United States Patent Application Publication US 2008/0318210 A1 - sequence listing, part 10

SEQ ID NO: 358348 - RNA, 19 nt, Human papillomavirus type 16
caaagaauaaagcauuaca

SEQ ID NO: 358349 - RNA, 21 nt, Human papillomavirus type 16
caacauagagaugcaguacag

SEQ ID NO: 358350 - RNA, 17 nt, Human papillomavirus type 16
caagcaauugaacugca

SEQ ID NO: 358351 - RNA, 22 nt, Human papillomavirus type 16
caauauaguaaugaaaagugga

SEQ ID NO: 358352 - RNA, 13 nt, Human papillomavirus type 16
caccuacauugca

SEQ ID NO: 358353 - RNA, 15 nt, Human papillomavirus type 16
cacugucuacuugcc

SEQ ID NO: 358354 - RNA, 12 nt, Human papillomavirus type 16
cagagaaauggg

SEQ ID NO: 358355 - RNA, 13 nt, Human papillomavirus type 16
cagagacagcaca

SEQ ID NO: 358356 - RNA, 20 nt, Human papillomavirus type 16
cagaggaggaggaugaaaua

SEQ ID NO: 358357 - RNA, 14 nt, Human papillomavirus type 16
cagcaaaugcaggu

SEQ ID NO: 358358 - RNA, 15 nt, Human papillomavirus type 16
cagcaacuaugguuu

SEQ ID NO: 358359 - RNA, 14 nt, Human papillomavirus type 16
cagcuggacaagca

SEQ ID NO: 358360 - RNA, 15 nt, Human papillomavirus type 16
caguggaagugcagu

SEQ ID NO: 358361 - RNA, 23 nt, Human papillomavirus type 16
caguuugauggagacauaugcaa

SEQ ID NO: 358362 - RNA, 21 nt, Human papillomavirus type 16
cauagagaugcaguacagguu

SEQ ID NO: 358363 - RNA, 15 nt, Human papillomavirus type 16
caucaguaacugugg

SEQ ID NO: 358364 - RNA, 17 nt, Human papillomavirus type 16
caucaguaacuguggua

SEQ ID NO: 358365 - RNA, 15 nt, Human papillomavirus type 16
ccagcuggacaagca

SEQ ID NO: 358366 - RNA, 13 nt, Human papillomavirus type 16
ccuauuaauacgu

SEQ ID NO: 358367 - RNA, 14 nt, Human papillomavirus type 16
ccugcagguaccaa

SEQ ID NO: 358368 - RNA, 14 nt, Human papillomavirus type 16
ccuguguagguguu

SEQ ID NO: 358369 - RNA, 22 nt, Human papillomavirus type 16
cgagaacgaaaaugacagugau

SEQ ID NO: 358370 - RNA, 18 nt, Human papillomavirus type 16
cuaauuguguugugguua

SEQ ID NO: 358371 - RNA, 14 nt, Human papillomavirus type 16
cuauuuauuacaag

SEQ ID NO: 358372 - RNA, 19 nt, Human papillomavirus type 16
cugcaacuaacguuagaaa

SEQ ID NO: 358373 - RNA, 22 nt, Human papillomavirus type 16
cugcaccaacaggauguauaaa

SEQ ID NO: 358374 - RNA, 15 nt, Human papillomavirus type 16
cugcauccacaacau

SEQ ID NO: 358375 - RNA, 17 nt, Human papillomavirus type 16
cugcauccacaacauua

SEQ ID NO: 358376 - RNA, 14 nt, Human papillomavirus type 16
cuggacacauauau

SEQ ID NO: 358377 - RNA, 14 nt, Human papillomavirus type 16
cuggcuguaucaaa

SEQ ID NO: 358378 - RNA, 13 nt, Human papillomavirus type 16
cuguaguggaaaa

SEQ ID NO: 358379 - RNA, 16 nt, Human papillomavirus type 16
cugugucuacauacac

SEQ ID NO: 358380 - RNA, 17 nt, Human papillomavirus type 16
cugugucuacauacaca

SEQ ID NO: 358381 - RNA, 23 nt, Human papillomavirus type 16
cuuuugucugugucuacauacac

SEQ ID NO: 358382 - RNA, 20 nt, Human papillomavirus type 16
gaaaugggauuuaaacauau

SEQ ID NO: 358383 - RNA, 19 nt, Human papillomavirus type 16
gaagcaucaguaacugugg

SEQ ID NO: 358384 - RNA, 13 nt, Human papillomavirus type 16
gaauaaagcauua

SEQ ID NO: 358385 - RNA, 16 nt, Human papillomavirus type 16
gacagugauacaggug

SEQ ID NO: 358386 - RNA, 15 nt, Human papillomavirus type 16
gaccuguuaaugggc

SEQ ID NO: 358387 - RNA, 13 nt, Human papillomavirus type 16
gacguuagccuug

SEQ ID NO: 358388 - RNA, 23 nt, Human papillomavirus type 16
gagaacgaaaaugacagugauac

SEQ ID NO: 358389 - RNA, 19 nt, Human papillomavirus type 16
gauggagacauaugcaaua

SEQ ID NO: 358390 - RNA, 14 nt, Human papillomavirus type 16
gauuaaaagcuaua

SEQ ID NO: 358391 - RNA, 23 nt, Human papillomavirus type 16
gcaacuaacguuagaaacaauau

SEQ ID NO: 358392 - RNA, 20 nt, Human papillomavirus type 16
gcaauacaaugcauuauaca

SEQ ID NO: 358393 - RNA, 14 nt, Human papillomavirus type 16
gcacaaaauguguu

SEQ ID NO: 358394 - RNA, 14 nt, Human papillomavirus type 16
gcacaggaagcaaa

SEQ ID NO: 358395 - RNA, 16 nt, Human papillomavirus type 16
gcagaaacagagacag

SEQ ID NO: 358396 - RNA, 15 nt, Human papillomavirus type 16
gcaucaguaacugug

SEQ ID NO: 358397 - RNA, 16 nt, Human papillomavirus type 16
gcauuacaagcaauug

SEQ ID NO: 358398 - RNA, 16 nt, Human papillomavirus type 16
gcuauaucagaugacg

SEQ ID NO: 358399 - RNA, 16 nt, Human papillomavirus type 16
gcuauauguauagaaa

SEQ ID NO: 358400 - RNA, 21 nt, Human papillomavirus type 16
gcuuguaaauauuaaguugua

SEQ ID NO: 358401 - RNA, 19 nt, Human papillomavirus type 16
gcuuguguaacuauugugu

SEQ ID NO: 358402 - RNA, 13 nt, Human papillomavirus type 16
gcuuugcuuugug

SEQ ID NO: 358403 - RNA, 16 nt, Human papillomavirus type 16
ggcagaaacagagaca

SEQ ID NO: 358404 - RNA, 21 nt, Human papillomavirus type 16
ggcauuaguggccauccuuua

SEQ ID NO: 358405 - RNA, 19 nt, Human papillomavirus type 16
gguauuuagaauacauuua

SEQ ID NO: 358406 - RNA, 14 nt, Human papillomavirus type 16
gguccagcuggaca

SEQ ID NO: 358407 - RNA, 15 nt, Human papillomavirus type 16
guaauuguuacauau

SEQ ID NO: 358408 - RNA, 16 nt, Human papillomavirus type 16
guccacuuagugauau

SEQ ID NO: 358409 - RNA, 21 nt, Human papillomavirus type 16
gugcaguuugauggagacaua

SEQ ID NO: 358410 - RNA, 18 nt, Human papillomavirus type 16
guuuauauaccauuauuu

SEQ ID NO: 358411 - RNA, 20 nt, Human papillomavirus type 16
guuugauggagacauaugca

SEQ ID NO: 358412 - RNA, 23 nt, Human papillomavirus type 16
guuugauggagacauaugcaaua

SEQ ID NO: 358413 - RNA, 15 nt, Human papillomavirus type 16
guuuguuguguauau

SEQ ID NO: 358414 - RNA, 19 nt, Human papillomavirus type 16
uaaacacguguguaugugu

SEQ ID NO: 358415 - RNA, 17 nt, Human papillomavirus type 16
uaaauaguucuauguca

SEQ ID NO: 358416 - RNA, 21 nt, Human papillomavirus type 16
uaaauauuaaguuguaugugu

SEQ ID NO: 358417 - RNA, 17 nt, Human papillomavirus type 16
uaacguuagaaacaaua

SEQ ID NO: 358418 - RNA, 12 nt, Human papillomavirus type 16
uaauacauacac

SEQ ID NO: 358419 - RNA, 14 nt, Human papillomavirus type 16
uaauacauacacau

SEQ ID NO: 358420 - RNA, 17 nt, Human papillomavirus type 16
uaauuguuguauaccau

SEQ ID NO: 358421 - RNA, 19 nt, Human papillomavirus type 16
uacacaucauuaauaauau

SEQ ID NO: 358422 - RNA, 20 nt, Human papillomavirus type 16
uacaccuacauugcaugaau

SEQ ID NO: 358423 - RNA, 18 nt, Human papillomavirus type 16
uacagaccuacgugacca

SEQ ID NO: 358424 - RNA, 22 nt, Human papillomavirus type 16
uaccauuauuuuuaauacauac

SEQ ID NO: 358425 - RNA, 14 nt, Human papillomavirus type 16
uagaaaaacaaagu

SEQ ID NO: 358426 - RNA, 13 nt, Human papillomavirus type 16
uagaaugugcuau

SEQ ID NO: 358427 - RNA, 18 nt, Human papillomavirus type 16
uagccuugaaguguauuu

SEQ ID NO: 358428 - RNA, 16 nt, Human papillomavirus type 16
uaguaaugaaaagugg

SEQ ID NO: 358429 - RNA, 18 nt, Human papillomavirus type 16
uaguccacuuagugauau

SEQ ID NO: 358430 - RNA, 19 nt, Human papillomavirus type 16
uauaauaaacacgugugua

SEQ ID NO: 358431 - RNA, 13 nt, Human papillomavirus type 16
uauacaaacugga

SEQ ID NO: 358432 - RNA, 19 nt, Human papillomavirus type 16
uauauaaacuauauuugcu

SEQ ID NO: 358433 - RNA, 18 nt, Human papillomavirus type 16
uauauguuuguaugugcu

SEQ ID NO: 358434 - RNA, 21 nt, Human papillomavirus type 16
uauauuugugaagaagcauca

SEQ ID NO: 358435 - RNA, 23 nt, Human papillomavirus type 16
uaucaaagaauaaagcauuacaa

SEQ ID NO: 358436 - RNA, 14 nt, Human papillomavirus type 16
uaucaggauuacaa

SEQ ID NO: 358437 - RNA, 18 nt, Human papillomavirus type 16
uaucaggauuacaauaca

SEQ ID NO: 358438 - RNA, 22 nt, Human papillomavirus type 16
uaucaugcaggaacauccagac

SEQ ID NO: 358439 - RNA, 19 nt, Human papillomavirus type 16
uaugucagcaacuaugguu

SEQ ID NO: 358440 - RNA, 12 nt, Human papillomavirus type 16
uaugugcuugua

SEQ ID NO: 358441 - RNA, 15 nt, Human papillomavirus type 16
uauguuagauuugca

SEQ ID NO: 358442 - RNA, 15 nt, Human papillomavirus type 16
ucuacauacacauca

SEQ ID NO: 358443 - RNA, 14 nt, Human papillomavirus type 16
ucuaugucagcaac

SEQ ID NO: 358444 - RNA, 22 nt, Human papillomavirus type 16
ucugugucuacauacacaucau

SEQ ID NO: 358445 - RNA, 13 nt, Human papillomavirus type 16
ugacagugauaca

SEQ ID NO: 358446 - RNA, 13 nt, Human papillomavirus type 16
ugauacaggugaa

SEQ ID NO: 358447 - RNA, 13 nt, Human papillomavirus type 16
ugaucucuacugu

SEQ ID NO: 358448 - RNA, 21 nt, Human papillomavirus type 16
ugcaccaacaggauguauaaa

SEQ ID NO: 358449 - RNA, 14 nt, Human papillomavirus type 16
ugcaggaacaucca

SEQ ID NO: 358450 - RNA, 17 nt, Human papillomavirus type 16
ugccaacacuggcugua

SEQ ID NO: 358451 - RNA, 21 nt, Human papillomavirus type 16
ugccaacacuggcuguaucaa

SEQ ID NO: 358452 - RNA, 19 nt, Human papillomavirus type 16
ugcgccuagaaugugcuau

SEQ ID NO: 358453 - RNA, 15 nt, Human papillomavirus type 16
ugcuauaucagauga

SEQ ID NO: 358454 - RNA, 20 nt, Human papillomavirus type 16
ugcuuuugugugucugccua

SEQ ID NO: 358455 - RNA, 21 nt, Human papillomavirus type 16
uggagauacaccuacauugca

SEQ ID NO: 358456 - RNA, 17 nt, Human papillomavirus type 16
ugggauuuaaacauauu

SEQ ID NO: 358457 - RNA, 13 nt, Human papillomavirus type 16
ugguuuuccugac

SEQ ID NO: 358458 - RNA, 17 nt, Human papillomavirus type 16
uguauaaaaaaacaugg

SEQ ID NO: 358459 - RNA, 18 nt, Human papillomavirus type 16
uguauaaaaaaacaugga

SEQ ID NO: 358460 - RNA, 14 nt, Human papillomavirus type 16
uguauuuaacugca

SEQ ID NO: 358461 - RNA, 19 nt, Human papillomavirus type 16
uguuuguuguguauauguu

SEQ ID NO: 358462 - RNA, 21 nt, Human papillomavirus type 16
uuaacacaggcagaaacagag

SEQ ID NO: 358463 - RNA, 13 nt, Human papillomavirus type 16
uuaauacauacac

SEQ ID NO: 358464 - RNA, 22 nt, Human papillomavirus type 16
uuagaaacaauauauaacucac

SEQ ID NO: 358465 - RNA, 20 nt, Human papillomavirus type 16
uuaucaugcaggaacaucca

SEQ ID NO: 358466 - RNA, 16 nt, Human papillomavirus type 16
uuaugcagcaaaugca

SEQ ID NO: 358467 - RNA, 16 nt, Human papillomavirus type 16
uuauuugaaagcgaag

SEQ ID NO: 358468 - RNA, 19 nt, Human papillomavirus type 16
uuauuuuuaauacauacac

SEQ ID NO: 358469 - RNA, 19 nt, Human papillomavirus type 16
uucguacuuuggaagaccu

SEQ ID NO: 358470 - RNA, 16 nt, Human papillomavirus type 16
uucuaaaacgaaagua

SEQ ID NO: 358471 - RNA, 13 nt, Human papillomavirus type 16
uucucagaaacca

SEQ ID NO: 358472 - RNA, 21 nt, Human papillomavirus type 16
uuguaaauauuaaguuguaug

SEQ ID NO: 358473 - RNA, 14 nt, Human papillomavirus type 16
uuguuguauaccau

SEQ ID NO: 358474 - RNA, 17 nt, Human papillomavirus type 16
uuguuuauauaccauua

SEQ ID NO: 358475 - RNA, 14 nt, Human papillomavirus type 16
uuuaauuacauaau

SEQ ID NO: 358476 - RNA, 13 nt, Human papillomavirus type 16
uuucauauauaau

SEQ ID NO: 358477 - RNA, 14 nt, Human papillomavirus type 16
uuugucugugucua

SEQ ID NO: 358478 - RNA, 18 nt, Human papillomavirus type 16
uuuuaaauaguucuaugu

SEQ ID NO: 358479 - RNA, 18 nt, Human papillomavirus type 16
uuuuauauauacuauauu

SEQ ID NO: 358480 - RNA, 18 nt, Human papillomavirus type 16
uuuuggcacaaaaugugu

SEQ ID NO: 358481 - RNA, 22 nt, Human parainfluenza virus 1 strain Washington/1964
aaaaacuuagggugaaugacaa

SEQ ID NO: 358482 - RNA, 19 nt, Human parainfluenza virus 1 strain Washington/1964
aaaacguagggacaaaguc

SEQ ID NO: 358483 - RNA, 10 nt, Human parainfluenza virus 1 strain Washington/1964
aaacaaaagu

SEQ ID NO: 358484 - RNA, 17 nt, Human parainfluenza virus 1 strain Washington/1964
aaacaggagucaacuca

SEQ ID NO: 358485 - RNA, 18 nt, Human parainfluenza virus 1 strain Washington/1964
aaacuuagggucaaagaa

SEQ ID NO: 358486 - RNA, 13 nt, Human parainfluenza virus 1 strain Washington/1964
aaagacaauccag

SEQ ID NO: 358487 - RNA, 20 nt, Human parainfluenza virus 1 strain Washington/1964
aaagcaagauugcucaacuu

SEQ ID NO: 358488 - RNA, 15 nt, Human parainfluenza virus 1 strain Washington/1964
aaagcaaucccucac

SEQ ID NO: 358489 - RNA, 23 nt, Human parainfluenza virus 1 strain Washington/1964
aaagccgacgauaacaacaaaga

SEQ ID NO: 358490 - RNA, 16 nt, Human parainfluenza virus 1 strain Washington/1964
aaagggaaaacaaaua

SEQ ID NO: 358491 - RNA, 17 nt, Human parainfluenza virus 1 strain Washington/1964
aacaaaaguauacacaa

SEQ ID NO: 358492 - RNA, 15 nt, Human parainfluenza virus 1 strain Washington/1964
aacaaauaguucaua

SEQ ID NO: 358493 - RNA, 14 nt, Human parainfluenza virus 1 strain Washington/1964
aacaacaaugcaua

SEQ ID NO: 358494 - RNA, 14 nt, Human parainfluenza virus 1 strain Washington/1964
aacaagaacaaaag

SEQ ID NO: 358495 - RNA, 16 nt, Human parainfluenza virus 1 strain Washington/1964
aacaagacacuuguau

SEQ ID NO: 358496 - RNA, 16 nt, Human parainfluenza virus 1 strain Washington/1964
aacaccaaaaccagcc

SEQ ID NO: 358497 - RNA, 21 nt, Human parainfluenza virus 1 strain Washington/1964
aacagcauccgauuauacaaa

SEQ ID NO: 358498 - RNA, 18 nt, Human parainfluenza virus 1 strain Washington/1964
aacaggagucaacucaga

SEQ ID NO: 358499 - RNA, 16 nt, Human parainfluenza virus 1 strain Washington/1964
aacaucaugacaguau

SEQ ID NO: 358500 - RNA, 21 nt, Human parainfluenza virus 1 strain Washington/1964
aaccaguuauucaaucugugg

SEQ ID NO: 358501 - RNA, 20 nt, Human parainfluenza virus 1 strain Washington/1964
aacccaaaagaaaacaagcc

SEQ ID NO: 358502 - RNA, 20 nt, Human parainfluenza virus 1 strain Washington/1964
aacccgaaaugacaauucca

SEQ ID NO: 358503 - RNA, 19 nt, Human parainfluenza virus 1 strain Washington/1964
aaccuauaaggcaacagca

SEQ ID NO: 358504 - RNA, 21 nt, Human parainfluenza virus 1 strain Washington/1964
aaccuauaaggcaacagcauc

SEQ ID NO: 358505 - RNA, 20 nt, Human parainfluenza virus 1 strain Washington/1964
aacucaaaaagcucccucaa

SEQ ID NO: 358506 - RNA, 16 nt, Human parainfluenza virus 1 strain Washington/1964
aacucagaauuccuca

SEQ ID NO: 358507 - RNA, 23 nt, Human parainfluenza virus 1 strain Washington/1964
aacuuaggguuaaagacaaucca

SEQ ID NO: 358508 - RNA, 14 nt, Human parainfluenza virus 1 strain Washington/1964
aacuucaccaauca

SEQ ID NO: 358509 - RNA, 16 nt, Human parainfluenza virus 1 strain Washington/1964
aagaaaacaagccauc

SEQ ID NO: 358510 - RNA, 14 nt, Human parainfluenza virus 1 strain Washington/1964
aagaacaaccacaa

SEQ ID NO: 358511 - RNA, 14 nt, Human parainfluenza virus 1 strain Washington/1964
aagaaucacucuca

SEQ ID NO: 358512 - RNA, 16 nt, Human parainfluenza virus 1 strain Washington/1964
aagagucucaaaaagc

SEQ ID NO: 358513 - RNA, 14 nt, Human parainfluenza virus 1 strain Washington/1964
aagauagagacaaa

SEQ ID NO: 358514 - RNA, 17 nt, Human parainfluenza virus 1 strain Washington/1964
aagauugcucaacuuca

SEQ ID NO: 358515 - RNA, 15 nt, Human parainfluenza virus 1 strain Washington/1964
aagcaagauugcuca

SEQ ID NO: 358516 - RNA, 21 nt, Human parainfluenza virus 1 strain Washington/1964
aaggcaacagcauccgauuau

SEQ ID NO: 358517 - RNA, 16 nt, Human parainfluenza virus 1 strain Washington/1964
aaucaacccuaugauu

SEQ ID NO: 358518 - RNA, 19 nt, Human parainfluenza virus 1 strain Washington/1964
aaucagguguacaacaagu

SEQ ID NO: 358519 - RNA, 21 nt, Human parainfluenza virus 1 strain Washington/1964
aaucagguguacaacaaguaa

SEQ ID NO: 358520 - RNA, 16 nt, Human parainfluenza virus 1 strain Washington/1964
aauuggcauagccaag

SEQ ID NO: 358521 - RNA, 14 nt, Human parainfluenza virus 1 strain Washington/1964
acaaaaaagcaauc

SEQ ID NO: 358522 - RNA, 22 nt, Human parainfluenza virus 1 strain Washington/1964
acaaaaaugcaaaaaucagaga

SEQ ID NO: 358523 - RNA, 15 nt, Human parainfluenza virus 1 strain Washington/1964
acaaacaucaugaca

SEQ ID NO: 358524 - RNA, 19 nt, Human parainfluenza virus 1 strain Washington/1964
acaaacaucaugacaguau

SEQ ID NO: 358525 - RNA, 16 nt, Human parainfluenza virus 1 strain Washington/1964
acaaagacagagcaau

SEQ ID NO: 358526 - RNA, 12 nt, Human parainfluenza virus 1 strain Washington/1964
acaacaaugcau

SEQ ID NO: 358527 - RNA, 19 nt, Human parainfluenza virus 1 strain Washington/1964
acaacaaugcauacaguau

SEQ ID NO: 358528 - RNA, 18 nt, Human parainfluenza virus 1 strain Washington/1964
acaacaccaaaaccagcc

SEQ ID NO: 358529 - RNA, 18 nt, Human parainfluenza virus 1 strain Washington/1964
acaacccgaaaugacaau

SEQ ID NO: 358530 - RNA, 15 nt, Human parainfluenza virus 1 strain Washington/1964
acaagaaucacucuc

SEQ ID NO: 358531 - RNA, 16 nt, Human parainfluenza virus 1 strain Washington/1964
acaagaaucacucuca

SEQ ID NO: 358532 - RNA, 18 nt, Human parainfluenza virus 1 strain Washington/1964
acaagaaucacucucaga

SEQ ID NO: 358533 - RNA, 23 nt, Human parainfluenza virus 1 strain Washington/1964
acaagaaucacucucagauguca

SEQ ID NO: 358534 - RNA, 23 nt, Human parainfluenza virus 1 strain Washington/1964
acaagaucacaaacaagaacaaa

SEQ ID NO: 358535 - RNA, 14 nt, Human parainfluenza virus 1 strain Washington/1964
acaagcccacagaa

SEQ ID NO: 358536 - RNA, 18 nt, Human parainfluenza virus 1 strain Washington/1964
acaauagaagccagauca

SEQ ID NO: 358537 - RNA, 13 nt, Human parainfluenza virus 1 strain Washington/1964
acaaucaaaucua

SEQ ID NO: 358538 - RNA, 16 nt, Human parainfluenza virus 1 strain Washington/1964
acaaucaaaucuaucc

SEQ ID NO: 358539 - RNA, 18 nt, Human parainfluenza virus 1 strain Washington/1964
acaauccagucaaccuau

SEQ ID NO: 358540 - RNA, 15 nt, Human parainfluenza virus 1 strain Washington/1964
acacaaaaaccaaaa

SEQ ID NO: 358541 - RNA, 15 nt, Human parainfluenza virus 1 strain Washington/1964
acacaaaaaguccac

SEQ ID NO: 358542 - RNA, 14 nt, Human parainfluenza virus 1 strain Washington/1964
acacacacauuaau

SEQ ID NO: 358543 - RNA, 14 nt, Human parainfluenza virus 1 strain Washington/1964
acacgaaaccaacc

SEQ ID NO: 358544 - RNA, 18 nt, Human parainfluenza virus 1 strain Washington/1964
acacgaaaccaaccuuca

SEQ ID NO: 358545 - RNA, 15 nt, Human parainfluenza virus 1 strain Washington/1964
acacuuguaugaaga

SEQ ID NO: 358546 - RNA, 14 nt, Human parainfluenza virus 1 strain Washington/1964
acagaucagcucaa

SEQ ID NO: 358547 - RNA, 18 nt, Human parainfluenza virus 1 strain Washington/1964
acagcauccgauuauaca

SEQ ID NO: 358548 - RNA, 16 nt, Human parainfluenza virus 1 strain Washington/1964
acaguauccuccauga

SEQ ID NO: 358549 - RNA, 19 nt, Human parainfluenza virus 1 strain Washington/1964
acaguauuguccuucauua

SEQ ID NO: 358550 - RNA, 17 nt, Human parainfluenza virus 1 strain Washington/1964
acauuaauacaccagca

SEQ ID NO: 358551 - RNA, 20 nt, Human parainfluenza virus 1 strain Washington/1964
acauuguagcauacauacaa

SEQ ID NO: 358552 - RNA, 19 nt, Human parainfluenza virus 1 strain Washington/1964
accagcaaucaaaaucaau

SEQ ID NO: 358553 - RNA, 20 nt, Human parainfluenza virus 1 strain Washington/1964
accagcaaucaaaaucaaua

SEQ ID NO: 358554 - RNA, 14 nt, Human parainfluenza virus 1 strain Washington/1964
accaguuauucaau

SEQ ID NO: 358555 - RNA, 21 nt, Human parainfluenza virus 1 strain Washington/1964
accuaauuauaaaacaagaca

SEQ ID NO: 358556 - RNA, 19 nt, Human parainfluenza virus 1 strain Washington/1964
accucucccucucaaaaca

SEQ ID NO: 358557 - RNA, 20 nt, Human parainfluenza virus 1 strain Washington/1964
acgauaacaacaaagacaga

SEQ ID NO: 358558 - RNA, 14 nt, Human parainfluenza virus 1 strain Washington/1964
acgguaaacacaca

SEQ ID NO: 358559 - RNA, 20 nt, Human parainfluenza virus 1 strain Washington/1964
acuccaaagaacaaccacaa

SEQ ID NO: 358560 - RNA, 22 nt, Human parainfluenza virus 1 strain Washington/1964
acugauugcaacaacaaugcau

SEQ ID NO: 358561 - RNA, 16 nt, Human parainfluenza virus 1 strain Washington/1964
acuuagggucaaagaa

SEQ ID NO: 358562 - RNA, 19 nt, Human parainfluenza virus 1 strain Washington/1964
acuuguaugaagacaaaca

SEQ ID NO: 358563 - RNA, 21 nt, Human parainfluenza virus 1 strain Washington/1964
agaaaaaaggccagagacaaa

SEQ ID NO: 358564 - RNA, 22 nt, Human parainfluenza virus 1 strain Washington/1964
agaaaaaaggccagagacaaaa

SEQ ID NO: 358565 - RNA, 15 nt, Human parainfluenza virus 1 strain Washington/1964
agaaaaacaaaagua

SEQ ID NO: 358566 - RNA, 22 nt, Human parainfluenza virus 1 strain Washington/1964
agaaaaacuuagggucaaagaa

SEQ ID NO: 358567 - RNA, 22 nt, Human parainfluenza virus 1 strain Washington/1964
agaaccucucccucucaaaaca

SEQ ID NO: 358568 - RNA, 19 nt, Human parainfluenza virus 1 strain Washington/1964
agaagccagaucaaaagua

SEQ ID NO: 358569 - RNA, 22 nt, Human parainfluenza virus 1 strain Washington/1964
agaaucaaccaguuauucaauc

SEQ ID NO: 358570 - RNA, 14 nt, Human parainfluenza virus 1 strain Washington/1964
agaaucacucucag

SEQ ID NO: 358571 - RNA, 22 nt, Human parainfluenza virus 1 strain Washington/1964
agacaaacaucaugacaguauc

SEQ ID NO: 358572 - RNA, 17 nt, Human parainfluenza virus 1 strain Washington/1964
agacagagcaaucucaa

SEQ ID NO: 358573 - RNA, 20 nt, Human parainfluenza virus 1 strain Washington/1964
agagacaaaaacggaggcaa

SEQ ID NO: 358574 - RNA, 13 nt, Human parainfluenza virus 1 strain Washington/1964
agagccaacucaa

SEQ ID NO: 358575 - RNA, 14 nt, Human parainfluenza virus 1 strain Washington/1964
agaggaaaccagca

SEQ ID NO: 358576 - RNA, 21 nt, Human parainfluenza virus 1 strain Washington/1964
agaggcaccacgaaaacaaga

SEQ ID NO: 358577 - RNA, 14 nt, Human parainfluenza virus 1 strain Washington/1964
agauagagacaaaa

SEQ ID NO: 358578 - RNA, 18 nt, Human parainfluenza virus 1 strain Washington/1964
agauucucacacgaagaa

SEQ ID NO: 358579 - RNA, 14 nt, Human parainfluenza virus 1 strain Washington/1964
gcaagauugcucaa

SEQ ID NO: 358580 - RNA, 15 nt, Human parainfluenza virus 1 strain Washington/1964
gcaagauugcucaac

SEQ ID NO: 358581 - RNA, 15 nt, Human parainfluenza virus 1 strain Washington/1964
gcaaucaaaaucaau

SEQ ID NO: 358582 - RNA, 12 nt, Human parainfluenza virus 1 strain Washington/1964
gcaaucccucac

SEQ ID NO: 358583 - RNA, 16 nt, Human parainfluenza virus 1 strain Washington/1964
gcaccacgaaaacaag

SEQ ID NO: 358584 - RNA, 14 nt, Human parainfluenza virus 1 strain Washington/1964
gcaggaaggacaca

SEQ ID NO: 358585 - RNA, 16 nt, Human parainfluenza virus 1 strain Washington/1964
gcauacauacaacaau

SEQ ID NO: 358586 - RNA, 23 nt, Human parainfluenza virus 1 strain Washington/1964
gccacuccaaagaacaaccacaa

SEQ ID NO: 358587 - RNA, 13 nt, Human parainfluenza virus 1 strain Washington/1964
gccagaucaaaag

SEQ ID NO: 358588 - RNA, 18 nt, Human parainfluenza virus 1 strain Washington/1964
gccccggcagaucaaaau

SEQ ID NO: 358589 - RNA, 13 nt, Human parainfluenza virus 1 strain Washington/1964
gcuagauaucaau

SEQ ID NO: 358590 - RNA, 21 nt, Human parainfluenza virus 1 strain Washington/1964
gcucaaccagacaccaccagc

SEQ ID NO: 358591 - RNA, 17 nt, Human parainfluenza virus 1 strain Washington/1964
ggaagaaaaacaaaagu

SEQ ID NO: 358592 - RNA, 15 nt, Human parainfluenza virus 1 strain Washington/1964
ggaaggacacacauc

SEQ ID NO: 358593 - RNA, 23 nt, Human parainfluenza virus 1 strain Washington/1964
ggacaagaucacaaacaagaaca

SEQ ID NO: 358594 - RNA, 20 nt, Human parainfluenza virus 1 strain Washington/1964
ggauaccucagcauccaaaa

SEQ ID NO: 358595 - RNA, 21 nt, Human parainfluenza virus 1 strain Washington/1964
ggauucuuugaaacaccuaag

SEQ ID NO: 358596 - RNA, 15 nt, Human parainfluenza virus 1 strain Washington/1964
ggccagagacaaaaa

SEQ ID NO: 358597 - RNA, 20 nt, Human parainfluenza virus 1 strain Washington/1964
ggcuacugauugcaacaaca

SEQ ID NO: 358598 - RNA, 21 nt, Human parainfluenza virus 1 strain Washington/1964
gguaucaucgacaacccaaaa

SEQ ID NO: 358599 - RNA, 17 nt, Human parainfluenza virus 1 strain Washington/1964
guaaacacacacauuaa

SEQ ID NO: 358600 - RNA, 19 nt, Human parainfluenza virus 1 strain Washington/1964
guaucaucgacaacccaaa

SEQ ID NO: 358601 - RNA, 18 nt, Human parainfluenza virus 1 strain Washington/1964
uaaaaacauaguaagaaa

SEQ ID NO: 358602 - RNA, 21 nt, Human parainfluenza virus 1 strain Washington/1964
uaaacaccaagauagagacaa

SEQ ID NO: 358603 - RNA, 22 nt, Human parainfluenza virus 1 strain Washington/1964
uaaacaccaagauagagacaaa

SEQ ID NO: 358604 - RNA, 13 nt, Human parainfluenza virus 1 strain Washington/1964
uaaagacaaucca

SEQ ID NO: 358605 - RNA, 15 nt, Human parainfluenza virus 1 strain Washington/1964
uaacaagauaagaaa

SEQ ID NO: 358606 - RNA, 18 nt, Human parainfluenza virus 1 strain Washington/1964
uaagcaaggaccucuauc

SEQ ID NO: 358607 - RNA, 14 nt, Human parainfluenza virus 1 strain Washington/1964
uaaggcaacagcau

SEQ ID NO: 358608 - RNA, 15 nt, Human parainfluenza virus 1 strain Washington/1964
uaaggcaacagcauc

SEQ ID NO: 358609 - RNA, 15 nt, Human parainfluenza virus 1 strain Washington/1964
uaaugaaaucacaac

SEQ ID NO: 358610 - RNA, 15 nt, Human parainfluenza virus 1 strain Washington/1964
uacaacaaucaaauc

SEQ ID NO: 358611 - RNA, 20 nt, Human parainfluenza virus 1 strain Washington/1964
uacacgaaaccaaccuucac

SEQ ID NO: 358612 - RNA, 15 nt, Human parainfluenza virus 1 strain Washington/1964
uacauacaacaauca

SEQ ID NO: 358613 - RNA, 21 nt, Human parainfluenza virus 1 strain Washington/1964
uaccaacaucaaggaagacaa

SEQ ID NO: 358614 - RNA, 16 nt, Human parainfluenza virus 1 strain Washington/1964
auuauaaaacaagaca

SEQ ID NO: 358615 - RNA, 16 nt, Human parainfluenza virus 1 strain Washington/1964
auucacagaucagcuc

SEQ ID NO: 358616 - RNA, 20 nt, Human parainfluenza virus 1 strain Washington/1964
auucacagaucagcucaacc

SEQ ID NO: 358617 - RNA, 16 nt, Human parainfluenza virus 1 strain Washington/1964
auugcaacaacaaugc

SEQ ID NO: 358618 - RNA, 15 nt, Human parainfluenza virus 1 strain Washington/1964
auuuaaacaaaaaca

SEQ ID NO: 358619 - RNA, 15 nt, Human parainfluenza virus 1 strain Washington/1964
auuucaaccagcaau

SEQ ID NO: 358620 - RNA, 12 nt, Human parainfluenza virus 1 strain Washington/1964
caaaaaagcaau

SEQ ID NO: 358621 - RNA, 19 nt, Human parainfluenza virus 1 strain Washington/1964
caaaaaagggaagaaaaac

SEQ ID NO: 358622 - RNA, 17 nt, Human parainfluenza virus 1 strain Washington/1964
caaaaacaagaacaaaa

SEQ ID NO: 358623 - RNA, 20 nt, Human parainfluenza virus 1 strain Washington/1964
caaaaacggaggcaagaaca

SEQ ID NO: 358624 - RNA, 23 nt, Human parainfluenza virus 1 strain Washington/1964
caaaaacggaggcaagaacaaaa

SEQ ID NO: 358625 - RNA, 19 nt, Human parainfluenza virus 1 strain Washington/1964
caaaacaauuaagaaaaac

SEQ ID NO: 358626 - RNA, 16 nt, Human parainfluenza virus 1 strain Washington/1964
caaaacucuccuuccc

SEQ ID NO: 358627 - RNA, 20 nt, Human parainfluenza virus 1 strain Washington/1964
caaaagaaaacaagccauca

SEQ ID NO: 358628 - RNA, 21 nt, Human parainfluenza virus 1 strain Washington/1964
caaaagaaaacaagccaucau

SEQ ID NO: 358629 - RNA, 15 nt, Human parainfluenza virus 1 strain Washington/1964
caaaaucaauaucca

SEQ ID NO: 358630 - RNA, 14 nt, Human parainfluenza virus 1 strain Washington/1964
caaacaagaacaaa

SEQ ID NO: 358631 - RNA, 14 nt, Human parainfluenza virus 1 strain Washington/1964
caaacaucaugaca

SEQ ID NO: 358632 - RNA, 17 nt, Human parainfluenza virus 1 strain Washington/1964
caaagaacaaccacaac

SEQ ID NO: 358633 - RNA, 20 nt, Human parainfluenza virus 1 strain Washington/1964
caaagaacaaccacaaccac

SEQ ID NO: 358634 - RNA, 11 nt, Human parainfluenza virus 1 strain Washington/1964
caaagacagag

SEQ ID NO: 358635 - RNA, 14 nt, Human parainfluenza virus 1 strain Washington/1964
caaauaagaaaaac

SEQ ID NO: 358636 - RNA, 21 nt, Human parainfluenza virus 1 strain Washington/1964
caaaugaagaggaaaccagca

SEQ ID NO: 358637 - RNA, 12 nt, Human parainfluenza virus 1 strain Washington/1964
caacaaagacag

SEQ ID NO: 358638 - RNA, 13 nt, Human parainfluenza virus 1 strain Washington/1964
caacaaagacaga

SEQ ID NO: 358639 - RNA, 22 nt, Human parainfluenza virus 1 strain Washington/1964
caacccaaaagaaaacaagcca

SEQ ID NO: 358640 - RNA, 15 nt, Human parainfluenza virus 1 strain Washington/1964
caaccuauaaggcaa

SEQ ID NO: 358641 - RNA, 17 nt, Human parainfluenza virus 1 strain Washington/1964
caagagucucaaaaagc

SEQ ID NO: 358642 - RNA, 14 nt, Human parainfluenza virus 1 strain Washington/1964
caagauugcucaac

SEQ ID NO: 358643 - RNA, 14 nt, Human parainfluenza virus 1 strain Washington/1964
caauagaagccaga

SEQ ID NO: 358644 - RNA, 18 nt, Human parainfluenza virus 1 strain Washington/1964
caauagaagccagaucaa

SEQ ID NO: 358645 - RNA, 15 nt, Human parainfluenza virus 1 strain Washington/1964
caaucccucacauca

SEQ ID NO: 358646 - RNA, 22 nt, Human parainfluenza virus 1 strain Washington/1964
caaugcaaacaacaacacaaaa

SEQ ID NO: 358647 - RNA, 15 nt, Human parainfluenza virus 1 strain Washington/1964
caaugcauacaguau

SEQ ID NO: 358648 - RNA, 15 nt, Human parainfluenza virus 1 strain Washington/1964
caauuucaaccagca

SEQ ID NO: 358649 - RNA, 14 nt, Human parainfluenza virus 1 strain Washington/1964
cacaaacaagaaca

SEQ ID NO: 358650 - RNA, 12 nt, Human parainfluenza virus 1 strain Washington/1964
cacacacauuaa

SEQ ID NO: 358651 - RNA, 23 nt, Human parainfluenza virus 1 strain Washington/1964
cacagaaucaaccaguuauucaa

SEQ ID NO: 358652 - RNA, 15 nt, Human parainfluenza virus 1 strain Washington/1964
cacagaucagcucaa

SEQ ID NO: 358653 - RNA, 18 nt, Human parainfluenza virus 1 strain Washington/1964
cacgaaaccaaccuucac

SEQ ID NO: 358654 - RNA, 23 nt, Human parainfluenza virus 1 strain Washington/1964
cacuuguaugaagacaaacauca

SEQ ID NO: 358655 - RNA, 20 nt, Human parainfluenza virus 1 strain Washington/1964
cagaaauuggagaagacaga

SEQ ID NO: 358656 - RNA, 19 nt, Human parainfluenza virus 1 strain Washington/1964
cagaauuccucagacaucu

SEQ ID NO: 358657 - RNA, 13 nt, Human parainfluenza virus 1 strain Washington/1964
cagagagaaaaac

SEQ ID NO: 358658 - RNA, 19 nt, Human parainfluenza virus 1 strain Washington/1964
cagagccaacucaaaaagc

SEQ ID NO: 358659 - RNA, 17 nt, Human parainfluenza virus 1 strain Washington/1964
cagcauacacgaaacca

SEQ ID NO: 358660 - RNA, 18 nt, Human parainfluenza virus 1 strain Washington/1964
cagcauacacgaaaccaa

SEQ ID NO: 358661 - RNA, 12 nt, Human parainfluenza virus 1 strain Washington/1964
cagccacuccaa

SEQ ID NO: 358662 - RNA, 19 nt, Human parainfluenza virus 1 strain Washington/1964
cagguuccccagauucuca

SEQ ID NO: 358663 - RNA, 18 nt, Human parainfluenza virus 1 strain Washington/1964
caguauaauaaauaucac

SEQ ID NO: 358664 - RNA, 22 nt, Human parainfluenza virus 1 strain Washington/1964
caguggauaccucagcauccaa

SEQ ID NO: 358665 - RNA, 14 nt, Human parainfluenza virus 1 strain Washington/1964
cauacaacaaucaa

SEQ ID NO: 358666 - RNA, 14 nt, Human parainfluenza virus 1 strain Washington/1964
cauaucugaucuca

SEQ ID NO: 358667 - RNA, 16 nt, Human parainfluenza virus 1 strain Washington/1964
caugaauagacauuua

SEQ ID NO: 358668 - RNA, 14 nt, Human parainfluenza virus 1 strain Washington/1964
caugacaguauccu

SEQ ID NO: 358669 - RNA, 19 nt, Human parainfluenza virus 1 strain Washington/1964
ccaaaagaaaacaagccau

SEQ ID NO: 358670 - RNA, 13 nt, Human parainfluenza virus 1 strain Washington/1964
ccaaccuucacag

SEQ ID NO: 358671 - RNA, 22 nt, Human parainfluenza virus 1 strain Washington/1964
ccacagaaauuggagaagacag

SEQ ID NO: 358672 - RNA, 23 nt, Human parainfluenza virus 1 strain Washington/1964
ccacagaaauuggagaagacaga

SEQ ID NO: 358673 - RNA, 18 nt, Human parainfluenza virus 1 strain Washington/1964
ccaccagcauacacgaaa

SEQ ID NO: 358674 - RNA, 14 nt, Human parainfluenza virus 1 strain Washington/1964
ccacgaaaacaaga

SEQ ID NO: 358675 - RNA, 21 nt, Human parainfluenza virus 1 strain Washington/1964
ccacgaaaacaagaaucacuc

SEQ ID NO: 358676 - RNA, 14 nt, Human parainfluenza virus 1 strain Washington/1964
ccagacaccaccag

SEQ ID NO: 358677 - RNA, 19 nt, Human parainfluenza virus 1 strain Washington/1964
ccagagccaacucaaaaag

SEQ ID NO: 358678 - RNA, 19 nt, Human parainfluenza virus 1 strain Washington/1964
ccaucaagcguaaccaaac

SEQ ID NO: 358679 - RNA, 15 nt, Human parainfluenza virus 1 strain Washington/1964
cccaagaucauagau

SEQ ID NO: 358680 - RNA, 13 nt, Human parainfluenza virus 1 strain Washington/1964
cccgaaaugacaa

SEQ ID NO: 358681 - RNA, 10 nt, Human parainfluenza virus 1 strain Washington/1964
cccucaaaac

SEQ ID NO: 358682 - RNA, 12 nt, Human parainfluenza virus 1 strain Washington/1964
cccucucaaaac

SEQ ID NO: 358683 - RNA, 13 nt, Human parainfluenza virus 1 strain Washington/1964
ccggcagaucaaa

SEQ ID NO: 358684 - RNA, 13 nt, Human parainfluenza virus 1 strain Washington/1964
ccuauaaggcaac

SEQ ID NO: 358685 - RNA, 19 nt, Human parainfluenza virus 1 strain Washington/1964
ccucaaaacaauuaagaaa

SEQ ID NO: 358686 - RNA, 16 nt, Human parainfluenza virus 1 strain Washington/1964
ccucgaagaccacaac

SEQ ID NO: 358687 - RNA, 17 nt, Human parainfluenza virus 1 strain Washington/1964
ccugccuauuugucaaa

SEQ ID NO: 358688 - RNA, 22 nt, Human parainfluenza virus 1 strain Washington/1964
cgaaaacaagaaucacucucag

SEQ ID NO: 358689 - RNA, 23 nt, Human parainfluenza virus 1 strain Washington/1964
cgaaaacaagaaucacucucaga

SEQ ID NO: 358690 - RNA, 18 nt, Human parainfluenza virus 1 strain Washington/1964
cgacgauaacaacaaaga

SEQ ID NO: 358691 - RNA, 18 nt, Human parainfluenza virus 1 strain Washington/1964
cuacugauugcaacaaca

SEQ ID NO: 358692 - RNA, 15 nt, Human parainfluenza virus 1 strain Washington/1964
uguagcauacauaca

SEQ ID NO: 358693 - RNA, 16 nt, Human parainfluenza virus 1 strain Washington/1964
uguagcauacauacaa

SEQ ID NO: 358694 - RNA, 22 nt, Human parainfluenza virus 1 strain Washington/1964
uguagcauacauacaacaauca

SEQ ID NO: 358695 - RNA, 19 nt, Human parainfluenza virus 1 strain Washington/1964
uguaugaagacaaacauca

SEQ ID NO: 358696 - RNA, 22 nt, Human parainfluenza virus 1 strain Washington/1964
uguaugaagacaaacaucauga

SEQ ID NO: 358697 - RNA, 13 nt, Human parainfluenza virus 1 strain Washington/1964
uuauacaaacgau

SEQ ID NO: 358698 - RNA, 17 nt, Human parainfluenza virus 1 strain Washington/1964
uuauauccagaauguca

SEQ ID NO: 358699 - RNA, 21 nt, Human parainfluenza virus 1 strain Washington/1964
uuaucaugauccuaugcauug

SEQ ID NO: 358700 - RNA, 21 nt, Human parainfluenza virus 1 strain Washington/1964
uucacaguggauaccucagca

SEQ ID NO: 358701 - RNA, 20 nt, Human parainfluenza virus 1 strain Washington/1964
uucgauacaaucaguucaaa

SEQ ID NO: 358702 - RNA, 18 nt, Human parainfluenza virus 1 strain Washington/1964
uugcaacaacaaugcaua

SEQ ID NO: 358703 - RNA, 17 nt, Human parainfluenza virus 1 strain Washington/1964
uuggacaauagaagcca

SEQ ID NO: 358704 - RNA, 15 nt, Human parainfluenza virus 1 strain Washington/1964
uuggagaagacagaa

SEQ ID NO: 358705 - RNA, 17 nt, Human parainfluenza virus 1 strain Washington/1964
uuggagaagacagaagc

SEQ ID NO: 358706 - RNA, 20 nt, Human parainfluenza virus 1 strain Washington/1964
uuguagcauacauacaacaa

SEQ ID NO: 358707 - RNA, 16 nt, Human parainfluenza virus 1 strain Washington/1964
uuguaugaagacaaac

SEQ ID NO: 358708 - RNA, 13 nt, Human parainfluenza virus 1 strain Washington/1964
aaaaacaagaaca

SEQ ID NO: 358709 - RNA, 12 nt, Human parainfluenza virus 1 strain Washington/1964
aaaacaacaaca

SEQ ID NO: 358710 - RNA, 18 nt, Human parainfluenza virus 1 strain Washington/1964
aaaacaacaacacaaaga

SEQ ID NO: 358711 - RNA, 14 nt, Human parainfluenza virus 1 strain Washington/1964
aaaacaagaacaaa

SEQ ID NO: 358712 - RNA, 23 nt, Human parainfluenza virus 1 strain Washington/1964
aaaacagguccugacaaaaaagc

SEQ ID NO: 358713 - RNA, 16 nt, Human parainfluenza virus 1 strain Washington/1964
aaaagcaaucccucac

SEQ ID NO: 358714 - RNA, 14 nt, Human parainfluenza virus 1 strain Washington/1964
aaaagcucccucaa

SEQ ID NO: 358715 - RNA, 22 nt, Human parainfluenza virus 1 strain Washington/1964
aaaaguauacacaaaaaccaaa

SEQ ID NO: 358716 - RNA, 23 nt, Human parainfluenza virus 1 strain Washington/1964
aaaaucagaucaaguacauugua

SEQ ID NO: 358717 - RNA, 21 nt, Human parainfluenza virus 1 strain Washington/1964
aaacaagccaucaugcaaagc

SEQ ID NO: 358718 - RNA, 16 nt, Human parainfluenza virus 1 strain Washington/1964
aaacaggagucaacuc

SEQ ID NO: 358719 - RNA, 17 nt, Human parainfluenza virus 1 strain Washington/1964
aaacggaggcaagaaca

SEQ ID NO: 358720 - RNA, 19 nt, Human parainfluenza virus 1 strain Washington/1964
aaacggaggcaagaacaaa

SEQ ID NO: 358721 - RNA, 20 nt, Human parainfluenza virus 1 strain Washington/1964
aaacuuaggguuaaagacaa

SEQ ID NO: 358722 - RNA, 22 nt, Human parainfluenza virus 1 strain Washington/1964
aaagaacaaccacaaccacaga

SEQ ID NO: 358723 - RNA, 12 nt, Human parainfluenza virus 1 strain Washington/1964
aaagacaaucca

SEQ ID NO: 358724 - RNA, 19 nt, Human parainfluenza virus 1 strain Washington/1964
aaagacagagcaaucucaa

SEQ ID NO: 358725 - RNA, 16 nt, Human parainfluenza virus 1 strain Washington/1964
aaagcaagauugcuca

SEQ ID NO: 358726 - RNA, 19 nt, Human parainfluenza virus 1 strain Washington/1964
aaagccgacgauaacaaca

SEQ ID NO: 358727 - RNA, 13 nt, Human parainfluenza virus 1 strain Washington/1964
aaagcucccucaa

SEQ ID NO: 358728 - RNA, 14 nt, Human parainfluenza virus 1 strain Washington/1964
aaaggaacaaaaga

SEQ ID NO: 358729 - RNA, 19 nt, Human parainfluenza virus 1 strain Washington/1964
aaaggccagagacaaaaac

SEQ ID NO: 358730 - RNA, 22 nt, Human parainfluenza virus 1 strain Washington/1964
aaaguauacacaaaaaccaaaa

SEQ ID NO: 358731 - RNA, 16 nt, Human parainfluenza virus 1 strain Washington/1964
aacaaaaacaagaaca

SEQ ID NO: 358732 - RNA, 15 nt, Human parainfluenza virus 1 strain Washington/1964
aacaaagacagagca

SEQ ID NO: 358733 - RNA, 15 nt, Human parainfluenza virus 1 strain Washington/1964
aacaacaacacaaag

SEQ ID NO: 358734 - RNA, 12 nt, Human parainfluenza virus 1 strain Washington/1964
aacaacaaugca

SEQ ID NO: 358735 - RNA, 19 nt, Human parainfluenza virus 1 strain Washington/1964
aacaacaaugcauacagua

SEQ ID NO: 358736 - RNA, 20 nt, Human parainfluenza virus 1 strain Washington/1964
aacaacaaugcauacaguau

SEQ ID NO: 358737 - RNA, 18 nt, Human parainfluenza virus 1 strain Washington/1964
aacaagccaucaugcaaa

SEQ ID NO: 358738 - RNA, 17 nt, Human parainfluenza virus 1 strain Washington/1964
agaccacaacaccaaaa

SEQ ID NO: 358739 - RNA, 20 nt, Human parainfluenza virus 1 strain Washington/1964
agaccacaacaccaaaacca

SEQ ID NO: 358740 - RNA, 21 nt, Human parainfluenza virus 1 strain Washington/1964
agagacaaaaaugcaaaaauc

SEQ ID NO: 358741 - RNA, 13 nt, Human parainfluenza virus 1 strain Washington/1964
agagcaaucucaa

SEQ ID NO: 358742 - RNA, 18 nt, Human parainfluenza virus 1 strain Washington/1964
agaucacaaacaagaaca

SEQ ID NO: 358743 - RNA, 22 nt, Human parainfluenza virus 1 strain Washington/1964
agcaaucccucacaucagaaua

SEQ ID NO: 358744 - RNA, 13 nt, Human parainfluenza virus 1 strain Washington/1964
agcucccucaaaa

SEQ ID NO: 358745 - RNA, 13 nt, Human parainfluenza virus 1 strain Washington/1964
aggagaggcacca

SEQ ID NO: 358746 - RNA, 22 nt, Human parainfluenza virus 1 strain Washington/1964
aggagauccuccaaaacaugga

SEQ ID NO: 358747 - RNA, 17 nt, Human parainfluenza virus 1 strain Washington/1964
aggguuaaagacaaucc

SEQ ID NO: 358748 - RNA, 22 nt, Human parainfluenza virus 1 strain Washington/1964
aguacauuguagcauacauaca

SEQ ID NO: 358749 - RNA, 17 nt, Human parainfluenza virus 1 strain Washington/1964
aguauaauaaauaucac

SEQ ID NO: 358750 - RNA, 20 nt, Human parainfluenza virus 1 strain Washington/1964
aguauacacaaaaaccaaaa

SEQ ID NO: 358751 - RNA, 15 nt, Human parainfluenza virus 1 strain Washington/1964
aguauuguccuucau

SEQ ID NO: 358752 - RNA, 16 nt, Human parainfluenza virus 1 strain Washington/1964
agucagguaucuugau

SEQ ID NO: 358753 - RNA, 12 nt, Human parainfluenza virus 1 strain Washington/1964
aguccaccaacu

SEQ ID NO: 358754 - RNA, 14 nt, Human parainfluenza virus 1 strain Washington/1964
aguggauaccucag

SEQ ID NO: 358755 - RNA, 15 nt, Human parainfluenza virus 1 strain Washington/1964
aguuauucaaucugu

SEQ ID NO: 358756 - RNA, 19 nt, Human parainfluenza virus 1 strain Washington/1964
aguuauucaaucuguggau

SEQ ID NO: 358757 - RNA, 17 nt, Human parainfluenza virus 1 strain Washington/1964
aguucagaacuccacaa

SEQ ID NO: 358758 - RNA, 15 nt, Human parainfluenza virus 1 strain Washington/1964
auaaaacaagacacu

SEQ ID NO: 358759 - RNA, 17 nt, Human parainfluenza virus 1 strain Washington/1964
auaacaacaaagacaga

SEQ ID NO: 358760 - RNA, 21 nt, Human parainfluenza virus 1 strain Washington/1964
auaagaaaaacguagggacaa

SEQ ID NO: 358761 - RNA, 18 nt, Human parainfluenza virus 1 strain Washington/1964
auacacaacaaacaaugc

SEQ ID NO: 358762 - RNA, 15 nt, Human parainfluenza virus 1 strain Washington/1964
auaccucagcaucca

SEQ ID NO: 358763 - RNA, 12 nt, Human parainfluenza virus 1 strain Washington/1964
auagaagccaga

SEQ ID NO: 358764 - RNA, 18 nt, Human parainfluenza virus 1 strain Washington/1964
auagacauuuauaugaca

SEQ ID NO: 358765 - RNA, 21 nt, Human parainfluenza virus 1 strain Washington/1964
auauccagagccaacucaaaa

SEQ ID NO: 358766 - RNA, 22 nt, Human parainfluenza virus 1 strain Washington/1964
aucaaaucuauccacaacuuca

SEQ ID NO: 358767 - RNA, 16 nt, Human parainfluenza virus 1 strain Washington/1964
aucaagcguaaccaaa

SEQ ID NO: 358768 - RNA, 20 nt, Human parainfluenza virus 1 strain Washington/1964
aucaugacaguauccuccau

SEQ ID NO: 358769 - RNA, 15 nt, Human parainfluenza virus 1 strain Washington/1964
auccgauuauacaaa

SEQ ID NO: 358770 - RNA, 17 nt, Human parainfluenza virus 1 strain Washington/1964
augacaauucacagauc

SEQ ID NO: 358771 - RNA, 19 nt, Human parainfluenza virus 1 strain Washington/1964
augccugccuauuugucaa

SEQ ID NO: 358772 - RNA, 20 nt, Human parainfluenza virus 1 strain Washington/1964
augccugccuauuugucaaa

SEQ ID NO: 358773 - RNA, 21 nt, Human parainfluenza virus 1 strain Washington/1964
auucacagaucagcucaacca

SEQ ID NO: 358774 - RNA, 13 nt, Human parainfluenza virus 1 strain Washington/1964
auugcaacaacaa

SEQ ID NO: 358775 - RNA, 17 nt, Human parainfluenza virus 1 strain Washington/1964
auugcaacaacaaugca

SEQ ID NO: 358776 - RNA, 13 nt, Human parainfluenza virus 1 strain Washington/1964
auuuauaugacaa

SEQ ID NO: 358777 - RNA, 16 nt, Human parainfluenza virus 1 strain Washington/1964
auuucaaccagcaauc

SEQ ID NO: 358778 - RNA, 14 nt, Human parainfluenza virus 1 strain Washington/1964
caaaaacaagaaca

SEQ ID NO: 358779 - RNA, 16 nt, Human parainfluenza virus 1 strain Washington/1964
caaaaagcucccucaa

SEQ ID NO: 358780 - RNA, 23 nt, Human parainfluenza virus 1 strain Washington/1964
caaaaagcucccucaaaacaauu

SEQ ID NO: 358781 - RNA, 18 nt, Human parainfluenza virus 1 strain Washington/1964
caaaagaaaacaagccau

SEQ ID NO: 358782 - RNA, 22 nt, Human parainfluenza virus 1 strain Washington/1964
caaacaagaucagagagaacac

SEQ ID NO: 358783 - RNA, 22 nt, Human parainfluenza virus 1 strain Washington/1964
caaacaucaugacaguauccuc

SEQ ID NO: 358784 - RNA, 14 nt, Human parainfluenza virus 1 strain Washington/1964
caaaggaacaaaag

SEQ ID NO: 358785 - RNA, 19 nt, Human parainfluenza virus 1 strain Washington/1964
caaaucuauccacaacuuc

SEQ ID NO: 358786 - RNA, 14 nt, Human parainfluenza virus 1 strain Washington/1964
caacaaagacagag

SEQ ID NO: 358787 - RNA, 14 nt, Human parainfluenza virus 1 strain Washington/1964
caacaaguaagaaa

SEQ ID NO: 358788 - RNA, 20 nt, Human parainfluenza virus 1 strain Washington/1964
caacaaguaagaaaaacuua

SEQ ID NO: 358789 - RNA, 20 nt, Human parainfluenza virus 1 strain Washington/1964
caacccgaaaugacaauucc

SEQ ID NO: 358790 - RNA, 15 nt, Human parainfluenza virus 1 strain Washington/1964
caacgucgacccaag

SEQ ID NO: 358791 - RNA, 16 nt, Human parainfluenza virus 1 strain Washington/1964
caacgucgacccaaga

SEQ ID NO: 358792 - RNA, 13 nt, Human parainfluenza virus 1 strain Washington/1964
caagaacaaaagc

SEQ ID NO: 358793 - RNA, 15 nt, Human parainfluenza virus 1 strain Washington/1964
caagaaucacucuca

SEQ ID NO: 358794 - RNA, 16 nt, Human parainfluenza virus 1 strain Washington/1964
caagaaucacucucag

SEQ ID NO: 358795 - RNA, 15 nt, Human parainfluenza virus 1 strain Washington/1964
caagccaucaugcaa

SEQ ID NO: 358796 - RNA, 21 nt, Human parainfluenza virus 1 strain Washington/1964
caagguaggagauccuccaaa

SEQ ID NO: 358797 - RNA, 15 nt, Human parainfluenza virus 1 strain Washington/1964
caauagaagccagau

SEQ ID NO: 358798 - RNA, 20 nt, Human parainfluenza virus 1 strain Washington/1964
caauauccagagccaacuca

SEQ ID NO: 358799 - RNA, 15 nt, Human parainfluenza virus 1 strain Washington/1964
caaucaaaaucaaua

SEQ ID NO: 358800 - RNA, 19 nt, Human parainfluenza virus 1 strain Washington/1964
caaucagguguacaacaag

SEQ ID NO: 358801 - RNA, 14 nt, Human parainfluenza virus 1 strain Washington/1964
caaucccucacauc

SEQ ID NO: 358802 - RNA, 18 nt, Human parainfluenza virus 1 strain Washington/1964
caaugcauacaguauugu

SEQ ID NO: 358803 - RNA, 12 nt, Human parainfluenza virus 1 strain Washington/1964
caauucacagau

SEQ ID NO: 358804 - RNA, 19 nt, Human parainfluenza virus 1 strain Washington/1964
caauucacagaucagcuca

SEQ ID NO: 358805 - RNA, 15 nt, Human parainfluenza virus 1 strain Washington/1964
caauuggcauagcca

SEQ ID NO: 358806 - RNA, 14 nt, Human parainfluenza virus 1 strain Washington/1964
cacaaaaaccaaaa

SEQ ID NO: 358807 - RNA, 14 nt, Human parainfluenza virus 1 strain Washington/1964
cacaaaaaguccac

SEQ ID NO: 358808 - RNA, 17 nt, Human parainfluenza virus 1 strain Washington/1964
cacaaacaagaacaaaa

SEQ ID NO: 358809 - RNA, 16 nt, Human parainfluenza virus 1 strain Washington/1964
cacagaaucaaccagu

SEQ ID NO: 358810 - RNA, 14 nt, Human parainfluenza virus 1 strain Washington/1964
cacagaucagcuca

SEQ ID NO: 358811 - RNA, 15 nt, Human parainfluenza virus 1 strain Washington/1964
cacaguggauaccuc

SEQ ID NO: 358812 - RNA, 14 nt, Human parainfluenza virus 1 strain Washington/1964
caccaaaaccagcc

SEQ ID NO: 358813 - RNA, 12 nt, Human parainfluenza virus 1 strain Washington/1964
caccuaagcaag

SEQ ID NO: 358814 - RNA, 23 nt, Human parainfluenza virus 1 strain Washington/1964
cacgaaaacaagaaucacucuca

SEQ ID NO: 358815 - RNA, 18 nt, Human parainfluenza virus 1 strain Washington/1964
cacuccaaagaacaacca

SEQ ID NO: 358816 - RNA, 16 nt, Human parainfluenza virus 1 strain Washington/1964
cagaauagucaaggua

SEQ ID NO: 358817 - RNA, 13 nt, Human parainfluenza virus 1 strain Washington/1964
gccaaaauaauca

SEQ ID NO: 358818 - RNA, 18 nt, Human parainfluenza virus 1 strain Washington/1964
gccgacgauaacaacaaa

SEQ ID NO: 358819 - RNA, 13 nt, Human parainfluenza virus 1 strain Washington/1964
gccuauuugucaa

SEQ ID NO: 358820 - RNA, 12 nt, Human parainfluenza virus 1 strain Washington/1964
gcuagauaucaa

SEQ ID NO: 358821 - RNA, 20 nt, Human parainfluenza virus 1 strain Washington/1964
ggacaauagaagccagauca

SEQ ID NO: 358822 - RNA, 22 nt, Human parainfluenza virus 1 strain Washington/1964
ggacaguagaaccucucccucu

SEQ ID NO: 358823 - RNA, 20 nt, Human parainfluenza virus 1 strain Washington/1964
ggagaggcaccacgaaaaca

SEQ ID NO: 358824 - RNA, 18 nt, Human parainfluenza virus 1 strain Washington/1964
ggagucagguaucuugau

SEQ ID NO: 358825 - RNA, 15 nt, Human parainfluenza virus 1 strain Washington/1964
ggcagcauaucugau

SEQ ID NO: 358826 - RNA, 21 nt, Human parainfluenza virus 1 strain Washington/1964
ggcagcauaucugaucucaca

SEQ ID NO: 358827 - RNA, 16 nt, Human parainfluenza virus 1 strain Washington/1964
ggguuaaagacaaucc

SEQ ID NO: 358828 - RNA, 23 nt, Human parainfluenza virus 1 strain Washington/1964
ggugaaugacaauucacagauca

SEQ ID NO: 358829 - RNA, 19 nt, Human parainfluenza virus 1 strain Washington/1964
gguuccccagauucucaca

SEQ ID NO: 358830 - RNA, 15 nt, Human parainfluenza virus 1 strain Washington/1964
guagcauacauacaa

SEQ ID NO: 358831 - RNA, 22 nt, Human parainfluenza virus 1 strain Washington/1964
guagcauacauacaacaaucaa

SEQ ID NO: 358832 - RNA, 15 nt, Human parainfluenza virus 1 strain Washington/1964
guauacacaaaaacc

SEQ ID NO: 358833 - RNA, 16 nt, Human parainfluenza virus 1 strain Washington/1964
gucaacucagaauucc

SEQ ID NO: 358834 - RNA, 16 nt, Human parainfluenza virus 1 strain Washington/1964
gugccaaaauaaucaa

SEQ ID NO: 358835 - RNA, 16 nt, Human parainfluenza virus 1 strain Washington/1964
guuaaagacaauccag

SEQ ID NO: 358836 - RNA, 19 nt, Human parainfluenza virus 1 strain Washington/1964
uaaaaagcaagauugcuca

SEQ ID NO: 358837 - RNA, 19 nt, Human parainfluenza virus 1 strain Washington/1964
uaaaacaagacacuuguau

SEQ ID NO: 358838 - RNA, 17 nt, Human parainfluenza virus 1 strain Washington/1964
uaaagacaauccaguca

SEQ ID NO: 358839 - RNA, 16 nt, Human parainfluenza virus 1 strain Washington/1964
uaauacaccagcagga

SEQ ID NO: 358840 - RNA, 16 nt, Human parainfluenza virus 1 strain Washington/1964
uaaugaaaucacaaca

SEQ ID NO: 358841 - RNA, 17 nt, Human parainfluenza virus 1 strain Washington/1964
uaauuauaaaacaagac

SEQ ID NO: 358842 - RNA, 16 nt, Human parainfluenza virus 1 strain Washington/1964
uacaacaaguaagaaa

SEQ ID NO: 358843 - RNA, 17 nt, Human parainfluenza virus 1 strain Washington/1964
uacaacccgaaaugaca

SEQ ID NO: 358844 - RNA, 22 nt, Human parainfluenza virus 1 strain Washington/1964
uacaaucaguucaaauaagaaa

SEQ ID NO: 358845 - RNA, 16 nt, Human parainfluenza virus 1 strain Washington/1964
uacauacaacaaucaa

SEQ ID NO: 358846 - RNA, 23 nt, Human parainfluenza virus 1 strain Washington/1964
uacauuguagcauacauacaaca

SEQ ID NO: 358847 - RNA, 17 nt, Human parainfluenza virus 1 strain Washington/1964
uacugauugcaacaaca

SEQ ID NO: 358848 - RNA, 19 nt, Human parainfluenza virus 1 strain Washington/1964
uagaaccucucccucucaa

SEQ ID NO: 358849 - RNA, 19 nt, Human parainfluenza virus 1 strain Washington/1964
uagcauacauacaacaauc

SEQ ID NO: 358850 - RNA, 15 nt, Human parainfluenza virus 1 strain Washington/1964
uauaaggcaacagca

SEQ ID NO: 358851 - RNA, 17 nt, Human parainfluenza virus 1 strain Washington/1964
uauaucaauuaugugaa

SEQ ID NO: 358852 - RNA, 18 nt, Human parainfluenza virus 1 strain Washington/1964
uaucaucgacaacccaaa

SEQ ID NO: 358853 - RNA, 18 nt, Human parainfluenza virus 1 strain Washington/1964
uaugaagacaaacaucau

SEQ ID NO: 358854 - RNA, 17 nt, Human parainfluenza virus 1 strain Washington/1964
ucaaaaagcucccucaa

SEQ ID NO: 358855 - RNA, 17 nt, Human parainfluenza virus 1 strain Washington/1964
ucaaaacaauuaagaaa

SEQ ID NO: 358856 - RNA, 23 nt, Human parainfluenza virus 1 strain Washington/1964
ucaaccagcaaucaaaaucaaua

SEQ ID NO: 358857 - RNA, 20 nt, Human parainfluenza virus 1 strain Washington/1964
ucaacccuaugauuuaaaag

SEQ ID NO: 358858 - RNA, 16 nt, Human parainfluenza virus 1 strain Washington/1964
ucaaccuauaaggcaa

SEQ ID NO: 358859 - RNA, 21 nt, Human parainfluenza virus 1 strain Washington/1964
ucaaccuauaaggcaacagca

SEQ ID NO: 358860 - RNA, 17 nt, Human parainfluenza virus 1 strain Washington/1964
ucacaaacaagaacaaa

SEQ ID NO: 358861 - RNA, 20 nt, Human parainfluenza virus 1 strain Washington/1964
ucacaaacaagaacaaaagc

SEQ ID NO: 358862 - RNA, 21 nt, Human parainfluenza virus 1 strain Washington/1964
ucacagaucagcucaaccaga

SEQ ID NO: 358863 - RNA, 23 nt, Human parainfluenza virus 1 strain Washington/1964
ucacagaucagcucaaccagaca

SEQ ID NO: 358864 - RNA, 15 nt, Human parainfluenza virus 1 strain Washington/1964
ucagaacuccacaaa

SEQ ID NO: 358865 - RNA, 13 nt, Human parainfluenza virus 1 strain Washington/1964
ucagaauagucaa

SEQ ID NO: 358866 - RNA, 13 nt, Human parainfluenza virus 1 strain Washington/1964
ucagaauuccuca

SEQ ID NO: 358867 - RNA, 19 nt, Human parainfluenza virus 1 strain Washington/1964
ucagcagccacuccaaaga

SEQ ID NO: 358868 - RNA, 21 nt, Human parainfluenza virus 1 strain Washington/1964
ucaugacaguauccuccauga

SEQ ID NO: 358869 - RNA, 14 nt, Human parainfluenza virus 1 strain Washington/1964
ucauuaccaaccca

SEQ ID NO: 358870 - RNA, 17 nt, Human parainfluenza virus 1 strain Washington/1964
uccaaagaacaaccaca

SEQ ID NO: 358871 - RNA, 14 nt, Human parainfluenza virus 1 strain Washington/1964
uccgauuguaaaaa

SEQ ID NO: 358872 - RNA, 19 nt, Human parainfluenza virus 1 strain Washington/1964
uccuacaagcccacagaaa

SEQ ID NO: 358873 - RNA, 12 nt, Human parainfluenza virus 1 strain Washington/1964
uccuccaugaac

SEQ ID NO: 358874 - RNA, 19 nt, Human parainfluenza virus 1 strain Washington/1964
uccugacaaaaaagcaauc

SEQ ID NO: 358875 - RNA, 14 nt, Human parainfluenza virus 1 strain Washington/1964
ucgaagaccacaac

SEQ ID NO: 358876 - RNA, 15 nt, Human parainfluenza virus 1 strain Washington/1964
ucgaagaccacaaca

SEQ ID NO: 358877 - RNA, 19 nt, Human parainfluenza virus 1 strain Washington/1964
ucgauacaaucaguucaaa

SEQ ID NO: 358878 - RNA, 20 nt, Human parainfluenza virus 1 strain Washington/1964
ucuaucuggcagcauaucug

SEQ ID NO: 358879 - RNA, 23 nt, Human parainfluenza virus 1 strain Washington/1964
ucuggcuacugauugcaacaaca

SEQ ID NO: 358880 - RNA, 20 nt, Human parainfluenza virus 1 strain Washington/1964
ugaagacaaacaucaugaca

SEQ ID NO: 358881 - RNA, 21 nt, Human parainfluenza virus 1 strain Washington/1964
ugaagacaaacaucaugacag

SEQ ID NO: 358882 - RNA, 13 nt, Human parainfluenza virus 1 strain Washington/1964
ugaauagacauuu

SEQ ID NO: 358883 - RNA, 18 nt, Human parainfluenza virus 1 strain Washington/1964
ugacaauucacagaucag

SEQ ID NO: 358884 - RNA, 19 nt, Human parainfluenza virus 1 strain Washington/1964
ugacaauucacagaucagc

SEQ ID NO: 358885 - RNA, 16 nt, Human parainfluenza virus 1 strain Washington/1964
ugaugugcuacuauug

SEQ ID NO: 358886 - RNA, 23 nt, Human parainfluenza virus 1 strain Washington/1964
ugauugcaacaacaaugcauaca

SEQ ID NO: 358887 - RNA, 19 nt, Human parainfluenza virus 1 strain Washington/1964
ugcaaagccgacgauaaca

SEQ ID NO: 358888 - RNA, 18 nt, Human parainfluenza virus 1 strain Washington/1964
ugcuagauaucaaucaac

SEQ ID NO: 358889 - RNA, 22 nt, Human parainfluenza virus 1 strain Washington/1964
uggacaauagaagccagaucaa

SEQ ID NO: 358890 - RNA, 18 nt, Human parainfluenza virus 1 strain Washington/1964
uggagaagacagaagcug

SEQ ID NO: 358891 - RNA, 19 nt, Human parainfluenza virus 1 strain Washington/1964
uguagcauacauacaacaa

SEQ ID NO: 358892 - RNA, 13 nt, Human parainfluenza virus 1 strain Washington/1964
uuaaagacaaucc

SEQ ID NO: 358893 - RNA, 14 nt, Human parainfluenza virus 1 strain Washington/1964
uuaaagacaaucca

SEQ ID NO: 358894 - RNA, 20 nt, Human parainfluenza virus 1 strain Washington/1964
uuaggguuaaagacaaucca

SEQ ID NO: 358895 - RNA, 21 nt, Human parainfluenza virus 1 strain Washington/1964
aacacaaaaaguccaccaacu

SEQ ID NO: 358896 - RNA, 13 nt, Human parainfluenza virus 1 strain Washington/1964
aacaccuaagcaa

SEQ ID NO: 358897 - RNA, 15 nt, Human parainfluenza virus 1 strain Washington/1964
aaccagacaccacca

SEQ ID NO: 358898 - RNA, 19 nt, Human parainfluenza virus 1 strain Washington/1964
aaccucucccucucaaaac

SEQ ID NO: 358899 - RNA, 21 nt, Human parainfluenza virus 1 strain Washington/1964
aacgaagagucagcagccacu

SEQ ID NO: 358900 - RNA, 19 nt, Human parainfluenza virus 1 strain Washington/1964
aacuuagggugaaugacaa

SEQ ID NO: 358901 - RNA, 17 nt, Human parainfluenza virus 1 strain Washington/1964
aacuuaggguuaaagac

SEQ ID NO: 358902 - RNA, 22 nt, Human parainfluenza virus 1 strain Washington/1964
aacuuaggguuaaagacaaucc

SEQ ID NO: 358903 - RNA, 21 nt, Human parainfluenza virus 1 strain Washington/1964
aacuucacguuuugcuagaua

SEQ ID NO: 358904 - RNA, 24 nt, Human parainfluenza virus 1 strain Washington/1964
aagaaaaacuuagggugaaugaca

SEQ ID NO: 358905 - RNA, 21 nt, Human parainfluenza virus 1 strain Washington/1964
aagaaaucccuuuaacugacu

SEQ ID NO: 358906 - RNA, 17 nt, Human parainfluenza virus 1 strain Washington/1964
aagacaauccagucaac

SEQ ID NO: 358907 - RNA, 17 nt, Human parainfluenza virus 1 strain Washington/1964
aagacagagcaaucuca

SEQ ID NO: 358908 - RNA, 18 nt, Human parainfluenza virus 1 strain Washington/1964
aagacagagcaaucucaa

SEQ ID NO: 358909 - RNA, 22 nt, Human parainfluenza virus 1 strain Washington/1964
aagacagagcaaucucaacguc

SEQ ID NO: 358910 - RNA, 13 nt, Human parainfluenza virus 1 strain Washington/1964
aagauagagacaa

SEQ ID NO: 358911 - RNA, 19 nt, Human parainfluenza virus 1 strain Washington/1964
aagaucacaaacaagaaca

SEQ ID NO: 358912 - RNA, 22 nt, Human parainfluenza virus 1 strain Washington/1964
aagcaaucccucacaucagaau

SEQ ID NO: 358913 - RNA, 18 nt, Human parainfluenza virus 1 strain Washington/1964
aagcucccucaaaacaau

SEQ ID NO: 358914 - RNA, 15 nt, Human parainfluenza virus 1 strain Washington/1964
aaggccagagacaaa

SEQ ID NO: 358915 - RNA, 16 nt, Human parainfluenza virus 1 strain Washington/1964
aaguccucuaccaaca

SEQ ID NO: 358916 - RNA, 15 nt, Human parainfluenza virus 1 strain Washington/1964
aauagaagccagauc

SEQ ID NO: 358917 - RNA, 22 nt, Human parainfluenza virus 1 strain Washington/1964
aauauccagagccaacucaaaa

SEQ ID NO: 358918 - RNA, 23 nt, Human parainfluenza virus 1 strain Washington/1964
aauauccagagccaacucaaaaa

SEQ ID NO: 358919 - RNA, 15 nt, Human parainfluenza virus 1 strain Washington/1964
aaucagguguacaac

SEQ ID NO: 358920 - RNA, 16 nt, Human parainfluenza virus 1 strain Washington/1964
aaugacaauucacaga

SEQ ID NO: 358921 - RNA, 16 nt, Human parainfluenza virus 1 strain Washington/1964
aaugcauacaguauug

SEQ ID NO: 358922 - RNA, 16 nt, Human parainfluenza virus 1 strain Washington/1964
aauuauaaaacaagac

SEQ ID NO: 358923 - RNA, 16 nt, Human parainfluenza virus 1 strain Washington/1964
aauuggagaagacaga

SEQ ID NO: 358924 - RNA, 13 nt, Human parainfluenza virus 1 strain Washington/1964
aauuucaaccagc

SEQ ID NO: 358925 - RNA, 12 nt, Human parainfluenza virus 1 strain Washington/1964
acaaaaacaaga

SEQ ID NO: 358926 - RNA, 12 nt, Human parainfluenza virus 1 strain Washington/1964
acaaaaacagaa

SEQ ID NO: 358927 - RNA, 13 nt, Human parainfluenza virus 1 strain Washington/1964
acaacaaucaaau

SEQ ID NO: 358928 - RNA, 15 nt, Human parainfluenza virus 1 strain Washington/1964
acaacaaugcauaca

SEQ ID NO: 358929 - RNA, 16 nt, Human parainfluenza virus 1 strain Washington/1964
acaacaaugcauacag

SEQ ID NO: 358930 - RNA, 22 nt, Human parainfluenza virus 1 strain Washington/1964
acaacccgaaaugacaauucca

SEQ ID NO: 358931 - RNA, 10 nt, Human parainfluenza virus 1 strain Washington/1964
acaagacacu

SEQ ID NO: 358932 - RNA, 14 nt, Human parainfluenza virus 1 strain Washington/1964
acaaucaaaucuau

SEQ ID NO: 358933 - RNA, 12 nt, Human parainfluenza virus 1 strain Washington/1964
acaauucacaga

SEQ ID NO: 358934 - RNA, 15 nt, Human parainfluenza virus 1 strain Washington/1964
acaauucacagauca

SEQ ID NO: 358935 - RNA, 19 nt, Human parainfluenza virus 1 strain Washington/1964
acaauucacagaucagcuc

SEQ ID NO: 358936 - RNA, 21 nt, Human parainfluenza virus 1 strain Washington/1964
acaauuucaaccagcaaucaa

SEQ ID NO: 358937 - RNA, 18 nt, Human parainfluenza virus 1 strain Washington/1964
acacauuaauacaccagc

SEQ ID NO: 358938 - RNA, 16 nt, Human parainfluenza virus 1 strain Washington/1964
acaccaccagcauaca

SEQ ID NO: 358939 - RNA, 22 nt, Human parainfluenza virus 1 strain Washington/1964
acacgaaaccaaccuucacagu

SEQ ID NO: 358940 - RNA, 20 nt, Human parainfluenza virus 1 strain Washington/1964
acacuuguaugaagacaaac

SEQ ID NO: 358941 - RNA, 15 nt, Human parainfluenza virus 1 strain Washington/1964
acagaaucaaccagu

SEQ ID NO: 358942 - RNA, 18 nt, Human parainfluenza virus 1 strain Washington/1964
acagaauuuaaauucaua

SEQ ID NO: 358943 - RNA, 14 nt, Human parainfluenza virus 1 strain Washington/1964
acagagcaaucuca

SEQ ID NO: 358944 - RNA, 15 nt, Human parainfluenza virus 1 strain Washington/1964
acagagcaaucucaa

SEQ ID NO: 358945 - RNA, 12 nt, Human parainfluenza virus 1 strain Washington/1964
acagaucagcuc

SEQ ID NO: 358946 - RNA, 13 nt, Human parainfluenza virus 1 strain Washington/1964
acagaucagcuca

SEQ ID NO: 358947 - RNA, 19 nt, Human parainfluenza virus 1 strain Washington/1964
acagaucagcucaaccaga

SEQ ID NO: 358948 - RNA, 17 nt, Human parainfluenza virus 1 strain Washington/1964
acaguauccuccaugaa

SEQ ID NO: 358949 - RNA, 23 nt, Human parainfluenza virus 1 strain Washington/1964
acaguauuguccuucauuaucau

SEQ ID NO: 358950 - RNA, 15 nt, Human parainfluenza virus 1 strain Washington/1964
acauacaacaaucaa

SEQ ID NO: 358951 - RNA, 22 nt, Human parainfluenza virus 1 strain Washington/1964
acaucuuauauccagaauguca

SEQ ID NO: 358952 - RNA, 14 nt, Human parainfluenza virus 1 strain Washington/1964
acauuaauacacca

SEQ ID NO: 358953 - RNA, 14 nt, Human parainfluenza virus 1 strain Washington/1964
acauuguagcauac

SEQ ID NO: 358954 - RNA, 16 nt, Human parainfluenza virus 1 strain Washington/1964
acauuguagcauacau

SEQ ID NO: 358955 - RNA, 19 nt, Human parainfluenza virus 1 strain Washington/1964
acauuguagcauacauaca

SEQ ID NO: 358956 - RNA, 16 nt, Human parainfluenza virus 1 strain Washington/1964
accaacccaaguccag

SEQ ID NO: 358957 - RNA, 15 nt, Human parainfluenza virus 1 strain Washington/1964
accaaccuucacagu

SEQ ID NO: 358958 - RNA, 15 nt, Human parainfluenza virus 1 strain Washington/1964
acccgaaaugacaau

SEQ ID NO: 358959 - RNA, 20 nt, Human parainfluenza virus 1 strain Washington/1964
accuauaaggcaacagcauc

SEQ ID NO: 358960 - RNA, 17 nt, Human parainfluenza virus 1 strain Washington/1964
accucucccucucaaaa

SEQ ID NO: 358961 - RNA, 16 nt, Human parainfluenza virus 1 strain Washington/1964
acgauaacaacaaaga

SEQ ID NO: 358962 - RNA, 16 nt, Human parainfluenza virus 1 strain Washington/1964
acugauugcaacaaca

SEQ ID NO: 358963 - RNA, 24 nt, Human parainfluenza virus 1 strain Washington/1964
acuuaggguuaaagacaauccagu

SEQ ID NO: 358964 - RNA, 13 nt, Human parainfluenza virus 1 strain Washington/1964
acuucaccaauca

SEQ ID NO: 358965 - RNA, 21 nt, Human parainfluenza virus 1 strain Washington/1964
acuuggacaauagaagccaga

SEQ ID NO: 358966 - RNA, 19 nt, Human parainfluenza virus 1 strain Washington/1964
agaaaaaaggccagagaca

SEQ ID NO: 358967 - RNA, 14 nt, Human parainfluenza virus 1 strain Washington/1964
agaaaacaagccau

SEQ ID NO: 358968 - RNA, 21 nt, Human parainfluenza virus 1 strain Washington/1964
agaaaacaagccaucaugcaa

SEQ ID NO: 358969 - RNA, 19 nt, Human parainfluenza virus 1 strain Washington/1964
agaaaaugggacaguagaa

SEQ ID NO: 358970 - RNA, 18 nt, Human parainfluenza virus 1 strain Washington/1964
agaaauuggagaagacag

SEQ ID NO: 358971 - RNA, 15 nt, Human parainfluenza virus 1 strain Washington/1964
agaacaaaagcaaaa

SEQ ID NO: 358972 - RNA, 20 nt, Human parainfluenza virus 1 strain Washington/1964
agaaucacucucagauguca

SEQ ID NO: 358973 - RNA, 18 nt, Human parainfluenza virus 1 strain Washington/1964
agacaucuuauauccaga

SEQ ID NO: 358974 - RNA, 16 nt, Human parainfluenza virus 1 strain Washington/1964
cagagagaacacagag

SEQ ID NO: 358975 - RNA, 13 nt, Human parainfluenza virus 1 strain Washington/1964
cagagcaaucuca

SEQ ID NO: 358976 - RNA, 14 nt, Human parainfluenza virus 1 strain Washington/1964
cagagcaaucucaa

SEQ ID NO: 358977 - RNA, 13 nt, Human parainfluenza virus 1 strain Washington/1964
cagcauccaaaac

SEQ ID NO: 358978 - RNA, 22 nt, Human parainfluenza virus 1 strain Washington/1964
caguagaaccucucccucucaa

SEQ ID NO: 358979 - RNA, 14 nt, Human parainfluenza virus 1 strain Washington/1964
caguggauaccuca

SEQ ID NO: 358980 - RNA, 21 nt, Human parainfluenza virus 1 strain Washington/1964
cauacacgaaaccaaccuuca

SEQ ID NO: 358981 - RNA, 18 nt, Human parainfluenza virus 1 strain Washington/1964
cauacauacaacaaucaa

SEQ ID NO: 358982 - RNA, 18 nt, Human parainfluenza virus 1 strain Washington/1964
cauaucugaucucacaga

SEQ ID NO: 358983 - RNA, 15 nt, Human parainfluenza virus 1 strain Washington/1964
caucaaggaagacaa

SEQ ID NO: 358984 - RNA, 14 nt, Human parainfluenza virus 1 strain Washington/1964
caucaugacaguau

SEQ ID NO: 358985 - RNA, 20 nt, Human parainfluenza virus 1 strain Washington/1964
cauuaccaacccaaguccag

SEQ ID NO: 358986 - RNA, 20 nt, Human parainfluenza virus 1 strain Washington/1964
cauuaucaugauccuaugca

SEQ ID NO: 358987 - RNA, 14 nt, Human parainfluenza virus 1 strain Washington/1964
ccaaaauaaucaaa

SEQ ID NO: 358988 - RNA, 23 nt, Human parainfluenza virus 1 strain Washington/1964
ccaaagaacaaccacaaccacag

SEQ ID NO: 358989 - RNA, 20 nt, Human parainfluenza virus 1 strain Washington/1964
ccaaccucgaagaccacaac

SEQ ID NO: 358990 - RNA, 22 nt, Human parainfluenza virus 1 strain Washington/1964
ccaacucaaaaagcucccucaa

SEQ ID NO: 358991 - RNA, 23 nt, Human parainfluenza virus 1 strain Washington/1964
ccaaucagguguacaacaaguaa

SEQ ID NO: 358992 - RNA, 16 nt, Human parainfluenza virus 1 strain Washington/1964
ccacgguaaacacaca

SEQ ID NO: 358993 - RNA, 23 nt, Human parainfluenza virus 1 strain Washington/1964
ccacuccaaagaacaaccacaac

SEQ ID NO: 358994 - RNA, 18 nt, Human parainfluenza virus 1 strain Washington/1964
ccagagccaacucaaaaa

SEQ ID NO: 358995 - RNA, 14 nt, Human parainfluenza virus 1 strain Washington/1964
ccagcaaucaaaau

SEQ ID NO: 358996 - RNA, 19 nt, Human parainfluenza virus 1 strain Washington/1964
ccaugaacgaaagugccaa

SEQ ID NO: 358997 - RNA, 19 nt, Human parainfluenza virus 1 strain Washington/1964
cccagauucucacacgaag

SEQ ID NO: 358998 - RNA, 18 nt, Human parainfluenza virus 1 strain Washington/1964
ccuacaagcccacagaaa

SEQ ID NO: 358999 - RNA, 16 nt, Human parainfluenza virus 1 strain Washington/1964
ccuccaaaacauggag

SEQ ID NO: 359000 - RNA, 19 nt, Human parainfluenza virus 1 strain Washington/1964
cgacgauaacaacaaagac

SEQ ID NO: 359001 - RNA, 19 nt, Human parainfluenza virus 1 strain Washington/1964
cuacaacccgaaaugacaa

SEQ ID NO: 359002 - RNA, 17 nt, Human parainfluenza virus 1 strain Washington/1964
cuacaagcccacagaaa

SEQ ID NO: 359003 - RNA, 18 nt, Human parainfluenza virus 1 strain Washington/1964
cuccaaagaacaaccaca

SEQ ID NO: 359004 - RNA, 21 nt, Human parainfluenza virus 1 strain Washington/1964
cuccaaccucgaagaccacaa

SEQ ID NO: 359005 - RNA, 17 nt, Human parainfluenza virus 1 strain Washington/1964
cucucaaaacagguccu

SEQ ID NO: 359006 - RNA, 18 nt, Human parainfluenza virus 1 strain Washington/1964
cucucccucucaaaacag

SEQ ID NO: 359007 - RNA, 18 nt, Human parainfluenza virus 1 strain Washington/1964
cugaaacauacagguucc

SEQ ID NO: 359008 - RNA, 15 nt, Human parainfluenza virus 1 strain Washington/1964
cuuagggucaaagaa

SEQ ID NO: 359009 - RNA, 21 nt, Human parainfluenza virus 1 strain Washington/1964
cuucacaguggauaccucagc

SEQ ID NO: 359010 - RNA, 23 nt, Human parainfluenza virus 1 strain Washington/1964
cuucacaguggauaccucagcau

SEQ ID NO: 359011 - RNA, 14 nt, Human parainfluenza virus 1 strain Washington/1964
cuucaccaaucagg

SEQ ID NO: 359012 - RNA, 15 nt, Human parainfluenza virus 1 strain Washington/1964
cuucauuaucaugau

SEQ ID NO: 359013 - RNA, 20 nt, Human parainfluenza virus 1 strain Washington/1964
cuucccgaauggaucaggau

SEQ ID NO: 359014 - RNA, 23 nt, Human parainfluenza virus 1 strain Washington/1964
gaaaaacaagauacacaacaaac

SEQ ID NO: 359015 - RNA, 16 nt, Human parainfluenza virus 1 strain Washington/1964
gaaaacaaauaguuca

SEQ ID NO: 359016 - RNA, 14 nt, Human parainfluenza virus 1 strain Washington/1964
gaaaugacaauucc

SEQ ID NO: 359017 - RNA, 21 nt, Human parainfluenza virus 1 strain Washington/1964
gaacgaaagugccaaaauaau

SEQ ID NO: 359018 - RNA, 13 nt, Human parainfluenza virus 1 strain Washington/1964
gaagaaaauggga

SEQ ID NO: 359019 - RNA, 17 nt, Human parainfluenza virus 1 strain Washington/1964
gaagaccacaacaccaa

SEQ ID NO: 359020 - RNA, 14 nt, Human parainfluenza virus 1 strain Washington/1964
gaagaggaaaccag

SEQ ID NO: 359021 - RNA, 21 nt, Human parainfluenza virus 1 strain Washington/1964
gaagccgaaggagaggcacca

SEQ ID NO: 359022 - RNA, 12 nt, Human parainfluenza virus 1 strain Washington/1964
gaaucaaccagu

SEQ ID NO: 359023 - RNA, 14 nt, Human parainfluenza virus 1 strain Washington/1964
gaaucaaccaguua

SEQ ID NO: 359024 - RNA, 22 nt, Human parainfluenza virus 1 strain Washington/1964
gaaucuacaauuucaaccagca

SEQ ID NO: 359025 - RNA, 21 nt, Human parainfluenza virus 1 strain Washington/1964
gacaaaaaagcaaucccucac

SEQ ID NO: 359026 - RNA, 22 nt, Human parainfluenza virus 1 strain Washington/1964
gacaaaaacggaggcaagaaca

SEQ ID NO: 359027 - RNA, 14 nt, Human parainfluenza virus 1 strain Washington/1964
gacaaaaaugcaaa

SEQ ID NO: 359028 - RNA, 13 nt, Human parainfluenza virus 1 strain Washington/1964
gacaagaucacaa

SEQ ID NO: 359029 - RNA, 15 nt, Human parainfluenza virus 1 strain Washington/1964
gacaauagaagccag

SEQ ID NO: 359030 - RNA, 19 nt, Human parainfluenza virus 1 strain Washington/1964
gacaauagaagccagauca

SEQ ID NO: 359031 - RNA, 14 nt, Human parainfluenza virus 1 strain Washington/1964
gacaccaccagcau

SEQ ID NO: 359032 - RNA, 21 nt, Human parainfluenza virus 1 strain Washington/1964
gacaguagaaccucucccucu

SEQ ID NO: 359033 - RNA, 22 nt, Human parainfluenza virus 1 strain Washington/1964
gaccuaauuauaaaacaagaca

SEQ ID NO: 359034 - RNA, 16 nt, Human parainfluenza virus 1 strain Washington/1964
gagaaaaacaacaaca

SEQ ID NO: 359035 - RNA, 17 nt, Human parainfluenza virus 1 strain Washington/1964
gagaaaggaaauggcug

SEQ ID NO: 359036 - RNA, 12 nt, Human parainfluenza virus 1 strain Washington/1964
gagacaaaaacg

SEQ ID NO: 359037 - RNA, 16 nt, Human parainfluenza virus 1 strain Washington/1964
gagauccuccaaaaca

SEQ ID NO: 359038 - RNA, 15 nt, Human parainfluenza virus 1 strain Washington/1964
gagccaacucaaaaa

SEQ ID NO: 359039 - RNA, 16 nt, Human parainfluenza virus 1 strain Washington/1964
gaggaaaccagcaaca

SEQ ID NO: 359040 - RNA, 18 nt, Human parainfluenza virus 1 strain Washington/1964
gaggcaagaacaaaaauu

SEQ ID NO: 359041 - RNA, 17 nt, Human parainfluenza virus 1 strain Washington/1964
gaucagcucaaccagac

SEQ ID NO: 359042 - RNA, 14 nt, Human parainfluenza virus 1 strain Washington/1964
gauccuaugcauug

SEQ ID NO: 359043 - RNA, 13 nt, Human parainfluenza virus 1 strain Washington/1964
gauccuccaaaac

SEQ ID NO: 359044 - RNA, 14 nt, Human parainfluenza virus 1 strain Washington/1964
gauccuccaaaaca

SEQ ID NO: 359045 - RNA, 15 nt, Human parainfluenza virus 1 strain Washington/1964
gauugcaacaacaau

SEQ ID NO: 359046 - RNA, 21 nt, Human parainfluenza virus 1 strain Washington/1964
gcaaaaacaaaaacaagaaca

SEQ ID NO: 359047 - RNA, 15 nt, Human parainfluenza virus 1 strain Washington/1964
gcaacaacaaugcau

SEQ ID NO: 359048 - RNA, 17 nt, Human parainfluenza virus 1 strain Washington/1964
gcaaucccucacaucag

SEQ ID NO: 359049 - RNA, 22 nt, Human parainfluenza virus 1 strain Washington/1964
gcaaucucaacgucgacccaag

SEQ ID NO: 359050 - RNA, 13 nt, Human parainfluenza virus 1 strain Washington/1964
gcaggaaggacac

SEQ ID NO: 359051 - RNA, 23 nt, Human parainfluenza virus 1 strain Washington/1964
gcauaucugaucucacagaauca

SEQ ID NO: 359052 - RNA, 12 nt, Human parainfluenza virus 1 strain Washington/1964
gcauccaaaacu

SEQ ID NO: 359053 - RNA, 23 nt, Human parainfluenza virus 1 strain Washington/1964
uucaccaaucagguguacaacaa

SEQ ID NO: 359054 - RNA, 21 nt, Human parainfluenza virus 1 strain Washington/1964
uuggacaauagaagccagauc

SEQ ID NO: 359055 - RNA, 12 nt, Human parainfluenza virus 1 strain Washington/1964
uuggagaagaca

SEQ ID NO: 359056 - RNA, 22 nt, Human parainfluenza virus 1 strain Washington/1964
uuguaaaaagcaagauugcuca

SEQ ID NO: 359057 - RNA, 22 nt, Human parainfluenza virus 1 strain Washington/1964
uacugauugcaacaacaaugca

SEQ ID NO: 359058 - RNA, 14 nt, Human parainfluenza virus 1 strain Washington/1964
uagcauacauacaa

SEQ ID NO: 359059 - RNA, 19 nt, Human parainfluenza virus 1 strain Washington/1964
uauccuacaagcccacaga

SEQ ID NO: 359060 - RNA, 18 nt, Human parainfluenza virus 1 strain Washington/1964
uaucuugaugugcuacua

SEQ ID NO: 359061 - RNA, 18 nt, Human parainfluenza virus 1 strain Washington/1964
uauuguccuucauuauca

SEQ ID NO: 359062 - RNA, 15 nt, Human parainfluenza virus 1 strain Washington/1964
ucaaccagcaaucaa

SEQ ID NO: 359063 - RNA, 18 nt, Human parainfluenza virus 1 strain Washington/1964
ucaacucagaauuccuca

SEQ ID NO: 359064 - RNA, 16 nt, Human parainfluenza virus 1 strain Washington/1964
ucacagaaucaaccag

SEQ ID NO: 359065 - RNA, 22 nt, Human parainfluenza virus 1 strain Washington/1964
ucaccaaauacaaaaucagaaa

SEQ ID NO: 359066 - RNA, 24 nt, Human parainfluenza virus 1 strain Washington/1964
ucaccaaucagguguacaacaagu

SEQ ID NO: 359067 - RNA, 21 nt, Human parainfluenza virus 1 strain Washington/1964
ucacguuuugcuagauaucaa

SEQ ID NO: 359068 - RNA, 18 nt, Human parainfluenza virus 1 strain Washington/1964
ucacucucagaugucauc

SEQ ID NO: 359069 - RNA, 20 nt, Human parainfluenza virus 1 strain Washington/1964
ucagguaucuugaugugcua

SEQ ID NO: 359070 - RNA, 15 nt, Human parainfluenza virus 1 strain Washington/1964
ucagguguacaacaa

SEQ ID NO: 359071 - RNA, 14 nt, Human parainfluenza virus 1 strain Washington/1964
ucaucgacaaccca

SEQ ID NO: 359072 - RNA, 16 nt, Human parainfluenza virus 1 strain Washington/1964
uccagagccaacucaa

SEQ ID NO: 359073 - RNA, 17 nt, Human parainfluenza virus 1 strain Washington/1964
uccagagccaacucaaa

SEQ ID NO: 359074 - RNA, 20 nt, Human parainfluenza virus 1 strain Washington/1964
uccagagccaacucaaaaag

SEQ ID NO: 359075 - RNA, 15 nt, Human parainfluenza virus 1 strain Washington/1964
uccaugaacgaaagu

SEQ ID NO: 359076 - RNA, 15 nt, Human parainfluenza virus 1 strain Washington/1964
ucccucucaaaacag

SEQ ID NO: 359077 - RNA, 13 nt, Human parainfluenza virus 1 strain Washington/1964
uccuccaaaacau

SEQ ID NO: 359078 - RNA, 22 nt, Human parainfluenza virus 1 strain Washington/1964
uccuccaugaacgaaagugcca

SEQ ID NO: 359079 - RNA, 17 nt, Human parainfluenza virus 1 strain Washington/1964
ucuacaauuucaaccag

SEQ ID NO: 359080 - RNA, 15 nt, Human parainfluenza virus 1 strain Washington/1964
ucucaaaaagcucag

SEQ ID NO: 359081 - RNA, 14 nt, Human parainfluenza virus 1 strain Washington/1964
ucucagaugucauc

SEQ ID NO: 359082 - RNA, 19 nt, Human parainfluenza virus 1 strain Washington/1964
ucuccuucccgaauggauc

SEQ ID NO: 359083 - RNA, 14 nt, Human parainfluenza virus 1 strain Washington/1964
ugaaaauagcucca

SEQ ID NO: 359084 - RNA, 20 nt, Human parainfluenza virus 1 strain Washington/1964
ugaaaauagcuccaaccucg

SEQ ID NO: 359085 - RNA, 16 nt, Human parainfluenza virus 1 strain Washington/1964
ugaaacaccuaagcaa

SEQ ID NO: 359086 - RNA, 17 nt, Human parainfluenza virus 1 strain Washington/1964
ugaagaggaaaccagca

SEQ ID NO: 359087 - RNA, 15 nt, Human parainfluenza virus 1 strain Washington/1964
ugaaugacaauucac

SEQ ID NO: 359088 - RNA, 19 nt, Human parainfluenza virus 1 strain Washington/1964
ugaccuaauuauaaaacaa

SEQ ID NO: 359089 - RNA, 18 nt, Human parainfluenza virus 1 strain Washington/1964
ugaucucacagaaucaac

SEQ ID NO: 359090 - RNA, 19 nt, Human parainfluenza virus 1 strain Washington/1964
ugauugcaacaacaaugca

SEQ ID NO: 359091 - RNA, 16 nt, Human parainfluenza virus 1 strain Washington/1964
ugcaaacaacaacaca

SEQ ID NO: 359092 - RNA, 15 nt, Human parainfluenza virus 1 strain Washington/1964
ugcaacaacaaugca

SEQ ID NO: 359093 - RNA, 18 nt, Human parainfluenza virus 1 strain Washington/1964
ugcaacaacaaugcauac

SEQ ID NO: 359094 - RNA, 15 nt, Human parainfluenza virus 1 strain Washington/1964
ugccuauuugucaaa

SEQ ID NO: 359095 - RNA, 16 nt, Human parainfluenza virus 1 strain Washington/1964
uggacaauagaagcca

SEQ ID NO: 359096 - RNA, 18 nt, Human parainfluenza virus 1 strain Washington/1964
uggacaauagaagccaga

SEQ ID NO: 359097 - RNA, 13 nt, Human parainfluenza virus 1 strain Washington/1964
uggagaagacaga

SEQ ID NO: 359098 - RNA, 17 nt, Human parainfluenza virus 1 strain Washington/1964
uggaucaggaugccuuc

SEQ ID NO: 359099 - RNA, 22 nt, Human parainfluenza virus 1 strain Washington/1964
uggucuacaacccgaaaugaca

SEQ ID NO: 359100 - RNA, 15 nt, Human parainfluenza virus 1 strain Washington/1964
uguaaugaaaucaca

SEQ ID NO: 359101 - RNA, 12 nt, Human parainfluenza virus 1 strain Washington/1964
agauugcucaac

SEQ ID NO: 359102 - RNA, 15 nt, Human parainfluenza virus 1 strain Washington/1964
agcaagauugcucaa

SEQ ID NO: 359103 - RNA, 19 nt, Human parainfluenza virus 1 strain Washington/1964
agcaaggaccucuaucugg

SEQ ID NO: 359104 - RNA, 16 nt, Human parainfluenza virus 1 strain Washington/1964
agcaaucccucacauc

SEQ ID NO: 359105 - RNA, 13 nt, Human parainfluenza virus 1 strain Washington/1964
agcauacacgaaa

SEQ ID NO: 359106 - RNA, 16 nt, Human parainfluenza virus 1 strain Washington/1964
agcauacacgaaacca

SEQ ID NO: 359107 - RNA, 20 nt, Human parainfluenza virus 1 strain Washington/1964
agcauacauacaacaaucaa

SEQ ID NO: 359108 - RNA, 21 nt, Human parainfluenza virus 1 strain Washington/1964
agccgacgauaacaacaaaga

SEQ ID NO: 359109 - RNA, 14 nt, Human parainfluenza virus 1 strain Washington/1964
agcucaaccagaca

SEQ ID NO: 359110 - RNA, 17 nt, Human parainfluenza virus 1 strain Washington/1964
agcucaaccagacacca

SEQ ID NO: 359111 - RNA, 15 nt, Human parainfluenza virus 1 strain Washington/1964
agcucccucaaaaca

SEQ ID NO: 359112 - RNA, 17 nt, Human parainfluenza virus 1 strain Washington/1964
aggagaggcaccacgaa

SEQ ID NO: 359113 - RNA, 17 nt, Human parainfluenza virus 1 strain Washington/1964
agggauccugaagccga

SEQ ID NO: 359114 - RNA, 21 nt, Human parainfluenza virus 1 strain Washington/1964
agguccugacaaaaaagcaau

SEQ ID NO: 359115 - RNA, 21 nt, Human parainfluenza virus 1 strain Washington/1964
aguagaaccucucccucucaa

SEQ ID NO: 359116 - RNA, 17 nt, Human parainfluenza virus 1 strain Washington/1964
aguccaccaacucccga

SEQ ID NO: 359117 - RNA, 21 nt, Human parainfluenza virus 1 strain Washington/1964
aguggauaccucagcauccaa

SEQ ID NO: 359118 - RNA, 21 nt, Human parainfluenza virus 1 strain Washington/1964
aguucagaacuccacaaauca

SEQ ID NO: 359119 - RNA, 14 nt, Human parainfluenza virus 1 strain Washington/1964
auaacaacaaagac

SEQ ID NO: 359120 - RNA, 16 nt, Human parainfluenza virus 1 strain Washington/1964
auaauaaacaccaaga

SEQ ID NO: 359121 - RNA, 18 nt, Human parainfluenza virus 1 strain Washington/1964
auacaccagcaggaagga

SEQ ID NO: 359122 - RNA, 22 nt, Human parainfluenza virus 1 strain Washington/1964
auacaccagcaggaaggacaca

SEQ ID NO: 359123 - RNA, 15 nt, Human parainfluenza virus 1 strain Washington/1964
auacauacaacaauc

SEQ ID NO: 359124 - RNA, 16 nt, Human parainfluenza virus 1 strain Washington/1964
auacauacaacaauca

SEQ ID NO: 359125 - RNA, 13 nt, Human parainfluenza virus 1 strain Washington/1964
auagaagccagau

SEQ ID NO: 359126 - RNA, 14 nt, Human parainfluenza virus 1 strain Washington/1964
auagaagccagauc

SEQ ID NO: 359127 - RNA, 23 nt, Human parainfluenza virus 1 strain Washington/1964
aucaauauccagagccaacucaa

SEQ ID NO: 359128 - RNA, 14 nt, Human parainfluenza virus 1 strain Washington/1964
aucacucucagaug

SEQ ID NO: 359129 - RNA, 15 nt, Human parainfluenza virus 1 strain Washington/1964
aucagaauagucaag

SEQ ID NO: 359130 - RNA, 17 nt, Human parainfluenza virus 1 strain Washington/1964
aucagagagaacacaga

SEQ ID NO: 359131 - RNA, 14 nt, Human parainfluenza virus 1 strain Washington/1964
aucaugacaguauc

SEQ ID NO: 359132 - RNA, 17 nt, Human parainfluenza virus 1 strain Washington/1964
aucaugauccuaugcau

SEQ ID NO: 359133 - RNA, 13 nt, Human parainfluenza virus 1 strain Washington/1964
auccuaugcauug

SEQ ID NO: 359134 - RNA, 19 nt, Human parainfluenza virus 1 strain Washington/1964
augaagaggaaaccagcaa

SEQ ID NO: 359135 - RNA, 23 nt, Human parainfluenza virus 1 strain Washington/1964
augacaguauccuccaugaacga

SEQ ID NO: 359136 - RNA, 13 nt, Human parainfluenza virus 1 strain Washington/1964
augcauacaguau

SEQ ID NO: 359137 - RNA, 15 nt, Human parainfluenza virus 1 strain Washington/1964
augcauacaguauug

SEQ ID NO: 359138 - RNA, 18 nt, Human parainfluenza virus 1 strain Washington/1964
augcauugaccuaauuau

SEQ ID NO: 359139 - RNA, 19 nt, Human parainfluenza virus 1 strain Washington/1964
cuacugauugcaacaacaa

SEQ ID NO: 359140 - RNA, 12 nt, Human parainfluenza virus 1 strain Washington/1964
cucagacaucuu

SEQ ID NO: 359141 - RNA, 20 nt, Human parainfluenza virus 1 strain Washington/1964
cuccaaagaacaaccacaac

SEQ ID NO: 359142 - RNA, 21 nt, Human parainfluenza virus 1 strain Washington/1964
cugaaaaagggaaaacaaaua

SEQ ID NO: 359143 - RNA, 23 nt, Human parainfluenza virus 1 strain Washington/1964
cugacaaaaaagcaaucccucac

SEQ ID NO: 359144 - RNA, 15 nt, Human parainfluenza virus 1 strain Washington/1964
cugaucucacagaau

SEQ ID NO: 359145 - RNA, 16 nt, Human parainfluenza virus 1 strain Washington/1964
cuuagggucaaagaaa

SEQ ID NO: 359146 - RNA, 13 nt, Human parainfluenza virus 1 strain Washington/1964
cuuauccuacaag

SEQ ID NO: 359147 - RNA, 17 nt, Human parainfluenza virus 1 strain Washington/1964
cuuauccuacaagccca

SEQ ID NO: 359148 - RNA, 20 nt, Human parainfluenza virus 1 strain Washington/1964
cuucacaguggauaccucag

SEQ ID NO: 359149 - RNA, 14 nt, Human parainfluenza virus 1 strain Washington/1964
cuucauuaucauga

SEQ ID NO: 359150 - RNA, 19 nt, Human parainfluenza virus 1 strain Washington/1964
cuuguaugaagacaaacau

SEQ ID NO: 359151 - RNA, 16 nt, Human parainfluenza virus 1 strain Washington/1964
gaaaaacguagggaca

SEQ ID NO: 359152 - RNA, 18 nt, Human parainfluenza virus 1 strain Washington/1964
gaaaaagggaaaacaaau

SEQ ID NO: 359153 - RNA, 14 nt, Human parainfluenza virus 1 strain Washington/1964
gaaagaaaaggaca

SEQ ID NO: 359154 - RNA, 15 nt, Human parainfluenza virus 1 strain Washington/1964
gaacaaaaaagggaa

SEQ ID NO: 359155 - RNA, 17 nt, Human parainfluenza virus 1 strain Washington/1964
gaacaaaagcaaaaaca

SEQ ID NO: 359156 - RNA, 13 nt, Human parainfluenza virus 1 strain Washington/1964
gaacuccacaaau

SEQ ID NO: 359157 - RNA, 20 nt, Human parainfluenza virus 1 strain Washington/1964
gaacuccacaaaucaacaag

SEQ ID NO: 359158 - RNA, 15 nt, Human parainfluenza virus 1 strain Washington/1964
gaagacaaacaucau

SEQ ID NO: 359159 - RNA, 23 nt, Human parainfluenza virus 1 strain Washington/1964
gaagacaaacaucaugacaguau

SEQ ID NO: 359160 - RNA, 20 nt, Human parainfluenza virus 1 strain Washington/1964
gaagaccacaacaccaaaac

SEQ ID NO: 359161 - RNA, 16 nt, Human parainfluenza virus 1 strain Washington/1964
gaagaggaaaccagca

SEQ ID NO: 359162 - RNA, 21 nt, Human parainfluenza virus 1 strain Washington/1964
gaagccagaucaaaaguaaga

SEQ ID NO: 359163 - RNA, 19 nt, Human parainfluenza virus 1 strain Washington/1964
gaaucaaccaguuauucaa

SEQ ID NO: 359164 - RNA, 21 nt, Human parainfluenza virus 1 strain Washington/1964
gaaucuacaauuucaaccagc

SEQ ID NO: 359165 - RNA, 18 nt, Human parainfluenza virus 1 strain Washington/1964
gaaugacaauucacagau

SEQ ID NO: 359166 - RNA, 14 nt, Human parainfluenza virus 1 strain Washington/1964
gacaaaaaagcaau

SEQ ID NO: 359167 - RNA, 13 nt, Human parainfluenza virus 1 strain Washington/1964
gacaaacaucaug

SEQ ID NO: 359168 - RNA, 22 nt, Human parainfluenza virus 1 strain Washington/1964
gacaauucacagaucagcucaa

SEQ ID NO: 359169 - RNA, 19 nt, Human parainfluenza virus 1 strain Washington/1964
gacacuuguaugaagacaa

SEQ ID NO: 359170 - RNA, 16 nt, Human parainfluenza virus 1 strain Washington/1964
gacagagcaaucucaa

SEQ ID NO: 359171 - RNA, 19 nt, Human parainfluenza virus 1 strain Washington/1964
gacccaacacuauaucaau

SEQ ID NO: 359172 - RNA, 14 nt, Human parainfluenza virus 1 strain Washington/1964
gaccucuaucuggc

SEQ ID NO: 359173 - RNA, 21 nt, Human parainfluenza virus 1 strain Washington/1964
gagacaaaaaugcaaaaauca

SEQ ID NO: 359174 - RNA, 17 nt, Human parainfluenza virus 1 strain Washington/1964
gaggcaccacgaaaaca

SEQ ID NO: 359175 - RNA, 20 nt, Human parainfluenza virus 1 strain Washington/1964
gaggcaccacgaaaacaaga

SEQ ID NO: 359176 - RNA, 16 nt, Human parainfluenza virus 1 strain Washington/1964
gauaacaacaaagaca

SEQ ID NO: 359177 - RNA, 13 nt, Human parainfluenza virus 1 strain Washington/1964
gauacacaacaaa

SEQ ID NO: 359178 - RNA, 17 nt, Human parainfluenza virus 1 strain Washington/1964
gauaccucagcauccaa

SEQ ID NO: 359179 - RNA, 19 nt, Human parainfluenza virus 1 strain Washington/1964
gauaccucagcauccaaaa

SEQ ID NO: 359180 - RNA, 12 nt, Human parainfluenza virus 1 strain Washington/1964
gcaacagcaucc

SEQ ID NO: 359181 - RNA, 17 nt, Human parainfluenza virus 2
aacucauauacuacuua

SEQ ID NO: 359182 - RNA, 16 nt, Human parainfluenza virus 2
aacuucugcaacuaua

SEQ ID NO: 359183 - RNA, 15 nt, Human parainfluenza virus 2
aacuugacaccaaag

SEQ ID NO: 359184 - RNA, 14 nt, Human parainfluenza virus 2
aagaaaaaaucaua

SEQ ID NO: 359185 - RNA, 15 nt, Human parainfluenza virus 2
aagaaaaacauauug

SEQ ID NO: 359186 - RNA, 15 nt, Human parainfluenza virus 2
aagacccaaacaaca

SEQ ID NO: 359187 - RNA, 20 nt, Human parainfluenza virus 2
aagaccucaaaaacugacac

SEQ ID NO: 359188 - RNA, 13 nt, Human parainfluenza virus 2
aagagacacucaa

SEQ ID NO: 359189 - RNA, 13 nt, Human parainfluenza virus 2
aagaguuuacaca

SEQ ID NO: 359190 - RNA, 15 nt, Human parainfluenza virus 2
aagaguuuacacaau

SEQ ID NO: 359191 - RNA, 21 nt, Human parainfluenza virus 2
aagaucacucauguacuauac

SEQ ID NO: 359192 - RNA, 21 nt, Human parainfluenza virus 2
aagccuccagauaccaaugaa

SEQ ID NO: 359193 - RNA, 21 nt, Human parainfluenza virus 2
aaggcagcaucccaccaggug

SEQ ID NO: 359194 - RNA, 16 nt, Human parainfluenza virus 2
aaggcgaguguugcaa

SEQ ID NO: 359195 - RNA, 21 nt, Human parainfluenza virus 2
aaguagauaaaauucuugcaa

SEQ ID NO: 359196 - RNA, 17 nt, Human parainfluenza virus 2
aaguccacuugaacuca

SEQ ID NO: 359197 - RNA, 21 nt, Human parainfluenza virus 2
aauaaccuuuauauaauguaa

SEQ ID NO: 359198 - RNA, 17 nt, Human parainfluenza virus 2
aauagaaccacaaucaa

SEQ ID NO: 359199 - RNA, 18 nt, Human parainfluenza virus 2
aauauaggggucauucaa

SEQ ID NO: 359200 - RNA, 22 nt, Human parainfluenza virus 2
aauauaggggucauucaaucaa

SEQ ID NO: 359201 - RNA, 14 nt, Human parainfluenza virus 2
aauauucagccaug

SEQ ID NO: 359202 - RNA, 18 nt, Human parainfluenza virus 2
aaucacaaaagaccucaa

SEQ ID NO: 359203 - RNA, 15 nt, Human parainfluenza virus 2
aauccaaaccaguug

SEQ ID NO: 359204 - RNA, 21 nt, Human parainfluenza virus 2
aaucuuaaaaaugaaaugacu

SEQ ID NO: 359205 - RNA, 19 nt, Human parainfluenza virus 2
aaucuucccccaagcaaug

SEQ ID NO: 359206 - RNA, 16 nt, Human parainfluenza virus 2
aaugacuagucucaag

SEQ ID NO: 359207 - RNA, 21 nt, Human parainfluenza virus 2
aaugaggugcagucacacaag

SEQ ID NO: 359208 - RNA, 12 nt, Human parainfluenza virus 2
aauuaacauuaa

SEQ ID NO: 359209 - RNA, 14 nt, Human parainfluenza virus 2
aauugucaacacca

SEQ ID NO: 359210 - RNA, 23 nt, Human parainfluenza virus 2
acaacaauuaaaaucauggaucc

SEQ ID NO: 359211 - RNA, 22 nt, Human parainfluenza virus 2
acaacaccucacaucaauagaa

SEQ ID NO: 359212 - RNA, 18 nt, Human parainfluenza virus 2
acaaccagauauacacau

SEQ ID NO: 359213 - RNA, 14 nt, Human parainfluenza virus 2
acaagagacacuca

SEQ ID NO: 359214 - RNA, 22 nt, Human parainfluenza virus 2
acaauguuccaguaguaauugc

SEQ ID NO: 359215 - RNA, 16 nt, Human parainfluenza virus 2
acaauugucaacacca

SEQ ID NO: 359216 - RNA, 20 nt, Human parainfluenza virus 2
acacaauagagaaaaucuag

SEQ ID NO: 359217 - RNA, 13 nt, Human parainfluenza virus 2
acacacucaucca

SEQ ID NO: 359218 - RNA, 15 nt, Human parainfluenza virus 2
acacacucauccaga

SEQ ID NO: 359219 - RNA, 21 nt, Human parainfluenza virus 2
acacaguauaauuuaaucaca

SEQ ID NO: 359220 - RNA, 18 nt, Human parainfluenza virus 2
acacauccacaucacuca

SEQ ID NO: 359221 - RNA, 13 nt, Human parainfluenza virus 2
acaccacugagca

SEQ ID NO: 359222 - RNA, 19 nt, Human parainfluenza virus 2
acaccagaaucauacaauc

SEQ ID NO: 359223 - RNA, 14 nt, Human parainfluenza virus 2
acacucaacaugca

SEQ ID NO: 359224 - RNA, 15 nt, Human parainfluenza virus 2
acacucaacaugcau

SEQ ID NO: 359225 - RNA, 15 nt, Human parainfluenza virus 2
acacucauccagaca

SEQ ID NO: 359226 - RNA, 19 nt, Human parainfluenza virus 2
acagaucccaaaaucauag

SEQ ID NO: 359227 - RNA, 19 nt, Human parainfluenza virus 2
acagccgaaccaugcucaa

SEQ ID NO: 359228 - RNA, 14 nt, Human parainfluenza virus 2
acagcugccacuca

SEQ ID NO: 359229 - RNA, 19 nt, Human parainfluenza virus 2
acaucacucagagauacag

SEQ ID NO: 359230 - RNA, 13 nt, Human parainfluenza virus 2
acauccacaucac

SEQ ID NO: 359231 - RNA, 14 nt, Human parainfluenza virus 2
acauccacaucacu

SEQ ID NO: 359232 - RNA, 20 nt, Human parainfluenza virus 2
acauccacaucacucagaga

SEQ ID NO: 359233 - RNA, 18 nt, Human parainfluenza virus 2
accaaaagacccaaacaa

SEQ ID NO: 359234 - RNA, 16 nt, Human parainfluenza virus 2
accagaaucauacaau

SEQ ID NO: 359235 - RNA, 18 nt, Human parainfluenza virus 2
accagaaucauacaauca

SEQ ID NO: 359236 - RNA, 19 nt, Human parainfluenza virus 2
accagauauacacauccac

SEQ ID NO: 359237 - RNA, 17 nt, Human parainfluenza virus 2
accaugcucaaccaaaa

SEQ ID NO: 359238 - RNA, 17 nt, Human parainfluenza virus 2
accuaaucuucccccaa

SEQ ID NO: 359239 - RNA, 21 nt, Human parainfluenza virus 2
accucaaaaacugacacagcu

SEQ ID NO: 359240 - RNA, 14 nt, Human parainfluenza virus 2
accuccacaccaga

SEQ ID NO: 359241 - RNA, 15 nt, Human parainfluenza virus 2
accuccacaccagaa

SEQ ID NO: 359242 - RNA, 15 nt, Human parainfluenza virus 2
uagucacuauacaau

SEQ ID NO: 359243 - RNA, 15 nt, Human parainfluenza virus 2
uauaagaacucauga

SEQ ID NO: 359244 - RNA, 13 nt, Human parainfluenza virus 2
uauacacauccac

SEQ ID NO: 359245 - RNA, 22 nt, Human parainfluenza virus 2
uauacugaugguggugcuagcu

SEQ ID NO: 359246 - RNA, 21 nt, Human parainfluenza virus 2
uauaggggucauucaaucaaa

SEQ ID NO: 359247 - RNA, 24 nt, Human parainfluenza virus 2
uaucauagguccgaacugaucaau

SEQ ID NO: 359248 - RNA, 17 nt, Human parainfluenza virus 2
uaugaagcaauccuuca

SEQ ID NO: 359249 - RNA, 17 nt, Human parainfluenza virus 2
uauugauuucaauggau

SEQ ID NO: 359250 - RNA, 19 nt, Human parainfluenza virus 2
uauuuaagaaaaacauauu

SEQ ID NO: 359251 - RNA, 20 nt, Human parainfluenza virus 2
uauuuaagaaaaacauauug

SEQ ID NO: 359252 - RNA, 17 nt, Human parainfluenza virus 2
ucaaaaacugacacagc

SEQ ID NO: 359253 - RNA, 19 nt, Human parainfluenza virus 2
ucaaagauaagaucacuca

SEQ ID NO: 359254 - RNA, 12 nt, Human parainfluenza virus 2
ucaacaugcauc

SEQ ID NO: 359255 - RNA, 12 nt, Human parainfluenza virus 2
ucaaccaaaaga

SEQ ID NO: 359256 - RNA, 15 nt, Human parainfluenza virus 2
ucaaccaaaagaccc

SEQ ID NO: 359257 - RNA, 19 nt, Human parainfluenza virus 2
ucaacguucaggccaaaau

SEQ ID NO: 359258 - RNA, 15 nt, Human parainfluenza virus 2
ucaauggaugaacua

SEQ ID NO: 359259 - RNA, 15 nt, Human parainfluenza virus 2
ucacacgaaagccug

SEQ ID NO: 359260 - RNA, 12 nt, Human parainfluenza virus 2
ucagccaugcau

SEQ ID NO: 359261 - RNA, 14 nt, Human parainfluenza virus 2
ucagccaugcauca

SEQ ID NO: 359262 - RNA, 15 nt, Human parainfluenza virus 2
ucagccaugcaucac

SEQ ID NO: 359263 - RNA, 21 nt, Human parainfluenza virus 2
ucauacaaccagauauacaca

SEQ ID NO: 359264 - RNA, 23 nt, Human parainfluenza virus 2
ucauacuacuagucacuauacaa

SEQ ID NO: 359265 - RNA, 12 nt, Human parainfluenza virus 2
ucauccagacaa

SEQ ID NO: 359266 - RNA, 21 nt, Human parainfluenza virus 2
ucauggccgaggaaccaacau

SEQ ID NO: 359267 - RNA, 18 nt, Human parainfluenza virus 2
ucauuaccagcagaucca

SEQ ID NO: 359268 - RNA, 21 nt, Human parainfluenza virus 2
ucauuuacuguuguaauucaa

SEQ ID NO: 359269 - RNA, 22 nt, Human parainfluenza virus 2
ucauuuacuguuguaauucaau

SEQ ID NO: 359270 - RNA, 15 nt, Human parainfluenza virus 2
uccaaaccccaaaca

SEQ ID NO: 359271 - RNA, 16 nt, Human parainfluenza virus 2
uccaaucaagauccag

SEQ ID NO: 359272 - RNA, 20 nt, Human parainfluenza virus 2
uccacaccagaaucauacaa

SEQ ID NO: 359273 - RNA, 12 nt, Human parainfluenza virus 2
uccauccaaaaa

SEQ ID NO: 359274 - RNA, 14 nt, Human parainfluenza virus 2
ucccccaagcaaug

SEQ ID NO: 359275 - RNA, 24 nt, Human parainfluenza virus 2
ucccuuacuccguuuccaauacaa

SEQ ID NO: 359276 - RNA, 16 nt, Human parainfluenza virus 2
uccguuuccaauacaa

SEQ ID NO: 359277 - RNA, 18 nt, Human parainfluenza virus 2
uccugaaguccacuugaa

SEQ ID NO: 359278 - RNA, 20 nt, Human parainfluenza virus 2
ucuaacaaaaaaacuaaacg

SEQ ID NO: 359279 - RNA, 15 nt, Human parainfluenza virus 2
ucuaucuuaugcaau

SEQ ID NO: 359280 - RNA, 17 nt, Human parainfluenza virus 2
ucucaaugucauacaac

SEQ ID NO: 359281 - RNA, 21 nt, Human parainfluenza virus 2
ucucagacagaucccaaaauc

SEQ ID NO: 359282 - RNA, 18 nt, Human parainfluenza virus 2
ucucuuagaaaaccugau

SEQ ID NO: 359283 - RNA, 19 nt, Human parainfluenza virus 2
ucuuauauaagaacacagu

SEQ ID NO: 359284 - RNA, 22 nt, Human parainfluenza virus 2
ucuucgccuucagacuguagaa

SEQ ID NO: 359285 - RNA, 17 nt, Human parainfluenza virus 2
ugaagacuccagauuca

SEQ ID NO: 359286 - RNA, 13 nt, Human parainfluenza virus 2
ugaagcaauccuu

SEQ ID NO: 359287 - RNA, 15 nt, Human parainfluenza virus 2
ugagauacuccuucc

SEQ ID NO: 359288 - RNA, 20 nt, Human parainfluenza virus 2
ugauagcguaguacaauuua

SEQ ID NO: 359289 - RNA, 16 nt, Human parainfluenza virus 2
ugauauugauuucaau

SEQ ID NO: 359290 - RNA, 22 nt, Human parainfluenza virus 2
ugaucuugacauuucugaaaua

SEQ ID NO: 359291 - RNA, 17 nt, Human parainfluenza virus 2
ugauuucaauggaugaa

SEQ ID NO: 359292 - RNA, 15 nt, Human parainfluenza virus 2
ugcaacuauaaucaa

SEQ ID NO: 359293 - RNA, 19 nt, Human parainfluenza virus 2
ugcagcggagacaaaaucc

SEQ ID NO: 359294 - RNA, 22 nt, Human parainfluenza virus 2
ugcaucaccugcauccaaugau

SEQ ID NO: 359295 - RNA, 17 nt, Human parainfluenza virus 2
ugcauccaaucaagauc

SEQ ID NO: 359296 - RNA, 18 nt, Human parainfluenza virus 2
ugccacucacacacucau

SEQ ID NO: 359297 - RNA, 21 nt, Human parainfluenza virus 2
ugccacucacacacucaucca

SEQ ID NO: 359298 - RNA, 20 nt, Human parainfluenza virus 2
ugccauugcuggagaucaac

SEQ ID NO: 359299 - RNA, 15 nt, Human parainfluenza virus 2
ugccuauaauaucau

SEQ ID NO: 359300 - RNA, 21 nt, Human parainfluenza virus 2
ugcuggagaucaacuacuuaa

SEQ ID NO: 359301 - RNA, 16 nt, Human parainfluenza virus 2
uuaagaaaaacauauu

SEQ ID NO: 359302 - RNA, 18 nt, Human parainfluenza virus 2
uugacauuucugaaauaa

SEQ ID NO: 359303 - RNA, 13 nt, Human parainfluenza virus 2
uugcaaaugacug

SEQ ID NO: 359304 - RNA, 15 nt, Human parainfluenza virus 2
uuguaauucaaucuu

SEQ ID NO: 359305 - RNA, 20 nt, Human parainfluenza virus 2
accuccacaccagaaucaua

SEQ ID NO: 359306 - RNA, 16 nt, Human parainfluenza virus 2
acgaaagccugaaucc

SEQ ID NO: 359307 - RNA, 16 nt, Human parainfluenza virus 2
acguucaggccaaaau

SEQ ID NO: 359308 - RNA, 17 nt, Human parainfluenza virus 2
acguucaggccaaaaua

SEQ ID NO: 359309 - RNA, 16 nt, Human parainfluenza virus 2
acuaacuuugaugcag

SEQ ID NO: 359310 - RNA, 19 nt, Human parainfluenza virus 2
acucacacacucauccaga

SEQ ID NO: 359311 - RNA, 16 nt, Human parainfluenza virus 2
acucauauacuacuua

SEQ ID NO: 359312 - RNA, 17 nt, Human parainfluenza virus 2
acucauccagacaaauc

SEQ ID NO: 359313 - RNA, 15 nt, Human parainfluenza virus 2
acuccagauucaaua

SEQ ID NO: 359314 - RNA, 17 nt, Human parainfluenza virus 2
acuccagauucaauaau

SEQ ID NO: 359315 - RNA, 18 nt, Human parainfluenza virus 2
acuccagauucaauaaua

SEQ ID NO: 359316 - RNA, 18 nt, Human parainfluenza virus 2
acuccguuuccaauacaa

SEQ ID NO: 359317 - RNA, 21 nt, Human parainfluenza virus 2
acugauuaccaagauguuauc

SEQ ID NO: 359318 - RNA, 17 nt, Human parainfluenza virus 2
acuguuguaauucaauc

SEQ ID NO: 359319 - RNA, 23 nt, Human parainfluenza virus 2
acuuaauauaggggucauucaau

SEQ ID NO: 359320 - RNA, 15 nt, Human parainfluenza virus 2
acuugacaccaaaga

SEQ ID NO: 359321 - RNA, 19 nt, Human parainfluenza virus 2
agaauagaaccacaaucaa

SEQ ID NO: 359322 - RNA, 14 nt, Human parainfluenza virus 2
agaaucauacaauc

SEQ ID NO: 359323 - RNA, 23 nt, Human parainfluenza virus 2
agacacucaacaugcauccaauc

SEQ ID NO: 359324 - RNA, 17 nt, Human parainfluenza virus 2
agacccaaacaacaccu

SEQ ID NO: 359325 - RNA, 17 nt, Human parainfluenza virus 2
agacuccauccauccaa

SEQ ID NO: 359326 - RNA, 19 nt, Human parainfluenza virus 2
agacuccauccauccaaaa

SEQ ID NO: 359327 - RNA, 12 nt, Human parainfluenza virus 2
agagacacucaa

SEQ ID NO: 359328 - RNA, 21 nt, Human parainfluenza virus 2
agagauacagcugccacucac

SEQ ID NO: 359329 - RNA, 23 nt, Human parainfluenza virus 2
agauaaccuccacaccagaauca

SEQ ID NO: 359330 - RNA, 14 nt, Human parainfluenza virus 2
agaucaacuacuua

SEQ ID NO: 359331 - RNA, 15 nt, Human parainfluenza virus 2
agaucaacuacuuaa

SEQ ID NO: 359332 - RNA, 22 nt, Human parainfluenza virus 2
agauccaacuucacccagucaa

SEQ ID NO: 359333 - RNA, 15 nt, Human parainfluenza virus 2
agauccagacuccau

SEQ ID NO: 359334 - RNA, 23 nt, Human parainfluenza virus 2
agauccagacuccauccauccaa

SEQ ID NO: 359335 - RNA, 21 nt, Human parainfluenza virus 2
agauucugcuguuuuucccau

SEQ ID NO: 359336 - RNA, 14 nt, Human parainfluenza virus 2
agccgaaccaugcu

SEQ ID NO: 359337 - RNA, 17 nt, Human parainfluenza virus 2
agccgaaccaugcucaa

SEQ ID NO: 359338 - RNA, 16 nt, Human parainfluenza virus 2
agccuccagauaccaa

SEQ ID NO: 359339 - RNA, 14 nt, Human parainfluenza virus 2
agcggagacaaaau

SEQ ID NO: 359340 - RNA, 18 nt, Human parainfluenza virus 2
agcggagacaaaauccaa

SEQ ID NO: 359341 - RNA, 22 nt, Human parainfluenza virus 2
agcuugauccacucaacauaua

SEQ ID NO: 359342 - RNA, 14 nt, Human parainfluenza virus 2
aggcagcaucccac

SEQ ID NO: 359343 - RNA, 21 nt, Human parainfluenza virus 2
aggccaaaauauucagccaug

SEQ ID NO: 359344 - RNA, 23 nt, Human parainfluenza virus 2
aggugucacagcuguucuaacua

SEQ ID NO: 359345 - RNA, 15 nt, Human parainfluenza virus 2
aguagauuucuuccu

SEQ ID NO: 359346 - RNA, 20 nt, Human parainfluenza virus 2
agucacuauacaauaaucaa

SEQ ID NO: 359347 - RNA, 14 nt, Human parainfluenza virus 2
aguccaaaccccaa

SEQ ID NO: 359348 - RNA, 18 nt, Human parainfluenza virus 2
aguccaaaccccaaacac

SEQ ID NO: 359349 - RNA, 23 nt, Human parainfluenza virus 2
agucuauauauguccacaauuga

SEQ ID NO: 359350 - RNA, 21 nt, Human parainfluenza virus 2
aguggaggcuucacagccgaa

SEQ ID NO: 359351 - RNA, 15 nt, Human parainfluenza virus 2
aguguugcaacuaug

SEQ ID NO: 359352 - RNA, 19 nt, Human parainfluenza virus 2
aguuuacacaauguuccag

SEQ ID NO: 359353 - RNA, 20 nt, Human parainfluenza virus 2
auaagaucacucauguacua

SEQ ID NO: 359354 - RNA, 16 nt, Human parainfluenza virus 2
auacaccacugagcaa

SEQ ID NO: 359355 - RNA, 19 nt, Human parainfluenza virus 2
auacagcugccacucacac

SEQ ID NO: 359356 - RNA, 13 nt, Human parainfluenza virus 2
auacuacuaguca

SEQ ID NO: 359357 - RNA, 19 nt, Human parainfluenza virus 2
auacuacuagucacuauac

SEQ ID NO: 359358 - RNA, 15 nt, Human parainfluenza virus 2
auacuccuuccugaa

SEQ ID NO: 359359 - RNA, 16 nt, Human parainfluenza virus 2
auagaaccacaaucaa

SEQ ID NO: 359360 - RNA, 18 nt, Human parainfluenza virus 2
auagaugcucagucuucu

SEQ ID NO: 359361 - RNA, 21 nt, Human parainfluenza virus 2
auagucaaacacaaacucaua

SEQ ID NO: 359362 - RNA, 20 nt, Human parainfluenza virus 2
auauacacauccacaucacu

SEQ ID NO: 359363 - RNA, 16 nt, Human parainfluenza virus 2
auauaggggucauuca

SEQ ID NO: 359364 - RNA, 18 nt, Human parainfluenza virus 2
auauucagccaugcauca

SEQ ID NO: 359365 - RNA, 22 nt, Human parainfluenza virus 2
auauucagccaugcaucaccug

SEQ ID NO: 359366 - RNA, 23 nt, Human parainfluenza virus 2
auauucagccaugcaucaccugc

SEQ ID NO: 359367 - RNA, 18 nt, Human parainfluenza virus 2
aucaaagauaagaucacu

SEQ ID NO: 359368 - RNA, 18 nt, Human parainfluenza virus 2
aucaacaauuuuagucaa

SEQ ID NO: 359369 - RNA, 15 nt, Human parainfluenza virus 2
aucaagauccagacu

SEQ ID NO: 359370 - RNA, 22 nt, Human parainfluenza virus 2
aucaagucauacuacuagucac

SEQ ID NO: 359371 - RNA, 23 nt, Human parainfluenza virus 2
aucacacgaaagccugaauccaa

SEQ ID NO: 359372 - RNA, 18 nt, Human parainfluenza virus 2
aucacucauguacuauac

SEQ ID NO: 359373 - RNA, 21 nt, Human parainfluenza virus 2
aucagauaaccuccacaccag

SEQ ID NO: 359374 - RNA, 21 nt, Human parainfluenza virus 2
aucauagguccgaacugauca

SEQ ID NO: 359375 - RNA, 23 nt, Human parainfluenza virus 2
aucauaguccaaaccccaaacac

SEQ ID NO: 359376 - RNA, 13 nt, Human parainfluenza virus 2
aucauuaccagca

SEQ ID NO: 359377 - RNA, 19 nt, Human parainfluenza virus 2
aucauucggaaacaauucu

SEQ ID NO: 359378 - RNA, 16 nt, Human parainfluenza virus 2
auccacaucacucaga

SEQ ID NO: 359379 - RNA, 14 nt, Human parainfluenza virus 2
auccagacaaauca

SEQ ID NO: 359380 - RNA, 14 nt, Human parainfluenza virus 2
auccauccaaaaac

SEQ ID NO: 359381 - RNA, 15 nt, Human parainfluenza virus 2
auccauccaaaaaca

SEQ ID NO: 359382 - RNA, 15 nt, Human parainfluenza virus 2
augaauuaauccaug

SEQ ID NO: 359383 - RNA, 14 nt, Human parainfluenza virus 2
augcaacaucacca

SEQ ID NO: 359384 - RNA, 20 nt, Human parainfluenza virus 2
augcagcuugcaaaugacug

SEQ ID NO: 359385 - RNA, 17 nt, Human parainfluenza virus 2
augcucaaccaaaagac

SEQ ID NO: 359386 - RNA, 12 nt, Human parainfluenza virus 2
auggaugaacua

SEQ ID NO: 359387 - RNA, 18 nt, Human parainfluenza virus 2
auguaacaauacuauuaa

SEQ ID NO: 359388 - RNA, 17 nt, Human parainfluenza virus 2
auuaagauuaugauaua

SEQ ID NO: 359389 - RNA, 18 nt, Human parainfluenza virus 2
auuaauccaugcuggacu

SEQ ID NO: 359390 - RNA, 20 nt, Human parainfluenza virus 2
auucagccaugcaucaccug

SEQ ID NO: 359391 - RNA, 21 nt, Human parainfluenza virus 2
auugaaugaagacuccagauu

SEQ ID NO: 359392 - RNA, 14 nt, Human parainfluenza virus 2
auugcuaccuaauc

SEQ ID NO: 359393 - RNA, 19 nt, Human parainfluenza virus 2
auugucaacaccaagaaac

SEQ ID NO: 359394 - RNA, 19 nt, Human parainfluenza virus 2
auuuaaagaaaaaaucaua

SEQ ID NO: 359395 - RNA, 20 nt, Human parainfluenza virus 2
auuuaaguauaauaguuuaa

SEQ ID NO: 359396 - RNA, 19 nt, Human parainfluenza virus 2
auuuaaucacaaaagaccu

SEQ ID NO: 359397 - RNA, 19 nt, Human parainfluenza virus 2
auuuacuguuguaauucaa

SEQ ID NO: 359398 - RNA, 21 nt, Human parainfluenza virus 2
auuuacuguuguaauucaauc

SEQ ID NO: 359399 - RNA, 14 nt, Human parainfluenza virus 2
caaacacaaacuca

SEQ ID NO: 359400 - RNA, 17 nt, Human parainfluenza virus 2
caaacuagacucacauc

SEQ ID NO: 359401 - RNA, 22 nt, Human parainfluenza virus 2
caaagauaagaucacucaugua

SEQ ID NO: 359402 - RNA, 11 nt, Human parainfluenza virus 2
caaaugacugc

SEQ ID NO: 359403 - RNA, 18 nt, Human parainfluenza virus 2
caacaaaaaggaucacac

SEQ ID NO: 359404 - RNA, 22 nt, Human parainfluenza virus 2
caacaaugauuauaagaacuca

SEQ ID NO: 359405 - RNA, 15 nt, Human parainfluenza virus 2
caacaccaagaaaca

SEQ ID NO: 359406 - RNA, 21 nt, Human parainfluenza virus 2
caacaccucacaucaauagaa

SEQ ID NO: 359407 - RNA, 15 nt, Human parainfluenza virus 2
caacauacaccacug

SEQ ID NO: 359408 - RNA, 15 nt, Human parainfluenza virus 2
caaccaaaagaccca

SEQ ID NO: 359409 - RNA, 15 nt, Human parainfluenza virus 2
caacuucugcaacua

SEQ ID NO: 359410 - RNA, 16 nt, Human parainfluenza virus 2
caagaaagauuuaaca

SEQ ID NO: 359411 - RNA, 19 nt, Human parainfluenza virus 2
caagucauacuacuaguca

SEQ ID NO: 359412 - RNA, 16 nt, Human parainfluenza virus 2
caauagucaaacacaa

SEQ ID NO: 359413 - RNA, 23 nt, Human parainfluenza virus 2
caaugaauaugaauauaucucuu

SEQ ID NO: 359414 - RNA, 22 nt, Human parainfluenza virus 2
caaugauuauaagaacucauga

SEQ ID NO: 359415 - RNA, 21 nt, Human parainfluenza virus 2
caauggaacaugcaacaucac

SEQ ID NO: 359416 - RNA, 18 nt, Human parainfluenza virus 2
caauggaugaacuagcua

SEQ ID NO: 359417 - RNA, 19 nt, Human parainfluenza virus 2
caaugucauacaaccagau

SEQ ID NO: 359418 - RNA, 17 nt, Human parainfluenza virus 2
caauuaaaaucauggau

SEQ ID NO: 359419 - RNA, 20 nt, Human parainfluenza virus 2
caauuuuagucaacugauua

SEQ ID NO: 359420 - RNA, 17 nt, Human parainfluenza virus 2
cacaagagacacucaac

SEQ ID NO: 359421 - RNA, 21 nt, Human parainfluenza virus 2
cacaaucaagucauacuacua

SEQ ID NO: 359422 - RNA, 20 nt, Human parainfluenza virus 2
cacaauugucaacaccaaga

SEQ ID NO: 359423 - RNA, 16 nt, Human parainfluenza virus 2
cacauccacaucacuc

SEQ ID NO: 359424 - RNA, 19 nt, Human parainfluenza virus 2
caccaagaaacaaccacag

SEQ ID NO: 359425 - RNA, 17 nt, Human parainfluenza virus 2
caccaggugucacagcu

SEQ ID NO: 359426 - RNA, 14 nt, Human parainfluenza virus 2
cacucaacaugcau

SEQ ID NO: 359427 - RNA, 17 nt, Human parainfluenza virus 2
cacucacacacucaucc

SEQ ID NO: 359428 - RNA, 19 nt, Human parainfluenza virus 2
cacucauguacuauacuga

SEQ ID NO: 359429 - RNA, 19 nt, Human parainfluenza virus 2
cacucucaucaacaaaaag

SEQ ID NO: 359430 - RNA, 22 nt, Human parainfluenza virus 2
cacuugaacucaccaauaguca

SEQ ID NO: 359431 - RNA, 23 nt, Human parainfluenza virus 2
cacuugaacucaccaauagucaa

SEQ ID NO: 359432 - RNA, 16 nt, Human parainfluenza virus 2
cagaaucauacaauca

SEQ ID NO: 359433 - RNA, 15 nt, Human parainfluenza virus 2
cagacuccauccauc

SEQ ID NO: 359434 - RNA, 22 nt, Human parainfluenza virus 2
cagacuccauccauccaaaaac

SEQ ID NO: 359435 - RNA, 20 nt, Human parainfluenza virus 2
cagauaaccuccacaccaga

SEQ ID NO: 359436 - RNA, 16 nt, Human parainfluenza virus 2
cagcaucccaccaggu

SEQ ID NO: 359437 - RNA, 21 nt, Human parainfluenza virus 2
cagcggagacaaaauccaaac

SEQ ID NO: 359438 - RNA, 21 nt, Human parainfluenza virus 2
cauaguccaaaccccaaacac

SEQ ID NO: 359439 - RNA, 15 nt, Human parainfluenza virus 2
caucaccagucuaga

SEQ ID NO: 359440 - RNA, 16 nt, Human parainfluenza virus 2
cauccaaugauaguau

SEQ ID NO: 359441 - RNA, 22 nt, Human parainfluenza virus 2
caucuuuguuauguacacugga

SEQ ID NO: 359442 - RNA, 20 nt, Human parainfluenza virus 2
caugcaacaucaccagucua

SEQ ID NO: 359443 - RNA, 14 nt, Human parainfluenza virus 2
cauguacuauacug

SEQ ID NO: 359444 - RNA, 16 nt, Human parainfluenza virus 2
cauuaccagcagaucc

SEQ ID NO: 359445 - RNA, 23 nt, Human parainfluenza virus 2
cauugcuggagaucaacuacuua

SEQ ID NO: 359446 - RNA, 17 nt, Human parainfluenza virus 2
ccaaaagacccaaacaa

SEQ ID NO: 359447 - RNA, 20 nt, Human parainfluenza virus 2
ccaagcaauggaacaugcaa

SEQ ID NO: 359448 - RNA, 23 nt, Human parainfluenza virus 2
ccacaccagaaucauacaaucau

SEQ ID NO: 359449 - RNA, 21 nt, Human parainfluenza virus 2
ccacagccgaaccaugcucaa

SEQ ID NO: 359450 - RNA, 15 nt, Human parainfluenza virus 2
ccacucacacacuca

SEQ ID NO: 359451 - RNA, 17 nt, Human parainfluenza virus 2
ccagauaccaaugaaua

SEQ ID NO: 359452 - RNA, 15 nt, Human parainfluenza virus 2
ccagauauacacauc

SEQ ID NO: 359453 - RNA, 18 nt, Human parainfluenza virus 2
ccagauauacacauccac

SEQ ID NO: 359454 - RNA, 12 nt, Human parainfluenza virus 2
ccagcagaucca

SEQ ID NO: 359455 - RNA, 15 nt, Human parainfluenza virus 2
ccauaugaagcaauc

SEQ ID NO: 359456 - RNA, 14 nt, Human parainfluenza virus 2
ccaugcucaaccaa

SEQ ID NO: 359457 - RNA, 15 nt, Human parainfluenza virus 2
ccaugcucaaccaaa

SEQ ID NO: 359458 - RNA, 16 nt, Human parainfluenza virus 2
ccaugcuggacuggga

SEQ ID NO: 359459 - RNA, 14 nt, Human parainfluenza virus 2
ccuccacaccagaa

SEQ ID NO: 359460 - RNA, 21 nt, Human parainfluenza virus 2
ccuuuauauaauguaacaaua

SEQ ID NO: 359461 - RNA, 21 nt, Human parainfluenza virus 2
cgaggaaccaacauacaccac

SEQ ID NO: 359462 - RNA, 22 nt, Human parainfluenza virus 2
cuaacuagugcagcggagacaa

SEQ ID NO: 359463 - RNA, 18 nt, Human parainfluenza virus 2
cuaacuuugaugcagcuu

SEQ ID NO: 359464 - RNA, 23 nt, Human parainfluenza virus 2
cuaccuaaucuucccccaagcaa

SEQ ID NO: 359465 - RNA, 15 nt, Human parainfluenza virus 2
cuacuagucacuaua

SEQ ID NO: 359466 - RNA, 14 nt, Human parainfluenza virus 2
cuagucacuauaca

SEQ ID NO: 359467 - RNA, 12 nt, Human parainfluenza virus 2
cucaaccaaaag

SEQ ID NO: 359468 - RNA, 13 nt, Human parainfluenza virus 2
cucaaccaaaaga

SEQ ID NO: 359469 - RNA, 16 nt, Human parainfluenza virus 2
cucauauacuacuuau

SEQ ID NO: 359470 - RNA, 16 nt, Human parainfluenza virus 2
cucaugauaguuuuau

SEQ ID NO: 359471 - RNA, 21 nt, Human parainfluenza virus 2
cuccacaccagaaucauacaa

SEQ ID NO: 359472 - RNA, 14 nt, Human parainfluenza virus 2
cucuaucuuaugca

SEQ ID NO: 359473 - RNA, 16 nt, Human parainfluenza virus 2
cucuaucuuaugcaau

SEQ ID NO: 359474 - RNA, 17 nt, Human parainfluenza virus 2
cucucaucaacaaaaag

SEQ ID NO: 359475 - RNA, 23 nt, Human parainfluenza virus 2
cucucuaucuuaugcaauaguua

SEQ ID NO: 359476 - RNA, 14 nt, Human parainfluenza virus 2
cugagcaaguugau

SEQ ID NO: 359477 - RNA, 16 nt, Human parainfluenza virus 2
cugaucaaucuaacaa

SEQ ID NO: 359478 - RNA, 17 nt, Human parainfluenza virus 2
cugccacucacacacuc

SEQ ID NO: 359479 - RNA, 20 nt, Human parainfluenza virus 2
cuggacugggaacaguagau

SEQ ID NO: 359480 - RNA, 15 nt, Human parainfluenza virus 2
cuguuguaauucaau

SEQ ID NO: 359481 - RNA, 19 nt, Human parainfluenza virus 2
cuucccccaagcaauggaa

SEQ ID NO: 359482 - RNA, 12 nt, Human parainfluenza virus 2
cuucugcaacua

SEQ ID NO: 359483 - RNA, 13 nt, Human parainfluenza virus 2
cuucuuuaggcaa

SEQ ID NO: 359484 - RNA, 19 nt, Human parainfluenza virus 2
gaaccaugcucaaccaaaa

SEQ ID NO: 359485 - RNA, 15 nt, Human parainfluenza virus 2
gaaucauacaaucau

SEQ ID NO: 359486 - RNA, 20 nt, Human parainfluenza virus 2
gaaugaagacuccagauuca

SEQ ID NO: 359487 - RNA, 11 nt, Human parainfluenza virus 2
gacccaaacaa

SEQ ID NO: 359488 - RNA, 19 nt, Human parainfluenza virus 2
gaccucaaaaacugacaca

SEQ ID NO: 359489 - RNA, 12 nt, Human parainfluenza virus 2
gacucacaucau

SEQ ID NO: 359490 - RNA, 16 nt, Human parainfluenza virus 2
gacuccagauucaaua

SEQ ID NO: 359491 - RNA, 17 nt, Human parainfluenza virus 2
gacuccauccauccaaa

SEQ ID NO: 359492 - RNA, 18 nt, Human parainfluenza virus 2
gacuccauccauccaaaa

SEQ ID NO: 359493 - RNA, 19 nt, Human parainfluenza virus 2
gagaauagaaccacaauca

SEQ ID NO: 359494 - RNA, 17 nt, Human parainfluenza virus 2
gaguuuacacaauguuc

SEQ ID NO: 359495 - RNA, 19 nt, Human parainfluenza virus 2
gauaaccuccacaccagaa

SEQ ID NO: 359496 - RNA, 16 nt, Human parainfluenza virus 2
gauacagcugccacuc

SEQ ID NO: 359497 - RNA, 20 nt, Human parainfluenza virus 2
gauauacacauccacaucac

SEQ ID NO: 359498 - RNA, 19 nt, Human parainfluenza virus 2
gauauugauuucaauggau

SEQ ID NO: 359499 - RNA, 13 nt, Human parainfluenza virus 2
gauuuaacaggca

SEQ ID NO: 359500 - RNA, 13 nt, Human parainfluenza virus 2
gcaucccaccagg

SEQ ID NO: 359501 - RNA, 14 nt, Human parainfluenza virus 2
gcaucccaccaggu

SEQ ID NO: 359502 - RNA, 13 nt, Human parainfluenza virus 2
gccaaaauauuca

SEQ ID NO: 359503 - RNA, 17 nt, Human parainfluenza virus 2
gccacucacacacucau

SEQ ID NO: 359504 - RNA, 21 nt, Human parainfluenza virus 2
gccacucacacacucauccag

SEQ ID NO: 359505 - RNA, 16 nt, Human parainfluenza virus 2
gcccacaauugucaac

SEQ ID NO: 359506 - RNA, 21 nt, Human parainfluenza virus 2
gccgaaccaugcucaaccaaa

SEQ ID NO: 359507 - RNA, 20 nt, Human parainfluenza virus 2
gccgaggaaccaacauacac

SEQ ID NO: 359508 - RNA, 23 nt, Human parainfluenza virus 2
gcucaaccaaaagacccaaacaa

SEQ ID NO: 359509 - RNA, 19 nt, Human parainfluenza virus 2
gcuguuuuucccauaugaa

SEQ ID NO: 359510 - RNA, 14 nt, Human parainfluenza virus 2
gcuucacagccgaa

SEQ ID NO: 359511 - RNA, 20 nt, Human parainfluenza virus 2
ggcauaaaacuaacuuugau

SEQ ID NO: 359512 - RNA, 17 nt, Human parainfluenza virus 2
aaaaucauaguccaaac

SEQ ID NO: 359513 - RNA, 18 nt, Human parainfluenza virus 2
aaaaugaaaugacuaguc

SEQ ID NO: 359514 - RNA, 23 nt, Human parainfluenza virus 2
aaaauuuaaaggacacaauagag

SEQ ID NO: 359515 - RNA, 13 nt, Human parainfluenza virus 2
aaacacagcagca

SEQ ID NO: 359516 - RNA, 18 nt, Human parainfluenza virus 2
aaacuagacucacaucau

SEQ ID NO: 359517 - RNA, 14 nt, Human parainfluenza virus 2
aaagacccaaacaa

SEQ ID NO: 359518 - RNA, 19 nt, Human parainfluenza virus 2
aaauaagcccccuucacaa

SEQ ID NO: 359519 - RNA, 23 nt, Human parainfluenza virus 2
aaauccaaaccaguugcugcugg

SEQ ID NO: 359520 - RNA, 15 nt, Human parainfluenza virus 2
aaauucuugcaacuu

SEQ ID NO: 359521 - RNA, 13 nt, Human parainfluenza virus 2
aacaauacuauua

SEQ ID NO: 359522 - RNA, 23 nt, Human parainfluenza virus 2
aacacaguauaauuuaaucacaa

SEQ ID NO: 359523 - RNA, 21 nt, Human parainfluenza virus 2
aacaccaagaaacaaccacag

SEQ ID NO: 359524 - RNA, 13 nt, Human parainfluenza virus 2
aacauauugauuu

SEQ ID NO: 359525 - RNA, 17 nt, Human parainfluenza virus 2
aacaugcauccaaucaa

SEQ ID NO: 359526 - RNA, 19 nt, Human parainfluenza virus 2
aaccaaaagacccaaacaa

SEQ ID NO: 359527 - RNA, 18 nt, Human parainfluenza virus 2
aaccaacauacaccacug

SEQ ID NO: 359528 - RNA, 22 nt, Human parainfluenza virus 2
aaccacagccgaaccaugcuca

SEQ ID NO: 359529 - RNA, 23 nt, Human parainfluenza virus 2
aaccuccacaccagaaucauaca

SEQ ID NO: 359530 - RNA, 21 nt, Human parainfluenza virus 2
aacuaaacguuccacaauaaa

SEQ ID NO: 359531 - RNA, 17 nt, Human parainfluenza virus 2
aacuagacucacaucau

SEQ ID NO: 359532 - RNA, 20 nt, Human parainfluenza virus 2
aacucauauacuacuuauua

SEQ ID NO: 359533 - RNA, 14 nt, Human parainfluenza virus 2
aacugaucaaucua

SEQ ID NO: 359534 - RNA, 17 nt, Human parainfluenza virus 2
aacuugacaccaaagau

SEQ ID NO: 359535 - RNA, 13 nt, Human parainfluenza virus 2
aacuuugaugcag

SEQ ID NO: 359536 - RNA, 14 nt, Human parainfluenza virus 2
aagaaaaacauauu

SEQ ID NO: 359537 - RNA, 21 nt, Human parainfluenza virus 2
aagacuccagauucaauaaua

SEQ ID NO: 359538 - RNA, 21 nt, Human parainfluenza virus 2
aagauuaugauauaggccaga

SEQ ID NO: 359539 - RNA, 20 nt, Human parainfluenza virus 2
aagucauacuacuagucacu

SEQ ID NO: 359540 - RNA, 12 nt, Human parainfluenza virus 2
aauaauaauuga

SEQ ID NO: 359541 - RNA, 20 nt, Human parainfluenza virus 2
aauaucgaccucuaacccaa

SEQ ID NO: 359542 - RNA, 21 nt, Human parainfluenza virus 2
aaucaacaauuuuagucaacu

SEQ ID NO: 359543 - RNA, 21 nt, Human parainfluenza virus 2
aaucaacguucaggccaaaau

SEQ ID NO: 359544 - RNA, 22 nt, Human parainfluenza virus 2
aaucaagucauacuacuaguca

SEQ ID NO: 359545 - RNA, 19 nt, Human parainfluenza virus 2
aaucuuacuaaaguuauuc

SEQ ID NO: 359546 - RNA, 22 nt, Human parainfluenza virus 2
aaucuucccccaagcaauggaa

SEQ ID NO: 359547 - RNA, 16 nt, Human parainfluenza virus 2
aaugucauacaaccag

SEQ ID NO: 359548 - RNA, 16 nt, Human parainfluenza virus 2
aauucaaucuuacuaa

SEQ ID NO: 359549 - RNA, 21 nt, Human parainfluenza virus 2
aauucuugcaacuucugcaac

SEQ ID NO: 359550 - RNA, 16 nt, Human parainfluenza virus 2
aauugucaacaccaag

SEQ ID NO: 359551 - RNA, 19 nt, Human parainfluenza virus 2
aauuuaaagaaaaaaucau

SEQ ID NO: 359552 - RNA, 19 nt, Human parainfluenza virus 2
aauuuuagucaacugauua

SEQ ID NO: 359553 - RNA, 11 nt, Human parainfluenza virus 2
acaaaauccaa

SEQ ID NO: 359554 - RNA, 17 nt, Human parainfluenza virus 2
acaaaucaaacuagacu

SEQ ID NO: 359555 - RNA, 24 nt, Human parainfluenza virus 2
acaaaucaaacuagacucacauca

SEQ ID NO: 359556 - RNA, 16 nt, Human parainfluenza virus 2
acaaccagauauacac

SEQ ID NO: 359557 - RNA, 19 nt, Human parainfluenza virus 2
acaaccagauauacacauc

SEQ ID NO: 359558 - RNA, 22 nt, Human parainfluenza virus 2
acaaccagauauacacauccac

SEQ ID NO: 359559 - RNA, 19 nt, Human parainfluenza virus 2
acaacuugacaccaaagau

SEQ ID NO: 359560 - RNA, 15 nt, Human parainfluenza virus 2
acaaucaagucauac

SEQ ID NO: 359561 - RNA, 18 nt, Human parainfluenza virus 2
acaauucucucauaauuu

SEQ ID NO: 359562 - RNA, 19 nt, Human parainfluenza virus 2
acaauugucaacaccaaga

SEQ ID NO: 359563 - RNA, 17 nt, Human parainfluenza virus 2
acacaagagacacucaa

SEQ ID NO: 359564 - RNA, 19 nt, Human parainfluenza virus 2
acacacucauccagacaaa

SEQ ID NO: 359565 - RNA, 21 nt, Human parainfluenza virus 2
acacacucauccagacaaauc

SEQ ID NO: 359566 - RNA, 14 nt, Human parainfluenza virus 2
acacauccacauca

SEQ ID NO: 359567 - RNA, 20 nt, Human parainfluenza virus 2
acacauccacaucacucaga

SEQ ID NO: 359568 - RNA, 15 nt, Human parainfluenza virus 2
acaccagaaucauac

SEQ ID NO: 359569 - RNA, 21 nt, Human parainfluenza virus 2
acaccagaaucauacaaucau

SEQ ID NO: 359570 - RNA, 21 nt, Human parainfluenza virus 2
acaccgacuuagguucaauuu

SEQ ID NO: 359571 - RNA, 13 nt, Human parainfluenza virus 2
acaccucacauca

SEQ ID NO: 359572 - RNA, 14 nt, Human parainfluenza virus 2
acagaucccaaaau

SEQ ID NO: 359573 - RNA, 16 nt, Human parainfluenza virus 2
acagccgaaccaugcu

SEQ ID NO: 359574 - RNA, 22 nt, Human parainfluenza virus 2
acagcugccacucacacacuca

SEQ ID NO: 359575 - RNA, 21 nt, Human parainfluenza virus 2
acaucacucagagauacagcu

SEQ ID NO: 359576 - RNA, 16 nt, Human parainfluenza virus 2
acaugcaacaucacca

SEQ ID NO: 359577 - RNA, 18 nt, Human parainfluenza virus 2
acaugcaacaucaccagu

SEQ ID NO: 359578 - RNA, 12 nt, Human parainfluenza virus 2
accaacauacac

SEQ ID NO: 359579 - RNA, 16 nt, Human parainfluenza virus 2
accaacauacaccacu

SEQ ID NO: 359580 - RNA, 18 nt, Human parainfluenza virus 2
accaacuuccaacgauua

SEQ ID NO: 359581 - RNA, 15 nt, Human parainfluenza virus 2
accaagaaacaacca

SEQ ID NO: 359582 - RNA, 21 nt, Human parainfluenza virus 2
accaauagucaaacacaaacu

SEQ ID NO: 359583 - RNA, 19 nt, Human parainfluenza virus 2
accacagccgaaccaugcu

SEQ ID NO: 359584 - RNA, 17 nt, Human parainfluenza virus 2
accaggugucacagcug

SEQ ID NO: 359585 - RNA, 12 nt, Human parainfluenza virus 2
acccaaacaaca

SEQ ID NO: 359586 - RNA, 18 nt, Human parainfluenza virus 2
acccauucuuauauaaga

SEQ ID NO: 359587 - RNA, 15 nt, Human parainfluenza virus 2
acccuuaagaaccaa

SEQ ID NO: 359588 - RNA, 13 nt, Human parainfluenza virus 2
accuaaaauaagc

SEQ ID NO: 359589 - RNA, 17 nt, Human parainfluenza virus 2
accucacaucaauagaa

SEQ ID NO: 359590 - RNA, 13 nt, Human parainfluenza virus 2
acgaaagccugaa

SEQ ID NO: 359591 - RNA, 21 nt, Human parainfluenza virus 2
acguucaggccaaaauauuca

SEQ ID NO: 359592 - RNA, 16 nt, Human parainfluenza virus 2
acuaaacguuccacaa

SEQ ID NO: 359593 - RNA, 21 nt, Human parainfluenza virus 2
acuagggcacuucccgcauga

SEQ ID NO: 359594 - RNA, 19 nt, Human parainfluenza virus 2
acuagucacuauacaauaa

SEQ ID NO: 359595 - RNA, 23 nt, Human parainfluenza virus 2
acuagucucaaggcgaguguugc

SEQ ID NO: 359596 - RNA, 19 nt, Human parainfluenza virus 2
acuagugcagcggagacaa

SEQ ID NO: 359597 - RNA, 21 nt, Human parainfluenza virus 2
acuagugcagcggagacaaaa

SEQ ID NO: 359598 - RNA, 13 nt, Human parainfluenza virus 2
acuauacugaugg

SEQ ID NO: 359599 - RNA, 17 nt, Human parainfluenza virus 2
acucagagauacagcug

SEQ ID NO: 359600 - RNA, 18 nt, Human parainfluenza virus 2
acucauccagacaaauca

SEQ ID NO: 359601 - RNA, 15 nt, Human parainfluenza virus 2
acucauguacuauac

SEQ ID NO: 359602 - RNA, 19 nt, Human parainfluenza virus 2
acuccauccauccaaaaac

SEQ ID NO: 359603 - RNA, 21 nt, Human parainfluenza virus 2
acugagcaaguugaugaauua

SEQ ID NO: 359604 - RNA, 21 nt, Human parainfluenza virus 2
acugaucaaucuaacaaaaaa

SEQ ID NO: 359605 - RNA, 18 nt, Human parainfluenza virus 2
acugaugguggugcuagc

SEQ ID NO: 359606 - RNA, 14 nt, Human parainfluenza virus 2
acugauuaccaaga

SEQ ID NO: 359607 - RNA, 22 nt, Human parainfluenza virus 2
acuugaacucaccaauagucaa

SEQ ID NO: 359608 - RNA, 16 nt, Human parainfluenza virus 2
cauccaaaaacacgcc

SEQ ID NO: 359609 - RNA, 13 nt, Human parainfluenza virus 2
cauccacaucacu

SEQ ID NO: 359610 - RNA, 16 nt, Human parainfluenza virus 2
cauccagacaaaucaa

SEQ ID NO: 359611 - RNA, 20 nt, Human parainfluenza virus 2
caucuuuguuauguacacug

SEQ ID NO: 359612 - RNA, 14 nt, Human parainfluenza virus 2
caugcaacaucacc

SEQ ID NO: 359613 - RNA, 22 nt, Human parainfluenza virus 2
cauuaagccuccagauaccaau

SEQ ID NO: 359614 - RNA, 12 nt, Human parainfluenza virus 2
cauucaaucaaa

SEQ ID NO: 359615 - RNA, 14 nt, Human parainfluenza virus 2
cauucaaucaaaga

SEQ ID NO: 359616 - RNA, 21 nt, Human parainfluenza virus 2
ccaaaauauucagccaugcau

SEQ ID NO: 359617 - RNA, 22 nt, Human parainfluenza virus 2
ccaaacaacaccucacaucaau

SEQ ID NO: 359618 - RNA, 12 nt, Human parainfluenza virus 2
ccacaucacuca

SEQ ID NO: 359619 - RNA, 16 nt, Human parainfluenza virus 2
ccagaaucauacaauc

SEQ ID NO: 359620 - RNA, 15 nt, Human parainfluenza virus 2
ccagacuccauccau

SEQ ID NO: 359621 - RNA, 19 nt, Human parainfluenza virus 2
ccagacuccauccauccaa

SEQ ID NO: 359622 - RNA, 20 nt, Human parainfluenza virus 2
ccagauauacacauccacau

SEQ ID NO: 359623 - RNA, 12 nt, Human parainfluenza virus 2
ccauaugaagca

SEQ ID NO: 359624 - RNA, 14 nt, Human parainfluenza virus 2
ccauccauccaaaa

SEQ ID NO: 359625 - RNA, 20 nt, Human parainfluenza virus 2
cccuguagaggagaucagaa

SEQ ID NO: 359626 - RNA, 19 nt, Human parainfluenza virus 2
ccgaggaaccaacauacac

SEQ ID NO: 359627 - RNA, 21 nt, Human parainfluenza virus 2
ccuaaucuucccccaagcaau

SEQ ID NO: 359628 - RNA, 22 nt, Human parainfluenza virus 2
ccuaaucuucccccaagcaaug

SEQ ID NO: 359629 - RNA, 12 nt, Human parainfluenza virus 2
ccuccacaccag

SEQ ID NO: 359630 - RNA, 18 nt, Human parainfluenza virus 2
ccugauuauuaugugaua

SEQ ID NO: 359631 - RNA, 14 nt, Human parainfluenza virus 2
ccuuccugaagucc

SEQ ID NO: 359632 - RNA, 23 nt, Human parainfluenza virus 2
cgaacaggugauauugauuucaa

SEQ ID NO: 359633 - RNA, 13 nt, Human parainfluenza virus 2
cgcaugaucuuga

SEQ ID NO: 359634 - RNA, 17 nt, Human parainfluenza virus 2
cuaaacguuccacaaua

SEQ ID NO: 359635 - RNA, 19 nt, Human parainfluenza virus 2
cuaaacguuccacaauaaa

SEQ ID NO: 359636 - RNA, 21 nt, Human parainfluenza virus 2
cuagucacuauacaauaauca

SEQ ID NO: 359637 - RNA, 14 nt, Human parainfluenza virus 2
cucaaccaaaagac

SEQ ID NO: 359638 - RNA, 23 nt, Human parainfluenza virus 2
cucaaggcgaguguugcaacuau

SEQ ID NO: 359639 - RNA, 15 nt, Human parainfluenza virus 2
cucagacagauccca

SEQ ID NO: 359640 - RNA, 19 nt, Human parainfluenza virus 2
cucagacagaucccaaaau

SEQ ID NO: 359641 - RNA, 17 nt, Human parainfluenza virus 2
cucauccagacaaauca

SEQ ID NO: 359642 - RNA, 20 nt, Human parainfluenza virus 2
cucauccagacaaaucaaac

SEQ ID NO: 359643 - RNA, 13 nt, Human parainfluenza virus 2
cuccagauucaau

SEQ ID NO: 359644 - RNA, 14 nt, Human parainfluenza virus 2
cuccagauucaaua

SEQ ID NO: 359645 - RNA, 15 nt, Human parainfluenza virus 2
cuccauccauccaaa

SEQ ID NO: 359646 - RNA, 21 nt, Human parainfluenza virus 2
cucucaaugucauacaaccag

SEQ ID NO: 359647 - RNA, 16 nt, Human parainfluenza virus 2
cucucagacagauccc

SEQ ID NO: 359648 - RNA, 20 nt, Human parainfluenza virus 2
cugaaguccacuugaacuca

SEQ ID NO: 359649 - RNA, 22 nt, Human parainfluenza virus 2
cugagaauagaaccacaaucaa

SEQ ID NO: 359650 - RNA, 14 nt, Human parainfluenza virus 2
cugcauccaaugau

SEQ ID NO: 359651 - RNA, 23 nt, Human parainfluenza virus 2
cugccacucacacacucauccag

SEQ ID NO: 359652 - RNA, 20 nt, Human parainfluenza virus 2
cugcuguuuuucccauauga

SEQ ID NO: 359653 - RNA, 22 nt, Human parainfluenza virus 2
cuguagaagggaaaguagauaa

SEQ ID NO: 359654 - RNA, 22 nt, Human parainfluenza virus 2
cuguagaggagaucagaaagag

SEQ ID NO: 359655 - RNA, 20 nt, Human parainfluenza virus 2
cuuaauauaggggucauuca

SEQ ID NO: 359656 - RNA, 21 nt, Human parainfluenza virus 2
cuucagacuguagaagggaaa

SEQ ID NO: 359657 - RNA, 14 nt, Human parainfluenza virus 2
cuucccccaagcaa

SEQ ID NO: 359658 - RNA, 20 nt, Human parainfluenza virus 2
cuugccucucagacagaucc

SEQ ID NO: 359659 - RNA, 18 nt, Human parainfluenza virus 2
gaaauaagcccccuucac

SEQ ID NO: 359660 - RNA, 22 nt, Human parainfluenza virus 2
gaacaugcaacaucaccagucu

SEQ ID NO: 359661 - RNA, 13 nt, Human parainfluenza virus 2
gaaccaacauaca

SEQ ID NO: 359662 - RNA, 14 nt, Human parainfluenza virus 2
gaaccaacauacac

SEQ ID NO: 359663 - RNA, 14 nt, Human parainfluenza virus 2
gaaccaugcucaac

SEQ ID NO: 359664 - RNA, 20 nt, Human parainfluenza virus 2
gaagacuccagauucaauaa

SEQ ID NO: 359665 - RNA, 16 nt, Human parainfluenza virus 2
gaagcaauccuucaac

SEQ ID NO: 359666 - RNA, 23 nt, Human parainfluenza virus 2
gaagcaauccuucaacaccgacu

SEQ ID NO: 359667 - RNA, 17 nt, Human parainfluenza virus 2
gaauuaauccaugcugg

SEQ ID NO: 359668 - RNA, 18 nt, Human parainfluenza virus 2
gaccucuaacccaauuua

SEQ ID NO: 359669 - RNA, 12 nt, Human parainfluenza virus 2
gacugggaacag

SEQ ID NO: 359670 - RNA, 12 nt, Human parainfluenza virus 2
gauaacaacaau

SEQ ID NO: 359671 - RNA, 15 nt, Human parainfluenza virus 2
gauagcguaguacaa

SEQ ID NO: 359672 - RNA, 18 nt, Human parainfluenza virus 2
gaucacacgaaagccuga

SEQ ID NO: 359673 - RNA, 19 nt, Human parainfluenza virus 2
gaucagauaaccuccacac

SEQ ID NO: 359674 - RNA, 12 nt, Human parainfluenza virus 2
gcaaaggcagca

SEQ ID NO: 359675 - RNA, 19 nt, Human parainfluenza virus 2
gcaacuauaaucaaucuua

SEQ ID NO: 359676 - RNA, 15 nt, Human parainfluenza virus 2
gcaauggaacaugca

SEQ ID NO: 359677 - RNA, 12 nt, Human parainfluenza virus 2
gcagcaucccac

SEQ ID NO: 359678 - RNA, 15 nt, Human parainfluenza virus 2
gcccacaauugucaa

SEQ ID NO: 359679 - RNA, 20 nt, Human parainfluenza virus 2
gcucaaccaaaagacccaaa

SEQ ID NO: 359680 - RNA, 21 nt, Human parainfluenza virus 2
gcucagucuucuuuaggcaaa

SEQ ID NO: 359681 - RNA, 18 nt, Human parainfluenza virus 2
gcuccagcaucugagaau

SEQ ID NO: 359682 - RNA, 19 nt, Human parainfluenza virus 2
ggaaccaacauacaccacu

SEQ ID NO: 359683 - RNA, 18 nt, Human parainfluenza virus 2
ggccggacggguuagaaa

SEQ ID NO: 359684 - RNA, 18 nt, Human parainfluenza virus 2
ggguucaguucaaauauc

SEQ ID NO: 359685 - RNA, 17 nt, Human parainfluenza virus 2
gguccgaacugaucaau

SEQ ID NO: 359686 - RNA, 19 nt, Human parainfluenza virus 2
gucacagcuguucuaacua

SEQ ID NO: 359687 - RNA, 18 nt, Human parainfluenza virus 2
gucacuauacaauaauca

SEQ ID NO: 359688 - RNA, 15 nt, Human parainfluenza virus 2
gucauacaaccagau

SEQ ID NO: 359689 - RNA, 18 nt, Human parainfluenza virus 2
guuauagauucugcuguu

SEQ ID NO: 359690 - RNA, 17 nt, Human parainfluenza virus 2
uaaaaaugaaaugacua

SEQ ID NO: 359691 - RNA, 15 nt, Human parainfluenza virus 2
uaaaggacacaauag

SEQ ID NO: 359692 - RNA, 15 nt, Human parainfluenza virus 2
uaaagggacuugauc

SEQ ID NO: 359693 - RNA, 16 nt, Human parainfluenza virus 2
uaaccuccacaccaga

SEQ ID NO: 359694 - RNA, 16 nt, Human parainfluenza virus 2
uaacgucucgugacac

SEQ ID NO: 359695 - RNA, 14 nt, Human parainfluenza virus 2
uaacuagugcagcg

SEQ ID NO: 359696 - RNA, 14 nt, Human parainfluenza virus 2
uaacuuugaugcag

SEQ ID NO: 359697 - RNA, 17 nt, Human parainfluenza virus 2
uaagaacacaguauaau

SEQ ID NO: 359698 - RNA, 19 nt, Human parainfluenza virus 2
uaauauaggggucauucaa

SEQ ID NO: 359699 - RNA, 19 nt, Human parainfluenza virus 2
uaauaucauuaccagcaga

SEQ ID NO: 359700 - RNA, 20 nt, Human parainfluenza virus 2
uaaucuucccccaagcaaug

SEQ ID NO: 359701 - RNA, 17 nt, Human parainfluenza virus 2
uaauguaacaauacuau

SEQ ID NO: 359702 - RNA, 21 nt, Human parainfluenza virus 2
uacaaccagauauacacaucc

SEQ ID NO: 359703 - RNA, 22 nt, Human parainfluenza virus 2
uacaaccagauauacacaucca

SEQ ID NO: 359704 - RNA, 19 nt, Human parainfluenza virus 2
uacaacuugacaccaaaga

SEQ ID NO: 359705 - RNA, 23 nt, Human parainfluenza virus 2
uacaauuuaagaaaaaaccuaaa

SEQ ID NO: 359706 - RNA, 19 nt, Human parainfluenza virus 2
uacacauccacaucacuca

SEQ ID NO: 359707 - RNA, 16 nt, Human parainfluenza virus 2
uacagcugccacucac

SEQ ID NO: 359708 - RNA, 17 nt, Human parainfluenza virus 2
uacagcugccacucaca

SEQ ID NO: 359709 - RNA, 15 nt, Human parainfluenza virus 2
uaccagcagauccaa

SEQ ID NO: 359710 - RNA, 13 nt, Human parainfluenza virus 2
acuugacaccaaa

SEQ ID NO: 359711 - RNA, 13 nt, Human parainfluenza virus 2
agaaaaacauauu

SEQ ID NO: 359712 - RNA, 20 nt, Human parainfluenza virus 2
agaauagaaccacaaucaag

SEQ ID NO: 359713 - RNA, 13 nt, Human parainfluenza virus 2
agaaucauacaau

SEQ ID NO: 359714 - RNA, 21 nt, Human parainfluenza virus 2
agacaaaucaaacuagacuca

SEQ ID NO: 359715 - RNA, 21 nt, Human parainfluenza virus 2
agacacucaacaugcauccaa

SEQ ID NO: 359716 - RNA, 17 nt, Human parainfluenza virus 2
agacccauagaugcuca

SEQ ID NO: 359717 - RNA, 16 nt, Human parainfluenza virus 2
agaccuacacucucau

SEQ ID NO: 359718 - RNA, 23 nt, Human parainfluenza virus 2
agacucacaucauucggaaacaa

SEQ ID NO: 359719 - RNA, 13 nt, Human parainfluenza virus 2
agauauacacauc

SEQ ID NO: 359720 - RNA, 19 nt, Human parainfluenza virus 2
agauauacacauccacauc

SEQ ID NO: 359721 - RNA, 13 nt, Human parainfluenza virus 2
agauuucuuccua

SEQ ID NO: 359722 - RNA, 23 nt, Human parainfluenza virus 2
agcaaguugaugaauuaauccau

SEQ ID NO: 359723 - RNA, 17 nt, Human parainfluenza virus 2
agccugaauccaagaaa

SEQ ID NO: 359724 - RNA, 13 nt, Human parainfluenza virus 2
agcugccacucac

SEQ ID NO: 359725 - RNA, 18 nt, Human parainfluenza virus 2
aggcgaguguugcaacua

SEQ ID NO: 359726 - RNA, 17 nt, Human parainfluenza virus 2
agguucaauuuucucau

SEQ ID NO: 359727 - RNA, 15 nt, Human parainfluenza virus 2
agucacacaagagac

SEQ ID NO: 359728 - RNA, 21 nt, Human parainfluenza virus 2
agucacacaagagacacucaa

SEQ ID NO: 359729 - RNA, 18 nt, Human parainfluenza virus 2
agucacuauacaauaauc

SEQ ID NO: 359730 - RNA, 14 nt, Human parainfluenza virus 2
agucauacuacuag

SEQ ID NO: 359731 - RNA, 22 nt, Human parainfluenza virus 2
agucucaaggcgaguguugcaa

SEQ ID NO: 359732 - RNA, 15 nt, Human parainfluenza virus 2
auaaaauucuugcaa

SEQ ID NO: 359733 - RNA, 17 nt, Human parainfluenza virus 2
auaagaacucaugauag

SEQ ID NO: 359734 - RNA, 17 nt, Human parainfluenza virus 2
auacagcugccacucac

SEQ ID NO: 359735 - RNA, 13 nt, Human parainfluenza virus 2
auaguaugcaucu

SEQ ID NO: 359736 - RNA, 17 nt, Human parainfluenza virus 2
auauaggggucauucaa

SEQ ID NO: 359737 - RNA, 13 nt, Human parainfluenza virus 2
auaucgaccucua

SEQ ID NO: 359738 - RNA, 19 nt, Human parainfluenza virus 2
auaucgaccucuaacccaa

SEQ ID NO: 359739 - RNA, 21 nt, Human parainfluenza virus 2
aucaaacuagacucacaucau

SEQ ID NO: 359740 - RNA, 22 nt, Human parainfluenza virus 2
aucaagauccagacuccaucca

SEQ ID NO: 359741 - RNA, 14 nt, Human parainfluenza virus 2
aucaagucauacua

SEQ ID NO: 359742 - RNA, 17 nt, Human parainfluenza virus 2
aucaagucauacuacua

SEQ ID NO: 359743 - RNA, 18 nt, Human parainfluenza virus 2
aucaagucauacuacuag

SEQ ID NO: 359744 - RNA, 13 nt, Human parainfluenza virus 2
aucaaucuaacaa

SEQ ID NO: 359745 - RNA, 17 nt, Human parainfluenza virus 2
aucaccugcauccaaug

SEQ ID NO: 359746 - RNA, 16 nt, Human parainfluenza virus 2
aucacucagagauaca

SEQ ID NO: 359747 - RNA, 22 nt, Human parainfluenza virus 2
aucauagguccgaacugaucaa

SEQ ID NO: 359748 - RNA, 18 nt, Human parainfluenza virus 2
auccacucaacauauaau

SEQ ID NO: 359749 - RNA, 17 nt, Human parainfluenza virus 2
auccagacuccauccau

SEQ ID NO: 359750 - RNA, 21 nt, Human parainfluenza virus 2
aucccaccaggugucacagcu

SEQ ID NO: 359751 - RNA, 16 nt, Human parainfluenza virus 2
aucucuuagaaaaccu

SEQ ID NO: 359752 - RNA, 18 nt, Human parainfluenza virus 2
aucuucccccaagcaaug

SEQ ID NO: 359753 - RNA, 21 nt, Human parainfluenza virus 2
aucuucgccuucagacuguag

SEQ ID NO: 359754 - RNA, 20 nt, Human parainfluenza virus 2
aucuugacauuucugaaaua

SEQ ID NO: 359755 - RNA, 19 nt, Human parainfluenza virus 2
augaaaugacuagucucaa

SEQ ID NO: 359756 - RNA, 15 nt, Human parainfluenza virus 2
augauaguaugcauc

SEQ ID NO: 359757 - RNA, 13 nt, Human parainfluenza virus 2
augcagcuugcaa

SEQ ID NO: 359758 - RNA, 18 nt, Human parainfluenza virus 2
augcaucaccugcaucca

SEQ ID NO: 359759 - RNA, 23 nt, Human parainfluenza virus 2
augcaucaccugcauccaaugau

SEQ ID NO: 359760 - RNA, 19 nt, Human parainfluenza virus 2
augcaucuuuguuauguac

SEQ ID NO: 359761 - RNA, 23 nt, Human parainfluenza virus 2
augccauugcuggagaucaacua

SEQ ID NO: 359762 - RNA, 14 nt, Human parainfluenza virus 2
augcucaaccaaaa

SEQ ID NO: 359763 - RNA, 16 nt, Human parainfluenza virus 2
augcucaaccaaaaga

SEQ ID NO: 359764 - RNA, 15 nt, Human parainfluenza virus 2
augcuggacugggaa

SEQ ID NO: 359765 - RNA, 22 nt, Human parainfluenza virus 2
auguaacaauacuauuaagauu

SEQ ID NO: 359766 - RNA, 18 nt, Human parainfluenza virus 2
augucauacaaccagaua

SEQ ID NO: 359767 - RNA, 19 nt, Human parainfluenza virus 2
augugauagcguaguacaa

SEQ ID NO: 359768 - RNA, 20 nt, Human parainfluenza virus 2
auuaagccuccagauaccaa

SEQ ID NO: 359769 - RNA, 14 nt, Human parainfluenza virus 2
auucaaucaaagau

SEQ ID NO: 359770 - RNA, 19 nt, Human parainfluenza virus 2
auugacccuuaagaaccaa

SEQ ID NO: 359771 - RNA, 12 nt, Human parainfluenza virus 2
auugcuaccuaa

SEQ ID NO: 359772 - RNA, 22 nt, Human parainfluenza virus 2
auugcuggagaucaacuacuua

SEQ ID NO: 359773 - RNA, 18 nt, Human parainfluenza virus 2
auugucaacaccaagaaa

SEQ ID NO: 359774 - RNA, 16 nt, Human parainfluenza virus 2
auuuaagaaaaaaccu

SEQ ID NO: 359775 - RNA, 13 nt, Human parainfluenza virus 2
caaaagaccucaa

SEQ ID NO: 359776 - RNA, 20 nt, Human parainfluenza virus 2
caaaauauucagccaugcau

SEQ ID NO: 359777 - RNA, 19 nt, Human parainfluenza virus 2
caaacacaaacucauauac

SEQ ID NO: 359778 - RNA, 14 nt, Human parainfluenza virus 2
caaaccccaaacac

SEQ ID NO: 359779 - RNA, 15 nt, Human parainfluenza virus 2
caaacuagacucaca

SEQ ID NO: 359780 - RNA, 18 nt, Human parainfluenza virus 2
caaacuagacucacauca

SEQ ID NO: 359781 - RNA, 21 nt, Human parainfluenza virus 2
caaacuagacucacaucauuc

SEQ ID NO: 359782 - RNA, 16 nt, Human parainfluenza virus 2
caaauaucgaccucua

SEQ ID NO: 359783 - RNA, 12 nt, Human parainfluenza virus 2
caacaccaagaa

SEQ ID NO: 359784 - RNA, 22 nt, Human parainfluenza virus 2
caaccaaaagacccaaacaaca

SEQ ID NO: 359785 - RNA, 18 nt, Human parainfluenza virus 2
caaccagauauacacauc

SEQ ID NO: 359786 - RNA, 19 nt, Human parainfluenza virus 2
caaccagauauacacaucc

SEQ ID NO: 359787 - RNA, 21 nt, Human parainfluenza virus 2
caacuucacccagucaauccc

SEQ ID NO: 359788 - RNA, 18 nt, Human parainfluenza virus 2
caacuugacaccaaagau

SEQ ID NO: 359789 - RNA, 15 nt, Human parainfluenza virus 2
caagauccagacucc

SEQ ID NO: 359790 - RNA, 21 nt, Human parainfluenza virus 2
caauagucaaacacaaacuca

SEQ ID NO: 359791 - RNA, 17 nt, Human parainfluenza virus 2
caauccuucaacaccga

SEQ ID NO: 359792 - RNA, 19 nt, Human parainfluenza virus 2
caaugauuauaagaacuca

SEQ ID NO: 359793 - RNA, 13 nt, Human parainfluenza virus 2
caauguuccagua

SEQ ID NO: 359794 - RNA, 22 nt, Human parainfluenza virus 2
caauugacccuuaagaaccaac

SEQ ID NO: 359795 - RNA, 13 nt, Human parainfluenza virus 2
cacaaucaaguca

SEQ ID NO: 359796 - RNA, 12 nt, Human parainfluenza virus 2
cacacacucauc

SEQ ID NO: 359797 - RNA, 14 nt, Human parainfluenza virus 2
cacagccgaaccau

SEQ ID NO: 359798 - RNA, 16 nt, Human parainfluenza virus 2
caccaagaaacaacca

SEQ ID NO: 359799 - RNA, 16 nt, Human parainfluenza virus 2
caccagaaucauacaa

SEQ ID NO: 359800 - RNA, 20 nt, Human parainfluenza virus 2
caccagaaucauacaaucau

SEQ ID NO: 359801 - RNA, 14 nt, Human parainfluenza virus 2
caccucacaucaau

SEQ ID NO: 359802 - RNA, 13 nt, Human parainfluenza virus 2
cacuauacaauaa

SEQ ID NO: 359803 - RNA, 12 nt, Human parainfluenza virus 2
cacucaacaugc

SEQ ID NO: 359804 - RNA, 14 nt, Human parainfluenza virus 2
cagacagaucccaa

SEQ ID NO: 359805 - RNA, 18 nt, Human parainfluenza virus 2
cagagauacagcugccac

SEQ ID NO: 359806 - RNA, 22 nt, Human parainfluenza virus 2
cagauaaccuccacaccagaau

SEQ ID NO: 359807 - RNA, 15 nt, Human parainfluenza virus 2
cagauauacacaucc

SEQ ID NO: 359808 - RNA, 16 nt, Human parainfluenza virus 2
cagcaaucuaucucuu

SEQ ID NO: 359809 - RNA, 20 nt, Human parainfluenza virus 2
cagcuguucuaacuagugca

SEQ ID NO: 359810 - RNA, 23 nt, Human parainfluenza virus 2
cagcuguucuaacuagugcagcg

SEQ ID NO: 359811 - RNA, 16 nt, Human parainfluenza virus 2
cauagaugcucagucu

SEQ ID NO: 359812 - RNA, 15 nt, Human parainfluenza virus 2
caucacucagagaua

SEQ ID NO: 359813 - RNA, 23 nt, Human parainfluenza virus 2
uacugaugguggugcuagcuuua

SEQ ID NO: 359814 - RNA, 16 nt, Human parainfluenza virus 2
uagaaccacaaucaag

SEQ ID NO: 359815 - RNA, 15 nt, Human parainfluenza virus 2
uagacucacaucauu

SEQ ID NO: 359816 - RNA, 18 nt, Human parainfluenza virus 2
uagauaaaauucuugcaa

SEQ ID NO: 359817 - RNA, 22 nt, Human parainfluenza virus 2
uagcuagaccuacacucucauc

SEQ ID NO: 359818 - RNA, 15 nt, Human parainfluenza virus 2
uaggcaaaggcagca

SEQ ID NO: 359819 - RNA, 21 nt, Human parainfluenza virus 2
uagucaacugauuaccaagau

SEQ ID NO: 359820 - RNA, 19 nt, Human parainfluenza virus 2
uaguccaaaccccaaacac

SEQ ID NO: 359821 - RNA, 14 nt, Human parainfluenza virus 2
uauaaucaaucuua

SEQ ID NO: 359822 - RNA, 16 nt, Human parainfluenza virus 2
uauaauuuaaucacaa

SEQ ID NO: 359823 - RNA, 14 nt, Human parainfluenza virus 2
uaucuuaugcaaua

SEQ ID NO: 359824 - RNA, 17 nt, Human parainfluenza virus 2
uauucagccaugcauca

SEQ ID NO: 359825 - RNA, 18 nt, Human parainfluenza virus 2
ucaaacacaaacucauau

SEQ ID NO: 359826 - RNA, 14 nt, Human parainfluenza virus 2
ucaaacuagacuca

SEQ ID NO: 359827 - RNA, 19 nt, Human parainfluenza virus 2
ucaacaaaaaggaucacac

SEQ ID NO: 359828 - RNA, 13 nt, Human parainfluenza virus 2
ucaacaccaagaa

SEQ ID NO: 359829 - RNA, 18 nt, Human parainfluenza virus 2
ucaacugauuaccaagau

SEQ ID NO: 359830 - RNA, 21 nt, Human parainfluenza virus 2
ucaaggcgaguguugcaacua

SEQ ID NO: 359831 - RNA, 20 nt, Human parainfluenza virus 2
ucaaucaaagauaagaucac

SEQ ID NO: 359832 - RNA, 22 nt, Human parainfluenza virus 2
ucaaugucauacaaccagauau

SEQ ID NO: 359833 - RNA, 16 nt, Human parainfluenza virus 2
ucaccugcauccaaug

SEQ ID NO: 359834 - RNA, 19 nt, Human parainfluenza virus 2
ucaccugcauccaaugaua

SEQ ID NO: 359835 - RNA, 19 nt, Human parainfluenza virus 2
ucacucagagauacagcug

SEQ ID NO: 359836 - RNA, 22 nt, Human parainfluenza virus 2
ucagauaaccuccacaccagaa

SEQ ID NO: 359837 - RNA, 12 nt, Human parainfluenza virus 2
ucagaugccauu

SEQ ID NO: 359838 - RNA, 13 nt, Human parainfluenza virus 2
ucagccaugcauc

SEQ ID NO: 359839 - RNA, 17 nt, Human parainfluenza virus 2
ucaggccaaaauauuca

SEQ ID NO: 359840 - RNA, 14 nt, Human parainfluenza virus 2
ucaguucaaauauc

SEQ ID NO: 359841 - RNA, 15 nt, Human parainfluenza virus 2
ucauacaaccagaua

SEQ ID NO: 359842 - RNA, 15 nt, Human parainfluenza virus 2
ucaucauuuacuguu

SEQ ID NO: 359843 - RNA, 18 nt, Human parainfluenza virus 2
ucauggaucccaguacac

SEQ ID NO: 359844 - RNA, 17 nt, Human parainfluenza virus 2
uccaagaaagauuuaac

SEQ ID NO: 359845 - RNA, 16 nt, Human parainfluenza virus 2
uccacaauaaaucaac

SEQ ID NO: 359846 - RNA, 19 nt, Human parainfluenza virus 2
uccacaauugacccuuaag

SEQ ID NO: 359847 - RNA, 15 nt, Human parainfluenza virus 2
uccacucaacauaua

SEQ ID NO: 359848 - RNA, 16 nt, Human parainfluenza virus 2
ucccccaagcaaugga

SEQ ID NO: 359849 - RNA, 15 nt, Human parainfluenza virus 2
ucuagguccgaaagc

SEQ ID NO: 359850 - RNA, 20 nt, Human parainfluenza virus 2
ucucaaggcgaguguugcaa

SEQ ID NO: 359851 - RNA, 12 nt, Human parainfluenza virus 2
ucuucugagaua

SEQ ID NO: 359852 - RNA, 21 nt, Human parainfluenza virus 2
ucuugcaacuucugcaacuau

SEQ ID NO: 359853 - RNA, 18 nt, Human parainfluenza virus 2
ugaaauaagcccccuuca

SEQ ID NO: 359854 - RNA, 14 nt, Human parainfluenza virus 2
ugaacucaccaaua

SEQ ID NO: 359855 - RNA, 16 nt, Human parainfluenza virus 2
ugaacucaccaauagu

SEQ ID NO: 359856 - RNA, 14 nt, Human parainfluenza virus 2
ugaagcaauccuuc

SEQ ID NO: 359857 - RNA, 16 nt, Human parainfluenza virus 2
ugaauaugaauauauc

SEQ ID NO: 359858 - RNA, 14 nt, Human parainfluenza virus 2
ugaauuaauccaug

SEQ ID NO: 359859 - RNA, 21 nt, Human parainfluenza virus 2
ugacaccggguucaguucaaa

SEQ ID NO: 359860 - RNA, 15 nt, Human parainfluenza virus 2
ugauaguaugcaucu

SEQ ID NO: 359861 - RNA, 15 nt, Human parainfluenza virus 2
ugaugcagcuugcaa

SEQ ID NO: 359862 - RNA, 18 nt, Human parainfluenza virus 2
ugauuaccaagauguuau

SEQ ID NO: 359863 - RNA, 18 nt, Human parainfluenza virus 2
ugcaucaccugcauccaa

SEQ ID NO: 359864 - RNA, 18 nt, Human parainfluenza virus 2
ugcauccaaucaagaucc

SEQ ID NO: 359865 - RNA, 19 nt, Human parainfluenza virus 2
ugcauccaaucaagaucca

SEQ ID NO: 359866 - RNA, 17 nt, Human parainfluenza virus 2
ugccacucacacacuca

SEQ ID NO: 359867 - RNA, 14 nt, Human parainfluenza virus 2
ugcucaaccaaaag

SEQ ID NO: 359868 - RNA, 12 nt, Human parainfluenza virus 2
uggaacaugcaa

SEQ ID NO: 359869 - RNA, 12 nt, Human parainfluenza virus 2
uguaauucaauc

SEQ ID NO: 359870 - RNA, 15 nt, Human parainfluenza virus 2
uguaauucaaucuua

SEQ ID NO: 359871 - RNA, 15 nt, Human parainfluenza virus 2
ugucauacaaccaga

SEQ ID NO: 359872 - RNA, 13 nt, Human parainfluenza virus 2
uguccacaauuga

SEQ ID NO: 359873 - RNA, 14 nt, Human parainfluenza virus 2
uguuccaguaguaa

SEQ ID NO: 359874 - RNA, 16 nt, Human parainfluenza virus 2
uguugcaacuauggaa

SEQ ID NO: 359875 - RNA, 17 nt, Human parainfluenza virus 2
uuaagauuaugauauag

SEQ ID NO: 359876 - RNA, 20 nt, Human parainfluenza virus 2
uucaaucaaagauaagauca

SEQ ID NO: 359877 - RNA, 20 nt, Human parainfluenza virus 2
uucaggccaaaauauucagc

SEQ ID NO: 359878 - RNA, 12 nt, Human parainfluenza virus 2
uucccauaugaa

SEQ ID NO: 359879 - RNA, 19 nt, Human parainfluenza virus 2
uucccgcaugaucuugaca

SEQ ID NO: 359880 - RNA, 21 nt, Human parainfluenza virus 2
uuccuaucuagacccauagau

SEQ ID NO: 359881 - RNA, 11 nt, Human parainfluenza virus 2
uucugagauac

SEQ ID NO: 359882 - RNA, 22 nt, Human parainfluenza virus 2
uucugagauacuccuuccugaa

SEQ ID NO: 359883 - RNA, 17 nt, Human parainfluenza virus 2
uugaugcagcuugcaaa

SEQ ID NO: 359884 - RNA, 19 nt, Human parainfluenza virus 2
uugcaacuucugcaacuau

SEQ ID NO: 359885 - RNA, 21 nt, Human parainfluenza virus 2
uugccucucagacagauccca

SEQ ID NO: 359886 - RNA, 11 nt, Human parainfluenza virus 2
aaaaacauauu

SEQ ID NO: 359887 - RNA, 22 nt, Human parainfluenza virus 2
aaaagacccaaacaacaccuca

SEQ ID NO: 359888 - RNA, 17 nt, Human parainfluenza virus 2
aaaaugaaaugacuagu

SEQ ID NO: 359889 - RNA, 22 nt, Human parainfluenza virus 2
aaaaugaaaugacuagucucaa

SEQ ID NO: 359890 - RNA, 13 nt, Human parainfluenza virus 2
aaaauuaacauua

SEQ ID NO: 359891 - RNA, 14 nt, Human parainfluenza virus 2
aaacaauucucuca

SEQ ID NO: 359892 - RNA, 14 nt, Human parainfluenza virus 2
aaacuaacuuugau

SEQ ID NO: 359893 - RNA, 16 nt, Human parainfluenza virus 2
aaacuagacucacauc

SEQ ID NO: 359894 - RNA, 18 nt, Human parainfluenza virus 2
aaacugacacagcuugau

SEQ ID NO: 359895 - RNA, 21 nt, Human parainfluenza virus 2
aaauaaccuuuauauaaugua

SEQ ID NO: 359896 - RNA, 15 nt, Human parainfluenza virus 2
aaauauucagccaug

SEQ ID NO: 359897 - RNA, 19 nt, Human parainfluenza virus 2
aaauauucagccaugcauc

SEQ ID NO: 359898 - RNA, 20 nt, Human parainfluenza virus 2
aaauauucagccaugcauca

SEQ ID NO: 359899 - RNA, 17 nt, Human parainfluenza virus 2
aaaucaaacuagacuca

SEQ ID NO: 359900 - RNA, 12 nt, Human parainfluenza virus 2
aaauucuugcaa

SEQ ID NO: 359901 - RNA, 14 nt, Human parainfluenza virus 2
aacaauuuuaguca

SEQ ID NO: 359902 - RNA, 20 nt, Human parainfluenza virus 2
aacaccaagaaacaaccaca

SEQ ID NO: 359903 - RNA, 17 nt, Human parainfluenza virus 2
aacauauugauuuuccc

SEQ ID NO: 359904 - RNA, 12 nt, Human parainfluenza virus 2
aaccacaaucaa

SEQ ID NO: 359905 - RNA, 16 nt, Human parainfluenza virus 2
aaccagauauacacau

SEQ ID NO: 359906 - RNA, 20 nt, Human parainfluenza virus 2
aacuaaacguuccacaauaa

SEQ ID NO: 359907 - RNA, 12 nt, Human parainfluenza virus 2
aacuauaaucaa

SEQ ID NO: 359908 - RNA, 19 nt, Human parainfluenza virus 2
ggcucucuaucuuaugcaa

SEQ ID NO: 359909 - RNA, 22 nt, Human parainfluenza virus 2
ggcucucuaucuuaugcaauag

SEQ ID NO: 359910 - RNA, 20 nt, Human parainfluenza virus 2
ggcuucacagccgaacaggu

SEQ ID NO: 359911 - RNA, 15 nt, Human parainfluenza virus 2
gguccgaacugauca

SEQ ID NO: 359912 - RNA, 15 nt, Human parainfluenza virus 2
gguucagaugccauu

SEQ ID NO: 359913 - RNA, 22 nt, Human parainfluenza virus 2
guacaauuuaagaaaaaaccua

SEQ ID NO: 359914 - RNA, 16 nt, Human parainfluenza virus 2
gucauacuacuaguca

SEQ ID NO: 359915 - RNA, 20 nt, Human parainfluenza virus 2
guuguaaaauugcuaccuaa

SEQ ID NO: 359916 - RNA, 20 nt, Human parainfluenza virus 2
uaaaaaugaaaugacuaguc

SEQ ID NO: 359917 - RNA, 20 nt, Human parainfluenza virus 2
uaaaaucauggaucccagua

SEQ ID NO: 359918 - RNA, 14 nt, Human parainfluenza virus 2
uaaaauugcuaccu

SEQ ID NO: 359919 - RNA, 16 nt, Human parainfluenza virus 2
uaaaauugcuaccuaa

SEQ ID NO: 359920 - RNA, 17 nt, Human parainfluenza virus 2
uaaacguuccacaauaa

SEQ ID NO: 359921 - RNA, 14 nt, Human parainfluenza virus 2
uaacaggcauaaaa

SEQ ID NO: 359922 - RNA, 21 nt, Human parainfluenza virus 2
uaaccuuuauauaauguaaca

SEQ ID NO: 359923 - RNA, 18 nt, Human parainfluenza virus 2
uaagcacgaacccuuaag

SEQ ID NO: 359924 - RNA, 18 nt, Human parainfluenza virus 2
uaagcccccuucacaaua

SEQ ID NO: 359925 - RNA, 20 nt, Human parainfluenza virus 2
uaauaauggaagauuacagc

SEQ ID NO: 359926 - RNA, 18 nt, Human parainfluenza virus 2
uaauauaggggucauuca

SEQ ID NO: 359927 - RNA, 22 nt, Human parainfluenza virus 2
uaauccaugcuggacugggaac

SEQ ID NO: 359928 - RNA, 20 nt, Human parainfluenza virus 2
uaauucaaucuuacuaaagu

SEQ ID NO: 359929 - RNA, 20 nt, Human parainfluenza virus 2
uacaaccagauauacacauc

SEQ ID NO: 359930 - RNA, 17 nt, Human parainfluenza virus 2
uacaauaaucaacaauu

SEQ ID NO: 359931 - RNA, 16 nt, Human parainfluenza virus 2
uacacauccacaucac

SEQ ID NO: 359932 - RNA, 16 nt, Human parainfluenza virus 2
uacuagucacuauaca

SEQ ID NO: 359933 - RNA, 14 nt, Human parainfluenza virus 2
uacuauacugaugg

SEQ ID NO: 359934 - RNA, 11 nt, Human parainfluenza virus 2
uagaaaaccug

SEQ ID NO: 359935 - RNA, 18 nt, Human parainfluenza virus 2
uagacccauagaugcuca

SEQ ID NO: 359936 - RNA, 16 nt, Human parainfluenza virus 2
uagaccuacacucuca

SEQ ID NO: 359937 - RNA, 19 nt, Human parainfluenza virus 2
uagauaaaauucuugcaac

SEQ ID NO: 359938 - RNA, 14 nt, Human parainfluenza virus 2
uagcguaguacaau

SEQ ID NO: 359939 - RNA, 12 nt, Human parainfluenza virus 2
uaguaugcaucu

SEQ ID NO: 359940 - RNA, 20 nt, Human parainfluenza virus 2
uagucaaacacaaacucaua

SEQ ID NO: 359941 - RNA, 16 nt, Human parainfluenza virus 3
aauaguaggacaaaga

SEQ ID NO: 359942 - RNA, 17 nt, Human parainfluenza virus 3
aauaucauugaauucau

SEQ ID NO: 359943 - RNA, 14 nt, Human parainfluenza virus 3
aauauuaacugaga

SEQ ID NO: 359944 - RNA, 21 nt, Human parainfluenza virus 3
aauauuaacugagaaagugaa

SEQ ID NO: 359945 - RNA, 16 nt, Human parainfluenza virus 3
aaucaaaccaacagaa

SEQ ID NO: 359946 - RNA, 12 nt, Human parainfluenza virus 3
aaucaacuaaua

SEQ ID NO: 359947 - RNA, 16 nt, Human parainfluenza virus 3
aaucagacaauggaca

SEQ ID NO: 359948 - RNA, 23 nt, Human parainfluenza virus 3
aaucagacaauggacaaaaggaa

SEQ ID NO: 359949 - RNA, 17 nt, Human parainfluenza virus 3
aaucaucaggaacacaa

SEQ ID NO: 359950 - RNA, 17 nt, Human parainfluenza virus 3
aauccaacucuacucau

SEQ ID NO: 359951 - RNA, 16 nt, Human parainfluenza virus 3
aaucuaucaacacaca

SEQ ID NO: 359952 - RNA, 17 nt, Human parainfluenza virus 3
aaucucaaaaacaacaa

SEQ ID NO: 359953 - RNA, 16 nt, Human parainfluenza virus 3
aaugaauccaaugaga

SEQ ID NO: 359954 - RNA, 14 nt, Human parainfluenza virus 3
aaugagcuggagac

SEQ ID NO: 359955 - RNA, 17 nt, Human parainfluenza virus 3
acaaccagauaccaaca

SEQ ID NO: 359956 - RNA, 14 nt, Human parainfluenza virus 3
acaacgaucuauua

SEQ ID NO: 359957 - RNA, 16 nt, Human parainfluenza virus 3
acaagcucacuaauaa

SEQ ID NO: 359958 - RNA, 17 nt, Human parainfluenza virus 3
acaauuacacacuauua

SEQ ID NO: 359959 - RNA, 11 nt, Human parainfluenza virus 3
acacaaucaac

SEQ ID NO: 359960 - RNA, 14 nt, Human parainfluenza virus 3
acacagauacaaaa

SEQ ID NO: 359961 - RNA, 12 nt, Human parainfluenza virus 3
acaccaaaacaa

SEQ ID NO: 359962 - RNA, 18 nt, Human parainfluenza virus 3
acaccgaacaaacagaca

SEQ ID NO: 359963 - RNA, 18 nt, Human parainfluenza virus 3
acacugcuaauuauuaca

SEQ ID NO: 359964 - RNA, 15 nt, Human parainfluenza virus 3
acagaaaagauccaa

SEQ ID NO: 359965 - RNA, 17 nt, Human parainfluenza virus 3
acagaaacaagugagaa

SEQ ID NO: 359966 - RNA, 22 nt, Human parainfluenza virus 3
acagaucgaaccgaacagacaa

SEQ ID NO: 359967 - RNA, 14 nt, Human parainfluenza virus 3
accaaaaugaaucc

SEQ ID NO: 359968 - RNA, 14 nt, Human parainfluenza virus 3
accaacaacuauua

SEQ ID NO: 359969 - RNA, 13 nt, Human parainfluenza virus 3
accaaugaucuaa

SEQ ID NO: 359970 - RNA, 14 nt, Human parainfluenza virus 3
accaucaacaccga

SEQ ID NO: 359971 - RNA, 18 nt, Human parainfluenza virus 3
acguccauggcuacucau

SEQ ID NO: 359972 - RNA, 15 nt, Human parainfluenza virus 3
acucaaucaauagag

SEQ ID NO: 359973 - RNA, 15 nt, Human parainfluenza virus 3
acucauacaauugag

SEQ ID NO: 359974 - RNA, 15 nt, Human parainfluenza virus 3
acucuacucauacaa

SEQ ID NO: 359975 - RNA, 15 nt, Human parainfluenza virus 3
acugcugcaacacca

SEQ ID NO: 359976 - RNA, 17 nt, Human parainfluenza virus 3
acugcugcaacaccaga

SEQ ID NO: 359977 - RNA, 13 nt, Human parainfluenza virus 3
acuucaacacugc

SEQ ID NO: 359978 - RNA, 15 nt, Human parainfluenza virus 3
agaaaagauccaaau

SEQ ID NO: 359979 - RNA, 20 nt, Human parainfluenza virus 3
agaaaauaaaacucaauaaa

SEQ ID NO: 359980 - RNA, 17 nt, Human parainfluenza virus 3
agaaaauggaugaauca

SEQ ID NO: 359981 - RNA, 19 nt, Human parainfluenza virus 3
agaaaauggaugaaucaca

SEQ ID NO: 359982 - RNA, 24 nt, Human parainfluenza virus 3
agaaaauggaugaaucacauagaa

SEQ ID NO: 359983 - RNA, 13 nt, Human parainfluenza virus 3
agaaagaccaaaa

SEQ ID NO: 359984 - RNA, 20 nt, Human parainfluenza virus 3
agaaagaccaaaaugaaucc

SEQ ID NO: 359985 - RNA, 15 nt, Human parainfluenza virus 3
agaacaacugucauu

SEQ ID NO: 359986 - RNA, 22 nt, Human parainfluenza virus 3
agaacaacugucauugaucacg

SEQ ID NO: 359987 - RNA, 22 nt, Human parainfluenza virus 3
agaacccaauagacaaauccaa

SEQ ID NO: 359988 - RNA, 17 nt, Human parainfluenza virus 3
agaaugaaacaauagau

SEQ ID NO: 359989 - RNA, 14 nt, Human parainfluenza virus 3
agacaaauccaaau

SEQ ID NO: 359990 - RNA, 22 nt, Human parainfluenza virus 3
agacagaaaauaaaacucaaua

SEQ ID NO: 359991 - RNA, 22 nt, Human parainfluenza virus 3
agacguccauggcuacucauaa

SEQ ID NO: 359992 - RNA, 13 nt, Human parainfluenza virus 3
agagaggaggaaa

SEQ ID NO: 359993 - RNA, 17 nt, Human parainfluenza virus 3
agaguauccaugaucaa

SEQ ID NO: 359994 - RNA, 12 nt, Human parainfluenza virus 3
agauaucaauca

SEQ ID NO: 359995 - RNA, 16 nt, Human parainfluenza virus 3
agaucaaaaucuauca

SEQ ID NO: 359996 - RNA, 17 nt, Human parainfluenza virus 3
agaucaaaaucuaucaa

SEQ ID NO: 359997 - RNA, 22 nt, Human parainfluenza virus 3
agauugauagaaaaucaaagag

SEQ ID NO: 359998 - RNA, 15 nt, Human parainfluenza virus 3
agcaaauguacuaaa

SEQ ID NO: 359999 - RNA, 20 nt, Human parainfluenza virus 3
aggaguaaaguuacgcaauc

SEQ ID NO: 360000 - RNA, 20 nt, Human parainfluenza virus 3
agggcagaagaaaaucucaa

SEQ ID NO: 360001 - RNA, 16 nt, Human parainfluenza virus 3
aguauccaugaucaaa

SEQ ID NO: 360002 - RNA, 21 nt, Human parainfluenza virus 3
agugucaccuuaacucuccua

SEQ ID NO: 360003 - RNA, 15 nt, Human parainfluenza virus 3
aguuacgcaauccaa

SEQ ID NO: 360004 - RNA, 15 nt, Human parainfluenza virus 3
auaaaaaucccaaaa

SEQ ID NO: 360005 - RNA, 14 nt, Human parainfluenza virus 3
auaaaacucaauaa

SEQ ID NO: 360006 - RNA, 15 nt, Human parainfluenza virus 3
auaaaacucaauaaa

SEQ ID NO: 360007 - RNA, 22 nt, Human parainfluenza virus 3
auaacuaacucugcaauauaca

SEQ ID NO: 360008 - RNA, 15 nt, Human parainfluenza virus 3
auacugacaaccaga

SEQ ID NO: 360009 - RNA, 18 nt, Human parainfluenza virus 3
auacuggaagcauaccaa

SEQ ID NO: 360010 - RNA, 16 nt, Human parainfluenza virus 3
auagaaaaucaaagag

SEQ ID NO: 360011 - RNA, 12 nt, Human parainfluenza virus 3
auagacaaaucc

SEQ ID NO: 360012 - RNA, 17 nt, Human parainfluenza virus 3
auagauaucaaucaaua

SEQ ID NO: 360013 - RNA, 21 nt, Human parainfluenza virus 3
auagauaucaaucaauauaca

SEQ ID NO: 360014 - RNA, 15 nt, Human parainfluenza virus 3
auagauaucacaaaa

SEQ ID NO: 360015 - RNA, 16 nt, Human parainfluenza virus 3
auagcacaauuacaca

SEQ ID NO: 360016 - RNA, 15 nt, Human parainfluenza virus 3
auaggagaaaucaaa

SEQ ID NO: 360017 - RNA, 19 nt, Human parainfluenza virus 3
auagugcuaauuaauucca

SEQ ID NO: 360018 - RNA, 20 nt, Human parainfluenza virus 3
auauggaugacgacucaaua

SEQ ID NO: 360019 - RNA, 21 nt, Human parainfluenza virus 3
auauggaugacgacucaauac

SEQ ID NO: 360020 - RNA, 15 nt, Human parainfluenza virus 3
aucaaagacaaauac

SEQ ID NO: 360021 - RNA, 19 nt, Human parainfluenza virus 3
aucaacauuuugauccaaa

SEQ ID NO: 360022 - RNA, 17 nt, Human parainfluenza virus 3
aucaaccaaaaaucaaa

SEQ ID NO: 360023 - RNA, 22 nt, Human parainfluenza virus 3
aucagcaaucagacaauggaca

SEQ ID NO: 360024 - RNA, 13 nt, Human parainfluenza virus 3
auccgaacaaacu

SEQ ID NO: 360025 - RNA, 15 nt, Human parainfluenza virus 3
aucuaucaaccaaaa

SEQ ID NO: 360026 - RNA, 15 nt, Human parainfluenza virus 3
aucucaaaaacaaca

SEQ ID NO: 360027 - RNA, 19 nt, Human parainfluenza virus 3
augaaacaauagauaucaa

SEQ ID NO: 360028 - RNA, 12 nt, Human parainfluenza virus 3
auggaaucucac

SEQ ID NO: 360029 - RNA, 13 nt, Human parainfluenza virus 3
auguacuaaacaa

SEQ ID NO: 360030 - RNA, 14 nt, Human parainfluenza virus 3
auuacacacuauua

SEQ ID NO: 360031 - RNA, 19 nt, Human parainfluenza virus 3
auuacacacuauuaugagu

SEQ ID NO: 360032 - RNA, 20 nt, Human parainfluenza virus 3
auuacagaaaagauccaaau

SEQ ID NO: 360033 - RNA, 23 nt, Human parainfluenza virus 3
auuagauaaaagacaacgaucua

SEQ ID NO: 360034 - RNA, 16 nt, Human parainfluenza virus 3
auuaugagucuaccuc

SEQ ID NO: 360035 - RNA, 14 nt, Human parainfluenza virus 3
auugauaacaacac

SEQ ID NO: 360036 - RNA, 19 nt, Human parainfluenza virus 3
auugauagaaaaucaaaga

SEQ ID NO: 360037 - RNA, 13 nt, Human parainfluenza virus 3
auuuugauccaaa

SEQ ID NO: 360038 - RNA, 18 nt, Human parainfluenza virus 3
caaaaacuuaggacaaaa

SEQ ID NO: 360039 - RNA, 23 nt, Human parainfluenza virus 3
caaaaaguaagaaaaacauguaa

SEQ ID NO: 360040 - RNA, 20 nt, Human parainfluenza virus 3
caaaacaacaaaaccaaaaa

SEQ ID NO: 360041 - RNA, 19 nt, Human parainfluenza virus 3
caaaaucuaucaacacaca

SEQ ID NO: 360042 - RNA, 14 nt, Human parainfluenza virus 3
caaaaugaguauaa

SEQ ID NO: 360043 - RNA, 17 nt, Human parainfluenza virus 3
caaacagacaagaaaca

SEQ ID NO: 360044 - RNA, 21 nt, Human parainfluenza virus 3
uaaugaguuuauggagauuac

SEQ ID NO: 360045 - RNA, 17 nt, Human parainfluenza virus 3
uacagaaaagauccaaa

SEQ ID NO: 360046 - RNA, 17 nt, Human parainfluenza virus 3
uacagacagaaucauca

SEQ ID NO: 360047 - RNA, 15 nt, Human parainfluenza virus 3
uacagauccacauca

SEQ ID NO: 360048 - RNA, 23 nt, Human parainfluenza virus 3
uaccccacauuagaguugccaaa

SEQ ID NO: 360049 - RNA, 12 nt, Human parainfluenza virus 3
uacucauaacaa

SEQ ID NO: 360050 - RNA, 13 nt, Human parainfluenza virus 3
uacugacaaccag

SEQ ID NO: 360051 - RNA, 17 nt, Human parainfluenza virus 3
uacuggaagcauaccaa

SEQ ID NO: 360052 - RNA, 14 nt, Human parainfluenza virus 3
uagaaaaucaaaga

SEQ ID NO: 360053 - RNA, 22 nt, Human parainfluenza virus 3
uagaguuugcuugcaacucaau

SEQ ID NO: 360054 - RNA, 15 nt, Human parainfluenza virus 3
uagauaucaaucaau

SEQ ID NO: 360055 - RNA, 16 nt, Human parainfluenza virus 3
uagauaucaaucaaua

SEQ ID NO: 360056 - RNA, 18 nt, Human parainfluenza virus 3
uaggagaaaucaaaacaa

SEQ ID NO: 360057 - RNA, 15 nt, Human parainfluenza virus 3
uaguaggacaaagaa

SEQ ID NO: 360058 - RNA, 23 nt, Human parainfluenza virus 3
uaucggaaaacgacacaaucaac

SEQ ID NO: 360059 - RNA, 17 nt, Human parainfluenza virus 3
ucaacauuuugauccaa

SEQ ID NO: 360060 - RNA, 12 nt, Human parainfluenza virus 3
ucaaccaaaaau

SEQ ID NO: 360061 - RNA, 15 nt, Human parainfluenza virus 3
ucaacugacaaaaau

SEQ ID NO: 360062 - RNA, 17 nt, Human parainfluenza virus 3
ucaacuuauacaaaaga

SEQ ID NO: 360063 - RNA, 15 nt, Human parainfluenza virus 3
ucaauacaccaagaa

SEQ ID NO: 360064 - RNA, 17 nt, Human parainfluenza virus 3
ucaauagugaaaagguc

SEQ ID NO: 360065 - RNA, 20 nt, Human parainfluenza virus 3
ucaauagugaaaagguccau

SEQ ID NO: 360066 - RNA, 20 nt, Human parainfluenza virus 3
ucaaucaauagagaguugau

SEQ ID NO: 360067 - RNA, 21 nt, Human parainfluenza virus 3
ucaccauugauaacaacacag

SEQ ID NO: 360068 - RNA, 11 nt, Human parainfluenza virus 3
ucacuaauaag

SEQ ID NO: 360069 - RNA, 18 nt, Human parainfluenza virus 3
ucaggaacacaauccuca

SEQ ID NO: 360070 - RNA, 16 nt, Human parainfluenza virus 3
ucauaacaacaagcuc

SEQ ID NO: 360071 - RNA, 23 nt, Human parainfluenza virus 3
ucauacuuagcaccgacccccaa

SEQ ID NO: 360072 - RNA, 20 nt, Human parainfluenza virus 3
ucauauagaaccauuaccac

SEQ ID NO: 360073 - RNA, 22 nt, Human parainfluenza virus 3
uccaaaaugaguauaacuaacu

SEQ ID NO: 360074 - RNA, 23 nt, Human parainfluenza virus 3
uccaucaauagugaaaaggucca

SEQ ID NO: 360075 - RNA, 11 nt, Human parainfluenza virus 3
uccaugaucaa

SEQ ID NO: 360076 - RNA, 19 nt, Human parainfluenza virus 3
uccaugaucaaaacaaaau

SEQ ID NO: 360077 - RNA, 11 nt, Human parainfluenza virus 3
ucccaaaagag

SEQ ID NO: 360078 - RNA, 18 nt, Human parainfluenza virus 3
uccuaucguuaaagguaa

SEQ ID NO: 360079 - RNA, 14 nt, Human parainfluenza virus 3
uccugguguuauua

SEQ ID NO: 360080 - RNA, 19 nt, Human parainfluenza virus 3
ucgagauggaauacuggaa

SEQ ID NO: 360081 - RNA, 19 nt, Human parainfluenza virus 3
ucucaaaaacaacaaccau

SEQ ID NO: 360082 - RNA, 20 nt, Human parainfluenza virus 3
ucucaccauugauaacaaca

SEQ ID NO: 360083 - RNA, 21 nt, Human parainfluenza virus 3
ucugcaauauacacauuccca

SEQ ID NO: 360084 - RNA, 21 nt, Human parainfluenza virus 3
ucugccaaauagauaucacaa

SEQ ID NO: 360085 - RNA, 21 nt, Human parainfluenza virus 3
ugaaagaagaaaagaucaaga

SEQ ID NO: 360086 - RNA, 20 nt, Human parainfluenza virus 3
ugaagaagaaauacuaauga

SEQ ID NO: 360087 - RNA, 15 nt, Human parainfluenza virus 3
ugaagauaucacaaa

SEQ ID NO: 360088 - RNA, 11 nt, Human parainfluenza virus 3
ugagaaaguga

SEQ ID NO: 360089 - RNA, 17 nt, Human parainfluenza virus 3
ugauagaaaaucaaaga

SEQ ID NO: 360090 - RNA, 15 nt, Human parainfluenza virus 3
ugauccaaauuaaua

SEQ ID NO: 360091 - RNA, 15 nt, Human parainfluenza virus 3
ugcaacucaaucaau

SEQ ID NO: 360092 - RNA, 16 nt, Human parainfluenza virus 3
ugcaacucaaucaaua

SEQ ID NO: 360093 - RNA, 19 nt, Human parainfluenza virus 3
ugcuaaaaacuaucaaauc

SEQ ID NO: 360094 - RNA, 21 nt, Human parainfluenza virus 3
ugcuaauuaauuccaucaaua

SEQ ID NO: 360095 - RNA, 14 nt, Human parainfluenza virus 3
ugcuugcaacucaa

SEQ ID NO: 360096 - RNA, 15 nt, Human parainfluenza virus 3
ugcuugcaacucaau

SEQ ID NO: 360097 - RNA, 11 nt, Human parainfluenza virus 3
uggaaucucac

SEQ ID NO: 360098 - RNA, 17 nt, Human parainfluenza virus 3
uggaucaacugacaaaa

SEQ ID NO: 360099 - RNA, 22 nt, Human parainfluenza virus 3
uggucauauagaaccauuacca

SEQ ID NO: 360100 - RNA, 13 nt, Human parainfluenza virus 3
ugucauugaucac

SEQ ID NO: 360101 - RNA, 21 nt, Human parainfluenza virus 3
uuaaaauuaugacugagagag

SEQ ID NO: 360102 - RNA, 20 nt, Human parainfluenza virus 3
uuaagccgaagcaaauaagg

SEQ ID NO: 360103 - RNA, 13 nt, Human parainfluenza virus 3
uuauacaaaagaa

SEQ ID NO: 360104 - RNA, 15 nt, Human parainfluenza virus 3
uuaucaauaguuuuc

SEQ ID NO: 360105 - RNA, 16 nt, Human parainfluenza virus 3
uucaauacaccaagaa

SEQ ID NO: 360106 - RNA, 21 nt, Human parainfluenza virus 3
uucaucauagugcuaauuaau

SEQ ID NO: 360107 - RNA, 15 nt, Human parainfluenza virus 3
uugaauucauacuua

SEQ ID NO: 360108 - RNA, 16 nt, Human parainfluenza virus 3
uugcaacucaaucaau

SEQ ID NO: 360109 - RNA, 22 nt, Human parainfluenza virus 3
uuucaauggacaacgacacaaa

SEQ ID NO: 360110 - RNA, 17 nt, Human parainfluenza virus 3
uuuucaucauagugcua

SEQ ID NO: 360111 - RNA, 17 nt, Human parainfluenza virus 3
uuuugauccaaauuaau

SEQ ID NO: 360112 - RNA, 12 nt, Human parainfluenza virus 3
aaaaacuaucaa

SEQ ID NO: 360113 - RNA, 20 nt, Human parainfluenza virus 3
aaaaauaguaggacaaagaa

SEQ ID NO: 360114 - RNA, 20 nt, Human parainfluenza virus 3
aaaaccaaaaaaucugaucu

SEQ ID NO: 360115 - RNA, 16 nt, Human parainfluenza virus 3
aaaacgacacaaucaa

SEQ ID NO: 360116 - RNA, 18 nt, Human parainfluenza virus 3
aaaacgacacaaucaaca

SEQ ID NO: 360117 - RNA, 16 nt, Human parainfluenza virus 3
aaaacuuaggacaaaa

SEQ ID NO: 360118 - RNA, 18 nt, Human parainfluenza virus 3
aaaaguacagaacaccaa

SEQ ID NO: 360119 - RNA, 18 nt, Human parainfluenza virus 3
aaaauaguaggacaaaga

SEQ ID NO: 360120 - RNA, 15 nt, Human parainfluenza virus 3
aaaaucaaaccaaca

SEQ ID NO: 360121 - RNA, 12 nt, Human parainfluenza virus 3
aaaaucuaucaa

SEQ ID NO: 360122 - RNA, 15 nt, Human parainfluenza virus 3
aaaauggacacugaa

SEQ ID NO: 360123 - RNA, 16 nt, Human parainfluenza virus 3
aaacaauagauaucaa

SEQ ID NO: 360124 - RNA, 17 nt, Human parainfluenza virus 3
aaagauacugacaacca

SEQ ID NO: 360125 - RNA, 20 nt, Human parainfluenza virus 3
aaagggaugaagauaucaca

SEQ ID NO: 360126 - RNA, 21 nt, Human parainfluenza virus 3
aaaguacagaacaccaaaaca

SEQ ID NO: 360127 - RNA, 18 nt, Human parainfluenza virus 3
aaaguuacgcaauccaac

SEQ ID NO: 360128 - RNA, 14 nt, Human parainfluenza virus 3
aaauagauaucaca

SEQ ID NO: 360129 - RNA, 21 nt, Human parainfluenza virus 3
aaaucucaaaaacaacaacca

SEQ ID NO: 360130 - RNA, 22 nt, Human parainfluenza virus 3
aaaucuuaaaauuaugacugag

SEQ ID NO: 360131 - RNA, 15 nt, Human parainfluenza virus 3
aaauggacacugaau

SEQ ID NO: 360132 - RNA, 12 nt, Human parainfluenza virus 3
aacaacaaccau

SEQ ID NO: 360133 - RNA, 19 nt, Human parainfluenza virus 3
aacaauagauaucaaucaa

SEQ ID NO: 360134 - RNA, 23 nt, Human parainfluenza virus 3
aacaguagaucaaaaucuaucaa

SEQ ID NO: 360135 - RNA, 11 nt, Human parainfluenza virus 3
aacauguaaua

SEQ ID NO: 360136 - RNA, 11 nt, Human parainfluenza virus 3
aaccaaaaauc

SEQ ID NO: 360137 - RNA, 14 nt, Human parainfluenza virus 3
aacgaaucaaagac

SEQ ID NO: 360138 - RNA, 21 nt, Human parainfluenza virus 3
aacgacacaaucaacacaaga

SEQ ID NO: 360139 - RNA, 14 nt, Human parainfluenza virus 3
aacuaucaaaucau

SEQ ID NO: 360140 - RNA, 11 nt, Human parainfluenza virus 3
aacucaaucaa

SEQ ID NO: 360141 - RNA, 23 nt, Human parainfluenza virus 3
aacucagugccaccaucuaucaa

SEQ ID NO: 360142 - RNA, 22 nt, Human parainfluenza virus 3
caaagcgugcucggaaaaugga

SEQ ID NO: 360143 - RNA, 21 nt, Human parainfluenza virus 3
caaagggaugaagauaucaca

SEQ ID NO: 360144 - RNA, 14 nt, Human parainfluenza virus 3
caaauagauaucac

SEQ ID NO: 360145 - RNA, 22 nt, Human parainfluenza virus 3
caacaaaaccaaaaaaucugau

SEQ ID NO: 360146 - RNA, 13 nt, Human parainfluenza virus 3
caacaaccaucaa

SEQ ID NO: 360147 - RNA, 16 nt, Human parainfluenza virus 3
caacauuuugauccaa

SEQ ID NO: 360148 - RNA, 22 nt, Human parainfluenza virus 3
caacauuuugauccaaauuaau

SEQ ID NO: 360149 - RNA, 23 nt, Human parainfluenza virus 3
caacauuuugauccaaauuaaua

SEQ ID NO: 360150 - RNA, 16 nt, Human parainfluenza virus 3
caaccaucaacaccga

SEQ ID NO: 360151 - RNA, 22 nt, Human parainfluenza virus 3
caauacuaguuaucacuagaca

SEQ ID NO: 360152 - RNA, 18 nt, Human parainfluenza virus 3
caauagacaaauccaaau

SEQ ID NO: 360153 - RNA, 19 nt, Human parainfluenza virus 3
caauagagaguugauggaa

SEQ ID NO: 360154 - RNA, 16 nt, Human parainfluenza virus 3
caauaucauugaauuc

SEQ ID NO: 360155 - RNA, 19 nt, Human parainfluenza virus 3
caauaucauugaauucaua

SEQ ID NO: 360156 - RNA, 16 nt, Human parainfluenza virus 3
caaucaauauacaaau

SEQ ID NO: 360157 - RNA, 16 nt, Human parainfluenza virus 3
caaucagacaauggac

SEQ ID NO: 360158 - RNA, 20 nt, Human parainfluenza virus 3
caauggacaacgacacaaaa

SEQ ID NO: 360159 - RNA, 21 nt, Human parainfluenza virus 3
caauguagauacugcaucaaa

SEQ ID NO: 360160 - RNA, 23 nt, Human parainfluenza virus 3
caauguagauacugcaucaaaga

SEQ ID NO: 360161 - RNA, 13 nt, Human parainfluenza virus 3
cacaagaacccag

SEQ ID NO: 360162 - RNA, 12 nt, Human parainfluenza virus 3
cacucaaaguca

SEQ ID NO: 360163 - RNA, 14 nt, Human parainfluenza virus 3
cagaaaagauccaa

SEQ ID NO: 360164 - RNA, 12 nt, Human parainfluenza virus 3
cagaacaccaaa

SEQ ID NO: 360165 - RNA, 18 nt, Human parainfluenza virus 3
cagaaugaaacaauagau

SEQ ID NO: 360166 - RNA, 23 nt, Human parainfluenza virus 3
cagaaugaaacaauagauaucaa

SEQ ID NO: 360167 - RNA, 15 nt, Human parainfluenza virus 3
cagacagaaucauca

SEQ ID NO: 360168 - RNA, 18 nt, Human parainfluenza virus 3
cagcaaucagacaaugga

SEQ ID NO: 360169 - RNA, 16 nt, Human parainfluenza virus 3
caguaccccacauuag

SEQ ID NO: 360170 - RNA, 13 nt, Human parainfluenza virus 3
caguagaucaaaa

SEQ ID NO: 360171 - RNA, 21 nt, Human parainfluenza virus 3
caguagaucaaaaucuaucaa

SEQ ID NO: 360172 - RNA, 14 nt, Human parainfluenza virus 3
cauagugcuaauua

SEQ ID NO: 360173 - RNA, 13 nt, Human parainfluenza virus 3
caucaauagugaa

SEQ ID NO: 360174 - RNA, 13 nt, Human parainfluenza virus 3
caucauagugcua

SEQ ID NO: 360175 - RNA, 16 nt, Human parainfluenza virus 3
caucauggaaucucac

SEQ ID NO: 360176 - RNA, 18 nt, Human parainfluenza virus 3
cauggcuacucauaacaa

SEQ ID NO: 360177 - RNA, 19 nt, Human parainfluenza virus 3
cauucuuugaaaaugguca

SEQ ID NO: 360178 - RNA, 18 nt, Human parainfluenza virus 3
cauugauaacaacacaga

SEQ ID NO: 360179 - RNA, 13 nt, Human parainfluenza virus 3
ccaaaaaucaaac

SEQ ID NO: 360180 - RNA, 22 nt, Human parainfluenza virus 3
ccaaaaugaguauaacuaacuc

SEQ ID NO: 360181 - RNA, 17 nt, Human parainfluenza virus 3
ccaauagacaaauccaa

SEQ ID NO: 360182 - RNA, 22 nt, Human parainfluenza virus 3
ccacauuagaguugccaaaauc

SEQ ID NO: 360183 - RNA, 16 nt, Human parainfluenza virus 3
ccaccaaaacauggau

SEQ ID NO: 360184 - RNA, 12 nt, Human parainfluenza virus 3
ccaccaucuauc

SEQ ID NO: 360185 - RNA, 21 nt, Human parainfluenza virus 3
ccagaaucaucauucuuugaa

SEQ ID NO: 360186 - RNA, 12 nt, Human parainfluenza virus 3
ccagcaacucag

SEQ ID NO: 360187 - RNA, 18 nt, Human parainfluenza virus 3
ccaucuaucaaccaaaaa

SEQ ID NO: 360188 - RNA, 17 nt, Human parainfluenza virus 3
ccauuaccacucaaagu

SEQ ID NO: 360189 - RNA, 19 nt, Human parainfluenza virus 3
ccauugauaacaacacaga

SEQ ID NO: 360190 - RNA, 21 nt, Human parainfluenza virus 3
cgaaauggaacgaaucaaaga

SEQ ID NO: 360191 - RNA, 22 nt, Human parainfluenza virus 3
cgaaauggaacgaaucaaagac

SEQ ID NO: 360192 - RNA, 18 nt, Human parainfluenza virus 3
cgaagcaaauaagggaua

SEQ ID NO: 360193 - RNA, 12 nt, Human parainfluenza virus 3
cgaaucaaagac

SEQ ID NO: 360194 - RNA, 20 nt, Human parainfluenza virus 3
cggaaaacgacacaaucaac

SEQ ID NO: 360195 - RNA, 22 nt, Human parainfluenza virus 3
cggaaauccaccaaaacaugga

SEQ ID NO: 360196 - RNA, 19 nt, Human parainfluenza virus 3
cuaauuaauuccaucaaua

SEQ ID NO: 360197 - RNA, 21 nt, Human parainfluenza virus 3
cuacagauccacaucaaaagg

SEQ ID NO: 360198 - RNA, 23 nt, Human parainfluenza virus 3
cuagacagaaaauaaaacucaau

SEQ ID NO: 360199 - RNA, 13 nt, Human parainfluenza virus 3
cuaucaaccaaaa

SEQ ID NO: 360200 - RNA, 17 nt, Human parainfluenza virus 3
cuaucaaccaaaaauca

SEQ ID NO: 360201 - RNA, 22 nt, Human parainfluenza virus 3
cuaucggaaaacgacacaauca

SEQ ID NO: 360202 - RNA, 16 nt, Human parainfluenza virus 3
cuauuauaccagaaua

SEQ ID NO: 360203 - RNA, 21 nt, Human parainfluenza virus 3
cucaaagucaaugaacagaga

SEQ ID NO: 360204 - RNA, 20 nt, Human parainfluenza virus 3
cucaauaucauugaauucau

SEQ ID NO: 360205 - RNA, 19 nt, Human parainfluenza virus 3
cucacuaauaagauaauau

SEQ ID NO: 360206 - RNA, 19 nt, Human parainfluenza virus 3
cucugcaauauacacauuc

SEQ ID NO: 360207 - RNA, 15 nt, Human parainfluenza virus 3
cugaaucuaacaaug

SEQ ID NO: 360208 - RNA, 23 nt, Human parainfluenza virus 3
cugacaaccagauaccaacauca

SEQ ID NO: 360209 - RNA, 20 nt, Human parainfluenza virus 3
cuggaagcauaccaaucacg

SEQ ID NO: 360210 - RNA, 15 nt, Human parainfluenza virus 3
cuuaggacaaaagag

SEQ ID NO: 360211 - RNA, 14 nt, Human parainfluenza virus 3
cuuauacaaaagaa

SEQ ID NO: 360212 - RNA, 12 nt, Human parainfluenza virus 3
cuugcaacucaa

SEQ ID NO: 360213 - RNA, 14 nt, Human parainfluenza virus 3
gaaaagcaguaccc

SEQ ID NO: 360214 - RNA, 13 nt, Human parainfluenza virus 3
gaaaaucaaagag

SEQ ID NO: 360215 - RNA, 15 nt, Human parainfluenza virus 3
gaaaauggacacuga

SEQ ID NO: 360216 - RNA, 16 nt, Human parainfluenza virus 3
gaaaauggaugaauca

SEQ ID NO: 360217 - RNA, 18 nt, Human parainfluenza virus 3
gaaaauggucauauagaa

SEQ ID NO: 360218 - RNA, 13 nt, Human parainfluenza virus 3
gaaagaccaaaau

SEQ ID NO: 360219 - RNA, 16 nt, Human parainfluenza virus 3
gaaauccaccaaaaca

SEQ ID NO: 360220 - RNA, 21 nt, Human parainfluenza virus 3
gaagaaauacuaaugaaaaau

SEQ ID NO: 360221 - RNA, 21 nt, Human parainfluenza virus 3
gaagaccuaucggaaaacgac

SEQ ID NO: 360222 - RNA, 19 nt, Human parainfluenza virus 3
gaaucaacauuuugaucca

SEQ ID NO: 360223 - RNA, 22 nt, Human parainfluenza virus 3
gaaucaacauuuugauccaaau

SEQ ID NO: 360224 - RNA, 18 nt, Human parainfluenza virus 3
gaaucuaacaauggcacu

SEQ ID NO: 360225 - RNA, 22 nt, Human parainfluenza virus 3
gacuacagauccacaucaaaag

SEQ ID NO: 360226 - RNA, 14 nt, Human parainfluenza virus 3
gagaaaucaaaaca

SEQ ID NO: 360227 - RNA, 18 nt, Human parainfluenza virus 3
gagauaaaucaacuaaua

SEQ ID NO: 360228 - RNA, 14 nt, Human parainfluenza virus 3
gauaccaacaucag

SEQ ID NO: 360229 - RNA, 15 nt, Human parainfluenza virus 3
gauacugacaaccag

SEQ ID NO: 360230 - RNA, 17 nt, Human parainfluenza virus 3
gauacugacaaccagau

SEQ ID NO: 360231 - RNA, 22 nt, Human parainfluenza virus 3
gauaguggaucaacugacaaaa

SEQ ID NO: 360232 - RNA, 18 nt, Human parainfluenza virus 3
gauaucaaucaauauaca

SEQ ID NO: 360233 - RNA, 13 nt, Human parainfluenza virus 3
gaucaacugacaa

SEQ ID NO: 360234 - RNA, 18 nt, Human parainfluenza virus 3
gaucuaaagaaaauggau

SEQ ID NO: 360235 - RNA, 14 nt, Human parainfluenza virus 3
gaugaagauaucac

SEQ ID NO: 360236 - RNA, 12 nt, Human parainfluenza virus 3
gaugacaaaaga

SEQ ID NO: 360237 - RNA, 13 nt, Human parainfluenza virus 3
gaugcuaaaaacu

SEQ ID NO: 360238 - RNA, 11 nt, Human parainfluenza virus 3
gcaacucagug

SEQ ID NO: 360239 - RNA, 16 nt, Human parainfluenza virus 3
gcaaucagacaaugga

SEQ ID NO: 360240 - RNA, 19 nt, Human parainfluenza virus 3
gcaauccaacucuacucau

SEQ ID NO: 360241 - RNA, 20 nt, Human parainfluenza virus 3
gccaccaucuaucaaccaaa

SEQ ID NO: 360242 - RNA, 21 nt, Human parainfluenza virus 3
gccaccaucuaucaaccaaaa

SEQ ID NO: 360243 - RNA, 21 nt, Human parainfluenza virus 3
gcccaaggauagacaaaaagu

SEQ ID NO: 360244 - RNA, 20 nt, Human parainfluenza virus 3
aacucccccaacaacaaccu

SEQ ID NO: 360245 - RNA, 12 nt, Human parainfluenza virus 3
aacucuacucau

SEQ ID NO: 360246 - RNA, 14 nt, Human parainfluenza virus 3
aacucuacucauac

SEQ ID NO: 360247 - RNA, 15 nt, Human parainfluenza virus 3
aacuuaggacaaaag

SEQ ID NO: 360248 - RNA, 18 nt, Human parainfluenza virus 3
aacuuaggacaaaagagg

SEQ ID NO: 360249 - RNA, 21 nt, Human parainfluenza virus 3
aacuuaggauuaaagaauccu

SEQ ID NO: 360250 - RNA, 15 nt, Human parainfluenza virus 3
aacuuauacaaaaga

SEQ ID NO: 360251 - RNA, 20 nt, Human parainfluenza virus 3
aacuuauacaaaagaaucaa

SEQ ID NO: 360252 - RNA, 13 nt, Human parainfluenza virus 3
aagaaaaucucaa

SEQ ID NO: 360253 - RNA, 15 nt, Human parainfluenza virus 3
aagaagaugacaaaa

SEQ ID NO: 360254 - RNA, 19 nt, Human parainfluenza virus 3
aagaauaaauuaauccuua

SEQ ID NO: 360255 - RNA, 19 nt, Human parainfluenza virus 3
aagaaucaauccgaacaaa

SEQ ID NO: 360256 - RNA, 18 nt, Human parainfluenza virus 3
aagagacuggcaacacag

SEQ ID NO: 360257 - RNA, 14 nt, Human parainfluenza virus 3
aagagauaaaucaa

SEQ ID NO: 360258 - RNA, 15 nt, Human parainfluenza virus 3
aagauaguggaucaa

SEQ ID NO: 360259 - RNA, 22 nt, Human parainfluenza virus 3
aagcaaauaagggauaaucaaa

SEQ ID NO: 360260 - RNA, 15 nt, Human parainfluenza virus 3
aagcucacuaauaag

SEQ ID NO: 360261 - RNA, 16 nt, Human parainfluenza virus 3
aaguuacgcaauccaa

SEQ ID NO: 360262 - RNA, 16 nt, Human parainfluenza virus 3
aauagauaucaaucaa

SEQ ID NO: 360263 - RNA, 14 nt, Human parainfluenza virus 3
aauaguaggacaaa

SEQ ID NO: 360264 - RNA, 15 nt, Human parainfluenza virus 3
aauauuaacugagaa

SEQ ID NO: 360265 - RNA, 21 nt, Human parainfluenza virus 3
aaucaagagauaaaucaacua

SEQ ID NO: 360266 - RNA, 17 nt, Human parainfluenza virus 3
aaucaagcagaaugaaa

SEQ ID NO: 360267 - RNA, 22 nt, Human parainfluenza virus 3
aaucaauagagaguugauggaa

SEQ ID NO: 360268 - RNA, 14 nt, Human parainfluenza virus 3
aaucagacaaugga

SEQ ID NO: 360269 - RNA, 16 nt, Human parainfluenza virus 3
aaucagcaaucagaca

SEQ ID NO: 360270 - RNA, 21 nt, Human parainfluenza virus 3
aaucaucaggaacacaauccu

SEQ ID NO: 360271 - RNA, 13 nt, Human parainfluenza virus 3
aauccaccaaaac

SEQ ID NO: 360272 - RNA, 22 nt, Human parainfluenza virus 3
aauguagauacugcaucaaaga

SEQ ID NO: 360273 - RNA, 14 nt, Human parainfluenza virus 3
acaaacacaacucc

SEQ ID NO: 360274 - RNA, 12 nt, Human parainfluenza virus 3
acaaauccaaau

SEQ ID NO: 360275 - RNA, 14 nt, Human parainfluenza virus 3
acaacaaaaccaaa

SEQ ID NO: 360276 - RNA, 19 nt, Human parainfluenza virus 3
acaacaguagaucaaaauc

SEQ ID NO: 360277 - RNA, 18 nt, Human parainfluenza virus 3
acaacucccccaacaaca

SEQ ID NO: 360278 - RNA, 17 nt, Human parainfluenza virus 3
acaagaaacaacaguag

SEQ ID NO: 360279 - RNA, 14 nt, Human parainfluenza virus 3
acaauagauaucaa

SEQ ID NO: 360280 - RNA, 20 nt, Human parainfluenza virus 3
acacacaaaaucaagcagaa

SEQ ID NO: 360281 - RNA, 14 nt, Human parainfluenza virus 3
acacacacaaaauc

SEQ ID NO: 360282 - RNA, 23 nt, Human parainfluenza virus 3
acagaucgaaccgaacagacaaa

SEQ ID NO: 360283 - RNA, 15 nt, Human parainfluenza virus 3
acaucaaaagggcag

SEQ ID NO: 360284 - RNA, 17 nt, Human parainfluenza virus 3
accaucuaucaaccaaa

SEQ ID NO: 360285 - RNA, 18 nt, Human parainfluenza virus 3
accaucuaucaaccaaaa

SEQ ID NO: 360286 - RNA, 18 nt, Human parainfluenza virus 3
accauugauaacaacaca

SEQ ID NO: 360287 - RNA, 20 nt, Human parainfluenza virus 3
accauugauaacaacacaga

SEQ ID NO: 360288 - RNA, 18 nt, Human parainfluenza virus 3
acuaacucugcaauauac

SEQ ID NO: 360289 - RNA, 16 nt, Human parainfluenza virus 3
acuaguuaucacuaga

SEQ ID NO: 360290 - RNA, 22 nt, Human parainfluenza virus 3
acucaaagucaaugaacagaga

SEQ ID NO: 360291 - RNA, 16 nt, Human parainfluenza virus 3
acucaaucaauagaga

SEQ ID NO: 360292 - RNA, 14 nt, Human parainfluenza virus 3
acugcaucaaagau

SEQ ID NO: 360293 - RNA, 19 nt, Human parainfluenza virus 3
acuggaagcauaccaauca

SEQ ID NO: 360294 - RNA, 16 nt, Human parainfluenza virus 3
acugucauugaucacg

SEQ ID NO: 360295 - RNA, 16 nt, Human parainfluenza virus 3
agaaacaacaguagau

SEQ ID NO: 360296 - RNA, 17 nt, Human parainfluenza virus 3
agaaagaagggacaaaa

SEQ ID NO: 360297 - RNA, 12 nt, Human parainfluenza virus 3
agaaagaccaaa

SEQ ID NO: 360298 - RNA, 14 nt, Human parainfluenza virus 3
agaacaccaaaaca

SEQ ID NO: 360299 - RNA, 17 nt, Human parainfluenza virus 3
agaagaugacaaaagaa

SEQ ID NO: 360300 - RNA, 18 nt, Human parainfluenza virus 3
agaagauuaaaauuaaua

SEQ ID NO: 360301 - RNA, 19 nt, Human parainfluenza virus 3
agacaaauccaaauucgag

SEQ ID NO: 360302 - RNA, 12 nt, Human parainfluenza virus 3
agacagaaucau

SEQ ID NO: 360303 - RNA, 20 nt, Human parainfluenza virus 3
agacguccauggcuacucau

SEQ ID NO: 360304 - RNA, 19 nt, Human parainfluenza virus 3
agagaguauccaugaucaa

SEQ ID NO: 360305 - RNA, 18 nt, Human parainfluenza virus 3
agauggaauacuggaagc

SEQ ID NO: 360306 - RNA, 22 nt, Human parainfluenza virus 3
aggaguaaaguuacgcaaucca

SEQ ID NO: 360307 - RNA, 13 nt, Human parainfluenza virus 3
agggauaaucaaa

SEQ ID NO: 360308 - RNA, 19 nt, Human parainfluenza virus 3
agggaugaagauaucacaa

SEQ ID NO: 360309 - RNA, 22 nt, Human parainfluenza virus 3
aguggaucaacugacaaaaaua

SEQ ID NO: 360310 - RNA, 14 nt, Human parainfluenza virus 3
aguuacgcaaucca

SEQ ID NO: 360311 - RNA, 23 nt, Human parainfluenza virus 3
auaacuaacucugcaauauacac

SEQ ID NO: 360312 - RNA, 12 nt, Human parainfluenza virus 3
auaccaacauca

SEQ ID NO: 360313 - RNA, 15 nt, Human parainfluenza virus 3
auagaaaaucaaaga

SEQ ID NO: 360314 - RNA, 21 nt, Human parainfluenza virus 3
auagaaaaucaaagagaacaa

SEQ ID NO: 360315 - RNA, 19 nt, Human parainfluenza virus 3
auagauaucaaucaauaua

SEQ ID NO: 360316 - RNA, 11 nt, Human parainfluenza virus 3
auagauaucac

SEQ ID NO: 360317 - RNA, 14 nt, Human parainfluenza virus 3
auaggagaaaucaa

SEQ ID NO: 360318 - RNA, 15 nt, Human parainfluenza virus 3
auagugcuaauuaau

SEQ ID NO: 360319 - RNA, 23 nt, Human parainfluenza virus 3
auaguggaucaacugacaaaaau

SEQ ID NO: 360320 - RNA, 12 nt, Human parainfluenza virus 3
auauacaaauaa

SEQ ID NO: 360321 - RNA, 19 nt, Human parainfluenza virus 3
auauauauuauggacaaua

SEQ ID NO: 360322 - RNA, 13 nt, Human parainfluenza virus 3
auaucaagacaaa

SEQ ID NO: 360323 - RNA, 22 nt, Human parainfluenza virus 3
aucaaaagauacugacaaccag

SEQ ID NO: 360324 - RNA, 15 nt, Human parainfluenza virus 3
aucaaaaucuaucaa

SEQ ID NO: 360325 - RNA, 18 nt, Human parainfluenza virus 3
aucaacacaagaacccag

SEQ ID NO: 360326 - RNA, 24 nt, Human parainfluenza virus 3
aucaaccaaaaaucaaaccaacag

SEQ ID NO: 360327 - RNA, 22 nt, Human parainfluenza virus 3
aucaagcagaaugaaacaauag

SEQ ID NO: 360328 - RNA, 22 nt, Human parainfluenza virus 3
aucaauagugaaaagguccaua

SEQ ID NO: 360329 - RNA, 21 nt, Human parainfluenza virus 3
aucauagugcuaauuaauucc

SEQ ID NO: 360330 - RNA, 15 nt, Human parainfluenza virus 3
aucauggaaucucac

SEQ ID NO: 360331 - RNA, 18 nt, Human parainfluenza virus 3
aucggaaaacgacacaau

SEQ ID NO: 360332 - RNA, 13 nt, Human parainfluenza virus 3
aucggaaauccac

SEQ ID NO: 360333 - RNA, 13 nt, Human parainfluenza virus 3
aucuaacaauggc

SEQ ID NO: 360334 - RNA, 17 nt, Human parainfluenza virus 3
aucuaucaaccaaaaau

SEQ ID NO: 360335 - RNA, 20 nt, Human parainfluenza virus 3
aucucaaaaacaacaaccau

SEQ ID NO: 360336 - RNA, 17 nt, Human parainfluenza virus 3
augaagauaucacaaaa

SEQ ID NO: 360337 - RNA, 18 nt, Human parainfluenza virus 3
auggaaagcgaugcuaaa

SEQ ID NO: 360338 - RNA, 16 nt, Human parainfluenza virus 3
auggacaacgacacaa

SEQ ID NO: 360339 - RNA, 18 nt, Human parainfluenza virus 3
auggcacuguaucugaca

SEQ ID NO: 360340 - RNA, 13 nt, Human parainfluenza virus 3
auuaaccuaucua

SEQ ID NO: 360341 - RNA, 18 nt, Human parainfluenza virus 3
caaaaaucaaaccaacag

SEQ ID NO: 360342 - RNA, 21 nt, Human parainfluenza virus 3
caaaagaggucaacaccaaca

SEQ ID NO: 360343 - RNA, 19 nt, Human parainfluenza virus 3
caaaauaggagaaaucaaa

SEQ ID NO: 360344 - RNA, 17 nt, Human parainfluenza virus 3
caaaaucggaaauccac

SEQ ID NO: 360345 - RNA, 13 nt, Human parainfluenza virus 3
caaaaucuaucaa

SEQ ID NO: 360346 - RNA, 22 nt, Human parainfluenza virus 3
caaaaugaauccaaugagagag

SEQ ID NO: 360347 - RNA, 17 nt, Human parainfluenza virus 3
ggaacgaaucaaagaca

SEQ ID NO: 360348 - RNA, 17 nt, Human parainfluenza virus 3
ggacaaaaaaagcaaaa

SEQ ID NO: 360349 - RNA, 15 nt, Human parainfluenza virus 3
ggauaaucaaaaacu

SEQ ID NO: 360350 - RNA, 20 nt, Human parainfluenza virus 3
ggaucaacuuauacaaaaga

SEQ ID NO: 360351 - RNA, 20 nt, Human parainfluenza virus 3
ggcaaacagaaauacagaca

SEQ ID NO: 360352 - RNA, 18 nt, Human parainfluenza virus 3
gggacaaaaaaagcaaaa

SEQ ID NO: 360353 - RNA, 16 nt, Human parainfluenza virus 3
gggaugaagauaucac

SEQ ID NO: 360354 - RNA, 21 nt, Human parainfluenza virus 3
guaaaugaucucgacagugac

SEQ ID NO: 360355 - RNA, 22 nt, Human parainfluenza virus 3
guaucugacauacucuauccug

SEQ ID NO: 360356 - RNA, 22 nt, Human parainfluenza virus 3
gucauagggguuucaauggaca

SEQ ID NO: 360357 - RNA, 16 nt, Human parainfluenza virus 3
guccauggcuacucau

SEQ ID NO: 360358 - RNA, 19 nt, Human parainfluenza virus 3
gugcucggaaaauggacac

SEQ ID NO: 360359 - RNA, 21 nt, Human parainfluenza virus 3
guuacugcugcaacaccagau

SEQ ID NO: 360360 - RNA, 14 nt, Human parainfluenza virus 3
guuuaagaaaucaa

SEQ ID NO: 360361 - RNA, 18 nt, Human parainfluenza virus 3
guuugcuugcaacucaau

SEQ ID NO: 360362 - RNA, 13 nt, Human parainfluenza virus 3
uaaaagacaacga

SEQ ID NO: 360363 - RNA, 13 nt, Human parainfluenza virus 3
uaaaauagcacaa

SEQ ID NO: 360364 - RNA, 17 nt, Human parainfluenza virus 3
uaacacagauacaaaau

SEQ ID NO: 360365 - RNA, 16 nt, Human parainfluenza virus 3
uaauauauauauacca

SEQ ID NO: 360366 - RNA, 21 nt, Human parainfluenza virus 3
uaauaucuccucggcccucaa

SEQ ID NO: 360367 - RNA, 21 nt, Human parainfluenza virus 3
uaaucagcaaucagacaaugg

SEQ ID NO: 360368 - RNA, 23 nt, Human parainfluenza virus 3
uaauccugguguuauuaucaaua

SEQ ID NO: 360369 - RNA, 14 nt, Human parainfluenza virus 3
uaaugagcuggaga

SEQ ID NO: 360370 - RNA, 17 nt, Human parainfluenza virus 3
uaaugaguuuauggaga

SEQ ID NO: 360371 - RNA, 22 nt, Human parainfluenza virus 3
uaaugaguuuauggagauuaca

SEQ ID NO: 360372 - RNA, 18 nt, Human parainfluenza virus 3
uacaauaaagauauaucu

SEQ ID NO: 360373 - RNA, 14 nt, Human parainfluenza virus 3
uacacauucccaga

SEQ ID NO: 360374 - RNA, 23 nt, Human parainfluenza virus 3
uacaccaagaagaugacaaaaga

SEQ ID NO: 360375 - RNA, 13 nt, Human parainfluenza virus 3
uacagaacaccaa

SEQ ID NO: 360376 - RNA, 14 nt, Human parainfluenza virus 3
uacagaacaccaaa

SEQ ID NO: 360377 - RNA, 20 nt, Human parainfluenza virus 3
uaccaacaucagacuacaga

SEQ ID NO: 360378 - RNA, 12 nt, Human parainfluenza virus 3
uacucauacaau

SEQ ID NO: 360379 - RNA, 14 nt, Human parainfluenza virus 3
uacugcaucaaaga

SEQ ID NO: 360380 - RNA, 18 nt, Human parainfluenza virus 3
uacuggaagcauaccaau

SEQ ID NO: 360381 - RNA, 14 nt, Human parainfluenza virus 3
uagacaaauccaaa

SEQ ID NO: 360382 - RNA, 18 nt, Human parainfluenza virus 3
uagauacugcaucaaaga

SEQ ID NO: 360383 - RNA, 15 nt, Human parainfluenza virus 3
uagauaucacaaaac

SEQ ID NO: 360384 - RNA, 19 nt, Human parainfluenza virus 3
uagaucaaaaucuaucaac

SEQ ID NO: 360385 - RNA, 18 nt, Human parainfluenza virus 3
uagugaaaagguccauaa

SEQ ID NO: 360386 - RNA, 22 nt, Human parainfluenza virus 3
uagugaaaagguccauaauuca

SEQ ID NO: 360387 - RNA, 22 nt, Human parainfluenza virus 3
uaguggaucaacugacaaaaau

SEQ ID NO: 360388 - RNA, 22 nt, Human parainfluenza virus 3
uauagaaccauuaccacucaaa

SEQ ID NO: 360389 - RNA, 16 nt, Human parainfluenza virus 3
uaucaacacacacaaa

SEQ ID NO: 360390 - RNA, 14 nt, Human parainfluenza virus 3
uaucaaccaaaaau

SEQ ID NO: 360391 - RNA, 15 nt, Human parainfluenza virus 3
uaucaauaguuuuca

SEQ ID NO: 360392 - RNA, 18 nt, Human parainfluenza virus 3
uaucaaucaauauacaaa

SEQ ID NO: 360393 - RNA, 11 nt, Human parainfluenza virus 3
uaucacaaaac

SEQ ID NO: 360394 - RNA, 13 nt, Human parainfluenza virus 3
uaucacuagacag

SEQ ID NO: 360395 - RNA, 20 nt, Human parainfluenza virus 3
uaucagauauccagaaaugu

SEQ ID NO: 360396 - RNA, 16 nt, Human parainfluenza virus 3
uauccaugaucaaaac

SEQ ID NO: 360397 - RNA, 21 nt, Human parainfluenza virus 3
uauuggucaacagucccaaag

SEQ ID NO: 360398 - RNA, 19 nt, Human parainfluenza virus 3
ucaaaaacaacaaccauca

SEQ ID NO: 360399 - RNA, 11 nt, Human parainfluenza virus 3
ucaacaccaac

SEQ ID NO: 360400 - RNA, 17 nt, Human parainfluenza virus 3
ucaacuaauaucuccuc

SEQ ID NO: 360401 - RNA, 22 nt, Human parainfluenza virus 3
ucaauggacaacgacacaaaau

SEQ ID NO: 360402 - RNA, 15 nt, Human parainfluenza virus 3
ucagacuacagaucc

SEQ ID NO: 360403 - RNA, 21 nt, Human parainfluenza virus 3
ucagacuacagauccacauca

SEQ ID NO: 360404 - RNA, 15 nt, Human parainfluenza virus 3
ucauagugcuaauua

SEQ ID NO: 360405 - RNA, 14 nt, Human parainfluenza virus 3
ucaucagauauuaa

SEQ ID NO: 360406 - RNA, 17 nt, Human parainfluenza virus 3
ucaucauggaaucucac

SEQ ID NO: 360407 - RNA, 15 nt, Human parainfluenza virus 3
uccauggcuacucau

SEQ ID NO: 360408 - RNA, 21 nt, Human parainfluenza virus 3
ucgcaggaacaagaaagaagg

SEQ ID NO: 360409 - RNA, 21 nt, Human parainfluenza virus 3
ucuccucggcccucaauauca

SEQ ID NO: 360410 - RNA, 22 nt, Human parainfluenza virus 3
ucugccaaauagauaucacaaa

SEQ ID NO: 360411 - RNA, 14 nt, Human parainfluenza virus 3
ugaagauaucacaa

SEQ ID NO: 360412 - RNA, 16 nt, Human parainfluenza virus 3
ugaauccaaugagaga

SEQ ID NO: 360413 - RNA, 19 nt, Human parainfluenza virus 3
ugauggaaagcgaugcuaa

SEQ ID NO: 360414 - RNA, 17 nt, Human parainfluenza virus 3
ugccaccaucuaucaac

SEQ ID NO: 360415 - RNA, 16 nt, Human parainfluenza virus 3
ugcucggaaaauggac

SEQ ID NO: 360416 - RNA, 24 nt, Human parainfluenza virus 3
uggauucuugggaagaggaaucaa

SEQ ID NO: 360417 - RNA, 17 nt, Human parainfluenza virus 3
uuaagaaaucaaaagau

SEQ ID NO: 360418 - RNA, 16 nt, Human parainfluenza virus 3
uuaagccgaagcaaau

SEQ ID NO: 360419 - RNA, 19 nt, Human parainfluenza virus 3
uuacagaaaagauccaaau

SEQ ID NO: 360420 - RNA, 16 nt, Human parainfluenza virus 3
uuaccacucaaaguca

SEQ ID NO: 360421 - RNA, 19 nt, Human parainfluenza virus 3
uuagaagauuaaaauuaau

SEQ ID NO: 360422 - RNA, 22 nt, Human parainfluenza virus 3
uuauggcaucuuucugccaaau

SEQ ID NO: 360423 - RNA, 23 nt, Human parainfluenza virus 3
uucgaaauggaacgaaucaaaga

SEQ ID NO: 360424 - RNA, 23 nt, Human parainfluenza virus 3
uucugccaaauagauaucacaaa

SEQ ID NO: 360425 - RNA, 14 nt, Human parainfluenza virus 3
uugcuugcaacuca

SEQ ID NO: 360426 - RNA, 17 nt, Human parainfluenza virus 3
uugcuugcaacucaauc

SEQ ID NO: 360427 - RNA, 15 nt, Human parainfluenza virus 3
uuugcuugcaacuca

SEQ ID NO: 360428 - RNA, 19 nt, Human parainfluenza virus 3
aaaaaucaaaccaacagaa

SEQ ID NO: 360429 - RNA, 19 nt, Human parainfluenza virus 3
aaaacaacaaccaucaaca

SEQ ID NO: 360430 - RNA, 19 nt, Human parainfluenza virus 3
aaaauagcacaauuacaca

SEQ ID NO: 360431 - RNA, 14 nt, Human parainfluenza virus 3
aaaaucaagcagaa

SEQ ID NO: 360432 - RNA, 21 nt, Human parainfluenza virus 3
aaaaucggaaauccaccaaaa

SEQ ID NO: 360433 - RNA, 18 nt, Human parainfluenza virus 3
aaaaucucaaaaacaaca

SEQ ID NO: 360434 - RNA, 14 nt, Human parainfluenza virus 3
aaaauggacacuga

SEQ ID NO: 360435 - RNA, 22 nt, Human parainfluenza virus 3
aaaauggacacugaaucuaaca

SEQ ID NO: 360436 - RNA, 13 nt, Human parainfluenza virus 3
aaaauuaauauua

SEQ ID NO: 360437 - RNA, 16 nt, Human parainfluenza virus 3
aaaauuaugacugaga

SEQ ID NO: 360438 - RNA, 22 nt, Human parainfluenza virus 3
aaacgaguuguauguguagcaa

SEQ ID NO: 360439 - RNA, 21 nt, Human parainfluenza virus 3
aaacuuaggauuaaagaauaa

SEQ ID NO: 360440 - RNA, 23 nt, Human parainfluenza virus 3
aaagcgugcucggaaaauggaca

SEQ ID NO: 360441 - RNA, 16 nt, Human parainfluenza virus 3
aaagguccauaauuca

SEQ ID NO: 360442 - RNA, 13 nt, Human parainfluenza virus 3
aaaguuacgcaau

SEQ ID NO: 360443 - RNA, 15 nt, Human parainfluenza virus 3
aaauaaugaguuuau

SEQ ID NO: 360444 - RNA, 15 nt, Human parainfluenza virus 3
aaaucccaaaagaga

SEQ ID NO: 360445 - RNA, 15 nt, Human parainfluenza virus 3
aaaucugaucuauua

SEQ ID NO: 360446 - RNA, 19 nt, Human parainfluenza virus 3
aaauggaacgaaucaaaga

SEQ ID NO: 360447 - RNA, 23 nt, Human parainfluenza virus 3
aaauguacuaaacaauguagaua

SEQ ID NO: 360448 - RNA, 23 nt, Human parainfluenza virus 3
aaauugaaagaagaaaagaucaa

SEQ ID NO: 360449 - RNA, 14 nt, Human parainfluenza virus 3
aacacagauacaaa

SEQ ID NO: 360450 - RNA, 17 nt, Human parainfluenza virus 3
aacacugcuaauuauua

SEQ ID NO: 360451 - RNA, 20 nt, Human parainfluenza virus 3
aacaguagaucaaaaucuau

SEQ ID NO: 360452 - RNA, 16 nt, Human parainfluenza virus 3
aacaucagacuacaga

SEQ ID NO: 360453 - RNA, 14 nt, Human parainfluenza virus 3
aaccaucaacaccg

SEQ ID NO: 360454 - RNA, 14 nt, Human parainfluenza virus 3
aacgacacaaucaa

SEQ ID NO: 360455 - RNA, 20 nt, Human parainfluenza virus 3
aacuaucaaaucauggauuc

SEQ ID NO: 360456 - RNA, 17 nt, Human parainfluenza virus 3
aagaaacaacaguagau

SEQ ID NO: 360457 - RNA, 14 nt, Human parainfluenza virus 3
aagaaagaccaaaa

SEQ ID NO: 360458 - RNA, 16 nt, Human parainfluenza virus 3
aagaggucaacaccaa

SEQ ID NO: 360459 - RNA, 18 nt, Human parainfluenza virus 3
aagauacugacaaccaga

SEQ ID NO: 360460 - RNA, 15 nt, Human parainfluenza virus 3
aagauaucacaaaac

SEQ ID NO: 360461 - RNA, 22 nt, Human parainfluenza virus 3
aagauugauagaaaaucaaaga

SEQ ID NO: 360462 - RNA, 12 nt, Human parainfluenza virus 3
aagcauaccaau

SEQ ID NO: 360463 - RNA, 22 nt, Human parainfluenza virus 3
aagcgugcucggaaaauggaca

SEQ ID NO: 360464 - RNA, 11 nt, Human parainfluenza virus 3
aauacagacag

SEQ ID NO: 360465 - RNA, 19 nt, Human parainfluenza virus 3
aauacuggaagcauaccaa

SEQ ID NO: 360466 - RNA, 14 nt, Human parainfluenza virus 3
aauagagaguugau

SEQ ID NO: 360467 - RNA, 14 nt, Human parainfluenza virus 3
caaagauagacuuc

SEQ ID NO: 360468 - RNA, 23 nt, Human parainfluenza virus 3
caaagcgugcucggaaaauggac

SEQ ID NO: 360469 - RNA, 20 nt, Human parainfluenza virus 3
caaagggaugaagauaucac

SEQ ID NO: 360470 - RNA, 18 nt, Human parainfluenza virus 3
caaauaagggauaaucaa

SEQ ID NO: 360471 - RNA, 16 nt, Human parainfluenza virus 3
caaauagauaucacaa

SEQ ID NO: 360472 - RNA, 23 nt, Human parainfluenza virus 3
caaauggcaucggauaauaccaa

SEQ ID NO: 360473 - RNA, 14 nt, Human parainfluenza virus 3
caacaacaaccucc

SEQ ID NO: 360474 - RNA, 14 nt, Human parainfluenza virus 3
caacaguagaucaa

SEQ ID NO: 360475 - RNA, 17 nt, Human parainfluenza virus 3
caacaguagaucaaaau

SEQ ID NO: 360476 - RNA, 12 nt, Human parainfluenza virus 3
caacucaaucaa

SEQ ID NO: 360477 - RNA, 13 nt, Human parainfluenza virus 3
caacucaaucaau

SEQ ID NO: 360478 - RNA, 14 nt, Human parainfluenza virus 3
caacucaaucaaua

SEQ ID NO: 360479 - RNA, 17 nt, Human parainfluenza virus 3
caacucuacucauacaa

SEQ ID NO: 360480 - RNA, 12 nt, Human parainfluenza virus 3
caauauacacau

SEQ ID NO: 360481 - RNA, 23 nt, Human parainfluenza virus 3
caaucacggaaaggaugcuggua

SEQ ID NO: 360482 - RNA, 16 nt, Human parainfluenza virus 3
cacaaucaacacaaga

SEQ ID NO: 360483 - RNA, 19 nt, Human parainfluenza virus 3
cacaauuacacacuauuau

SEQ ID NO: 360484 - RNA, 18 nt, Human parainfluenza virus 3
cacaucaaaacuagauuu

SEQ ID NO: 360485 - RNA, 18 nt, Human parainfluenza virus 3
cacgucauuaauuucaaa

SEQ ID NO: 360486 - RNA, 13 nt, Human parainfluenza virus 3
cagaacaccaaaa

SEQ ID NO: 360487 - RNA, 16 nt, Human parainfluenza virus 3
cagaagaaaaucucaa

SEQ ID NO: 360488 - RNA, 16 nt, Human parainfluenza virus 3
cagucccaaagggaug

SEQ ID NO: 360489 - RNA, 17 nt, Human parainfluenza virus 3
cagucugggucaucaca

SEQ ID NO: 360490 - RNA, 19 nt, Human parainfluenza virus 3
cagugccaccaucuaucaa

SEQ ID NO: 360491 - RNA, 13 nt, Human parainfluenza virus 3
cauaauucauugc

SEQ ID NO: 360492 - RNA, 18 nt, Human parainfluenza virus 3
caucuaucaaccaaaaau

SEQ ID NO: 360493 - RNA, 22 nt, Human parainfluenza virus 3
caugaucaaaacaaaauugaaa

SEQ ID NO: 360494 - RNA, 20 nt, Human parainfluenza virus 3
cauuaagccgaagcaaauaa

SEQ ID NO: 360495 - RNA, 21 nt, Human parainfluenza virus 3
cauuuaucagauauccagaaa

SEQ ID NO: 360496 - RNA, 20 nt, Human parainfluenza virus 3
ccaaagggaugaagauauca

SEQ ID NO: 360497 - RNA, 15 nt, Human parainfluenza virus 3
ccaaauagauaucac

SEQ ID NO: 360498 - RNA, 16 nt, Human parainfluenza virus 3
ccaaauagauaucaca

SEQ ID NO: 360499 - RNA, 20 nt, Human parainfluenza virus 3
ccaagaagaugacaaaagaa

SEQ ID NO: 360500 - RNA, 20 nt, Human parainfluenza virus 3
ccaaugaucuaauacaguca

SEQ ID NO: 360501 - RNA, 18 nt, Human parainfluenza virus 3
ccacucaaagucaaugaa

SEQ ID NO: 360502 - RNA, 15 nt, Human parainfluenza virus 3
ccaucuaucaaccaa

SEQ ID NO: 360503 - RNA, 13 nt, Human parainfluenza virus 3
cccagcaacucag

SEQ ID NO: 360504 - RNA, 18 nt, Human parainfluenza virus 3
ccuuauccaaaaugagua

SEQ ID NO: 360505 - RNA, 16 nt, Human parainfluenza virus 3
cggaaauccaccaaaa

SEQ ID NO: 360506 - RNA, 17 nt, Human parainfluenza virus 3
cggaaauccaccaaaac

SEQ ID NO: 360507 - RNA, 14 nt, Human parainfluenza virus 3
cggauaauaccaau

SEQ ID NO: 360508 - RNA, 23 nt, Human parainfluenza virus 3
cggauaauaccaaugaucuaaua

SEQ ID NO: 360509 - RNA, 16 nt, Human parainfluenza virus 3
cguuaaagguaaaaua

SEQ ID NO: 360510 - RNA, 16 nt, Human parainfluenza virus 3
cuaacucugcaauaua

SEQ ID NO: 360511 - RNA, 16 nt, Human parainfluenza virus 3
cuacaagaaauaaaua

SEQ ID NO: 360512 - RNA, 18 nt, Human parainfluenza virus 3
cuacagauccacaucaaa

SEQ ID NO: 360513 - RNA, 17 nt, Human parainfluenza virus 3
cuagauuuauaucaaga

SEQ ID NO: 360514 - RNA, 19 nt, Human parainfluenza virus 3
cuaucaaccaaaaaucaaa

SEQ ID NO: 360515 - RNA, 15 nt, Human parainfluenza virus 3
cucaaaaacaacaac

SEQ ID NO: 360516 - RNA, 20 nt, Human parainfluenza virus 3
cucaauacuaguuaucacua

SEQ ID NO: 360517 - RNA, 16 nt, Human parainfluenza virus 3
cucaauaucauugaau

SEQ ID NO: 360518 - RNA, 14 nt, Human parainfluenza virus 3
cugacauacucuau

SEQ ID NO: 360519 - RNA, 19 nt, Human parainfluenza virus 3
cugacauacucuauccuga

SEQ ID NO: 360520 - RNA, 13 nt, Human parainfluenza virus 3
cugcaucaaagau

SEQ ID NO: 360521 - RNA, 14 nt, Human parainfluenza virus 3
cugcugcaacacca

SEQ ID NO: 360522 - RNA, 14 nt, Human parainfluenza virus 3
cuuaggauuaaaga

SEQ ID NO: 360523 - RNA, 17 nt, Human parainfluenza virus 3
cuuaggauuaaagaaua

SEQ ID NO: 360524 - RNA, 14 nt, Human parainfluenza virus 3
cuuauccaaaauga

SEQ ID NO: 360525 - RNA, 13 nt, Human parainfluenza virus 3
cuucgaaauggaa

SEQ ID NO: 360526 - RNA, 20 nt, Human parainfluenza virus 3
cuugcaacucaaucaauaga

SEQ ID NO: 360527 - RNA, 20 nt, Human parainfluenza virus 3
cuugggaagaggaaucaaga

SEQ ID NO: 360528 - RNA, 15 nt, Human parainfluenza virus 3
cuuucugccaaauag

SEQ ID NO: 360529 - RNA, 14 nt, Human parainfluenza virus 3
gaaaacgacacaau

SEQ ID NO: 360530 - RNA, 22 nt, Human parainfluenza virus 3
gaaagauaguggaucaacugac

SEQ ID NO: 360531 - RNA, 18 nt, Human parainfluenza virus 3
gaaagcgaugcuaaaaac

SEQ ID NO: 360532 - RNA, 22 nt, Human parainfluenza virus 3
gaaaugcuaaaccucaaagcag

SEQ ID NO: 360533 - RNA, 13 nt, Human parainfluenza virus 3
gaaccauuaccac

SEQ ID NO: 360534 - RNA, 14 nt, Human parainfluenza virus 3
gaagaaaaucucaa

SEQ ID NO: 360535 - RNA, 14 nt, Human parainfluenza virus 3
gaagcauaccaauc

SEQ ID NO: 360536 - RNA, 20 nt, Human parainfluenza virus 3
gaagggacaaaaaaagcaaa

SEQ ID NO: 360537 - RNA, 20 nt, Human parainfluenza virus 3
gaaucaagagauaaaucaac

SEQ ID NO: 360538 - RNA, 16 nt, Human parainfluenza virus 3
gacaaaaaaagcaaaa

SEQ ID NO: 360539 - RNA, 21 nt, Human parainfluenza virus 3
gacaaaagaggucaacaccaa

SEQ ID NO: 360540 - RNA, 14 nt, Human parainfluenza virus 3
gacaauggacaaaa

SEQ ID NO: 360541 - RNA, 22 nt, Human parainfluenza virus 3
gacacugaaucuaacaauggca

SEQ ID NO: 360542 - RNA, 19 nt, Human parainfluenza virus 3
gacagucugggucaucaca

SEQ ID NO: 360543 - RNA, 15 nt, Human parainfluenza virus 3
gaccaaaaugaaucc

SEQ ID NO: 360544 - RNA, 15 nt, Human parainfluenza virus 3
gacuggcaacacagc

SEQ ID NO: 360545 - RNA, 12 nt, Human parainfluenza virus 3
gagagaguaucc

SEQ ID NO: 360546 - RNA, 22 nt, Human parainfluenza virus 3
gagagaguauccaugaucaaaa

SEQ ID NO: 360547 - RNA, 22 nt, Human parainfluenza virus 3
gagcaaagcgugcucggaaaau

SEQ ID NO: 360548 - RNA, 19 nt, Human parainfluenza virus 3
gagcccaaggauagacaaa

SEQ ID NO: 360549 - RNA, 15 nt, Human parainfluenza virus 3
gauaacaacacagau

SEQ ID NO: 360550 - RNA, 17 nt, Human parainfluenza virus 3
gauaacaacacagaucg

SEQ ID NO: 360551 - RNA, 12 nt, Human parainfluenza virus 3
gauaaucaaaaa

SEQ ID NO: 360552 - RNA, 15 nt, Human parainfluenza virus 3
gaugacgacucaaua

SEQ ID NO: 360553 - RNA, 23 nt, Human parainfluenza virus 3
gauggaauacuggaagcauacca

SEQ ID NO: 360554 - RNA, 22 nt, Human parainfluenza virus 3
gcaaaauaggagaaaucaaaac

SEQ ID NO: 360555 - RNA, 23 nt, Human parainfluenza virus 3
gcaaaauaggagaaaucaaaaca

SEQ ID NO: 360556 - RNA, 19 nt, Human parainfluenza virus 3
gcaaucagacaauggacaa

SEQ ID NO: 360557 - RNA, 16 nt, Human parainfluenza virus 3
gcaccgacccccaaga

SEQ ID NO: 360558 - RNA, 16 nt, Human parainfluenza virus 3
gccaaauagauaucac

SEQ ID NO: 360559 - RNA, 12 nt, Human parainfluenza virus 3
gccgaagcaaau

SEQ ID NO: 360560 - RNA, 17 nt, Human parainfluenza virus 3
gcucggaaaauggacac

SEQ ID NO: 360561 - RNA, 22 nt, Human parainfluenza virus 3
ggagauuacagaaaagauccaa

SEQ ID NO: 360562 - RNA, 18 nt, Human parainfluenza virus 3
guaaaguuacgcaaucca

SEQ ID NO: 360563 - RNA, 18 nt, Human parainfluenza virus 3
gucaucacacgaauguac

SEQ ID NO: 360564 - RNA, 20 nt, Human parainfluenza virus 3
gugucaccuuaacucuccua

SEQ ID NO: 360565 - RNA, 17 nt, Human parainfluenza virus 3
guuuaagaaaucaaaag

SEQ ID NO: 360566 - RNA, 14 nt, Human parainfluenza virus 3
uaaaaacuaucaaa

SEQ ID NO: 360567 - RNA, 14 nt, Human parainfluenza virus 3
uaaaaaucccaaaa

SEQ ID NO: 360568 - RNA, 21 nt, Human parainfluenza virus 3
uaagaaaaacuuaggauuaaa

SEQ ID NO: 360569 - RNA, 18 nt, Human parainfluenza virus 3
uaauccugguguuauuau

SEQ ID NO: 360570 - RNA, 16 nt, Human parechovirus 2
aauauuggacauaaca

SEQ ID NO: 360571 - RNA, 12 nt, Human parechovirus 2
acuaauuugauu

SEQ ID NO: 360572 - RNA, 15 nt, Human parechovirus 2
acuaauuuggaauau

SEQ ID NO: 360573 - RNA, 13 nt, Human parechovirus 2
auggacuauucau

SEQ ID NO: 360574 - RNA, 13 nt, Human parechovirus 2
auuagaacacuaa

SEQ ID NO: 360575 - RNA, 15 nt, Human parechovirus 2
auuagaacacuaauu

SEQ ID NO: 360576 - RNA, 16 nt, Human parechovirus 2
gcuauggacuauucau

SEQ ID NO: 360577 - RNA, 17 nt, Human parechovirus 2
gguuuucuuuugcuaug

SEQ ID NO: 360578 - RNA, 14 nt, Human parechovirus 2
uauuggacauaaca

SEQ ID NO: 360579 - RNA, 22 nt, Human parechovirus 2
uucauuaggauacuaauuugau

SEQ ID NO: 360580 - RNA, 18 nt, Human parechovirus 2
uucuuuugcuauggacua

SEQ ID NO: 360581 - RNA, 18 nt, Human parechovirus 2
uuuugcuauggacuauuc

SEQ ID NO: 360582 - RNA, 13 nt, Human parechovirus 2
aauuugauuagaa

SEQ ID NO: 360583 - RNA, 21 nt, Human parechovirus 2
aauuuggaauauuggacauaa

SEQ ID NO: 360584 - RNA, 12 nt, Human parechovirus 2
acuauucauuag

SEQ ID NO: 360585 - RNA, 12 nt, Human parechovirus 2
aggauacuaauu

SEQ ID NO: 360586 - RNA, 16 nt, Human parechovirus 2
auauuggacauaacaa

SEQ ID NO: 360587 - RNA, 12 nt, Human parechovirus 2
auggacuauuca

SEQ ID NO: 360588 - RNA, 13 nt, Human parechovirus 2
auuaggauacuaa

SEQ ID NO: 360589 - RNA, 14 nt, Human parechovirus 2
auuaggauacuaau

SEQ ID NO: 360590 - RNA, 23 nt, Human parechovirus 2
cuaauuugauuagaacacuaauu

SEQ ID NO: 360591 - RNA, 16 nt, Human parechovirus 2
cuuuugcuauggacua

SEQ ID NO: 360592 - RNA, 21 nt, Human parechovirus 2
cuuuugcuauggacuauucau

SEQ ID NO: 360593 - RNA, 17 nt, Human parechovirus 2
gaauauuggacauaaca

SEQ ID NO: 360594 - RNA, 11 nt, Human parechovirus 2
gcuauggacua

SEQ ID NO: 360595 - RNA, 13 nt, Human parechovirus 2
uagaacacuaauu

SEQ ID NO: 360596 - RNA, 18 nt, Human parechovirus 2
uauucauuaggauacuaa

SEQ ID NO: 360597 - RNA, 15 nt, Human parechovirus 2
uauuggacauaacaa

SEQ ID NO: 360598 - RNA, 16 nt, Human parechovirus 2
uucuuuugcuauggac

SEQ ID NO: 360599 - RNA, 23 nt, Human parechovirus 2
uuucuuuugcuauggacuauuca

SEQ ID NO: 360600 - RNA, 22 nt, Human respiratory syncytial virus
aaaaaccaacccaaccaaacca

SEQ ID NO: 360601 - RNA, 18 nt, Human respiratory syncytial virus
aaaaagaugaugauccug

SEQ ID NO: 360602 - RNA, 21 nt, Human respiratory syncytial virus
aaaaccgugaccuaucaagca

SEQ ID NO: 360603 - RNA, 12 nt, Human respiratory syncytial virus
aaaacucaucaa

SEQ ID NO: 360604 - RNA, 18 nt, Human respiratory syncytial virus
aaaacuuauaaaacaaga

SEQ ID NO: 360605 - RNA, 13 nt, Human respiratory syncytial virus
aaaagaaaccaaa

SEQ ID NO: 360606 - RNA, 20 nt, Human respiratory syncytial virus
aaaaugauuacaccaacuua

SEQ ID NO: 360607 - RNA, 22 nt, Human respiratory syncytial virus
aaaaugauuacaccaacuuaau

SEQ ID NO: 360608 - RNA, 14 nt, Human respiratory syncytial virus
aaaauuaacauaau

SEQ ID NO: 360609 - RNA, 20 nt, Human respiratory syncytial virus
aaacaaauccaaucuucuca

SEQ ID NO: 360610 - RNA, 16 nt, Human respiratory syncytial virus
aaacaccuaaacaaac

SEQ ID NO: 360611 - RNA, 23 nt, Human respiratory syncytial virus
aaacacuaaaucaacacaucauu

SEQ ID NO: 360612 - RNA, 12 nt, Human respiratory syncytial virus
aaaccaaaauau

SEQ ID NO: 360613 - RNA, 17 nt, Human respiratory syncytial virus
aaaccgugaccuaucaa

SEQ ID NO: 360614 - RNA, 23 nt, Human respiratory syncytial virus
aaaccgugaccuaucaagcaaga

SEQ ID NO: 360615 - RNA, 22 nt, Human respiratory syncytial virus
aaaccucaaguaucacaaucaa

SEQ ID NO: 360616 - RNA, 16 nt, Human respiratory syncytial virus
aaacuacacacuauau

SEQ ID NO: 360617 - RNA, 15 nt, Human respiratory syncytial virus
aauagaaacauuuga

SEQ ID NO: 360618 - RNA, 15 nt, Human respiratory syncytial virus
aauagaauuaaguaa

SEQ ID NO: 360619 - RNA, 18 nt, Human respiratory syncytial virus
aauauaaaaacucaucaa

SEQ ID NO: 360620 - RNA, 22 nt, Human respiratory syncytial virus
aauaucuguuaacucaauagau

SEQ ID NO: 360621 - RNA, 18 nt, Human respiratory syncytial virus
aaucaaacacuaaaucaa

SEQ ID NO: 360622 - RNA, 13 nt, Human respiratory syncytial virus
aaucaaacuauga

SEQ ID NO: 360623 - RNA, 15 nt, Human respiratory syncytial virus
aaucaaacuaugagc

SEQ ID NO: 360624 - RNA, 17 nt, Human respiratory syncytial virus
aaucaacacaucauuca

SEQ ID NO: 360625 - RNA, 21 nt, Human respiratory syncytial virus
aaucaaccaacugauccauca

SEQ ID NO: 360626 - RNA, 23 nt, Human respiratory syncytial virus
aaucaaccaacugauccaucagc

SEQ ID NO: 360627 - RNA, 12 nt, Human respiratory syncytial virus
aaucaacccaua

SEQ ID NO: 360628 - RNA, 17 nt, Human respiratory syncytial virus
aaucaacgcacugccag

SEQ ID NO: 360629 - RNA, 20 nt, Human respiratory syncytial virus
aaucaaucaaccaacugauc

SEQ ID NO: 360630 - RNA, 16 nt, Human respiratory syncytial virus
aaucauaaaaacauau

SEQ ID NO: 360631 - RNA, 17 nt, Human respiratory syncytial virus
aaucauaaaaacauauu

SEQ ID NO: 360632 - RNA, 14 nt, Human respiratory syncytial virus
aaucauuucuucac

SEQ ID NO: 360633 - RNA, 21 nt, Human respiratory syncytial virus
aauccaacaagugaagccgac

SEQ ID NO: 360634 - RNA, 15 nt, Human respiratory syncytial virus
aauccaaucuucuca

SEQ ID NO: 360635 - RNA, 19 nt, Human respiratory syncytial virus
aaucccacucaaaauccaa

SEQ ID NO: 360636 - RNA, 20 nt, Human respiratory syncytial virus
aaucuagcuacucauaugaa

SEQ ID NO: 360637 - RNA, 14 nt, Human respiratory syncytial virus
aaucuauagcacaa

SEQ ID NO: 360638 - RNA, 17 nt, Human respiratory syncytial virus
aaucucaaccucucuca

SEQ ID NO: 360639 - RNA, 19 nt, Human respiratory syncytial virus
aaucuucucacagagucau

SEQ ID NO: 360640 - RNA, 21 nt, Human respiratory syncytial virus
aaugacaacacuacuaugcaa

SEQ ID NO: 360641 - RNA, 13 nt, Human respiratory syncytial virus
aaugauaaucuca

SEQ ID NO: 360642 - RNA, 21 nt, Human respiratory syncytial virus
aaugauacauuaaauaaggau

SEQ ID NO: 360643 - RNA, 14 nt, Human respiratory syncytial virus
aaugcaaccauguc

SEQ ID NO: 360644 - RNA, 19 nt, Human respiratory syncytial virus
aaugcaaccauguccaaac

SEQ ID NO: 360645 - RNA, 23 nt, Human respiratory syncytial virus
aauguccgucagcggaaccacca

SEQ ID NO: 360646 - RNA, 20 nt, Human respiratory syncytial virus
aauuacagcuacuuaugcaa

SEQ ID NO: 360647 - RNA, 15 nt, Human respiratory syncytial virus
aauuaugaugugcaa

SEQ ID NO: 360648 - RNA, 15 nt, Human respiratory syncytial virus
aauucaauacauaua

SEQ ID NO: 360649 - RNA, 21 nt, Human respiratory syncytial virus
aauucauuggacaccuaaaaa

SEQ ID NO: 360650 - RNA, 18 nt, Human respiratory syncytial virus
aauuuagcuuacugauuc

SEQ ID NO: 360651 - RNA, 18 nt, Human respiratory syncytial virus
aauuucuccaacaucuua

SEQ ID NO: 360652 - RNA, 18 nt, Human respiratory syncytial virus
acaaaagcauagacacuu

SEQ ID NO: 360653 - RNA, 22 nt, Human respiratory syncytial virus
acaaaagcauagacacuuuguc

SEQ ID NO: 360654 - RNA, 14 nt, Human respiratory syncytial virus
acaaacaaauccaa

SEQ ID NO: 360655 - RNA, 22 nt, Human respiratory syncytial virus
acaaacaaauccaaucuucuca

SEQ ID NO: 360656 - RNA, 18 nt, Human respiratory syncytial virus
acaaacaaauguccguca

SEQ ID NO: 360657 - RNA, 22 nt, Human respiratory syncytial virus
acaaacuaugugguaugcuauu

SEQ ID NO: 360658 - RNA, 16 nt, Human respiratory syncytial virus
acaaauagcacuauca

SEQ ID NO: 360659 - RNA, 19 nt, Human respiratory syncytial virus
acaaauccaaucuucucac

SEQ ID NO: 360660 - RNA, 22 nt, Human respiratory syncytial virus
acaacagucugcugaucaccaa

SEQ ID NO: 360661 - RNA, 22 nt, Human respiratory syncytial virus
acaacaucaauaaaacagacau

SEQ ID NO: 360662 - RNA, 22 nt, Human respiratory syncytial virus
acaacauuggggcaaaugcaac

SEQ ID NO: 360663 - RNA, 16 nt, Human respiratory syncytial virus
acaaucaaacacuaaa

SEQ ID NO: 360664 - RNA, 15 nt, Human respiratory syncytial virus
acaauuuaaccauaa

SEQ ID NO: 360665 - RNA, 16 nt, Human respiratory syncytial virus
acaauuucuccaacau

SEQ ID NO: 360666 - RNA, 17 nt, Human respiratory syncytial virus
acacacuauauccaaac

SEQ ID NO: 360667 - RNA, 19 nt, Human respiratory syncytial virus
acacacuauauccaaacau

SEQ ID NO: 360668 - RNA, 13 nt, Human respiratory syncytial virus
acaccuaaacaaa

SEQ ID NO: 360669 - RNA, 17 nt, Human respiratory syncytial virus
acacuacacacuucauc

SEQ ID NO: 360670 - RNA, 17 nt, Human respiratory syncytial virus
acacuacuaugcaaaga

SEQ ID NO: 360671 - RNA, 14 nt, Human respiratory syncytial virus
acacuucaacauca

SEQ ID NO: 360672 - RNA, 23 nt, Human respiratory syncytial virus
acagauuaaauuuaaaaucuaua

SEQ ID NO: 360673 - RNA, 16 nt, Human respiratory syncytial virus
acagguuaagugcaau

SEQ ID NO: 360674 - RNA, 20 nt, Human respiratory syncytial virus
acaguaccccagaaaccaaa

SEQ ID NO: 360675 - RNA, 19 nt, Human respiratory syncytial virus
acagucauaauuacuuuga

SEQ ID NO: 360676 - RNA, 15 nt, Human respiratory syncytial virus
acauauauccucaaa

SEQ ID NO: 360677 - RNA, 18 nt, Human respiratory syncytial virus
acaucaauaaaacagaca

SEQ ID NO: 360678 - RNA, 20 nt, Human respiratory syncytial virus
acaucaauaaaacagacauc

SEQ ID NO: 360679 - RNA, 12 nt, Human respiratory syncytial virus
acaucaauccau

SEQ ID NO: 360680 - RNA, 13 nt, Human respiratory syncytial virus
acaucuuagcaga

SEQ ID NO: 360681 - RNA, 13 nt, Human respiratory syncytial virus
acauguagugcag

SEQ ID NO: 360682 - RNA, 22 nt, Human respiratory syncytial virus
acaugugcauuuacaacacaac

SEQ ID NO: 360683 - RNA, 13 nt, Human respiratory syncytial virus
accaaaugcaaug

SEQ ID NO: 360684 - RNA, 15 nt, Human respiratory syncytial virus
accaaaugcaaugga

SEQ ID NO: 360685 - RNA, 16 nt, Human respiratory syncytial virus
accaaaugcaauggaa

SEQ ID NO: 360686 - RNA, 22 nt, Human respiratory syncytial virus
accaaaugcaauggaacugaca

SEQ ID NO: 360687 - RNA, 22 nt, Human respiratory syncytial virus
accaacuuauuuccagucauua

SEQ ID NO: 360688 - RNA, 16 nt, Human respiratory syncytial virus
accacgccaacuauca

SEQ ID NO: 360689 - RNA, 15 nt, Human respiratory syncytial virus
accagccacuaucug

SEQ ID NO: 360690 - RNA, 17 nt, Human respiratory syncytial virus
accagugucauaacaau

SEQ ID NO: 360691 - RNA, 21 nt, Human respiratory syncytial virus
accauuuauaccgccaauuca

SEQ ID NO: 360692 - RNA, 14 nt, Human respiratory syncytial virus
acccauaacaaaca

SEQ ID NO: 360693 - RNA, 19 nt, Human respiratory syncytial virus
acccauaacaaacacuuca

SEQ ID NO: 360694 - RNA, 15 nt, Human respiratory syncytial virus
accuagagugcgaau

SEQ ID NO: 360695 - RNA, 13 nt, Human respiratory syncytial virus
accucaagucaga

SEQ ID NO: 360696 - RNA, 16 nt, Human respiratory syncytial virus
accugggauacucuca

SEQ ID NO: 360697 - RNA, 19 nt, Human respiratory syncytial virus
acgauucuauaucauccaa

SEQ ID NO: 360698 - RNA, 23 nt, Human respiratory syncytial virus
acgauucuauaucauccaaccau

SEQ ID NO: 360699 - RNA, 14 nt, Human respiratory syncytial virus
acuaaaucaacaca

SEQ ID NO: 360700 - RNA, 18 nt, Human respiratory syncytial virus
acuaaaucaacacaucau

SEQ ID NO: 360701 - RNA, 22 nt, Human respiratory syncytial virus
acuaacuauaacacagucauua

SEQ ID NO: 360702 - RNA, 13 nt, Human respiratory syncytial virus
acuaauacauaug

SEQ ID NO: 360703 - RNA, 15 nt, Human respiratory syncytial virus
acuaauacauaugau

SEQ ID NO: 360704 - RNA, 15 nt, Human respiratory syncytial virus
acuauaacacaguca

SEQ ID NO: 360705 - RNA, 20 nt, Human respiratory syncytial virus
acuauaacacagucauuaau

SEQ ID NO: 360706 - RNA, 13 nt, Human respiratory syncytial virus
acuauauccaaac

SEQ ID NO: 360707 - RNA, 15 nt, Human respiratory syncytial virus
acuauauccaaacau

SEQ ID NO: 360708 - RNA, 18 nt, Human respiratory syncytial virus
acuaucaugguagcauag

SEQ ID NO: 360709 - RNA, 19 nt, Human respiratory syncytial virus
acuaugagcacuacaaaug

SEQ ID NO: 360710 - RNA, 19 nt, Human respiratory syncytial virus
acuauucaacguaguacag

SEQ ID NO: 360711 - RNA, 16 nt, Human respiratory syncytial virus
acucaaaauccaaaau

SEQ ID NO: 360712 - RNA, 22 nt, Human respiratory syncytial virus
acucacucagcaaucaacaaca

SEQ ID NO: 360713 - RNA, 21 nt, Human respiratory syncytial virus
acucagcaaucaacaacauca

SEQ ID NO: 360714 - RNA, 19 nt, Human respiratory syncytial virus
acugaagaugcaaaucaua

SEQ ID NO: 360715 - RNA, 20 nt, Human respiratory syncytial virus
acugccagaccgaacaaaca

SEQ ID NO: 360716 - RNA, 23 nt, Human respiratory syncytial virus
acuuaugcaaaacacaccagcug

SEQ ID NO: 360717 - RNA, 23 nt, Human respiratory syncytial virus
acuuauuagaugccacucaacaa

SEQ ID NO: 360718 - RNA, 15 nt, Human respiratory syncytial virus
acuuauuuccaguca

SEQ ID NO: 360719 - RNA, 20 nt, Human respiratory syncytial virus
acuuauuuccagucauuacu

SEQ ID NO: 360720 - RNA, 17 nt, Human respiratory syncytial virus
acuugauaaacaaugaa

SEQ ID NO: 360721 - RNA, 14 nt, Human respiratory syncytial virus
acuugcucauaaaa

SEQ ID NO: 360722 - RNA, 20 nt, Human respiratory syncytial virus
agaaaaccgugaccuaucaa

SEQ ID NO: 360723 - RNA, 23 nt, Human respiratory syncytial virus
agaaaagaccugggauacucuca

SEQ ID NO: 360724 - RNA, 17 nt, Human respiratory syncytial virus
agaaaccaaaugcaaug

SEQ ID NO: 360725 - RNA, 22 nt, Human respiratory syncytial virus
agaaaucaucacacacaaauuc

SEQ ID NO: 360726 - RNA, 19 nt, Human respiratory syncytial virus
agaacuugcaagcaucaac

SEQ ID NO: 360727 - RNA, 15 nt, Human respiratory syncytial virus
agaaguaaccaaaga

SEQ ID NO: 360728 - RNA, 19 nt, Human respiratory syncytial virus
agaaguaaccaaagagagc

SEQ ID NO: 360729 - RNA, 16 nt, Human respiratory syncytial virus
agaaucaauaaagggc

SEQ ID NO: 360730 - RNA, 19 nt, Human respiratory syncytial virus
agaaucaauaaagggcaag

SEQ ID NO: 360731 - RNA, 16 nt, Human respiratory syncytial virus
agaauucacaagcaaa

SEQ ID NO: 360732 - RNA, 17 nt, Human respiratory syncytial virus
agacacuauaaagauac

SEQ ID NO: 360733 - RNA, 13 nt, Human respiratory syncytial virus
agacuugcucaua

SEQ ID NO: 360734 - RNA, 14 nt, Human respiratory syncytial virus
agauacucaaguca

SEQ ID NO: 360735 - RNA, 19 nt, Human respiratory syncytial virus
agauauagaaguaaccaaa

SEQ ID NO: 360736 - RNA, 15 nt, Human respiratory syncytial virus
agauuaaugaucacg

SEQ ID NO: 360737 - RNA, 19 nt, Human respiratory syncytial virus
agcaaucaacaacaucaau

SEQ ID NO: 360738 - RNA, 20 nt, Human respiratory syncytial virus
agcacaaauagcacuaucag

SEQ ID NO: 360739 - RNA, 19 nt, Human respiratory syncytial virus
agcagcuguucaguacaau

SEQ ID NO: 360740 - RNA, 14 nt, Human respiratory syncytial virus
agccaauaacauaa

SEQ ID NO: 360741 - RNA, 22 nt, Human respiratory syncytial virus
agccauaauauucaucaucucu

SEQ ID NO: 360742 - RNA, 20 nt, Human respiratory syncytial virus
agccgacaguaccccagaaa

SEQ ID NO: 360743 - RNA, 18 nt, Human respiratory syncytial virus
agcuagauccuuaacuca

SEQ ID NO: 360744 - RNA, 20 nt, Human respiratory syncytial virus
agcuagauccuuaacucaua

SEQ ID NO: 360745 - RNA, 17 nt, Human respiratory syncytial virus
agcuauuccucaaacaa

SEQ ID NO: 360746 - RNA, 15 nt, Human respiratory syncytial virus
aggaguuuuaccaau

SEQ ID NO: 360747 - RNA, 13 nt, Human respiratory syncytial virus
aggcaaaacuuca

SEQ ID NO: 360748 - RNA, 21 nt, Human respiratory syncytial virus
agggcaaguucgcaucaucca

SEQ ID NO: 360749 - RNA, 14 nt, Human respiratory syncytial virus
agguuaagugcaau

SEQ ID NO: 360750 - RNA, 21 nt, Human respiratory syncytial virus
agguugguauaccagugucau

SEQ ID NO: 360751 - RNA, 12 nt, Human respiratory syncytial virus
aguaaagccaau

SEQ ID NO: 360752 - RNA, 13 nt, Human respiratory syncytial virus
aguaaccaaagag

SEQ ID NO: 360753 - RNA, 21 nt, Human respiratory syncytial virus
aguacaggcugaaucauuucu

SEQ ID NO: 360754 - RNA, 19 nt, Human respiratory syncytial virus
aguaccccagaaaccaaag

SEQ ID NO: 360755 - RNA, 24 nt, Human respiratory syncytial virus
aguaucacaaucaaacacuaaauc

SEQ ID NO: 360756 - RNA, 13 nt, Human respiratory syncytial virus
aguaugggaucaa

SEQ ID NO: 360757 - RNA, 17 nt, Human respiratory syncytial virus
agucauaauuacuuuga

SEQ ID NO: 360758 - RNA, 15 nt, Human respiratory syncytial virus
agugaagcagaucuc

SEQ ID NO: 360759 - RNA, 17 nt, Human respiratory syncytial virus
aguuaauauaaaaacuc

SEQ ID NO: 360760 - RNA, 19 nt, Human respiratory syncytial virus
aguuaauauaaaaacucau

SEQ ID NO: 360761 - RNA, 17 nt, Human respiratory syncytial virus
aguucaaucaaucucaa

SEQ ID NO: 360762 - RNA, 13 nt, Human respiratory syncytial virus
auaaaaaccucaa

SEQ ID NO: 360763 - RNA, 21 nt, Human respiratory syncytial virus
auaaaagaaaccaaaugcaau

SEQ ID NO: 360764 - RNA, 19 nt, Human respiratory syncytial virus
auaaaagucuaaaacuaac

SEQ ID NO: 360765 - RNA, 12 nt, Human respiratory syncytial virus
auaaacaaugaa

SEQ ID NO: 360766 - RNA, 16 nt, Human respiratory syncytial virus
auaacaaacacuucaa

SEQ ID NO: 360767 - RNA, 12 nt, Human respiratory syncytial virus
auaacaauagaa

SEQ ID NO: 360768 - RNA, 16 nt, Human respiratory syncytial virus
auaacaauagaauuaa

SEQ ID NO: 360769 - RNA, 22 nt, Human respiratory syncytial virus
auaacgauucuauaucauccaa

SEQ ID NO: 360770 - RNA, 23 nt, Human respiratory syncytial virus
auaauaacaucucucaccaaaga

SEQ ID NO: 360771 - RNA, 17 nt, Human respiratory syncytial virus
auaauauucaucaucuc

SEQ ID NO: 360772 - RNA, 13 nt, Human respiratory syncytial virus
auaaucacuauua

SEQ ID NO: 360773 - RNA, 12 nt, Human respiratory syncytial virus
auaauccuguau

SEQ ID NO: 360774 - RNA, 19 nt, Human respiratory syncytial virus
auaaucucaaccucucuca

SEQ ID NO: 360775 - RNA, 20 nt, Human respiratory syncytial virus
auaaugcuuggccauaacga

SEQ ID NO: 360776 - RNA, 14 nt, Human respiratory syncytial virus
auaauuacuuugaa

SEQ ID NO: 360777 - RNA, 18 nt, Human respiratory syncytial virus
auacacugaauauaauac

SEQ ID NO: 360778 - RNA, 16 nt, Human respiratory syncytial virus
auacauuaaauaagga

SEQ ID NO: 360779 - RNA, 23 nt, Human respiratory syncytial virus
auacauuaaauaaggaucagcug

SEQ ID NO: 360780 - RNA, 16 nt, Human respiratory syncytial virus
auacucucaaucaucu

SEQ ID NO: 360781 - RNA, 22 nt, Human respiratory syncytial virus
auacuugauaaacaaugaaugu

SEQ ID NO: 360782 - RNA, 21 nt, Human respiratory syncytial virus
auagaauucacaagcaaauuu

SEQ ID NO: 360783 - RNA, 22 nt, Human respiratory syncytial virus
auagcacuaucaguucuggcaa

SEQ ID NO: 360784 - RNA, 23 nt, Human respiratory syncytial virus
auagguauguuauaugcuauguc

SEQ ID NO: 360785 - RNA, 23 nt, Human respiratory syncytial virus
auauaaaagaaaccaaaugcaau

SEQ ID NO: 360786 - RNA, 24 nt, Human respiratory syncytial virus
auauaaaagaaaccaaaugcaaug

SEQ ID NO: 360787 - RNA, 21 nt, Human respiratory syncytial virus
auauauccucaaacuacacac

SEQ ID NO: 360788 - RNA, 15 nt, Human respiratory syncytial virus
auauccaaacaucau

SEQ ID NO: 360789 - RNA, 15 nt, Human respiratory syncytial virus
auauucaucaucucu

SEQ ID NO: 360790 - RNA, 20 nt, Human respiratory syncytial virus
auauucaucaucucugccaa

SEQ ID NO: 360791 - RNA, 13 nt, Human respiratory syncytial virus
aucaaacuaugag

SEQ ID NO: 360792 - RNA, 17 nt, Human respiratory syncytial virus
aucaacacaucauucac

SEQ ID NO: 360793 - RNA, 15 nt, Human respiratory syncytial virus
aucaacucacucagc

SEQ ID NO: 360794 - RNA, 17 nt, Human respiratory syncytial virus
aucaacucacucagcaa

SEQ ID NO: 360795 - RNA, 18 nt, Human respiratory syncytial virus
aucaacucacucagcaau

SEQ ID NO: 360796 - RNA, 21 nt, Human respiratory syncytial virus
aucaacucacucagcaaucaa

SEQ ID NO: 360797 - RNA, 22 nt, Human respiratory syncytial virus
aucacaaucaaacacuaaauca

SEQ ID NO: 360798 - RNA, 15 nt, Human respiratory syncytial virus
aucacaguacaggcu

SEQ ID NO: 360799 - RNA, 12 nt, Human respiratory syncytial virus
aucauccaaaga

SEQ ID NO: 360800 - RNA, 15 nt, Human respiratory syncytial virus
aucauccaaccauaa

SEQ ID NO: 360801 - RNA, 16 nt, Human respiratory syncytial virus
aucauccaaccauaaa

SEQ ID NO: 360802 - RNA, 22 nt, Human respiratory syncytial virus
aucaucuaauuguaauauccuc

SEQ ID NO: 360803 - RNA, 14 nt, Human respiratory syncytial virus
aucaugaacaucua

SEQ ID NO: 360804 - RNA, 18 nt, Human respiratory syncytial virus
aucauguuucaacaacag

SEQ ID NO: 360805 - RNA, 12 nt, Human respiratory syncytial virus
auccaaccauaa

SEQ ID NO: 360806 - RNA, 19 nt, Human respiratory syncytial virus
auccacagguuaagugcaa

SEQ ID NO: 360807 - RNA, 13 nt, Human respiratory syncytial virus
auccaucagcaac

SEQ ID NO: 360808 - RNA, 23 nt, Human respiratory syncytial virus
ucaguucuggcaaugauaaucuc

SEQ ID NO: 360809 - RNA, 19 nt, Human respiratory syncytial virus
ucauaaugcuuggccauaa

SEQ ID NO: 360810 - RNA, 16 nt, Human respiratory syncytial virus
ucaucaucucugccaa

SEQ ID NO: 360811 - RNA, 22 nt, Human respiratory syncytial virus
ucauguuaaacaagauacucaa

SEQ ID NO: 360812 - RNA, 18 nt, Human respiratory syncytial virus
ucauuaauaucuagauau

SEQ ID NO: 360813 - RNA, 22 nt, Human respiratory syncytial virus
ucauucacaaaauuaacagcug

SEQ ID NO: 360814 - RNA, 13 nt, Human respiratory syncytial virus
ucauuucuucaca

SEQ ID NO: 360815 - RNA, 16 nt, Human respiratory syncytial virus
uccaaaaucacuacca

SEQ ID NO: 360816 - RNA, 14 nt, Human respiratory syncytial virus
uccaaagauccuaa

SEQ ID NO: 360817 - RNA, 18 nt, Human respiratory syncytial virus
uccaacaagugaagccga

SEQ ID NO: 360818 - RNA, 21 nt, Human respiratory syncytial virus
uccaaucuucucacagaguca

SEQ ID NO: 360819 - RNA, 19 nt, Human respiratory syncytial virus
uccacagguuaagugcaau

SEQ ID NO: 360820 - RNA, 19 nt, Human respiratory syncytial virus
uccacauacacagcagcug

SEQ ID NO: 360821 - RNA, 15 nt, Human respiratory syncytial virus
ucccaaaucaaccca

SEQ ID NO: 360822 - RNA, 17 nt, Human respiratory syncytial virus
ucgacauguagugcagu

SEQ ID NO: 360823 - RNA, 16 nt, Human respiratory syncytial virus
ucgcaucauccaaaga

SEQ ID NO: 360824 - RNA, 17 nt, Human respiratory syncytial virus
ucgcaucauccaaagau

SEQ ID NO: 360825 - RNA, 19 nt, Human respiratory syncytial virus
ucuaaguuguacaaagaaa

SEQ ID NO: 360826 - RNA, 12 nt, Human respiratory syncytial virus
ucuagauaucau

SEQ ID NO: 360827 - RNA, 22 nt, Human respiratory syncytial virus
ucuauagcacaaauagcacuau

SEQ ID NO: 360828 - RNA, 13 nt, Human respiratory syncytial virus
ucucaccaaagaa

SEQ ID NO: 360829 - RNA, 21 nt, Human respiratory syncytial virus
ucucaccaaagaaaucaucac

SEQ ID NO: 360830 - RNA, 13 nt, Human respiratory syncytial virus
ucucucaccaaag

SEQ ID NO: 360831 - RNA, 22 nt, Human respiratory syncytial virus
ucucucauaauugcagccauaa

SEQ ID NO: 360832 - RNA, 14 nt, Human respiratory syncytial virus
ucucugccaaucac

SEQ ID NO: 360833 - RNA, 23 nt, Human respiratory syncytial virus
ucucuuuuucagaauguaaugcu

SEQ ID NO: 360834 - RNA, 13 nt, Human respiratory syncytial virus
ugaacaagcuuca

SEQ ID NO: 360835 - RNA, 18 nt, Human respiratory syncytial virus
ugaacaucuacacuacac

SEQ ID NO: 360836 - RNA, 16 nt, Human respiratory syncytial virus
ugaagaugcaaaucau

SEQ ID NO: 360837 - RNA, 23 nt, Human respiratory syncytial virus
ugaaucauuucuucacaucaugc

SEQ ID NO: 360838 - RNA, 14 nt, Human respiratory syncytial virus
ugacacuaaaguaa

SEQ ID NO: 360839 - RNA, 15 nt, Human respiratory syncytial virus
ugacacuaaaguaaa

SEQ ID NO: 360840 - RNA, 15 nt, Human respiratory syncytial virus
ugaccuaucaagcaa

SEQ ID NO: 360841 - RNA, 13 nt, Human respiratory syncytial virus
ugauccaucagca

SEQ ID NO: 360842 - RNA, 15 nt, Human respiratory syncytial virus
ugauccaucagcaac

SEQ ID NO: 360843 - RNA, 13 nt, Human respiratory syncytial virus
ugauccugcauca

SEQ ID NO: 360844 - RNA, 22 nt, Human respiratory syncytial virus
ugaugauccugcaucacuaaca

SEQ ID NO: 360845 - RNA, 19 nt, Human respiratory syncytial virus
ugcaagcaucaacauacua

SEQ ID NO: 360846 - RNA, 23 nt, Human respiratory syncytial virus
ugcaagcaucaacauacuaguga

SEQ ID NO: 360847 - RNA, 11 nt, Human respiratory syncytial virus
ugcaauggaac

SEQ ID NO: 360848 - RNA, 15 nt, Human respiratory syncytial virus
ugcaucacuaacaau

SEQ ID NO: 360849 - RNA, 19 nt, Human respiratory syncytial virus
ugccagaccgaacaaacaa

SEQ ID NO: 360850 - RNA, 23 nt, Human respiratory syncytial virus
ugccuauguuccagucaucugua

SEQ ID NO: 360851 - RNA, 16 nt, Human respiratory syncytial virus
ugcuauuaaugcauug

SEQ ID NO: 360852 - RNA, 13 nt, Human respiratory syncytial virus
uggauaaccacca

SEQ ID NO: 360853 - RNA, 14 nt, Human respiratory syncytial virus
ugggauacucucaa

SEQ ID NO: 360854 - RNA, 12 nt, Human respiratory syncytial virus
ugguaugcuauu

SEQ ID NO: 360855 - RNA, 12 nt, Human respiratory syncytial virus
uguaccagcaga

SEQ ID NO: 360856 - RNA, 21 nt, Human respiratory syncytial virus
uguauuguaagaaaacuugau

SEQ ID NO: 360857 - RNA, 14 nt, Human respiratory syncytial virus
ugucaaauuauaau

SEQ ID NO: 360858 - RNA, 11 nt, Human respiratory syncytial virus
uguccaaacac

SEQ ID NO: 360859 - RNA, 21 nt, Human respiratory syncytial virus
uguccaaacacaagaaucaac

SEQ ID NO: 360860 - RNA, 16 nt, Human respiratory syncytial virus
uguuccagucaucugu

SEQ ID NO: 360861 - RNA, 16 nt, Human respiratory syncytial virus
uuaaacaagauacuca

SEQ ID NO: 360862 - RNA, 14 nt, Human respiratory syncytial virus
uuaaaugauacauu

SEQ ID NO: 360863 - RNA, 19 nt, Human respiratory syncytial virus
uuaacaauauaguaacaaa

SEQ ID NO: 360864 - RNA, 18 nt, Human respiratory syncytial virus
uuaacggcccuuaucuca

SEQ ID NO: 360865 - RNA, 20 nt, Human respiratory syncytial virus
uuaauauaaaaacucaucaa

SEQ ID NO: 360866 - RNA, 19 nt, Human respiratory syncytial virus
uuaaucacugaagaugcaa

SEQ ID NO: 360867 - RNA, 17 nt, Human respiratory syncytial virus
uuacaauuuaaccauaa

SEQ ID NO: 360868 - RNA, 16 nt, Human respiratory syncytial virus
uuacacuaauacauau

SEQ ID NO: 360869 - RNA, 22 nt, Human respiratory syncytial virus
uuacuuugaauggccuccucau

SEQ ID NO: 360870 - RNA, 14 nt, Human respiratory syncytial virus
uuagucuaacucaa

SEQ ID NO: 360871 - RNA, 15 nt, Human respiratory syncytial virus
uuagucuaacucaau

SEQ ID NO: 360872 - RNA, 21 nt, Human respiratory syncytial virus
uuagugcuuuaagaacagguu

SEQ ID NO: 360873 - RNA, 18 nt, Human respiratory syncytial virus
uuauaaucacuauuauga

SEQ ID NO: 360874 - RNA, 18 nt, Human respiratory syncytial virus
uuauaccgccaauucaau

SEQ ID NO: 360875 - RNA, 21 nt, Human respiratory syncytial virus
uuaugaugugcaaaaacaccu

SEQ ID NO: 360876 - RNA, 17 nt, Human respiratory syncytial virus
uuauuuuagugcuuuaa

SEQ ID NO: 360877 - RNA, 16 nt, Human respiratory syncytial virus
uucacaaaauuaacag

SEQ ID NO: 360878 - RNA, 23 nt, Human respiratory syncytial virus
uucacaucaugcuacccacacaa

SEQ ID NO: 360879 - RNA, 14 nt, Human respiratory syncytial virus
uucauauacuugau

SEQ ID NO: 360880 - RNA, 14 nt, Human respiratory syncytial virus
uucaucaucucugc

SEQ ID NO: 360881 - RNA, 13 nt, Human respiratory syncytial virus
uuccagucauuac

SEQ ID NO: 360882 - RNA, 14 nt, Human respiratory syncytial virus
uuccucaaacaaca

SEQ ID NO: 360883 - RNA, 22 nt, Human respiratory syncytial virus
uucuggcaaugauaaucucaac

SEQ ID NO: 360884 - RNA, 17 nt, Human respiratory syncytial virus
uuguaagaaaacuugau

SEQ ID NO: 360885 - RNA, 18 nt, Human respiratory syncytial virus
uuuaaaaauuaacauaau

SEQ ID NO: 360886 - RNA, 19 nt, Human respiratory syncytial virus
uuuaaaagguguuaucucu

SEQ ID NO: 360887 - RNA, 19 nt, Human respiratory syncytial virus
uuuaaaaucuauagcacaa

SEQ ID NO: 360888 - RNA, 21 nt, Human respiratory syncytial virus
uuuacuaauuauaaucacuau

SEQ ID NO: 360889 - RNA, 15 nt, Human respiratory syncytial virus
uuuagucuaacucaa

SEQ ID NO: 360890 - RNA, 19 nt, Human respiratory syncytial virus
uuuauaccgccaauucaau

SEQ ID NO: 360891 - RNA, 18 nt, Human respiratory syncytial virus
uuucaacaacagucugcu

SEQ ID NO: 360892 - RNA, 22 nt, Human respiratory syncytial virus
uuugagauuagaggucauugcu

SEQ ID NO: 360893 - RNA, 18 nt, Human respiratory syncytial virus
cuacuagagcauaugaau

SEQ ID NO: 360894 - RNA, 12 nt, Human respiratory syncytial virus
cuagauccuuaa

SEQ ID NO: 360895 - RNA, 18 nt, Human respiratory syncytial virus
cuaguaagcuucaaagaa

SEQ ID NO: 360896 - RNA, 12 nt, Human respiratory syncytial virus
cuagugaagcag

SEQ ID NO: 360897 - RNA, 23 nt, Human respiratory syncytial virus
cuauaaagauacuuaaagaugcu

SEQ ID NO: 360898 - RNA, 14 nt, Human respiratory syncytial virus
cuauaaaucuuaaa

SEQ ID NO: 360899 - RNA, 14 nt, Human respiratory syncytial virus
cuauagcacaaaua

SEQ ID NO: 360900 - RNA, 19 nt, Human respiratory syncytial virus
cuauaucauccaaccauaa

SEQ ID NO: 360901 - RNA, 12 nt, Human respiratory syncytial virus
cuauauccaaac

SEQ ID NO: 360902 - RNA, 14 nt, Human respiratory syncytial virus
cuauauccaaacau

SEQ ID NO: 360903 - RNA, 19 nt, Human respiratory syncytial virus
cuauauccaaacaucauga

SEQ ID NO: 360904 - RNA, 17 nt, Human respiratory syncytial virus
cuaucaguucuggcaau

SEQ ID NO: 360905 - RNA, 18 nt, Human respiratory syncytial virus
cuaucaugguagcauaga

SEQ ID NO: 360906 - RNA, 13 nt, Human respiratory syncytial virus
cuauuaaugcauu

SEQ ID NO: 360907 - RNA, 20 nt, Human respiratory syncytial virus
uaaaaacauauuacaauuua

SEQ ID NO: 360908 - RNA, 20 nt, Human respiratory syncytial virus
uaaaacagacaucaauccau

SEQ ID NO: 360909 - RNA, 20 nt, Human respiratory syncytial virus
uaaaagaaaccaaaugcaau

SEQ ID NO: 360910 - RNA, 19 nt, Human respiratory syncytial virus
uaaaagaacuugcaagcau

SEQ ID NO: 360911 - RNA, 23 nt, Human respiratory syncytial virus
uaaaaugggaaauacauccauca

SEQ ID NO: 360912 - RNA, 19 nt, Human respiratory syncytial virus
uaaacaaacuaugugguau

SEQ ID NO: 360913 - RNA, 19 nt, Human respiratory syncytial virus
uaaacaagauacucaaguc

SEQ ID NO: 360914 - RNA, 23 nt, Human respiratory syncytial virus
uaaagggcaaguucgcaucaucc

SEQ ID NO: 360915 - RNA, 16 nt, Human respiratory syncytial virus
uaaauaaaaccaaaau

SEQ ID NO: 360916 - RNA, 14 nt, Human respiratory syncytial virus
uaaaucaacacauc

SEQ ID NO: 360917 - RNA, 15 nt, Human respiratory syncytial virus
uaaaucaacacauca

SEQ ID NO: 360918 - RNA, 21 nt, Human respiratory syncytial virus
uaaaucaacacaucauucaca

SEQ ID NO: 360919 - RNA, 18 nt, Human respiratory syncytial virus
uaaauuggggcaaauaca

SEQ ID NO: 360920 - RNA, 14 nt, Human respiratory syncytial virus
uaaauuugagauua

SEQ ID NO: 360921 - RNA, 22 nt, Human respiratory syncytial virus
uaacaaacacuucaacaucaca

SEQ ID NO: 360922 - RNA, 16 nt, Human respiratory syncytial virus
uaacacagucauuaau

SEQ ID NO: 360923 - RNA, 17 nt, Human respiratory syncytial virus
uaacacagucauuaaua

SEQ ID NO: 360924 - RNA, 18 nt, Human respiratory syncytial virus
uaacgauucuauaucauc

SEQ ID NO: 360925 - RNA, 20 nt, Human respiratory syncytial virus
uaacgauucuauaucaucca

SEQ ID NO: 360926 - RNA, 18 nt, Human respiratory syncytial virus
uaacggcccuuaucucaa

SEQ ID NO: 360927 - RNA, 18 nt, Human respiratory syncytial virus
uaagaagaaagauagcau

SEQ ID NO: 360928 - RNA, 14 nt, Human respiratory syncytial virus
uaagaaggagcuaa

SEQ ID NO: 360929 - RNA, 21 nt, Human respiratory syncytial virus
uaagcuagauccuuaacucau

SEQ ID NO: 360930 - RNA, 13 nt, Human respiratory syncytial virus
uaaguaauauaaa

SEQ ID NO: 360931 - RNA, 15 nt, Human respiratory syncytial virus
uaauauaaaaacuca

SEQ ID NO: 360932 - RNA, 20 nt, Human respiratory syncytial virus
uaauauccucuuguuuauac

SEQ ID NO: 360933 - RNA, 17 nt, Human respiratory syncytial virus
uaaucucuuuacuaauu

SEQ ID NO: 360934 - RNA, 22 nt, Human respiratory syncytial virus
uaaugcauuguaccucaccuca

SEQ ID NO: 360935 - RNA, 12 nt, Human respiratory syncytial virus
uaauuacuuuga

SEQ ID NO: 360936 - RNA, 17 nt, Human respiratory syncytial virus
uacacacuauauccaaa

SEQ ID NO: 360937 - RNA, 23 nt, Human respiratory syncytial virus
uacacacuucaucacacaaacca

SEQ ID NO: 360938 - RNA, 17 nt, Human respiratory syncytial virus
uacacagcagcuguuca

SEQ ID NO: 360939 - RNA, 15 nt, Human respiratory syncytial virus
uacacuaauacauau

SEQ ID NO: 360940 - RNA, 20 nt, Human respiratory syncytial virus
uacacuaauacauaugaucu

SEQ ID NO: 360941 - RNA, 22 nt, Human respiratory syncytial virus
uacacuauucaacguaguacag

SEQ ID NO: 360942 - RNA, 19 nt, Human respiratory syncytial virus
uacacugaauauaauacaa

SEQ ID NO: 360943 - RNA, 16 nt, Human respiratory syncytial virus
uacagcuacuuaugca

SEQ ID NO: 360944 - RNA, 18 nt, Human respiratory syncytial virus
uacagcuacuuaugcaaa

SEQ ID NO: 360945 - RNA, 14 nt, Human respiratory syncytial virus
uacaggcugaauca

SEQ ID NO: 360946 - RNA, 19 nt, Human respiratory syncytial virus
uacaggcugaaucauuucu

SEQ ID NO: 360947 - RNA, 18 nt, Human respiratory syncytial virus
uacagucauaauuacuuu

SEQ ID NO: 360948 - RNA, 21 nt, Human respiratory syncytial virus
uacauaugaucuuaacucuaa

SEQ ID NO: 360949 - RNA, 14 nt, Human respiratory syncytial virus
uacauccaucacaa

SEQ ID NO: 360950 - RNA, 17 nt, Human respiratory syncytial virus
uacaugugcauuuacaa

SEQ ID NO: 360951 - RNA, 19 nt, Human respiratory syncytial virus
uaccagugucauaacaaua

SEQ ID NO: 360952 - RNA, 20 nt, Human respiratory syncytial virus
uaccaucaugcugugucaaa

SEQ ID NO: 360953 - RNA, 14 nt, Human respiratory syncytial virus
uacgugaacaagcu

SEQ ID NO: 360954 - RNA, 16 nt, Human respiratory syncytial virus
uacuagagcauaugaa

SEQ ID NO: 360955 - RNA, 18 nt, Human respiratory syncytial virus
uacuagugaggcaaaacu

SEQ ID NO: 360956 - RNA, 12 nt, Human respiratory syncytial virus
uagaauucacaa

SEQ ID NO: 360957 - RNA, 22 nt, Human respiratory syncytial virus
uagcacaaauagcacuaucagu

SEQ ID NO: 360958 - RNA, 23 nt, Human respiratory syncytial virus
uagcagaaaaccgugaccuauca

SEQ ID NO: 360959 - RNA, 24 nt, Human respiratory syncytial virus
uagcagaaaaccgugaccuaucaa

SEQ ID NO: 360960 - RNA, 14 nt, Human respiratory syncytial virus
uagcauaauaucug

SEQ ID NO: 360961 - RNA, 16 nt, Human respiratory syncytial virus
uagggaguaccaaaua

SEQ ID NO: 360962 - RNA, 22 nt, Human respiratory syncytial virus
uagggaguaccaaauacaagaa

SEQ ID NO: 360963 - RNA, 20 nt, Human respiratory syncytial virus
uagguauguuauaugcuaug

SEQ ID NO: 360964 - RNA, 23 nt, Human respiratory syncytial virus
uaguaacaaaaaaagaacaagau

SEQ ID NO: 360965 - RNA, 14 nt, Human respiratory syncytial virus
uaguauaucaucca

SEQ ID NO: 360966 - RNA, 17 nt, Human respiratory syncytial virus
uaguauaucauccauau

SEQ ID NO: 360967 - RNA, 19 nt, Human respiratory syncytial virus
uaguaugggaucaaaaaca

SEQ ID NO: 360968 - RNA, 22 nt, Human respiratory syncytial virus
uaguaugggaucaaaaacaaca

SEQ ID NO: 360969 - RNA, 15 nt, Human respiratory syncytial virus
uaguuagaguucaau

SEQ ID NO: 360970 - RNA, 20 nt, Human respiratory syncytial virus
uaguuagaguucaaucaauc

SEQ ID NO: 360971 - RNA, 15 nt, Human respiratory syncytial virus
uauaccgccaauuca

SEQ ID NO: 360972 - RNA, 17 nt, Human respiratory syncytial virus
uauagaaguaaccaaag

SEQ ID NO: 360973 - RNA, 18 nt, Human respiratory syncytial virus
uauagaaguaaccaaaga

SEQ ID NO: 360974 - RNA, 19 nt, Human respiratory syncytial virus
uauagaaguaaccaaagag

SEQ ID NO: 360975 - RNA, 21 nt, Human respiratory syncytial virus
uauauauaaacaaacaaaucc

SEQ ID NO: 360976 - RNA, 14 nt, Human respiratory syncytial virus
uaucaacacugaau

SEQ ID NO: 360977 - RNA, 15 nt, Human respiratory syncytial virus
uaucacaaucaaaca

SEQ ID NO: 360978 - RNA, 16 nt, Human respiratory syncytial virus
uaucauccaaccauaa

SEQ ID NO: 360979 - RNA, 18 nt, Human respiratory syncytial virus
uaucauccaaccauaaaa

SEQ ID NO: 360980 - RNA, 13 nt, Human respiratory syncytial virus
uaugacauauaaa

SEQ ID NO: 360981 - RNA, 15 nt, Human respiratory syncytial virus
uauguuauaugcuau

SEQ ID NO: 360982 - RNA, 20 nt, Human respiratory syncytial virus
uauuuccagucauuacuuau

SEQ ID NO: 360983 - RNA, 24 nt, Human respiratory syncytial virus
ucaaaauccaaaaucacuaccagc

SEQ ID NO: 360984 - RNA, 15 nt, Human respiratory syncytial virus
ucaaacuaugagcac

SEQ ID NO: 360985 - RNA, 23 nt, Human respiratory syncytial virus
ucaaagggaaauggggcaaauaa

SEQ ID NO: 360986 - RNA, 13 nt, Human respiratory syncytial virus
ucaacaacagucu

SEQ ID NO: 360987 - RNA, 20 nt, Human respiratory syncytial virus
ucaacaacagucugcugauc

SEQ ID NO: 360988 - RNA, 13 nt, Human respiratory syncytial virus
ucaacaaccauuu

SEQ ID NO: 360989 - RNA, 16 nt, Human respiratory syncytial virus
auccucaaacuacaca

SEQ ID NO: 360990 - RNA, 18 nt, Human respiratory syncytial virus
auccucaaacuacacacu

SEQ ID NO: 360991 - RNA, 23 nt, Human respiratory syncytial virus
auccucaaacuacacacuauauc

SEQ ID NO: 360992 - RNA, 20 nt, Human respiratory syncytial virus
auccucuuguuuauacagau

SEQ ID NO: 360993 - RNA, 16 nt, Human respiratory syncytial virus
auccugcaucacuaac

SEQ ID NO: 360994 - RNA, 18 nt, Human respiratory syncytial virus
auccugcaucacuaacaa

SEQ ID NO: 360995 - RNA, 16 nt, Human respiratory syncytial virus
auccuuguaaauuuga

SEQ ID NO: 360996 - RNA, 14 nt, Human respiratory syncytial virus
aucuacacuacaca

SEQ ID NO: 360997 - RNA, 15 nt, Human respiratory syncytial virus
aucuacacuacacac

SEQ ID NO: 360998 - RNA, 16 nt, Human respiratory syncytial virus
aucuacacuacacacu

SEQ ID NO: 360999 - RNA, 13 nt, Human respiratory syncytial virus
aucucaacaacca

SEQ ID NO: 361000 - RNA, 15 nt, Human respiratory syncytial virus
aucuguuaacucaau

SEQ ID NO: 361001 - RNA, 20 nt, Human respiratory syncytial virus
aucuuaaaaaacuaacuaua

SEQ ID NO: 361002 - RNA, 18 nt, Human respiratory syncytial virus
augaauguauuguaagaa

SEQ ID NO: 361003 - RNA, 19 nt, Human respiratory syncytial virus
augacaacacuacuaugca

SEQ ID NO: 361004 - RNA, 14 nt, Human respiratory syncytial virus
augauccugcauca

SEQ ID NO: 361005 - RNA, 21 nt, Human respiratory syncytial virus
augauccugcaucacuaacaa

SEQ ID NO: 361006 - RNA, 18 nt, Human respiratory syncytial virus
augaucuuaacucuaauc

SEQ ID NO: 361007 - RNA, 22 nt, Human respiratory syncytial virus
augcaaaacacaccagcugcca

SEQ ID NO: 361008 - RNA, 20 nt, Human respiratory syncytial virus
augcaaagauuaaugaucac

SEQ ID NO: 361009 - RNA, 16 nt, Human respiratory syncytial virus
augcuauuaaucacug

SEQ ID NO: 361010 - RNA, 22 nt, Human respiratory syncytial virus
augcugugucaaauuauaaucc

SEQ ID NO: 361011 - RNA, 17 nt, Human respiratory syncytial virus
auggauucaauaauaac

SEQ ID NO: 361012 - RNA, 17 nt, Human respiratory syncytial virus
auggcucuuagcaaagu

SEQ ID NO: 361013 - RNA, 22 nt, Human respiratory syncytial virus
augggaaauacauccaucacaa

SEQ ID NO: 361014 - RNA, 15 nt, Human respiratory syncytial virus
augucacuacaguca

SEQ ID NO: 361015 - RNA, 13 nt, Human respiratory syncytial virus
augugguaugcua

SEQ ID NO: 361016 - RNA, 12 nt, Human respiratory syncytial virus
auguguaucuaa

SEQ ID NO: 361017 - RNA, 12 nt, Human respiratory syncytial virus
auguuccaguca

SEQ ID NO: 361018 - RNA, 18 nt, Human respiratory syncytial virus
auguuuagucuaacucaa

SEQ ID NO: 361019 - RNA, 18 nt, Human respiratory syncytial virus
auuacaauuuaaccauaa

SEQ ID NO: 361020 - RNA, 22 nt, Human respiratory syncytial virus
auuacaauuuaaccauaaccau

SEQ ID NO: 361021 - RNA, 15 nt, Human respiratory syncytial virus
auuacaccaacuuaa

SEQ ID NO: 361022 - RNA, 16 nt, Human respiratory syncytial virus
auuacaccaacuuaau

SEQ ID NO: 361023 - RNA, 22 nt, Human respiratory syncytial virus
auuacagcuacuuaugcaaaac

SEQ ID NO: 361024 - RNA, 16 nt, Human respiratory syncytial virus
auuagaugccacucaa

SEQ ID NO: 361025 - RNA, 19 nt, Human respiratory syncytial virus
auucaauaauaacaucucu

SEQ ID NO: 361026 - RNA, 15 nt, Human respiratory syncytial virus
auucaauacauauac

SEQ ID NO: 361027 - RNA, 15 nt, Human respiratory syncytial virus
auuccucaaacaaca

SEQ ID NO: 361028 - RNA, 18 nt, Human respiratory syncytial virus
auugcuacaacuaacuua

SEQ ID NO: 361029 - RNA, 22 nt, Human respiratory syncytial virus
auugcuacauucaaucauaaaa

SEQ ID NO: 361030 - RNA, 15 nt, Human respiratory syncytial virus
auuguaccucaccuc

SEQ ID NO: 361031 - RNA, 17 nt, Human respiratory syncytial virus
auuguaccucaccucaa

SEQ ID NO: 361032 - RNA, 20 nt, Human respiratory syncytial virus
auuuaaaagguguuaucucu

SEQ ID NO: 361033 - RNA, 14 nt, Human respiratory syncytial virus
auuuagaugcuaac

SEQ ID NO: 361034 - RNA, 14 nt, Human respiratory syncytial virus
auuucuucacauca

SEQ ID NO: 361035 - RNA, 15 nt, Human respiratory syncytial virus
caaaaucacuaccag

SEQ ID NO: 361036 - RNA, 15 nt, Human respiratory syncytial virus
caaaauccaaaauca

SEQ ID NO: 361037 - RNA, 18 nt, Human respiratory syncytial virus
caaaauccaaaaucacua

SEQ ID NO: 361038 - RNA, 21 nt, Human respiratory syncytial virus
caaacaaauccaaucuucuca

SEQ ID NO: 361039 - RNA, 15 nt, Human respiratory syncytial virus
caaacacuucaacau

SEQ ID NO: 361040 - RNA, 19 nt, Human respiratory syncytial virus
caaacacuucaacaucaca

SEQ ID NO: 361041 - RNA, 22 nt, Human respiratory syncytial virus
caaacuacacacuauauccaaa

SEQ ID NO: 361042 - RNA, 19 nt, Human respiratory syncytial virus
caaacuaugagcacuacaa

SEQ ID NO: 361043 - RNA, 23 nt, Human respiratory syncytial virus
caaacuaugagcacuacaaauga

SEQ ID NO: 361044 - RNA, 15 nt, Human respiratory syncytial virus
caaagaaaucaucac

SEQ ID NO: 361045 - RNA, 17 nt, Human respiratory syncytial virus
caaagauuaaugaucac

SEQ ID NO: 361046 - RNA, 22 nt, Human respiratory syncytial virus
caaagcuaccaaauuccuagaa

SEQ ID NO: 361047 - RNA, 15 nt, Human respiratory syncytial virus
caaaguccacuacua

SEQ ID NO: 361048 - RNA, 12 nt, Human respiratory syncytial virus
caaauaaacuca

SEQ ID NO: 361049 - RNA, 13 nt, Human respiratory syncytial virus
caaauaaacucac

SEQ ID NO: 361050 - RNA, 15 nt, Human respiratory syncytial virus
caaauagcacuauca

SEQ ID NO: 361051 - RNA, 16 nt, Human respiratory syncytial virus
caaauagcacuaucag

SEQ ID NO: 361052 - RNA, 16 nt, Human respiratory syncytial virus
caaauccaaucuucuc

SEQ ID NO: 361053 - RNA, 16 nt, Human respiratory syncytial virus
caacacuacuaugcaa

SEQ ID NO: 361054 - RNA, 24 nt, Human respiratory syncytial virus
caacagucugcugaucaccaaucc

SEQ ID NO: 361055 - RNA, 12 nt, Human respiratory syncytial virus
caaccaaucaau

SEQ ID NO: 361056 - RNA, 20 nt, Human respiratory syncytial virus
caacuaucaugguagcauag

SEQ ID NO: 361057 - RNA, 19 nt, Human respiratory syncytial virus
caacucacucagcaaucaa

SEQ ID NO: 361058 - RNA, 20 nt, Human respiratory syncytial virus
caacucacucagcaaucaac

SEQ ID NO: 361059 - RNA, 20 nt, Human respiratory syncytial virus
caagaaucaacgcacugcca

SEQ ID NO: 361060 - RNA, 16 nt, Human respiratory syncytial virus
caagucaauggacaaa

SEQ ID NO: 361061 - RNA, 19 nt, Human respiratory syncytial virus
caaguuaaaugauacauua

SEQ ID NO: 361062 - RNA, 22 nt, Human respiratory syncytial virus
caaguucgcaucauccaaagau

SEQ ID NO: 361063 - RNA, 14 nt, Human respiratory syncytial virus
caauaaaacagaca

SEQ ID NO: 361064 - RNA, 12 nt, Human respiratory syncytial virus
caauacauauac

SEQ ID NO: 361065 - RNA, 19 nt, Human respiratory syncytial virus
caauacauauacuauaaau

SEQ ID NO: 361066 - RNA, 15 nt, Human respiratory syncytial virus
caauagaauucacaa

SEQ ID NO: 361067 - RNA, 17 nt, Human respiratory syncytial virus
caaucaacaacaucaau

SEQ ID NO: 361068 - RNA, 12 nt, Human respiratory syncytial virus
caaucaaccaac

SEQ ID NO: 361069 - RNA, 22 nt, Human respiratory syncytial virus
caaucauaaaaacauauuacaa

SEQ ID NO: 361070 - RNA, 15 nt, Human respiratory syncytial virus
caauccaacaaguga

SEQ ID NO: 361071 - RNA, 21 nt, Human respiratory syncytial virus
caaucccacucaaaauccaaa

SEQ ID NO: 361072 - RNA, 19 nt, Human respiratory syncytial virus
caaucgacauguagugcag

SEQ ID NO: 361073 - RNA, 14 nt, Human respiratory syncytial virus
caaugauaaucuca

SEQ ID NO: 361074 - RNA, 17 nt, Human respiratory syncytial virus
caaugauacaugugcau

SEQ ID NO: 361075 - RNA, 15 nt, Human respiratory syncytial virus
caauuucuccaacau

SEQ ID NO: 361076 - RNA, 17 nt, Human respiratory syncytial virus
cacaaauagcacuauca

SEQ ID NO: 361077 - RNA, 17 nt, Human respiratory syncytial virus
cacagguuaagugcaau

SEQ ID NO: 361078 - RNA, 16 nt, Human respiratory syncytial virus
caccuaaaaacuuauu

SEQ ID NO: 361079 - RNA, 21 nt, Human respiratory syncytial virus
caccuaaaaacuuauuagaug

SEQ ID NO: 361080 - RNA, 15 nt, Human respiratory syncytial virus
caccucaagucagaa

SEQ ID NO: 361081 - RNA, 19 nt, Human respiratory syncytial virus
cacuaaaucaacacaucau

SEQ ID NO: 361082 - RNA, 15 nt, Human respiratory syncytial virus
cacuaauacauauga

SEQ ID NO: 361083 - RNA, 23 nt, Human respiratory syncytial virus
cacuaauacauaugaucuuaacu

SEQ ID NO: 361084 - RNA, 13 nt, Human respiratory syncytial virus
cacuacuaugcaa

SEQ ID NO: 361085 - RNA, 13 nt, Human respiratory syncytial virus
cacuauauccaaa

SEQ ID NO: 361086 - RNA, 22 nt, Human respiratory syncytial virus
cacucaaaauccaaaaucacua

SEQ ID NO: 361087 - RNA, 12 nt, Human respiratory syncytial virus
cacucaacaauu

SEQ ID NO: 361088 - RNA, 16 nt, Human respiratory syncytial virus
cacucagcaaucaaca

SEQ ID NO: 361089 - RNA, 20 nt, Human respiratory syncytial virus
cagagguuauuuuagugcuu

SEQ ID NO: 361090 - RNA, 22 nt, Human respiratory syncytial virus
cagauuaaauuuaaaaucuaua

SEQ ID NO: 361091 - RNA, 13 nt, Human respiratory syncytial virus
cagcaaucaacaa

SEQ ID NO: 361092 - RNA, 19 nt, Human respiratory syncytial virus
cagcagcuguucaguacaa

SEQ ID NO: 361093 - RNA, 23 nt, Human respiratory syncytial virus
cagccauaauauucaucaucucu

SEQ ID NO: 361094 - RNA, 15 nt, Human respiratory syncytial virus
cagcuguucaguaca

SEQ ID NO: 361095 - RNA, 15 nt, Human respiratory syncytial virus
cagguccacauauau

SEQ ID NO: 361096 - RNA, 22 nt, Human respiratory syncytial virus
cagguugguauaccagugucau

SEQ ID NO: 361097 - RNA, 18 nt, Human respiratory syncytial virus
caguaccccagaaaccaa

SEQ ID NO: 361098 - RNA, 19 nt, Human respiratory syncytial virus
caguaccccagaaaccaaa

SEQ ID NO: 361099 - RNA, 20 nt, Human respiratory syncytial virus
caguaccccagaaaccaaag

SEQ ID NO: 361100 - RNA, 15 nt, Human respiratory syncytial virus
cagucaucuguacca

SEQ ID NO: 361101 - RNA, 17 nt, Human respiratory syncytial virus
cagucauuacuuaugac

SEQ ID NO: 361102 - RNA, 14 nt, Human respiratory syncytial virus
aaacaccuaaacaa

SEQ ID NO: 361103 - RNA, 12 nt, Human respiratory syncytial virus
aaacacuaaauc

SEQ ID NO: 361104 - RNA, 19 nt, Human respiratory syncytial virus
aaaccacgccaacuaucau

SEQ ID NO: 361105 - RNA, 18 nt, Human respiratory syncytial virus
aaaccuggggcaaauaac

SEQ ID NO: 361106 - RNA, 16 nt, Human respiratory syncytial virus
aaacuaacaaugauac

SEQ ID NO: 361107 - RNA, 15 nt, Human respiratory syncytial virus
aaacuaacuauaaca

SEQ ID NO: 361108 - RNA, 22 nt, Human respiratory syncytial virus
aaacuaugugguaugcuauuaa

SEQ ID NO: 361109 - RNA, 20 nt, Human respiratory syncytial virus
aaacucaccuaaucaaucaa

SEQ ID NO: 361110 - RNA, 19 nt, Human respiratory syncytial virus
aaacuuuucaauaauuuag

SEQ ID NO: 361111 - RNA, 13 nt, Human respiratory syncytial virus
aaagacaagcuac

SEQ ID NO: 361112 - RNA, 13 nt, Human respiratory syncytial virus
aaagaccugggau

SEQ ID NO: 361113 - RNA, 17 nt, Human respiratory syncytial virus
aaagccaacuacccaag

SEQ ID NO: 361114 - RNA, 13 nt, Human respiratory syncytial virus
aaaggaccuucac

SEQ ID NO: 361115 - RNA, 16 nt, Human respiratory syncytial virus
aaagguguuaucucuu

SEQ ID NO: 361116 - RNA, 20 nt, Human respiratory syncytial virus
aaagucaaguuaaaugauac

SEQ ID NO: 361117 - RNA, 12 nt, Human respiratory syncytial virus
aaauaaacucac

SEQ ID NO: 361118 - RNA, 19 nt, Human respiratory syncytial virus
aaauaacaaagcuaccaaa

SEQ ID NO: 361119 - RNA, 21 nt, Human respiratory syncytial virus
aaauaaggaucagcugcuguc

SEQ ID NO: 361120 - RNA, 16 nt, Human respiratory syncytial virus
aaauauggaaacauac

SEQ ID NO: 361121 - RNA, 15 nt, Human respiratory syncytial virus
aaaucaacacaucau

SEQ ID NO: 361122 - RNA, 19 nt, Human respiratory syncytial virus
aaaucaacacaucauucac

SEQ ID NO: 361123 - RNA, 20 nt, Human respiratory syncytial virus
aaaucaacacaucauucaca

SEQ ID NO: 361124 - RNA, 16 nt, Human respiratory syncytial virus
aaauuuagaugcuaac

SEQ ID NO: 361125 - RNA, 16 nt, Human respiratory syncytial virus
aacaaagcuaccaaau

SEQ ID NO: 361126 - RNA, 19 nt, Human respiratory syncytial virus
aacaagauacucaagucaa

SEQ ID NO: 361127 - RNA, 15 nt, Human respiratory syncytial virus
aacacagucauuaau

SEQ ID NO: 361128 - RNA, 13 nt, Human respiratory syncytial virus
aacacaucauuca

SEQ ID NO: 361129 - RNA, 13 nt, Human respiratory syncytial virus
aacaccuaaacaa

SEQ ID NO: 361130 - RNA, 16 nt, Human respiratory syncytial virus
aacagacaucaaucca

SEQ ID NO: 361131 - RNA, 17 nt, Human respiratory syncytial virus
aacagacaucaauccau

SEQ ID NO: 361132 - RNA, 21 nt, Human respiratory syncytial virus
aacagcuggggcaaauauguc

SEQ ID NO: 361133 - RNA, 22 nt, Human respiratory syncytial virus
aacauacgugaacaagcuucac

SEQ ID NO: 361134 - RNA, 14 nt, Human respiratory syncytial virus
aacauacuagugaa

SEQ ID NO: 361135 - RNA, 21 nt, Human respiratory syncytial virus
aacauacuagugaagcagauc

SEQ ID NO: 361136 - RNA, 23 nt, Human respiratory syncytial virus
aacauauuacaauuuaaccauaa

SEQ ID NO: 361137 - RNA, 18 nt, Human respiratory syncytial virus
aacaucaauaaaacagac

SEQ ID NO: 361138 - RNA, 23 nt, Human respiratory syncytial virus
aacaucaucaauccaacaaguga

SEQ ID NO: 361139 - RNA, 18 nt, Human respiratory syncytial virus
aacaucaugaacaucuac

SEQ ID NO: 361140 - RNA, 20 nt, Human respiratory syncytial virus
aaccaaaccaagcuauuccu

SEQ ID NO: 361141 - RNA, 13 nt, Human respiratory syncytial virus
aaccaaagccaac

SEQ ID NO: 361142 - RNA, 17 nt, Human respiratory syncytial virus
aaccaccugaucauguu

SEQ ID NO: 361143 - RNA, 17 nt, Human respiratory syncytial virus
aaccacgccaacuauca

SEQ ID NO: 361144 - RNA, 13 nt, Human respiratory syncytial virus
aaccauaaccauu

SEQ ID NO: 361145 - RNA, 12 nt, Human respiratory syncytial virus
aaccauggagcu

SEQ ID NO: 361146 - RNA, 16 nt, Human respiratory syncytial virus
aaccgugaccuaucaa

SEQ ID NO: 361147 - RNA, 22 nt, Human respiratory syncytial virus
aaccugacgaaauuaacaauau

SEQ ID NO: 361148 - RNA, 17 nt, Human respiratory syncytial virus
aacgauucuauaucauc

SEQ ID NO: 361149 - RNA, 12 nt, Human respiratory syncytial virus
aacuaacuauaa

SEQ ID NO: 361150 - RNA, 20 nt, Human respiratory syncytial virus
aacucuugcuauuaaugcau

SEQ ID NO: 361151 - RNA, 17 nt, Human respiratory syncytial virus
aacugacacuaaaguaa

SEQ ID NO: 361152 - RNA, 18 nt, Human respiratory syncytial virus
aacugaggaguuuuacca

SEQ ID NO: 361153 - RNA, 13 nt, Human respiratory syncytial virus
aacuugcaagcau

SEQ ID NO: 361154 - RNA, 15 nt, Human respiratory syncytial virus
aacuugcaagcauca

SEQ ID NO: 361155 - RNA, 14 nt, Human respiratory syncytial virus
aagaaaacuugaug

SEQ ID NO: 361156 - RNA, 16 nt, Human respiratory syncytial virus
aagaaaacuugaugaa

SEQ ID NO: 361157 - RNA, 17 nt, Human respiratory syncytial virus
aagaaaccaaaugcaau

SEQ ID NO: 361158 - RNA, 16 nt, Human respiratory syncytial virus
aagaaauacacugaau

SEQ ID NO: 361159 - RNA, 15 nt, Human respiratory syncytial virus
aagaaugcagugaca

SEQ ID NO: 361160 - RNA, 23 nt, Human respiratory syncytial virus
aagaaugcagugacagaauuaca

SEQ ID NO: 361161 - RNA, 16 nt, Human respiratory syncytial virus
aagaauuagauaagua

SEQ ID NO: 361162 - RNA, 13 nt, Human respiratory syncytial virus
aagacacuauaaa

SEQ ID NO: 361163 - RNA, 19 nt, Human respiratory syncytial virus
aagaccugggauacucuca

SEQ ID NO: 361164 - RNA, 20 nt, Human respiratory syncytial virus
aagaccugggauacucucaa

SEQ ID NO: 361165 - RNA, 13 nt, Human respiratory syncytial virus
aagcaagaacgaa

SEQ ID NO: 361166 - RNA, 13 nt, Human respiratory syncytial virus
aagcagaucucua

SEQ ID NO: 361167 - RNA, 21 nt, Human respiratory syncytial virus
aagcauguccucgucugaaca

SEQ ID NO: 361168 - RNA, 15 nt, Human respiratory syncytial virus
aagcuacugcacaaa

SEQ ID NO: 361169 - RNA, 18 nt, Human respiratory syncytial virus
aaggaucagcugcuguca

SEQ ID NO: 361170 - RNA, 21 nt, Human respiratory syncytial virus
aagggaagacacuauaaagau

SEQ ID NO: 361171 - RNA, 15 nt, Human respiratory syncytial virus
aagguguuaucucuu

SEQ ID NO: 361172 - RNA, 14 nt, Human respiratory syncytial virus
aaguaucacaauca

SEQ ID NO: 361173 - RNA, 15 nt, Human respiratory syncytial virus
aaguaucacaaucaa

SEQ ID NO: 361174 - RNA, 21 nt, Human respiratory syncytial virus
aaguucgcaucauccaaagau

SEQ ID NO: 361175 - RNA, 13 nt, Human respiratory syncytial virus
aauaaaacagaca

SEQ ID NO: 361176 - RNA, 19 nt, Human respiratory syncytial virus
aauaaacucaccuaaucaa

SEQ ID NO: 361177 - RNA, 15 nt, Human respiratory syncytial virus
aauaaccauggagcu

SEQ ID NO: 361178 - RNA, 16 nt, Human respiratory syncytial virus
aauaagucaacaugga

SEQ ID NO: 361179 - RNA, 11 nt, Human respiratory syncytial virus
aauacacuauu

SEQ ID NO: 361180 - RNA, 13 nt, Human respiratory syncytial virus
aauacggggcaaa

SEQ ID NO: 361181 - RNA, 23 nt, Human respiratory syncytial virus
aauagauauagaaguaaccaaag

SEQ ID NO: 361182 - RNA, 19 nt, Human respiratory syncytial virus
aauauaaaaacucaucaaa

SEQ ID NO: 361183 - RNA, 23 nt, Human respiratory syncytial virus
aauauaaaagaaaccaaaugcaa

SEQ ID NO: 361184 - RNA, 17 nt, Human respiratory syncytial virus
aauaucuagauaucaua

SEQ ID NO: 361185 - RNA, 21 nt, Human respiratory syncytial virus
aaucauaaauucacaggauua

SEQ ID NO: 361186 - RNA, 19 nt, Human respiratory syncytial virus
aaucauuucuucacaucau

SEQ ID NO: 361187 - RNA, 21 nt, Human respiratory syncytial virus
aaucauuucuucacaucaugc

SEQ ID NO: 361188 - RNA, 18 nt, Human respiratory syncytial virus
aauccaaaaucacuacca

SEQ ID NO: 361189 - RNA, 13 nt, Human respiratory syncytial virus
aaucccaaaucaa

SEQ ID NO: 361190 - RNA, 18 nt, Human respiratory syncytial virus
aauccuuguaaauuugag

SEQ ID NO: 361191 - RNA, 14 nt, Human respiratory syncytial virus
aaucucaaccucuc

SEQ ID NO: 361192 - RNA, 14 nt, Human respiratory syncytial virus
aaucucuuuacuaa

SEQ ID NO: 361193 - RNA, 19 nt, Human respiratory syncytial virus
aaugaucacggacaugaga

SEQ ID NO: 361194 - RNA, 23 nt, Human respiratory syncytial virus
aaugcaaccauguccaaacacaa

SEQ ID NO: 361195 - RNA, 13 nt, Human respiratory syncytial virus
aauuaacaauaua

SEQ ID NO: 361196 - RNA, 21 nt, Human respiratory syncytial virus
aauuacagcuacuuaugcaaa

SEQ ID NO: 361197 - RNA, 13 nt, Human respiratory syncytial virus
auaagaaugcagu

SEQ ID NO: 361198 - RNA, 14 nt, Human respiratory syncytial virus
auaagaaugcagug

SEQ ID NO: 361199 - RNA, 17 nt, Human respiratory syncytial virus
auaaucacuauuaugau

SEQ ID NO: 361200 - RNA, 14 nt, Human respiratory syncytial virus
auaauuuagcuuac

SEQ ID NO: 361201 - RNA, 19 nt, Human respiratory syncytial virus
auacaagaaauacacugaa

SEQ ID NO: 361202 - RNA, 13 nt, Human respiratory syncytial virus
auacacagcagcu

SEQ ID NO: 361203 - RNA, 14 nt, Human respiratory syncytial virus
auacacugaauaua

SEQ ID NO: 361204 - RNA, 22 nt, Human respiratory syncytial virus
auacacugaauauaauacaaaa

SEQ ID NO: 361205 - RNA, 14 nt, Human respiratory syncytial virus
auacauauacuaua

SEQ ID NO: 361206 - RNA, 15 nt, Human respiratory syncytial virus
auacauauacuauaa

SEQ ID NO: 361207 - RNA, 19 nt, Human respiratory syncytial virus
auacauuaaauaaggauca

SEQ ID NO: 361208 - RNA, 16 nt, Human respiratory syncytial virus
auaccagugucauaac

SEQ ID NO: 361209 - RNA, 18 nt, Human respiratory syncytial virus
auaccagugucauaacaa

SEQ ID NO: 361210 - RNA, 18 nt, Human respiratory syncytial virus
auacuagugaagcagauc

SEQ ID NO: 361211 - RNA, 17 nt, Human respiratory syncytial virus
auacucucaaucaucua

SEQ ID NO: 361212 - RNA, 18 nt, Human respiratory syncytial virus
auagaaguaaccaaagag

SEQ ID NO: 361213 - RNA, 21 nt, Human respiratory syncytial virus
auagcacaaauagcacuauca

SEQ ID NO: 361214 - RNA, 17 nt, Human respiratory syncytial virus
auagguauguuauaugc

SEQ ID NO: 361215 - RNA, 21 nt, Human respiratory syncytial virus
auaguuacauaaaaaccucaa

SEQ ID NO: 361216 - RNA, 14 nt, Human respiratory syncytial virus
auauauaaacaaac

SEQ ID NO: 361217 - RNA, 22 nt, Human respiratory syncytial virus
auauauaaacaaacaaauccaa

SEQ ID NO: 361218 - RNA, 12 nt, Human respiratory syncytial virus
auauauuugaug

SEQ ID NO: 361219 - RNA, 17 nt, Human respiratory syncytial virus
auaucauccaaccauaa

SEQ ID NO: 361220 - RNA, 14 nt, Human respiratory syncytial virus
auaucuagauauca

SEQ ID NO: 361221 - RNA, 13 nt, Human respiratory syncytial virus
auauucaucaucu

SEQ ID NO: 361222 - RNA, 15 nt, Human respiratory syncytial virus
aucaacaacaucaau

SEQ ID NO: 361223 - RNA, 13 nt, Human respiratory syncytial virus
aucaacacaucau

SEQ ID NO: 361224 - RNA, 23 nt, Human respiratory syncytial virus
aucaaccaacugauccaucagca

SEQ ID NO: 361225 - RNA, 22 nt, Human respiratory syncytial virus
aucaacucacucagcaaucaac

SEQ ID NO: 361226 - RNA, 13 nt, Human respiratory syncytial virus
aucaacugccaga

SEQ ID NO: 361227 - RNA, 15 nt, Human respiratory syncytial virus
aucaauaaaacagac

SEQ ID NO: 361228 - RNA, 13 nt, Human respiratory syncytial virus
aucaaucucaaca

SEQ ID NO: 361229 - RNA, 19 nt, Human respiratory syncytial virus
aucacaauagaauucacaa

SEQ ID NO: 361230 - RNA, 22 nt, Human respiratory syncytial virus
aucacaauagaauucacaagca

SEQ ID NO: 361231 - RNA, 16 nt, Human respiratory syncytial virus
aucacacaaaccaauc

SEQ ID NO: 361232 - RNA, 21 nt, Human respiratory syncytial virus
aucacacaaaccaaucccacu

SEQ ID NO: 361233 - RNA, 21 nt, Human respiratory syncytial virus
aucacaguacaggcugaauca

SEQ ID NO: 361234 - RNA, 14 nt, Human respiratory syncytial virus
aucacuaacaauau

SEQ ID NO: 361235 - RNA, 13 nt, Human respiratory syncytial virus
aucauccaaagau

SEQ ID NO: 361236 - RNA, 15 nt, Human respiratory syncytial virus
aucaugcugugucaa

SEQ ID NO: 361237 - RNA, 13 nt, Human respiratory syncytial virus
auccaaaaucacu

SEQ ID NO: 361238 - RNA, 17 nt, Human respiratory syncytial virus
auccaaaaucacuacca

SEQ ID NO: 361239 - RNA, 23 nt, Human respiratory syncytial virus
auccaaccauaaaacuaucuuaa

SEQ ID NO: 361240 - RNA, 13 nt, Human respiratory syncytial virus
auccaaucuucuc

SEQ ID NO: 361241 - RNA, 20 nt, Human respiratory syncytial virus
auccaaucuucucacagagu

SEQ ID NO: 361242 - RNA, 22 nt, Human respiratory syncytial virus
auccaaucuucucacagaguca

SEQ ID NO: 361243 - RNA, 20 nt, Human respiratory syncytial virus
auccacagguuaagugcaau

SEQ ID NO: 361244 - RNA, 21 nt, Human respiratory syncytial virus
auccacagguuaagugcaauc

SEQ ID NO: 361245 - RNA, 16 nt, Human respiratory syncytial virus
auccaucacaauagaa

SEQ ID NO: 361246 - RNA, 20 nt, Human respiratory syncytial virus
auccaucacaauagaauuca

SEQ ID NO: 361247 - RNA, 21 nt, Human respiratory syncytial virus
auccaucacaauagaauucac

SEQ ID NO: 361248 - RNA, 17 nt, Human respiratory syncytial virus
auccauugaaucaacug

SEQ ID NO: 361249 - RNA, 18 nt, Human respiratory syncytial virus
aucccaaaucaacccaua

SEQ ID NO: 361250 - RNA, 20 nt, Human respiratory syncytial virus
auccugcaucacuaacaaua

SEQ ID NO: 361251 - RNA, 20 nt, Human respiratory syncytial virus
aucgacauguagugcaguua

SEQ ID NO: 361252 - RNA, 12 nt, Human respiratory syncytial virus
aucuacacuaca

SEQ ID NO: 361253 - RNA, 13 nt, Human respiratory syncytial virus
aucuauagcacaa

SEQ ID NO: 361254 - RNA, 14 nt, Human respiratory syncytial virus
aucucaaccucucu

SEQ ID NO: 361255 - RNA, 16 nt, Human respiratory syncytial virus
aucucaaccucucuca

SEQ ID NO: 361256 - RNA, 17 nt, Human respiratory syncytial virus
aucucugccaaucacaa

SEQ ID NO: 361257 - RNA, 18 nt, Human respiratory syncytial virus
aucucugccaaucacaaa

SEQ ID NO: 361258 - RNA, 14 nt, Human respiratory syncytial virus
aucuguaccagcag

SEQ ID NO: 361259 - RNA, 13 nt, Human respiratory syncytial virus
aucuuccuaacuc

SEQ ID NO: 361260 - RNA, 18 nt, Human respiratory syncytial virus
augauugcaauacuaaau

SEQ ID NO: 361261 - RNA, 16 nt, Human respiratory syncytial virus
augcaaaacacaccag

SEQ ID NO: 361262 - RNA, 17 nt, Human respiratory syncytial virus
augcaauggaacugaca

SEQ ID NO: 361263 - RNA, 17 nt, Human respiratory syncytial virus
augcagugacagaauua

SEQ ID NO: 361264 - RNA, 21 nt, Human respiratory syncytial virus
augcuacccacacaacuaagc

SEQ ID NO: 361265 - RNA, 18 nt, Human respiratory syncytial virus
augcuauguccagguuag

SEQ ID NO: 361266 - RNA, 21 nt, Human respiratory syncytial virus
augcuuuagggaguuaccuuu

SEQ ID NO: 361267 - RNA, 16 nt, Human respiratory syncytial virus
auggaaacucugcuaa

SEQ ID NO: 361268 - RNA, 14 nt, Human respiratory syncytial virus
auggagaagaugca

SEQ ID NO: 361269 - RNA, 15 nt, Human respiratory syncytial virus
auggagaaguuugca

SEQ ID NO: 361270 - RNA, 19 nt, Human respiratory syncytial virus
auggugucgcaaaaccacg

SEQ ID NO: 361271 - RNA, 22 nt, Human respiratory syncytial virus
auguaaugcuuuagggaguuac

SEQ ID NO: 361272 - RNA, 12 nt, Human respiratory syncytial virus
auguagugcagu

SEQ ID NO: 361273 - RNA, 16 nt, Human respiratory syncytial virus
augugcaaaaacaccu

SEQ ID NO: 361274 - RNA, 13 nt, Human respiratory syncytial virus
auguuaaacaaga

SEQ ID NO: 361275 - RNA, 13 nt, Human respiratory syncytial virus
auguuauaugcua

SEQ ID NO: 361276 - RNA, 16 nt, Human respiratory syncytial virus
auuaaaaaauaugcaa

SEQ ID NO: 361277 - RNA, 18 nt, Human respiratory syncytial virus
auuaaaaaauaugcaaac

SEQ ID NO: 361278 - RNA, 22 nt, Human respiratory syncytial virus
auuaaugaucacggacaugaga

SEQ ID NO: 361279 - RNA, 14 nt, Human respiratory syncytial virus
auuaaugcauugua

SEQ ID NO: 361280 - RNA, 19 nt, Human respiratory syncytial virus
auuacaauuuaaccauaac

SEQ ID NO: 361281 - RNA, 21 nt, Human respiratory syncytial virus
auuacaauuuaaccauaacca

SEQ ID NO: 361282 - RNA, 14 nt, Human respiratory syncytial virus
auuacaccaacuua

SEQ ID NO: 361283 - RNA, 13 nt, Human respiratory syncytial virus
auuaguuagaguu

SEQ ID NO: 361284 - RNA, 16 nt, Human respiratory syncytial virus
auuauaaucacuauua

SEQ ID NO: 361285 - RNA, 15 nt, Human respiratory syncytial virus
auuaucaacacugaa

SEQ ID NO: 361286 - RNA, 14 nt, Human respiratory syncytial virus
auucacaggauuaa

SEQ ID NO: 361287 - RNA, 21 nt, Human respiratory syncytial virus
auuccaacaaaaaaaaccaac

SEQ ID NO: 361288 - RNA, 16 nt, Human respiratory syncytial virus
auucuauaucauccaa

SEQ ID NO: 361289 - RNA, 17 nt, Human respiratory syncytial virus
auucuauaucauccaac

SEQ ID NO: 361290 - RNA, 21 nt, Human respiratory syncytial virus
auugaaucaacugccagaccg

SEQ ID NO: 361291 - RNA, 23 nt, Human respiratory syncytial virus
auugcuacaacuaacuuacuuaa

SEQ ID NO: 361292 - RNA, 21 nt, Human respiratory syncytial virus
cauuaguuagaguucaaucaa

SEQ ID NO: 361293 - RNA, 18 nt, Human respiratory syncytial virus
cauuaguuuuugacacuu

SEQ ID NO: 361294 - RNA, 21 nt, Human respiratory syncytial virus
cauuggacaccuaaaaacuua

SEQ ID NO: 361295 - RNA, 13 nt, Human respiratory syncytial virus
cauuucuucacau

SEQ ID NO: 361296 - RNA, 16 nt, Human respiratory syncytial virus
cauuucuucacaucau

SEQ ID NO: 361297 - RNA, 19 nt, Human respiratory syncytial virus
cauuucuucacaucaugcu

SEQ ID NO: 361298 - RNA, 22 nt, Human respiratory syncytial virus
ccaaagaaaucaucacacacaa

SEQ ID NO: 361299 - RNA, 19 nt, Human respiratory syncytial virus
ccaaauacaagaaauacac

SEQ ID NO: 361300 - RNA, 18 nt, Human respiratory syncytial virus
ccaaaucaacccauaaca

SEQ ID NO: 361301 - RNA, 15 nt, Human respiratory syncytial virus
ccaacuacccaagaa

SEQ ID NO: 361302 - RNA, 17 nt, Human respiratory syncytial virus
ccaaucccacucaaaau

SEQ ID NO: 361303 - RNA, 22 nt, Human respiratory syncytial virus
ccaaucccacucaaaauccaaa

SEQ ID NO: 361304 - RNA, 21 nt, Human respiratory syncytial virus
ccaaucgacauguagugcagu

SEQ ID NO: 361305 - RNA, 22 nt, Human respiratory syncytial virus
ccaaucgacauguagugcaguu

SEQ ID NO: 361306 - RNA, 13 nt, Human respiratory syncytial virus
ccaauucaauaca

SEQ ID NO: 361307 - RNA, 18 nt, Human respiratory syncytial virus
ccacagguuaagugcaau

SEQ ID NO: 361308 - RNA, 12 nt, Human respiratory syncytial virus
ccaccaaccaau

SEQ ID NO: 361309 - RNA, 13 nt, Human respiratory syncytial virus
ccagaaaccaaag

SEQ ID NO: 361310 - RNA, 17 nt, Human respiratory syncytial virus
ccagaccgaacaaacaa

SEQ ID NO: 361311 - RNA, 16 nt, Human respiratory syncytial virus
ccauaacaaacacuuc

SEQ ID NO: 361312 - RNA, 17 nt, Human respiratory syncytial virus
ccauaacaaacacuuca

SEQ ID NO: 361313 - RNA, 12 nt, Human respiratory syncytial virus
cccuuaucucaa

SEQ ID NO: 361314 - RNA, 18 nt, Human respiratory syncytial virus
ccgacaguaccccagaaa

SEQ ID NO: 361315 - RNA, 15 nt, Human respiratory syncytial virus
ccgucagcggaacca

SEQ ID NO: 361316 - RNA, 15 nt, Human respiratory syncytial virus
ccuaaucaaucaaac

SEQ ID NO: 361317 - RNA, 21 nt, Human respiratory syncytial virus
ccuauuuuacacuaauacaua

SEQ ID NO: 361318 - RNA, 17 nt, Human respiratory syncytial virus
ccucaaacuacacacua

SEQ ID NO: 361319 - RNA, 15 nt, Human respiratory syncytial virus
ccugcaucacuaaca

SEQ ID NO: 361320 - RNA, 22 nt, Human respiratory syncytial virus
ccuuuuuaacggcccuuaucuc

SEQ ID NO: 361321 - RNA, 23 nt, Human respiratory syncytial virus
cgaaauuaacaauauaguaacaa

SEQ ID NO: 361322 - RNA, 11 nt, Human respiratory syncytial virus
cgcacugccag

SEQ ID NO: 361323 - RNA, 21 nt, Human respiratory syncytial virus
cggaaccaccaaccaaucaau

SEQ ID NO: 361324 - RNA, 14 nt, Human respiratory syncytial virus
cggcccuuaucuca

SEQ ID NO: 361325 - RNA, 19 nt, Human respiratory syncytial virus
cuaaaguaaaacuuauaaa

SEQ ID NO: 361326 - RNA, 16 nt, Human respiratory syncytial virus
cuaaaucaacacauca

SEQ ID NO: 361327 - RNA, 16 nt, Human respiratory syncytial virus
cuaacucuugcuauua

SEQ ID NO: 361328 - RNA, 18 nt, Human respiratory syncytial virus
cuaagcuagauccuuaac

SEQ ID NO: 361329 - RNA, 16 nt, Human respiratory syncytial virus
cuaaguuguacaaaga

SEQ ID NO: 361330 - RNA, 14 nt, Human respiratory syncytial virus
cuaauacauaugau

SEQ ID NO: 361331 - RNA, 16 nt, Human respiratory syncytial virus
cuaauuauaaucacua

SEQ ID NO: 361332 - RNA, 19 nt, Human respiratory syncytial virus
cuaauuauaaucacuauua

SEQ ID NO: 361333 - RNA, 20 nt, Human respiratory syncytial virus
cuaauuauaaucacuauuau

SEQ ID NO: 361334 - RNA, 17 nt, Human respiratory syncytial virus
cuacaaaugacaacacu

SEQ ID NO: 361335 - RNA, 12 nt, Human respiratory syncytial virus
cuacacacuaua

SEQ ID NO: 361336 - RNA, 14 nt, Human respiratory syncytial virus
cuacacacuauauc

SEQ ID NO: 361337 - RNA, 13 nt, Human respiratory syncytial virus
cuacacuacacac

SEQ ID NO: 361338 - RNA, 11 nt, Human respiratory syncytial virus
cuacccaagaa

SEQ ID NO: 361339 - RNA, 19 nt, Human respiratory syncytial virus
cuagaaaaagaugaugauc

SEQ ID NO: 361340 - RNA, 16 nt, Human respiratory syncytial virus
cuagauccuuaacuca

SEQ ID NO: 361341 - RNA, 17 nt, Human respiratory syncytial virus
cuaguaagcuucaaaga

SEQ ID NO: 361342 - RNA, 16 nt, Human respiratory syncytial virus
cuauaaagauacuuaa

SEQ ID NO: 361343 - RNA, 17 nt, Human respiratory syncytial virus
cuauaaagauacuuaaa

SEQ ID NO: 361344 - RNA, 17 nt, Human respiratory syncytial virus
cuauaucauccaaccau

SEQ ID NO: 361345 - RNA, 21 nt, Human respiratory syncytial virus
cuauauccaaacaucaugaac

SEQ ID NO: 361346 - RNA, 16 nt, Human respiratory syncytial virus
cuauuuuacacuaaua

SEQ ID NO: 361347 - RNA, 23 nt, Human respiratory syncytial virus
cuauuuuacacuaauacauauga

SEQ ID NO: 361348 - RNA, 15 nt, Human respiratory syncytial virus
cucaaacuacacacu

SEQ ID NO: 361349 - RNA, 19 nt, Human respiratory syncytial virus
cucaaacuacacacuauau

SEQ ID NO: 361350 - RNA, 15 nt, Human respiratory syncytial virus
cucaaccucucucau

SEQ ID NO: 361351 - RNA, 24 nt, Human respiratory syncytial virus
cucacucagcaaucaacaacauca

SEQ ID NO: 361352 - RNA, 21 nt, Human respiratory syncytial virus
cucagcaaucaacaacaucaa

SEQ ID NO: 361353 - RNA, 16 nt, Human respiratory syncytial virus
cuccacauacacagca

SEQ ID NO: 361354 - RNA, 14 nt, Human respiratory syncytial virus
cuccucaugccuua

SEQ ID NO: 361355 - RNA, 21 nt, Human respiratory syncytial virus
cugaacaaauugcuacaacua

SEQ ID NO: 361356 - RNA, 17 nt, Human respiratory syncytial virus
cugaagaugcaaaucau

SEQ ID NO: 361357 - RNA, 19 nt, Human respiratory syncytial virus
cugaaucauuucuucacau

SEQ ID NO: 361358 - RNA, 21 nt, Human respiratory syncytial virus
cugaaugacagguccacauau

SEQ ID NO: 361359 - RNA, 22 nt, Human respiratory syncytial virus
cugaaugacagguccacauaua

SEQ ID NO: 361360 - RNA, 23 nt, Human respiratory syncytial virus
cugauccacagguuaagugcaau

SEQ ID NO: 361361 - RNA, 21 nt, Human respiratory syncytial virus
cugauccaucagcaaccugac

SEQ ID NO: 361362 - RNA, 14 nt, Human respiratory syncytial virus
cugccagaccgaac

SEQ ID NO: 361363 - RNA, 19 nt, Human respiratory syncytial virus
cuuaaaaaacuaacuauaa

SEQ ID NO: 361364 - RNA, 15 nt, Human respiratory syncytial virus
cuuaaagaugcugga

SEQ ID NO: 361365 - RNA, 20 nt, Human respiratory syncytial virus
cuuauuagaugccacucaac

SEQ ID NO: 361366 - RNA, 17 nt, Human respiratory syncytial virus
cuucaaagaagaucuca

SEQ ID NO: 361367 - RNA, 13 nt, Human respiratory syncytial virus
cuucaacaucaca

SEQ ID NO: 361368 - RNA, 19 nt, Human respiratory syncytial virus
cuucaacaucacaguacag

SEQ ID NO: 361369 - RNA, 21 nt, Human respiratory syncytial virus
cuugcaagcaucaacauacua

SEQ ID NO: 361370 - RNA, 17 nt, Human respiratory syncytial virus
gaaaaagaugaugaucc

SEQ ID NO: 361371 - RNA, 20 nt, Human respiratory syncytial virus
gaaaacuugaugaaagacaa

SEQ ID NO: 361372 - RNA, 22 nt, Human respiratory syncytial virus
gaaaagaccugggauacucuca

SEQ ID NO: 361373 - RNA, 13 nt, Human respiratory syncytial virus
gaaaccaaaugca

SEQ ID NO: 361374 - RNA, 15 nt, Human respiratory syncytial virus
gaaaccaaaugcaau

SEQ ID NO: 361375 - RNA, 22 nt, Human respiratory syncytial virus
gaaagcaugauugcuacauuca

SEQ ID NO: 361376 - RNA, 20 nt, Human respiratory syncytial virus
gaaauccuuguaaauuugag

SEQ ID NO: 361377 - RNA, 20 nt, Human respiratory syncytial virus
gaaauuagaagaaccaacuu

SEQ ID NO: 361378 - RNA, 20 nt, Human respiratory syncytial virus
gaacagguugguauaccagu

SEQ ID NO: 361379 - RNA, 21 nt, Human respiratory syncytial virus
gaagaugcaaauaacaaagcu

SEQ ID NO: 361380 - RNA, 13 nt, Human respiratory syncytial virus
gaaguaaccaaag

SEQ ID NO: 361381 - RNA, 21 nt, Human respiratory syncytial virus
gaaucauuucuucacaucaug

SEQ ID NO: 361382 - RNA, 22 nt, Human respiratory syncytial virus
gacaguaccccagaaaccaaag

SEQ ID NO: 361383 - RNA, 22 nt, Human respiratory syncytial virus
gacaucaauccauugaaucaac

SEQ ID NO: 361384 - RNA, 16 nt, Human respiratory syncytial virus
gacauguagugcaguu

SEQ ID NO: 361385 - RNA, 17 nt, Human respiratory syncytial virus
gacauguagugcaguua

SEQ ID NO: 361386 - RNA, 20 nt, Human respiratory syncytial virus
gacucuagaaaagaccuggg

SEQ ID NO: 361387 - RNA, 18 nt, Human respiratory syncytial virus
uaccccagaaaccaaagc

SEQ ID NO: 361388 - RNA, 15 nt, Human respiratory syncytial virus
uaccgccaauucaau

SEQ ID NO: 361389 - RNA, 21 nt, Human respiratory syncytial virus
uaccgccaauucaauacauau

SEQ ID NO: 361390 - RNA, 18 nt, Human respiratory syncytial virus
uacuagugaagcagaucu

SEQ ID NO: 361391 - RNA, 22 nt, Human respiratory syncytial virus
uacucaagucaauggacaaaag

SEQ ID NO: 361392 - RNA, 23 nt, Human respiratory syncytial virus
uacucaagucaauggacaaaagc

SEQ ID NO: 361393 - RNA, 12 nt, Human respiratory syncytial virus
uacugauuccaa

SEQ ID NO: 361394 - RNA, 15 nt, Human respiratory syncytial virus
uacuuaugacauaua

SEQ ID NO: 361395 - RNA, 16 nt, Human respiratory syncytial virus
uagaaguaaccaaaga

SEQ ID NO: 361396 - RNA, 17 nt, Human respiratory syncytial virus
uagaaguaaccaaagag

SEQ ID NO: 361397 - RNA, 15 nt, Human respiratory syncytial virus
uagaauuaaguaaua

SEQ ID NO: 361398 - RNA, 17 nt, Human respiratory syncytial virus
uaguaagcuucaaagaa

SEQ ID NO: 361399 - RNA, 23 nt, Human respiratory syncytial virus
uaguaagcuucaaagaagaucuc

SEQ ID NO: 361400 - RNA, 16 nt, Human respiratory syncytial virus
uaguauaucauccaua

SEQ ID NO: 361401 - RNA, 13 nt, Human respiratory syncytial virus
uaguuaagaagga

SEQ ID NO: 361402 - RNA, 14 nt, Human respiratory syncytial virus
uauaagaaugcagu

SEQ ID NO: 361403 - RNA, 23 nt, Human respiratory syncytial virus
uauaagaaugcagugacagaauu

SEQ ID NO: 361404 - RNA, 23 nt, Human respiratory syncytial virus
uauagcacaaauagcacuaucag

SEQ ID NO: 361405 - RNA, 17 nt, Human respiratory syncytial virus
uaucacaaucaaacacu

SEQ ID NO: 361406 - RNA, 17 nt, Human respiratory syncytial virus
uauccucaaacuacaca

SEQ ID NO: 361407 - RNA, 23 nt, Human respiratory syncytial virus
uauccuuguaguauaucauccau

SEQ ID NO: 361408 - RNA, 15 nt, Human respiratory syncytial virus
uaugagcacuacaaa

SEQ ID NO: 361409 - RNA, 16 nt, Human respiratory syncytial virus
uaugggaucaaaaaca

SEQ ID NO: 361410 - RNA, 16 nt, Human respiratory syncytial virus
uauguuccagucaucu

SEQ ID NO: 361411 - RNA, 20 nt, Human respiratory syncytial virus
uauuaugauugcaauacuaa

SEQ ID NO: 361412 - RNA, 23 nt, Human respiratory syncytial virus
uauuugaugaaauucauuggaca

SEQ ID NO: 361413 - RNA, 13 nt, Human respiratory syncytial virus
uauuuuacacuaa

SEQ ID NO: 361414 - RNA, 17 nt, Human respiratory syncytial virus
uauuuuacacuaauaca

SEQ ID NO: 361415 - RNA, 12 nt, Human respiratory syncytial virus
ucaaaauccaaa

SEQ ID NO: 361416 - RNA, 21 nt, Human respiratory syncytial virus
ucaaacuacacacuauaucca

SEQ ID NO: 361417 - RNA, 20 nt, Human respiratory syncytial virus
ucaaacuaugagcacuacaa

SEQ ID NO: 361418 - RNA, 21 nt, Human respiratory syncytial virus
ucaaagaagaucucaccccaa

SEQ ID NO: 361419 - RNA, 16 nt, Human respiratory syncytial virus
ucaaguaucacaauca

SEQ ID NO: 361420 - RNA, 17 nt, Human respiratory syncytial virus
ucaaguaucacaaucaa

SEQ ID NO: 361421 - RNA, 16 nt, Human respiratory syncytial virus
ucaagucagaacauaa

SEQ ID NO: 361422 - RNA, 15 nt, Human respiratory syncytial virus
ucaauaaaacagaca

SEQ ID NO: 361423 - RNA, 15 nt, Human respiratory syncytial virus
ucaaucaaccaacug

SEQ ID NO: 361424 - RNA, 21 nt, Human respiratory syncytial virus
ucaaucaaccaacugauccau

SEQ ID NO: 361425 - RNA, 17 nt, Human respiratory syncytial virus
ucaauccaacaagugaa

SEQ ID NO: 361426 - RNA, 15 nt, Human respiratory syncytial virus
ucaauggacaaaagc

SEQ ID NO: 361427 - RNA, 19 nt, Human respiratory syncytial virus
ucacaggauuaauagguau

SEQ ID NO: 361428 - RNA, 19 nt, Human respiratory syncytial virus
ucacaguacaggcugaauc

SEQ ID NO: 361429 - RNA, 21 nt, Human respiratory syncytial virus
ucacaucaugcuacccacaca

SEQ ID NO: 361430 - RNA, 13 nt, Human respiratory syncytial virus
ucaccucaaguca

SEQ ID NO: 361431 - RNA, 16 nt, Human respiratory syncytial virus
ucaccucaagucagaa

SEQ ID NO: 361432 - RNA, 22 nt, Human respiratory syncytial virus
ucaccucaagucagaacauaac

SEQ ID NO: 361433 - RNA, 15 nt, Human respiratory syncytial virus
ucacuacagucauaa

SEQ ID NO: 361434 - RNA, 12 nt, Human respiratory syncytial virus
ucagcaaucaac

SEQ ID NO: 361435 - RNA, 19 nt, Human respiratory syncytial virus
ucauaaaggugaacugaaa

SEQ ID NO: 361436 - RNA, 17 nt, Human respiratory syncytial virus
ucauaaauucacaggau

SEQ ID NO: 361437 - RNA, 16 nt, Human respiratory syncytial virus
ucauaacaauagaauu

SEQ ID NO: 361438 - RNA, 19 nt, Human respiratory syncytial virus
ucaucaauccaacaaguga

SEQ ID NO: 361439 - RNA, 16 nt, Human respiratory syncytial virus
ucaucuaauuguaaua

SEQ ID NO: 361440 - RNA, 18 nt, Human respiratory syncytial virus
ucaucucugccaaucaca

SEQ ID NO: 361441 - RNA, 16 nt, Human respiratory syncytial virus
ucaucuguaccagcag

SEQ ID NO: 361442 - RNA, 22 nt, Human respiratory syncytial virus
ucaugcuacccacacaacuaag

SEQ ID NO: 361443 - RNA, 18 nt, Human respiratory syncytial virus
ucauguuaaacaagauac

SEQ ID NO: 361444 - RNA, 17 nt, Human respiratory syncytial virus
ucauuucuucacaucau

SEQ ID NO: 361445 - RNA, 23 nt, Human respiratory syncytial virus
uccacauauauccucaaacuaca

SEQ ID NO: 361446 - RNA, 18 nt, Human respiratory syncytial virus
uccacuacuagagcauau

SEQ ID NO: 361447 - RNA, 11 nt, Human respiratory syncytial virus
uccaucacaau

SEQ ID NO: 361448 - RNA, 21 nt, Human respiratory syncytial virus
ucccaaaucaacccauaacaa

SEQ ID NO: 361449 - RNA, 19 nt, Human respiratory syncytial virus
ucccaauuaugaugugcaa

SEQ ID NO: 361450 - RNA, 21 nt, Human respiratory syncytial virus
uccuguauauauaaacaaaca

SEQ ID NO: 361451 - RNA, 17 nt, Human respiratory syncytial virus
ucgcaaaaccacgccaa

SEQ ID NO: 361452 - RNA, 13 nt, Human respiratory syncytial virus
ucucaccccaagu

SEQ ID NO: 361453 - RNA, 15 nt, Human respiratory syncytial virus
ucugccaaucacaaa

SEQ ID NO: 361454 - RNA, 17 nt, Human respiratory syncytial virus
ucuguuaacucaauaga

SEQ ID NO: 361455 - RNA, 15 nt, Human respiratory syncytial virus
ucuuagcaaagucaa

SEQ ID NO: 361456 - RNA, 20 nt, Human respiratory syncytial virus
ugaaauucauuggacaccua

SEQ ID NO: 361457 - RNA, 14 nt, Human respiratory syncytial virus
ugaaucaacugcca

SEQ ID NO: 361458 - RNA, 14 nt, Human respiratory syncytial virus
ugaaucauuucuuc

SEQ ID NO: 361459 - RNA, 22 nt, Human respiratory syncytial virus
ugaaucauuucuucacaucaug

SEQ ID NO: 361460 - RNA, 17 nt, Human respiratory syncytial virus
ugacaacacuacuaugc

SEQ ID NO: 361461 - RNA, 14 nt, Human respiratory syncytial virus
ugaggcaaaacuuc

SEQ ID NO: 361462 - RNA, 14 nt, Human respiratory syncytial virus
ugauaaacaaugaa

SEQ ID NO: 361463 - RNA, 13 nt, Human respiratory syncytial virus
ugauaaucucaac

SEQ ID NO: 361464 - RNA, 19 nt, Human respiratory syncytial virus
ugauacauuaaauaaggau

SEQ ID NO: 361465 - RNA, 12 nt, Human respiratory syncytial virus
ugaucaacucac

SEQ ID NO: 361466 - RNA, 18 nt, Human respiratory syncytial virus
ugaucaacucacucagca

SEQ ID NO: 361467 - RNA, 22 nt, Human respiratory syncytial virus
ugaucaacucacucagcaauca

SEQ ID NO: 361468 - RNA, 19 nt, Human respiratory syncytial virus
ugaucaccaaucccaaauc

SEQ ID NO: 361469 - RNA, 20 nt, Human respiratory syncytial virus
ugaucauguuucaacaacag

SEQ ID NO: 361470 - RNA, 16 nt, Human respiratory syncytial virus
ugcaaaaacaccuaaa

SEQ ID NO: 361471 - RNA, 14 nt, Human respiratory syncytial virus
ugcaaauaacaaag

SEQ ID NO: 361472 - RNA, 16 nt, Human respiratory syncytial virus
ugcaagcaucaacaua

SEQ ID NO: 361473 - RNA, 18 nt, Human respiratory syncytial virus
ugccagaccgaacaaaca

SEQ ID NO: 361474 - RNA, 14 nt, Human respiratory syncytial virus
ugccuauguuccag

SEQ ID NO: 361475 - RNA, 17 nt, Human respiratory syncytial virus
ugcuacaacuaacuuac

SEQ ID NO: 361476 - RNA, 21 nt, Human respiratory syncytial virus
ugcuacaacuaacuuacuuaa

SEQ ID NO: 361477 - RNA, 15 nt, Human respiratory syncytial virus
ugcuacccacacaac

SEQ ID NO: 361478 - RNA, 21 nt, Human respiratory syncytial virus
ugcuagaccuagagugcgaau

SEQ ID NO: 361479 - RNA, 16 nt, Human respiratory syncytial virus
ugcuuggccauaacga

SEQ ID NO: 361480 - RNA, 22 nt, Human respiratory syncytial virus
uggagcugcugauccacagguu

SEQ ID NO: 361481 - RNA, 23 nt, Human respiratory syncytial virus
uguaaauuugagauuagagguca

SEQ ID NO: 361482 - RNA, 13 nt, Human respiratory syncytial virus
aaaaaauaugcaa

SEQ ID NO: 361483 - RNA, 14 nt, Human respiratory syncytial virus
aaaaaccucaagua

SEQ ID NO: 361484 - RNA, 16 nt, Human respiratory syncytial virus
aaaaagaacaagaugg

SEQ ID NO: 361485 - RNA, 21 nt, Human respiratory syncytial virus
aaaagaacuugcaagcaucaa

SEQ ID NO: 361486 - RNA, 23 nt, Human respiratory syncytial virus
aaaagaacuugcaagcaucaaca

SEQ ID NO: 361487 - RNA, 21 nt, Human respiratory syncytial virus
aaaagaccugggauacucuca

SEQ ID NO: 361488 - RNA, 22 nt, Human respiratory syncytial virus
aaaagaccugggauacucucaa

SEQ ID NO: 361489 - RNA, 22 nt, Human respiratory syncytial virus
aaaaguaaagccaauaacauaa

SEQ ID NO: 361490 - RNA, 11 nt, Human respiratory syncytial virus
aaaauccaaaa

SEQ ID NO: 361491 - RNA, 15 nt, Human respiratory syncytial virus
aaacaagauacucaa

SEQ ID NO: 361492 - RNA, 18 nt, Human respiratory syncytial virus
aauuauaaucacuauuau

SEQ ID NO: 361493 - RNA, 17 nt, Human respiratory syncytial virus
aauucauauacuugaua

SEQ ID NO: 361494 - RNA, 14 nt, Human respiratory syncytial virus
aauuuaaaaucuau

SEQ ID NO: 361495 - RNA, 13 nt, Human respiratory syncytial virus
aauuuaaccauaa

SEQ ID NO: 361496 - RNA, 17 nt, Human respiratory syncytial virus
acaaaaaaagaacaaga

SEQ ID NO: 361497 - RNA, 15 nt, Human respiratory syncytial virus
acaaacaaauccaau

SEQ ID NO: 361498 - RNA, 12 nt, Human respiratory syncytial virus
acaaacacuuca

SEQ ID NO: 361499 - RNA, 17 nt, Human respiratory syncytial virus
acaaacacuucaacauc

SEQ ID NO: 361500 - RNA, 18 nt, Human respiratory syncytial virus
acaaauccaaucuucuca

SEQ ID NO: 361501 - RNA, 16 nt, Human respiratory syncytial virus
acaacacuacuaugca

SEQ ID NO: 361502 - RNA, 17 nt, Human respiratory syncytial virus
acaacacuacuaugcaa

SEQ ID NO: 361503 - RNA, 18 nt, Human respiratory syncytial virus
acaacagucugcugauca

SEQ ID NO: 361504 - RNA, 20 nt, Human respiratory syncytial virus
acaacagucugcugaucacc

SEQ ID NO: 361505 - RNA, 21 nt, Human respiratory syncytial virus
acaagaaucaacgcacugcca

SEQ ID NO: 361506 - RNA, 20 nt, Human respiratory syncytial virus
acaaguuuggucaaauuuag

SEQ ID NO: 361507 - RNA, 16 nt, Human respiratory syncytial virus
acaauagaauuaagua

SEQ ID NO: 361508 - RNA, 17 nt, Human respiratory syncytial virus
acaaugauacaugugca

SEQ ID NO: 361509 - RNA, 16 nt, Human respiratory syncytial virus
acacacuucaucacac

SEQ ID NO: 361510 - RNA, 12 nt, Human respiratory syncytial virus
acacaucauuca

SEQ ID NO: 361511 - RNA, 17 nt, Human respiratory syncytial virus
acacuucaucacacaaa

SEQ ID NO: 361512 - RNA, 22 nt, Human respiratory syncytial virus
acagagucauggugucgcaaaa

SEQ ID NO: 361513 - RNA, 18 nt, Human respiratory syncytial virus
acaggagauaauauugac

SEQ ID NO: 361514 - RNA, 22 nt, Human respiratory syncytial virus
acaguaccccagaaaccaaagc

SEQ ID NO: 361515 - RNA, 21 nt, Human respiratory syncytial virus
acagucugcugaucaccaauc

SEQ ID NO: 361516 - RNA, 15 nt, Human respiratory syncytial virus
acauacacagcagcu

SEQ ID NO: 361517 - RNA, 19 nt, Human respiratory syncytial virus
acaucauucacaaaauuaa

SEQ ID NO: 361518 - RNA, 17 nt, Human respiratory syncytial virus
acaucucucaccaaaga

SEQ ID NO: 361519 - RNA, 15 nt, Human respiratory syncytial virus
acaucuggcaccaac

SEQ ID NO: 361520 - RNA, 14 nt, Human respiratory syncytial virus
acaucuuagcagaa

SEQ ID NO: 361521 - RNA, 21 nt, Human respiratory syncytial virus
acauguagugcaguuagcaga

SEQ ID NO: 361522 - RNA, 17 nt, Human respiratory syncytial virus
acauuaaauaaggauca

SEQ ID NO: 361523 - RNA, 22 nt, Human respiratory syncytial virus
acauuaguuagaguucaaucaa

SEQ ID NO: 361524 - RNA, 13 nt, Human respiratory syncytial virus
accaacaucauca

SEQ ID NO: 361525 - RNA, 16 nt, Human respiratory syncytial virus
accaaccaaucaauca

SEQ ID NO: 361526 - RNA, 13 nt, Human respiratory syncytial virus
accaaucaaucaa

SEQ ID NO: 361527 - RNA, 22 nt, Human respiratory syncytial virus
accaaucgacauguagugcagu

SEQ ID NO: 361528 - RNA, 19 nt, Human respiratory syncytial virus
accagcagacuugcucaua

SEQ ID NO: 361529 - RNA, 14 nt, Human respiratory syncytial virus
accagugucauaac

SEQ ID NO: 361530 - RNA, 19 nt, Human respiratory syncytial virus
accaucaugcugugucaaa

SEQ ID NO: 361531 - RNA, 16 nt, Human respiratory syncytial virus
acccaaccaaaccaag

SEQ ID NO: 361532 - RNA, 16 nt, Human respiratory syncytial virus
accccagaaaccaaag

SEQ ID NO: 361533 - RNA, 13 nt, Human respiratory syncytial virus
accuaaacaaacu

SEQ ID NO: 361534 - RNA, 21 nt, Human respiratory syncytial virus
accuaaucaaucaaacuauga

SEQ ID NO: 361535 - RNA, 15 nt, Human respiratory syncytial virus
accucaaguaucaca

SEQ ID NO: 361536 - RNA, 19 nt, Human respiratory syncytial virus
accucaaguaucacaauca

SEQ ID NO: 361537 - RNA, 20 nt, Human respiratory syncytial virus
accucaaguaucacaaucaa

SEQ ID NO: 361538 - RNA, 19 nt, Human respiratory syncytial virus
accucaagucagaacauaa

SEQ ID NO: 361539 - RNA, 20 nt, Human respiratory syncytial virus
accucaagucagaacauaac

SEQ ID NO: 361540 - RNA, 16 nt, Human respiratory syncytial virus
acggcccuuaucucaa

SEQ ID NO: 361541 - RNA, 22 nt, Human respiratory syncytial virus
acuacuaugcaaagauuaauga

SEQ ID NO: 361542 - RNA, 15 nt, Human respiratory syncytial virus
acuagagcauaugaa

SEQ ID NO: 361543 - RNA, 14 nt, Human respiratory syncytial virus
acuagugaggcaaa

SEQ ID NO: 361544 - RNA, 20 nt, Human respiratory syncytial virus
acuaugugguaugcuauuaa

SEQ ID NO: 361545 - RNA, 21 nt, Human respiratory syncytial virus
acuauuaugauugcaauacua

SEQ ID NO: 361546 - RNA, 15 nt, Human respiratory syncytial virus
acucaaaauccaaaa

SEQ ID NO: 361547 - RNA, 17 nt, Human respiratory syncytial virus
acucaagucaauggaca

SEQ ID NO: 361548 - RNA, 14 nt, Human respiratory syncytial virus
acucacucagcaau

SEQ ID NO: 361549 - RNA, 21 nt, Human respiratory syncytial virus
acucacucagcaaucaacaac

SEQ ID NO: 361550 - RNA, 12 nt, Human respiratory syncytial virus
acucagcaauca

SEQ ID NO: 361551 - RNA, 17 nt, Human respiratory syncytial virus
acucauaguuacauaaa

SEQ ID NO: 361552 - RNA, 20 nt, Human respiratory syncytial virus
acuugcaagcaucaacauac

SEQ ID NO: 361553 - RNA, 21 nt, Human respiratory syncytial virus
acuugcaagcaucaacauacu

SEQ ID NO: 361554 - RNA, 13 nt, Human respiratory syncytial virus
agaaaaagaugau

SEQ ID NO: 361555 - RNA, 12 nt, Human respiratory syncytial virus
agaaacaauaga

SEQ ID NO: 361556 - RNA, 19 nt, Human respiratory syncytial virus
agaaaucaucacacacaaa

SEQ ID NO: 361557 - RNA, 22 nt, Human respiratory syncytial virus
agaagaugucacuacagucaua

SEQ ID NO: 361558 - RNA, 14 nt, Human respiratory syncytial virus
agaaguaaccaaag

SEQ ID NO: 361559 - RNA, 11 nt, Human respiratory syncytial virus
agaaugcagug

SEQ ID NO: 361560 - RNA, 15 nt, Human respiratory syncytial virus
agaaugcagugacag

SEQ ID NO: 361561 - RNA, 23 nt, Human respiratory syncytial virus
agaauuacagcuacuuaugcaaa

SEQ ID NO: 361562 - RNA, 16 nt, Human respiratory syncytial virus
agacuugcucauaaaa

SEQ ID NO: 361563 - RNA, 20 nt, Human respiratory syncytial virus
agauaaguauaagaaugcag

SEQ ID NO: 361564 - RNA, 22 nt, Human respiratory syncytial virus
agauauagaaguaaccaaagag

SEQ ID NO: 361565 - RNA, 23 nt, Human respiratory syncytial virus
agauaucauaaaggugaacugaa

SEQ ID NO: 361566 - RNA, 15 nt, Human respiratory syncytial virus
agaugcuaacacauc

SEQ ID NO: 361567 - RNA, 22 nt, Human respiratory syncytial virus
agcauguccucgucugaacaaa

SEQ ID NO: 361568 - RNA, 18 nt, Human respiratory syncytial virus
agccaacuacccaagaaa

SEQ ID NO: 361569 - RNA, 15 nt, Human respiratory syncytial virus
agcuacucauaugaa

SEQ ID NO: 361570 - RNA, 23 nt, Human respiratory syncytial virus
aggcuccacauacacagcagcug

SEQ ID NO: 361571 - RNA, 23 nt, Human respiratory syncytial virus
agggaaauggggcaaauaaacuc

SEQ ID NO: 361572 - RNA, 14 nt, Human respiratory syncytial virus
aggucauugcuuga

SEQ ID NO: 361573 - RNA, 21 nt, Human respiratory syncytial virus
aguaacaaaaaaagaacaaga

SEQ ID NO: 361574 - RNA, 20 nt, Human respiratory syncytial virus
aguaccccagaaaccaaagc

SEQ ID NO: 361575 - RNA, 14 nt, Human respiratory syncytial virus
aguauaucauccau

SEQ ID NO: 361576 - RNA, 13 nt, Human respiratory syncytial virus
aguaucacaauca

SEQ ID NO: 361577 - RNA, 18 nt, Human respiratory syncytial virus
agucauaauuacuuugaa

SEQ ID NO: 361578 - RNA, 16 nt, Human respiratory syncytial virus
agucauuacuuaugac

SEQ ID NO: 361579 - RNA, 19 nt, Human respiratory syncytial virus
agucugcugaucaccaauc

SEQ ID NO: 361580 - RNA, 21 nt, Human respiratory syncytial virus
agugaucaacucacucagcaa

SEQ ID NO: 361581 - RNA, 23 nt, Human respiratory syncytial virus
agugucauaaugcuuggccauaa

SEQ ID NO: 361582 - RNA, 12 nt, Human respiratory syncytial virus
auaaaaacucau

SEQ ID NO: 361583 - RNA, 18 nt, Human respiratory syncytial virus
auaaacucaccuaaucaa

SEQ ID NO: 361584 - RNA, 14 nt, Human respiratory syncytial virus
auaaagauacuuaa

SEQ ID NO: 361585 - RNA, 18 nt, Human respiratory syncytial virus
auaaauucacaggauuaa

SEQ ID NO: 361586 - RNA, 17 nt, Human respiratory syncytial virus
auaacaucucucaccaa

SEQ ID NO: 361587 - RNA, 19 nt, Human respiratory syncytial virus
auuguaagaaaacuugaug

SEQ ID NO: 361588 - RNA, 16 nt, Human respiratory syncytial virus
auuuaaaagguguuau

SEQ ID NO: 361589 - RNA, 12 nt, Human respiratory syncytial virus
auuuaaccauaa

SEQ ID NO: 361590 - RNA, 23 nt, Human respiratory syncytial virus
auuuaaccauaaccauuuggaua

SEQ ID NO: 361591 - RNA, 18 nt, Human respiratory syncytial virus
auuuacaacacaacgaga

SEQ ID NO: 361592 - RNA, 18 nt, Human respiratory syncytial virus
auuuccagucauuacuua

SEQ ID NO: 361593 - RNA, 21 nt, Human respiratory syncytial virus
auuucuccaacaucuuaacau

SEQ ID NO: 361594 - RNA, 12 nt, Human respiratory syncytial virus
auuuuacacuaa

SEQ ID NO: 361595 - RNA, 14 nt, Human respiratory syncytial virus
caaaaaugauuaca

SEQ ID NO: 361596 - RNA, 15 nt, Human respiratory syncytial virus
caaaacuucauguua

SEQ ID NO: 361597 - RNA, 14 nt, Human respiratory syncytial virus
caaacaacaaugcu

SEQ ID NO: 361598 - RNA, 10 nt, Human respiratory syncytial virus
caaacacuuc

SEQ ID NO: 361599 - RNA, 20 nt, Human respiratory syncytial virus
caaacuaugagcacuacaaa

SEQ ID NO: 361600 - RNA, 16 nt, Human respiratory syncytial virus
caaagaaacaauagaa

SEQ ID NO: 361601 - RNA, 13 nt, Human respiratory syncytial virus
caaauaacaaagc

SEQ ID NO: 361602 - RNA, 14 nt, Human respiratory syncytial virus
caaauauggaaaca

SEQ ID NO: 361603 - RNA, 15 nt, Human respiratory syncytial virus
caaaucaacccauaa

SEQ ID NO: 361604 - RNA, 21 nt, Human respiratory syncytial virus
caaauccaaucuucucacaga

SEQ ID NO: 361605 - RNA, 22 nt, Human respiratory syncytial virus
caaauguccgucagcggaacca

SEQ ID NO: 361606 - RNA, 22 nt, Human respiratory syncytial virus
caacaauuucuccaacaucuua

SEQ ID NO: 361607 - RNA, 16 nt, Human respiratory syncytial virus
caacacaucauucaca

SEQ ID NO: 361608 - RNA, 19 nt, Human respiratory syncytial virus
caacacuacuaugcaaaga

SEQ ID NO: 361609 - RNA, 16 nt, Human respiratory syncytial virus
caacaucacaguacag

SEQ ID NO: 361610 - RNA, 12 nt, Human respiratory syncytial virus
caaccaaaccaa

SEQ ID NO: 361611 - RNA, 13 nt, Human respiratory syncytial virus
caaccaaucaauc

SEQ ID NO: 361612 - RNA, 15 nt, Human respiratory syncytial virus
caaccaaucaaucaa

SEQ ID NO: 361613 - RNA, 17 nt, Human respiratory syncytial virus
caaccauguccaaacac

SEQ ID NO: 361614 - RNA, 19 nt, Human respiratory syncytial virus
caaccauguccaaacacaa

SEQ ID NO: 361615 - RNA, 22 nt, Human respiratory syncytial virus
caaccugacgaaauuaacaaua

SEQ ID NO: 361616 - RNA, 18 nt, Human respiratory syncytial virus
caacuaacuuacuuaaaa

SEQ ID NO: 361617 - RNA, 14 nt, Human respiratory syncytial virus
caacuacccaagaa

SEQ ID NO: 361618 - RNA, 18 nt, Human respiratory syncytial virus
caacugauccaucagcaa

SEQ ID NO: 361619 - RNA, 22 nt, Human respiratory syncytial virus
caacugccagaccgaacaaaca

SEQ ID NO: 361620 - RNA, 15 nt, Human respiratory syncytial virus
caagaacgaaauuaa

SEQ ID NO: 361621 - RNA, 16 nt, Human respiratory syncytial virus
caagauacucaaguca

SEQ ID NO: 361622 - RNA, 17 nt, Human respiratory syncytial virus
caagauacucaagucaa

SEQ ID NO: 361623 - RNA, 21 nt, Human respiratory syncytial virus
caagcuauuccucaaacaaca

SEQ ID NO: 361624 - RNA, 22 nt, Human respiratory syncytial virus
caagugaaagcaugauugcuac

SEQ ID NO: 361625 - RNA, 22 nt, Human respiratory syncytial virus
caauaaaacagacaucaaucca

SEQ ID NO: 361626 - RNA, 23 nt, Human respiratory syncytial virus
caauaaaacagacaucaauccau

SEQ ID NO: 361627 - RNA, 19 nt, Human respiratory syncytial virus
caaucaaacacuaaaucaa

SEQ ID NO: 361628 - RNA, 14 nt, Human respiratory syncytial virus
caaucccacucaaa

SEQ ID NO: 361629 - RNA, 15 nt, Human respiratory syncytial virus
caaucccacucaaaa

SEQ ID NO: 361630 - RNA, 16 nt, Human respiratory syncytial virus
caaucucaacaaccau

SEQ ID NO: 361631 - RNA, 15 nt, Human respiratory syncytial virus
caaucuuccuaacuc

SEQ ID NO: 361632 - RNA, 15 nt, Human respiratory syncytial virus
caaucuucucacaga

SEQ ID NO: 361633 - RNA, 21 nt, Human respiratory syncytial virus
caaugauaaucucaaccucuc

SEQ ID NO: 361634 - RNA, 14 nt, Human respiratory syncytial virus
caauucaauacaua

SEQ ID NO: 361635 - RNA, 15 nt, Human respiratory syncytial virus
cacaacuaagcuaga

SEQ ID NO: 361636 - RNA, 18 nt, Human respiratory syncytial virus
cacacacaaauucauaua

SEQ ID NO: 361637 - RNA, 16 nt, Human respiratory syncytial virus
cacagguuaagugcaa

SEQ ID NO: 361638 - RNA, 19 nt, Human respiratory syncytial virus
cacagucauuaauaucuag

SEQ ID NO: 361639 - RNA, 22 nt, Human respiratory syncytial virus
cacauauauccucaaacuacac

SEQ ID NO: 361640 - RNA, 17 nt, Human respiratory syncytial virus
cacaucauucacaaaau

SEQ ID NO: 361641 - RNA, 15 nt, Human respiratory syncytial virus
caccuaaacaaacua

SEQ ID NO: 361642 - RNA, 12 nt, Human respiratory syncytial virus
caccucaaguca

SEQ ID NO: 361643 - RNA, 14 nt, Human respiratory syncytial virus
caccucaagucaga

SEQ ID NO: 361644 - RNA, 16 nt, Human respiratory syncytial virus
cacuacacacuucauc

SEQ ID NO: 361645 - RNA, 23 nt, Human respiratory syncytial virus
cacuacacacuucaucacacaaa

SEQ ID NO: 361646 - RNA, 20 nt, Human respiratory syncytial virus
cacuacuagagcauaugaau

SEQ ID NO: 361647 - RNA, 18 nt, Human respiratory syncytial virus
cacuauaaagauacuuaa

SEQ ID NO: 361648 - RNA, 18 nt, Human respiratory syncytial virus
cacuauuaugauugcaau

SEQ ID NO: 361649 - RNA, 16 nt, Human respiratory syncytial virus
cacucaaaauccaaaa

SEQ ID NO: 361650 - RNA, 14 nt, Human respiratory syncytial virus
cacucagcaaucaa

SEQ ID NO: 361651 - RNA, 22 nt, Human respiratory syncytial virus
cacucccaauuaugaugugcaa

SEQ ID NO: 361652 - RNA, 13 nt, Human respiratory syncytial virus
cacuucaacauca

SEQ ID NO: 361653 - RNA, 14 nt, Human respiratory syncytial virus
cacuucaacaucac

SEQ ID NO: 361654 - RNA, 13 nt, Human respiratory syncytial virus
cagaaaccaaagc

SEQ ID NO: 361655 - RNA, 15 nt, Human respiratory syncytial virus
cagaccgaacaaaca

SEQ ID NO: 361656 - RNA, 23 nt, Human respiratory syncytial virus
cagcaaccugacgaaauuaacaa

SEQ ID NO: 361657 - RNA, 21 nt, Human respiratory syncytial virus
cagcaaucaacaacaucaaua

SEQ ID NO: 361658 - RNA, 15 nt, Human respiratory syncytial virus
cagcuacuuaugcaa

SEQ ID NO: 361659 - RNA, 18 nt, Human respiratory syncytial virus
cagguugguauaccagug

SEQ ID NO: 361660 - RNA, 18 nt, Human respiratory syncytial virus
cagucauuaauaucuaga

SEQ ID NO: 361661 - RNA, 22 nt, Human respiratory syncytial virus
cagugaucaacucacucagcaa

SEQ ID NO: 361662 - RNA, 13 nt, Human respiratory syncytial virus
cauaaaaaccuca

SEQ ID NO: 361663 - RNA, 17 nt, Human respiratory syncytial virus
cauaaaagaacuugcaa

SEQ ID NO: 361664 - RNA, 19 nt, Human respiratory syncytial virus
cauaaaggugaacugaaau

SEQ ID NO: 361665 - RNA, 19 nt, Human respiratory syncytial virus
cauaaauuggggcaaauac

SEQ ID NO: 361666 - RNA, 13 nt, Human respiratory syncytial virus
cauaacaaacacu

SEQ ID NO: 361667 - RNA, 19 nt, Human respiratory syncytial virus
cauaacgauucuauaucau

SEQ ID NO: 361668 - RNA, 19 nt, Human respiratory syncytial virus
cauaauauucaucaucucu

SEQ ID NO: 361669 - RNA, 23 nt, Human respiratory syncytial virus
cauaauauucaucaucucugcca

SEQ ID NO: 361670 - RNA, 12 nt, Human respiratory syncytial virus
caucaacauacu

SEQ ID NO: 361671 - RNA, 14 nt, Human respiratory syncytial virus
caucaacauacuag

SEQ ID NO: 361672 - RNA, 14 nt, Human respiratory syncytial virus
caucacuaacaaua

SEQ ID NO: 361673 - RNA, 14 nt, Human respiratory syncytial virus
caucauccaaagau

SEQ ID NO: 361674 - RNA, 15 nt, Human respiratory syncytial virus
caucaucucugccaa

SEQ ID NO: 361675 - RNA, 16 nt, Human respiratory syncytial virus
caucaucucugccaau

SEQ ID NO: 361676 - RNA, 21 nt, Human respiratory syncytial virus
caucaucucugccaaucacaa

SEQ ID NO: 361677 - RNA, 14 nt, Human respiratory syncytial virus
cauccaucacaaua

SEQ ID NO: 361678 - RNA, 18 nt, Human respiratory syncytial virus
cauccaucacaauagaau

SEQ ID NO: 361679 - RNA, 19 nt, Human respiratory syncytial virus
caucucugccaaucacaaa

SEQ ID NO: 361680 - RNA, 13 nt, Human respiratory syncytial virus
caucuuagcagaa

SEQ ID NO: 361681 - RNA, 18 nt, Human respiratory syncytial virus
cauuaguuagaguucaau

SEQ ID NO: 361682 - RNA, 22 nt, Human respiratory syncytial virus
gagacauuaguuuuugacacuu

SEQ ID NO: 361683 - RNA, 19 nt, Human respiratory syncytial virus
gagauaauauugacacucc

SEQ ID NO: 361684 - RNA, 16 nt, Human respiratory syncytial virus
gagauuagaggucauu

SEQ ID NO: 361685 - RNA, 22 nt, Human respiratory syncytial virus
gagucauggugucgcaaaacca

SEQ ID NO: 361686 - RNA, 20 nt, Human respiratory syncytial virus
gauaaguauaagaaugcagu

SEQ ID NO: 361687 - RNA, 15 nt, Human respiratory syncytial virus
gauacaugugcauuu

SEQ ID NO: 361688 - RNA, 18 nt, Human respiratory syncytial virus
gauacucucaaucaucua

SEQ ID NO: 361689 - RNA, 21 nt, Human respiratory syncytial virus
gauccacagguuaagugcaau

SEQ ID NO: 361690 - RNA, 22 nt, Human respiratory syncytial virus
gauccuuaacucauaguuacau

SEQ ID NO: 361691 - RNA, 18 nt, Human respiratory syncytial virus
gaugccacucaacaauuu

SEQ ID NO: 361692 - RNA, 14 nt, Human respiratory syncytial virus
gauuacaccaacuu

SEQ ID NO: 361693 - RNA, 21 nt, Human respiratory syncytial virus
gcaaaaccacgccaacuauca

SEQ ID NO: 361694 - RNA, 22 nt, Human respiratory syncytial virus
gcaaaaccacgccaacuaucau

SEQ ID NO: 361695 - RNA, 16 nt, Human respiratory syncytial virus
gcaaauacacuauuca

SEQ ID NO: 361696 - RNA, 16 nt, Human respiratory syncytial virus
gcaaguucgcaucauc

SEQ ID NO: 361697 - RNA, 22 nt, Human respiratory syncytial virus
gcaaguucgcaucauccaaaga

SEQ ID NO: 361698 - RNA, 23 nt, Human respiratory syncytial virus
gcaaguucgcaucauccaaagau

SEQ ID NO: 361699 - RNA, 23 nt, Human respiratory syncytial virus
gcauaauaucuguuaacucaaua

SEQ ID NO: 361700 - RNA, 16 nt, Human respiratory syncytial virus
gcaucaacauacuagu

SEQ ID NO: 361701 - RNA, 15 nt, Human respiratory syncytial virus
gcaucacuaacaaua

SEQ ID NO: 361702 - RNA, 17 nt, Human respiratory syncytial virus
gccaacuacccaagaaa

SEQ ID NO: 361703 - RNA, 15 nt, Human respiratory syncytial virus
gccaauucaauacau

SEQ ID NO: 361704 - RNA, 18 nt, Human respiratory syncytial virus
gccaauucaauacauaua

SEQ ID NO: 361705 - RNA, 15 nt, Human respiratory syncytial virus
gcggaaccaccaacc

SEQ ID NO: 361706 - RNA, 22 nt, Human respiratory syncytial virus
gcuccacauacacagcagcugu

SEQ ID NO: 361707 - RNA, 23 nt, Human respiratory syncytial virus
gcucuaccaucaugcugugucaa

SEQ ID NO: 361708 - RNA, 12 nt, Human respiratory syncytial virus
gcucuuagcaaa

SEQ ID NO: 361709 - RNA, 18 nt, Human respiratory syncytial virus
gcugcugauccacagguu

SEQ ID NO: 361710 - RNA, 14 nt, Human respiratory syncytial virus
ggaaauacauccau

SEQ ID NO: 361711 - RNA, 21 nt, Human respiratory syncytial virus
ggaacugacacuaaaguaaaa

SEQ ID NO: 361712 - RNA, 14 nt, Human respiratory syncytial virus
ggaagacacuauaa

SEQ ID NO: 361713 - RNA, 16 nt, Human respiratory syncytial virus
ggaagggaagacacua

SEQ ID NO: 361714 - RNA, 12 nt, Human respiratory syncytial virus
ggauacucucaa

SEQ ID NO: 361715 - RNA, 20 nt, Human respiratory syncytial virus
ggaucaaaaacaacauuggg

SEQ ID NO: 361716 - RNA, 15 nt, Human respiratory syncytial virus
ggcaaauaaacucac

SEQ ID NO: 361717 - RNA, 16 nt, Human respiratory syncytial virus
guaaauaaaaccaaaa

SEQ ID NO: 361718 - RNA, 18 nt, Human respiratory syncytial virus
guaaauaaaaccaaaaua

SEQ ID NO: 361719 - RNA, 13 nt, Human respiratory syncytial virus
guaaauagacauu

SEQ ID NO: 361720 - RNA, 13 nt, Human respiratory syncytial virus
guacaauguucua

SEQ ID NO: 361721 - RNA, 19 nt, Human respiratory syncytial virus
guaccccagaaaccaaagc

SEQ ID NO: 361722 - RNA, 13 nt, Human respiratory syncytial virus
guagaagauguca

SEQ ID NO: 361723 - RNA, 16 nt, Human respiratory syncytial virus
guauaagaaugcagug

SEQ ID NO: 361724 - RNA, 17 nt, Human respiratory syncytial virus
guauaagaaugcaguga

SEQ ID NO: 361725 - RNA, 18 nt, Human respiratory syncytial virus
gucaucuguaccagcaga

SEQ ID NO: 361726 - RNA, 22 nt, Human respiratory syncytial virus
gucaucuguaccagcagacuug

SEQ ID NO: 361727 - RNA, 17 nt, Human respiratory syncytial virus
gugaccuaucaagcaag

SEQ ID NO: 361728 - RNA, 18 nt, Human respiratory syncytial virus
gugaccuaucaagcaaga

SEQ ID NO: 361729 - RNA, 19 nt, Human respiratory syncytial virus
gugaccuaucaagcaagaa

SEQ ID NO: 361730 - RNA, 15 nt, Human respiratory syncytial virus
gugaggcaaaacuuc

SEQ ID NO: 361731 - RNA, 19 nt, Human respiratory syncytial virus
gugaucaacucacucagca

SEQ ID NO: 361732 - RNA, 20 nt, Human respiratory syncytial virus
gugaucaacucacucagcaa

SEQ ID NO: 361733 - RNA, 21 nt, Human respiratory syncytial virus
gugaucaacucacucagcaau

SEQ ID NO: 361734 - RNA, 14 nt, Human respiratory syncytial virus
gugccuauguucca

SEQ ID NO: 361735 - RNA, 18 nt, Human respiratory syncytial virus
gugucauaacaauagaau

SEQ ID NO: 361736 - RNA, 22 nt, Human respiratory syncytial virus
guuaaacaagauacucaaguca

SEQ ID NO: 361737 - RNA, 17 nt, Human respiratory syncytial virus
guuaaaugauacauuaa

SEQ ID NO: 361738 - RNA, 16 nt, Human respiratory syncytial virus
guuacauaaaaaccuc

SEQ ID NO: 361739 - RNA, 16 nt, Human respiratory syncytial virus
guucaaucaaucucaa

SEQ ID NO: 361740 - RNA, 22 nt, Human respiratory syncytial virus
guuccagucaucuguaccagca

SEQ ID NO: 361741 - RNA, 19 nt, Human respiratory syncytial virus
uaaaaaacuaacuauaaca

SEQ ID NO: 361742 - RNA, 15 nt, Human respiratory syncytial virus
uaaaaacucaucaaa

SEQ ID NO: 361743 - RNA, 17 nt, Human respiratory syncytial virus
uaaaagguguuaucucu

SEQ ID NO: 361744 - RNA, 15 nt, Human respiratory syncytial virus
uaaacaaacaaaucc

SEQ ID NO: 361745 - RNA, 21 nt, Human respiratory syncytial virus
uaaacucaccuaaucaaucaa

SEQ ID NO: 361746 - RNA, 18 nt, Human respiratory syncytial virus
uaaagccaauaacauaaa

SEQ ID NO: 361747 - RNA, 16 nt, Human respiratory syncytial virus
uaaaguaaaacuuaua

SEQ ID NO: 361748 - RNA, 20 nt, Human respiratory syncytial virus
uaacaaacacuucaacauca

SEQ ID NO: 361749 - RNA, 13 nt, Human respiratory syncytial virus
uaacacagucauu

SEQ ID NO: 361750 - RNA, 19 nt, Human respiratory syncytial virus
uaacagcuggggcaaauau

SEQ ID NO: 361751 - RNA, 16 nt, Human respiratory syncytial virus
uaacaucucucaccaa

SEQ ID NO: 361752 - RNA, 17 nt, Human respiratory syncytial virus
uaacgauucuauaucau

SEQ ID NO: 361753 - RNA, 21 nt, Human respiratory syncytial virus
uaacuauaacacagucauuaa

SEQ ID NO: 361754 - RNA, 22 nt, Human respiratory syncytial virus
uaagcuagauccuuaacucaua

SEQ ID NO: 361755 - RNA, 18 nt, Human respiratory syncytial virus
uaauacaaaauauggcac

SEQ ID NO: 361756 - RNA, 18 nt, Human respiratory syncytial virus
uaauaucuagauaucaua

SEQ ID NO: 361757 - RNA, 20 nt, Human respiratory syncytial virus
uaauaucuguuaacucaaua

SEQ ID NO: 361758 - RNA, 16 nt, Human respiratory syncytial virus
uaauauucaucaucuc

SEQ ID NO: 361759 - RNA, 18 nt, Human respiratory syncytial virus
uaaucaaucaaacuauga

SEQ ID NO: 361760 - RNA, 14 nt, Human respiratory syncytial virus
uaauccuguauaua

SEQ ID NO: 361761 - RNA, 13 nt, Human respiratory syncytial virus
uaauuacuuugaa

SEQ ID NO: 361762 - RNA, 14 nt, Human respiratory syncytial virus
uaauuguaauaucc

SEQ ID NO: 361763 - RNA, 23 nt, Human respiratory syncytial virus
uacaaagauggcucuuagcaaag

SEQ ID NO: 361764 - RNA, 16 nt, Human respiratory syncytial virus
uacaauguucuagaaa

SEQ ID NO: 361765 - RNA, 15 nt, Human respiratory syncytial virus
uacaauuuaaccaua

SEQ ID NO: 361766 - RNA, 16 nt, Human respiratory syncytial virus
uacaauuuaaccauaa

SEQ ID NO: 361767 - RNA, 15 nt, Human respiratory syncytial virus
uacacagcagcuguu

SEQ ID NO: 361768 - RNA, 17 nt, Human respiratory syncytial virus
uacacuaauacauauga

SEQ ID NO: 361769 - RNA, 15 nt, Human respiratory syncytial virus
uacaggagauaauau

SEQ ID NO: 361770 - RNA, 14 nt, Human respiratory syncytial virus
uacauauacuauaa

SEQ ID NO: 361771 - RNA, 23 nt, Human respiratory syncytial virus
uacauccaucacaauagaauuca

SEQ ID NO: 361772 - RNA, 23 nt, Human respiratory syncytial virus
uacaugugcauuuacaacacaac

SEQ ID NO: 361773 - RNA, 15 nt, Human respiratory syncytial virus
uacauuaaauaagga

SEQ ID NO: 361774 - RNA, 23 nt, Human respiratory syncytial virus
uaccaaauuccuagaaucaauaa

SEQ ID NO: 361775 - RNA, 23 nt, Human respiratory syncytial virus
uaccaaucgacauguagugcagu

SEQ ID NO: 361776 - RNA, 18 nt, Human respiratory syncytial virus
uaccaucaugcuguguca

SEQ ID NO: 361777 - RNA, 20 nt, Human respiratory syncytial virus
uguaccagcagacuugcuca

SEQ ID NO: 361778 - RNA, 14 nt, Human respiratory syncytial virus
uguaccucaccuca

SEQ ID NO: 361779 - RNA, 14 nt, Human respiratory syncytial virus
ugucacuacaguca

SEQ ID NO: 361780 - RNA, 22 nt, Human respiratory syncytial virus
uguccgucagcggaaccaccaa

SEQ ID NO: 361781 - RNA, 13 nt, Human respiratory syncytial virus
ugugguaugcuau

SEQ ID NO: 361782 - RNA, 16 nt, Human respiratory syncytial virus
uguuucaacaacaguc

SEQ ID NO: 361783 - RNA, 18 nt, Human respiratory syncytial virus
uuaaaagguguuaucucu

SEQ ID NO: 361784 - RNA, 10 nt, Human respiratory syncytial virus
uuaaccauaa

SEQ ID NO: 361785 - RNA, 17 nt, Human respiratory syncytial virus
uuaauauaaaaacucau

SEQ ID NO: 361786 - RNA, 12 nt, Human respiratory syncytial virus
uuacaccaacuu

SEQ ID NO: 361787 - RNA, 19 nt, Human respiratory syncytial virus
uuagaagaaccaacuuauu

SEQ ID NO: 361788 - RNA, 16 nt, Human respiratory syncytial virus
uuagaguucaaucaau

SEQ ID NO: 361789 - RNA, 14 nt, Human respiratory syncytial virus
uuaguuagaguuca

SEQ ID NO: 361790 - RNA, 21 nt, Human respiratory syncytial virus
uuauuuaaaagguguuaucuc

SEQ ID NO: 361791 - RNA, 17 nt, Human respiratory syncytial virus
uucaacaacagucugcu

SEQ ID NO: 361792 - RNA, 18 nt, Human respiratory syncytial virus
uucaacguaguacaggag

SEQ ID NO: 361793 - RNA, 14 nt, Human respiratory syncytial virus
uucaaucaaucuca

SEQ ID NO: 361794 - RNA, 13 nt, Human respiratory syncytial virus
uucacaucaugcu

SEQ ID NO: 361795 - RNA, 11 nt, Human respiratory syncytial virus
uucaguacaau

SEQ ID NO: 361796 - RNA, 19 nt, Human respiratory syncytial virus
uuccuaacucuugcuauua

SEQ ID NO: 361797 - RNA, 17 nt, Human respiratory syncytial virus
uucgcaucauccaaaga

SEQ ID NO: 361798 - RNA, 18 nt, Human respiratory syncytial virus
uucgcaucauccaaagau

SEQ ID NO: 361799 - RNA, 19 nt, Human respiratory syncytial virus
uucuaaguuguacaaagaa

SEQ ID NO: 361800 - RNA, 19 nt, Human respiratory syncytial virus
uugaauggccuccucaugc

SEQ ID NO: 361801 - RNA, 20 nt, Human respiratory syncytial virus
uugcaagcaucaacauacua

SEQ ID NO: 361802 - RNA, 12 nt, Human respiratory syncytial virus
uuuaaaaucuau

SEQ ID NO: 361803 - RNA, 11 nt, Human respiratory syncytial virus
uuuaaccauaa

SEQ ID NO: 361804 - RNA, 19 nt, Human respiratory syncytial virus
uuuaacggcccuuaucuca

SEQ ID NO: 361805 - RNA, 21 nt, Human respiratory syncytial virus
uuuaguuaauauaaaaacuca

SEQ ID NO: 361806 - RNA, 20 nt, Human respiratory syncytial virus
uuuuacacuaauacauauga

SEQ ID NO: 361807 - RNA, 16 nt, Human respiratory syncytial virus
aaacuacaucuuagca

SEQ ID NO: 361808 - RNA, 12 nt, Human respiratory syncytial virus
aaagaaaccaaa

SEQ ID NO: 361809 - RNA, 15 nt, Human respiratory syncytial virus
aaagauacuuaaaga

SEQ ID NO: 361810 - RNA, 18 nt, Human respiratory syncytial virus
aaagauacuuaaagaugc

SEQ ID NO: 361811 - RNA, 18 nt, Human respiratory syncytial virus
aaagccaacuacccaaga

SEQ ID NO: 361812 - RNA, 15 nt, Human respiratory syncytial virus
aaagguguuaucucu

SEQ ID NO: 361813 - RNA, 20 nt, Human respiratory syncytial virus
aaaguagggaguaccaaaua

SEQ ID NO: 361814 - RNA, 15 nt, Human respiratory syncytial virus
aaauacacuauucaa

SEQ ID NO: 361815 - RNA, 15 nt, Human respiratory syncytial virus
aaauagcacuaucag

SEQ ID NO: 361816 - RNA, 17 nt, Human respiratory syncytial virus
aaaucauaaauucacag

SEQ ID NO: 361817 - RNA, 16 nt, Human respiratory syncytial virus
aaauccaaucuucuca

SEQ ID NO: 361818 - RNA, 17 nt, Human respiratory syncytial virus
aaauccaaucuucucac

SEQ ID NO: 361819 - RNA, 14 nt, Human respiratory syncytial virus
aaaugauacauuaa

SEQ ID NO: 361820 - RNA, 15 nt, Human respiratory syncytial virus
aaaugauacauuaaa

SEQ ID NO: 361821 - RNA, 17 nt, Human respiratory syncytial virus
aaaugcaauggaacuga

SEQ ID NO: 361822 - RNA, 20 nt, Human respiratory syncytial virus
aaauuagaagaaccaacuua

SEQ ID NO: 361823 - RNA, 16 nt, Human respiratory syncytial virus
aaauucacaggauuaa

SEQ ID NO: 361824 - RNA, 17 nt, Human respiratory syncytial virus
aaauucauauacuugau

SEQ ID NO: 361825 - RNA, 20 nt, Human respiratory syncytial virus
aaauugcuacaacuaacuua

SEQ ID NO: 361826 - RNA, 21 nt, Human respiratory syncytial virus
aaauuggggcaaauacaaaga

SEQ ID NO: 361827 - RNA, 15 nt, Human respiratory syncytial virus
aacaaacaaauccaa

SEQ ID NO: 361828 - RNA, 20 nt, Human respiratory syncytial virus
aacaaacacuucaacaucac

SEQ ID NO: 361829 - RNA, 14 nt, Human respiratory syncytial virus
aacaagauacucaa

SEQ ID NO: 361830 - RNA, 17 nt, Human respiratory syncytial virus
aacaauuucuccaacau

SEQ ID NO: 361831 - RNA, 14 nt, Human respiratory syncytial virus
aacacaagaaucaa

SEQ ID NO: 361832 - RNA, 13 nt, Human respiratory syncytial virus
aacacaccagcug

SEQ ID NO: 361833 - RNA, 19 nt, Human respiratory syncytial virus
aacacaucauucacaaaau

SEQ ID NO: 361834 - RNA, 14 nt, Human respiratory syncytial virus
aacacuacuaugca

SEQ ID NO: 361835 - RNA, 21 nt, Human respiratory syncytial virus
aacagacaucaauccauugaa

SEQ ID NO: 361836 - RNA, 18 nt, Human respiratory syncytial virus
aacagguugguauaccag

SEQ ID NO: 361837 - RNA, 20 nt, Human respiratory syncytial virus
aacagguugguauaccagug

SEQ ID NO: 361838 - RNA, 23 nt, Human respiratory syncytial virus
aacauaaauuggggcaaauacaa

SEQ ID NO: 361839 - RNA, 20 nt, Human respiratory syncytial virus
aacauaaugaugaauuauua

SEQ ID NO: 361840 - RNA, 14 nt, Human respiratory syncytial virus
aacauacgugaaca

SEQ ID NO: 361841 - RNA, 14 nt, Human respiratory syncytial virus
aacaucucucacca

SEQ ID NO: 361842 - RNA, 16 nt, Human respiratory syncytial virus
aaccaacccaaccaaa

SEQ ID NO: 361843 - RNA, 14 nt, Human respiratory syncytial virus
aaccaccaaccaau

SEQ ID NO: 361844 - RNA, 17 nt, Human respiratory syncytial virus
aaccaccaaccaaucaa

SEQ ID NO: 361845 - RNA, 19 nt, Human respiratory syncytial virus
aaccauaaaacuaucuuaa

SEQ ID NO: 361846 - RNA, 13 nt, Human respiratory syncytial virus
aaccauguccaaa

SEQ ID NO: 361847 - RNA, 18 nt, Human respiratory syncytial virus
aaccauguccaaacacaa

SEQ ID NO: 361848 - RNA, 23 nt, Human respiratory syncytial virus
aaccauuuauaccgccaauucaa

SEQ ID NO: 361849 - RNA, 21 nt, Human respiratory syncytial virus
aaccugacgaaauuaacaaua

SEQ ID NO: 361850 - RNA, 16 nt, Human respiratory syncytial virus
aacggcccuuaucuca

SEQ ID NO: 361851 - RNA, 14 nt, Human respiratory syncytial virus
aacuaacaaugaua

SEQ ID NO: 361852 - RNA, 14 nt, Human respiratory syncytial virus
aacuacacacuaua

SEQ ID NO: 361853 - RNA, 16 nt, Human respiratory syncytial virus
aacuacacacuauauc

SEQ ID NO: 361854 - RNA, 19 nt, Human respiratory syncytial virus
aacuacacacuauauccaa

SEQ ID NO: 361855 - RNA, 18 nt, Human respiratory syncytial virus
aacucacucagcaaucaa

SEQ ID NO: 361856 - RNA, 15 nt, Human respiratory syncytial virus
aacucuugcuauuaa

SEQ ID NO: 361857 - RNA, 22 nt, Human respiratory syncytial virus
aacugccagaccgaacaaacaa

SEQ ID NO: 361858 - RNA, 13 nt, Human respiratory syncytial virus
aagaaaacuugau

SEQ ID NO: 361859 - RNA, 22 nt, Human respiratory syncytial virus
aagaagaucucaccccaaguga

SEQ ID NO: 361860 - RNA, 11 nt, Human respiratory syncytial virus
aagacacuaua

SEQ ID NO: 361861 - RNA, 19 nt, Human respiratory syncytial virus
aagaugucacuacagucau

SEQ ID NO: 361862 - RNA, 21 nt, Human respiratory syncytial virus
aagcaaauuuuggcccuauuu

SEQ ID NO: 361863 - RNA, 17 nt, Human respiratory syncytial virus
aagcauagacacuuugu

SEQ ID NO: 361864 - RNA, 14 nt, Human respiratory syncytial virus
aagcaucaacauac

SEQ ID NO: 361865 - RNA, 18 nt, Human respiratory syncytial virus
aagccaacuacccaagaa

SEQ ID NO: 361866 - RNA, 18 nt, Human respiratory syncytial virus
aagccgacaguaccccag

SEQ ID NO: 361867 - RNA, 13 nt, Human respiratory syncytial virus
aaguaaagccaau

SEQ ID NO: 361868 - RNA, 14 nt, Human respiratory syncytial virus
aaguaaccaaagag

SEQ ID NO: 361869 - RNA, 21 nt, Human respiratory syncytial virus
aagucaauggacaaaagcaua

SEQ ID NO: 361870 - RNA, 14 nt, Human respiratory syncytial virus
aaguuaaaugauac

SEQ ID NO: 361871 - RNA, 16 nt, Human respiratory syncytial virus
aauaaaaguaaagcca

SEQ ID NO: 361872 - RNA, 23 nt, Human respiratory syncytial virus
aauaaacucaccuaaucaaucaa

SEQ ID NO: 361873 - RNA, 14 nt, Human respiratory syncytial virus
aauacacuauucaa

SEQ ID NO: 361874 - RNA, 21 nt, Human respiratory syncytial virus
aauacacugaauauaauacaa

SEQ ID NO: 361875 - RNA, 23 nt, Human respiratory syncytial virus
aauacauauacuauaaaucuuaa

SEQ ID NO: 361876 - RNA, 17 nt, Human respiratory syncytial virus
aauacauaugaucuuaa

SEQ ID NO: 361877 - RNA, 11 nt, Human respiratory syncytial virus
aauacauccau

SEQ ID NO: 361878 - RNA, 13 nt, Human respiratory syncytial virus
ucaacacaucauu

SEQ ID NO: 361879 - RNA, 17 nt, Human respiratory syncytial virus
ucaacacaucauucaca

SEQ ID NO: 361880 - RNA, 17 nt, Human respiratory syncytial virus
ucaauccauugaaucaa

SEQ ID NO: 361881 - RNA, 21 nt, Human respiratory syncytial virus
ucaauuaugagaugaagcuac

SEQ ID NO: 361882 - RNA, 23 nt, Human respiratory syncytial virus
ucacagagucauggugucgcaaa

SEQ ID NO: 361883 - RNA, 19 nt, Human respiratory syncytial virus
ucaccaaagaaaucaucac

SEQ ID NO: 361884 - RNA, 16 nt, Human respiratory syncytial virus
ucaccccaagugacaa

SEQ ID NO: 361885 - RNA, 17 nt, Human respiratory syncytial virus
ucaccuaaucaaucaaa

SEQ ID NO: 361886 - RNA, 14 nt, Human respiratory syncytial virus
ucacuauuaugauu

SEQ ID NO: 361887 - RNA, 15 nt, Human respiratory syncytial virus
ucacugaagaugcaa

SEQ ID NO: 361888 - RNA, 14 nt, Human respiratory syncytial virus
cuauuuuacacuaa

SEQ ID NO: 361889 - RNA, 14 nt, Human respiratory syncytial virus
cucaaacuacacac

SEQ ID NO: 361890 - RNA, 14 nt, Human respiratory syncytial virus
cucaaucaucuaau

SEQ ID NO: 361891 - RNA, 14 nt, Human respiratory syncytial virus
cucaccccaaguga

SEQ ID NO: 361892 - RNA, 13 nt, Human respiratory syncytial virus
cucaccuaaucaa

SEQ ID NO: 361893 - RNA, 18 nt, Human respiratory syncytial virus
cucaugccuuacuaguga

SEQ ID NO: 361894 - RNA, 14 nt, Human respiratory syncytial virus
cucucaaucaucua

SEQ ID NO: 361895 - RNA, 19 nt, Human respiratory syncytial virus
cucuuguuuauacagauua

SEQ ID NO: 361896 - RNA, 22 nt, Human respiratory syncytial virus
cugaaauuagaagaaccaacuu

SEQ ID NO: 361897 - RNA, 23 nt, Human respiratory syncytial virus
cugaaauuagaagaaccaacuua

SEQ ID NO: 361898 - RNA, 17 nt, Human respiratory syncytial virus
cugaaucauuucuucac

SEQ ID NO: 361899 - RNA, 23 nt, Human respiratory syncytial virus
cugaaugacagguccacauauau

SEQ ID NO: 361900 - RNA, 18 nt, Human respiratory syncytial virus
cugacgaaauuaacaaua

SEQ ID NO: 361901 - RNA, 15 nt, Human respiratory syncytial virus
cugcaucacuaacaa

SEQ ID NO: 361902 - RNA, 18 nt, Human respiratory syncytial virus
cuggcaccaacaucauca

SEQ ID NO: 361903 - RNA, 22 nt, Human respiratory syncytial virus
cuuagcagaaaaccgugaccua

SEQ ID NO: 361904 - RNA, 14 nt, Human respiratory syncytial virus
cuuaugacauauaa

SEQ ID NO: 361905 - RNA, 18 nt, Human respiratory syncytial virus
cuuaugcaaaacacacca

SEQ ID NO: 361906 - RNA, 18 nt, Human respiratory syncytial virus
cuucaucacacaaaccaa

SEQ ID NO: 361907 - RNA, 16 nt, Human respiratory syncytial virus
cuuguaguauaucauc

SEQ ID NO: 361908 - RNA, 13 nt, Human respiratory syncytial virus
gaaacauacguga

SEQ ID NO: 361909 - RNA, 12 nt, Human respiratory syncytial virus
gaaaccaaagcc

SEQ ID NO: 361910 - RNA, 17 nt, Human respiratory syncytial virus
gaaaccaaaugcaaugg

SEQ ID NO: 361911 - RNA, 21 nt, Human respiratory syncytial virus
gaaaccaaaugcaauggaacu

SEQ ID NO: 361912 - RNA, 14 nt, Human respiratory syncytial virus
gaaauuaaaccugg

SEQ ID NO: 361913 - RNA, 23 nt, Human respiratory syncytial virus
gaaccaacuuauuuccagucauu

SEQ ID NO: 361914 - RNA, 15 nt, Human respiratory syncytial virus
gaaccaccaaccaau

SEQ ID NO: 361915 - RNA, 16 nt, Human respiratory syncytial virus
gaaccaccaaccaauc

SEQ ID NO: 361916 - RNA, 23 nt, Human respiratory syncytial virus
gaacuugcaagcaucaacauacu

SEQ ID NO: 361917 - RNA, 17 nt, Human respiratory syncytial virus
gaagaugcaaaucauaa

SEQ ID NO: 361918 - RNA, 22 nt, Human respiratory syncytial virus
gaagaugcaaaucauaaauuca

SEQ ID NO: 361919 - RNA, 19 nt, Human respiratory syncytial virus
gaagaugucacuacaguca

SEQ ID NO: 361920 - RNA, 14 nt, Human respiratory syncytial virus
gaaguaaccaaaga

SEQ ID NO: 361921 - RNA, 15 nt, Human respiratory syncytial virus
gaaucauuucuucac

SEQ ID NO: 361922 - RNA, 18 nt, Human respiratory syncytial virus
gaaucauuucuucacauc

SEQ ID NO: 361923 - RNA, 13 nt, Human respiratory syncytial virus
gaauuaaguaaua

SEQ ID NO: 361924 - RNA, 20 nt, Human respiratory syncytial virus
gaauuacagcuacuuaugca

SEQ ID NO: 361925 - RNA, 16 nt, Human respiratory syncytial virus
gaauuagauaaguaua

SEQ ID NO: 361926 - RNA, 18 nt, Human respiratory syncytial virus
gacaacacuacuaugcaa

SEQ ID NO: 361927 - RNA, 23 nt, Human respiratory syncytial virus
gacaguaccccagaaaccaaagc

SEQ ID NO: 361928 - RNA, 13 nt, Human respiratory syncytial virus
gacaucaauccau

SEQ ID NO: 361929 - RNA, 15 nt, Human respiratory syncytial virus
gacauguagugcagu

SEQ ID NO: 361930 - RNA, 16 nt, Human respiratory syncytial virus
gaccgaacaaacaaau

SEQ ID NO: 361931 - RNA, 21 nt, Human respiratory syncytial virus
gaggcaaaacuucauguuaaa

SEQ ID NO: 361932 - RNA, 20 nt, Human respiratory syncytial virus
gauaaucucaaccucucuca

SEQ ID NO: 361933 - RNA, 17 nt, Human respiratory syncytial virus
gauauauauacaauaua

SEQ ID NO: 361934 - RNA, 18 nt, Human respiratory syncytial virus
gaucaacucacucagcaa

SEQ ID NO: 361935 - RNA, 13 nt, Human respiratory syncytial virus
gaucauguuucaa

SEQ ID NO: 361936 - RNA, 15 nt, Human respiratory syncytial virus
gauccugcaucacua

SEQ ID NO: 361937 - RNA, 18 nt, Human respiratory syncytial virus
gauccugcaucacuaaca

SEQ ID NO: 361938 - RNA, 18 nt, Human respiratory syncytial virus
gauuaaauuuaaaaucua

SEQ ID NO: 361939 - RNA, 13 nt, Human respiratory syncytial virus
gauuaaugaucac

SEQ ID NO: 361940 - RNA, 23 nt, Human respiratory syncytial virus
gauucuauaucauccaaccauaa

SEQ ID NO: 361941 - RNA, 17 nt, Human respiratory syncytial virus
gcaaaaacaccuaaaca

SEQ ID NO: 361942 - RNA, 22 nt, Human respiratory syncytial virus
gcaaauaaacucaccuaaucaa

SEQ ID NO: 361943 - RNA, 16 nt, Human respiratory syncytial virus
gcaaaucauaaauuca

SEQ ID NO: 361944 - RNA, 17 nt, Human respiratory syncytial virus
gcaagcaucaacauacu

SEQ ID NO: 361945 - RNA, 21 nt, Human respiratory syncytial virus
gcaaguucgcaucauccaaag

SEQ ID NO: 361946 - RNA, 18 nt, Human respiratory syncytial virus
gcaaucaacaacaucaau

SEQ ID NO: 361947 - RNA, 19 nt, Human respiratory syncytial virus
gcaaucuuccuaacucuug

SEQ ID NO: 361948 - RNA, 15 nt, Human respiratory syncytial virus
gcaaugauaaucuca

SEQ ID NO: 361949 - RNA, 20 nt, Human respiratory syncytial virus
gcaauggaacugacacuaaa

SEQ ID NO: 361950 - RNA, 22 nt, Human respiratory syncytial virus
gcacaaaguagggaguaccaaa

SEQ ID NO: 361951 - RNA, 19 nt, Human respiratory syncytial virus
gcacuaucaguucuggcaa

SEQ ID NO: 361952 - RNA, 18 nt, Human respiratory syncytial virus
gcagaaaaccgugaccua

SEQ ID NO: 361953 - RNA, 22 nt, Human respiratory syncytial virus
gcagaaaaccgugaccuaucaa

SEQ ID NO: 361954 - RNA, 17 nt, Human respiratory syncytial virus
gcaucacuaacaauaug

SEQ ID NO: 361955 - RNA, 19 nt, Human respiratory syncytial virus
gccaauucaauacauauac

SEQ ID NO: 361956 - RNA, 20 nt, Human respiratory syncytial virus
gccagaccgaacaaacaaau

SEQ ID NO: 361957 - RNA, 19 nt, Human respiratory syncytial virus
gcuaauccguuuuaguaau

SEQ ID NO: 361958 - RNA, 16 nt, Human respiratory syncytial virus
gcuacauuuacauucu

SEQ ID NO: 361959 - RNA, 16 nt, Human respiratory syncytial virus
gcuagaccuagagugc

SEQ ID NO: 361960 - RNA, 22 nt, Human respiratory syncytial virus
gcuauuaaugcauuguaccuca

SEQ ID NO: 361961 - RNA, 17 nt, Human respiratory syncytial virus
gcucauaaaagaacuug

SEQ ID NO: 361962 - RNA, 23 nt, Human respiratory syncytial virus
gcugaaucauuucuucacaucau

SEQ ID NO: 361963 - RNA, 19 nt, Human respiratory syncytial virus
gcugucauccagcaaauac

SEQ ID NO: 361964 - RNA, 20 nt, Human respiratory syncytial virus
ggaaccaccaaccaaucaau

SEQ ID NO: 361965 - RNA, 12 nt, Human respiratory syncytial virus
ggaucaaaaaca

SEQ ID NO: 361966 - RNA, 20 nt, Human respiratory syncytial virus
ggcccuauuuuacacuaaua

SEQ ID NO: 361967 - RNA, 13 nt, Human respiratory syncytial virus
ggcuccacauaca

SEQ ID NO: 361968 - RNA, 14 nt, Human respiratory syncytial virus
gguuaagugcaauc

SEQ ID NO: 361969 - RNA, 15 nt, Human respiratory syncytial virus
guaaagccaauaaca

SEQ ID NO: 361970 - RNA, 14 nt, Human respiratory syncytial virus
guaccagcagacuu

SEQ ID NO: 361971 - RNA, 18 nt, Human respiratory syncytial virus
guaccccagaaaccaaag

SEQ ID NO: 361972 - RNA, 19 nt, Human respiratory syncytial virus
guauaccagugucauaaca

SEQ ID NO: 361973 - RNA, 15 nt, Human respiratory syncytial virus
guaugggaucaaaaa

SEQ ID NO: 361974 - RNA, 14 nt, Human respiratory syncytial virus
gucagaacauaacu

SEQ ID NO: 361975 - RNA, 22 nt, Human respiratory syncytial virus
gucagcggaaccaccaaccaau

SEQ ID NO: 361976 - RNA, 23 nt, Human respiratory syncytial virus
gucauaauuacuuugaauggccu

SEQ ID NO: 361977 - RNA, 16 nt, Human respiratory syncytial virus
gucaucuguaccagca

SEQ ID NO: 361978 - RNA, 22 nt, Human respiratory syncytial virus
gugaagccgacaguaccccaga

SEQ ID NO: 361979 - RNA, 18 nt, Human respiratory syncytial virus
gugccuauguuccaguca

SEQ ID NO: 361980 - RNA, 15 nt, Human respiratory syncytial virus
gugcuuuaagaacag

SEQ ID NO: 361981 - RNA, 17 nt, Human respiratory syncytial virus
guuaaacaagauacuca

SEQ ID NO: 361982 - RNA, 22 nt, Human respiratory syncytial virus
guuacauaaaaaccucaaguau

SEQ ID NO: 361983 - RNA, 22 nt, Human respiratory syncytial virus
cauaaaaacauauuacaauuua

SEQ ID NO: 361984 - RNA, 21 nt, Human respiratory syncytial virus
cauaaaaaccucaaguaucac

SEQ ID NO: 361985 - RNA, 18 nt, Human respiratory syncytial virus
cauaauauucaucaucuc

SEQ ID NO: 361986 - RNA, 22 nt, Human respiratory syncytial virus
cauaaugcuuggccauaacgau

SEQ ID NO: 361987 - RNA, 13 nt, Human respiratory syncytial virus
cauagacacuuug

SEQ ID NO: 361988 - RNA, 13 nt, Human respiratory syncytial virus
cauauacuugaua

SEQ ID NO: 361989 - RNA, 20 nt, Human respiratory syncytial virus
cauaugaucuuaacucuaau

SEQ ID NO: 361990 - RNA, 21 nt, Human respiratory syncytial virus
cauauuacaauuuaaccauaa

SEQ ID NO: 361991 - RNA, 14 nt, Human respiratory syncytial virus
cauauugauuucaa

SEQ ID NO: 361992 - RNA, 12 nt, Human respiratory syncytial virus
caucacaauaga

SEQ ID NO: 361993 - RNA, 15 nt, Human respiratory syncytial virus
caucacacaaaccaa

SEQ ID NO: 361994 - RNA, 18 nt, Human respiratory syncytial virus
caucacacacaaauucau

SEQ ID NO: 361995 - RNA, 21 nt, Human respiratory syncytial virus
caucaugaacaucuacacuac

SEQ ID NO: 361996 - RNA, 22 nt, Human respiratory syncytial virus
caucuaauuguaauauccucuu

SEQ ID NO: 361997 - RNA, 15 nt, Human respiratory syncytial virus
caucuacacuacaca

SEQ ID NO: 361998 - RNA, 17 nt, Human respiratory syncytial virus
caucuacacuacacacu

SEQ ID NO: 361999 - RNA, 13 nt, Human respiratory syncytial virus
caucucucaccaa

SEQ ID NO: 362000 - RNA, 16 nt, Human respiratory syncytial virus
caucucugccaaucac

SEQ ID NO: 362001 - RNA, 18 nt, Human respiratory syncytial virus
caucucugccaaucacaa

SEQ ID NO: 362002 - RNA, 21 nt, Human respiratory syncytial virus
caucuggcaccaacaucauca

SEQ ID NO: 362003 - RNA, 19 nt, Human respiratory syncytial virus
caugauugcuacauucaau

SEQ ID NO: 362004 - RNA, 17 nt, Human respiratory syncytial virus
caugcuacccacacaac

SEQ ID NO: 362005 - RNA, 20 nt, Human respiratory syncytial virus
caugcuacccacacaacuaa

SEQ ID NO: 362006 - RNA, 13 nt, Human respiratory syncytial virus
cauguagugcagu

SEQ ID NO: 362007 - RNA, 14 nt, Human respiratory syncytial virus
cauguccaaacaca

SEQ ID NO: 362008 - RNA, 14 nt, Human respiratory syncytial virus
cauuaaauaaggau

SEQ ID NO: 362009 - RNA, 20 nt, Human respiratory syncytial virus
cauuaauaucuagauaucau

SEQ ID NO: 362010 - RNA, 18 nt, Human respiratory syncytial virus
cauuacuuaugacauaua

SEQ ID NO: 362011 - RNA, 19 nt, Human respiratory syncytial virus
cauuauauuauaguuauua

SEQ ID NO: 362012 - RNA, 16 nt, Human respiratory syncytial virus
cauuguaccucaccuc

SEQ ID NO: 362013 - RNA, 15 nt, Human respiratory syncytial virus
cauuucuucacauca

SEQ ID NO: 362014 - RNA, 22 nt, Human respiratory syncytial virus
ccaaaaucacuaccagccacua

SEQ ID NO: 362015 - RNA, 18 nt, Human respiratory syncytial virus
ccaaacacaagaaucaac

SEQ ID NO: 362016 - RNA, 16 nt, Human respiratory syncytial virus
ccaaagaaaucaucac

SEQ ID NO: 362017 - RNA, 13 nt, Human respiratory syncytial virus
ccaaaugcaaugg

SEQ ID NO: 362018 - RNA, 14 nt, Human respiratory syncytial virus
ccaacaucuuaaca

SEQ ID NO: 362019 - RNA, 12 nt, Human respiratory syncytial virus
ccaaccaaucaa

SEQ ID NO: 362020 - RNA, 13 nt, Human respiratory syncytial virus
ccaauaacauaaa

SEQ ID NO: 362021 - RNA, 21 nt, Human respiratory syncytial virus
ccaaucccacucaaaauccaa

SEQ ID NO: 362022 - RNA, 17 nt, Human respiratory syncytial virus
ccaauucaauacauaua

SEQ ID NO: 362023 - RNA, 18 nt, Human respiratory syncytial virus
ccaauucaauacauauac

SEQ ID NO: 362024 - RNA, 20 nt, Human respiratory syncytial virus
ccacagguuaagugcaaucu

SEQ ID NO: 362025 - RNA, 15 nt, Human respiratory syncytial virus
ccacauacacagcag

SEQ ID NO: 362026 - RNA, 16 nt, Human respiratory syncytial virus
ccacauacacagcagc

SEQ ID NO: 362027 - RNA, 21 nt, Human respiratory syncytial virus
ccacauauauccucaaacuac

SEQ ID NO: 362028 - RNA, 23 nt, Human respiratory syncytial virus
ccacauauauccucaaacuacac

SEQ ID NO: 362029 - RNA, 19 nt, Human respiratory syncytial virus
ccacuaucugcuagaccua

SEQ ID NO: 362030 - RNA, 17 nt, Human respiratory syncytial virus
ccacucaaaauccaaaa

SEQ ID NO: 362031 - RNA, 16 nt, Human respiratory syncytial virus
ccauaaaacuaucuua

SEQ ID NO: 362032 - RNA, 19 nt, Human respiratory syncytial virus
ccauaaaacuaucuuaaua

SEQ ID NO: 362033 - RNA, 18 nt, Human respiratory syncytial virus
ccauaacaaacacuucaa

SEQ ID NO: 362034 - RNA, 18 nt, Human respiratory syncytial virus
ccauuuggauaaccacca

SEQ ID NO: 362035 - RNA, 13 nt, Human respiratory syncytial virus
cccacucaaaauc

SEQ ID NO: 362036 - RNA, 14 nt, Human respiratory syncytial virus
cccagaaaccaaag

SEQ ID NO: 362037 - RNA, 18 nt, Human respiratory syncytial virus
cccagaaaccaaagccaa

SEQ ID NO: 362038 - RNA, 16 nt, Human respiratory syncytial virus
ccccagaaaccaaagc

SEQ ID NO: 362039 - RNA, 11 nt, Human respiratory syncytial virus
cccuuaucuca

SEQ ID NO: 362040 - RNA, 18 nt, Human respiratory syncytial virus
ccuaacucuugcuauuaa

SEQ ID NO: 362041 - RNA, 21 nt, Human respiratory syncytial virus
ccuaaucaaucaaacuaugag

SEQ ID NO: 362042 - RNA, 13 nt, Human respiratory syncytial virus
ccucaaguaucac

SEQ ID NO: 362043 - RNA, 12 nt, Human respiratory syncytial virus
ccucaugccuua

SEQ ID NO: 362044 - RNA, 22 nt, Human respiratory syncytial virus
ccuuaacucauaguuacauaaa

SEQ ID NO: 362045 - RNA, 17 nt, Human respiratory syncytial virus
ccuuguaguauaucauc

SEQ ID NO: 362046 - RNA, 21 nt, Human respiratory syncytial virus
cgaauagguaaauaaaaccaa

SEQ ID NO: 362047 - RNA, 22 nt, Human respiratory syncytial virus
cgacaguaccccagaaaccaaa

SEQ ID NO: 362048 - RNA, 16 nt, Human respiratory syncytial virus
cgacauguagugcagu

SEQ ID NO: 362049 - RNA, 16 nt, Human respiratory syncytial virus
cgagacauuaguuuuu

SEQ ID NO: 362050 - RNA, 22 nt, Human respiratory syncytial virus
cgcaaaaccacgccaacuauca

SEQ ID NO: 362051 - RNA, 15 nt, Human respiratory syncytial virus
cgcaucauccaaaga

SEQ ID NO: 362052 - RNA, 20 nt, Human respiratory syncytial virus
cgccaauucaauacauauac

SEQ ID NO: 362053 - RNA, 21 nt, Human respiratory syncytial virus
cgucagcggaaccaccaacca

SEQ ID NO: 362054 - RNA, 13 nt, Human respiratory syncytial virus
cuaaaucaacaca

SEQ ID NO: 362055 - RNA, 20 nt, Human respiratory syncytial virus
cuaaaucaacacaucauuca

SEQ ID NO: 362056 - RNA, 15 nt, Human respiratory syncytial virus
cuaacuuacuuaaaa

SEQ ID NO: 362057 - RNA, 17 nt, Human respiratory syncytial virus
cuaaguuguacaaagaa

SEQ ID NO: 362058 - RNA, 12 nt, Human respiratory syncytial virus
cuaauacauaug

SEQ ID NO: 362059 - RNA, 16 nt, Human respiratory syncytial virus
cuacacacuucaucac

SEQ ID NO: 362060 - RNA, 17 nt, Human respiratory syncytial virus
cuaccagccacuaucug

SEQ ID NO: 362061 - RNA, 17 nt, Human respiratory syncytial virus
cuacuagagcauaugaa

SEQ ID NO: 362062 - RNA, 16 nt, Human rhinovirus 89
aauauagcuaguuuau

SEQ ID NO: 362063 - RNA, 13 nt, Human rhinovirus 89
agcuaguuuauua

SEQ ID NO: 362064 - RNA, 14 nt, Human rhinovirus 89
agcuaguuuauuag

SEQ ID NO: 362065 - RNA, 19 nt, Human rhinovirus 89
agcuaguuuauuaguuuua

SEQ ID NO: 362066 - RNA, 22 nt, Human rhinovirus 89
auaaaacuguuaaauauagcua

SEQ ID NO: 362067 - RNA, 23 nt, Human rhinovirus 89
auauaaaacuguuaaauauagcu

SEQ ID NO: 362068 - RNA, 20 nt, Human rhinovirus 89
uaaaacuguuaaauauagcu

SEQ ID NO: 362069 - RNA, 19 nt, Human rhinovirus 89
uaaauauagcuaguuuauu

SEQ ID NO: 362070 - RNA, 16 nt, Human rhinovirus 89
uauagcuaguuuauua

SEQ ID NO: 362071 - RNA, 13 nt, Human rhinovirus 89
uuaaauauagcua

SEQ ID NO: 362072 - RNA, 17 nt, Human rhinovirus 89
aaauauagcuaguuuau

SEQ ID NO: 362073 - RNA, 18 nt, Human rhinovirus 89
acuguuaaauauagcuag

SEQ ID NO: 362074 - RNA, 22 nt, Human rhinovirus 89
auagcuaguuuauuaguuuuau

SEQ ID NO: 362075 - RNA, 18 nt, Human rhinovirus 89
cuaguuuauuaguuuuau

SEQ ID NO: 362076 - RNA, 21 nt, Human rhinovirus 89
uaaaacuguuaaauauagcua

SEQ ID NO: 362077 - RNA, 20 nt, Human rhinovirus 89
uagcuaguuuauuaguuuua

SEQ ID NO: 362078 - RNA, 21 nt, Human rhinovirus 89
uagcuaguuuauuaguuuuau

SEQ ID NO: 362079 - RNA, 21 nt, Human rhinovirus 89
uauaaaacuguuaaauauagc

SEQ ID NO: 362080 - RNA, 14 nt, Human rhinovirus 89
uguuaaauauagcu

SEQ ID NO: 362081 - RNA, 17 nt, Human rhinovirus B
aacaauauagacacuua

SEQ ID NO: 362082 - RNA, 19 nt, Human rhinovirus B
aacaauauagacacuuaau

SEQ ID NO: 362083 - RNA, 16 nt, Human rhinovirus B
acaauauagacacuua

SEQ ID NO: 362084 - RNA, 14 nt, Human rhinovirus B
aaguaggaguuuau

SEQ ID NO: 362085 - RNA, 15 nt, Human rhinovirus B
aauauagacacuuaa

SEQ ID NO: 362086 - RNA, 21 nt, Human rhinovirus B
aauauagacacuuaauuugag

SEQ ID NO: 362087 - RNA, 21 nt, Human rhinovirus B
agacacuuaauuugaguagaa

SEQ ID NO: 362088 - RNA, 14 nt, Human rhinovirus B
auauagacacuuaa

SEQ ID NO: 362089 - RNA, 14 nt, Human rhinovirus B
caauauagacacuu

SEQ ID NO: 362090 - RNA, 16 nt, Human rhinovirus B
caauauagacacuuaa

SEQ ID NO: 362091 - RNA, 15 nt, Human rhinovirus B
gaaguaggaguuuau

SEQ ID NO: 362092 - RNA, 19 nt, Human rhinovirus B
guuaacaauauagacacuu

SEQ ID NO: 362093 - RNA, 12 nt, Human rhinovirus B
uagacacuuaau

SEQ ID NO: 362094 - RNA, 13 nt, Human rhinovirus B
uauagacacuuaa

SEQ ID NO: 362095 - RNA, 15 nt, Human rhinovirus B
ugaguagaaguagga

SEQ ID NO: 362096 - RNA, 19 nt, Human rhinovirus B
uuugaguagaaguaggagu

SEQ ID NO: 362097 - RNA, 17 nt, Human rhinovirus B
acaauauagacacuuaa

SEQ ID NO: 362098 - RNA, 17 nt, Human rhinovirus B
acuuaauuugaguagaa

SEQ ID NO: 362099 - RNA, 16 nt, Human rhinovirus B
agaaguaggaguuuau

SEQ ID NO: 362100 - RNA, 16 nt, Human rhinovirus B
agacacuuaauuugag

SEQ ID NO: 362101 - RNA, 22 nt, Human rhinovirus B
agacacuuaauuugaguagaag

SEQ ID NO: 362102 - RNA, 20 nt, Human rhinovirus B
gacacuuaauuugaguagaa

SEQ ID NO: 362103 - RNA, 17 nt, Human rhinovirus B
guagaaguaggaguuua

SEQ ID NO: 362104 - RNA, 22 nt, Human rhinovirus B
guuaacaauauagacacuuaau

SEQ ID NO: 362105 - RNA, 19 nt, Human rhinovirus B
uaacaauauagacacuuaa

SEQ ID NO: 362106 - RNA, 15 nt, Human rhinovirus B
uagaaguaggaguuu

SEQ ID NO: 362107 - RNA, 14 nt, Human rhinovirus B
uauagacacuuaau

SEQ ID NO: 362108 - RNA, 18 nt, Human rhinovirus B
uauagacacuuaauuuga

SEQ ID NO: 362109 - RNA, 20 nt, Human rhinovirus B
uuaacaauauagacacuuaa

SEQ ID NO: 362110 - RNA, 20 nt, Human rhinovirus B
uuaauuugaguagaaguagg

SEQ ID NO: 362111 - RNA, 18 nt, Human rhinovirus B
uuugaguagaaguaggag

SEQ ID NO: 362112 - RNA, 11 nt, Human T-lymphotropic virus 1
aaacauuuccg

SEQ ID NO: 362113 - RNA, 22 nt, Human T-lymphotropic virus 1
aaacauuuccgugaaacagaag

SEQ ID NO: 362114 - RNA, 18 nt, Human T-lymphotropic virus 1
aaacccugcaauccugcc

SEQ ID NO: 362115 - RNA, 15 nt, Human T-lymphotropic virus 1
aaagcccagauugac

SEQ ID NO: 362116 - RNA, 22 nt, Human T-lymphotropic virus 1
aaagcccagauugacacccaga

SEQ ID NO: 362117 - RNA, 22 nt, Human T-lymphotropic virus 1
aaaugcagcuggcccauauccu

SEQ ID NO: 362118 - RNA, 18 nt, Human T-lymphotropic virus 1
aacaucuauucugccagu

SEQ ID NO: 362119 - RNA, 16 nt, Human T-lymphotropic virus 1
aaccacaucgccucca

SEQ ID NO: 362120 - RNA, 16 nt, Human T-lymphotropic virus 1
aacuacacuagcccac

SEQ ID NO: 362121 - RNA, 22 nt, Human T-lymphotropic virus 1
aagcccagauugacacccagac

SEQ ID NO: 362122 - RNA, 14 nt, Human T-lymphotropic virus 1
aagccguccucagg

SEQ ID NO: 362123 - RNA, 17 nt, Human T-lymphotropic virus 1
aagucagcggccuucuc

SEQ ID NO: 362124 - RNA, 15 nt, Human T-lymphotropic virus 1
aaguuacuccagcua

SEQ ID NO: 362125 - RNA, 16 nt, Human T-lymphotropic virus 1
aauaaaauaacaggag

SEQ ID NO: 362126 - RNA, 19 nt, Human T-lymphotropic virus 1
aauacuccccucaaaaaca

SEQ ID NO: 362127 - RNA, 18 nt, Human T-lymphotropic virus 1
aauccugcccagccaguu

SEQ ID NO: 362128 - RNA, 19 nt, Human T-lymphotropic virus 1
aaucuaguaaguuacucca

SEQ ID NO: 362129 - RNA, 15 nt, Human T-lymphotropic virus 1
aaugcccauaccuag

SEQ ID NO: 362130 - RNA, 21 nt, Human T-lymphotropic virus 1
aauggcuucccuaaucuccca

SEQ ID NO: 362131 - RNA, 14 nt, Human T-lymphotropic virus 1
acaacaaugccaag

SEQ ID NO: 362132 - RNA, 13 nt, Human T-lymphotropic virus 1
acagcaaguccuu

SEQ ID NO: 362133 - RNA, 19 nt, Human T-lymphotropic virus 1
acaguuggagucuccucau

SEQ ID NO: 362134 - RNA, 14 nt, Human T-lymphotropic virus 1
acaugacaguccuu

SEQ ID NO: 362135 - RNA, 19 nt, Human T-lymphotropic virus 1
acauggaugacauucuccu

SEQ ID NO: 362136 - RNA, 14 nt, Human T-lymphotropic virus 1
accaaaaacaacug

SEQ ID NO: 362137 - RNA, 13 nt, Human T-lymphotropic virus 1
accacaucgccuc

SEQ ID NO: 362138 - RNA, 11 nt, Human T-lymphotropic virus 1
accgggaacca

SEQ ID NO: 362139 - RNA, 21 nt, Human T-lymphotropic virus 1
accgggaaccacccauuuccu

SEQ ID NO: 362140 - RNA, 21 nt, Human T-lymphotropic virus 1
accuagggugccaaucaugga

SEQ ID NO: 362141 - RNA, 20 nt, Human T-lymphotropic virus 1
accucgccuuccaacugucu

SEQ ID NO: 362142 - RNA, 15 nt, Human T-lymphotropic virus 1
acggcgcuccugcuc

SEQ ID NO: 362143 - RNA, 14 nt, Human T-lymphotropic virus 1
acuacacuagccca

SEQ ID NO: 362144 - RNA, 23 nt, Human T-lymphotropic virus 1
acuuuaagcucaccucccuuccu

SEQ ID NO: 362145 - RNA, 19 nt, Human T-lymphotropic virus 1
agaauaaggcucugacguc

SEQ ID NO: 362146 - RNA, 15 nt, Human T-lymphotropic virus 1
agacccuuguuccuu

SEQ ID NO: 362147 - RNA, 15 nt, Human T-lymphotropic virus 1
agagccucucaguga

SEQ ID NO: 362148 - RNA, 18 nt, Human T-lymphotropic virus 1
agaucaggcccuacagcc

SEQ ID NO: 362149 - RNA, 18 nt, Human T-lymphotropic virus 1
agcaaccuccuccguuca

SEQ ID NO: 362150 - RNA, 21 nt, Human T-lymphotropic virus 1
agcaaguccuuccuaaccaag

SEQ ID NO: 362151 - RNA, 22 nt, Human T-lymphotropic virus 1
agcaaucugcuuuuccuccucu

SEQ ID NO: 362152 - RNA, 17 nt, Human T-lymphotropic virus 1
agcagacaugacagucc

SEQ ID NO: 362153 - RNA, 18 nt, Human T-lymphotropic virus 1
agccaguuuguucaugga

SEQ ID NO: 362154 - RNA, 14 nt, Human T-lymphotropic virus 1
agccccucccaugc

SEQ ID NO: 362155 - RNA, 18 nt, Human T-lymphotropic virus 1
agcccuacuuugcuuuca

SEQ ID NO: 362156 - RNA, 19 nt, Human T-lymphotropic virus 1
agccgucuccagccccuac

SEQ ID NO: 362157 - RNA, 23 nt, Human T-lymphotropic virus 1
agcuaccaugccaccuauucccu

SEQ ID NO: 362158 - RNA, 18 nt, Human T-lymphotropic virus 1
agcucaccucccuuccug

SEQ ID NO: 362159 - RNA, 22 nt, Human T-lymphotropic virus 1
agcucagcaccagcucaggcua

SEQ ID NO: 362160 - RNA, 22 nt, Human T-lymphotropic virus 1
aggacuccaccucgccuuccaa

SEQ ID NO: 362161 - RNA, 13 nt, Human T-lymphotropic virus 1
aggcuauuauuca

SEQ ID NO: 362162 - RNA, 18 nt, Human T-lymphotropic virus 1
agggggccaaacccaaga

SEQ ID NO: 362163 - RNA, 17 nt, Human T-lymphotropic virus 1
aggucgugaugccuuac

SEQ ID NO: 362164 - RNA, 12 nt, Human T-lymphotropic virus 1
aguacuacccca

SEQ ID NO: 362165 - RNA, 14 nt, Human T-lymphotropic virus 1
aguauagccaucaa

SEQ ID NO: 362166 - RNA, 15 nt, Human T-lymphotropic virus 1
aguugauaccaaaaa

SEQ ID NO: 362167 - RNA, 23 nt, Human T-lymphotropic virus 1
auaaaagcguggggacaguucag

SEQ ID NO: 362168 - RNA, 14 nt, Human T-lymphotropic virus 1
auacaggagccguc

SEQ ID NO: 362169 - RNA, 22 nt, Human T-lymphotropic virus 1
auagaucucucaucaucuuccc

SEQ ID NO: 362170 - RNA, 16 nt, Human T-lymphotropic virus 1
auauccugcagcccau

SEQ ID NO: 362171 - RNA, 22 nt, Human T-lymphotropic virus 1
aucaaauccuccuucuccugca

SEQ ID NO: 362172 - RNA, 18 nt, Human T-lymphotropic virus 1
aucauaagcucagaccuc

SEQ ID NO: 362173 - RNA, 19 nt, Human T-lymphotropic virus 1
aucauggaccugccccuau

SEQ ID NO: 362174 - RNA, 17 nt, Human T-lymphotropic virus 1
auccugcccagccaguu

SEQ ID NO: 362175 - RNA, 20 nt, Human T-lymphotropic virus 1
augcuguuucgccuucucag

SEQ ID NO: 362176 - RNA, 21 nt, Human T-lymphotropic virus 1
caaagacuaucgaagcucuac

SEQ ID NO: 362177 - RNA, 17 nt, Human T-lymphotropic virus 1
caaaucauaagcucaga

SEQ ID NO: 362178 - RNA, 13 nt, Human T-lymphotropic virus 1
caaauccuccuuc

SEQ ID NO: 362179 - RNA, 16 nt, Human T-lymphotropic virus 1
caagacccaacaucua

SEQ ID NO: 362180 - RNA, 16 nt, Human T-lymphotropic virus 1
caagccccucccaugc

SEQ ID NO: 362181 - RNA, 23 nt, Human T-lymphotropic virus 1
caauaauuaaccucucccaucaa

SEQ ID NO: 362182 - RNA, 19 nt, Human T-lymphotropic virus 1
cacaucgccuccagccucc

SEQ ID NO: 362183 - RNA, 21 nt, Human T-lymphotropic virus 1
cacauuacagcaaguccuucc

SEQ ID NO: 362184 - RNA, 23 nt, Human T-lymphotropic virus 1
cacccagaccagccacccaaaga

SEQ ID NO: 362185 - RNA, 17 nt, Human T-lymphotropic virus 1
cacuuuaagcucaccuc

SEQ ID NO: 362186 - RNA, 13 nt, Human T-lymphotropic virus 1
cagcaaccuccuc

SEQ ID NO: 362187 - RNA, 23 nt, Human T-lymphotropic virus 1
cagcaaguccuuccuaaccaaga

SEQ ID NO: 362188 - RNA, 15 nt, Human T-lymphotropic virus 1
cauaccacucuaaac

SEQ ID NO: 362189 - RNA, 17 nt, Human T-lymphotropic virus 1
caucaacccccaacucc

SEQ ID NO: 362190 - RNA, 14 nt, Human T-lymphotropic virus 1
caucuugccuaguu

SEQ ID NO: 362191 - RNA, 15 nt, Human T-lymphotropic virus 1
caugacaguccuucc

SEQ ID NO: 362192 - RNA, 15 nt, Human T-lymphotropic virus 1
cauggaugacauucu

SEQ ID NO: 362193 - RNA, 13 nt, Human T-lymphotropic virus 1
ccaaacccaagau

SEQ ID NO: 362194 - RNA, 18 nt, Human T-lymphotropic virus 1
ccaacaucuauucugcca

SEQ ID NO: 362195 - RNA, 21 nt, Human T-lymphotropic virus 1
ccaacaucuauucugccaguu

SEQ ID NO: 362196 - RNA, 21 nt, Human T-lymphotropic virus 1
ccaagaucacuuuaagcucac

SEQ ID NO: 362197 - RNA, 17 nt, Human T-lymphotropic virus 1
ccaauaauuaaccucuc

SEQ ID NO: 362198 - RNA, 21 nt, Human T-lymphotropic virus 1
ccagaccagccacccaaagac

SEQ ID NO: 362199 - RNA, 17 nt, Human T-lymphotropic virus 1
ccagccacccaaagacu

SEQ ID NO: 362200 - RNA, 16 nt, Human T-lymphotropic virus 1
ccagcuaccaugccac

SEQ ID NO: 362201 - RNA, 12 nt, Human T-lymphotropic virus 1
ccccaaauaucc

SEQ ID NO: 362202 - RNA, 20 nt, Human T-lymphotropic virus 1
cccccggaggacagcucagc

SEQ ID NO: 362203 - RNA, 20 nt, Human T-lymphotropic virus 1
ccccuauacaggagccgucu

SEQ ID NO: 362204 - RNA, 23 nt, Human T-lymphotropic virus 1
cccucauuggaucaaaaagccaa

SEQ ID NO: 362205 - RNA, 20 nt, Human T-lymphotropic virus 1
ccgggcccccugacuugucc

SEQ ID NO: 362206 - RNA, 13 nt, Human T-lymphotropic virus 1
ccuaaacaguucc

SEQ ID NO: 362207 - RNA, 12 nt, Human T-lymphotropic virus 1
ccuaaucuccca

SEQ ID NO: 362208 - RNA, 11 nt, Human T-lymphotropic virus 1
ccuacagccac

SEQ ID NO: 362209 - RNA, 14 nt, Human T-lymphotropic virus 1
ccuccccugccaau

SEQ ID NO: 362210 - RNA, 15 nt, Human T-lymphotropic virus 1
ccuuccuaaccaaga

SEQ ID NO: 362211 - RNA, 22 nt, Human T-lymphotropic virus 1
ccuucucagccccuugucucca

SEQ ID NO: 362212 - RNA, 21 nt, Human T-lymphotropic virus 1
ccuuguuccuuaaaaugccca

SEQ ID NO: 362213 - RNA, 21 nt, Human T-lymphotropic virus 1
cggcccguaauuaaagcccag

SEQ ID NO: 362214 - RNA, 18 nt, Human T-lymphotropic virus 1
cggcucaauaaaauaaca

SEQ ID NO: 362215 - RNA, 17 nt, Human T-lymphotropic virus 1
cguaauuaaagcccaga

SEQ ID NO: 362216 - RNA, 22 nt, Human T-lymphotropic virus 1
cuaaucuaguaaguuacuccag

SEQ ID NO: 362217 - RNA, 20 nt, Human T-lymphotropic virus 1
cuacagccacccugcccuaa

SEQ ID NO: 362218 - RNA, 16 nt, Human T-lymphotropic virus 1
cuaguauagccaucaa

SEQ ID NO: 362219 - RNA, 22 nt, Human T-lymphotropic virus 1
cuaugcuguuucgccuucucag

SEQ ID NO: 362220 - RNA, 18 nt, Human T-lymphotropic virus 1
cuauuguuuuaacaucuu

SEQ ID NO: 362221 - RNA, 20 nt, Human T-lymphotropic virus 1
cucacggcgcuccugcucuu

SEQ ID NO: 362222 - RNA, 16 nt, Human T-lymphotropic virus 1
cucauaccacucuaaa

SEQ ID NO: 362223 - RNA, 17 nt, Human T-lymphotropic virus 1
cuccaccucgccuucca

SEQ ID NO: 362224 - RNA, 19 nt, Human T-lymphotropic virus 1
cuccagccccuacuggaaa

SEQ ID NO: 362225 - RNA, 18 nt, Human T-lymphotropic virus 1
cuccucauaccacucuaa

SEQ ID NO: 362226 - RNA, 21 nt, Human T-lymphotropic virus 1
cugcccagccaguuuguucau

SEQ ID NO: 362227 - RNA, 15 nt, Human T-lymphotropic virus 1
cugcuguacucucac

SEQ ID NO: 362228 - RNA, 17 nt, Human T-lymphotropic virus 1
cugucuaguauagccau

SEQ ID NO: 362229 - RNA, 18 nt, Human T-lymphotropic virus 1
cuguucgaaaugcagcug

SEQ ID NO: 362230 - RNA, 15 nt, Human T-lymphotropic virus 1
cuuccuaaccaagac

SEQ ID NO: 362231 - RNA, 22 nt, Human T-lymphotropic virus 1
cuuccuaaccaagacccaacau

SEQ ID NO: 362232 - RNA, 12 nt, Human T-lymphotropic virus 1
cuuccuuuucaa

SEQ ID NO: 362233 - RNA, 15 nt, Human T-lymphotropic virus 1
cuuucucccgcucuu

SEQ ID NO: 362234 - RNA, 15 nt, Human T-lymphotropic virus 1
gacaaccccucaccu

SEQ ID NO: 362235 - RNA, 15 nt, Human T-lymphotropic virus 1
gaccagccacccaaa

SEQ ID NO: 362236 - RNA, 16 nt, Human T-lymphotropic virus 1
gaccagccacccaaag

SEQ ID NO: 362237 - RNA, 14 nt, Human T-lymphotropic virus 1
gaccaugagcccca

SEQ ID NO: 362238 - RNA, 22 nt, Human T-lymphotropic virus 1
gacuuguccagccugccaacua

SEQ ID NO: 362239 - RNA, 23 nt, Human T-lymphotropic virus 1
gaggacagcucagcaccagcuca

SEQ ID NO: 362240 - RNA, 14 nt, Human T-lymphotropic virus 1
gaggccgccaucca

SEQ ID NO: 362241 - RNA, 13 nt, Human T-lymphotropic virus 1
gauaccaaaaaca

SEQ ID NO: 362242 - RNA, 13 nt, Human T-lymphotropic virus 1
gccaaacccaaga

SEQ ID NO: 362243 - RNA, 17 nt, Human T-lymphotropic virus 1
gccaacuacacuagccc

SEQ ID NO: 362244 - RNA, 15 nt, Human T-lymphotropic virus 1
gccacccugcccuaa

SEQ ID NO: 362245 - RNA, 20 nt, Human T-lymphotropic virus 1
gcccagauugacacccagac

SEQ ID NO: 362246 - RNA, 17 nt, Human T-lymphotropic virus 1
gccccuugucuccacuu

SEQ ID NO: 362247 - RNA, 20 nt, Human T-lymphotropic virus 1
gccuauuguuuuaacaucuu

SEQ ID NO: 362248 - RNA, 18 nt, Human T-lymphotropic virus 1
gccuuacaacaaugccaa

SEQ ID NO: 362249 - RNA, 20 nt, Human T-lymphotropic virus 1
gccuuaccugaggccgccau

SEQ ID NO: 362250 - RNA, 21 nt, Human T-lymphotropic virus 1
gcggaccugcaacuacucuca

SEQ ID NO: 362251 - RNA, 18 nt, Human T-lymphotropic virus 1
gcuauuauucagccucuu

SEQ ID NO: 362252 - RNA, 24 nt, Human T-lymphotropic virus 1
gcuauuauucagccucuuauucag

SEQ ID NO: 362253 - RNA, 15 nt, Human T-lymphotropic virus 1
gcucuuccugcuuuc

SEQ ID NO: 362254 - RNA, 14 nt, Human T-lymphotropic virus 1
gcuggcccuuucag

SEQ ID NO: 362255 - RNA, 18 nt, Human T-lymphotropic virus 1
gcuuccucuucuccucag

SEQ ID NO: 362256 - RNA, 15 nt, Human T-lymphotropic virus 1
gcuuucacuguccca

SEQ ID NO: 362257 - RNA, 14 nt, Human T-lymphotropic virus 1
gcuuuuccuccucu

SEQ ID NO: 362258 - RNA, 20 nt, Human T-lymphotropic virus 1
ggcagggggccaaacccaag

SEQ ID NO: 362259 - RNA, 22 nt, Human T-lymphotropic virus 1
ggcagggggccaaacccaagau

SEQ ID NO: 362260 - RNA, 20 nt, Human T-lymphotropic virus 1
gggcagggggccaaacccaa

SEQ ID NO: 362261 - RNA, 15 nt, Human T-lymphotropic virus 1
gggccaaacccaaga

SEQ ID NO: 362262 - RNA, 23 nt, Human T-lymphotropic virus 1
gggggcuuagagccucucaguga

SEQ ID NO: 362263 - RNA, 20 nt, Human T-lymphotropic virus 1
guaauacuccccucaaaaac

SEQ ID NO: 362264 - RNA, 20 nt, Human T-lymphotropic virus 1
uaaaagcguggggacaguuc

SEQ ID NO: 362265 - RNA, 21 nt, Human T-lymphotropic virus 1
uaaaagcguggggacaguuca

SEQ ID NO: 362266 - RNA, 13 nt, Human T-lymphotropic virus 1
uaaagacaaauca

SEQ ID NO: 362267 - RNA, 21 nt, Human T-lymphotropic virus 1
uaaagacgccuuuuuccaaau

SEQ ID NO: 362268 - RNA, 23 nt, Human T-lymphotropic virus 1
uaagcucagaccuccgggaagcc

SEQ ID NO: 362269 - RNA, 16 nt, Human T-lymphotropic virus 1
uacaaacuauagaccu

SEQ ID NO: 362270 - RNA, 18 nt, Human T-lymphotropic virus 1
uacagccacccugcccua

SEQ ID NO: 362271 - RNA, 19 nt, Human T-lymphotropic virus 1
uacagccacccugcccuaa

SEQ ID NO: 362272 - RNA, 19 nt, Human T-lymphotropic virus 1
uaccacucuaaacccugca

SEQ ID NO: 362273 - RNA, 18 nt, Human T-lymphotropic virus 1
uacuccagcuaccaugcc

SEQ ID NO: 362274 - RNA, 16 nt, Human T-lymphotropic virus 1
uagagccucucaguga

SEQ ID NO: 362275 - RNA, 16 nt, Human T-lymphotropic virus 1
uaggcccugacguguc

SEQ ID NO: 362276 - RNA, 15 nt, Human T-lymphotropic virus 1
uaguauagccaucaa

SEQ ID NO: 362277 - RNA, 17 nt, Human T-lymphotropic virus 1
uauaucuauucccucau

SEQ ID NO: 362278 - RNA, 18 nt, Human T-lymphotropic virus 1
ucaagccguccucaggcg

SEQ ID NO: 362279 - RNA, 16 nt, Human T-lymphotropic virus 1
ucagacccuuguuccu

SEQ ID NO: 362280 - RNA, 19 nt, Human T-lymphotropic virus 1
ucagacccuuguuccuuaa

SEQ ID NO: 362281 - RNA, 17 nt, Human T-lymphotropic virus 1
ucagccccuugucucca

SEQ ID NO: 362282 - RNA, 12 nt, Human T-lymphotropic virus 1
ucauaagcucag

SEQ ID NO: 362283 - RNA, 21 nt, Human T-lymphotropic virus 1
ucaucuucccccgggcccccu

SEQ ID NO: 362284 - RNA, 20 nt, Human T-lymphotropic virus 1
ucauuggaucaaaaagccaa

SEQ ID NO: 362285 - RNA, 20 nt, Human T-lymphotropic virus 1
uccagccugccaacuacacu

SEQ ID NO: 362286 - RNA, 20 nt, Human T-lymphotropic virus 1
uccagcuaccaugccaccua

SEQ ID NO: 362287 - RNA, 21 nt, Human T-lymphotropic virus 1
ucccccaaugcacuauucuuc

SEQ ID NO: 362288 - RNA, 18 nt, Human T-lymphotropic virus 1
ucccccgggcccccugac

SEQ ID NO: 362289 - RNA, 23 nt, Human T-lymphotropic virus 1
uccuaaccaagacccaacaucua

SEQ ID NO: 362290 - RNA, 17 nt, Human T-lymphotropic virus 1
uccucauaccacucuaa

SEQ ID NO: 362291 - RNA, 15 nt, Human T-lymphotropic virus 1
uccuccucuuucucc

SEQ ID NO: 362292 - RNA, 22 nt, Human T-lymphotropic virus 1
uccugcgccgugccuucuccuc

SEQ ID NO: 362293 - RNA, 17 nt, Human T-lymphotropic virus 1
uggcuucccuaaucucc

SEQ ID NO: 362294 - RNA, 21 nt, Human T-lymphotropic virus 1
uuacaaacuauagaccuuaaa

SEQ ID NO: 362295 - RNA, 17 nt, Human T-lymphotropic virus 1
uuccuuuucaaauacuc

SEQ ID NO: 362296 - RNA, 23 nt, Human T-lymphotropic virus 1
uugccuaguugauaccaaaaaca

SEQ ID NO: 362297 - RNA, 22 nt, Human T-lymphotropic virus 1
uuuccaaaucccccuaccuaaa

SEQ ID NO: 362298 - RNA, 23 nt, Human T-lymphotropic virus 1
uuuucgcuuccucuucuccucag

SEQ ID NO: 362299 - RNA, 13 nt, Human T-lymphotropic virus 1
aaaaacauuuccg

SEQ ID NO: 362300 - RNA, 21 nt, Human T-lymphotropic virus 1
aaagacaaaucauaagcucag

SEQ ID NO: 362301 - RNA, 21 nt, Human T-lymphotropic virus 1
aaagacuaucgaagcucuacu

SEQ ID NO: 362302 - RNA, 19 nt, Human T-lymphotropic virus 1
aaagcguggggacaguuca

SEQ ID NO: 362303 - RNA, 22 nt, Human T-lymphotropic virus 1
aaagcguggggacaguucagga

SEQ ID NO: 362304 - RNA, 13 nt, Human T-lymphotropic virus 1
aacaucuugccua

SEQ ID NO: 362305 - RNA, 16 nt, Human T-lymphotropic virus 1
aacaucuugccuaguu

SEQ ID NO: 362306 - RNA, 22 nt, Human T-lymphotropic virus 1
aaccuccuccguucagccucca

SEQ ID NO: 362307 - RNA, 20 nt, Human T-lymphotropic virus 1
aagaucacuuuaagcucacc

SEQ ID NO: 362308 - RNA, 13 nt, Human T-lymphotropic virus 1
aagcucaccuccc

SEQ ID NO: 362309 - RNA, 21 nt, Human T-lymphotropic virus 1
aaggguuuaaaaauaguccca

SEQ ID NO: 362310 - RNA, 13 nt, Human T-lymphotropic virus 1
aaguaauacuccc

SEQ ID NO: 362311 - RNA, 20 nt, Human T-lymphotropic virus 1
aaguaauacuccccucaaaa

SEQ ID NO: 362312 - RNA, 20 nt, Human T-lymphotropic virus 1
aaguccuuccuaaccaagac

SEQ ID NO: 362313 - RNA, 19 nt, Human T-lymphotropic virus 1
aauaauuaaccucucccau

SEQ ID NO: 362314 - RNA, 22 nt, Human T-lymphotropic virus 1
aaucuaguaaguuacuccagcu

SEQ ID NO: 362315 - RNA, 16 nt, Human T-lymphotropic virus 1
aaugcacuauucuuca

SEQ ID NO: 362316 - RNA, 20 nt, Human T-lymphotropic virus 1
aaugccaaggcguccuguac

SEQ ID NO: 362317 - RNA, 18 nt, Human T-lymphotropic virus 1
aauggcggaggcuauuau

SEQ ID NO: 362318 - RNA, 17 nt, Human T-lymphotropic virus 1
acaauggcuucccuaau

SEQ ID NO: 362319 - RNA, 14 nt, Human T-lymphotropic virus 1
acagccacccugcc

SEQ ID NO: 362320 - RNA, 17 nt, Human T-lymphotropic virus 1
acagccacccugcccua

SEQ ID NO: 362321 - RNA, 20 nt, Human T-lymphotropic virus 1
acagccacccugcccuaauc

SEQ ID NO: 362322 - RNA, 19 nt, Human T-lymphotropic virus 1
acaggagccgucuccagcc

SEQ ID NO: 362323 - RNA, 13 nt, Human T-lymphotropic virus 1
acaucuugccuag

SEQ ID NO: 362324 - RNA, 16 nt, Human T-lymphotropic virus 1
acaugacaguccuucc

SEQ ID NO: 362325 - RNA, 23 nt, Human T-lymphotropic virus 1
acauggaugacauucuccuggca

SEQ ID NO: 362326 - RNA, 21 nt, Human T-lymphotropic virus 1
acauuacagcaaguccuuccu

SEQ ID NO: 362327 - RNA, 12 nt, Human T-lymphotropic virus 1
acccaacaucua

SEQ ID NO: 362328 - RNA, 13 nt, Human T-lymphotropic virus 1
acccccaacuccu

SEQ ID NO: 362329 - RNA, 18 nt, Human T-lymphotropic virus 1
accucaaaaaacuuuuca

SEQ ID NO: 362330 - RNA, 18 nt, Human T-lymphotropic virus 1
acuccaccucgccuucca

SEQ ID NO: 362331 - RNA, 12 nt, Human T-lymphotropic virus 1
acucucacaguu

SEQ ID NO: 362332 - RNA, 20 nt, Human T-lymphotropic virus 1
acuuacaaacuauagaccuu

SEQ ID NO: 362333 - RNA, 19 nt, Human T-lymphotropic virus 1
agacgccuuuuuccaaauc

SEQ ID NO: 362334 - RNA, 19 nt, Human T-lymphotropic virus 1
agaucucucaucaucuucc

SEQ ID NO: 362335 - RNA, 15 nt, Human T-lymphotropic virus 1
agauugacacccaga

SEQ ID NO: 362336 - RNA, 14 nt, Human T-lymphotropic virus 1
agcaccagcucagg

SEQ ID NO: 362337 - RNA, 17 nt, Human T-lymphotropic virus 1
agcagaucaggcccuac

SEQ ID NO: 362338 - RNA, 17 nt, Human T-lymphotropic virus 1
agcccagauugacaccc

SEQ ID NO: 362339 - RNA, 22 nt, Human T-lymphotropic virus 1
agccccagcugcuguacucuca

SEQ ID NO: 362340 - RNA, 17 nt, Human T-lymphotropic virus 1
agccguccucaggcguu

SEQ ID NO: 362341 - RNA, 14 nt, Human T-lymphotropic virus 1
agccugccaacuac

SEQ ID NO: 362342 - RNA, 18 nt, Human T-lymphotropic virus 1
agcuaccaugccaccuau

SEQ ID NO: 362343 - RNA, 13 nt, Human T-lymphotropic virus 1
aggacagcucagc

SEQ ID NO: 362344 - RNA, 22 nt, Human T-lymphotropic virus 1
aggacagcucagcaccagcuca

SEQ ID NO: 362345 - RNA, 21 nt, Human T-lymphotropic virus 1
aggagggggcucgcaucucuc

SEQ ID NO: 362346 - RNA, 14 nt, Human T-lymphotropic virus 1
aggccgccauccac

SEQ ID NO: 362347 - RNA, 13 nt, Human T-lymphotropic virus 1
aguacuaccccaa

SEQ ID NO: 362348 - RNA, 14 nt, Human T-lymphotropic virus 1
aguuccagcccuac

SEQ ID NO: 362349 - RNA, 15 nt, Human T-lymphotropic virus 1
uaccuaaacaguucc

SEQ ID NO: 362350 - RNA, 20 nt, Human T-lymphotropic virus 1
uacuagauacaggagcagac

SEQ ID NO: 362351 - RNA, 22 nt, Human T-lymphotropic virus 1
uauugcaaccacaucgccucca

SEQ ID NO: 362352 - RNA, 18 nt, Human T-lymphotropic virus 1
ucagcaccagcucaggcu

SEQ ID NO: 362353 - RNA, 17 nt, Human T-lymphotropic virus 1
ucagcggccuucuccuc

SEQ ID NO: 362354 - RNA, 23 nt, Human T-lymphotropic virus 1
ucaggcccuacagccacccugcc

SEQ ID NO: 362355 - RNA, 13 nt, Human T-lymphotropic virus 1
uccaaggacucca

SEQ ID NO: 362356 - RNA, 18 nt, Human T-lymphotropic virus 1
uccucauaccacucuaaa

SEQ ID NO: 362357 - RNA, 13 nt, Human T-lymphotropic virus 1
uccugcuuucucc

SEQ ID NO: 362358 - RNA, 19 nt, Human T-lymphotropic virus 1
uccuuaaaaugcccauacc

SEQ ID NO: 362359 - RNA, 22 nt, Human T-lymphotropic virus 1
uccuucuccugcagcaaccucc

SEQ ID NO: 362360 - RNA, 14 nt, Human T-lymphotropic virus 1
ucgaaaugcagcug

SEQ ID NO: 362361 - RNA, 16 nt, Human T-lymphotropic virus 1
ucuaguauagccauca

SEQ ID NO: 362362 - RNA, 22 nt, Human T-lymphotropic virus 1
ucuugccuaguugauaccaaaa

SEQ ID NO: 362363 - RNA, 23 nt, Human T-lymphotropic virus 1
ugacaaugaccaugagccccaaa

SEQ ID NO: 362364 - RNA, 17 nt, Human T-lymphotropic virus 1
ugacauucuccuggcaa

SEQ ID NO: 362365 - RNA, 20 nt, Human T-lymphotropic virus 1
ugagaaggucagggcccaga

SEQ ID NO: 362366 - RNA, 19 nt, Human T-lymphotropic virus 1
ugcaaccacaucgccucca

SEQ ID NO: 362367 - RNA, 15 nt, Human T-lymphotropic virus 1
ugcagcaaccuccuc

SEQ ID NO: 362368 - RNA, 19 nt, Human T-lymphotropic virus 1
ugcagcuggcccauauccu

SEQ ID NO: 362369 - RNA, 16 nt, Human T-lymphotropic virus 1
ugcccuaaucuaguaa

SEQ ID NO: 362370 - RNA, 18 nt, Human T-lymphotropic virus 1
ugccuaguugauaccaaa

SEQ ID NO: 362371 - RNA, 14 nt, Human T-lymphotropic virus 1
ugcuuucuccgggc

SEQ ID NO: 362372 - RNA, 16 nt, Human T-lymphotropic virus 1
uggagaguacuacccc

SEQ ID NO: 362373 - RNA, 16 nt, Human T-lymphotropic virus 1
uggggacaguucagga

SEQ ID NO: 362374 - RNA, 21 nt, Human T-lymphotropic virus 1
uguuccuuaaaaugcccauac

SEQ ID NO: 362375 - RNA, 18 nt, Human T-lymphotropic virus 1
uuaaaaugcccauaccua

SEQ ID NO: 362376 - RNA, 23 nt, Human T-lymphotropic virus 1
uuaaccucucccaucaaauccuc

SEQ ID NO: 362377 - RNA, 14 nt, Human T-lymphotropic virus 1
uuauugcaaccaca

SEQ ID NO: 362378 - RNA, 15 nt, Human T-lymphotropic virus 1
uuccgugaaacagaa

SEQ ID NO: 362379 - RNA, 19 nt, Human T-lymphotropic virus 1
uucuccugcagcaaccucc

SEQ ID NO: 362380 - RNA, 13 nt, Human T-lymphotropic virus 1
uugcgcucacggc

SEQ ID NO: 362381 - RNA, 23 nt, Human T-lymphotropic virus 1
uuuuucuuuccuagcacuaugcu

SEQ ID NO: 362382 - RNA, 22 nt, Human T-lymphotropic virus 1
ucucagaggccacaauggcuuc

SEQ ID NO: 362383 - RNA, 14 nt, Human T-lymphotropic virus 1
ucuuuccuagcacu

SEQ ID NO: 362384 - RNA, 13 nt, Human T-lymphotropic virus 1
ugacaguccuucc

SEQ ID NO: 362385 - RNA, 12 nt, Human T-lymphotropic virus 1
ugauaccaaaaa

SEQ ID NO: 362386 - RNA, 19 nt, Human T-lymphotropic virus 1
ugccaacuacacuagccca

SEQ ID NO: 362387 - RNA, 19 nt, Human T-lymphotropic virus 1
uggagucuccucauaccac

SEQ ID NO: 362388 - RNA, 21 nt, Human T-lymphotropic virus 1
auaauuaaccucucccaucaa

SEQ ID NO: 362389 - RNA, 19 nt, Human T-lymphotropic virus 1
auacaggagcagacaugac

SEQ ID NO: 362390 - RNA, 19 nt, Human T-lymphotropic virus 1
auacaggagccgucuccag

SEQ ID NO: 362391 - RNA, 18 nt, Human T-lymphotropic virus 1
auacuccccucaaaaaca

SEQ ID NO: 362392 - RNA, 20 nt, Human T-lymphotropic virus 1
aucaacccccaacuccugca

SEQ ID NO: 362393 - RNA, 14 nt, Human T-lymphotropic virus 1
augcagcuggccca

SEQ ID NO: 362394 - RNA, 17 nt, Human T-lymphotropic virus 1
augccaccuauucccua

SEQ ID NO: 362395 - RNA, 20 nt, Human T-lymphotropic virus 1
augccaccuauucccuauau

SEQ ID NO: 362396 - RNA, 20 nt, Human T-lymphotropic virus 1
augccuuacaacaaugccaa

SEQ ID NO: 362397 - RNA, 20 nt, Human T-lymphotropic virus 1
auggcuucccuaaucuccca

SEQ ID NO: 362398 - RNA, 15 nt, Human T-lymphotropic virus 1
auuauugcaaccaca

SEQ ID NO: 362399 - RNA, 18 nt, Human T-lymphotropic virus 1
auucccuauaucuauucc

SEQ ID NO: 362400 - RNA, 14 nt, Human T-lymphotropic virus 1
auucggcaagccuu

SEQ ID NO: 362401 - RNA, 13 nt, Human T-lymphotropic virus 1
caacaaugccaag

SEQ ID NO: 362402 - RNA, 22 nt, Human T-lymphotropic virus 1
caaccuccuccguucagccucc

SEQ ID NO: 362403 - RNA, 13 nt, Human T-lymphotropic virus 1
caauccugcccag

SEQ ID NO: 362404 - RNA, 23 nt, Human T-lymphotropic virus 1
cacacaauuauugcaaccacauc

SEQ ID NO: 362405 - RNA, 14 nt, Human T-lymphotropic virus 1
caccucgccuucca

SEQ ID NO: 362406 - RNA, 13 nt, Human T-lymphotropic virus 1
cacuuacaaacua

SEQ ID NO: 362407 - RNA, 21 nt, Human T-lymphotropic virus 1
cagaucaggcccuacagccac

SEQ ID NO: 362408 - RNA, 13 nt, Human T-lymphotropic virus 1
cagccacccaaag

SEQ ID NO: 362409 - RNA, 14 nt, Human T-lymphotropic virus 1
cagccccuacugga

SEQ ID NO: 362410 - RNA, 14 nt, Human T-lymphotropic virus 1
cagggcccagaaua

SEQ ID NO: 362411 - RNA, 17 nt, Human T-lymphotropic virus 1
caguucugcccccucau

SEQ ID NO: 362412 - RNA, 12 nt, Human T-lymphotropic virus 1
cauaagcucaga

SEQ ID NO: 362413 - RNA, 21 nt, Human T-lymphotropic virus 1
caucaacccccaacuccugca

SEQ ID NO: 362414 - RNA, 20 nt, Human T-lymphotropic virus 1
cauggacccucgaccugcug

SEQ ID NO: 362415 - RNA, 15 nt, Human T-lymphotropic virus 1
ccaacuccugcauuu

SEQ ID NO: 362416 - RNA, 16 nt, Human T-lymphotropic virus 1
ccaacuccugcauuuu

SEQ ID NO: 362417 - RNA, 22 nt, Human T-lymphotropic virus 1
ccaccgggaaccacccauuucc

SEQ ID NO: 362418 - RNA, 18 nt, Human T-lymphotropic virus 1
ccagcugcuguacucuca

SEQ ID NO: 362419 - RNA, 23 nt, Human T-lymphotropic virus 1
ccaugcggaccugcaacuacucu

SEQ ID NO: 362420 - RNA, 15 nt, Human T-lymphotropic virus 1
cccaacuccugcauu

SEQ ID NO: 362421 - RNA, 12 nt, Human T-lymphotropic virus 1
cccacagcagug

SEQ ID NO: 362422 - RNA, 23 nt, Human T-lymphotropic virus 1
cccaugcggaccugcaacuacuc

SEQ ID NO: 362423 - RNA, 13 nt, Human T-lymphotropic virus 1
ccccuaaagacaa

SEQ ID NO: 362424 - RNA, 12 nt, Human T-lymphotropic virus 1
ccccuaccuaaa

SEQ ID NO: 362425 - RNA, 22 nt, Human T-lymphotropic virus 1
ccccucccaugcggaccugcaa

SEQ ID NO: 362426 - RNA, 20 nt, Human T-lymphotropic virus 1
cccuguucgaaaugcagcug

SEQ ID NO: 362427 - RNA, 22 nt, Human T-lymphotropic virus 1
cccuuguuccuuaaaaugccca

SEQ ID NO: 362428 - RNA, 23 nt, Human T-lymphotropic virus 1
ccuauuguuuuaacaucuugccu

SEQ ID NO: 362429 - RNA, 14 nt, Human T-lymphotropic virus 1
ccugccaacuacac

SEQ ID NO: 362430 - RNA, 15 nt, Human T-lymphotropic virus 1
ccugcccagccaguu

SEQ ID NO: 362431 - RNA, 22 nt, Human T-lymphotropic virus 1
ccuucccccaaugcacuauucu

SEQ ID NO: 362432 - RNA, 17 nt, Human T-lymphotropic virus 1
ccuucuccucuuccuuc

SEQ ID NO: 362433 - RNA, 14 nt, Human T-lymphotropic virus 1
cuaaucucccaugg

SEQ ID NO: 362434 - RNA, 15 nt, Human T-lymphotropic virus 1
cuacacuagcccacu

SEQ ID NO: 362435 - RNA, 16 nt, Human T-lymphotropic virus 1
cuaccaugccaccuau

SEQ ID NO: 362436 - RNA, 17 nt, Human T-lymphotropic virus 1
cuacuuugcuuucacug

SEQ ID NO: 362437 - RNA, 15 nt, Human T-lymphotropic virus 1
cuaguugauaccaaa

SEQ ID NO: 362438 - RNA, 23 nt, Human T-lymphotropic virus 1
cuaugcuguuucgccuucucagc

SEQ ID NO: 362439 - RNA, 19 nt, Human T-lymphotropic virus 1
cucagaggccacaauggcu

SEQ ID NO: 362440 - RNA, 20 nt, Human T-lymphotropic virus 1
cucagcaccagcucaggcua

SEQ ID NO: 362441 - RNA, 19 nt, Human T-lymphotropic virus 1
cucagugaaaaacauuucc

SEQ ID NO: 362442 - RNA, 23 nt, Human T-lymphotropic virus 1
cucauaccacucuaaacccugca

SEQ ID NO: 362443 - RNA, 21 nt, Human T-lymphotropic virus 1
cucauuggaucaaaaagccaa

SEQ ID NO: 362444 - RNA, 22 nt, Human T-lymphotropic virus 1
cucccaugcggaccugcaacua

SEQ ID NO: 362445 - RNA, 17 nt, Human T-lymphotropic virus 1
cucccauggguugccug

SEQ ID NO: 362446 - RNA, 23 nt, Human T-lymphotropic virus 1
cucggugauuacagccccagcug

SEQ ID NO: 362447 - RNA, 13 nt, Human T-lymphotropic virus 1
cugccccuauaca

SEQ ID NO: 362448 - RNA, 17 nt, Human T-lymphotropic virus 1
cugcccuaaucuaguaa

SEQ ID NO: 362449 - RNA, 18 nt, Human T-lymphotropic virus 1
cugcucuuccugcuuucu

SEQ ID NO: 362450 - RNA, 16 nt, Human T-lymphotropic virus 1
cugucccacagcagug

SEQ ID NO: 362451 - RNA, 22 nt, Human T-lymphotropic virus 1
cugucccacagcaguguaacua

SEQ ID NO: 362452 - RNA, 17 nt, Human T-lymphotropic virus 1
cugugcuaauacgccuc

SEQ ID NO: 362453 - RNA, 15 nt, Human T-lymphotropic virus 1
cuucaguacauggau

SEQ ID NO: 362454 - RNA, 17 nt, Human T-lymphotropic virus 1
cuucccccaaugcacua

SEQ ID NO: 362455 - RNA, 14 nt, Human T-lymphotropic virus 1
cuuccuaaccaaga

SEQ ID NO: 362456 - RNA, 21 nt, Human T-lymphotropic virus 1
cuugccuaguugauaccaaaa

SEQ ID NO: 362457 - RNA, 14 nt, Human T-lymphotropic virus 1
cuuucacuguccca

SEQ ID NO: 362458 - RNA, 20 nt, Human T-lymphotropic virus 1
cuuuuccuccucuuucuccc

SEQ ID NO: 362459 - RNA, 22 nt, Human T-lymphotropic virus 1
gaaccacccauuuccuccccau

SEQ ID NO: 362460 - RNA, 19 nt, Human T-lymphotropic virus 1
gaccuccgggaagccaccg

SEQ ID NO: 362461 - RNA, 13 nt, Human T-lymphotropic virus 1
gaggacagcucag

SEQ ID NO: 362462 - RNA, 12 nt, Human T-lymphotropic virus 1
gauaccaaaaac

SEQ ID NO: 362463 - RNA, 15 nt, Human T-lymphotropic virus 1
gauugacacccagac

SEQ ID NO: 362464 - RNA, 22 nt, Human T-lymphotropic virus 1
gcaaccacaucgccuccagccu

SEQ ID NO: 362465 - RNA, 23 nt, Human T-lymphotropic virus 1
gcaagccuucccccaaugcacua

SEQ ID NO: 362466 - RNA, 20 nt, Human T-lymphotropic virus 1
gcaaguccuuccuaaccaag

SEQ ID NO: 362467 - RNA, 23 nt, Human T-lymphotropic virus 1
gccaaucauggaccugccccuau

SEQ ID NO: 362468 - RNA, 19 nt, Human T-lymphotropic virus 1
gccaccgggaaccacccau

SEQ ID NO: 362469 - RNA, 16 nt, Human T-lymphotropic virus 1
gccaccuauucccuau

SEQ ID NO: 362470 - RNA, 23 nt, Human T-lymphotropic virus 1
gcccagccaguuuguucauggac

SEQ ID NO: 362471 - RNA, 20 nt, Human T-lymphotropic virus 1
gccccagcugcuguacucuc

SEQ ID NO: 362472 - RNA, 15 nt, Human T-lymphotropic virus 1
gccuccccugccaau

SEQ ID NO: 362473 - RNA, 23 nt, Human T-lymphotropic virus 1
gccucucagugaaaaacauuucc

SEQ ID NO: 362474 - RNA, 16 nt, Human T-lymphotropic virus 1
gcgccgugccuucucc

SEQ ID NO: 362475 - RNA, 17 nt, Human T-lymphotropic virus 1
gcuuccucuucuccuca

SEQ ID NO: 362476 - RNA, 22 nt, Human T-lymphotropic virus 1
gcuuccugcgccgugccuucuc

SEQ ID NO: 362477 - RNA, 13 nt, Human T-lymphotropic virus 1
ggacuccaccucg

SEQ ID NO: 362478 - RNA, 23 nt, Human T-lymphotropic virus 1
gggcgaagucagcggccuucucc

SEQ ID NO: 362479 - RNA, 15 nt, Human T-lymphotropic virus 1
ggggacaguucagga

SEQ ID NO: 362480 - RNA, 18 nt, Human T-lymphotropic virus 1
ggggcuuagagccucuca

SEQ ID NO: 362481 - RNA, 16 nt, Human T-lymphotropic virus 1
ggugccaaucauggac

SEQ ID NO: 362482 - RNA, 21 nt, Human T-lymphotropic virus 1
gucuccagccccuacuggaaa

SEQ ID NO: 362483 - RNA, 22 nt, Human T-lymphotropic virus 1
uaaaagcguggggacaguucag

SEQ ID NO: 362484 - RNA, 16 nt, Human T-lymphotropic virus 1
uaaccucucccaucaa

SEQ ID NO: 362485 - RNA, 18 nt, Human T-lymphotropic virus 1
uaacuacggccccggcac

SEQ ID NO: 362486 - RNA, 18 nt, Human T-lymphotropic virus 1
uaagcucaccucccuucc

SEQ ID NO: 362487 - RNA, 13 nt, Human T-lymphotropic virus 1
uaaguuacuccag

SEQ ID NO: 362488 - RNA, 18 nt, Human T-lymphotropic virus 1
uacauggaugacauucuc

SEQ ID NO: 362489 - RNA, 16 nt, Human T-lymphotropic virus 2
caucucgauacuccca

SEQ ID NO: 362490 - RNA, 21 nt, Human T-lymphotropic virus 2
caucucgauacucccacucau

SEQ ID NO: 362491 - RNA, 21 nt, Human T-lymphotropic virus 2
cauugacccauccacaguccu

SEQ ID NO: 362492 - RNA, 20 nt, Human T-lymphotropic virus 2
ccauaaaauuugccuaguca

SEQ ID NO: 362493 - RNA, 21 nt, Human T-lymphotropic virus 2
ccauaaaauuugccuagucaa

SEQ ID NO: 362494 - RNA, 18 nt, Human T-lymphotropic virus 2
ccauugacccauccacag

SEQ ID NO: 362495 - RNA, 22 nt, Human T-lymphotropic virus 2
ccauugacccauccacaguccu

SEQ ID NO: 362496 - RNA, 21 nt, Human T-lymphotropic virus 2
ccccaaagcagggcagccauc

SEQ ID NO: 362497 - RNA, 23 nt, Human T-lymphotropic virus 2
ccccagacaauuaggagccuucc

SEQ ID NO: 362498 - RNA, 14 nt, Human T-lymphotropic virus 2
cccccuacacauau

SEQ ID NO: 362499 - RNA, 22 nt, Human T-lymphotropic virus 2
cccuucaggaaauccacauaac

SEQ ID NO: 362500 - RNA, 16 nt, Human T-lymphotropic virus 2
ccgugggaccgucucc

SEQ ID NO: 362501 - RNA, 14 nt, Human T-lymphotropic virus 2
ccuagucaaaauaa

SEQ ID NO: 362502 - RNA, 16 nt, Human T-lymphotropic virus 2
ccucacgcuccugcag

SEQ ID NO: 362503 - RNA, 16 nt, Human T-lymphotropic virus 2
ccugauccuaggcgcc

SEQ ID NO: 362504 - RNA, 17 nt, Human T-lymphotropic virus 2
cgacacccugauccuag

SEQ ID NO: 362505 - RNA, 13 nt, Human T-lymphotropic virus 2
cgccaacagucuc

SEQ ID NO: 362506 - RNA, 17 nt, Human T-lymphotropic virus 2
cgcucacauuccuccca

SEQ ID NO: 362507 - RNA, 16 nt, Human T-lymphotropic virus 2
cgcugcuccuccgcca

SEQ ID NO: 362508 - RNA, 15 nt, Human T-lymphotropic virus 2
cgugggaccgucucc

SEQ ID NO: 362509 - RNA, 21 nt, Human T-lymphotropic virus 2
cuaacccccgcucacauuccu

SEQ ID NO: 362510 - RNA, 23 nt, Human T-lymphotropic virus 2
cuaacccccgcucacauuccucc

SEQ ID NO: 362511 - RNA, 22 nt, Human T-lymphotropic virus 2
cuaggcgccagugggcaaacca

SEQ ID NO: 362512 - RNA, 23 nt, Human T-lymphotropic virus 2
cuauaccucccagacgaccccag

SEQ ID NO: 362513 - RNA, 16 nt, Human T-lymphotropic virus 2
cucacgcuccugcaga

SEQ ID NO: 362514 - RNA, 16 nt, Human T-lymphotropic virus 2
cuccccccuaggaaca

SEQ ID NO: 362515 - RNA, 17 nt, Human T-lymphotropic virus 2
cucccgcugcuccuccg

SEQ ID NO: 362516 - RNA, 20 nt, Human T-lymphotropic virus 2
cuccguuaugggacaaacac

SEQ ID NO: 362517 - RNA, 23 nt, Human T-lymphotropic virus 2
cucuaaaacgauuagaagaacuu

SEQ ID NO: 362518 - RNA, 13 nt, Human T-lymphotropic virus 2
cuuccucaccaag

SEQ ID NO: 362519 - RNA, 15 nt, Human T-lymphotropic virus 2
cuucuccccuaucac

SEQ ID NO: 362520 - RNA, 18 nt, Human T-lymphotropic virus 2
cuuuccccacccaugaca

SEQ ID NO: 362521 - RNA, 15 nt, Human T-lymphotropic virus 2
cuuuuuuuaggaacu

SEQ ID NO: 362522 - RNA, 16 nt, Human T-lymphotropic virus 2
gaacugcuccucccaa

SEQ ID NO: 362523 - RNA, 23 nt, Human T-lymphotropic virus 2
gacauggccacuuauaccccaug

SEQ ID NO: 362524 - RNA, 20 nt, Human T-lymphotropic virus 2
gacccauccacaguccucua

SEQ ID NO: 362525 - RNA, 16 nt, Human T-lymphotropic virus 2
gaccuacccaccacaa

SEQ ID NO: 362526 - RNA, 23 nt, Human T-lymphotropic virus 2
gaccuucaaugacggcucaccaa

SEQ ID NO: 362527 - RNA, 12 nt, Human T-lymphotropic virus 2
gacgaccccagc

SEQ ID NO: 362528 - RNA, 13 nt, Human T-lymphotropic virus 2
gacggcucaccaa

SEQ ID NO: 362529 - RNA, 16 nt, Human T-lymphotropic virus 2
gaggacgaccuaccca

SEQ ID NO: 362530 - RNA, 17 nt, Human T-lymphotropic virus 2
gaggacgaccuacccac

SEQ ID NO: 362531 - RNA, 14 nt, Human T-lymphotropic virus 2
gagucaucgaccca

SEQ ID NO: 362532 - RNA, 16 nt, Human T-lymphotropic virus 2
gauuacccccugccca

SEQ ID NO: 362533 - RNA, 15 nt, Human T-lymphotropic virus 2
gcaacagcaaccaau

SEQ ID NO: 362534 - RNA, 16 nt, Human T-lymphotropic virus 2
gcaacagcaaccaauu

SEQ ID NO: 362535 - RNA, 13 nt, Human T-lymphotropic virus 2
gcagggcagccau

SEQ ID NO: 362536 - RNA, 19 nt, Human T-lymphotropic virus 2
gccacccagggcgagucau

SEQ ID NO: 362537 - RNA, 15 nt, Human T-lymphotropic virus 2
gcccuacaacaaugc

SEQ ID NO: 362538 - RNA, 14 nt, Human T-lymphotropic virus 2
gccuuccucaccaa

SEQ ID NO: 362539 - RNA, 21 nt, Human T-lymphotropic virus 2
gcgccagugggcaaaccaaca

SEQ ID NO: 362540 - RNA, 19 nt, Human T-lymphotropic virus 2
gcuuuccccacccaugaca

SEQ ID NO: 362541 - RNA, 20 nt, Human T-lymphotropic virus 2
ggaaauccacauaacccuga

SEQ ID NO: 362542 - RNA, 15 nt, Human T-lymphotropic virus 2
ggaacagcucuccag

SEQ ID NO: 362543 - RNA, 11 nt, Human T-lymphotropic virus 2
ggaccgucucc

SEQ ID NO: 362544 - RNA, 17 nt, Human T-lymphotropic virus 2
ggauccauccucuccaa

SEQ ID NO: 362545 - RNA, 21 nt, Human T-lymphotropic virus 2
ggaucuccguuaugggacaaa

SEQ ID NO: 362546 - RNA, 13 nt, Human T-lymphotropic virus 2
guaaaggcucuga

SEQ ID NO: 362547 - RNA, 16 nt, Human T-lymphotropic virus 2
guaagucuccucucag

SEQ ID NO: 362548 - RNA, 15 nt, Human T-lymphotropic virus 2
gucacggagacucac

SEQ ID NO: 362549 - RNA, 20 nt, Human T-lymphotropic virus 2
gucucacacaaacaauccca

SEQ ID NO: 362550 - RNA, 13 nt, Human T-lymphotropic virus 2
guuauaccccaga

SEQ ID NO: 362551 - RNA, 19 nt, Human T-lymphotropic virus 2
uaaaagcgcaaggacaguu

SEQ ID NO: 362552 - RNA, 13 nt, Human T-lymphotropic virus 2
uaacaaccccagg

SEQ ID NO: 362553 - RNA, 16 nt, Human T-lymphotropic virus 2
uaccagcuuuccccac

SEQ ID NO: 362554 - RNA, 17 nt, Human T-lymphotropic virus 2
uaccauugacccaucca

SEQ ID NO: 362555 - RNA, 11 nt, Human T-lymphotropic virus 2
uacccaccaca

SEQ ID NO: 362556 - RNA, 20 nt, Human T-lymphotropic virus 2
uaccucccagacgaccccag

SEQ ID NO: 362557 - RNA, 16 nt, Human T-lymphotropic virus 2
uacgguuauaccccag

SEQ ID NO: 362558 - RNA, 20 nt, Human T-lymphotropic virus 2
uacgguuauaccccagacac

SEQ ID NO: 362559 - RNA, 17 nt, Human T-lymphotropic virus 2
uauacaaaauguuccua

SEQ ID NO: 362560 - RNA, 15 nt, Human T-lymphotropic virus 2
uauaccccaugucau

SEQ ID NO: 362561 - RNA, 19 nt, Human T-lymphotropic virus 2
uaucacuccaucuuaacaa

SEQ ID NO: 362562 - RNA, 19 nt, Human T-lymphotropic virus 2
uaugggacaaacaccucag

SEQ ID NO: 362563 - RNA, 12 nt, Human T-lymphotropic virus 2
ucaaacuccucc

SEQ ID NO: 362564 - RNA, 17 nt, Human T-lymphotropic virus 2
ucacaaaacccaucaaa

SEQ ID NO: 362565 - RNA, 17 nt, Human T-lymphotropic virus 2
ucacauuccucccauag

SEQ ID NO: 362566 - RNA, 14 nt, Human T-lymphotropic virus 2
ucacuccaucuuaa

SEQ ID NO: 362567 - RNA, 23 nt, Human T-lymphotropic virus 2
ucauauucugccaccccagacaa

SEQ ID NO: 362568 - RNA, 18 nt, Human T-lymphotropic virus 2
uccaaaccccccuacaca

SEQ ID NO: 362569 - RNA, 18 nt, Human T-lymphotropic virus 2
uccaucuuaacaacccca

SEQ ID NO: 362570 - RNA, 22 nt, Human T-lymphotropic virus 2
ucccaagguaagucuccucuca

SEQ ID NO: 362571 - RNA, 17 nt, Human T-lymphotropic virus 2
uccccuagcgcugaaaa

SEQ ID NO: 362572 - RNA, 17 nt, Human T-lymphotropic virus 2
ucccgcaggcgcuccuu

SEQ ID NO: 362573 - RNA, 12 nt, Human T-lymphotropic virus 2
ucccgcuccuca

SEQ ID NO: 362574 - RNA, 16 nt, Human T-lymphotropic virus 2
ucccuguauccagacu

SEQ ID NO: 362575 - RNA, 17 nt, Human T-lymphotropic virus 2
uccggcccuuaccccaa

SEQ ID NO: 362576 - RNA, 16 nt, Human T-lymphotropic virus 2
uccgugggaccgucuc

SEQ ID NO: 362577 - RNA, 18 nt, Human T-lymphotropic virus 2
ucgauacucccacucauc

SEQ ID NO: 362578 - RNA, 19 nt, Human T-lymphotropic virus 2
ucuauaccucccagacgac

SEQ ID NO: 362579 - RNA, 14 nt, Human T-lymphotropic virus 2
ucucgauacuccca

SEQ ID NO: 362580 - RNA, 17 nt, Human T-lymphotropic virus 2
ucugcagcaaauccccu

SEQ ID NO: 362581 - RNA, 14 nt, Human T-lymphotropic virus 2
ucuuagacacccac

SEQ ID NO: 362582 - RNA, 18 nt, Human T-lymphotropic virus 2
ugaaaaacaaggcucuga

SEQ ID NO: 362583 - RNA, 20 nt, Human T-lymphotropic virus 2
ugccucaaauaguuccucua

SEQ ID NO: 362584 - RNA, 18 nt, Human T-lymphotropic virus 2
uggccacuuauaccccau

SEQ ID NO: 362585 - RNA, 17 nt, Human T-lymphotropic virus 2
uuaggagccuuccucac

SEQ ID NO: 362586 - RNA, 20 nt, Human T-lymphotropic virus 2
uuaggagccuuccucaccaa

SEQ ID NO: 362587 - RNA, 21 nt, Human T-lymphotropic virus 2
uuauaccccagacacucgugc

SEQ ID NO: 362588 - RNA, 19 nt, Human T-lymphotropic virus 2
uucaaugacggcucaccaa

SEQ ID NO: 362589 - RNA, 15 nt, Human T-lymphotropic virus 2
uucaggaaauccaca

SEQ ID NO: 362590 - RNA, 15 nt, Human T-lymphotropic virus 2
cuagcuucugcagca

SEQ ID NO: 362591 - RNA, 20 nt, Human T-lymphotropic virus 2
cuccaucuuaacaaccccag

SEQ ID NO: 362592 - RNA, 15 nt, Human T-lymphotropic virus 2
cucccgcuccucacg

SEQ ID NO: 362593 - RNA, 19 nt, Human T-lymphotropic virus 2
cucccuauuaaucuucgaa

SEQ ID NO: 362594 - RNA, 23 nt, Human T-lymphotropic virus 2
cuccguuaugggacaaacaccuc

SEQ ID NO: 362595 - RNA, 20 nt, Human T-lymphotropic virus 2
cugaaaaacaaggcucugac

SEQ ID NO: 362596 - RNA, 18 nt, Human T-lymphotropic virus 2
cugaacugcuccucccaa

SEQ ID NO: 362597 - RNA, 16 nt, Human T-lymphotropic virus 2
cugaauaauugccuca

SEQ ID NO: 362598 - RNA, 16 nt, Human T-lymphotropic virus 2
cugcggcagcaacagc

SEQ ID NO: 362599 - RNA, 21 nt, Human T-lymphotropic virus 2
cugcuccuccgccaacagucu

SEQ ID NO: 362600 - RNA, 16 nt, Human T-lymphotropic virus 2
cuuauaccccauguca

SEQ ID NO: 362601 - RNA, 23 nt, Human T-lymphotropic virus 2
cuucaaugacggcucaccaauga

SEQ ID NO: 362602 - RNA, 23 nt, Human T-lymphotropic virus 2
cuucccucucccggcgcuuuuga

SEQ ID NO: 362603 - RNA, 11 nt, Human T-lymphotropic virus 2
gaaaccaaagc

SEQ ID NO: 362604 - RNA, 16 nt, Human T-lymphotropic virus 2
gacacccacaacaaau

SEQ ID NO: 362605 - RNA, 16 nt, Human T-lymphotropic virus 2
gacaucucgauacucc

SEQ ID NO: 362606 - RNA, 21 nt, Human T-lymphotropic virus 2
gaccgucucacacaaacaauc

SEQ ID NO: 362607 - RNA, 17 nt, Human T-lymphotropic virus 2
gaccucacccuuaccca

SEQ ID NO: 362608 - RNA, 16 nt, Human T-lymphotropic virus 2
gacgcccuacaacaau

SEQ ID NO: 362609 - RNA, 24 nt, Human T-lymphotropic virus 2
gaggacgaccuacccaccacaaug

SEQ ID NO: 362610 - RNA, 22 nt, Human T-lymphotropic virus 2
gauuagaagaacuucuauacaa

SEQ ID NO: 362611 - RNA, 16 nt, Human T-lymphotropic virus 2
gccacuuauaccccau

SEQ ID NO: 362612 - RNA, 13 nt, Human T-lymphotropic virus 2
gccagugggcaaa

SEQ ID NO: 362613 - RNA, 13 nt, Human T-lymphotropic virus 2
gcccuuaccccaa

SEQ ID NO: 362614 - RNA, 19 nt, Human T-lymphotropic virus 2
gccucaaauaguuccucua

SEQ ID NO: 362615 - RNA, 18 nt, Human T-lymphotropic virus 2
gccucggcaccuccugaa

SEQ ID NO: 362616 - RNA, 22 nt, Human T-lymphotropic virus 2
gcgccagugggcaaaccaacac

SEQ ID NO: 362617 - RNA, 14 nt, Human T-lymphotropic virus 2
gcucccgcuccuca

SEQ ID NO: 362618 - RNA, 18 nt, Human T-lymphotropic virus 2
gcucuccagaaaaaaaua

SEQ ID NO: 362619 - RNA, 15 nt, Human T-lymphotropic virus 2
gcuucuauaccuccc

SEQ ID NO: 362620 - RNA, 14 nt, Human T-lymphotropic virus 2
ggaacagcucucca

SEQ ID NO: 362621 - RNA, 17 nt, Human T-lymphotropic virus 2
ggccacuuauaccccau

SEQ ID NO: 362622 - RNA, 19 nt, Human T-lymphotropic virus 2
ggcucccuguauccagacu

SEQ ID NO: 362623 - RNA, 12 nt, Human T-lymphotropic virus 2
gggaccgucucc

SEQ ID NO: 362624 - RNA, 18 nt, Human T-lymphotropic virus 2
gggauccauccucuccaa

SEQ ID NO: 362625 - RNA, 16 nt, Human T-lymphotropic virus 2
ggucacggagacucac

SEQ ID NO: 362626 - RNA, 16 nt, Human T-lymphotropic virus 2
ggucagaccgucucac

SEQ ID NO: 362627 - RNA, 17 nt, Human T-lymphotropic virus 2
ggucagaccgucucaca

SEQ ID NO: 362628 - RNA, 20 nt, Human T-lymphotropic virus 2
guaaaggcucugacgucucc

SEQ ID NO: 362629 - RNA, 21 nt, Human T-lymphotropic virus 2
gucauauucugccaccccaga

SEQ ID NO: 362630 - RNA, 12 nt, Human T-lymphotropic virus 2
guuauaccccag

SEQ ID NO: 362631 - RNA, 14 nt, Human T-lymphotropic virus 2
guuccuacacacag

SEQ ID NO: 362632 - RNA, 13 nt, Human T-lymphotropic virus 2
uaaaggcucugac

SEQ ID NO: 362633 - RNA, 18 nt, Human T-lymphotropic virus 2
uaaaggcucugacgucuc

SEQ ID NO: 362634 - RNA, 16 nt, Human T-lymphotropic virus 2
uaacccccgcucacau

SEQ ID NO: 362635 - RNA, 19 nt, Human T-lymphotropic virus 2
uaacccccgcucacauucc

SEQ ID NO: 362636 - RNA, 20 nt, Human T-lymphotropic virus 2
uaacccccgcucacauuccu

SEQ ID NO: 362637 - RNA, 14 nt, Human T-lymphotropic virus 2
uaauauggaccuuc

SEQ ID NO: 362638 - RNA, 15 nt, Human T-lymphotropic virus 2
uacaaaauguuccua

SEQ ID NO: 362639 - RNA, 22 nt, Human T-lymphotropic virus 2
uaccccaaagcagggcagccau

SEQ ID NO: 362640 - RNA, 21 nt, Human T-lymphotropic virus 2
uaccucccagacgaccccagc

SEQ ID NO: 362641 - RNA, 12 nt, Human T-lymphotropic virus 2
uagacacccaca

SEQ ID NO: 362642 - RNA, 16 nt, Human T-lymphotropic virus 2
uagcgcugaaaaacaa

SEQ ID NO: 362643 - RNA, 18 nt, Human T-lymphotropic virus 2
uaggaacaggaacagcuc

SEQ ID NO: 362644 - RNA, 16 nt, Human T-lymphotropic virus 2
uaggagccuuccucac

SEQ ID NO: 362645 - RNA, 14 nt, Human T-lymphotropic virus 2
uauaccccagacac

SEQ ID NO: 362646 - RNA, 15 nt, Human T-lymphotropic virus 2
uaugggacaaacacc

SEQ ID NO: 362647 - RNA, 14 nt, Human T-lymphotropic virus 2
uauucugccacccc

SEQ ID NO: 362648 - RNA, 15 nt, Human T-lymphotropic virus 2
uauucugccacccca

SEQ ID NO: 362649 - RNA, 16 nt, Human T-lymphotropic virus 2
ucacaaaacccaucaa

SEQ ID NO: 362650 - RNA, 14 nt, Human T-lymphotropic virus 2
ucacacaaacaauc

SEQ ID NO: 362651 - RNA, 23 nt, Human T-lymphotropic virus 2
ucaccaaugauuuccggcccuua

SEQ ID NO: 362652 - RNA, 23 nt, Human T-lymphotropic virus 2
uccaaaccccccuacacauauuc

SEQ ID NO: 362653 - RNA, 22 nt, Human T-lymphotropic virus 2
uccagaaaaaaauagaccucac

SEQ ID NO: 362654 - RNA, 20 nt, Human T-lymphotropic virus 2
uccccuagcgcugaaaaaca

SEQ ID NO: 362655 - RNA, 15 nt, Human T-lymphotropic virus 2
ucccgaucaagacau

SEQ ID NO: 362656 - RNA, 22 nt, Human T-lymphotropic virus 2
ucccucaccgacccucugguca

SEQ ID NO: 362657 - RNA, 14 nt, Human T-lymphotropic virus 2
uccgacgagagucu

SEQ ID NO: 362658 - RNA, 16 nt, Human T-lymphotropic virus 2
uccguuaugggacaaa

SEQ ID NO: 362659 - RNA, 20 nt, Human T-lymphotropic virus 2
uccuccaaaccccccuacac

SEQ ID NO: 362660 - RNA, 21 nt, Human T-lymphotropic virus 2
uccucuauaccagaugagucg

SEQ ID NO: 362661 - RNA, 21 nt, Human T-lymphotropic virus 2
uccugccucuuagacacccac

SEQ ID NO: 362662 - RNA, 16 nt, Human T-lymphotropic virus 2
ucgauacucccacuca

SEQ ID NO: 362663 - RNA, 17 nt, Human T-lymphotropic virus 2
ucugaauaauugccuca

SEQ ID NO: 362664 - RNA, 23 nt, Human T-lymphotropic virus 2
ugacauggccacuuauaccccau

SEQ ID NO: 362665 - RNA, 21 nt, Human T-lymphotropic virus 2
ugacccauccacaguccucua

SEQ ID NO: 362666 - RNA, 22 nt, Human T-lymphotropic virus 2
ugauuuccggcccuuaccccaa

SEQ ID NO: 362667 - RNA, 17 nt, Human T-lymphotropic virus 2
ugcagcaaauccccuag

SEQ ID NO: 362668 - RNA, 15 nt, Human T-lymphotropic virus 2
uuauaccccagacac

SEQ ID NO: 362669 - RNA, 16 nt, Human T-lymphotropic virus 2
uucaggaaauccacau

SEQ ID NO: 362670 - RNA, 13 nt, Human T-lymphotropic virus 2
uucuauaccuccc

SEQ ID NO: 362671 - RNA, 20 nt, Human T-lymphotropic virus 2
aaaagcgcaaggacaguuca

SEQ ID NO: 362672 - RNA, 21 nt, Human T-lymphotropic virus 2
aaaaggucagaccgucucaca

SEQ ID NO: 362673 - RNA, 20 nt, Human T-lymphotropic virus 2
aaacccaggaguccuauaca

SEQ ID NO: 362674 - RNA, 19 nt, Human T-lymphotropic virus 2
aaagcgcaaggacaguuca

SEQ ID NO: 362675 - RNA, 22 nt, Human T-lymphotropic virus 2
aaagcgcaaggacaguucagga

SEQ ID NO: 362676 - RNA, 14 nt, Human T-lymphotropic virus 2
aacaaggcucugac

SEQ ID NO: 362677 - RNA, 18 nt, Human T-lymphotropic virus 2
aacaaggcucugacgauu

SEQ ID NO: 362678 - RNA, 14 nt, Human T-lymphotropic virus 2
aacagcaaccaauu

SEQ ID NO: 362679 - RNA, 14 nt, Human T-lymphotropic virus 2
aaccaacacccagu

SEQ ID NO: 362680 - RNA, 20 nt, Human T-lymphotropic virus 2
aacuucuauacaaaauguuc

SEQ ID NO: 362681 - RNA, 20 nt, Human T-lymphotropic virus 2
aagcgcaaggacaguucagg

SEQ ID NO: 362682 - RNA, 18 nt, Human T-lymphotropic virus 2
aagguaagucuccucuca

SEQ ID NO: 362683 - RNA, 17 nt, Human T-lymphotropic virus 2
aaggucagaccgucuca

SEQ ID NO: 362684 - RNA, 15 nt, Human T-lymphotropic virus 2
aagucuccucucagg

SEQ ID NO: 362685 - RNA, 23 nt, Human T-lymphotropic virus 2
aaucccaaguaaaggcucugacg

SEQ ID NO: 362686 - RNA, 19 nt, Human T-lymphotropic virus 2
aaugacggcucaccaauga

SEQ ID NO: 362687 - RNA, 13 nt, Human T-lymphotropic virus 2
acaaaauguuccu

SEQ ID NO: 362688 - RNA, 14 nt, Human T-lymphotropic virus 2
acaaggcucugacg

SEQ ID NO: 362689 - RNA, 12 nt, Human T-lymphotropic virus 2
acaauguuccaa

SEQ ID NO: 362690 - RNA, 20 nt, Human T-lymphotropic virus 2
acaauuaggagccuuccuca

SEQ ID NO: 362691 - RNA, 23 nt, Human T-lymphotropic virus 2
acacauauucuugcccuuccgaa

SEQ ID NO: 362692 - RNA, 16 nt, Human T-lymphotropic virus 2
acacccacaacaaaug

SEQ ID NO: 362693 - RNA, 22 nt, Human T-lymphotropic virus 2
acacccaguucaaacuccucca

SEQ ID NO: 362694 - RNA, 17 nt, Human T-lymphotropic virus 2
acaguccucuauaccag

SEQ ID NO: 362695 - RNA, 12 nt, Human T-lymphotropic virus 2
accaacacccag

SEQ ID NO: 362696 - RNA, 23 nt, Human T-lymphotropic virus 2
acccaggaguccuauacacucca

SEQ ID NO: 362697 - RNA, 22 nt, Human T-lymphotropic virus 2
acccaguucaaacuccuccaaa

SEQ ID NO: 362698 - RNA, 20 nt, Human T-lymphotropic virus 2
acccugaagcaagucacaaa

SEQ ID NO: 362699 - RNA, 15 nt, Human T-lymphotropic virus 2
accuacccaccacaa

SEQ ID NO: 362700 - RNA, 20 nt, Human T-lymphotropic virus 2
accuuacgguuauaccccag

SEQ ID NO: 362701 - RNA, 23 nt, Human T-lymphotropic virus 2
accuucaaugacggcucaccaau

SEQ ID NO: 362702 - RNA, 23 nt, Human T-lymphotropic virus 2
acugcugaugccuuucuucccuc

SEQ ID NO: 362703 - RNA, 13 nt, Human T-lymphotropic virus 2
acuuauaccccau

SEQ ID NO: 362704 - RNA, 14 nt, Human T-lymphotropic virus 2
agaacuucuauaca

SEQ ID NO: 362705 - RNA, 11 nt, Human T-lymphotropic virus 2
agacacccaca

SEQ ID NO: 362706 - RNA, 12 nt, Human T-lymphotropic virus 2
agcuuuccccac

SEQ ID NO: 362707 - RNA, 16 nt, Human T-lymphotropic virus 2
aggaacagcucuccag

SEQ ID NO: 362708 - RNA, 13 nt, Human T-lymphotropic virus 2
agucaucgaccca

SEQ ID NO: 362709 - RNA, 16 nt, Human T-lymphotropic virus 2
aguccuauacacucca

SEQ ID NO: 362710 - RNA, 16 nt, Human T-lymphotropic virus 2
aguucaaacuccucca

SEQ ID NO: 362711 - RNA, 17 nt, Human T-lymphotropic virus 2
auaccagcuuuccccac

SEQ ID NO: 362712 - RNA, 18 nt, Human T-lymphotropic virus 2
auaccuauaccagcuuuc

SEQ ID NO: 362713 - RNA, 21 nt, Human T-lymphotropic virus 2
auauucugccaccccagacaa

SEQ ID NO: 362714 - RNA, 12 nt, Human T-lymphotropic virus 2
auccacaguccu

SEQ ID NO: 362715 - RNA, 15 nt, Human T-lymphotropic virus 2
auccacaguccucua

SEQ ID NO: 362716 - RNA, 17 nt, Human T-lymphotropic virus 2
augccuuucuucccucu

SEQ ID NO: 362717 - RNA, 14 nt, Human T-lymphotropic virus 2
auguuccuacacac

SEQ ID NO: 362718 - RNA, 21 nt, Human T-lymphotropic virus 2
auuagaagaacuucuauacaa

SEQ ID NO: 362719 - RNA, 15 nt, Human T-lymphotropic virus 2
auucugccaccccag

SEQ ID NO: 362720 - RNA, 22 nt, Human T-lymphotropic virus 2
auucugccaccccagacaauua

SEQ ID NO: 362721 - RNA, 16 nt, Human T-lymphotropic virus 2
auugacccauccacag

SEQ ID NO: 362722 - RNA, 21 nt, Human T-lymphotropic virus 2
auugccucaaauaguuccucu

SEQ ID NO: 362723 - RNA, 22 nt, Human T-lymphotropic virus 2
auugccucaaauaguuccucua

SEQ ID NO: 362724 - RNA, 12 nt, Human T-lymphotropic virus 2
caaaacccauca

SEQ ID NO: 362725 - RNA, 13 nt, Human T-lymphotropic virus 2
caaaauguuccua

SEQ ID NO: 362726 - RNA, 23 nt, Human T-lymphotropic virus 2
caacacccaguucaaacuccucc

SEQ ID NO: 362727 - RNA, 21 nt, Human T-lymphotropic virus 2
caagacaucucgauacuccca

SEQ ID NO: 362728 - RNA, 19 nt, Human T-lymphotropic virus 2
caagguaagucuccucuca

SEQ ID NO: 362729 - RNA, 23 nt, Human T-lymphotropic virus 2
caauuaggagccuuccucaccaa

SEQ ID NO: 362730 - RNA, 14 nt, Human T-lymphotropic virus 2
cacauauucuugcc

SEQ ID NO: 362731 - RNA, 20 nt, Human T-lymphotropic virus 2
cacccaugacauggccacuu

SEQ ID NO: 362732 - RNA, 15 nt, Human T-lymphotropic virus 2
cacuuauaccccaug

SEQ ID NO: 362733 - RNA, 17 nt, Human T-lymphotropic virus 2
caggaacagcucuccag

SEQ ID NO: 362734 - RNA, 21 nt, Human T-lymphotropic virus 2
caggacuucuccccuaucacu

SEQ ID NO: 362735 - RNA, 13 nt, Human T-lymphotropic virus 2
cagggacagucau

SEQ ID NO: 362736 - RNA, 14 nt, Human T-lymphotropic virus 2
caucaaaacccagg

SEQ ID NO: 362737 - RNA, 18 nt, Human T-lymphotropic virus 2
caucccgaucaagacauc

SEQ ID NO: 362738 - RNA, 15 nt, Human T-lymphotropic virus 2
caucucgauacuccc

SEQ ID NO: 362739 - RNA, 14 nt, Human T-lymphotropic virus 2
uucgaaaccaaagc

SEQ ID NO: 362740 - RNA, 17 nt, Human T-lymphotropic virus 2
uugccuagucaaaauaa

SEQ ID NO: 362741 - RNA, 19 nt, Human T-lymphotropic virus 2
aaaaggucagaccgucuca

SEQ ID NO: 362742 - RNA, 18 nt, Human T-lymphotropic virus 2
aaagaugccgagucuaua

SEQ ID NO: 362743 - RNA, 18 nt, Human T-lymphotropic virus 2
aaaggucagaccgucuca

SEQ ID NO: 362744 - RNA, 17 nt, Human T-lymphotropic virus 2
aaauucgaaaccaaagc

SEQ ID NO: 362745 - RNA, 15 nt, Human T-lymphotropic virus 2
aacaaugccaggggc

SEQ ID NO: 362746 - RNA, 11 nt, Human T-lymphotropic virus 2
aacaccucagc

SEQ ID NO: 362747 - RNA, 20 nt, Human T-lymphotropic virus 2
aacaccucagccuacccaag

SEQ ID NO: 362748 - RNA, 13 nt, Human T-lymphotropic virus 2
aacagcaaccaau

SEQ ID NO: 362749 - RNA, 23 nt, Human T-lymphotropic virus 2
aacccaggaguccuauacacucc

SEQ ID NO: 362750 - RNA, 15 nt, Human T-lymphotropic virus 2
aaccccccuacacau

SEQ ID NO: 362751 - RNA, 21 nt, Human T-lymphotropic virus 2
aagacaucucgauacucccac

SEQ ID NO: 362752 - RNA, 18 nt, Human T-lymphotropic virus 2
aagcgcaaggacaguuca

SEQ ID NO: 362753 - RNA, 16 nt, Human T-lymphotropic virus 2
aagucuccucucaggu

SEQ ID NO: 362754 - RNA, 16 nt, Human T-lymphotropic virus 2
aaguuuuaagaucucc

SEQ ID NO: 362755 - RNA, 22 nt, Human T-lymphotropic virus 2
aaugacggcucaccaaugauuu

SEQ ID NO: 362756 - RNA, 23 nt, Human T-lymphotropic virus 2
aaugauuuccggcccuuacccca

SEQ ID NO: 362757 - RNA, 13 nt, Human T-lymphotropic virus 2
aauguuccuacac

SEQ ID NO: 362758 - RNA, 13 nt, Human T-lymphotropic virus 2
acaaacaccucag

SEQ ID NO: 362759 - RNA, 21 nt, Human T-lymphotropic virus 2
acaaacaccucagccuaccca

SEQ ID NO: 362760 - RNA, 13 nt, Human T-lymphotropic virus 2
accaacacccagu

SEQ ID NO: 362761 - RNA, 14 nt, Human T-lymphotropic virus 2
accacaauguucca

SEQ ID NO: 362762 - RNA, 20 nt, Human T-lymphotropic virus 2
accagcuuuccccacccaug

SEQ ID NO: 362763 - RNA, 21 nt, Human T-lymphotropic virus 2
accccaaagcagggcagccau

SEQ ID NO: 362764 - RNA, 14 nt, Human T-lymphotropic virus 2
accccagacacucg

SEQ ID NO: 362765 - RNA, 19 nt, Human T-lymphotropic virus 2
acccccgcucacauuccuc

SEQ ID NO: 362766 - RNA, 17 nt, Human T-lymphotropic virus 2
accgucucacacaaaca

SEQ ID NO: 362767 - RNA, 22 nt, Human T-lymphotropic virus 2
accuacccaccacaauguucca

SEQ ID NO: 362768 - RNA, 18 nt, Human T-lymphotropic virus 2
accugcuagcuucugcag

SEQ ID NO: 362769 - RNA, 22 nt, Human T-lymphotropic virus 2
accugcuagcuucugcagcaaa

SEQ ID NO: 362770 - RNA, 19 nt, Human T-lymphotropic virus 2
accuuacgguuauacccca

SEQ ID NO: 362771 - RNA, 23 nt, Human T-lymphotropic virus 2
acucgauucugaauaauugccuc

SEQ ID NO: 362772 - RNA, 17 nt, Human T-lymphotropic virus 2
acuuauaccccauguca

SEQ ID NO: 362773 - RNA, 15 nt, Human T-lymphotropic virus 2
acuucuccccuauca

SEQ ID NO: 362774 - RNA, 17 nt, Human T-lymphotropic virus 2
agaagaacuucuauaca

SEQ ID NO: 362775 - RNA, 23 nt, Human T-lymphotropic virus 2
agacaucucgauacucccacuca

SEQ ID NO: 362776 - RNA, 19 nt, Human T-lymphotropic virus 2
agcaagucacaaaacccau

SEQ ID NO: 362777 - RNA, 23 nt, Human T-lymphotropic virus 2
agccuacccaagcgcuacuugac

SEQ ID NO: 362778 - RNA, 12 nt, Human T-lymphotropic virus 2
agcucuccagaa

SEQ ID NO: 362779 - RNA, 18 nt, Human T-lymphotropic virus 2
aggagccuuccucaccaa

SEQ ID NO: 362780 - RNA, 15 nt, Human T-lymphotropic virus 2
aggaguccuauacac

SEQ ID NO: 362781 - RNA, 16 nt, Human T-lymphotropic virus 2
aggucagaccgucuca

SEQ ID NO: 362782 - RNA, 18 nt, Human T-lymphotropic virus 2
agguggcucgcucccuca

SEQ ID NO: 362783 - RNA, 16 nt, Human T-lymphotropic virus 2
auauucugccacccca

SEQ ID NO: 362784 - RNA, 20 nt, Human T-lymphotropic virus 2
auccacaguccucuauacca

SEQ ID NO: 362785 - RNA, 15 nt, Human T-lymphotropic virus 2
auccauccucuccaa

SEQ ID NO: 362786 - RNA, 19 nt, Human T-lymphotropic virus 2
auccuaggcgccagugggc

SEQ ID NO: 362787 - RNA, 22 nt, Human T-lymphotropic virus 2
aucucccgcugcuccuccgcca

SEQ ID NO: 362788 - RNA, 15 nt, Human T-lymphotropic virus 2
aucuuaacaacccca

SEQ ID NO: 362789 - RNA, 18 nt, Human T-lymphotropic virus 2
augacggcucaccaauga

SEQ ID NO: 362790 - RNA, 22 nt, Human T-lymphotropic virus 2
augauuuccggcccuuacccca

SEQ ID NO: 362791 - RNA, 23 nt, Human T-lymphotropic virus 2
augauuuccggcccuuaccccaa

SEQ ID NO: 362792 - RNA, 19 nt, Human T-lymphotropic virus 2
auggccacuuauaccccau

SEQ ID NO: 362793 - RNA, 13 nt, Human T-lymphotropic virus 2
auguuccuacaca

SEQ ID NO: 362794 - RNA, 24 nt, Human T-lymphotropic virus 2
auuggaagggacgcccuacaacaa

SEQ ID NO: 362795 - RNA, 20 nt, Human T-lymphotropic virus 2
auuuccggcccuuaccccaa

SEQ ID NO: 362796 - RNA, 13 nt, Human T-lymphotropic virus 2
caaucccaaguaa

SEQ ID NO: 362797 - RNA, 17 nt, Human T-lymphotropic virus 2
caaugacggcucaccaa

SEQ ID NO: 362798 - RNA, 20 nt, Human T-lymphotropic virus 2
caaugacggcucaccaauga

SEQ ID NO: 362799 - RNA, 14 nt, Human T-lymphotropic virus 2
cacagggacaguca

SEQ ID NO: 362800 - RNA, 17 nt, Human T-lymphotropic virus 2
cacagggacagucauag

SEQ ID NO: 362801 - RNA, 13 nt, Human T-lymphotropic virus 2
cacccacaacaaa

SEQ ID NO: 362802 - RNA, 18 nt, Human T-lymphotropic virus 2
cacuuauaccccauguca

SEQ ID NO: 362803 - RNA, 12 nt, Human T-lymphotropic virus 2
cagaccgucuca

SEQ ID NO: 362804 - RNA, 21 nt, Human T-lymphotropic virus 2
cagcuuuccccacccaugaca

SEQ ID NO: 362805 - RNA, 14 nt, Human T-lymphotropic virus 2
caggaaauccacau

SEQ ID NO: 362806 - RNA, 15 nt, Human T-lymphotropic virus 2
caguucaaacuccuc

SEQ ID NO: 362807 - RNA, 17 nt, Human T-lymphotropic virus 2
caguucaaacuccucca

SEQ ID NO: 362808 - RNA, 21 nt, Human T-lymphotropic virus 2
cauauucugccaccccagaca

SEQ ID NO: 362809 - RNA, 14 nt, Human T-lymphotropic virus 2
cauccacaguccuc

SEQ ID NO: 362810 - RNA, 13 nt, Human T-lymphotropic virus 2
cauugacccaucc

SEQ ID NO: 362811 - RNA, 12 nt, Human T-lymphotropic virus 2
ccaacagucucc

SEQ ID NO: 362812 - RNA, 13 nt, Human T-lymphotropic virus 2
ccacaauguucca

SEQ ID NO: 362813 - RNA, 21 nt, Human T-lymphotropic virus 2
ccagaaaaaaauagaccucac

SEQ ID NO: 362814 - RNA, 23 nt, Human T-lymphotropic virus 2
ccagcuuuccccacccaugacau

SEQ ID NO: 362815 - RNA, 21 nt, Human T-lymphotropic virus 2
ccaggaguccuauacacucca

SEQ ID NO: 362816 - RNA, 20 nt, Human T-lymphotropic virus 2
ccauugacccauccacaguc

SEQ ID NO: 362817 - RNA, 22 nt, Human T-lymphotropic virus 2
cccaaagcagggcagccaucuu

SEQ ID NO: 362818 - RNA, 19 nt, Human T-lymphotropic virus 2
cccaaguaaaggcucugac

SEQ ID NO: 362819 - RNA, 21 nt, Human T-lymphotropic virus 2
cccagacaauuaggagccuuc

SEQ ID NO: 362820 - RNA, 22 nt, Human T-lymphotropic virus 2
ccccaucccgaucaagacaucu

SEQ ID NO: 362821 - RNA, 13 nt, Human T-lymphotropic virus 2
cccgcucacauuc

SEQ ID NO: 362822 - RNA, 22 nt, Human T-lymphotropic virus 2
cccuuuuuuuaggaacugaaac

SEQ ID NO: 362823 - RNA, 17 nt, Human T-lymphotropic virus 2
ccgcugcuccuccgcca

SEQ ID NO: 362824 - RNA, 16 nt, Human T-lymphotropic virus 2
ccuaacucgauucuga

SEQ ID NO: 362825 - RNA, 21 nt, Human T-lymphotropic virus 2
ccuacacacagggacagucau

SEQ ID NO: 362826 - RNA, 15 nt, Human T-lymphotropic virus 2
ccuaccauugaccca

SEQ ID NO: 362827 - RNA, 19 nt, Human T-lymphotropic virus 2
ccuccaaaccccccuacac

SEQ ID NO: 362828 - RNA, 15 nt, Human T-lymphotropic virus 2
ccuccgccaacaguc

SEQ ID NO: 362829 - RNA, 21 nt, Human T-lymphotropic virus 2
ccucuggucacggagacucac

SEQ ID NO: 362830 - RNA, 17 nt, Human T-lymphotropic virus 2
ccugccucuuagacacc

SEQ ID NO: 362831 - RNA, 16 nt, Human T-lymphotropic virus 2
ccuucaggaaauccac

SEQ ID NO: 362832 - RNA, 16 nt, Human T-lymphotropic virus 2
cgauacucccacucau

SEQ ID NO: 362833 - RNA, 22 nt, Human T-lymphotropic virus 2
cguuaugggacaaacaccucag

SEQ ID NO: 362834 - RNA, 17 nt, Human T-lymphotropic virus 2
cuaauauggaccuucaa

SEQ ID NO: 362835 - RNA, 15 nt, Influenza A virus
auacuguccaaaaaa

SEQ ID NO: 362836 - RNA, 13 nt, Influenza A virus
augaaaaaaugcc

SEQ ID NO: 362837 - RNA, 12 nt, Influenza A virus
aaaaaaugccuu

SEQ ID NO: 362838 - RNA, 18 nt, Influenza A virus
aaaaaugccuuguuccua

SEQ ID NO: 362839 - RNA, 21 nt, Influenza A virus
aaauaugaggaaaaacacccu

SEQ ID NO: 362840 - RNA, 12 nt, Influenza A virus
aauaugaggaaa

SEQ ID NO: 362841 - RNA, 18 nt, Influenza A virus
aauaugaggaaaaacacc

SEQ ID NO: 362842 - RNA, 21 nt, Influenza A virus
aauaugaggaaaaacacccuu

SEQ ID NO: 362843 - RNA, 15 nt, Influenza A virus
aaugccuuguuccua

SEQ ID NO: 362844 - RNA, 19 nt, Influenza A virus
aauuuagcuuguccuucau

SEQ ID NO: 362845 - RNA, 23 nt, Influenza A virus
acuguccaaaaaaguaccuuguu

SEQ ID NO: 362846 - RNA, 15 nt, Influenza A virus
agaagugagacacaa

SEQ ID NO: 362847 - RNA, 18 nt, Influenza A virus
agaauuucagaaauauga

SEQ ID NO: 362848 - RNA, 14 nt, Influenza A virus
agcuuguccuucau

SEQ ID NO: 362849 - RNA, 17 nt, Influenza A virus
agcuuguccuucaugaa

SEQ ID NO: 362850 - RNA, 23 nt, Influenza A virus
auacuguccaaaaaaguaccuug

SEQ ID NO: 362851 - RNA, 16 nt, Influenza A virus
auaugaggaaaaacac

SEQ ID NO: 362852 - RNA, 13 nt, Influenza A virus
auccauacugucc

SEQ ID NO: 362853 - RNA, 18 nt, Influenza A virus
auccauacuguccaaaaa

SEQ ID NO: 362854 - RNA, 13 nt, Influenza A virus
auuugcuauccau

SEQ ID NO: 362855 - RNA, 15 nt, Influenza A virus
caaaaaacuccuugu

SEQ ID NO: 362856 - RNA, 14 nt, Influenza A virus
caaaaaaguaccuu

SEQ ID NO: 362857 - RNA, 16 nt, Influenza A virus
caugaaaaaaugccuu

SEQ ID NO: 362858 - RNA, 23 nt, Influenza A virus
caugaaaaaaugccuuguuccua

SEQ ID NO: 362859 - RNA, 19 nt, Influenza A virus
ccuucaugaaaaaaugccu

SEQ ID NO: 362860 - RNA, 13 nt, Influenza A virus
cuacuauuugcua

SEQ ID NO: 362861 - RNA, 17 nt, Influenza A virus
cuacuauuugcuaucca

SEQ ID NO: 362862 - RNA, 21 nt, Influenza A virus
gaaaaaaugccuuguuccuac

SEQ ID NO: 362863 - RNA, 18 nt, Influenza A virus
gaaauaugaggaaaaaca

SEQ ID NO: 362864 - RNA, 13 nt, Influenza A virus
gaggaaaaacacc

SEQ ID NO: 362865 - RNA, 21 nt, Influenza A virus
gcagugcuacuauuugcuauc

SEQ ID NO: 362866 - RNA, 16 nt, Influenza A virus
guccaaaaaaguaccu

SEQ ID NO: 362867 - RNA, 22 nt, Influenza A virus
guggcagugcuacuauuugcua

SEQ ID NO: 362868 - RNA, 19 nt, Influenza A virus
uacuauuugcuauccauac

SEQ ID NO: 362869 - RNA, 14 nt, Influenza A virus
uacuguccaaaaaa

SEQ ID NO: 362870 - RNA, 20 nt, Influenza A virus
uacuguccaaaaaaguaccu

SEQ ID NO: 362871 - RNA, 16 nt, Influenza A virus
uaugaggaaaaacacc

SEQ ID NO: 362872 - RNA, 16 nt, Influenza A virus
ucaugaaaaaaugccu

SEQ ID NO: 362873 - RNA, 16 nt, Influenza A virus
ucauugggaucuugca

SEQ ID NO: 362874 - RNA, 15 nt, Influenza A virus
uccauacuguccaaa

SEQ ID NO: 362875 - RNA, 18 nt, Influenza A virus
ucuguucaaaaaacuccu

SEQ ID NO: 362876 - RNA, 19 nt, Influenza A virus
ucuguucaaaaaacuccuu

SEQ ID NO: 362877 - RNA, 16 nt, Influenza A virus
ugaaaaaaugccuugu

SEQ ID NO: 362878 - RNA, 21 nt, Influenza A virus
ugaaaaaaugccuuguuccua

SEQ ID NO: 362879 - RNA, 17 nt, Influenza A virus
ugauugaagaagugaga

SEQ ID NO: 362880 - RNA, 15 nt, Influenza A virus
ugcuauccauacugu

SEQ ID NO: 362881 - RNA, 23 nt, Influenza A virus
ugcuauccauacuguccaaaaaa

SEQ ID NO: 362882 - RNA, 13 nt, Influenza A virus
ugcuugaagugga

SEQ ID NO: 362883 - RNA, 20 nt, Influenza A virus
uggcagugcuacuauuugcu

SEQ ID NO: 362884 - RNA, 22 nt, Influenza A virus
uguggcagugcuacuauuugcu

SEQ ID NO: 362885 - RNA, 14 nt, Influenza A virus
uucagaaauaugag

SEQ ID NO: 362886 - RNA, 14 nt, Influenza A virus
uuguccuucaugaa

SEQ ID NO: 362887 - RNA, 13 nt, Influenza A virus
uuugcuauccaua

SEQ ID NO: 362888 - RNA, 11 nt, Influenza A virus
aaaaaaugccu

SEQ ID NO: 362889 - RNA, 12 nt, Influenza A virus
aaaaacacccuu

SEQ ID NO: 362890 - RNA, 12 nt, Influenza A virus
aaaaaguaccuu

SEQ ID NO: 362891 - RNA, 11 nt, Influenza A virus
aaaaaugccuu

SEQ ID NO: 362892 - RNA, 15 nt, Influenza A virus
aaaaugccuuguucc

SEQ ID NO: 362893 - RNA, 21 nt, Influenza A virus
aaggaacagcagagugcugug

SEQ ID NO: 362894 - RNA, 20 nt, Influenza A virus
aaggagugccaaagucuaug

SEQ ID NO: 362895 - RNA, 23 nt, Influenza A virus
acacaaacugaagguaacagaga

SEQ ID NO: 362896 - RNA, 22 nt, Influenza A virus
acagagaauaguuuugagcaaa

SEQ ID NO: 362897 - RNA, 16 nt, Influenza A virus
acuauuugcuauccau

SEQ ID NO: 362898 - RNA, 11 nt, Influenza A virus
acuguccaaaa

SEQ ID NO: 362899 - RNA, 13 nt, Influenza A virus
acuguccaaaaaa

SEQ ID NO: 362900 - RNA, 15 nt, Influenza A virus
agaaauaugaggaaa

SEQ ID NO: 362901 - RNA, 14 nt, Influenza A virus
agaagugagacaca

SEQ ID NO: 362902 - RNA, 21 nt, Influenza A virus
agaauuucagaaauaugagga

SEQ ID NO: 362903 - RNA, 22 nt, Influenza A virus
agaauuucagaaauaugaggaa

SEQ ID NO: 362904 - RNA, 16 nt, Influenza A virus
agcuuguccuucauga

SEQ ID NO: 362905 - RNA, 17 nt, Influenza A virus
agugcuacuauuugcua

SEQ ID NO: 362906 - RNA, 17 nt, Influenza A virus
aguuuaaaaacgaccuu

SEQ ID NO: 362907 - RNA, 20 nt, Influenza A virus
aguuuaaaaacgaccuuguu

SEQ ID NO: 362908 - RNA, 16 nt, Influenza A virus
augaggaaaaacaccc

SEQ ID NO: 362909 - RNA, 18 nt, Influenza A virus
auuuagcuuguccuucau

SEQ ID NO: 362910 - RNA, 20 nt, Influenza A virus
auuugcuauccauacugucc

SEQ ID NO: 362911 - RNA, 12 nt, Influenza A virus
cagaaauaugag

SEQ ID NO: 362912 - RNA, 23 nt, Influenza A virus
cagugcuacuauuugcuauccau

SEQ ID NO: 362913 - RNA, 17 nt, Influenza A virus
caugaaaaaaugccuug

SEQ ID NO: 362914 - RNA, 18 nt, Influenza A virus
caugaaaaaaugccuugu

SEQ ID NO: 362915 - RNA, 21 nt, Influenza A virus
caugaaaaaaugccuuguucc

SEQ ID NO: 362916 - RNA, 17 nt, Influenza A virus
ccauacuguccaaaaaa

SEQ ID NO: 362917 - RNA, 12 nt, Influenza A virus
ccuucaugaaaa

SEQ ID NO: 362918 - RNA, 22 nt, Influenza A virus
cgucuuuuuuucaaaugcauuu

SEQ ID NO: 362919 - RNA, 18 nt, Influenza A virus
cuacuauuugcuauccau

SEQ ID NO: 362920 - RNA, 19 nt, Influenza A virus
cuacuauuugcuauccaua

SEQ ID NO: 362921 - RNA, 20 nt, Influenza A virus
cuacuauuugcuauccauac

SEQ ID NO: 362922 - RNA, 14 nt, Influenza A virus
cuauccauacuguc

SEQ ID NO: 362923 - RNA, 17 nt, Influenza A virus
cuauuugcuauccauac

SEQ ID NO: 362924 - RNA, 18 nt, Influenza A virus
cuguccaaaaaaguaccu

SEQ ID NO: 362925 - RNA, 20 nt, Influenza A virus
cuguccaaaaaaguaccuug

SEQ ID NO: 362926 - RNA, 21 nt, Influenza A virus
cuucaugaaaaaaugccuugu

SEQ ID NO: 362927 - RNA, 14 nt, Influenza A virus
cuuguccuucauga

SEQ ID NO: 362928 - RNA, 15 nt, Influenza A virus
cuuguccuucaugaa

SEQ ID NO: 362929 - RNA, 16 nt, Influenza A virus
cuuguccuucaugaaa

SEQ ID NO: 362930 - RNA, 18 nt, Influenza A virus
gaauaguuuaaaaacgac

SEQ ID NO: 362931 - RNA, 22 nt, Influenza A virus
gaauaguuuaaaaacgaccuug

SEQ ID NO: 362932 - RNA, 20 nt, Influenza A virus
gaauuucagaaauaugagga

SEQ ID NO: 362933 - RNA, 23 nt, Influenza A virus
gaauuucagaaauaugaggaaaa

SEQ ID NO: 362934 - RNA, 14 nt, Influenza A virus
gacacaaacugaag

SEQ ID NO: 362935 - RNA, 22 nt, Influenza A virus
gaggaaaaacacccuuguuucu

SEQ ID NO: 362936 - RNA, 22 nt, Influenza A virus
gccuuacaucuauugcuugaag

SEQ ID NO: 362937 - RNA, 22 nt, Influenza A virus
gcuacuauuugcuauccauacu

SEQ ID NO: 362938 - RNA, 23 nt, Influenza A virus
gcuugaaguggagcaagagauaa

SEQ ID NO: 362939 - RNA, 16 nt, Influenza A virus
gcuuguccuucaugaa

SEQ ID NO: 362940 - RNA, 14 nt, Influenza A virus
guccuucaugaaaa

SEQ ID NO: 362941 - RNA, 12 nt, Influenza A virus
uacuauuugcua

SEQ ID NO: 362942 - RNA, 22 nt, Influenza A virus
uagaauuucagaaauaugagga

SEQ ID NO: 362943 - RNA, 19 nt, Influenza A virus
uagcuuguccuucaugaaa

SEQ ID NO: 362944 - RNA, 17 nt, Influenza A virus
uaugaggaaaaacaccc

SEQ ID NO: 362945 - RNA, 15 nt, Influenza A virus
uccaaaaaaguaccu

SEQ ID NO: 362946 - RNA, 18 nt, Influenza A virus
uccaaaaaaguaccuugu

SEQ ID NO: 362947 - RNA, 17 nt, Influenza A virus
uccauacuguccaaaaa

SEQ ID NO: 362948 - RNA, 12 nt, Influenza A virus
uccuucaugaaa

SEQ ID NO: 362949 - RNA, 22 nt, Influenza A virus
ucgaauaguuuaaaaacgaccu

SEQ ID NO: 362950 - RNA, 23 nt, Influenza A virus
ucgaauaguuuaaaaacgaccuu

SEQ ID NO: 362951 - RNA, 11 nt, Influenza A virus
ucuugcacuug

SEQ ID NO: 362952 - RNA, 15 nt, Influenza A virus
uguccuucaugaaaa

SEQ ID NO: 362953 - RNA, 17 nt, Influenza A virus
uucaugaaaaaaugccu

SEQ ID NO: 362954 - RNA, 18 nt, Influenza A virus
uucaugaaaaaaugccuu

SEQ ID NO: 362955 - RNA, 20 nt, Influenza A virus
uugcuugaaguggagcaaga

SEQ ID NO: 362956 - RNA, 15 nt, Influenza A virus
uuguccuucaugaaa

SEQ ID NO: 362957 - RNA, 17 nt, Influenza A virus
uuuagcuuguccuucau

SEQ ID NO: 362958 - RNA, 20 nt, Influenza A virus
uuucagaaauaugaggaaaa

SEQ ID NO: 362959 - RNA, 12 nt, Influenza A virus
uuuugagcaaau

SEQ ID NO: 362960 - RNA, 17 nt, Influenza A virus (A/Hong Kong/1073/99(H9N2))
aaugcuacuauuugcua

SEQ ID NO: 362961 - RNA, 16 nt, Influenza A virus (A/Hong Kong/1073/99(H9N2))
acuauuugcuauccau

SEQ ID NO: 362962 - RNA, 17 nt, Influenza A virus (A/Hong Kong/1073/99(H9N2))
acuauuugcuauccaua

SEQ ID NO: 362963 - RNA, 18 nt, Influenza A virus (A/Hong Kong/1073/99(H9N2))
acuauuugcuauccauac

SEQ ID NO: 362964 - RNA, 23 nt, Influenza A virus (A/Hong Kong/1073/99(H9N2))
auacuguccaaaaaaguaccuug

SEQ ID NO: 362965 - RNA, 14 nt, Influenza A virus (A/Hong Kong/1073/99(H9N2))
auauugcacuugau

SEQ ID NO: 362966 - RNA, 13 nt, Influenza A virus (A/Hong Kong/1073/99(H9N2))
auccauacugucc

SEQ ID NO: 362967 - RNA, 16 nt, Influenza A virus (A/Hong Kong/1073/99(H9N2))
auccauacuguccaaa

SEQ ID NO: 362968 - RNA, 17 nt, Influenza A virus (A/Hong Kong/1073/99(H9N2))
auccauacuguccaaaa

SEQ ID NO: 362969 - RNA, 18 nt, Influenza A virus (A/Hong Kong/1073/99(H9N2))
auccauacuguccaaaaa

SEQ ID NO: 362970 - RNA, 19 nt, Influenza A virus (A/Hong Kong/1073/99(H9N2))
auccauacuguccaaaaaa

SEQ ID NO: 362971 - RNA, 19 nt, Influenza A virus (A/Hong Kong/1073/99(H9N2))
auuugcuauccauacuguc

SEQ ID NO: 362972 - RNA, 21 nt, Influenza A virus (A/Hong Kong/1073/99(H9N2))
auuugcuauccauacugucca

SEQ ID NO: 362973 - RNA, 13 nt, Influenza A virus (A/Hong Kong/1073/99(H9N2))
caaaaaaguaccu

SEQ ID NO: 362974 - RNA, 14 nt, Influenza A virus (A/Hong Kong/1073/99(H9N2))
caaaaaaguaccuu

SEQ ID NO: 362975 - RNA, 17 nt, Influenza A virus (A/Hong Kong/1073/99(H9N2))
caaugcuacuauuugcu

SEQ ID NO: 362976 - RNA, 18 nt, Influenza A virus (A/Hong Kong/1073/99(H9N2))
caaugcuacuauuugcua

SEQ ID NO: 362977 - RNA, 22 nt, Influenza A virus (A/Hong Kong/1073/99(H9N2))
caaugcuacuauuugcuaucca

SEQ ID NO: 362978 - RNA, 23 nt, Influenza A virus (A/Hong Kong/1073/99(H9N2))
caaugcuacuauuugcuauccau

SEQ ID NO: 362979 - RNA, 14 nt, Influenza A virus (A/Hong Kong/1073/99(H9N2))
cauacuguccaaaa

SEQ ID NO: 362980 - RNA, 18 nt, Influenza A virus (A/Hong Kong/1073/99(H9N2))
cauacuguccaaaaaagu

SEQ ID NO: 362981 - RNA, 19 nt, Influenza A virus (A/Hong Kong/1073/99(H9N2))
cauugggauauugcacuug

SEQ ID NO: 362982 - RNA, 17 nt, Influenza A virus (A/Hong Kong/1073/99(H9N2))
ccauacuguccaaaaaa

SEQ ID NO: 362983 - RNA, 12 nt, Influenza A virus (A/Hong Kong/1073/99(H9N2))
ccuucaugaaaa

SEQ ID NO: 362984 - RNA, 13 nt, Influenza A virus (A/Hong Kong/1073/99(H9N2))
cuacuauuugcua

SEQ ID NO: 362985 - RNA, 19 nt, Influenza A virus (A/Hong Kong/1073/99(H9N2))
cuacuauuugcuauccaua

SEQ ID NO: 362986 - RNA, 20 nt, Influenza A virus (A/Hong Kong/1073/99(H9N2))
cuacuauuugcuauccauac

SEQ ID NO: 362987 - RNA, 23 nt, Influenza A virus (A/Hong Kong/1073/99(H9N2))
cuauuugcuauccauacugucca

SEQ ID NO: 362988 - RNA, 20 nt, Influenza A virus (A/Hong Kong/1073/99(H9N2))
cuguccaaaaaaguaccuug

SEQ ID NO: 362989 - RNA, 14 nt, Influenza A virus (A/Hong Kong/1073/99(H9N2))
cuuguccuucauga

SEQ ID NO: 362990 - RNA, 15 nt, Influenza A virus (A/Hong Kong/1073/99(H9N2))
cuuguccuucaugaa

SEQ ID NO: 362991 - RNA, 16 nt, Influenza A virus (A/Hong Kong/1073/99(H9N2))
cuuguccuucaugaaa

SEQ ID NO: 362992 - RNA, 18 nt, Influenza A virus (A/Hong Kong/1073/99(H9N2))
gaauuguuuaaaaacgac

SEQ ID NO: 362993 - RNA, 21 nt, Influenza A virus (A/Hong Kong/1073/99(H9N2))
gcuacuauuugcuauccauac

SEQ ID NO: 362994 - RNA, 22 nt, Influenza A virus (A/Hong Kong/1073/99(H9N2))
gcuacuauuugcuauccauacu

SEQ ID NO: 362995 - RNA, 17 nt, Influenza A virus (A/Hong Kong/1073/99(H9N2))
gcuauccauacugucca

SEQ ID NO: 362996 - RNA, 16 nt, Influenza A virus (A/Hong Kong/1073/99(H9N2))
gcuuguccuucaugaa

SEQ ID NO: 362997 - RNA, 21 nt, Influenza A virus (A/Hong Kong/1073/99(H9N2))
ggcaaugcuacuauuugcuau

SEQ ID NO: 362998 - RNA, 14 nt, Influenza A virus (A/Hong Kong/1073/99(H9N2))
guccuucaugaaaa

SEQ ID NO: 362999 - RNA, 24 nt, Influenza A virus (A/Hong Kong/1073/99(H9N2))
uacuauuugcuauccauacugucc

SEQ ID NO: 363000 - RNA, 14 nt, Influenza A virus (A/Hong Kong/1073/99(H9N2))
uacuguccaaaaaa

SEQ ID NO: 363001 - RNA, 15 nt, Influenza A virus (A/Hong Kong/1073/99(H9N2))
uacuguccaaaaaag

SEQ ID NO: 363002 - RNA, 13 nt, Influenza A virus (A/Hong Kong/1073/99(H9N2))
uccauacugucca

SEQ ID NO: 363003 - RNA, 15 nt, Influenza A virus (A/Hong Kong/1073/99(H9N2))
uccauacuguccaaa

SEQ ID NO: 363004 - RNA, 17 nt, Influenza A virus (A/Hong Kong/1073/99(H9N2))
uccauacuguccaaaaa

SEQ ID NO: 363005 - RNA, 19 nt, Influenza A virus (A/Hong Kong/1073/99(H9N2))
ugcuacuauuugcuaucca

SEQ ID NO: 363006 - RNA, 12 nt, Influenza A virus (A/Hong Kong/1073/99(H9N2))
aaaaaguaccuu

SEQ ID NO: 363007 - RNA, 19 nt, Influenza A virus (A/Hong Kong/1073/99(H9N2))
aaugcuacuauuugcuauc

SEQ ID NO: 363008 - RNA, 11 nt, Influenza A virus (A/Hong Kong/1073/99(H9N2))
acgaccuuguu

SEQ ID NO: 363009 - RNA, 15 nt, Influenza A virus (A/Hong Kong/1073/99(H9N2))
acuauuugcuaucca

SEQ ID NO: 363010 - RNA, 11 nt, Influenza A virus (A/Hong Kong/1073/99(H9N2))
acuguccaaaa

SEQ ID NO: 363011 - RNA, 13 nt, Influenza A virus (A/Hong Kong/1073/99(H9N2))
acuguccaaaaaa

SEQ ID NO: 363012 - RNA, 18 nt, Influenza A virus (A/Hong Kong/1073/99(H9N2))
acuguccaaaaaaguacc

SEQ ID NO: 363013 - RNA, 23 nt, Influenza A virus (A/Hong Kong/1073/99(H9N2))
acuguccaaaaaaguaccuuguu

SEQ ID NO: 363014 - RNA, 15 nt, Influenza A virus (A/Hong Kong/1073/99(H9N2))
auacuguccaaaaaa

SEQ ID NO: 363015 - RNA, 14 nt, Influenza A virus (A/Hong Kong/1073/99(H9N2))
auccauacugucca

SEQ ID NO: 363016 - RNA, 13 nt, Influenza A virus (A/Hong Kong/1073/99(H9N2))
auuugcuauccau

SEQ ID NO: 363017 - RNA, 15 nt, Influenza A virus (A/Hong Kong/1073/99(H9N2))
auuugcuauccauac

SEQ ID NO: 363018 - RNA, 20 nt, Influenza A virus (A/Hong Kong/1073/99(H9N2))
auuugcuauccauacugucc

SEQ ID NO: 363019 - RNA, 15 nt, Influenza A virus (A/Hong Kong/1073/99(H9N2))
cauacuguccaaaaa

SEQ ID NO: 363020 - RNA, 22 nt, Influenza A virus (A/Hong Kong/1073/99(H9N2))
cgucuuuucuucaaaugcauuu

SEQ ID NO: 363021 - RNA, 17 nt, Influenza A virus (A/Hong Kong/1073/99(H9N2))
cuacuauuugcuaucca

SEQ ID NO: 363022 - RNA, 18 nt, Influenza A virus (A/Hong Kong/1073/99(H9N2))
cuacuauuugcuauccau

SEQ ID NO: 363023 - RNA, 14 nt, Influenza A virus (A/Hong Kong/1073/99(H9N2))
cuauccauacuguc

SEQ ID NO: 363024 - RNA, 17 nt, Influenza A virus (A/Hong Kong/1073/99(H9N2))
cuauuugcuauccauac

SEQ ID NO: 363025 - RNA, 18 nt, Influenza A virus (A/Hong Kong/1073/99(H9N2))
cuguccaaaaaaguaccu

SEQ ID NO: 363026 - RNA, 19 nt, Influenza A virus (A/Hong Kong/1073/99(H9N2))
cuuuucuucaaaugcauuu

SEQ ID NO: 363027 - RNA, 22 nt, Influenza A virus (A/Hong Kong/1073/99(H9N2))
gaauuguuuaaaaacgaccuug

SEQ ID NO: 363028 - RNA, 16 nt, Influenza A virus (A/Hong Kong/1073/99(H9N2))
gcaaugcuacuauuug

SEQ ID NO: 363029 - RNA, 16 nt, Influenza A virus (A/Hong Kong/1073/99(H9N2))
guccaaaaaaguaccu

SEQ ID NO: 363030 - RNA, 22 nt, Influenza A virus (A/Hong Kong/1073/99(H9N2))
guggcaaugcuacuauuugcua

SEQ ID NO: 363031 - RNA, 19 nt, Influenza A virus (A/Hong Kong/1073/99(H9N2))
uacuauuugcuauccauac

SEQ ID NO: 363032 - RNA, 20 nt, Influenza A virus (A/Hong Kong/1073/99(H9N2))
uacuguccaaaaaaguaccu

SEQ ID NO: 363033 - RNA, 15 nt, Influenza A virus (A/Hong Kong/1073/99(H9N2))
uagcuuugagcaaau

SEQ ID NO: 363034 - RNA, 19 nt, Influenza A virus (A/Hong Kong/1073/99(H9N2))
uauccauacuguccaaaaa

SEQ ID NO: 363035 - RNA, 14 nt, Influenza A virus (A/Hong Kong/1073/99(H9N2))
uauuugcuauccau

SEQ ID NO: 363036 - RNA, 16 nt, Influenza A virus (A/Hong Kong/1073/99(H9N2))
uauuugcuauccauac

SEQ ID NO: 363037 - RNA, 15 nt, Influenza A virus (A/Hong Kong/1073/99(H9N2))
uccaaaaaaguaccu

SEQ ID NO: 363038 - RNA, 18 nt, Influenza A virus (A/Hong Kong/1073/99(H9N2))
uccaaaaaaguaccuugu

SEQ ID NO: 363039 - RNA, 12 nt, Influenza A virus (A/Hong Kong/1073/99(H9N2))
uccuucaugaaa

SEQ ID NO: 363040 - RNA, 23 nt, Influenza A virus (A/Hong Kong/1073/99(H9N2))
ucgaauuguuuaaaaacgaccuu

SEQ ID NO: 363041 - RNA, 22 nt, Influenza A virus (A/Hong Kong/1073/99(H9N2))
ugcuauccauacuguccaaaaa

SEQ ID NO: 363042 - RNA, 23 nt, Influenza A virus (A/Hong Kong/1073/99(H9N2))
ugcuauccauacuguccaaaaaa

SEQ ID NO: 363043 - RNA, 20 nt, Influenza A virus (A/Hong Kong/1073/99(H9N2))
uggcaaugcuacuauuugcu

SEQ ID NO: 363044 - RNA, 22 nt, Influenza A virus (A/Hong Kong/1073/99(H9N2))
uggcaaugcuacuauuugcuau

SEQ ID NO: 363045 - RNA, 13 nt, Influenza A virus (A/Hong Kong/1073/99(H9N2))
uguccaaaaaagu

SEQ ID NO: 363046 - RNA, 18 nt, Influenza A virus (A/Hong Kong/1073/99(H9N2))
uucuucaaaugcauuuau

SEQ ID NO: 363047 - RNA, 20 nt, Influenza A virus (A/Hong Kong/1073/99(H9N2))
uugcuauccauacuguccaa

SEQ ID NO: 363048 - RNA, 22 nt, Influenza A virus (A/Hong Kong/1073/99(H9N2))
uugcuauccauacuguccaaaa

SEQ ID NO: 363049 - RNA, 23 nt, Influenza A virus (A/Hong Kong/1073/99(H9N2))
uuguggcaaugcuacuauuugcu

SEQ ID NO: 363050 - RNA, 14 nt, Influenza A virus (A/Hong Kong/1073/99(H9N2))
uuugcuauccauac

SEQ ID NO: 363051 - RNA, 17 nt, Influenza A virus (A/Hong Kong/1073/99(H9N2))
uuugcuauccauacugu

SEQ ID NO: 363052 - RNA, 15 nt, Influenza A virus (A/Hong Kong/1073/99(H9N2))
ugcuauccauacugu

SEQ ID NO: 363053 - RNA, 19 nt, Influenza A virus (A/Hong Kong/1073/99(H9N2))
ugcuauccauacuguccaa

SEQ ID NO: 363054 - RNA, 15 nt, Influenza A virus (A/Hong Kong/1073/99(H9N2))
uguccuucaugaaaa

SEQ ID NO: 363055 - RNA, 22 nt, Influenza A virus (A/Hong Kong/1073/99(H9N2))
uguggcaaugcuacuauuugcu

SEQ ID NO: 363056 - RNA, 20 nt, Influenza A virus (A/Hong Kong/1073/99(H9N2))
uugcuugaaguggagcaaga

SEQ ID NO: 363057 - RNA, 14 nt, Influenza A virus (A/Hong Kong/1073/99(H9N2))
uuguccuucaugaa

SEQ ID NO: 363058 - RNA, 15 nt, Influenza A virus (A/Hong Kong/1073/99(H9N2))
uuguccuucaugaaa

SEQ ID NO: 363059 - RNA, 13 nt, Influenza A virus (A/Hong Kong/1073/99(H9N2))
uuugcuauccaua

SEQ ID NO: 363060 - RNA, 23 nt, Influenza A virus (A/Hong Kong/1073/99(H9N2))
uuugcuauccauacuguccaaaa

SEQ ID NO: 363061 - RNA, 11 nt, Influenza A virus (A/Puerto Rico/8/34/Mount Sinai(
aaaaaaugccu

SEQ ID NO: 363062 - RNA, 21 nt, Influenza A virus (A/Puerto Rico/8/34/Mount Sinai(
aaggaacagcagagugcugug

SEQ ID NO: 363063 - RNA, 20 nt, Influenza A virus (A/Puerto Rico/8/34/Mount Sinai(
aaggagugccaaagucuaug

SEQ ID NO: 363064 - RNA, 12 nt, Influenza A virus (A/Puerto Rico/8/34/Mount Sinai(
aauaugaggaaa

SEQ ID NO: 363065 - RNA, 22 nt, Influenza A virus (A/Puerto Rico/8/34/Mount Sinai(
acagagaauaguuuugagcaaa

SEQ ID NO: 363066 - RNA, 11 nt, Influenza A virus (A/Puerto Rico/8/34/Mount Sinai(
acuguccaaaa

SEQ ID NO: 363067 - RNA, 13 nt, Influenza A virus (A/Puerto Rico/8/34/Mount Sinai(
acuguccaaaaaa

SEQ ID NO: 363068 - RNA, 15 nt, Influenza A virus (A/Puerto Rico/8/34/Mount Sinai(
agaaauaugaggaaa

SEQ ID NO: 363069 - RNA, 15 nt, Influenza A virus (A/Puerto Rico/8/34/Mount Sinai(
agaagugagacacaa

SEQ ID NO: 363070 - RNA, 21 nt, Influenza A virus (A/Puerto Rico/8/34/Mount Sinai(
agaauuucagaaauaugagga

SEQ ID NO: 363071 - RNA, 22 nt, Influenza A virus (A/Puerto Rico/8/34/Mount Sinai(
agaauuucagaaauaugaggaa

SEQ ID NO: 363072 - RNA, 14 nt, Influenza A virus (A/Puerto Rico/8/34/Mount Sinai(
agcuuguccuucau

SEQ ID NO: 363073 - RNA, 17 nt, Influenza A virus (A/Puerto Rico/8/34/Mount Sinai(
agcuuguccuucaugaa

SEQ ID NO: 363074 - RNA, 17 nt, Influenza A virus (A/Puerto Rico/8/34/Mount Sinai(
agugcuacuauuugcua

SEQ ID NO: 363075 - RNA, 20 nt, Influenza A virus (A/Puerto Rico/8/34/Mount Sinai(
aguuuaaaaacgaccuuguu

SEQ ID NO: 363076 - RNA, 13 nt, Influenza A virus (A/Puerto Rico/8/34/Mount Sinai(
augaaaaaaugcc

SEQ ID NO: 363077 - RNA, 16 nt, Influenza A virus (A/Puerto Rico/8/34/Mount Sinai(
augaggaaaaacaccc

SEQ ID NO: 363078 - RNA, 18 nt, Influenza A virus (A/Puerto Rico/8/34/Mount Sinai(
auuuagcuuguccuucau

SEQ ID NO: 363079 - RNA, 13 nt, Influenza A virus (A/Puerto Rico/8/34/Mount Sinai(
auuugcuauccau

SEQ ID NO: 363080 - RNA, 15 nt, Influenza A virus (A/Puerto Rico/8/34/Mount Sinai(
caaaaaacuccuugu

SEQ ID NO: 363081 - RNA, 14 nt, Influenza A virus (A/Puerto Rico/8/34/Mount Sinai(
caaaaaaguaccuu

SEQ ID NO: 363082 - RNA, 18 nt, Influenza A virus (A/Puerto Rico/8/34/Mount Sinai(
caugaaaaaaugccuugu

SEQ ID NO: 363083 - RNA, 12 nt, Influenza A virus (A/Puerto Rico/8/34/Mount Sinai(
ccuucaugaaaa

SEQ ID NO: 363084 - RNA, 19 nt, Influenza A virus (A/Puerto Rico/8/34/Mount Sinai(
ccuucaugaaaaaaugccu

SEQ ID NO: 363085 - RNA, 22 nt, Influenza A virus (A/Puerto Rico/8/34/Mount Sinai(
cgucuuuuuuucaaaugcauuu

SEQ ID NO: 363086 - RNA, 17 nt, Influenza A virus (A/Puerto Rico/8/34/Mount Sinai(
cuacuauuugcuaucca

SEQ ID NO: 363087 - RNA, 14 nt, Influenza A virus (A/Puerto Rico/8/34/Mount Sinai(
cuauccauacuguc

SEQ ID NO: 363088 - RNA, 18 nt, Influenza A virus (A/Puerto Rico/8/34/Mount Sinai(
cuguccaaaaaaguaccu

SEQ ID NO: 363089 - RNA, 20 nt, Influenza A virus (A/Puerto Rico/8/34/Mount Sinai(
cuguccaaaaaaguaccuug

SEQ ID NO: 363090 - RNA, 14 nt, Influenza A virus (A/Puerto Rico/8/34/Mount Sinai(
cuuguccuucauga

SEQ ID NO: 363091 - RNA, 15 nt, Influenza A virus (A/Puerto Rico/8/34/Mount Sinai(
cuuguccuucaugaa

SEQ ID NO: 363092 - RNA, 16 nt, Influenza A virus (A/Puerto Rico/8/34/Mount Sinai(
cuuguccuucaugaaa

SEQ ID NO: 363093 - RNA, 20 nt, Influenza A virus (A/Puerto Rico/8/34/Mount Sinai(
gaauuucagaaauaugagga

SEQ ID NO: 363094 - RNA, 13 nt, Influenza A virus (A/Puerto Rico/8/34/Mount Sinai(
gaggaaaaacacc

SEQ ID NO: 363095 - RNA, 21 nt, Influenza A virus (A/Puerto Rico/8/34/Mount Sinai(
gcagugcuacuauuugcuauc

SEQ ID NO: 363096 - RNA, 22 nt, Influenza A virus (A/Puerto Rico/8/34/Mount Sinai(
gccuuacaucuauugcuugaag

SEQ ID NO: 363097 - RNA, 14 nt, Influenza A virus (A/Puerto Rico/8/34/Mount Sinai(
guccuucaugaaaa

SEQ ID NO: 363098 - RNA, 12 nt, Influenza A virus (A/Puerto Rico/8/34/Mount Sinai(
uacuauuugcua

SEQ ID NO: 363099 - RNA, 14 nt, Influenza A virus (A/Puerto Rico/8/34/Mount Sinai(
uacuguccaaaaaa

SEQ ID NO: 363100 - RNA, 16 nt, Influenza A virus (A/Puerto Rico/8/34/Mount Sinai(
ucaugaaaaaaugccu

SEQ ID NO: 363101 - RNA, 16 nt, Influenza A virus (A/Puerto Rico/8/34/Mount Sinai(
ucauugggaucuugca

SEQ ID NO: 363102 - RNA, 15 nt, Influenza A virus (A/Puerto Rico/8/34/Mount Sinai(
uccaaaaaaguaccu

SEQ ID NO: 363103 - RNA, 15 nt, Influenza A virus (A/Puerto Rico/8/34/Mount Sinai(
uccauacuguccaaa

SEQ ID NO: 363104 - RNA, 17 nt, Influenza A virus (A/Puerto Rico/8/34/Mount Sinai(
uccauacuguccaaaaa

SEQ ID NO: 363105 - RNA, 18 nt, Influenza A virus (A/Puerto Rico/8/34/Mount Sinai(
ucuguucaaaaaacuccu

SEQ ID NO: 363106 - RNA, 21 nt, Influenza A virus (A/Puerto Rico/8/34/Mount Sinai(
ugaaaaaaugccuuguuucua

SEQ ID NO: 363107 - RNA, 23 nt, Influenza A virus (A/Puerto Rico/8/34/Mount Sinai(
ugcuauccauacuguccaaaaaa

SEQ ID NO: 363108 - RNA, 20 nt, Influenza A virus (A/Puerto Rico/8/34/Mount Sinai(
uugcuugaaguggagcaaga

SEQ ID NO: 363109 - RNA, 15 nt, Influenza A virus (A/Puerto Rico/8/34/Mount Sinai(
uuguccuucaugaaa

SEQ ID NO: 363110 - RNA, 13 nt, Influenza A virus (A/Puerto Rico/8/34/Mount Sinai(
uuugcuauccaua

SEQ ID NO: 363111 - RNA, 12 nt, Influenza A virus (A/Puerto Rico/8/34/Mount Sinai(
aaaaaaugccuu

SEQ ID NO: 363112 - RNA, 12 nt, Influenza A virus (A/Puerto Rico/8/34/Mount Sinai(
aaaaacacccuu

SEQ ID NO: 363113 - RNA, 12 nt, Influenza A virus (A/Puerto Rico/8/34/Mount Sinai(
aaaaaguaccuu

SEQ ID NO: 363114 - RNA, 11 nt, Influenza A virus (A/Puerto Rico/8/34/Mount Sinai(
aaaaaugccuu

SEQ ID NO: 363115 - RNA, 21 nt, Influenza A virus (A/Puerto Rico/8/34/Mount Sinai(
aaauaugaggaaaaacacccu

SEQ ID NO: 363116 - RNA, 18 nt, Influenza A virus (A/Puerto Rico/8/34/Mount Sinai(
aauaugaggaaaaacacc

SEQ ID NO: 363117 - RNA, 21 nt, Influenza A virus (A/Puerto Rico/8/34/Mount Sinai(
aauaugaggaaaaacacccuu

SEQ ID NO: 363118 - RNA, 19 nt, Influenza A virus (A/Puerto Rico/8/34/Mount Sinai(
aauuuagcuuguccuucau

SEQ ID NO: 363119 - RNA, 23 nt, Influenza A virus (A/Puerto Rico/8/34/Mount Sinai(
acacaaacugaagauaacagaga

SEQ ID NO: 363120 - RNA, 16 nt, Influenza A virus (A/Puerto Rico/8/34/Mount Sinai(
acuauuugcuauccau

SEQ ID NO: 363121 - RNA, 23 nt, Influenza A virus (A/Puerto Rico/8/34/Mount Sinai(
acuguccaaaaaaguaccuuguu

SEQ ID NO: 363122 - RNA, 14 nt, Influenza A virus (A/Puerto Rico/8/34/Mount Sinai(
agaagugagacaca

SEQ ID NO: 363123 - RNA, 18 nt, Influenza A virus (A/Puerto Rico/8/34/Mount Sinai(
agaauuucagaaauauga

SEQ ID NO: 363124 - RNA, 16 nt, Influenza A virus (A/Puerto Rico/8/34/Mount Sinai(
agcuuguccuucauga

SEQ ID NO: 363125 - RNA, 17 nt, Influenza A virus (A/Puerto Rico/8/34/Mount Sinai(
aguuuaaaaacgaccuu

SEQ ID NO: 363126 - RNA, 15 nt, Influenza A virus (A/Puerto Rico/8/34/Mount Sinai(
auacuguccaaaaaa

SEQ ID NO: 363127 - RNA, 23 nt, Influenza A virus (A/Puerto Rico/8/34/Mount Sinai(
auacuguccaaaaaaguaccuug

SEQ ID NO: 363128 - RNA, 16 nt, Influenza A virus (A/Puerto Rico/8/34/Mount Sinai(
auaugaggaaaaacac

SEQ ID NO: 363129 - RNA, 13 nt, Influenza A virus (A/Puerto Rico/8/34/Mount Sinai(
auccauacugucc

SEQ ID NO: 363130 - RNA, 18 nt, Influenza A virus (A/Puerto Rico/8/34/Mount Sinai(
auccauacuguccaaaaa

SEQ ID NO: 363131 - RNA, 20 nt, Influenza A virus (A/Puerto Rico/8/34/Mount Sinai(
auuugcuauccauacugucc

SEQ ID NO: 363132 - RNA, 12 nt, Influenza A virus (A/Puerto Rico/8/34/Mount Sinai(
cagaaauaugag

SEQ ID NO: 363133 - RNA, 23 nt, Influenza A virus (A/Puerto Rico/8/34/Mount Sinai(
cagugcuacuauuugcuauccau

SEQ ID NO: 363134 - RNA, 16 nt, Influenza A virus (A/Puerto Rico/8/34/Mount Sinai(
caugaaaaaaugccuu

SEQ ID NO: 363135 - RNA, 17 nt, Influenza A virus (A/Puerto Rico/8/34/Mount Sinai(
caugaaaaaaugccuug

SEQ ID NO: 363136 - RNA, 17 nt, Influenza A virus (A/Puerto Rico/8/34/Mount Sinai(
ccauacuguccaaaaaa

SEQ ID NO: 363137 - RNA, 13 nt, Influenza A virus (A/Puerto Rico/8/34/Mount Sinai(
cuacuauuugcua

SEQ ID NO: 363138 - RNA, 18 nt, Influenza A virus (A/Puerto Rico/8/34/Mount Sinai(
cuacuauuugcuauccau

SEQ ID NO: 363139 - RNA, 19 nt, Influenza A virus (A/Puerto Rico/8/34/Mount Sinai(
cuacuauuugcuauccaua

SEQ ID NO: 363140 - RNA, 20 nt, Influenza A virus (A/Puerto Rico/8/34/Mount Sinai(
cuacuauuugcuauccauac

SEQ ID NO: 363141 - RNA, 17 nt, Influenza A virus (A/Puerto Rico/8/34/Mount Sinai(
cuauuugcuauccauac

SEQ ID NO: 363142 - RNA, 21 nt, Influenza A virus (A/Puerto Rico/8/34/Mount Sinai(
cuucaugaaaaaaugccuugu

SEQ ID NO: 363143 - RNA, 18 nt, Influenza A virus (A/Puerto Rico/8/34/Mount Sinai(
gaaauaugaggaaaaaca

SEQ ID NO: 363144 - RNA, 18 nt, Influenza A virus (A/Puerto Rico/8/34/Mount Sinai(
gaauaguuuaaaaacgac

SEQ ID NO: 363145 - RNA, 22 nt, Influenza A virus (A/Puerto Rico/8/34/Mount Sinai(
gaauaguuuaaaaacgaccuug

SEQ ID NO: 363146 - RNA, 23 nt, Influenza A virus (A/Puerto Rico/8/34/Mount Sinai(
gaauuucagaaauaugaggaaaa

SEQ ID NO: 363147 - RNA, 14 nt, Influenza A virus (A/Puerto Rico/8/34/Mount Sinai(
gacacaaacugaag

SEQ ID NO: 363148 - RNA, 22 nt, Influenza A virus (A/Puerto Rico/8/34/Mount Sinai(
gaggaaaaacacccuuguuucu

SEQ ID NO: 363149 - RNA, 22 nt, Influenza A virus (A/Puerto Rico/8/34/Mount Sinai(
gcuacuauuugcuauccauacu

SEQ ID NO: 363150 - RNA, 23 nt, Influenza A virus (A/Puerto Rico/8/34/Mount Sinai(
gcuugaaguggagcaagagauaa

SEQ ID NO: 363151 - RNA, 16 nt, Influenza A virus (A/Puerto Rico/8/34/Mount Sinai(
gcuuguccuucaugaa

SEQ ID NO: 363152 - RNA, 16 nt, Influenza A virus (A/Puerto Rico/8/34/Mount Sinai(
guccaaaaaaguaccu

SEQ ID NO: 363153 - RNA, 22 nt, Influenza A virus (A/Puerto Rico/8/34/Mount Sinai(
guggcagugcuacuauuugcua

SEQ ID NO: 363154 - RNA, 19 nt, Influenza A virus (A/Puerto Rico/8/34/Mount Sinai(
uacuauuugcuauccauac

SEQ ID NO: 363155 - RNA, 20 nt, Influenza A virus (A/Puerto Rico/8/34/Mount Sinai(
uacuguccaaaaaaguaccu

SEQ ID NO: 363156 - RNA, 22 nt, Influenza A virus (A/Puerto Rico/8/34/Mount Sinai(
uagaauuucagaaauaugagga

SEQ ID NO: 363157 - RNA, 19 nt, Influenza A virus (A/Puerto Rico/8/34/Mount Sinai(
uagcuuguccuucaugaaa

SEQ ID NO: 363158 - RNA, 16 nt, Influenza A virus (A/Puerto Rico/8/34/Mount Sinai(
uaugaggaaaaacacc

SEQ ID NO: 363159 - RNA, 17 nt, Influenza A virus (A/Puerto Rico/8/34/Mount Sinai(
uaugaggaaaaacaccc

SEQ ID NO: 363160 - RNA, 18 nt, Influenza A virus (A/Puerto Rico/8/34/Mount Sinai(
uccaaaaaaguaccuugu

SEQ ID NO: 363161 - RNA, 12 nt, Influenza A virus (A/Puerto Rico/8/34/Mount Sinai(
uccuucaugaaa

SEQ ID NO: 363162 - RNA, 22 nt, Influenza A virus (A/Puerto Rico/8/34/Mount Sinai(
ucgaauaguuuaaaaacgaccu

SEQ ID NO: 363163 - RNA, 23 nt, Influenza A virus (A/Puerto Rico/8/34/Mount Sinai(
ucgaauaguuuaaaaacgaccuu

SEQ ID NO: 363164 - RNA, 19 nt, Influenza A virus (A/Puerto Rico/8/34/Mount Sinai(
ucuguucaaaaaacuccuu

SEQ ID NO: 363165 - RNA, 11 nt, Influenza A virus (A/Puerto Rico/8/34/Mount Sinai(
ucuugcacuug

SEQ ID NO: 363166 - RNA, 16 nt, Influenza A virus (A/Puerto Rico/8/34/Mount Sinai(
ugaaaaaaugccuugu

SEQ ID NO: 363167 - RNA, 17 nt, Influenza A virus (A/Puerto Rico/8/34/Mount Sinai(
ugauugaagaagugaga

SEQ ID NO: 363168 - RNA, 15 nt, Influenza A virus (A/Puerto Rico/8/34/Mount Sinai(
ugcuauccauacugu

SEQ ID NO: 363169 - RNA, 13 nt, Influenza A virus (A/Puerto Rico/8/34/Mount Sinai(
ugcuugaagugga

SEQ ID NO: 363170 - RNA, 20 nt, Influenza A virus (A/Puerto Rico/8/34/Mount Sinai(
uggcagugcuacuauuugcu

SEQ ID NO: 363171 - RNA, 15 nt, Influenza A virus (A/Puerto Rico/8/34/Mount Sinai(
uguccuucaugaaaa

SEQ ID NO: 363172 - RNA, 22 nt, Influenza A virus (A/Puerto Rico/8/34/Mount Sinai(
uguggcagugcuacuauuugcu

SEQ ID NO: 363173 - RNA, 14 nt, Influenza A virus (A/Puerto Rico/8/34/Mount Sinai(
uucagaaauaugag

SEQ ID NO: 363174 - RNA, 17 nt, Influenza A virus (A/Puerto Rico/8/34/Mount Sinai(
uucaugaaaaaaugccu

SEQ ID NO: 363175 - RNA, 18 nt, Influenza A virus (A/Puerto Rico/8/34/Mount Sinai(
uucaugaaaaaaugccuu

SEQ ID NO: 363176 - RNA, 14 nt, Influenza A virus (A/Puerto Rico/8/34/Mount Sinai(
uuguccuucaugaa

SEQ ID NO: 363177 - RNA, 17 nt, Influenza A virus (A/Puerto Rico/8/34/Mount Sinai(
uuuagcuuguccuucau

SEQ ID NO: 363178 - RNA, 20 nt, Influenza A virus (A/Puerto Rico/8/34/Mount Sinai(
uuucagaaauaugaggaaaa

SEQ ID NO: 363179 - RNA, 12 nt, Influenza A virus (A/Puerto Rico/8/34/Mount Sinai(
uuuugagcaaau

SEQ ID NO: 363180 - RNA, 14 nt, Influenza B virus
aaacguuauugaaa

SEQ ID NO: 363181 - RNA, 13 nt, Influenza B virus
aaagaaacaauga

SEQ ID NO: 363182 - RNA, 21 nt, Influenza B virus
aaaggaaauccaagccaaaga

SEQ ID NO: 363183 - RNA, 18 nt, Influenza B virus
aaaggacagaaacaagcu

SEQ ID NO: 363184 - RNA, 16 nt, Influenza B virus
aaaugcucuuguuacu

SEQ ID NO: 363185 - RNA, 14 nt, Influenza B virus
aaauugggaaaaau

SEQ ID NO: 363186 - RNA, 18 nt, Influenza B virus
aacacaagaaagugccug

SEQ ID NO: 363187 - RNA, 21 nt, Influenza B virus
aacaguuuuggagguggaaga

SEQ ID NO: 363188 - RNA, 22 nt, Influenza B virus
aagaaaauacucucugacaaca

SEQ ID NO: 363189 - RNA, 13 nt, Influenza B virus
aagaaacaaugaa

SEQ ID NO: 363190 - RNA, 21 nt, Influenza B virus
aagagggguaaacuugaaaau

SEQ ID NO: 363191 - RNA, 16 nt, Influenza B virus
aaggaaacucagcucc

SEQ ID NO: 363192 - RNA, 12 nt, Influenza B virus
aaggaaauccaa

SEQ ID NO: 363193 - RNA, 15 nt, Influenza B virus
aauaaaaauccucuu

SEQ ID NO: 363194 - RNA, 20 nt, Influenza B virus
aauaaaauauggagaagcau

SEQ ID NO: 363195 - RNA, 21 nt, Influenza B virus
aauccaaauaaggaggcaaua

SEQ ID NO: 363196 - RNA, 13 nt, Influenza B virus
aauccaagccaaa

SEQ ID NO: 363197 - RNA, 14 nt, Influenza B virus
aauccucuuguuac

SEQ ID NO: 363198 - RNA, 16 nt, Influenza B virus
aauccucuuguuacua

SEQ ID NO: 363199 - RNA, 20 nt, Influenza B virus
aaugcagacacuuugcucug

SEQ ID NO: 363200 - RNA, 13 nt, Influenza B virus
aauugcaaugagc

SEQ ID NO: 363201 - RNA, 14 nt, Influenza B virus
acacuauggcugug

SEQ ID NO: 363202 - RNA, 15 nt, Influenza B virus
acaugcggugcacaa

SEQ ID NO: 363203 - RNA, 17 nt, Influenza B virus
accaaaagaaugcagac

SEQ ID NO: 363204 - RNA, 20 nt, Influenza B virus
acguuauugaaaaaugcucu

SEQ ID NO: 363205 - RNA, 14 nt, Influenza B virus
acuguagugcucau

SEQ ID NO: 363206 - RNA, 20 nt, Influenza B virus
acuugaaaauacaaauaagg

SEQ ID NO: 363207 - RNA, 15 nt, Influenza B virus
agacacaauuaccaa

SEQ ID NO: 363208 - RNA, 16 nt, Influenza B virus
agacacuuugcucuga

SEQ ID NO: 363209 - RNA, 20 nt, Influenza B virus
agagaaccuuuuguugcuug

SEQ ID NO: 363210 - RNA, 17 nt, Influenza B virus
agaucaaaggaaacuca

SEQ ID NO: 363211 - RNA, 13 nt, Influenza B virus
agauucuuucaau

SEQ ID NO: 363212 - RNA, 16 nt, Influenza B virus
agcauauacugacaca

SEQ ID NO: 363213 - RNA, 16 nt, Influenza B virus
agcucccuugauaaua

SEQ ID NO: 363214 - RNA, 16 nt, Influenza B virus
agggcauagcgcucaa

SEQ ID NO: 363215 - RNA, 18 nt, Influenza B virus
aggugucaauucugagac

SEQ ID NO: 363216 - RNA, 22 nt, Influenza B virus
aggugucaauucugagacacaa

SEQ ID NO: 363217 - RNA, 16 nt, Influenza B virus
aguacguuugggaugu

SEQ ID NO: 363218 - RNA, 20 nt, Influenza B virus
aguaguugaagggcuuucaa

SEQ ID NO: 363219 - RNA, 21 nt, Influenza B virus
aguuguucuuacuagauuuaa

SEQ ID NO: 363220 - RNA, 21 nt, Influenza B virus
auaaaaauccucuuguuacua

SEQ ID NO: 363221 - RNA, 20 nt, Influenza B virus
auaaauguaaaaaaugcugu

SEQ ID NO: 363222 - RNA, 21 nt, Influenza B virus
auacuacaauggaacaagaaa

SEQ ID NO: 363223 - RNA, 16 nt, Influenza B virus
aucaaugucagugaau

SEQ ID NO: 363224 - RNA, 12 nt, Influenza B virus
auccucuuguua

SEQ ID NO: 363225 - RNA, 18 nt, Influenza B virus
augguuggaucuguucua

SEQ ID NO: 363226 - RNA, 23 nt, Influenza B virus
auuggucaaaauaaaauauggag

SEQ ID NO: 363227 - RNA, 21 nt, Influenza B virus
auuugcuugucaccauuacaa

SEQ ID NO: 363228 - RNA, 20 nt, Influenza B virus
auuuuauuugaacaguuguu

SEQ ID NO: 363229 - RNA, 24 nt, Influenza B virus
caaagaaacguuauugaaaaaugc

SEQ ID NO: 363230 - RNA, 16 nt, Influenza B virus
caaauaaggaauccaa

SEQ ID NO: 363231 - RNA, 20 nt, Influenza B virus
caaauugggaaaaaucccaa

SEQ ID NO: 363232 - RNA, 19 nt, Influenza B virus
caagaaagugccugcaauu

SEQ ID NO: 363233 - RNA, 22 nt, Influenza B virus
caauaaacagagaggugucaau

SEQ ID NO: 363234 - RNA, 16 nt, Influenza B virus
caauagggcauuugaa

SEQ ID NO: 363235 - RNA, 15 nt, Influenza B virus
cacuauggcugugac

SEQ ID NO: 363236 - RNA, 18 nt, Influenza B virus
cacuauggcugugacugu

SEQ ID NO: 363237 - RNA, 23 nt, Influenza B virus
cacuauggcugugacuguuucag

SEQ ID NO: 363238 - RNA, 24 nt, Influenza B virus
cacuuugcucugacccauuaugca

SEQ ID NO: 363239 - RNA, 17 nt, Influenza B virus
cagacacuuugcucuga

SEQ ID NO: 363240 - RNA, 16 nt, Influenza B virus
cagugaauaaaacugg

SEQ ID NO: 363241 - RNA, 15 nt, Influenza B virus
cauagcgcucaauuu

SEQ ID NO: 363242 - RNA, 19 nt, Influenza B virus
cauaguaguugaagggcuu

SEQ ID NO: 363243 - RNA, 19 nt, Influenza B virus
cauauacugacacauauca

SEQ ID NO: 363244 - RNA, 22 nt, Influenza B virus
cauggcuuggacaauagggcau

SEQ ID NO: 363245 - RNA, 19 nt, Influenza B virus
ccaaagaaacaaugaagaa

SEQ ID NO: 363246 - RNA, 22 nt, Influenza B virus
ccaacuguggaaaacuccauuu

SEQ ID NO: 363247 - RNA, 13 nt, Influenza B virus
ccaagccaaagaa

SEQ ID NO: 363248 - RNA, 15 nt, Influenza B virus
cguugaauacaugcg

SEQ ID NO: 363249 - RNA, 16 nt, Influenza B virus
cuaagaacacaagaaa

SEQ ID NO: 363250 - RNA, 16 nt, Influenza B virus
cuaugcauuuaagcaa

SEQ ID NO: 363251 - RNA, 22 nt, Influenza B virus
cucugacccauuaugcagcuca

SEQ ID NO: 363252 - RNA, 14 nt, Influenza B virus
cucuuguuacuacu

SEQ ID NO: 363253 - RNA, 22 nt, Influenza B virus
cugaggcaucuaguaucaguca

SEQ ID NO: 363254 - RNA, 21 nt, Influenza B virus
cugaugagauaauaaaaaugg

SEQ ID NO: 363255 - RNA, 16 nt, Influenza B virus
cuugucaccauuacaa

SEQ ID NO: 363256 - RNA, 16 nt, Influenza B virus
cuuuacuguagugcuc

SEQ ID NO: 363257 - RNA, 16 nt, Influenza B virus
gaaacaagcugaggca

SEQ ID NO: 363258 - RNA, 12 nt, Influenza B virus
gaaacaguuuug

SEQ ID NO: 363259 - RNA, 19 nt, Influenza B virus
gaaaggacagaaacaagcu

SEQ ID NO: 363260 - RNA, 16 nt, Influenza B virus
gaaagugccugcaauu

SEQ ID NO: 363261 - RNA, 18 nt, Influenza B virus
gaacaguuguucuuacua

SEQ ID NO: 363262 - RNA, 17 nt, Influenza B virus
gaagaacuuuaucucuu

SEQ ID NO: 363263 - RNA, 18 nt, Influenza B virus
gaagcauauacugacaca

SEQ ID NO: 363264 - RNA, 20 nt, Influenza B virus
gaauacaugcggugcacaaa

SEQ ID NO: 363265 - RNA, 18 nt, Influenza B virus
gacaauagggcauuugaa

SEQ ID NO: 363266 - RNA, 18 nt, Influenza B virus
gacacauaucauuccuau

SEQ ID NO: 363267 - RNA, 21 nt, Influenza B virus
gacacuauggcugugacuguu

SEQ ID NO: 363268 - RNA, 15 nt, Influenza B virus
gaccaaaagaaugca

SEQ ID NO: 363269 - RNA, 16 nt, Influenza B virus
gaccacauaguaguug

SEQ ID NO: 363270 - RNA, 16 nt, Influenza B virus
gacccauuaugcagcu

SEQ ID NO: 363271 - RNA, 14 nt, Influenza B virus
gauacuacaaugga

SEQ ID NO: 363272 - RNA, 21 nt, Influenza B virus
gaucaaaggaaacucagcucc

SEQ ID NO: 363273 - RNA, 22 nt, Influenza B virus
gcaauaaaauagacacuauggc

SEQ ID NO: 363274 - RNA, 22 nt, Influenza B virus
gcagacacuuugcucugaccca

SEQ ID NO: 363275 - RNA, 17 nt, Influenza B virus
gcagugcuuaugaaugu

SEQ ID NO: 363276 - RNA, 16 nt, Influenza B virus
gcauuugaaucaaaua

SEQ ID NO: 363277 - RNA, 16 nt, Influenza B virus
gcucauuugcuuguca

SEQ ID NO: 363278 - RNA, 13 nt, Influenza B virus
gcucuuguuacua

SEQ ID NO: 363279 - RNA, 15 nt, Influenza B virus
gcucuuguuacuacu

SEQ ID NO: 363280 - RNA, 18 nt, Influenza B virus
gguucggagagaucaaag

SEQ ID NO: 363281 - RNA, 15 nt, Influenza B virus
guaaaagaauugaug

SEQ ID NO: 363282 - RNA, 15 nt, Influenza B virus
guagagaauggacau

SEQ ID NO: 363283 - RNA, 18 nt, Influenza B virus
guauugggugaccacaua

SEQ ID NO: 363284 - RNA, 21 nt, Influenza B virus
guauuucuuacuaugcauuua

SEQ ID NO: 363285 - RNA, 17 nt, Influenza B virus
gucaauucugagacaca

SEQ ID NO: 363286 - RNA, 17 nt, Influenza B virus
gugcuuaugaauguaaa

SEQ ID NO: 363287 - RNA, 18 nt, Influenza B virus
guugcuuguggaccaaaa

SEQ ID NO: 363288 - RNA, 12 nt, Influenza B virus
uaaaaauccucu

SEQ ID NO: 363289 - RNA, 13 nt, Influenza B virus
uaaaaauccucuu

SEQ ID NO: 363290 - RNA, 22 nt, Influenza B virus
uaaaaauccucuuguuacuacu

SEQ ID NO: 363291 - RNA, 23 nt, Influenza B virus
uaaaauagacacuauggcuguga

SEQ ID NO: 363292 - RNA, 20 nt, Influenza B virus
uaagcaaauuguaaucaaug

SEQ ID NO: 363293 - RNA, 18 nt, Influenza B virus
uaaucaaugucagugaau

SEQ ID NO: 363294 - RNA, 16 nt, Influenza B virus
uacaugcggugcacaa

SEQ ID NO: 363295 - RNA, 14 nt, Influenza B virus
uagggcauuugaau

SEQ ID NO: 363296 - RNA, 18 nt, Influenza B virus
uauaucggaguugauggu

SEQ ID NO: 363297 - RNA, 18 nt, Influenza B virus
uaucauuccuaugcacac

SEQ ID NO: 363298 - RNA, 17 nt, Influenza B virus
uaucggaguugaugguc

SEQ ID NO: 363299 - RNA, 17 nt, Influenza B virus
uauggcugugacuguuu

SEQ ID NO: 363300 - RNA, 14 nt, Influenza B virus
ucaaaggaaacuca

SEQ ID NO: 363301 - RNA, 13 nt, Influenza B virus
ucaaauaaaaaga

SEQ ID NO: 363302 - RNA, 15 nt, Influenza B virus
ucaaugucagugaau

SEQ ID NO: 363303 - RNA, 14 nt, Influenza B virus
ucaauucugagaca

SEQ ID NO: 363304 - RNA, 15 nt, Influenza B virus
ucagauucuuucaau

SEQ ID NO: 363305 - RNA, 18 nt, Influenza B virus
ucagugaauaaaacugga

SEQ ID NO: 363306 - RNA, 15 nt, Influenza B virus
ucauuugcuugucac

SEQ ID NO: 363307 - RNA, 18 nt, Influenza B virus
uccaaauaaggaggcaau

SEQ ID NO: 363308 - RNA, 12 nt, Influenza B virus
uccaagccaaag

SEQ ID NO: 363309 - RNA, 19 nt, Influenza B virus
uccgcaugccaugauggua

SEQ ID NO: 363310 - RNA, 19 nt, Influenza B virus
uccuauuuuauuugaacag

SEQ ID NO: 363311 - RNA, 17 nt, Influenza B virus
uccugacaaugaugcau

SEQ ID NO: 363312 - RNA, 17 nt, Influenza B virus
aaaacaguaauagcuaa

SEQ ID NO: 363313 - RNA, 24 nt, Influenza B virus
aaaacuccauuuuccacauggcag

SEQ ID NO: 363314 - RNA, 16 nt, Influenza B virus
aaaauaaaauauggag

SEQ ID NO: 363315 - RNA, 22 nt, Influenza B virus
aaaauacaaauaaggaauccaa

SEQ ID NO: 363316 - RNA, 18 nt, Influenza B virus
aaaauccucuuguuacua

SEQ ID NO: 363317 - RNA, 19 nt, Influenza B virus
aaaauccucuuguuacuac

SEQ ID NO: 363318 - RNA, 18 nt, Influenza B virus
aaaaugcucuuguuacua

SEQ ID NO: 363319 - RNA, 20 nt, Influenza B virus
aaagaauugaugauaguaua

SEQ ID NO: 363320 - RNA, 15 nt, Influenza B virus
aaaggaaacucagcu

SEQ ID NO: 363321 - RNA, 16 nt, Influenza B virus
aaaggcucguguuucu

SEQ ID NO: 363322 - RNA, 15 nt, Influenza B virus
aaauaaaaauccucu

SEQ ID NO: 363323 - RNA, 18 nt, Influenza B virus
aaauaaggaauccaaaua

SEQ ID NO: 363324 - RNA, 21 nt, Influenza B virus
aaauacaaauaaggaauccaa

SEQ ID NO: 363325 - RNA, 16 nt, Influenza B virus
aaauccucuuguuacu

SEQ ID NO: 363326 - RNA, 15 nt, Influenza B virus
aacaagcugaggcau

SEQ ID NO: 363327 - RNA, 21 nt, Influenza B virus
aacauuguaugaaaugaagga

SEQ ID NO: 363328 - RNA, 24 nt, Influenza B virus
aacuccauuuuccacauggcagcu

SEQ ID NO: 363329 - RNA, 16 nt, Influenza B virus
aagaacuuuaucucuu

SEQ ID NO: 363330 - RNA, 19 nt, Influenza B virus
aagccaaagaaacaaugaa

SEQ ID NO: 363331 - RNA, 20 nt, Influenza B virus
aauacaaauaaggaauccaa

SEQ ID NO: 363332 - RNA, 14 nt, Influenza B virus
aauccaagccaaag

SEQ ID NO: 363333 - RNA, 17 nt, Influenza B virus
aaugaugcauuggucaa

SEQ ID NO: 363334 - RNA, 12 nt, Influenza B virus
aauggacauaua

SEQ ID NO: 363335 - RNA, 14 nt, Influenza B virus
aaugucagugaaua

SEQ ID NO: 363336 - RNA, 21 nt, Influenza B virus
aauuaccaaaaggaaauccaa

SEQ ID NO: 363337 - RNA, 19 nt, Influenza B virus
aauucugagacacaauuac

SEQ ID NO: 363338 - RNA, 17 nt, Influenza B virus
aauugcaaugagcccaa

SEQ ID NO: 363339 - RNA, 18 nt, Influenza B virus
acaaauaaggaauccaaa

SEQ ID NO: 363340 - RNA, 13 nt, Influenza B virus
acaauggaacaag

SEQ ID NO: 363341 - RNA, 23 nt, Influenza B virus
acaauuaccaaaaggaaauccaa

SEQ ID NO: 363342 - RNA, 16 nt, Influenza B virus
acaugcggugcacaaa

SEQ ID NO: 363343 - RNA, 23 nt, Influenza B virus
acguuugggauguggguguuuac

SEQ ID NO: 363344 - RNA, 17 nt, Influenza B virus
acuauggcugugacugu

SEQ ID NO: 363345 - RNA, 13 nt, Influenza B virus
acuguagugcuca

SEQ ID NO: 363346 - RNA, 18 nt, Influenza B virus
acuugaaaauacaaauaa

SEQ ID NO: 363347 - RNA, 19 nt, Influenza B virus
agaaccuuuuguugcuugu

SEQ ID NO: 363348 - RNA, 17 nt, Influenza B virus
agacacaauuaccaaaa

SEQ ID NO: 363349 - RNA, 19 nt, Influenza B virus
agacacuauggcugugacu

SEQ ID NO: 363350 - RNA, 15 nt, Influenza B virus
agauaauaaaaaugg

SEQ ID NO: 363351 - RNA, 17 nt, Influenza B virus
aggaaauccaagccaaa

SEQ ID NO: 363352 - RNA, 19 nt, Influenza B virus
aggcaucuaguaucaguca

SEQ ID NO: 363353 - RNA, 19 nt, Influenza B virus
agggcuuucaacugaugag

SEQ ID NO: 363354 - RNA, 14 nt, Influenza B virus
auaauaaaaauggg

SEQ ID NO: 363355 - RNA, 12 nt, Influenza B virus
auccaaauaagg

SEQ ID NO: 363356 - RNA, 19 nt, Influenza B virus
auccaaauaaggaggcaau

SEQ ID NO: 363357 - RNA, 19 nt, Influenza B virus
auccuaagaacacaagaaa

SEQ ID NO: 363358 - RNA, 15 nt, Influenza B virus
auccucuuguuacua

SEQ ID NO: 363359 - RNA, 20 nt, Influenza B virus
augcagacacuuugcucuga

SEQ ID NO: 363360 - RNA, 12 nt, Influenza B virus
augcucuuguua

SEQ ID NO: 363361 - RNA, 23 nt, Influenza B virus
augucuaugggguuauuggucau

SEQ ID NO: 363362 - RNA, 18 nt, Influenza B virus
auucugagacacaauuac

SEQ ID NO: 363363 - RNA, 13 nt, Influenza B virus
auugaugauagua

SEQ ID NO: 363364 - RNA, 22 nt, Influenza B virus
auuguaaucaaugucagugaau

SEQ ID NO: 363365 - RNA, 21 nt, Influenza B virus
auuguuucugaaaaaugcucu

SEQ ID NO: 363366 - RNA, 22 nt, Influenza B virus
auuucauggcuuggacaauagg

SEQ ID NO: 363367 - RNA, 19 nt, Influenza B virus
auuucuuacuaugcauuua

SEQ ID NO: 363368 - RNA, 22 nt, Influenza B virus
auuuuaucagcucuccauuuca

SEQ ID NO: 363369 - RNA, 14 nt, Influenza B virus
caaaaggaaaucca

SEQ ID NO: 363370 - RNA, 21 nt, Influenza B virus
caaaaggaaauccaagccaaa

SEQ ID NO: 363371 - RNA, 15 nt, Influenza B virus
caaauaaggaaucca

SEQ ID NO: 363372 - RNA, 20 nt, Influenza B virus
caaauaaggaauccaaauaa

SEQ ID NO: 363373 - RNA, 18 nt, Influenza B virus
caacauccuaagaacaca

SEQ ID NO: 363374 - RNA, 19 nt, Influenza B virus
caacauccuaagaacacaa

SEQ ID NO: 363375 - RNA, 21 nt, Influenza B virus
caauagggcauuugaaucaaa

SEQ ID NO: 363376 - RNA, 12 nt, Influenza B virus
caaugagcccaa

SEQ ID NO: 363377 - RNA, 22 nt, Influenza B virus
caauuaccaaaaggaaauccaa

SEQ ID NO: 363378 - RNA, 12 nt, Influenza B virus
caccauuacaaa

SEQ ID NO: 363379 - RNA, 13 nt, Influenza B virus
cagauucuuucaa

SEQ ID NO: 363380 - RNA, 16 nt, Influenza B virus
cagcucuccauuucau

SEQ ID NO: 363381 - RNA, 14 nt, Influenza B virus
cauaguaguugaag

SEQ ID NO: 363382 - RNA, 16 nt, Influenza B virus
cauauacugacacaua

SEQ ID NO: 363383 - RNA, 16 nt, Influenza B virus
cauuaugcagcucagc

SEQ ID NO: 363384 - RNA, 12 nt, Influenza B virus
cauuuaagcaaa

SEQ ID NO: 363385 - RNA, 14 nt, Influenza B virus
cauuugcuugucac

SEQ ID NO: 363386 - RNA, 18 nt, Influenza B virus
cauuugcuugucaccauu

SEQ ID NO: 363387 - RNA, 21 nt, Influenza B virus
cauuugcuugucaccauuaca

SEQ ID NO: 363388 - RNA, 18 nt, Influenza B virus
ccaaauaaggaggcaaua

SEQ ID NO: 363389 - RNA, 17 nt, Influenza B virus
ccacauaguaguugaag

SEQ ID NO: 363390 - RNA, 13 nt, Influenza B virus
ccacauggcagcu

SEQ ID NO: 363391 - RNA, 17 nt, Influenza B virus
ccuaagaacacaagaaa

SEQ ID NO: 363392 - RNA, 11 nt, Influenza B virus
ccuaugcacac

SEQ ID NO: 363393 - RNA, 19 nt, Influenza B virus
ccuuuacuguagugcucau

SEQ ID NO: 363394 - RNA, 18 nt, Influenza B virus
cuaaacccuuuguuccua

SEQ ID NO: 363395 - RNA, 18 nt, Influenza B virus
cuacaauggaacaagaaa

SEQ ID NO: 363396 - RNA, 22 nt, Influenza B virus
cuaguaucagucaaauugggaa

SEQ ID NO: 363397 - RNA, 21 nt, Influenza B virus
cuguagugcucauuugcuugu

SEQ ID NO: 363398 - RNA, 16 nt, Influenza B virus
cuucagauucuuucaa

SEQ ID NO: 363399 - RNA, 21 nt, Influenza B virus
cuuggacaauagggcauuuga

SEQ ID NO: 363400 - RNA, 15 nt, Influenza B virus
cuuuacuguagugcu

SEQ ID NO: 363401 - RNA, 20 nt, Influenza B virus
gaaaaaaggcucguguuucu

SEQ ID NO: 363402 - RNA, 20 nt, Influenza B virus
gaaaacuccauuuuccacau

SEQ ID NO: 363403 - RNA, 23 nt, Influenza B virus
gaaacguuauugaaaaaugcucu

SEQ ID NO: 363404 - RNA, 24 nt, Influenza B virus
gaagaaaauacucucugacaacau

SEQ ID NO: 363405 - RNA, 18 nt, Influenza B virus
gaauugcaaugagcccaa

SEQ ID NO: 363406 - RNA, 18 nt, Influenza B virus
gacaacauggaaguauug

SEQ ID NO: 363407 - RNA, 13 nt, Influenza B virus
gacaaugaugcau

SEQ ID NO: 363408 - RNA, 14 nt, Influenza B virus
gacaaugaugcauu

SEQ ID NO: 363409 - RNA, 19 nt, Influenza B virus
gacacuuugcucugaccca

SEQ ID NO: 363410 - RNA, 21 nt, Influenza B virus
gacagaaacaagcugaggcau

SEQ ID NO: 363411 - RNA, 20 nt, Influenza B virus
gagaaccuuuuguugcuugu

SEQ ID NO: 363412 - RNA, 19 nt, Influenza B virus
gaucaaaggaaacucagcu

SEQ ID NO: 363413 - RNA, 15 nt, Influenza B virus
gauccgcaugccaug

SEQ ID NO: 363414 - RNA, 17 nt, Influenza B virus
gauuaagcccuguguuu

SEQ ID NO: 363415 - RNA, 14 nt, Influenza B virus
gcauagcgcucaau

SEQ ID NO: 363416 - RNA, 11 nt, Influenza B virus
gcuaacagcuc

SEQ ID NO: 363417 - RNA, 12 nt, Influenza B virus
gcucguguuucu

SEQ ID NO: 363418 - RNA, 14 nt, Influenza B virus
gcucuccauuucau

SEQ ID NO: 363419 - RNA, 21 nt, Influenza B virus
gcucugacccauuaugcagcu

SEQ ID NO: 363420 - RNA, 21 nt, Influenza B virus
ggaauccaaauaaggaggcaa

SEQ ID NO: 363421 - RNA, 19 nt, Influenza B virus
ggggauacuacaauggaac

SEQ ID NO: 363422 - RNA, 16 nt, Influenza B virus
gguagagaauggacau

SEQ ID NO: 363423 - RNA, 20 nt, Influenza B virus
gguccugacaaugaugcauu

SEQ ID NO: 363424 - RNA, 12 nt, Influenza B virus
guaaacuugaaa

SEQ ID NO: 363425 - RNA, 23 nt, Influenza B virus
guacguuugggauguggguguuu

SEQ ID NO: 363426 - RNA, 22 nt, Influenza B virus
guaucauuaucauuacuggaaa

SEQ ID NO: 363427 - RNA, 12 nt, Influenza B virus
guccugacaaug

SEQ ID NO: 363428 - RNA, 19 nt, Influenza B virus
guguuuuccuuuacuguag

SEQ ID NO: 363429 - RNA, 22 nt, Influenza B virus
guucuaaacccuuuguuccuau

SEQ ID NO: 363430 - RNA, 20 nt, Influenza B virus
guuuacucuuauugaaauaa

SEQ ID NO: 363431 - RNA, 14 nt, Influenza B virus
uaaaaauccucuug

SEQ ID NO: 363432 - RNA, 17 nt, Influenza B virus
uaaaaaugggugaaaca

SEQ ID NO: 363433 - RNA, 21 nt, Influenza B virus
uaaaauagacacuauggcugu

SEQ ID NO: 363434 - RNA, 21 nt, Influenza B virus
uaaggaggcaauaaacagaga

SEQ ID NO: 363435 - RNA, 13 nt, Influenza B virus
uacaauggaacaa

SEQ ID NO: 363436 - RNA, 20 nt, Influenza B virus
uacuaugcauuuaagcaaau

SEQ ID NO: 363437 - RNA, 15 nt, Influenza B virus
uacugacacauauca

SEQ ID NO: 363438 - RNA, 17 nt, Influenza B virus
uagacacuauggcugug

SEQ ID NO: 363439 - RNA, 15 nt, Influenza B virus
uagugcucauuugcu

SEQ ID NO: 363440 - RNA, 21 nt, Influenza B virus
uagugcucauuugcuugucac

SEQ ID NO: 363441 - RNA, 17 nt, Influenza B virus
uaucagcucuccauuuc

SEQ ID NO: 363442 - RNA, 16 nt, Influenza B virus
uauugaaaaaugcucu

SEQ ID NO: 363443 - RNA, 14 nt, Influenza B virus
ucaaugucagugaa

SEQ ID NO: 363444 - RNA, 16 nt, Influenza B virus
ucagcucuccauuuca

SEQ ID NO: 363445 - RNA, 16 nt, Influenza B virus
ucauuccuaugcacac

SEQ ID NO: 363446 - RNA, 22 nt, Influenza B virus
ucauuugcuugucaccauuaca

SEQ ID NO: 363447 - RNA, 11 nt, Influenza B virus
uccaagccaaa

SEQ ID NO: 363448 - RNA, 23 nt, Influenza B virus
uccaagccaaagaaacaaugaag

SEQ ID NO: 363449 - RNA, 13 nt, Influenza B virus
uccucuuguuacu

SEQ ID NO: 363450 - RNA, 18 nt, Influenza B virus
ucuaaacccuuuguuccu

SEQ ID NO: 363451 - RNA, 15 nt, Influenza B virus
ucuguucuaaacccu

SEQ ID NO: 363452 - RNA, 14 nt, Influenza B virus
ugaagggcuuucaa

SEQ ID NO: 363453 - RNA, 18 nt, Influenza B virus
ugacaaugaugcauuggu

SEQ ID NO: 363454 - RNA, 22 nt, Influenza B virus
ugacacauaucauuccuaugca

SEQ ID NO: 363455 - RNA, 15 nt, Influenza B virus
ugccugcaauugcau

SEQ ID NO: 363456 - RNA, 22 nt, Influenza B virus
uggaagaauugcaaugagccca

SEQ ID NO: 363457 - RNA, 20 nt, Influenza B virus
uggacaauagggcauuugaa

SEQ ID NO: 363458 - RNA, 20 nt, Influenza B virus
ugguagagaauggacauaua

SEQ ID NO: 363459 - RNA, 23 nt, Influenza B virus
uggucaaaauaaaauauggagaa

SEQ ID NO: 363460 - RNA, 18 nt, Influenza B virus
ugguuggaucuguucuaa

SEQ ID NO: 363461 - RNA, 15 nt, Influenza B virus
uguaaaaaaugcugu

SEQ ID NO: 363462 - RNA, 22 nt, Influenza B virus
ugucuaugggguuauuggucau

SEQ ID NO: 363463 - RNA, 15 nt, Influenza B virus
uguggguguuuacuc

SEQ ID NO: 363464 - RNA, 17 nt, Influenza B virus
uguuccacaaaacagua

SEQ ID NO: 363465 - RNA, 14 nt, Influenza B virus
uguugcuuguggac

SEQ ID NO: 363466 - RNA, 12 nt, Influenza B virus
uuccacauggca

SEQ ID NO: 363467 - RNA, 20 nt, Influenza B virus
uuccuauuuuauuugaacag

SEQ ID NO: 363468 - RNA, 14 nt, Influenza B virus
uuccuuuacuguag

SEQ ID NO: 363469 - RNA, 20 nt, Influenza B virus
uucuuucauuuuaucagcuc

SEQ ID NO: 363470 - RNA, 15 nt, Influenza B virus
uugaugauaguauau

SEQ ID NO: 363471 - RNA, 21 nt, Influenza B virus
uuggagguggaagaauugcaa

SEQ ID NO: 363472 - RNA, 21 nt, Influenza B virus
uuguaaucaaugucagugaau

SEQ ID NO: 363473 - RNA, 15 nt, Influenza B virus
uuguaucauuaucau

SEQ ID NO: 363474 - RNA, 18 nt, Influenza B virus
uugucaccauuacaaaga

SEQ ID NO: 363475 - RNA, 11 nt, Influenza B virus
uuguggaccaa

SEQ ID NO: 363476 - RNA, 20 nt, Influenza B virus
uuguuucugaaaaaugcucu

SEQ ID NO: 363477 - RNA, 11 nt, Influenza B virus
uuuacucuuau

SEQ ID NO: 363478 - RNA, 16 nt, Influenza B virus
uuucaacugaugagau

SEQ ID NO: 363479 - RNA, 15 nt, Influenza B virus
uuuuccuuuacugua

SEQ ID NO: 363480 - RNA, 20 nt, Influenza B virus
uccuuuacuguagugcucau

SEQ ID NO: 363481 - RNA, 22 nt, Influenza B virus
ucggaguugaugguccugacaa

SEQ ID NO: 363482 - RNA, 14 nt, Influenza B virus
ucuaaacccuuugu

SEQ ID NO: 363483 - RNA, 22 nt, Influenza B virus
ucugaaaaaugcucuuguuacu

SEQ ID NO: 363484 - RNA, 16 nt, Influenza B virus
ucuuacuaugcauuua

SEQ ID NO: 363485 - RNA, 14 nt, Influenza B virus
ugaaaugaaggaug

SEQ ID NO: 363486 - RNA, 13 nt, Influenza B virus
ugaauaaaacugg

SEQ ID NO: 363487 - RNA, 21 nt, Influenza B virus
ugaauacaugcggugcacaaa

SEQ ID NO: 363488 - RNA, 20 nt, Influenza B virus
ugaggcaucuaguaucaguc

SEQ ID NO: 363489 - RNA, 21 nt, Influenza B virus
ugaugagauaauaaaaauggg

SEQ ID NO: 363490 - RNA, 23 nt, Influenza B virus
ugcagacacuuugcucugaccca

SEQ ID NO: 363491 - RNA, 16 nt, Influenza B virus
uggaagaauugcaaug

SEQ ID NO: 363492 - RNA, 17 nt, Influenza B virus
uggaagaauugcaauga

SEQ ID NO: 363493 - RNA, 21 nt, Influenza B virus
uggaaguauugggugaccaca

SEQ ID NO: 363494 - RNA, 14 nt, Influenza B virus
uggcugugacuguu

SEQ ID NO: 363495 - RNA, 17 nt, Influenza B virus
ugguagagaauggacau

SEQ ID NO: 363496 - RNA, 12 nt, Influenza B virus
uguagugcucau

SEQ ID NO: 363497 - RNA, 17 nt, Influenza B virus
uguagugcucauuugcu

SEQ ID NO: 363498 - RNA, 16 nt, Influenza B virus
uguaugaaaugaagga

SEQ ID NO: 363499 - RNA, 22 nt, Influenza B virus
uguggaccaaaagaaugcagac

SEQ ID NO: 363500 - RNA, 15 nt, Influenza B virus
uuaagcaaauuguaa

SEQ ID NO: 363501 - RNA, 17 nt, Influenza B virus
uuauugaaaaaugcucu

SEQ ID NO: 363502 - RNA, 15 nt, Influenza B virus
uucauggcuuggaca

SEQ ID NO: 363503 - RNA, 22 nt, Influenza B virus
uucugagacacaauuaccaaaa

SEQ ID NO: 363504 - RNA, 11 nt, Influenza B virus
uucuuacuaga

SEQ ID NO: 363505 - RNA, 20 nt, Influenza B virus
uuggacaauagggcauuuga

SEQ ID NO: 363506 - RNA, 14 nt, Influenza B virus
uuggaucuguucua

SEQ ID NO: 363507 - RNA, 23 nt, Influenza B virus
uuguggaccaaaagaaugcagac

SEQ ID NO: 363508 - RNA, 18 nt, Influenza B virus
uuucuuacuaugcauuua

SEQ ID NO: 363509 - RNA, 17 nt, Influenza B virus
uuuuauuugaacaguug

SEQ ID NO: 363510 - RNA, 22 nt, Influenza B virus
uuuuccacauggcagcuuggag

SEQ ID NO: 363511 - RNA, 23 nt, Influenza B virus
uuuuccuuuacuguagugcucau

SEQ ID NO: 363512 - RNA, 22 nt, Influenza B virus (B/Memphis/12/97)
aaaaagaaauccaggccaaaga

SEQ ID NO: 363513 - RNA, 24 nt, Influenza B virus (B/Memphis/12/97)
aaaacuccauuuuucacauggcag

SEQ ID NO: 363514 - RNA, 21 nt, Influenza B virus (B/Memphis/12/97)
aaaagaaauccaggccaaaga

SEQ ID NO: 363515 - RNA, 14 nt, Influenza B virus (B/Memphis/12/97)
aaaagguccaaaca

SEQ ID NO: 363516 - RNA, 18 nt, Influenza B virus (B/Memphis/12/97)
aaaagguccaaacaaaga

SEQ ID NO: 363517 - RNA, 16 nt, Influenza B virus (B/Memphis/12/97)
aaaauaaaauauggag

SEQ ID NO: 363518 - RNA, 13 nt, Influenza B virus (B/Memphis/12/97)
aaagaaacaauga

SEQ ID NO: 363519 - RNA, 12 nt, Influenza B virus (B/Memphis/12/97)
aaagagacaaua

SEQ ID NO: 363520 - RNA, 15 nt, Influenza B virus (B/Memphis/12/97)
aaaggaaacucagcu

SEQ ID NO: 363521 - RNA, 19 nt, Influenza B virus (B/Memphis/12/97)
aaagugccugcaauugcau

SEQ ID NO: 363522 - RNA, 19 nt, Influenza B virus (B/Memphis/12/97)
aaauagacacuauggcugu

SEQ ID NO: 363523 - RNA, 23 nt, Influenza B virus (B/Memphis/12/97)
aaauagacacuauggcugugauu

SEQ ID NO: 363524 - RNA, 16 nt, Influenza B virus (B/Memphis/12/97)
aaauuguaaucaaugu

SEQ ID NO: 363525 - RNA, 16 nt, Influenza B virus (B/Memphis/12/97)
aacaagagaagacaga

SEQ ID NO: 363526 - RNA, 15 nt, Influenza B virus (B/Memphis/12/97)
aacaagcugaggcau

SEQ ID NO: 363527 - RNA, 21 nt, Influenza B virus (B/Memphis/12/97)
aacauuguaugaaaugaagga

SEQ ID NO: 363528 - RNA, 16 nt, Influenza B virus (B/Memphis/12/97)
aagaaauccaggccaa

SEQ ID NO: 363529 - RNA, 14 nt, Influenza B virus (B/Memphis/12/97)
aagaauugcauuaa

SEQ ID NO: 363530 - RNA, 22 nt, Influenza B virus (B/Memphis/12/97)
aagcauauacugacacauacca

SEQ ID NO: 363531 - RNA, 20 nt, Influenza B virus (B/Memphis/12/97)
aagggaaccuuuuauugcuu

SEQ ID NO: 363532 - RNA, 21 nt, Influenza B virus (B/Memphis/12/97)
aagggaaccuuuuauugcuug

SEQ ID NO: 363533 - RNA, 21 nt, Influenza B virus (B/Memphis/12/97)
aagguccaaacaaagagacaa

SEQ ID NO: 363534 - RNA, 22 nt, Influenza B virus (B/Memphis/12/97)
aauaaaagguccaaacaaagag

SEQ ID NO: 363535 - RNA, 20 nt, Influenza B virus (B/Memphis/12/97)
aauaaaauauggagaagcau

SEQ ID NO: 363536 - RNA, 20 nt, Influenza B virus (B/Memphis/12/97)
aauagacacuauggcuguga

SEQ ID NO: 363537 - RNA, 22 nt, Influenza B virus (B/Memphis/12/97)
aauagcugacaugguuguauca

SEQ ID NO: 363538 - RNA, 14 nt, Influenza B virus (B/Memphis/12/97)
aauagggcauuuga

SEQ ID NO: 363539 - RNA, 20 nt, Influenza B virus (B/Memphis/12/97)
aaugcaaacacuuugcucua

SEQ ID NO: 363540 - RNA, 15 nt, Influenza B virus (B/Memphis/12/97)
aaugguugagucugu

SEQ ID NO: 363541 - RNA, 13 nt, Influenza B virus (B/Memphis/12/97)
aaugucagcaaau

SEQ ID NO: 363542 - RNA, 21 nt, Influenza B virus (B/Memphis/12/97)
aaugucagcaaauaaacugga

SEQ ID NO: 363543 - RNA, 14 nt, Influenza B virus (B/Memphis/12/97)
aauugaugauaaca

SEQ ID NO: 363544 - RNA, 11 nt, Influenza B virus (B/Memphis/12/97)
aauugcccuua

SEQ ID NO: 363545 - RNA, 13 nt, Influenza B virus (B/Memphis/12/97)
aauuucagucaaa

SEQ ID NO: 363546 - RNA, 22 nt, Influenza B virus (B/Memphis/12/97)
acaaaauagacacuauggcugu

SEQ ID NO: 363547 - RNA, 23 nt, Influenza B virus (B/Memphis/12/97)
acaagagaagacagaaacaagcu

SEQ ID NO: 363548 - RNA, 22 nt, Influenza B virus (B/Memphis/12/97)
acacauaccauuccuaugcaaa

SEQ ID NO: 363549 - RNA, 14 nt, Influenza B virus (B/Memphis/12/97)
acacuauggcugug

SEQ ID NO: 363550 - RNA, 16 nt, Influenza B virus (B/Memphis/12/97)
acacuauggcugugau

SEQ ID NO: 363551 - RNA, 17 nt, Influenza B virus (B/Memphis/12/97)
acacuauggcugugauu

SEQ ID NO: 363552 - RNA, 22 nt, Influenza B virus (B/Memphis/12/97)
acacuauggcugugauuguuuc

SEQ ID NO: 363553 - RNA, 20 nt, Influenza B virus (B/Memphis/12/97)
acauaccauuccuaugcaaa

SEQ ID NO: 363554 - RNA, 18 nt, Influenza B virus (B/Memphis/12/97)
acauaguacucaauuuag

SEQ ID NO: 363555 - RNA, 16 nt, Influenza B virus (B/Memphis/12/97)
accaaaggaaugcaaa

SEQ ID NO: 363556 - RNA, 15 nt, Influenza B virus (B/Memphis/12/97)
acuauggcugugauu

SEQ ID NO: 363557 - RNA, 23 nt, Influenza B virus (B/Memphis/12/97)
acuguauuucuuauuaugcauuu

SEQ ID NO: 363558 - RNA, 18 nt, Influenza B virus (B/Memphis/12/97)
agaacacaagaaagugcc

SEQ ID NO: 363559 - RNA, 18 nt, Influenza B virus (B/Memphis/12/97)
agacacuauggcugugau

SEQ ID NO: 363560 - RNA, 21 nt, Influenza B virus (B/Memphis/12/97)
agauucggagaaaccaaagga

SEQ ID NO: 363561 - RNA, 16 nt, Influenza B virus (B/Memphis/12/97)
agcaaauaaacuggaa

SEQ ID NO: 363562 - RNA, 21 nt, Influenza B virus (B/Memphis/12/97)
agcaaauuguaaucaauguca

SEQ ID NO: 363563 - RNA, 22 nt, Influenza B virus (B/Memphis/12/97)
aggaaugguugagucuguucua

SEQ ID NO: 363564 - RNA, 12 nt, Influenza B virus (B/Memphis/12/97)
agguccaaacaa

SEQ ID NO: 363565 - RNA, 20 nt, Influenza B virus (B/Memphis/12/97)
aguacucaauuuaguacuau

SEQ ID NO: 363566 - RNA, 21 nt, Influenza B virus (B/Memphis/12/97)
aguacucaauuuaguacuauu

SEQ ID NO: 363567 - RNA, 13 nt, Influenza B virus (B/Memphis/12/97)
aguagaaaacucc

SEQ ID NO: 363568 - RNA, 16 nt, Influenza B virus (B/Memphis/12/97)
auaaacagagagguau

SEQ ID NO: 363569 - RNA, 21 nt, Influenza B virus (B/Memphis/12/97)
auaaauuuauccauuaauuca

SEQ ID NO: 363570 - RNA, 22 nt, Influenza B virus (B/Memphis/12/97)
auaaauuuauccauuaauucaa

SEQ ID NO: 363571 - RNA, 14 nt, Influenza B virus (B/Memphis/12/97)
auaauaaaaauggg

SEQ ID NO: 363572 - RNA, 18 nt, Influenza B virus (B/Memphis/12/97)
auacgaauaaaaggucca

SEQ ID NO: 363573 - RNA, 12 nt, Influenza B virus (B/Memphis/12/97)
auagacacuaug

SEQ ID NO: 363574 - RNA, 15 nt, Influenza B virus (B/Memphis/12/97)
auaguacucaauuua

SEQ ID NO: 363575 - RNA, 11 nt, Influenza B virus (B/Memphis/12/97)
aucagcucucc

SEQ ID NO: 363576 - RNA, 13 nt, Influenza B virus (B/Memphis/12/97)
auccauuaauuca

SEQ ID NO: 363577 - RNA, 14 nt, Influenza B virus (B/Memphis/12/97)
auccauuaauucaa

SEQ ID NO: 363578 - RNA, 15 nt, Influenza B virus (B/Memphis/12/97)
augcagcccaaccag

SEQ ID NO: 363579 - RNA, 12 nt, Influenza B virus (B/Memphis/12/97)
augcauugcuca

SEQ ID NO: 363580 - RNA, 14 nt, Influenza B virus (B/Memphis/12/97)
augcauugcucaaa

SEQ ID NO: 363581 - RNA, 21 nt, Influenza B virus (B/Memphis/12/97)
augucagcaaauaaacuggaa

SEQ ID NO: 363582 - RNA, 23 nt, Influenza B virus (B/Memphis/12/97)
augucagcaaauaaacuggaaaa

SEQ ID NO: 363583 - RNA, 19 nt, Influenza B virus (B/Memphis/12/97)
auuaauucaauaaacacaa

SEQ ID NO: 363584 - RNA, 14 nt, Influenza B virus (B/Memphis/12/97)
auucaauaaacaca

SEQ ID NO: 363585 - RNA, 16 nt, Influenza B virus (B/Memphis/12/97)
auuccuaugcaaacaa

SEQ ID NO: 363586 - RNA, 20 nt, Influenza B virus (B/Memphis/12/97)
auugagugaccacauaguga

SEQ ID NO: 363587 - RNA, 21 nt, Influenza B virus (B/Memphis/12/97)
auugcccuuacugaacuuaau

SEQ ID NO: 363588 - RNA, 19 nt, Influenza B virus (B/Memphis/12/97)
auugcuuguggaccaaagg

SEQ ID NO: 363589 - RNA, 20 nt, Influenza B virus (B/Memphis/12/97)
auugcuuguggaccaaagga

SEQ ID NO: 363590 - RNA, 21 nt, Influenza B virus (B/Memphis/12/97)
auuguaaucaaugucagcaaa

SEQ ID NO: 363591 - RNA, 13 nt, Influenza B virus (B/Memphis/12/97)
auuuaguacuauu

SEQ ID NO: 363592 - RNA, 16 nt, Influenza B virus (B/Memphis/12/97)
auuuauccauuaauuc

SEQ ID NO: 363593 - RNA, 18 nt, Influenza B virus (B/Memphis/12/97)
auuuauccauuaauucaa

SEQ ID NO: 363594 - RNA, 22 nt, Influenza B virus (B/Memphis/12/97)
auuucauggcuuggacaauagg

SEQ ID NO: 363595 - RNA, 15 nt, Influenza B virus (B/Memphis/12/97)
auuucuuauuaugca

SEQ ID NO: 363596 - RNA, 14 nt, Influenza B virus (B/Memphis/12/97)
auuuuguucauuau

SEQ ID NO: 363597 - RNA, 17 nt, Influenza B virus (B/Memphis/12/97)
auuuuguucauuaugua

SEQ ID NO: 363598 - RNA, 17 nt, Influenza B virus (B/Memphis/12/97)
auuuuguuuggacaauu

SEQ ID NO: 363599 - RNA, 15 nt, Influenza B virus (B/Memphis/12/97)
caaacaaagagacaa

SEQ ID NO: 363600 - RNA, 17 nt, Influenza B virus (B/Memphis/12/97)
caaacaaagagacaaua

SEQ ID NO: 363601 - RNA, 20 nt, Influenza B virus (B/Memphis/12/97)
caaacaacauccuaagaaca

SEQ ID NO: 363602 - RNA, 18 nt, Influenza B virus (B/Memphis/12/97)
caacauccuaagaacaca

SEQ ID NO: 363603 - RNA, 17 nt, Influenza B virus (B/Memphis/12/97)
caagaaagugccugcaa

SEQ ID NO: 363604 - RNA, 19 nt, Influenza B virus (B/Memphis/12/97)
caagaaagugccugcaauu

SEQ ID NO: 363605 - RNA, 16 nt, Influenza B virus (B/Memphis/12/97)
caaugucagcaaauaa

SEQ ID NO: 363606 - RNA, 22 nt, Influenza B virus (B/Memphis/12/97)
caaugucagcaaauaaacugga

SEQ ID NO: 363607 - RNA, 17 nt, Influenza B virus (B/Memphis/12/97)
caauuuugagacacagu

SEQ ID NO: 363608 - RNA, 20 nt, Influenza B virus (B/Memphis/12/97)
cacauaccauuccuaugcaa

SEQ ID NO: 363609 - RNA, 15 nt, Influenza B virus (B/Memphis/12/97)
cacuauggcugugau

SEQ ID NO: 363610 - RNA, 24 nt, Influenza B virus (B/Memphis/12/97)
cacuauggcugugauuguuucaau

SEQ ID NO: 363611 - RNA, 13 nt, Influenza B virus (B/Memphis/12/97)
cagauucuuucaa

SEQ ID NO: 363612 - RNA, 16 nt, Influenza B virus (B/Memphis/12/97)
cagauucuuucaauuu

SEQ ID NO: 363613 - RNA, 18 nt, Influenza B virus (B/Memphis/12/97)
cagcaaauaaacuggaaa

SEQ ID NO: 363614 - RNA, 16 nt, Influenza B virus (B/Memphis/12/97)
cagcucuccauuucau

SEQ ID NO: 363615 - RNA, 15 nt, Influenza B virus (B/Memphis/12/97)
caggccaaagaaaca

SEQ ID NO: 363616 - RNA, 13 nt, Influenza B virus (B/Memphis/12/97)
caguuaccaaaaa

SEQ ID NO: 363617 - RNA, 20 nt, Influenza B virus (B/Memphis/12/97)
cauaccauuccuaugcaaac

SEQ ID NO: 363618 - RNA, 23 nt, Influenza B virus (B/Memphis/12/97)
cauagauucggagaaaccaaagg

SEQ ID NO: 363619 - RNA, 12 nt, Influenza B virus (B/Memphis/12/97)
cauaguacucaa

SEQ ID NO: 363620 - RNA, 16 nt, Influenza B virus (B/Memphis/12/97)
cauaguacucaauuua

SEQ ID NO: 363621 - RNA, 22 nt, Influenza B virus (B/Memphis/12/97)
cauaguacucaauuuaguacua

SEQ ID NO: 363622 - RNA, 21 nt, Influenza B virus (B/Memphis/12/97)
cauauacugacacauaccauu

SEQ ID NO: 363623 - RNA, 15 nt, Influenza B virus (B/Memphis/12/97)
cauuaauucaauaaa

SEQ ID NO: 363624 - RNA, 12 nt, Influenza B virus (B/Memphis/12/97)
cauuuaagcaaa

SEQ ID NO: 363625 - RNA, 21 nt, Influenza B virus (B/Memphis/12/97)
cauuucauggcuuggacaaua

SEQ ID NO: 363626 - RNA, 16 nt, Influenza B virus (B/Memphis/12/97)
cauuugaaucaaauaa

SEQ ID NO: 363627 - RNA, 16 nt, Influenza B virus (B/Memphis/12/97)
ccaaaggaaugcaaac

SEQ ID NO: 363628 - RNA, 22 nt, Influenza B virus (B/Memphis/12/97)
ccaacaguagaaaacuccauuu

SEQ ID NO: 363629 - RNA, 21 nt, Influenza B virus (B/Memphis/12/97)
ccugacaguaaugcauugcuc

SEQ ID NO: 363630 - RNA, 14 nt, Influenza B virus (B/Memphis/12/97)
ccugcaauugcauc

SEQ ID NO: 363631 - RNA, 11 nt, Influenza B virus (B/Memphis/12/97)
ccuuacugaac

SEQ ID NO: 363632 - RNA, 23 nt, Influenza B virus (B/Memphis/12/97)
cgaauaaaagguccaaacaaaga

SEQ ID NO: 363633 - RNA, 18 nt, Influenza B virus (B/Memphis/12/97)
cuaaacccuuuguuccua

SEQ ID NO: 363634 - RNA, 16 nt, Influenza B virus (B/Memphis/12/97)
cuaacagcuccauaau

SEQ ID NO: 363635 - RNA, 12 nt, Influenza B virus (B/Memphis/12/97)
cuaugcaaacaa

SEQ ID NO: 363636 - RNA, 22 nt, Influenza B virus (B/Memphis/12/97)
cuauggcugugauuguuucaau

SEQ ID NO: 363637 - RNA, 23 nt, Influenza B virus (B/Memphis/12/97)
cuauggcugugauuguuucaaua

SEQ ID NO: 363638 - RNA, 17 nt, Influenza B virus (B/Memphis/12/97)
cucaauuuaguacuauu

SEQ ID NO: 363639 - RNA, 17 nt, Influenza B virus (B/Memphis/12/97)
cucuaacccauuaugca

SEQ ID NO: 363640 - RNA, 18 nt, Influenza B virus (B/Memphis/12/97)
cucuaacccauuaugcag

SEQ ID NO: 363641 - RNA, 22 nt, Influenza B virus (B/Memphis/12/97)
cugaggcaucuaauuucaguca

SEQ ID NO: 363642 - RNA, 17 nt, Influenza B virus (B/Memphis/12/97)
cugugauuguuucaaua

SEQ ID NO: 363643 - RNA, 11 nt, Influenza B virus (B/Memphis/12/97)
cuuacugaacu

SEQ ID NO: 363644 - RNA, 14 nt, Influenza B virus (B/Memphis/12/97)
cuuauuaugcauuu

SEQ ID NO: 363645 - RNA, 15 nt, Influenza B virus (B/Memphis/12/97)
cuuguggaccaaagg

SEQ ID NO: 363646 - RNA, 13 nt, Influenza B virus (B/Memphis/12/97)
gaaacucagcucc

SEQ ID NO: 363647 - RNA, 18 nt, Influenza B virus (B/Memphis/12/97)
gaagcauauacugacaca

SEQ ID NO: 363648 - RNA, 24 nt, Influenza B virus (B/Memphis/12/97)
gaaggaaguacucucugacaacau

SEQ ID NO: 363649 - RNA, 18 nt, Influenza B virus (B/Memphis/12/97)
gacaauagggcauuugaa

SEQ ID NO: 363650 - RNA, 17 nt, Influenza B virus (B/Memphis/12/97)
gacacuauggcugugau

SEQ ID NO: 363651 - RNA, 18 nt, Influenza B virus (B/Memphis/12/97)
gacauaguacucaauuua

SEQ ID NO: 363652 - RNA, 20 nt, Influenza B virus (B/Memphis/12/97)
gagacacaguuaccaaaaag

SEQ ID NO: 363653 - RNA, 19 nt, Influenza B virus (B/Memphis/12/97)
gaggaguaaacaugaaaau

SEQ ID NO: 363654 - RNA, 13 nt, Influenza B virus (B/Memphis/12/97)
gauaauaagggaa

SEQ ID NO: 363655 - RNA, 14 nt, Influenza B virus (B/Memphis/12/97)
gauaauaagggaac

SEQ ID NO: 363656 - RNA, 17 nt, Influenza B virus (B/Memphis/12/97)
gauggcccugacaguaa

SEQ ID NO: 363657 - RNA, 18 nt, Influenza B virus (B/Memphis/12/97)
gauucggagaaaccaaag

SEQ ID NO: 363658 - RNA, 16 nt, Influenza B virus (B/Memphis/12/97)
gcauuugaaucaaaua

SEQ ID NO: 363659 - RNA, 11 nt, Influenza B virus (B/Memphis/12/97)
gcuaacagcuc

SEQ ID NO: 363660 - RNA, 19 nt, Influenza B virus (B/Memphis/12/97)
gcuuguggaccaaaggaau

SEQ ID NO: 363661 - RNA, 10 nt, Influenza B virus (B/Memphis/12/97)
ggaccaaagg

SEQ ID NO: 363662 - RNA, 12 nt, Influenza B virus (B/Memphis/12/97)
ggaccaaaggaa

SEQ ID NO: 363663 - RNA, 15 nt, Influenza B virus (B/Memphis/12/97)
guaaaagaauugaug

SEQ ID NO: 363664 - RNA, 20 nt, Influenza B virus (B/Memphis/12/97)
guacucaauuuaguacuauu

SEQ ID NO: 363665 - RNA, 18 nt, Influenza B virus (B/Memphis/12/97)
guauugagugaccacaua

SEQ ID NO: 363666 - RNA, 18 nt, Influenza B virus (B/Memphis/12/97)
guauuucuuauuaugcau

SEQ ID NO: 363667 - RNA, 22 nt, Influenza B virus (B/Memphis/12/97)
guauuucuuauuaugcauuuaa

SEQ ID NO: 363668 - RNA, 12 nt, Influenza B virus (B/Memphis/12/97)
guggaccaaagg

SEQ ID NO: 363669 - RNA, 15 nt, Influenza B virus (B/Memphis/12/97)
guggaccaaaggaau

SEQ ID NO: 363670 - RNA, 15 nt, Influenza B virus (B/Memphis/12/97)
guucauuauguaucu

SEQ ID NO: 363671 - RNA, 22 nt, Influenza B virus (B/Memphis/12/97)
guucuaaacccuuuguuccuau

SEQ ID NO: 363672 - RNA, 15 nt, Influenza B virus (B/Memphis/12/97)
aaaaagaggaguaaa

SEQ ID NO: 363673 - RNA, 15 nt, Influenza B virus (B/Memphis/12/97)
aaacacaauugagug

SEQ ID NO: 363674 - RNA, 20 nt, Influenza B virus (B/Memphis/12/97)
aaacaguuuuggagauagaa

SEQ ID NO: 363675 - RNA, 20 nt, Influenza B virus (B/Memphis/12/97)
aaagaaauccaggccaaaga

SEQ ID NO: 363676 - RNA, 13 nt, Influenza B virus (B/Memphis/12/97)
aaagguccaaaca

SEQ ID NO: 363677 - RNA, 17 nt, Influenza B virus (B/Memphis/12/97)
aaagguccaaacaaaga

SEQ ID NO: 363678 - RNA, 17 nt, Influenza B virus (B/Memphis/12/97)
aacagagagguaucaau

SEQ ID NO: 363679 - RNA, 13 nt, Influenza B virus (B/Memphis/12/97)
aagaaacaaugaa

SEQ ID NO: 363680 - RNA, 23 nt, Influenza B virus (B/Memphis/12/97)
aagcauauacugacacauaccau

SEQ ID NO: 363681 - RNA, 16 nt, Influenza B virus (B/Memphis/12/97)
aaggaaacucagcucc

SEQ ID NO: 363682 - RNA, 14 nt, Influenza B virus (B/Memphis/12/97)
aauaaaagguccaa

SEQ ID NO: 363683 - RNA, 23 nt, Influenza B virus (B/Memphis/12/97)
aauaaaagguccaaacaaagaga

SEQ ID NO: 363684 - RNA, 13 nt, Influenza B virus (B/Memphis/12/97)
aauaaacagagag

SEQ ID NO: 363685 - RNA, 14 nt, Influenza B virus (B/Memphis/12/97)
aauagacacuaugg

SEQ ID NO: 363686 - RNA, 12 nt, Influenza B virus (B/Memphis/12/97)
aauggacauaua

SEQ ID NO: 363687 - RNA, 18 nt, Influenza B virus (B/Memphis/12/97)
aauucaauaaacacaauu

SEQ ID NO: 363688 - RNA, 22 nt, Influenza B virus (B/Memphis/12/97)
aauugggcaaaaucccaacagu

SEQ ID NO: 363689 - RNA, 17 nt, Influenza B virus (B/Memphis/12/97)
aauuguaaucaauguca

SEQ ID NO: 363690 - RNA, 19 nt, Influenza B virus (B/Memphis/12/97)
aauuuauccauuaauucaa

SEQ ID NO: 363691 - RNA, 15 nt, Influenza B virus (B/Memphis/12/97)
acaacauggagguau

SEQ ID NO: 363692 - RNA, 12 nt, Influenza B virus (B/Memphis/12/97)
acaauugcccuu

SEQ ID NO: 363693 - RNA, 18 nt, Influenza B virus (B/Memphis/12/97)
acacuauggcugugauug

SEQ ID NO: 363694 - RNA, 17 nt, Influenza B virus (B/Memphis/12/97)
acaguagaaaacuccau

SEQ ID NO: 363695 - RNA, 19 nt, Influenza B virus (B/Memphis/12/97)
agaaaccaaaggaaacuca

SEQ ID NO: 363696 - RNA, 23 nt, Influenza B virus (B/Memphis/12/97)
agacaauaaacagagagguauca

SEQ ID NO: 363697 - RNA, 17 nt, Influenza B virus (B/Memphis/12/97)
agacacaguuaccaaaa

SEQ ID NO: 363698 - RNA, 19 nt, Influenza B virus (B/Memphis/12/97)
agacacuauggcugugauu

SEQ ID NO: 363699 - RNA, 23 nt, Influenza B virus (B/Memphis/12/97)
agagguaucaauuuugagacaca

SEQ ID NO: 363700 - RNA, 20 nt, Influenza B virus (B/Memphis/12/97)
agauucggagaaaccaaagg

SEQ ID NO: 363701 - RNA, 13 nt, Influenza B virus (B/Memphis/12/97)
agauucuuucaau

SEQ ID NO: 363702 - RNA, 14 nt, Influenza B virus (B/Memphis/12/97)
aggaaguacucucu

SEQ ID NO: 363703 - RNA, 19 nt, Influenza B virus (B/Memphis/12/97)
aggcaucuaauuucaguca

SEQ ID NO: 363704 - RNA, 15 nt, Influenza B virus (B/Memphis/12/97)
agguccaaacaaaga

SEQ ID NO: 363705 - RNA, 17 nt, Influenza B virus (B/Memphis/12/97)
aguacuauuuuguucau

SEQ ID NO: 363706 - RNA, 19 nt, Influenza B virus (B/Memphis/12/97)
aguacuauuuuguucauua

SEQ ID NO: 363707 - RNA, 14 nt, Influenza B virus (B/Memphis/12/97)
aguuaccaaaaaga

SEQ ID NO: 363708 - RNA, 18 nt, Influenza B virus (B/Memphis/12/97)
aguugauggcccugacag

SEQ ID NO: 363709 - RNA, 20 nt, Influenza B virus (B/Memphis/12/97)
auacgaauaaaagguccaaa

SEQ ID NO: 363710 - RNA, 22 nt, Influenza B virus (B/Memphis/12/97)
auacuacaauggaacaagagaa

SEQ ID NO: 363711 - RNA, 20 nt, Influenza B virus (B/Memphis/12/97)
auagacacuauggcugugau

SEQ ID NO: 363712 - RNA, 22 nt, Influenza B virus (B/Memphis/12/97)
auagauucggagaaaccaaagg

SEQ ID NO: 363713 - RNA, 14 nt, Influenza B virus (B/Memphis/12/97)
aucaaugucagcaa

SEQ ID NO: 363714 - RNA, 16 nt, Influenza B virus (B/Memphis/12/97)
aucaauuuugagacac

SEQ ID NO: 363715 - RNA, 17 nt, Influenza B virus (B/Memphis/12/97)
aucaauuuugagacaca

SEQ ID NO: 363716 - RNA, 12 nt, Influenza B virus (B/Memphis/12/97)
auccaggccaaa

SEQ ID NO: 363717 - RNA, 15 nt, Influenza B virus (B/Memphis/12/97)
auccaggccaaagaa

SEQ ID NO: 363718 - RNA, 16 nt, Influenza B virus (B/Memphis/12/97)
auccauuaauucaaua

SEQ ID NO: 363719 - RNA, 18 nt, Influenza B virus (B/Memphis/12/97)
auccauuaauucaauaaa

SEQ ID NO: 363720 - RNA, 21 nt, Influenza B virus (B/Memphis/12/97)
auccauuaauucaauaaacac

SEQ ID NO: 363721 - RNA, 17 nt, Influenza B virus (B/Memphis/12/97)
augcaaacaacauccua

SEQ ID NO: 363722 - RNA, 19 nt, Influenza B virus (B/Memphis/12/97)
augcaaacacuuugcucua

SEQ ID NO: 363723 - RNA, 16 nt, Influenza B virus (B/Memphis/12/97)
augcagcccaaccagg

SEQ ID NO: 363724 - RNA, 15 nt, Influenza B virus (B/Memphis/12/97)
augcauuuaagcaaa

SEQ ID NO: 363725 - RNA, 12 nt, Influenza B virus (B/Memphis/12/97)
auggcugugauu

SEQ ID NO: 363726 - RNA, 22 nt, Influenza B virus (B/Memphis/12/97)
auggcugugauuguuucaauac

SEQ ID NO: 363727 - RNA, 15 nt, Influenza B virus (B/Memphis/12/97)
augguugagucuguu

SEQ ID NO: 363728 - RNA, 13 nt, Influenza B virus (B/Memphis/12/97)
auuaugcauuuaa

SEQ ID NO: 363729 - RNA, 15 nt, Influenza B virus (B/Memphis/12/97)
auucaauaaacacaa

SEQ ID NO: 363730 - RNA, 23 nt, Influenza B virus (B/Memphis/12/97)
auugcucaaaauaaaauauggag

SEQ ID NO: 363731 - RNA, 20 nt, Influenza B virus (B/Memphis/12/97)
auugggcaaaaucccaacag

SEQ ID NO: 363732 - RNA, 14 nt, Influenza B virus (B/Memphis/12/97)
auuuauccauuaau

SEQ ID NO: 363733 - RNA, 15 nt, Influenza B virus (B/Memphis/12/97)
caaaauagacacuau

SEQ ID NO: 363734 - RNA, 18 nt, Influenza B virus (B/Memphis/12/97)
caaaauagacacuauggc

SEQ ID NO: 363735 - RNA, 14 nt, Influenza B virus (B/Memphis/12/97)
caaacaaagagaca

SEQ ID NO: 363736 - RNA, 18 nt, Influenza B virus (B/Memphis/12/97)
caaaggaaugcaaacacu

SEQ ID NO: 363737 - RNA, 15 nt, Influenza B virus (B/Memphis/12/97)
caaauaaaaagagga

SEQ ID NO: 363738 - RNA, 19 nt, Influenza B virus (B/Memphis/12/97)
caaauaaacuggaaaaagu

SEQ ID NO: 363739 - RNA, 20 nt, Influenza B virus (B/Memphis/12/97)
caaauugggcaaaaucccaa

SEQ ID NO: 363740 - RNA, 19 nt, Influenza B virus (B/Memphis/12/97)
caacauccuaagaacacaa

SEQ ID NO: 363741 - RNA, 21 nt, Influenza B virus (B/Memphis/12/97)
caauagggcauuugaaucaaa

SEQ ID NO: 363742 - RNA, 18 nt, Influenza B virus (B/Memphis/12/97)
caauugcccuuacugaac

SEQ ID NO: 363743 - RNA, 17 nt, Influenza B virus (B/Memphis/12/97)
cacuauggcugugauug

SEQ ID NO: 363744 - RNA, 23 nt, Influenza B virus (B/Memphis/12/97)
cacuauggcugugauuguuucaa

SEQ ID NO: 363745 - RNA, 16 nt, Influenza B virus (B/Memphis/12/97)
cauauacugacacaua

SEQ ID NO: 363746 - RNA, 16 nt, Influenza B virus (B/Memphis/12/97)
cauauuguuccacaaa

SEQ ID NO: 363747 - RNA, 16 nt, Influenza B virus (B/Memphis/12/97)
cauccuaagaacacaa

SEQ ID NO: 363748 - RNA, 15 nt, Influenza B virus (B/Memphis/12/97)
cauuaaauucaauuu

SEQ ID NO: 363749 - RNA, 13 nt, Influenza B virus (B/Memphis/12/97)
cauuaauucaaua

SEQ ID NO: 363750 - RNA, 15 nt, Influenza B virus (B/Memphis/12/97)
ccauuaauucaauaa

SEQ ID NO: 363751 - RNA, 21 nt, Influenza B virus (B/Memphis/12/97)
ccauuaauucaauaaacacaa

SEQ ID NO: 363752 - RNA, 15 nt, Influenza B virus (B/Memphis/12/97)
cggagaaaccaaagg

SEQ ID NO: 363753 - RNA, 16 nt, Influenza B virus (B/Memphis/12/97)
cggagaaaccaaagga

SEQ ID NO: 363754 - RNA, 14 nt, Influenza B virus (B/Memphis/12/97)
cuauggcugugauu

SEQ ID NO: 363755 - RNA, 22 nt, Influenza B virus (B/Memphis/12/97)
cucauagauucggagaaaccaa

SEQ ID NO: 363756 - RNA, 14 nt, Influenza B virus (B/Memphis/12/97)
cugugauuguuuca

SEQ ID NO: 363757 - RNA, 19 nt, Influenza B virus (B/Memphis/12/97)
gaaaauuaagcccuguauu

SEQ ID NO: 363758 - RNA, 16 nt, Influenza B virus (B/Memphis/12/97)
gaaacaagcugaggca

SEQ ID NO: 363759 - RNA, 18 nt, Influenza B virus (B/Memphis/12/97)
gacacuauggcugugauu

SEQ ID NO: 363760 - RNA, 15 nt, Influenza B virus (B/Memphis/12/97)
gagaaaccaaaggaa

SEQ ID NO: 363761 - RNA, 22 nt, Influenza B virus (B/Memphis/12/97)
gagguaucaauuuugagacaca

SEQ ID NO: 363762 - RNA, 21 nt, Influenza B virus (B/Memphis/12/97)
gauagaagaauugcauuaaau

SEQ ID NO: 363763 - RNA, 19 nt, Influenza B virus (B/Memphis/12/97)
gauucggagaaaccaaagg

SEQ ID NO: 363764 - RNA, 21 nt, Influenza B virus (B/Memphis/12/97)
gauucggagaaaccaaaggaa

SEQ ID NO: 363765 - RNA, 16 nt, Influenza B virus (B/Memphis/12/97)
gcaaauuguaaucaau

SEQ ID NO: 363766 - RNA, 14 nt, Influenza B virus (B/Memphis/12/97)
gcucuccauuucau

SEQ ID NO: 363767 - RNA, 16 nt, Influenza B virus (B/Memphis/12/97)
gcugugauuguuucaa

SEQ ID NO: 363768 - RNA, 16 nt, Influenza B virus (B/Memphis/12/97)
gcuuguggaccaaagg

SEQ ID NO: 363769 - RNA, 14 nt, Influenza B virus (B/Memphis/12/97)
ggagaaaccaaagg

SEQ ID NO: 363770 - RNA, 16 nt, Influenza B virus (B/Memphis/12/97)
ggauacuacaauggaa

SEQ ID NO: 363771 - RNA, 19 nt, Influenza B virus (B/Memphis/12/97)
ggggauacuacaauggaac

SEQ ID NO: 363772 - RNA, 16 nt, Influenza B virus (B/Memphis/12/97)
gguagagaauggacau

SEQ ID NO: 363773 - RNA, 21 nt, Influenza B virus (B/Memphis/12/97)
gguauugagugaccacauagu

SEQ ID NO: 363774 - RNA, 20 nt, Influenza B virus (B/Memphis/12/97)
guaaucaaugucagcaaaua

SEQ ID NO: 363775 - RNA, 15 nt, Influenza B virus (B/Memphis/12/97)
guacuauuuuguuca

SEQ ID NO: 363776 - RNA, 16 nt, Influenza B virus (B/Memphis/12/97)
guacuauuuuguucau

SEQ ID NO: 363777 - RNA, 17 nt, Influenza B virus (B/Memphis/12/97)
guacuauuuuguucauu

SEQ ID NO: 363778 - RNA, 19 nt, Influenza B virus (B/Memphis/12/97)
guacuauuuuguucauuau

SEQ ID NO: 363779 - RNA, 17 nt, Influenza B virus (B/Memphis/12/97)
guagagaauggacauau

SEQ ID NO: 363780 - RNA, 21 nt, Influenza B virus (B/Memphis/12/97)
guauuucuuauuaugcauuua

SEQ ID NO: 363781 - RNA, 11 nt, Influenza B virus (B/Memphis/12/97)
guggaccaaag

SEQ ID NO: 363782 - RNA, 15 nt, Influenza B virus (B/Memphis/12/97)
guugagucuguucua

SEQ ID NO: 363783 - RNA, 20 nt, Influenza B virus (B/Memphis/12/97)
uaagcaaauuguaaucaaug

SEQ ID NO: 363784 - RNA, 13 nt, Influenza B virus (B/Memphis/12/97)
uacaauggaacaa

SEQ ID NO: 363785 - RNA, 15 nt, Influenza B virus (B/Memphis/12/97)
uaccauuccuaugca

SEQ ID NO: 363786 - RNA, 19 nt, Influenza B virus (B/Memphis/12/97)
uacuacaauggaacaagag

SEQ ID NO: 363787 - RNA, 17 nt, Influenza B virus (B/Memphis/12/97)
uacuauuuuguucauua

SEQ ID NO: 363788 - RNA, 14 nt, Influenza B virus (B/Memphis/12/97)
uagacacuauggcu

SEQ ID NO: 363789 - RNA, 17 nt, Influenza B virus (B/Memphis/12/97)
uagacacuauggcugug

SEQ ID NO: 363790 - RNA, 20 nt, Influenza B virus (B/Memphis/12/97)
uagauucggagaaaccaaag

SEQ ID NO: 363791 - RNA, 14 nt, Influenza B virus (B/Memphis/12/97)
uagggcauuugaau

SEQ ID NO: 363792 - RNA, 21 nt, Influenza B virus (B/Memphis/12/97)
uaguacucaauuuaguacuau

SEQ ID NO: 363793 - RNA, 22 nt, Influenza B virus (B/Memphis/12/97)
uauaaauuuauccauuaauuca

SEQ ID NO: 363794 - RNA, 15 nt, Influenza B virus (B/Memphis/12/97)
uauccauuaauucaa

SEQ ID NO: 363795 - RNA, 16 nt, Influenza B virus (B/Memphis/12/97)
uauccauuaauucaau

SEQ ID NO: 363796 - RNA, 17 nt, Influenza B virus (B/Memphis/12/97)
uaugcauuuaagcaaau

SEQ ID NO: 363797 - RNA, 13 nt, Influenza B virus (B/Memphis/12/97)
uauggcugugauu

SEQ ID NO: 363798 - RNA, 23 nt, Influenza B virus (B/Memphis/12/97)
uauggcugugauuguuucaauac

SEQ ID NO: 363799 - RNA, 20 nt, Influenza B virus (B/Memphis/12/97)
uauugagugaccacauagug

SEQ ID NO: 363800 - RNA, 17 nt, Influenza B virus (B/Memphis/12/97)
uauugcuuguggaccaa

SEQ ID NO: 363801 - RNA, 15 nt, Influenza B virus (B/Memphis/12/97)
uauuuuguuuggaca

SEQ ID NO: 363802 - RNA, 15 nt, Influenza B virus (B/Memphis/12/97)
ucaauaaacacaauu

SEQ ID NO: 363803 - RNA, 17 nt, Influenza B virus (B/Memphis/12/97)
ucaauaaacacaauuga

SEQ ID NO: 363804 - RNA, 14 nt, Influenza B virus (B/Memphis/12/97)
ucaauuuaguacua

SEQ ID NO: 363805 - RNA, 17 nt, Influenza B virus (B/Memphis/12/97)
ucagcaaauaaacugga

SEQ ID NO: 363806 - RNA, 16 nt, Influenza B virus (B/Memphis/12/97)
ucagcucuccauuuca

SEQ ID NO: 363807 - RNA, 23 nt, Influenza B virus (B/Memphis/12/97)
ucauagauucggagaaaccaaag

SEQ ID NO: 363808 - RNA, 12 nt, Influenza B virus (B/Memphis/12/97)
uccauuaauuca

SEQ ID NO: 363809 - RNA, 15 nt, Influenza B virus (B/Memphis/12/97)
uccauuaauucaaua

SEQ ID NO: 363810 - RNA, 16 nt, Influenza B virus (B/Memphis/12/97)
uccauuaauucaauaa

SEQ ID NO: 363811 - RNA, 23 nt, Influenza B virus (B/Memphis/12/97)
uccauuaauucaauaaacacaau

SEQ ID NO: 363812 - RNA, 21 nt, Influenza B virus (B/Memphis/12/97)
uccuauuuuguuuggacaauu

SEQ ID NO: 363813 - RNA, 16 nt, Influenza B virus (B/Memphis/12/97)
ucggagaaaccaaagg

SEQ ID NO: 363814 - RNA, 14 nt, Influenza B virus (B/Memphis/12/97)
ucuaaacccuuugu

SEQ ID NO: 363815 - RNA, 15 nt, Influenza B virus (B/Memphis/12/97)
ucuguucuaaacccu

SEQ ID NO: 363816 - RNA, 21 nt, Influenza B virus (B/Memphis/12/97)
ugaaacaguuuuggagauaga

SEQ ID NO: 363817 - RNA, 14 nt, Influenza B virus (B/Memphis/12/97)
ugaaaugaaggaug

SEQ ID NO: 363818 - RNA, 19 nt, Influenza B virus (B/Memphis/12/97)
ugaggcaucuaauuucagu

SEQ ID NO: 363819 - RNA, 15 nt, Influenza B virus (B/Memphis/12/97)
ugaugauaacauauu

SEQ ID NO: 363820 - RNA, 15 nt, Influenza B virus (B/Memphis/12/97)
ugccugcaauugcau

SEQ ID NO: 363821 - RNA, 20 nt, Influenza B virus (B/Memphis/12/97)
uggacaauagggcauuugaa

SEQ ID NO: 363822 - RNA, 20 nt, Influenza B virus (B/Memphis/12/97)
uggagcggguccgcaugcca

SEQ ID NO: 363823 - RNA, 21 nt, Influenza B virus (B/Memphis/12/97)
uggagcggguccgcaugccau

SEQ ID NO: 363824 - RNA, 19 nt, Influenza B virus (B/Memphis/12/97)
uguaaucaaugucagcaaa

SEQ ID NO: 363825 - RNA, 19 nt, Influenza B virus (B/Memphis/12/97)
ugucagcaaauaaacugga

SEQ ID NO: 363826 - RNA, 16 nt, Influenza B virus (B/Memphis/12/97)
ugugauuguuucaaua

SEQ ID NO: 363827 - RNA, 18 nt, Influenza B virus (B/Memphis/12/97)
uguucauuauguaucuaa

SEQ ID NO: 363828 - RNA, 13 nt, Influenza B virus (B/Memphis/12/97)
uguuuggacaauu

SEQ ID NO: 363829 - RNA, 14 nt, Influenza B virus (B/Memphis/12/97)
uuaaguaaaagaau

SEQ ID NO: 363830 - RNA, 17 nt, Influenza B virus (B/Memphis/12/97)
uuauccauuaauucaau

SEQ ID NO: 363831 - RNA, 14 nt, Influenza B virus (B/Memphis/12/97)
uucaauaaacacaa

SEQ ID NO: 363832 - RNA, 20 nt, Influenza B virus (B/Memphis/12/97)
uucaauaaacacaauugagu

SEQ ID NO: 363833 - RNA, 14 nt, Influenza B virus (B/Memphis/12/97)
uucauuauguaucu

SEQ ID NO: 363834 - RNA, 15 nt, Influenza B virus (B/Memphis/12/97)
uucauuauguaucua

SEQ ID NO: 363835 - RNA, 14 nt, Influenza B virus (B/Memphis/12/97)
uugcucuaacccau

SEQ ID NO: 363836 - RNA, 23 nt, Influenza B virus (B/Memphis/12/97)
uuggagcggguccgcaugccaug

SEQ ID NO: 363837 - RNA, 19 nt, Influenza B virus (B/Memphis/12/97)
uuguucauuauguaucuaa

SEQ ID NO: 363838 - RNA, 20 nt, Influenza B virus (B/Memphis/12/97)
uuguuccacaaaacaguaau

SEQ ID NO: 363839 - RNA, 23 nt, Influenza B virus (B/Memphis/12/97)
uuuauccauuaauucaauaaaca

SEQ ID NO: 363840 - RNA, 18 nt, Influenza B virus (B/Memphis/12/97)
uuucuuauuaugcauuua

SEQ ID NO: 363841 - RNA, 21 nt, Influenza B virus (B/Memphis/12/97)
uuuucacauggcagcuuggag

SEQ ID NO: 363842 - RNA, 20 nt, Influenza B virus (B/Memphis/12/97)
uaaauuuauccauuaauuca

SEQ ID NO: 363843 - RNA, 19 nt, Influenza B virus (B/Memphis/12/97)
uaagcaaauuguaaucaau

SEQ ID NO: 363844 - RNA, 23 nt, Influenza B virus (B/Memphis/12/97)
uaagcaaauuguaaucaauguca

SEQ ID NO: 363845 - RNA, 16 nt, Influenza B virus (B/Memphis/12/97)
uaccauuccuaugcaa

SEQ ID NO: 363846 - RNA, 13 nt, Influenza B virus (B/Memphis/12/97)
uacuacaauggaa

SEQ ID NO: 363847 - RNA, 15 nt, Influenza B virus (B/Memphis/12/97)
uacuauuuuguucau

SEQ ID NO: 363848 - RNA, 18 nt, Influenza B virus (B/Memphis/12/97)
uacuauuuuguucauuau

SEQ ID NO: 363849 - RNA, 15 nt, Influenza B virus (B/Memphis/12/97)
uacucaauuuaguac

SEQ ID NO: 363850 - RNA, 19 nt, Influenza B virus (B/Memphis/12/97)
uagaagaauugcauuaaau

SEQ ID NO: 363851 - RNA, 13 nt, Influenza B virus (B/Memphis/12/97)
uagacacuauggc

SEQ ID NO: 363852 - RNA, 19 nt, Influenza B virus (B/Memphis/12/97)
uagacacuauggcugugau

SEQ ID NO: 363853 - RNA, 21 nt, Influenza B virus (B/Memphis/12/97)
uagauucggagaaaccaaagg

SEQ ID NO: 363854 - RNA, 17 nt, Influenza B virus (B/Memphis/12/97)
uaguacuauuuuguuca

SEQ ID NO: 363855 - RNA, 17 nt, Influenza B virus (B/Memphis/12/97)
uaucagcucuccauuuc

SEQ ID NO: 363856 - RNA, 21 nt, Influenza B virus (B/Memphis/12/97)
uauccauuaauucaauaaaca

SEQ ID NO: 363857 - RNA, 17 nt, Influenza B virus (B/Memphis/12/97)
uaugcagcccaaccagg

SEQ ID NO: 363858 - RNA, 12 nt, Influenza B virus (B/Memphis/12/97)
uaugcauuuaag

SEQ ID NO: 363859 - RNA, 11 nt, Influenza B virus (B/Memphis/12/97)
uauggcuguga

SEQ ID NO: 363860 - RNA, 20 nt, Influenza B virus (B/Memphis/12/97)
uauugcuuguggaccaaagg

SEQ ID NO: 363861 - RNA, 13 nt, Influenza B virus (B/Memphis/12/97)
ucaaauaaaaaga

SEQ ID NO: 363862 - RNA, 12 nt, Influenza B virus (B/Memphis/12/97)
ucaauaaacaca

SEQ ID NO: 363863 - RNA, 17 nt, Influenza B virus (B/Memphis/12/97)
ucaaugucagcaaauaa

SEQ ID NO: 363864 - RNA, 19 nt, Influenza B virus (B/Memphis/12/97)
ucaauuuugagacacaguu

SEQ ID NO: 363865 - RNA, 17 nt, Influenza B virus (B/Memphis/12/97)
ucauuauuagaaacauu

SEQ ID NO: 363866 - RNA, 20 nt, Influenza B virus (B/Memphis/12/97)
uccauuaauucaauaaacac

SEQ ID NO: 363867 - RNA, 15 nt, Influenza B virus (B/Memphis/12/97)
ucccaacaguagaaa

SEQ ID NO: 363868 - RNA, 13 nt, Influenza B virus (B/Memphis/12/97)
uccgcaugccaug

SEQ ID NO: 363869 - RNA, 16 nt, Influenza B virus (B/Memphis/12/97)
ucuaauuucagucaaa

SEQ ID NO: 363870 - RNA, 11 nt, Influenza B virus (B/Memphis/12/97)
ugaaucaaaua

SEQ ID NO: 363871 - RNA, 14 nt, Influenza B virus (B/Memphis/12/97)
ugacacauaccauu

SEQ ID NO: 363872 - RNA, 20 nt, Influenza B virus (B/Memphis/12/97)
ugacaguaaugcauugcuca

SEQ ID NO: 363873 - RNA, 18 nt, Influenza B virus (B/Memphis/12/97)
ugaccacauagugauuga

SEQ ID NO: 363874 - RNA, 20 nt, Influenza B virus (B/Memphis/12/97)
ugagacacaguuaccaaaaa

SEQ ID NO: 363875 - RNA, 21 nt, Influenza B virus (B/Memphis/12/97)
ugagacacaguuaccaaaaag

SEQ ID NO: 363876 - RNA, 15 nt, Influenza B virus (B/Memphis/12/97)
ugagugaccacauag

SEQ ID NO: 363877 - RNA, 19 nt, Influenza B virus (B/Memphis/12/97)
ugcaaacacuuugcucuaa

SEQ ID NO: 363878 - RNA, 12 nt, Influenza B virus (B/Memphis/12/97)
ugcauugcucaa

SEQ ID NO: 363879 - RNA, 16 nt, Influenza B virus (B/Memphis/12/97)
ugcuuguggaccaaag

SEQ ID NO: 363880 - RNA, 12 nt, Influenza B virus (B/Memphis/12/97)
uggaccaaagga

SEQ ID NO: 363881 - RNA, 18 nt, Influenza B virus (B/Memphis/12/97)
uggcugugauuguuucaa

SEQ ID NO: 363882 - RNA, 17 nt, Influenza B virus (B/Memphis/12/97)
ugguagagaauggacau

SEQ ID NO: 363883 - RNA, 18 nt, Influenza B virus (B/Memphis/12/97)
ugguugagucuguucuaa

SEQ ID NO: 363884 - RNA, 21 nt, Influenza B virus (B/Memphis/12/97)
uguaaucaaugucagcaaaua

SEQ ID NO: 363885 - RNA, 17 nt, Influenza B virus (B/Memphis/12/97)
uguuccacaaaacagua

SEQ ID NO: 363886 - RNA, 21 nt, Influenza B virus (B/Memphis/12/97)
uguuccuauuuuguuuggaca

SEQ ID NO: 363887 - RNA, 14 nt, Influenza B virus (B/Memphis/12/97)
uuacugaacuuaau

SEQ ID NO: 363888 - RNA, 20 nt, Influenza B virus (B/Memphis/12/97)
uuaucagcucuccauuucau

SEQ ID NO: 363889 - RNA, 21 nt, Influenza B virus (B/Memphis/12/97)
uuauuaugcauuuaagcaaau

SEQ ID NO: 363890 - RNA, 13 nt, Influenza B virus (B/Memphis/12/97)
uucaauaaacaca

SEQ ID NO: 363891 - RNA, 13 nt, Influenza B virus (B/Memphis/12/97)
uucauuauguauc

SEQ ID NO: 363892 - RNA, 23 nt, Influenza B virus (B/Memphis/12/97)
uuccuauuuuguuuggacaauug

SEQ ID NO: 363893 - RNA, 17 nt, Influenza B virus (B/Memphis/12/97)
uucggagaaaccaaagg

SEQ ID NO: 363894 - RNA, 16 nt, Influenza B virus (B/Memphis/12/97)
uugcauuaaauucaau

SEQ ID NO: 363895 - RNA, 20 nt, Influenza B virus (B/Memphis/12/97)
uuggacaauagggcauuuga

SEQ ID NO: 363896 - RNA, 16 nt, Influenza B virus (B/Memphis/12/97)
uuggacaauugcccuu

SEQ ID NO: 363897 - RNA, 12 nt, Influenza B virus (B/Memphis/12/97)
uuguuucaauac

SEQ ID NO: 363898 - RNA, 18 nt, Influenza B virus (B/Memphis/12/97)
uuuauccauuaauucaau

SEQ ID NO: 363899 - RNA, 16 nt, Influenza B virus (B/Memphis/12/97)
uuucagauucuuucaa

SEQ ID NO: 363900 - RNA, 14 nt, Influenza B virus (B/Memphis/12/97)
uuuuaucuuaucag

SEQ ID NO: 363901 - RNA, 21 nt, Influenza B virus (B/Memphis/12/97-MA)
aaaagaaauccaggccaaaga

SEQ ID NO: 363902 - RNA, 18 nt, Influenza B virus (B/Memphis/12/97-MA)
aaaagguccaaacaaaga

SEQ ID NO: 363903 - RNA, 20 nt, Influenza B virus (B/Memphis/12/97-MA)
aaacaguuuuggagauagaa

SEQ ID NO: 363904 - RNA, 17 nt, Influenza B virus (B/Memphis/12/97-MA)
aaacccuuuguuccuau

SEQ ID NO: 363905 - RNA, 14 nt, Influenza B virus (B/Memphis/12/97-MA)
aaacguuauugaaa

SEQ ID NO: 363906 - RNA, 20 nt, Influenza B virus (B/Memphis/12/97-MA)
aaagaaauccaggccaaaga

SEQ ID NO: 363907 - RNA, 19 nt, Influenza B virus (B/Memphis/12/97-MA)
aaaggaugauuuugagaaa

SEQ ID NO: 363908 - RNA, 17 nt, Influenza B virus (B/Memphis/12/97-MA)
aaagguccaaacaaaga

SEQ ID NO: 363909 - RNA, 19 nt, Influenza B virus (B/Memphis/12/97-MA)
aaagugccugcaauugcau

SEQ ID NO: 363910 - RNA, 19 nt, Influenza B virus (B/Memphis/12/97-MA)
aaauagacacuauggcugu

SEQ ID NO: 363911 - RNA, 23 nt, Influenza B virus (B/Memphis/12/97-MA)
aaauagacacuauggcugugauu

SEQ ID NO: 363912 - RNA, 16 nt, Influenza B virus (B/Memphis/12/97-MA)
aacaagagaagacaga

SEQ ID NO: 363913 - RNA, 15 nt, Influenza B virus (B/Memphis/12/97-MA)
aacaagcugaggcau

SEQ ID NO: 363914 - RNA, 17 nt, Influenza B virus (B/Memphis/12/97-MA)
aacagagagguaucaau

SEQ ID NO: 363915 - RNA, 13 nt, Influenza B virus (B/Memphis/12/97-MA)
aagaaacaaugaa

SEQ ID NO: 363916 - RNA, 22 nt, Influenza B virus (B/Memphis/12/97-MA)
aagcauauacugacacauacca

SEQ ID NO: 363917 - RNA, 16 nt, Influenza B virus (B/Memphis/12/97-MA)
aaggaaacucagcucc

SEQ ID NO: 363918 - RNA, 20 nt, Influenza B virus (B/Memphis/12/97-MA)
aagggaaccuuuuauugcuu

SEQ ID NO: 363919 - RNA, 20 nt, Influenza B virus (B/Memphis/12/97-MA)
aauaaaauauggagaagcau

SEQ ID NO: 363920 - RNA, 13 nt, Influenza B virus (B/Memphis/12/97-MA)
aauaaacagagag

SEQ ID NO: 363921 - RNA, 14 nt, Influenza B virus (B/Memphis/12/97-MA)
aauagggcauuuga

SEQ ID NO: 363922 - RNA, 20 nt, Influenza B virus (B/Memphis/12/97-MA)
aaugcaaacacuuugcucua

SEQ ID NO: 363923 - RNA, 13 nt, Influenza B virus (B/Memphis/12/97-MA)
aaugucagcaaau

SEQ ID NO: 363924 - RNA, 21 nt, Influenza B virus (B/Memphis/12/97-MA)
aaugucagcaaauaaacugga

SEQ ID NO: 363925 - RNA, 17 nt, Influenza B virus (B/Memphis/12/97-MA)
aauuguaaucaauguca

SEQ ID NO: 363926 - RNA, 17 nt, Influenza B virus (B/Memphis/12/97-MA)
aauuguccuuacugaac

SEQ ID NO: 363927 - RNA, 16 nt, Influenza B virus (B/Memphis/12/97-MA)
acacuauggcugugau

SEQ ID NO: 363928 - RNA, 17 nt, Influenza B virus (B/Memphis/12/97-MA)
acacuauggcugugauu

SEQ ID NO: 363929 - RNA, 22 nt, Influenza B virus (B/Memphis/12/97-MA)
acacuauggcugugauuguuuc

SEQ ID NO: 363930 - RNA, 20 nt, Influenza B virus (B/Memphis/12/97-MA)
acauaccauuccuaugcaaa

SEQ ID NO: 363931 - RNA, 16 nt, Influenza B virus (B/Memphis/12/97-MA)
accaaaggaaugcaaa

SEQ ID NO: 363932 - RNA, 21 nt, Influenza B virus (B/Memphis/12/97-MA)
accuuggugagauuggguaca

SEQ ID NO: 363933 - RNA, 23 nt, Influenza B virus (B/Memphis/12/97-MA)
accuuggugagauuggguacaua

SEQ ID NO: 363934 - RNA, 15 nt, Influenza B virus (B/Memphis/12/97-MA)
acuauggcugugauu

SEQ ID NO: 363935 - RNA, 23 nt, Influenza B virus (B/Memphis/12/97-MA)
acuguauuucuuauuaugcauuu

SEQ ID NO: 363936 - RNA, 19 nt, Influenza B virus (B/Memphis/12/97-MA)
agaaaccaaaggaaacuca

SEQ ID NO: 363937 - RNA, 12 nt, Influenza B virus (B/Memphis/12/97-MA)
agaaagcaaugg

SEQ ID NO: 363938 - RNA, 13 nt, Influenza B virus (B/Memphis/12/97-MA)
agaaagcaauggc

SEQ ID NO: 363939 - RNA, 14 nt, Influenza B virus (B/Memphis/12/97-MA)
agaaagcaauggcu

SEQ ID NO: 363940 - RNA, 23 nt, Influenza B virus (B/Memphis/12/97-MA)
agacaauaaacagagagguauca

SEQ ID NO: 363941 - RNA, 17 nt, Influenza B virus (B/Memphis/12/97-MA)
agacacaguuaccaaaa

SEQ ID NO: 363942 - RNA, 23 nt, Influenza B virus (B/Memphis/12/97-MA)
agagguaucaauuuugagacaca

SEQ ID NO: 363943 - RNA, 20 nt, Influenza B virus (B/Memphis/12/97-MA)
agauucggagaaaccaaagg

SEQ ID NO: 363944 - RNA, 16 nt, Influenza B virus (B/Memphis/12/97-MA)
agauuggguacauaua

SEQ ID NO: 363945 - RNA, 21 nt, Influenza B virus (B/Memphis/12/97-MA)
agcaaauuguaaucaauguca

SEQ ID NO: 363946 - RNA, 19 nt, Influenza B virus (B/Memphis/12/97-MA)
aggaaugguugagucuguu

SEQ ID NO: 363947 - RNA, 22 nt, Influenza B virus (B/Memphis/12/97-MA)
aggaugauuuugagaaagcaau

SEQ ID NO: 363948 - RNA, 19 nt, Influenza B virus (B/Memphis/12/97-MA)
aggcaucuaauuucaguca

SEQ ID NO: 363949 - RNA, 12 nt, Influenza B virus (B/Memphis/12/97-MA)
agguccaaacaa

SEQ ID NO: 363950 - RNA, 17 nt, Influenza B virus (B/Memphis/12/97-MA)
aguacuauuuuguucau

SEQ ID NO: 363951 - RNA, 19 nt, Influenza B virus (B/Memphis/12/97-MA)
aguacuauuuuguucauua

SEQ ID NO: 363952 - RNA, 20 nt, Influenza B virus (B/Memphis/12/97-MA)
aguacucaauuuaguacuau

SEQ ID NO: 363953 - RNA, 21 nt, Influenza B virus (B/Memphis/12/97-MA)
aguacucaauuuaguacuauu

SEQ ID NO: 363954 - RNA, 13 nt, Influenza B virus (B/Memphis/12/97-MA)
aguagaaaacucc

SEQ ID NO: 363955 - RNA, 14 nt, Influenza B virus (B/Memphis/12/97-MA)
aguuaccaaaaaga

SEQ ID NO: 363956 - RNA, 18 nt, Influenza B virus (B/Memphis/12/97-MA)
aguugauggcccugacag

SEQ ID NO: 363957 - RNA, 21 nt, Influenza B virus (B/Memphis/12/97-MA)
auaaauuuauccauuaauuca

SEQ ID NO: 363958 - RNA, 14 nt, Influenza B virus (B/Memphis/12/97-MA)
auaauaaaaauggg

SEQ ID NO: 363959 - RNA, 20 nt, Influenza B virus (B/Memphis/12/97-MA)
auacgaauaaaagguccaaa

SEQ ID NO: 363960 - RNA, 12 nt, Influenza B virus (B/Memphis/12/97-MA)
auagacacuaug

SEQ ID NO: 363961 - RNA, 16 nt, Influenza B virus (B/Memphis/12/97-MA)
aucaauuuugagacac

SEQ ID NO: 363962 - RNA, 11 nt, Influenza B virus (B/Memphis/12/97-MA)
aucagcucucc

SEQ ID NO: 363963 - RNA, 14 nt, Influenza B virus (B/Memphis/12/97-MA)
auccauuaauucaa

SEQ ID NO: 363964 - RNA, 16 nt, Influenza B virus (B/Memphis/12/97-MA)
auccauuaauucaaua

SEQ ID NO: 363965 - RNA, 19 nt, Influenza B virus (B/Memphis/12/97-MA)
augauuuugagaaagcaau

SEQ ID NO: 363966 - RNA, 22 nt, Influenza B virus (B/Memphis/12/97-MA)
augauuuugagaaagcaauggc

SEQ ID NO: 363967 - RNA, 19 nt, Influenza B virus (B/Memphis/12/97-MA)
augcaaacacuuugcucua

SEQ ID NO: 363968 - RNA, 15 nt, Influenza B virus (B/Memphis/12/97-MA)
augcagcccaaccag

SEQ ID NO: 363969 - RNA, 16 nt, Influenza B virus (B/Memphis/12/97-MA)
augcagcccaaccagg

SEQ ID NO: 363970 - RNA, 22 nt, Influenza B virus (B/Memphis/12/97-MA)
auggcucaccuuggugagauug

SEQ ID NO: 363971 - RNA, 22 nt, Influenza B virus (B/Memphis/12/97-MA)
auggcugugauuguuucaauac

SEQ ID NO: 363972 - RNA, 15 nt, Influenza B virus (B/Memphis/12/97-MA)
augguugagucuguu

SEQ ID NO: 363973 - RNA, 21 nt, Influenza B virus (B/Memphis/12/97-MA)
augucagcaaauaaacuggaa

SEQ ID NO: 363974 - RNA, 23 nt, Influenza B virus (B/Memphis/12/97-MA)
augucagcaaauaaacuggaaaa

SEQ ID NO: 363975 - RNA, 23 nt, Influenza B virus (B/Memphis/12/97-MA)
auugcucaaaauaaaauauggag

SEQ ID NO: 363976 - RNA, 20 nt, Influenza B virus (B/Memphis/12/97-MA)
auugcuuguggaccaaagga

SEQ ID NO: 363977 - RNA, 21 nt, Influenza B virus (B/Memphis/12/97-MA)
auuguaaucaaugucagcaaa

SEQ ID NO: 363978 - RNA, 20 nt, Influenza B virus (B/Memphis/12/97-MA)
auuguagugcuuguuugcuu

SEQ ID NO: 363979 - RNA, 17 nt, Influenza B virus (B/Memphis/12/97-MA)
auuguccuuacugaacu

SEQ ID NO: 363980 - RNA, 14 nt, Influenza B virus (B/Memphis/12/97-MA)
auuuauccauuaau

SEQ ID NO: 363981 - RNA, 16 nt, Influenza B virus (B/Memphis/12/97-MA)
auuuauccauuaauuc

SEQ ID NO: 363982 - RNA, 18 nt, Influenza B virus (B/Memphis/12/97-MA)
auuuauccauuaauucaa

SEQ ID NO: 363983 - RNA, 15 nt, Influenza B virus (B/Memphis/12/97-MA)
auuucuuauuaugca

SEQ ID NO: 363984 - RNA, 17 nt, Influenza B virus (B/Memphis/12/97-MA)
auuuugagaaagcaaug

SEQ ID NO: 363985 - RNA, 18 nt, Influenza B virus (B/Memphis/12/97-MA)
auuuugagaaagcaaugg

SEQ ID NO: 363986 - RNA, 19 nt, Influenza B virus (B/Memphis/12/97-MA)
auuuugagaaagcaauggc

SEQ ID NO: 363987 - RNA, 14 nt, Influenza B virus (B/Memphis/12/97-MA)
auuuuguucauuau

SEQ ID NO: 363988 - RNA, 17 nt, Influenza B virus (B/Memphis/12/97-MA)
auuuuguucauuaugua

SEQ ID NO: 363989 - RNA, 24 nt, Influenza B virus (B/Memphis/12/97-MA)
caaagaaacguuauugaaaaaugc

SEQ ID NO: 363990 - RNA, 18 nt, Influenza B virus (B/Memphis/12/97-MA)
caaaggaaugcaaacacu

SEQ ID NO: 363991 - RNA, 19 nt, Influenza B virus (B/Memphis/12/97-MA)
caaaggaugauuuugagaa

SEQ ID NO: 363992 - RNA, 22 nt, Influenza B virus (B/Memphis/12/97-MA)
caaaggaugauuuugagaaagc

SEQ ID NO: 363993 - RNA, 19 nt, Influenza B virus (B/Memphis/12/97-MA)
caaauaaacuggaaaaagu

SEQ ID NO: 363994 - RNA, 18 nt, Influenza B virus (B/Memphis/12/97-MA)
caacauccuaagaacaca

SEQ ID NO: 363995 - RNA, 17 nt, Influenza B virus (B/Memphis/12/97-MA)
caagaaagugccugcaa

SEQ ID NO: 363996 - RNA, 19 nt, Influenza B virus (B/Memphis/12/97-MA)
caagaaagugccugcaauu

SEQ ID NO: 363997 - RNA, 16 nt, Influenza B virus (B/Memphis/12/97-MA)
caaugucagcaaauaa

SEQ ID NO: 363998 - RNA, 22 nt, Influenza B virus (B/Memphis/12/97-MA)
caaugucagcaaauaaacugga

SEQ ID NO: 363999 - RNA, 17 nt, Influenza B virus (B/Memphis/12/97-MA)
caauuuugagacacagu

SEQ ID NO: 364000 - RNA, 20 nt, Influenza B virus (B/Memphis/12/97-MA)
cacauaccauuccuaugcaa

SEQ ID NO: 364001 - RNA, 21 nt, Influenza B virus (B/Memphis/12/97-MA)
caccuuggugagauuggguac

SEQ ID NO: 364002 - RNA, 15 nt, Influenza B virus (B/Memphis/12/97-MA)
cacuauggcugugau

SEQ ID NO: 364003 - RNA, 23 nt, Influenza B virus (B/Memphis/12/97-MA)
cacuauggcugugauuguuucaa

SEQ ID NO: 364004 - RNA, 24 nt, Influenza B virus (B/Memphis/12/97-MA)
cacuauggcugugauuguuucaau

SEQ ID NO: 364005 - RNA, 13 nt, Influenza B virus (B/Memphis/12/97-MA)
cagauucuuucaa

SEQ ID NO: 364006 - RNA, 16 nt, Influenza B virus (B/Memphis/12/97-MA)
cagauucuuucaauuu

SEQ ID NO: 364007 - RNA, 18 nt, Influenza B virus (B/Memphis/12/97-MA)
cagcaaauaaacuggaaa

SEQ ID NO: 364008 - RNA, 16 nt, Influenza B virus (B/Memphis/12/97-MA)
cagcucuccauuucau

SEQ ID NO: 364009 - RNA, 13 nt, Influenza B virus (B/Memphis/12/97-MA)
caguuaccaaaaa

SEQ ID NO: 364010 - RNA, 22 nt, Influenza B virus (B/Memphis/12/97-MA)
cauaguacucaauuuaguacua

SEQ ID NO: 364011 - RNA, 16 nt, Influenza B virus (B/Memphis/12/97-MA)
cauauuguuccacaaa

SEQ ID NO: 364012 - RNA, 15 nt, Influenza B virus (B/Memphis/12/97-MA)
cauuaauucaauaaa

SEQ ID NO: 364013 - RNA, 17 nt, Influenza B virus (B/Memphis/12/97-MA)
cauuauguaucuaaaac

SEQ ID NO: 364014 - RNA, 16 nt, Influenza B virus (B/Memphis/12/97-MA)
cauuugaaucaaauaa

SEQ ID NO: 364015 - RNA, 16 nt, Influenza B virus (B/Memphis/12/97-MA)
ccaaaggaaugcaaac

SEQ ID NO: 364016 - RNA, 21 nt, Influenza B virus (B/Memphis/12/97-MA)
ccugacaguaaugcauugcuc

SEQ ID NO: 364017 - RNA, 16 nt, Influenza B virus (B/Memphis/12/97-MA)
cggagaaaccaaagga

SEQ ID NO: 364018 - RNA, 12 nt, Influenza B virus (B/Memphis/12/97-MA)
cuaugcaaacaa

SEQ ID NO: 364019 - RNA, 14 nt, Influenza B virus (B/Memphis/12/97-MA)
cuauggcugugauu

SEQ ID NO: 364020 - RNA, 23 nt, Influenza B virus (B/Memphis/12/97-MA)
cuauggcugugauuguuucaaua

SEQ ID NO: 364021 - RNA, 17 nt, Influenza B virus (B/Memphis/12/97-MA)
cucaccuuggugagauu

SEQ ID NO: 364022 - RNA, 17 nt, Influenza B virus (B/Memphis/12/97-MA)
cucuaacccauuaugca

SEQ ID NO: 364023 - RNA, 19 nt, Influenza B virus (B/Memphis/12/97-MA)
uguuccuauuuuguuugaa

SEQ ID NO: 364024 - RNA, 21 nt, Influenza B virus (B/Memphis/12/97-MA)
uguuccuauuuuguuugaaca

SEQ ID NO: 364025 - RNA, 14 nt, Influenza B virus (B/Memphis/12/97-MA)
uguucuaaacccuu

SEQ ID NO: 364026 - RNA, 20 nt, Influenza B virus (B/Memphis/12/97-MA)
uuaucagcucuccauuucau

SEQ ID NO: 364027 - RNA, 13 nt, Influenza B virus (B/Memphis/12/97-MA)
uucauuauguauc

SEQ ID NO: 364028 - RNA, 12 nt, Influenza B virus (B/Memphis/12/97-MA)
uuccacauggca

SEQ ID NO: 364029 - RNA, 20 nt, Influenza B virus (B/Memphis/12/97-MA)
uuccuauuuuguuugaacaa

SEQ ID NO: 364030 - RNA, 23 nt, Influenza B virus (B/Memphis/12/97-MA)
uuccuauuuuguuugaacaauug

SEQ ID NO: 364031 - RNA, 18 nt, Influenza B virus (B/Memphis/12/97-MA)
uugagaaagcaauggcuc

SEQ ID NO: 364032 - RNA, 17 nt, Influenza B virus (B/Memphis/12/97-MA)
uugagucuguucuaaac

SEQ ID NO: 364033 - RNA, 16 nt, Influenza B virus (B/Memphis/12/97-MA)
uugcauuaaauucaau

SEQ ID NO: 364034 - RNA, 16 nt, Influenza B virus (B/Memphis/12/97-MA)
uugcuuguuaucauua

SEQ ID NO: 364035 - RNA, 20 nt, Influenza B virus (B/Memphis/12/97-MA)
uuggacaauagggcauuuga

SEQ ID NO: 364036 - RNA, 23 nt, Influenza B virus (B/Memphis/12/97-MA)
uuggagcggguccgcaugccaug

SEQ ID NO: 364037 - RNA, 12 nt, Influenza B virus (B/Memphis/12/97-MA)
uuguuccuauuu

SEQ ID NO: 364038 - RNA, 18 nt, Influenza B virus (B/Memphis/12/97-MA)
uuuauccauuaauucaau

SEQ ID NO: 364039 - RNA, 18 nt, Influenza B virus (B/Memphis/12/97-MA)
uuucuuauuaugcauuua

SEQ ID NO: 364040 - RNA, 18 nt, Influenza B virus (B/Memphis/12/97-MA)
uuugagaaagcaauggcu

SEQ ID NO: 364041 - RNA, 19 nt, Influenza B virus (B/Memphis/12/97-MA)
uuugagaaagcaauggcuc

SEQ ID NO: 364042 - RNA, 22 nt, Influenza B virus (B/Memphis/12/97-MA)
uuuuccacauggcagcuuggag

SEQ ID NO: 364043 - RNA, 15 nt, Influenza B virus (B/Memphis/12/97-MA)
uuuuccuuuauugua

SEQ ID NO: 364044 - RNA, 21 nt, Influenza B virus (B/Memphis/12/97-MA)
uuuugagaaagcaauggcuca

SEQ ID NO: 364045 - RNA, 22 nt, Influenza B virus (B/Memphis/12/97-MA)
aaaaagaaauccaggccaaaga

SEQ ID NO: 364046 - RNA, 15 nt, Influenza B virus (B/Memphis/12/97-MA)
aaaaagaggaguaaa

SEQ ID NO: 364047 - RNA, 24 nt, Influenza B virus (B/Memphis/12/97-MA)
aaaacuccauuuuccacauggcag

SEQ ID NO: 364048 - RNA, 14 nt, Influenza B virus (B/Memphis/12/97-MA)
aaaagguccaaaca

SEQ ID NO: 364049 - RNA, 16 nt, Influenza B virus (B/Memphis/12/97-MA)
aaaauaaaauauggag

SEQ ID NO: 364050 - RNA, 16 nt, Influenza B virus (B/Memphis/12/97-MA)
aaacccuuuguuccua

SEQ ID NO: 364051 - RNA, 13 nt, Influenza B virus (B/Memphis/12/97-MA)
aaagaaacaauga

SEQ ID NO: 364052 - RNA, 12 nt, Influenza B virus (B/Memphis/12/97-MA)
aaagagacaaua

SEQ ID NO: 364053 - RNA, 15 nt, Influenza B virus (B/Memphis/12/97-MA)
aaagcaauggcucac

SEQ ID NO: 364054 - RNA, 15 nt, Influenza B virus (B/Memphis/12/97-MA)
aaaggaaacucagcu

SEQ ID NO: 364055 - RNA, 22 nt, Influenza B virus (B/Memphis/12/97-MA)
aaaggaugauuuugagaaagca

SEQ ID NO: 364056 - RNA, 13 nt, Influenza B virus (B/Memphis/12/97-MA)
aaagguccaaaca

SEQ ID NO: 364057 - RNA, 16 nt, Influenza B virus (B/Memphis/12/97-MA)
aaauuguaaucaaugu

SEQ ID NO: 364058 - RNA, 19 nt, Influenza B virus (B/Memphis/12/97-MA)
aacaauuguccuuacugaa

SEQ ID NO: 364059 - RNA, 21 nt, Influenza B virus (B/Memphis/12/97-MA)
aacaauuguccuuacugaacu

SEQ ID NO: 364060 - RNA, 21 nt, Influenza B virus (B/Memphis/12/97-MA)
aacauuguaugaaaugaagga

SEQ ID NO: 364061 - RNA, 16 nt, Influenza B virus (B/Memphis/12/97-MA)
aagaaauccaggccaa

SEQ ID NO: 364062 - RNA, 14 nt, Influenza B virus (B/Memphis/12/97-MA)
aagaauugcauuaa

SEQ ID NO: 364063 - RNA, 13 nt, Influenza B virus (B/Memphis/12/97-MA)
aagcaauggcuca

SEQ ID NO: 364064 - RNA, 23 nt, Influenza B virus (B/Memphis/12/97-MA)
aagcauauacugacacauaccau

SEQ ID NO: 364065 - RNA, 21 nt, Influenza B virus (B/Memphis/12/97-MA)
aagggaaccuuuuauugcuug

SEQ ID NO: 364066 - RNA, 21 nt, Influenza B virus (B/Memphis/12/97-MA)
aagguccaaacaaagagacaa

SEQ ID NO: 364067 - RNA, 14 nt, Influenza B virus (B/Memphis/12/97-MA)
aauaaaagguccaa

SEQ ID NO: 364068 - RNA, 22 nt, Influenza B virus (B/Memphis/12/97-MA)
aauaaaagguccaaacaaagag

SEQ ID NO: 364069 - RNA, 23 nt, Influenza B virus (B/Memphis/12/97-MA)
aauaaaagguccaaacaaagaga

SEQ ID NO: 364070 - RNA, 14 nt, Influenza B virus (B/Memphis/12/97-MA)
aauagacacuaugg

SEQ ID NO: 364071 - RNA, 20 nt, Influenza B virus (B/Memphis/12/97-MA)
aauagacacuauggcuguga

SEQ ID NO: 364072 - RNA, 22 nt, Influenza B virus (B/Memphis/12/97-MA)
aauagcugacaugguuguauca

SEQ ID NO: 364073 - RNA, 12 nt, Influenza B virus (B/Memphis/12/97-MA)
aauggacauaua

SEQ ID NO: 364074 - RNA, 11 nt, Influenza B virus (B/Memphis/12/97-MA)
aauggcucacc

SEQ ID NO: 364075 - RNA, 15 nt, Influenza B virus (B/Memphis/12/97-MA)
aaugguugagucugu

SEQ ID NO: 364076 - RNA, 14 nt, Influenza B virus (B/Memphis/12/97-MA)
aauugaugauaaca

SEQ ID NO: 364077 - RNA, 22 nt, Influenza B virus (B/Memphis/12/97-MA)
aauugggcaaaaucccaacagu

SEQ ID NO: 364078 - RNA, 19 nt, Influenza B virus (B/Memphis/12/97-MA)
aauuuauccauuaauucaa

SEQ ID NO: 364079 - RNA, 13 nt, Influenza B virus (B/Memphis/12/97-MA)
aauuucagucaaa

SEQ ID NO: 364080 - RNA, 22 nt, Influenza B virus (B/Memphis/12/97-MA)
acaaaauagacacuauggcugu

SEQ ID NO: 364081 - RNA, 15 nt, Influenza B virus (B/Memphis/12/97-MA)
acaacauggagguau

SEQ ID NO: 364082 - RNA, 23 nt, Influenza B virus (B/Memphis/12/97-MA)
acaagagaagacagaaacaagcu

SEQ ID NO: 364083 - RNA, 22 nt, Influenza B virus (B/Memphis/12/97-MA)
acacauaccauuccuaugcaaa

SEQ ID NO: 364084 - RNA, 14 nt, Influenza B virus (B/Memphis/12/97-MA)
acacuauggcugug

SEQ ID NO: 364085 - RNA, 18 nt, Influenza B virus (B/Memphis/12/97-MA)
acacuauggcugugauug

SEQ ID NO: 364086 - RNA, 17 nt, Influenza B virus (B/Memphis/12/97-MA)
acaguagaaaacuccau

SEQ ID NO: 364087 - RNA, 18 nt, Influenza B virus (B/Memphis/12/97-MA)
acauaguacucaauuuag

SEQ ID NO: 364088 - RNA, 15 nt, Influenza B virus (B/Memphis/12/97-MA)
agaaagcaauggcuc

SEQ ID NO: 364089 - RNA, 18 nt, Influenza B virus (B/Memphis/12/97-MA)
agaacacaagaaagugcc

SEQ ID NO: 364090 - RNA, 18 nt, Influenza B virus (B/Memphis/12/97-MA)
agacacuauggcugugau

SEQ ID NO: 364091 - RNA, 19 nt, Influenza B virus (B/Memphis/12/97-MA)
agacacuauggcugugauu

SEQ ID NO: 364092 - RNA, 21 nt, Influenza B virus (B/Memphis/12/97-MA)
agauucggagaaaccaaagga

SEQ ID NO: 364093 - RNA, 13 nt, Influenza B virus (B/Memphis/12/97-MA)
agauucuuucaau

SEQ ID NO: 364094 - RNA, 17 nt, Influenza B virus (B/Memphis/12/97-MA)
agauuggguacauauaa

SEQ ID NO: 364095 - RNA, 16 nt, Influenza B virus (B/Memphis/12/97-MA)
agcaaauaaacuggaa

SEQ ID NO: 364096 - RNA, 13 nt, Influenza B virus (B/Memphis/12/97-MA)
agcaauggcucac

SEQ ID NO: 364097 - RNA, 14 nt, Influenza B virus (B/Memphis/12/97-MA)
aggaaguacucucu

SEQ ID NO: 364098 - RNA, 22 nt, Influenza B virus (B/Memphis/12/97-MA)
aggaaugguugagucuguucua

SEQ ID NO: 364099 - RNA, 23 nt, Influenza B virus (B/Memphis/12/97-MA)
aggaaugguugagucuguucuaa

SEQ ID NO: 364100 - RNA, 15 nt, Influenza B virus (B/Memphis/12/97-MA)
agguccaaacaaaga

SEQ ID NO: 364101 - RNA, 22 nt, Influenza B virus (B/Memphis/12/97-MA)
agugcuuguuugcuuguuauca

SEQ ID NO: 364102 - RNA, 16 nt, Influenza B virus (B/Memphis/12/97-MA)
auaaacagagagguau

SEQ ID NO: 364103 - RNA, 22 nt, Influenza B virus (B/Memphis/12/97-MA)
auaaauuuauccauuaauucaa

SEQ ID NO: 364104 - RNA, 18 nt, Influenza B virus (B/Memphis/12/97-MA)
auacgaauaaaaggucca

SEQ ID NO: 364105 - RNA, 22 nt, Influenza B virus (B/Memphis/12/97-MA)
auacuacaauggaacaagagaa

SEQ ID NO: 364106 - RNA, 20 nt, Influenza B virus (B/Memphis/12/97-MA)
auagacacuauggcugugau

SEQ ID NO: 364107 - RNA, 22 nt, Influenza B virus (B/Memphis/12/97-MA)
auagauucggagaaaccaaagg

SEQ ID NO: 364108 - RNA, 15 nt, Influenza B virus (B/Memphis/12/97-MA)
auaguacucaauuua

SEQ ID NO: 364109 - RNA, 14 nt, Influenza B virus (B/Memphis/12/97-MA)
aucaaugucagcaa

SEQ ID NO: 364110 - RNA, 17 nt, Influenza B virus (B/Memphis/12/97-MA)
aucaauuuugagacaca

SEQ ID NO: 364111 - RNA, 12 nt, Influenza B virus (B/Memphis/12/97-MA)
auccaggccaaa

SEQ ID NO: 364112 - RNA, 15 nt, Influenza B virus (B/Memphis/12/97-MA)
auccaggccaaagaa

SEQ ID NO: 364113 - RNA, 13 nt, Influenza B virus (B/Memphis/12/97-MA)
auccauuaauuca

SEQ ID NO: 364114 - RNA, 18 nt, Influenza B virus (B/Memphis/12/97-MA)
auccauuaauucaauaaa

SEQ ID NO: 364115 - RNA, 21 nt, Influenza B virus (B/Memphis/12/97-MA)
auccauuaauucaauaaacac

SEQ ID NO: 364116 - RNA, 21 nt, Influenza B virus (B/Memphis/12/97-MA)
augauuuugagaaagcaaugg

SEQ ID NO: 364117 - RNA, 17 nt, Influenza B virus (B/Memphis/12/97-MA)
augcaaacaacauccua

SEQ ID NO: 364118 - RNA, 12 nt, Influenza B virus (B/Memphis/12/97-MA)
augcauugcuca

SEQ ID NO: 364119 - RNA, 14 nt, Influenza B virus (B/Memphis/12/97-MA)
augcauugcucaaa

SEQ ID NO: 364120 - RNA, 15 nt, Influenza B virus (B/Memphis/12/97-MA)
augcauuuaagcaaa

SEQ ID NO: 364121 - RNA, 12 nt, Influenza B virus (B/Memphis/12/97-MA)
auggcugugauu

SEQ ID NO: 364122 - RNA, 18 nt, Influenza B virus (B/Memphis/12/97-MA)
augguugagucuguucua

SEQ ID NO: 364123 - RNA, 13 nt, Influenza B virus (B/Memphis/12/97-MA)
auuaugcauuuaa

SEQ ID NO: 364124 - RNA, 14 nt, Influenza B virus (B/Memphis/12/97-MA)
auucaauaaacaca

SEQ ID NO: 364125 - RNA, 16 nt, Influenza B virus (B/Memphis/12/97-MA)
auuccuaugcaaacaa

SEQ ID NO: 364126 - RNA, 20 nt, Influenza B virus (B/Memphis/12/97-MA)
auugagugaccacauaguga

SEQ ID NO: 364127 - RNA, 19 nt, Influenza B virus (B/Memphis/12/97-MA)
auugcuuguggaccaaagg

SEQ ID NO: 364128 - RNA, 20 nt, Influenza B virus (B/Memphis/12/97-MA)
auugggcaaaaucccaacag

SEQ ID NO: 364129 - RNA, 13 nt, Influenza B virus (B/Memphis/12/97-MA)
auuggguacauau

SEQ ID NO: 364130 - RNA, 13 nt, Influenza B virus (B/Memphis/12/97-MA)
auuguccuuacug

SEQ ID NO: 364131 - RNA, 15 nt, Influenza B virus (B/Memphis/12/97-MA)
auuguccuuacugaa

SEQ ID NO: 364132 - RNA, 13 nt, Influenza B virus (B/Memphis/12/97-MA)
auuuaguacuauu

SEQ ID NO: 364133 - RNA, 22 nt, Influenza B virus (B/Memphis/12/97-MA)
auuucauggcuuggacaauagg

SEQ ID NO: 364134 - RNA, 15 nt, Influenza B virus (B/Memphis/12/97-MA)
caaaauagacacuau

SEQ ID NO: 364135 - RNA, 18 nt, Influenza B virus (B/Memphis/12/97-MA)
caaaauagacacuauggc

SEQ ID NO: 364136 - RNA, 14 nt, Influenza B virus (B/Memphis/12/97-MA)
caaacaaagagaca

SEQ ID NO: 364137 - RNA, 15 nt, Influenza B virus (B/Memphis/12/97-MA)
caaacaaagagacaa

SEQ ID NO: 364138 - RNA, 17 nt, Influenza B virus (B/Memphis/12/97-MA)
caaacaaagagacaaua

SEQ ID NO: 364139 - RNA, 20 nt, Influenza B virus (B/Memphis/12/97-MA)
caaacaacauccuaagaaca

SEQ ID NO: 364140 - RNA, 15 nt, Influenza B virus (B/Memphis/12/97-MA)
caaauaaaaagagga

SEQ ID NO: 364141 - RNA, 20 nt, Influenza B virus (B/Memphis/12/97-MA)
caaauugggcaaaaucccaa

SEQ ID NO: 364142 - RNA, 19 nt, Influenza B virus (B/Memphis/12/97-MA)
caacauccuaagaacacaa

SEQ ID NO: 364143 - RNA, 21 nt, Influenza B virus (B/Memphis/12/97-MA)
caauagggcauuugaaucaaa

SEQ ID NO: 364144 - RNA, 12 nt, Influenza B virus (B/Memphis/12/97-MA)
caauuguccuua

SEQ ID NO: 364145 - RNA, 17 nt, Influenza B virus (B/Memphis/12/97-MA)
caauuguccuuacugaa

SEQ ID NO: 364146 - RNA, 18 nt, Influenza B virus (B/Memphis/12/97-MA)
caauuguccuuacugaac

SEQ ID NO: 364147 - RNA, 17 nt, Influenza B virus (B/Memphis/12/97-MA)
cacuauggcugugauug

SEQ ID NO: 364148 - RNA, 15 nt, Influenza B virus (B/Memphis/12/97-MA)
caggccaaagaaaca

SEQ ID NO: 364149 - RNA, 20 nt, Influenza B virus (B/Memphis/12/97-MA)
cauaccauuccuaugcaaac

SEQ ID NO: 364150 - RNA, 23 nt, Influenza B virus (B/Memphis/12/97-MA)
cauagauucggagaaaccaaagg

SEQ ID NO: 364151 - RNA, 12 nt, Influenza B virus (B/Memphis/12/97-MA)
cauaguacucaa

SEQ ID NO: 364152 - RNA, 16 nt, Influenza B virus (B/Memphis/12/97-MA)
cauaguacucaauuua

SEQ ID NO: 364153 - RNA, 16 nt, Influenza B virus (B/Memphis/12/97-MA)
cauauacugacacaua

SEQ ID NO: 364154 - RNA, 21 nt, Influenza B virus (B/Memphis/12/97-MA)
cauauacugacacauaccauu

SEQ ID NO: 364155 - RNA, 16 nt, Influenza B virus (B/Memphis/12/97-MA)
cauccuaagaacacaa

SEQ ID NO: 364156 - RNA, 15 nt, Influenza B virus (B/Memphis/12/97-MA)
cauuaaauucaauuu

SEQ ID NO: 364157 - RNA, 13 nt, Influenza B virus (B/Memphis/12/97-MA)
cauuaauucaaua

SEQ ID NO: 364158 - RNA, 12 nt, Influenza B virus (B/Memphis/12/97-MA)
cauuuaagcaaa

SEQ ID NO: 364159 - RNA, 21 nt, Influenza B virus (B/Memphis/12/97-MA)
cauuucauggcuuggacaaua

SEQ ID NO: 364160 - RNA, 22 nt, Influenza B virus (B/Memphis/12/97-MA)
ccaacaguagaaaacuccauuu

SEQ ID NO: 364161 - RNA, 15 nt, Influenza B virus (B/Memphis/12/97-MA)
ccauuaauucaauaa

SEQ ID NO: 364162 - RNA, 14 nt, Influenza B virus (B/Memphis/12/97-MA)
ccugcaauugcauc

SEQ ID NO: 364163 - RNA, 23 nt, Influenza B virus (B/Memphis/12/97-MA)
cgaauaaaagguccaaacaaaga

SEQ ID NO: 364164 - RNA, 15 nt, Influenza B virus (B/Memphis/12/97-MA)
cggagaaaccaaagg

SEQ ID NO: 364165 - RNA, 18 nt, Influenza B virus (B/Memphis/12/97-MA)
cuaaacccuuuguuccua

SEQ ID NO: 364166 - RNA, 16 nt, Influenza B virus (B/Memphis/12/97-MA)
cuaacagcuccauaau

SEQ ID NO: 364167 - RNA, 22 nt, Influenza B virus (B/Memphis/12/97-MA)
cuauggcugugauuguuucaau

SEQ ID NO: 364168 - RNA, 18 nt, Influenza B virus (B/Memphis/12/97-MA)
cuauuuuguuugaacaau

SEQ ID NO: 364169 - RNA, 17 nt, Influenza B virus (B/Memphis/12/97-MA)
cucaauuuaguacuauu

SEQ ID NO: 364170 - RNA, 15 nt, Influenza B virus (B/Memphis/12/97-MA)
cucaccuuggugaga

SEQ ID NO: 364171 - RNA, 22 nt, Influenza B virus (B/Memphis/12/97-MA)
cucauagauucggagaaaccaa

SEQ ID NO: 364172 - RNA, 18 nt, Influenza B virus (B/Memphis/12/97-MA)
cucuaacccauuaugcag

SEQ ID NO: 364173 - RNA, 14 nt, Influenza B virus (B/Memphis/12/97-MA)
cugugauuguuuca

SEQ ID NO: 364174 - RNA, 15 nt, Influenza B virus (B/Memphis/12/97-MA)
cuuguggaccaaagg

SEQ ID NO: 364175 - RNA, 20 nt, Influenza B virus (B/Memphis/12/97-MA)
gaaaacuccauuuuccacau

SEQ ID NO: 364176 - RNA, 16 nt, Influenza B virus (B/Memphis/12/97-MA)
gaaacaagcugaggca

SEQ ID NO: 364177 - RNA, 13 nt, Influenza B virus (B/Memphis/12/97-MA)
gaaacucagcucc

SEQ ID NO: 364178 - RNA, 20 nt, Influenza B virus (B/Memphis/12/97-MA)
gaaagcaauggcucaccuug

SEQ ID NO: 364179 - RNA, 18 nt, Influenza B virus (B/Memphis/12/97-MA)
gaagcauauacugacaca

SEQ ID NO: 364180 - RNA, 24 nt, Influenza B virus (B/Memphis/12/97-MA)
gaaggaaguacucucugacaacau

SEQ ID NO: 364181 - RNA, 18 nt, Influenza B virus (B/Memphis/12/97-MA)
gacacauaccauuccuau

SEQ ID NO: 364182 - RNA, 17 nt, Influenza B virus (B/Memphis/12/97-MA)
gacacuauggcugugau

SEQ ID NO: 364183 - RNA, 18 nt, Influenza B virus (B/Memphis/12/97-MA)
gacauaguacucaauuua

SEQ ID NO: 364184 - RNA, 17 nt, Influenza B virus (B/Memphis/12/97-MA)
gagaaagcaauggcuca

SEQ ID NO: 364185 - RNA, 20 nt, Influenza B virus (B/Memphis/12/97-MA)
gagacacaguuaccaaaaag

SEQ ID NO: 364186 - RNA, 19 nt, Influenza B virus (B/Memphis/12/97-MA)
gaggaguaaacaugaaaau

SEQ ID NO: 364187 - RNA, 22 nt, Influenza B virus (B/Memphis/12/97-MA)
gagguaucaauuuugagacaca

SEQ ID NO: 364188 - RNA, 13 nt, Influenza B virus (B/Memphis/12/97-MA)
gauaauaagggaa

SEQ ID NO: 364189 - RNA, 21 nt, Influenza B virus (B/Memphis/12/97-MA)
gauagaagaauugcauuaaau

SEQ ID NO: 364190 - RNA, 21 nt, Influenza B virus (B/Memphis/12/97-MA)
gaugauuuugagaaagcaaug

SEQ ID NO: 364191 - RNA, 19 nt, Influenza B virus (B/Memphis/12/97-MA)
gauucggagaaaccaaagg

SEQ ID NO: 364192 - RNA, 16 nt, Influenza B virus (B/Memphis/12/97-MA)
gcaaauuguaaucaau

SEQ ID NO: 364193 - RNA, 19 nt, Influenza B virus (B/Memphis/12/97-MA)
gcaauggcucaccuuggug

SEQ ID NO: 364194 - RNA, 11 nt, Influenza B virus (B/Memphis/12/97-MA)
gcuaacagcuc

SEQ ID NO: 364195 - RNA, 18 nt, Influenza B virus (B/Memphis/12/97-MA)
gcucaccuuggugagauu

SEQ ID NO: 364196 - RNA, 14 nt, Influenza B virus (B/Memphis/12/97-MA)
ggagaaaccaaagg

SEQ ID NO: 364197 - RNA, 22 nt, Influenza B virus (B/Memphis/12/97-MA)
ggaugauuuugagaaagcaaug

SEQ ID NO: 364198 - RNA, 16 nt, Influenza B virus (B/Memphis/12/97-MA)
gguagagaauggacau

SEQ ID NO: 364199 - RNA, 21 nt, Influenza B virus (B/Memphis/12/97-MA)
gguauugagugaccacauagu

SEQ ID NO: 364200 - RNA, 20 nt, Influenza B virus (B/Memphis/12/97-MA)
guaaucaaugucagcaaaua

SEQ ID NO: 364201 - RNA, 15 nt, Influenza B virus (B/Memphis/12/97-MA)
guacuauuuuguuca

SEQ ID NO: 364202 - RNA, 17 nt, Influenza B virus (B/Memphis/12/97-MA)
guacuauuuuguucauu

SEQ ID NO: 364203 - RNA, 19 nt, Influenza B virus (B/Memphis/12/97-MA)
guacuauuuuguucauuau

SEQ ID NO: 364204 - RNA, 20 nt, Influenza B virus (B/Memphis/12/97-MA)
guacucaauuuaguacuauu

SEQ ID NO: 364205 - RNA, 17 nt, Influenza B virus (B/Memphis/12/97-MA)
guagagaauggacauau

SEQ ID NO: 364206 - RNA, 18 nt, Influenza B virus (B/Memphis/12/97-MA)
guauugagugaccacaua

SEQ ID NO: 364207 - RNA, 18 nt, Influenza B virus (B/Memphis/12/97-MA)
guauuucuuauuaugcau

SEQ ID NO: 364208 - RNA, 21 nt, Influenza B virus (B/Memphis/12/97-MA)
guauuucuuauuaugcauuua

SEQ ID NO: 364209 - RNA, 22 nt, Influenza B virus (B/Memphis/12/97-MA)
guauuucuuauuaugcauuuaa

SEQ ID NO: 364210 - RNA, 14 nt, Influenza B virus (B/Memphis/12/97-MA)
guccuuacugaacu

SEQ ID NO: 364211 - RNA, 12 nt, Influenza B virus (B/Memphis/12/97-MA)
guggaccaaagg

SEQ ID NO: 364212 - RNA, 15 nt, Influenza B virus (B/Memphis/12/97-MA)
guucauuauguaucu

SEQ ID NO: 364213 - RNA, 22 nt, Influenza B virus (B/Memphis/12/97-MA)
guucuaaacccuuuguuccuau

SEQ ID NO: 364214 - RNA, 15 nt, Influenza B virus (B/Memphis/12/97-MA)
guugagucuguucua

SEQ ID NO: 364215 - RNA, 15 nt, Influenza B virus (B/Memphis/12/97-MA)
guuugcuuguuauca

SEQ ID NO: 364216 - RNA, 14 nt, Influenza B virus (B/Memphis/12/97-MA)
uaaacccuuuguuc

SEQ ID NO: 364217 - RNA, 20 nt, Influenza B virus (B/Memphis/12/97-MA)
uaaauuuauccauuaauuca

SEQ ID NO: 364218 - RNA, 20 nt, Influenza B virus (B/Memphis/12/97-MA)
uaagcaaauuguaaucaaug

SEQ ID NO: 364219 - RNA, 23 nt, Influenza B virus (B/Memphis/12/97-MA)
uaagcaaauuguaaucaauguca

SEQ ID NO: 364220 - RNA, 18 nt, Influenza B virus (B/Memphis/12/97-MA)
uaagcccuguauuuuccu

SEQ ID NO: 364221 - RNA, 13 nt, Influenza B virus (B/Memphis/12/97-MA)
uacaauggaacaa

SEQ ID NO: 364222 - RNA, 15 nt, Influenza B virus (B/Memphis/12/97-MA)
uaccauuccuaugca

SEQ ID NO: 364223 - RNA, 13 nt, Influenza B virus (B/Memphis/12/97-MA)
uacuacaauggaa

SEQ ID NO: 364224 - RNA, 19 nt, Influenza B virus (B/Memphis/12/97-MA)
uacuacaauggaacaagag

SEQ ID NO: 364225 - RNA, 17 nt, Influenza B virus (B/Memphis/12/97-MA)
uacuauuuuguucauua

SEQ ID NO: 364226 - RNA, 18 nt, Influenza B virus (B/Memphis/12/97-MA)
uacuauuuuguucauuau

SEQ ID NO: 364227 - RNA, 15 nt, Influenza B virus (B/Memphis/12/97-MA)
uacucaauuuaguac

SEQ ID NO: 364228 - RNA, 19 nt, Influenza B virus (B/Memphis/12/97-MA)
uagacacuauggcugugau

SEQ ID NO: 364229 - RNA, 20 nt, Influenza B virus (B/Memphis/12/97-MA)
uagauucggagaaaccaaag

SEQ ID NO: 364230 - RNA, 14 nt, Influenza B virus (B/Memphis/12/97-MA)
uagggcauuugaau

SEQ ID NO: 364231 - RNA, 17 nt, Influenza B virus (B/Memphis/12/97-MA)
uaguacuauuuuguuca

SEQ ID NO: 364232 - RNA, 21 nt, Influenza B virus (B/Memphis/12/97-MA)
uaguacucaauuuaguacuau

SEQ ID NO: 364233 - RNA, 17 nt, Influenza B virus (B/Memphis/12/97-MA)
uaugcagcccaaccagg

SEQ ID NO: 364234 - RNA, 13 nt, Influenza B virus (B/Memphis/12/97-MA)
uauggcugugauu

SEQ ID NO: 364235 - RNA, 20 nt, Influenza B virus (B/Memphis/12/97-MA)
uauugcuuguggaccaaagg

SEQ ID NO: 364236 - RNA, 13 nt, Influenza B virus (B/Memphis/12/97-MA)
ucaaauaaaaaga

SEQ ID NO: 364237 - RNA, 17 nt, Influenza B virus (B/Memphis/12/97-MA)
ucaaugucagcaaauaa

SEQ ID NO: 364238 - RNA, 19 nt, Influenza B virus (B/Memphis/12/97-MA)
ucaauuuugagacacaguu

SEQ ID NO: 364239 - RNA, 16 nt, Influenza B virus (B/Memphis/12/97-MA)
ucaccuuggugagauu

SEQ ID NO: 364240 - RNA, 23 nt, Influenza B virus (B/Memphis/12/97-MA)
ucauagauucggagaaaccaaag

SEQ ID NO: 364241 - RNA, 17 nt, Influenza B virus (B/Memphis/12/97-MA)
ucauuauuagaaacauu

SEQ ID NO: 364242 - RNA, 12 nt, Influenza B virus (B/Memphis/12/97-MA)
uccauuaauuca

SEQ ID NO: 364243 - RNA, 15 nt, Influenza B virus (B/Memphis/12/97-MA)
uccauuaauucaaua

SEQ ID NO: 364244 - RNA, 19 nt, Influenza B virus (B/Memphis/12/97-MA)
uccuauuuuguuugaacaa

SEQ ID NO: 364245 - RNA, 21 nt, Influenza B virus (B/Memphis/12/97-MA)
uccuauuuuguuugaacaauu

SEQ ID NO: 364246 - RNA, 14 nt, Influenza B virus (B/Memphis/12/97-MA)
ucuaaacccuuugu

SEQ ID NO: 364247 - RNA, 18 nt, Influenza B virus (B/Memphis/12/97-MA)
ucuaaacccuuuguuccu

SEQ ID NO: 364248 - RNA, 15 nt, Influenza B virus (B/Memphis/12/97-MA)
ucuguucuaaacccu

SEQ ID NO: 364249 - RNA, 11 nt, Influenza B virus (B/Memphis/12/97-MA)
ugaaucaaaua

SEQ ID NO: 364250 - RNA, 14 nt, Influenza B virus (B/Memphis/12/97-MA)
ugacacauaccauu

SEQ ID NO: 364251 - RNA, 20 nt, Influenza B virus (B/Memphis/12/97-MA)
ugacaguaaugcauugcuca

SEQ ID NO: 364252 - RNA, 13 nt, Influenza B virus (B/Memphis/12/97-MA)
ugagaaagcaaug

SEQ ID NO: 364253 - RNA, 15 nt, Influenza B virus (B/Memphis/12/97-MA)
ugagaaagcaauggc

SEQ ID NO: 364254 - RNA, 17 nt, Influenza B virus (B/Memphis/12/97-MA)
ugagaaagcaauggcuc

SEQ ID NO: 364255 - RNA, 18 nt, Influenza B virus (B/Memphis/12/97-MA)
ugagauuggguacauaua

SEQ ID NO: 364256 - RNA, 19 nt, Influenza B virus (B/Memphis/12/97-MA)
ugaggcaucuaauuucagu

SEQ ID NO: 364257 - RNA, 16 nt, Influenza B virus (B/Memphis/12/97-MA)
ugagucuguucuaaac

SEQ ID NO: 364258 - RNA, 21 nt, Influenza B virus (B/Memphis/12/97-MA)
ugagucuguucuaaacccuuu

SEQ ID NO: 364259 - RNA, 15 nt, Influenza B virus (B/Memphis/12/97-MA)
ugaugauaacauauu

SEQ ID NO: 364260 - RNA, 21 nt, Influenza B virus (B/Memphis/12/97-MA)
ugauuuugagaaagcaauggc

SEQ ID NO: 364261 - RNA, 12 nt, Influenza B virus (B/Memphis/12/97-MA)
ugcauugcucaa

SEQ ID NO: 364262 - RNA, 15 nt, Influenza B virus (B/Memphis/12/97-MA)
ugccugcaauugcau

SEQ ID NO: 364263 - RNA, 16 nt, Influenza B virus (B/Memphis/12/97-MA)
ugcuuguggaccaaag

SEQ ID NO: 364264 - RNA, 20 nt, Influenza B virus (B/Memphis/12/97-MA)
uggagcggguccgcaugcca

SEQ ID NO: 364265 - RNA, 18 nt, Influenza B virus (B/Memphis/12/97-MA)
uggcugugauuguuucaa

SEQ ID NO: 364266 - RNA, 17 nt, Influenza B virus (B/Memphis/12/97-MA)
ugguagagaauggacau

SEQ ID NO: 364267 - RNA, 19 nt, Influenza B virus (B/Memphis/12/97-MA)
uguaaucaaugucagcaaa

SEQ ID NO: 364268 - RNA, 21 nt, Influenza B virus (B/Memphis/12/97-MA)
uguaaucaaugucagcaaaua

SEQ ID NO: 364269 - RNA, 13 nt, Influenza B virus (B/Memphis/12/97-MA)
uguccuuacugaa

SEQ ID NO: 364270 - RNA, 14 nt, Influenza B virus (B/Memphis/12/97-MA)
uguccuuacugaac

SEQ ID NO: 364271 - RNA, 18 nt, Influenza B virus (B/Memphis/12/97-MA)
uguucauuauguaucuaa

SEQ ID NO: 364272 - RNA, 22 nt, Influenza B virus (B/Memphis/12/97-MA)
uguucuaaacccuuuguuccua

SEQ ID NO: 364273 - RNA, 14 nt, Influenza B virus (B/Memphis/12/97-MA)
uuaaguaaaagaau

SEQ ID NO: 364274 - RNA, 17 nt, Influenza B virus (B/Memphis/12/97-MA)
uuauccauuaauucaau

SEQ ID NO: 364275 - RNA, 21 nt, Influenza B virus (B/Memphis/12/97-MA)
uuauuaugcauuuaagcaaau

SEQ ID NO: 364276 - RNA, 13 nt, Influenza B virus (B/Memphis/12/97-MA)
uucaauaaacaca

SEQ ID NO: 364277 - RNA, 14 nt, Influenza B virus (B/Memphis/12/97-MA)
uucaauaaacacau

SEQ ID NO: 364278 - RNA, 14 nt, Influenza B virus (B/Memphis/12/97-MA)
uucauuauguaucu

SEQ ID NO: 364279 - RNA, 15 nt, Influenza B virus (B/Memphis/12/97-MA)
uucauuauguaucua

SEQ ID NO: 364280 - RNA, 17 nt, Influenza B virus (B/Memphis/12/97-MA)
uucggagaaaccaaagg

SEQ ID NO: 364281 - RNA, 14 nt, Influenza B virus (B/Memphis/12/97-MA)
uugagaaagcaaug

SEQ ID NO: 364282 - RNA, 19 nt, Influenza B virus (B/Memphis/12/97-MA)
uugagaaagcaauggcuca

SEQ ID NO: 364283 - RNA, 14 nt, Influenza B virus (B/Memphis/12/97-MA)
uugcucuaacccau

SEQ ID NO: 364284 - RNA, 19 nt, Influenza B virus (B/Memphis/12/97-MA)
uuguucauuauguaucuaa

SEQ ID NO: 364285 - RNA, 20 nt, Influenza B virus (B/Memphis/12/97-MA)
uuguuccacaaaacaguaau

SEQ ID NO: 364286 - RNA, 23 nt, Influenza B virus (B/Memphis/12/97-MA)
uuuauccauuaauucaauaaaca

SEQ ID NO: 364287 - RNA, 16 nt, Influenza B virus (B/Memphis/12/97-MA)
uuucagauucuuucaa

SEQ ID NO: 364288 - RNA, 17 nt, Influenza B virus (B/Memphis/12/97-MA)
uuugaacaauuguccuu

SEQ ID NO: 364289 - RNA, 13 nt, Influenza B virus (B/Memphis/12/97-MA)
uuuguuugaacaa

SEQ ID NO: 364290 - RNA, 14 nt, Influenza B virus (B/Memphis/12/97-MA)
uuuuaucuuaucag

SEQ ID NO: 364291 - RNA, 22 nt, Influenza B virus (B/Memphis/12/97-MA)
cugaggcaucuaauuucaguca

SEQ ID NO: 364292 - RNA, 17 nt, Influenza B virus (B/Memphis/12/97-MA)
cugugauuguuucaaua

SEQ ID NO: 364293 - RNA, 12 nt, Influenza B virus (B/Memphis/12/97-MA)
cuuacugaacuu

SEQ ID NO: 364294 - RNA, 14 nt, Influenza B virus (B/Memphis/12/97-MA)
cuuauuaugcauuu

SEQ ID NO: 364295 - RNA, 13 nt, Influenza B virus (B/Memphis/12/97-MA)
cuuggugagauug

SEQ ID NO: 364296 - RNA, 23 nt, Influenza B virus (B/Memphis/12/97-MA)
cuuggugagauuggguacauaua

SEQ ID NO: 364297 - RNA, 16 nt, Influenza B virus (B/Memphis/12/97-MA)
cuuguuaucauuacaa

SEQ ID NO: 364298 - RNA, 17 nt, Influenza B virus (B/Memphis/12/97-MA)
cuuguuaucauuacaaa

SEQ ID NO: 364299 - RNA, 15 nt, Influenza B virus (B/Memphis/12/97-MA)
cuuuauuguagugcu

SEQ ID NO: 364300 - RNA, 16 nt, Influenza B virus (B/Memphis/12/97-MA)
cuuuauuguagugcuu

SEQ ID NO: 364301 - RNA, 21 nt, Influenza B virus (B/Memphis/12/97-MA)
cuuuguuccuauuuuguuuga

SEQ ID NO: 364302 - RNA, 23 nt, Influenza B virus (B/Memphis/12/97-MA)
gaacaauuguccuuacugaacuu

SEQ ID NO: 364303 - RNA, 18 nt, Influenza B virus (B/Memphis/12/97-MA)
gacaauagggcauuugaa

SEQ ID NO: 364304 - RNA, 18 nt, Influenza B virus (B/Memphis/12/97-MA)
gacacuauggcugugauu

SEQ ID NO: 364305 - RNA, 15 nt, Influenza B virus (B/Memphis/12/97-MA)
gagaaaccaaaggaa

SEQ ID NO: 364306 - RNA, 20 nt, Influenza B virus (B/Memphis/12/97-MA)
gagucuguucuaaacccuuu

SEQ ID NO: 364307 - RNA, 14 nt, Influenza B virus (B/Memphis/12/97-MA)
gauaauaagggaac

SEQ ID NO: 364308 - RNA, 23 nt, Influenza B virus (B/Memphis/12/97-MA)
gaugauuuugagaaagcaauggc

SEQ ID NO: 364309 - RNA, 17 nt, Influenza B virus (B/Memphis/12/97-MA)
gauggcccugacaguaa

SEQ ID NO: 364310 - RNA, 18 nt, Influenza B virus (B/Memphis/12/97-MA)
gauucggagaaaccaaag

SEQ ID NO: 364311 - RNA, 21 nt, Influenza B virus (B/Memphis/12/97-MA)
gauucggagaaaccaaaggaa

SEQ ID NO: 364312 - RNA, 16 nt, Influenza B virus (B/Memphis/12/97-MA)
gcauuugaaucaaaua

SEQ ID NO: 364313 - RNA, 16 nt, Influenza B virus (B/Memphis/12/97-MA)
gcucaccuuggugaga

SEQ ID NO: 364314 - RNA, 14 nt, Influenza B virus (B/Memphis/12/97-MA)
gcucuccauuucau

SEQ ID NO: 364315 - RNA, 16 nt, Influenza B virus (B/Memphis/12/97-MA)
gcugugauuguuucaa

SEQ ID NO: 364316 - RNA, 16 nt, Influenza B virus (B/Memphis/12/97-MA)
gcuuguggaccaaagg

SEQ ID NO: 364317 - RNA, 19 nt, Influenza B virus (B/Memphis/12/97-MA)
gcuuguggaccaaaggaau

SEQ ID NO: 364318 - RNA, 10 nt, Influenza B virus (B/Memphis/12/97-MA)
ggaccaaagg

SEQ ID NO: 364319 - RNA, 12 nt, Influenza B virus (B/Memphis/12/97-MA)
ggaccaaaggaa

SEQ ID NO: 364320 - RNA, 16 nt, Influenza B virus (B/Memphis/12/97-MA)
ggauacuacaauggaa

SEQ ID NO: 364321 - RNA, 19 nt, Influenza B virus (B/Memphis/12/97-MA)
ggggauacuacaauggaac

SEQ ID NO: 364322 - RNA, 12 nt, Influenza B virus (B/Memphis/12/97-MA)
ggguacauauaa

SEQ ID NO: 364323 - RNA, 15 nt, Influenza B virus (B/Memphis/12/97-MA)
guaaaagaauugaug

SEQ ID NO: 364324 - RNA, 16 nt, Influenza B virus (B/Memphis/12/97-MA)
guacuauuuuguucau

SEQ ID NO: 364325 - RNA, 11 nt, Influenza B virus (B/Memphis/12/97-MA)
guggaccaaag

SEQ ID NO: 364326 - RNA, 15 nt, Influenza B virus (B/Memphis/12/97-MA)
guggaccaaaggaau

SEQ ID NO: 364327 - RNA, 19 nt, Influenza B virus (B/Memphis/12/97-MA)
uaagcaaauuguaaucaau

SEQ ID NO: 364328 - RNA, 16 nt, Influenza B virus (B/Memphis/12/97-MA)
uaccauuccuaugcaa

SEQ ID NO: 364329 - RNA, 15 nt, Influenza B virus (B/Memphis/12/97-MA)
uacuauuuuguucau

SEQ ID NO: 364330 - RNA, 19 nt, Influenza B virus (B/Memphis/12/97-MA)
uagaagaauugcauuaaau

SEQ ID NO: 364331 - RNA, 13 nt, Influenza B virus (B/Memphis/12/97-MA)
uagacacuauggc

SEQ ID NO: 364332 - RNA, 14 nt, Influenza B virus (B/Memphis/12/97-MA)
uagacacuauggcu

SEQ ID NO: 364333 - RNA, 17 nt, Influenza B virus (B/Memphis/12/97-MA)
uagacacuauggcugug

SEQ ID NO: 364334 - RNA, 21 nt, Influenza B virus (B/Memphis/12/97-MA)
uagauucggagaaaccaaagg

SEQ ID NO: 364335 - RNA, 22 nt, Influenza B virus (B/Memphis/12/97-MA)
uauaaauuuauccauuaauuca

SEQ ID NO: 364336 - RNA, 17 nt, Influenza B virus (B/Memphis/12/97-MA)
uaucagcucuccauuuc

SEQ ID NO: 364337 - RNA, 15 nt, Influenza B virus (B/Memphis/12/97-MA)
uauccauuaauucaa

SEQ ID NO: 364338 - RNA, 16 nt, Influenza B virus (B/Memphis/12/97-MA)
uauccauuaauucaau

SEQ ID NO: 364339 - RNA, 21 nt, Influenza B virus (B/Memphis/12/97-MA)
uauccauuaauucaauaaaca

SEQ ID NO: 364340 - RNA, 12 nt, Influenza B virus (B/Memphis/12/97-MA)
uaugcauuuaag

SEQ ID NO: 364341 - RNA, 17 nt, Influenza B virus (B/Memphis/12/97-MA)
uaugcauuuaagcaaau

SEQ ID NO: 364342 - RNA, 11 nt, Influenza B virus (B/Memphis/12/97-MA)
uauggcuguga

SEQ ID NO: 364343 - RNA, 23 nt, Influenza B virus (B/Memphis/12/97-MA)
uauggcugugauuguuucaauac

SEQ ID NO: 364344 - RNA, 20 nt, Influenza B virus (B/Memphis/12/97-MA)
uauugagugaccacauagug

SEQ ID NO: 364345 - RNA, 17 nt, Influenza B virus (B/Memphis/12/97-MA)
uauugcuuguggaccaa

SEQ ID NO: 364346 - RNA, 15 nt, Influenza B virus (B/Memphis/12/97-MA)
uauuuuguuugaaca

SEQ ID NO: 364347 - RNA, 22 nt, Influenza B virus (B/Memphis/12/97-MA)
ucaaaggaugauuuugagaaag

SEQ ID NO: 364348 - RNA, 12 nt, Influenza B virus (B/Memphis/12/97-MA)
ucaauaaacaca

SEQ ID NO: 364349 - RNA, 14 nt, Influenza B virus (B/Memphis/12/97-MA)
ucaauuuaguacua

SEQ ID NO: 364350 - RNA, 17 nt, Influenza B virus (B/Memphis/12/97-MA)
ucagcaaauaaacugga

SEQ ID NO: 364351 - RNA, 16 nt, Influenza B virus (B/Memphis/12/97-MA)
ucagcucuccauuuca

SEQ ID NO: 364352 - RNA, 20 nt, Influenza B virus (B/Memphis/12/97-MA)
uccauuaauucaauaaacac

SEQ ID NO: 364353 - RNA, 22 nt, Influenza B virus (B/Memphis/12/97-MA)
uccauuaauucaauaaacacau

SEQ ID NO: 364354 - RNA, 15 nt, Influenza B virus (B/Memphis/12/97-MA)
ucccaacaguagaaa

SEQ ID NO: 364355 - RNA, 13 nt, Influenza B virus (B/Memphis/12/97-MA)
uccgcaugccaug

SEQ ID NO: 364356 - RNA, 13 nt, Influenza B virus (B/Memphis/12/97-MA)
uccuuacugaacu

SEQ ID NO: 364357 - RNA, 16 nt, Influenza B virus (B/Memphis/12/97-MA)
ucggagaaaccaaagg

SEQ ID NO: 364358 - RNA, 16 nt, Influenza B virus (B/Memphis/12/97-MA)
ucuaauuucagucaaa

SEQ ID NO: 364359 - RNA, 18 nt, Influenza B virus (B/Memphis/12/97-MA)
ucuguucuaaacccuuug

SEQ ID NO: 364360 - RNA, 24 nt, Influenza B virus (B/Memphis/12/97-MA)
ucuguucuaaacccuuuguuccua

SEQ ID NO: 364361 - RNA, 21 nt, Influenza B virus (B/Memphis/12/97-MA)
ugaaacaguuuuggagauaga

SEQ ID NO: 364362 - RNA, 14 nt, Influenza B virus (B/Memphis/12/97-MA)
ugaaaugaaggaug

SEQ ID NO: 364363 - RNA, 20 nt, Influenza B virus (B/Memphis/12/97-MA)
ugaacaauuguccuuacuga

SEQ ID NO: 364364 - RNA, 22 nt, Influenza B virus (B/Memphis/12/97-MA)
ugaacaauuguccuuacugaac

SEQ ID NO: 364365 - RNA, 22 nt, Influenza B virus (B/Memphis/12/97-MA)
ugacacauaccauuccuaugca

SEQ ID NO: 364366 - RNA, 18 nt, Influenza B virus (B/Memphis/12/97-MA)
ugaccacauagugauuga

SEQ ID NO: 364367 - RNA, 20 nt, Influenza B virus (B/Memphis/12/97-MA)
ugagacacaguuaccaaaaa

SEQ ID NO: 364368 - RNA, 21 nt, Influenza B virus (B/Memphis/12/97-MA)
ugagacacaguuaccaaaaag

SEQ ID NO: 364369 - RNA, 19 nt, Influenza B virus (B/Memphis/12/97-MA)
ugagauuggguacauauaa

SEQ ID NO: 364370 - RNA, 15 nt, Influenza B virus (B/Memphis/12/97-MA)
ugagugaccacauag

SEQ ID NO: 364371 - RNA, 19 nt, Influenza B virus (B/Memphis/12/97-MA)
ugcaaacacuuugcucuaa

SEQ ID NO: 364372 - RNA, 20 nt, Influenza B virus (B/Memphis/12/97-MA)
uggacaauagggcauuugaa

SEQ ID NO: 364373 - RNA, 12 nt, Influenza B virus (B/Memphis/12/97-MA)
uggaccaaagga

SEQ ID NO: 364374 - RNA, 21 nt, Influenza B virus (B/Memphis/12/97-MA)
uggagcggguccgcaugccau

SEQ ID NO: 364375 - RNA, 13 nt, Influenza B virus (B/Memphis/12/97-MA)
uggguacauauaa

SEQ ID NO: 364376 - RNA, 18 nt, Influenza B virus (B/Memphis/12/97-MA)
ugguugagucuguucuaa

SEQ ID NO: 364377 - RNA, 17 nt, Influenza B virus (B/Memphis/12/97-MA)
uguaucuaaaacgucca

SEQ ID NO: 364378 - RNA, 19 nt, Influenza B virus (B/Memphis/12/97-MA)
ugucagcaaauaaacugga

SEQ ID NO: 364379 - RNA, 16 nt, Influenza B virus (B/Memphis/12/97-MA)
ugugauuguuucaaua

SEQ ID NO: 364380 - RNA, 17 nt, Influenza B virus (B/Memphis/12/97-MA)
uguuccacaaaacagua

SEQ ID NO: 364381 - RNA, 22 nt, Japanese encephalitis virus
aagcccucagaaccgucucgga

SEQ ID NO: 364382 - RNA, 14 nt, Japanese encephalitis virus
aagccucgucuagg

SEQ ID NO: 364383 - RNA, 15 nt, Japanese encephalitis virus
aagccucgucuagga

SEQ ID NO: 364384 - RNA, 23 nt, Japanese encephalitis virus
aagcugccaccggauacugggua

SEQ ID NO: 364385 - RNA, 23 nt, Japanese encephalitis virus
aaguaggucccugcucacuggaa

SEQ ID NO: 364386 - RNA, 19 nt, Japanese encephalitis virus
acggugcugucugcgucuc

SEQ ID NO: 364387 - RNA, 20 nt, Japanese encephalitis virus
acggugcugucugcgucuca

SEQ ID NO: 364388 - RNA, 12 nt, Japanese encephalitis virus
acgucaggccac

SEQ ID NO: 364389 - RNA, 22 nt, Japanese encephalitis virus
agacggugcugucugcgucuca

SEQ ID NO: 364390 - RNA, 20 nt, Japanese encephalitis virus
agccccaggaggacuggguu

SEQ ID NO: 364391 - RNA, 19 nt, Japanese encephalitis virus
agcccucagaaccgucucg

SEQ ID NO: 364392 - RNA, 13 nt, Japanese encephalitis virus
aggaggacugggu

SEQ ID NO: 364393 - RNA, 14 nt, Japanese encephalitis virus
aggaggacuggguu

SEQ ID NO: 364394 - RNA, 14 nt, Japanese encephalitis virus
aggaugcaauagac

SEQ ID NO: 364395 - RNA, 20 nt, Japanese encephalitis virus
aggccagcaaaagcugccac

SEQ ID NO: 364396 - RNA, 15 nt, Japanese encephalitis virus
aggucccugcucacu

SEQ ID NO: 364397 - RNA, 20 nt, Japanese encephalitis virus
aggucccugcucacuggaag

SEQ ID NO: 364398 - RNA, 20 nt, Japanese encephalitis virus
agucccaggaggacuggguu

SEQ ID NO: 364399 - RNA, 15 nt, Japanese encephalitis virus
auggagucaggccag

SEQ ID NO: 364400 - RNA, 20 nt, Japanese encephalitis virus
auguaaauaauguaaaugag

SEQ ID NO: 364401 - RNA, 13 nt, Japanese encephalitis virus
auguaaaugagaa

SEQ ID NO: 364402 - RNA, 11 nt, Japanese encephalitis virus
caacaauaugc

SEQ ID NO: 364403 - RNA, 13 nt, Japanese encephalitis virus
cagaaccgucucg

SEQ ID NO: 364404 - RNA, 16 nt, Japanese encephalitis virus
ccacaaauuugugcca

SEQ ID NO: 364405 - RNA, 17 nt, Japanese encephalitis virus
ccccaggaggacugggu

SEQ ID NO: 364406 - RNA, 19 nt, Japanese encephalitis virus
cggugcugucugcgucuca

SEQ ID NO: 364407 - RNA, 20 nt, Japanese encephalitis virus
cguggaaacaacaauaugcg

SEQ ID NO: 364408 - RNA, 23 nt, Japanese encephalitis virus
cuggguuaacaaaucugacaaca

SEQ ID NO: 364409 - RNA, 21 nt, Japanese encephalitis virus
gaaagaccaacgucaggccac

SEQ ID NO: 364410 - RNA, 17 nt, Japanese encephalitis virus
gacuggguuaacaaauc

SEQ ID NO: 364411 - RNA, 23 nt, Japanese encephalitis virus
gagaccccguggaaacaacaaua

SEQ ID NO: 364412 - RNA, 19 nt, Japanese encephalitis virus
gcaaaagcugccaccggau

SEQ ID NO: 364413 - RNA, 14 nt, Japanese encephalitis virus
aaacaacaauaugc

SEQ ID NO: 364414 - RNA, 20 nt, Japanese encephalitis virus
aaagcccucagaaccgucuc

SEQ ID NO: 364415 - RNA, 21 nt, Japanese encephalitis virus
aaagcccucagaaccgucucg

SEQ ID NO: 364416 - RNA, 21 nt, Japanese encephalitis virus
aagcccucagaaccgucucgg

SEQ ID NO: 364417 - RNA, 23 nt, Japanese encephalitis virus
aauguaaaugagaaaaugcaugc

SEQ ID NO: 364418 - RNA, 18 nt, Japanese encephalitis virus
acaaaucugacaacagaa

SEQ ID NO: 364419 - RNA, 17 nt, Japanese encephalitis virus
acaacagaaagugagaa

SEQ ID NO: 364420 - RNA, 22 nt, Japanese encephalitis virus
acggugcugucugcgucucagu

SEQ ID NO: 364421 - RNA, 17 nt, Japanese encephalitis virus
acuggguagacggugcu

SEQ ID NO: 364422 - RNA, 12 nt, Japanese encephalitis virus
agaaaaguagac

SEQ ID NO: 364423 - RNA, 15 nt, Japanese encephalitis virus
agaaagcccucagaa

SEQ ID NO: 364424 - RNA, 20 nt, Japanese encephalitis virus
aggccacaaauuugugccac

SEQ ID NO: 364425 - RNA, 19 nt, Japanese encephalitis virus
agucccaggaggacugggu

SEQ ID NO: 364426 - RNA, 16 nt, Japanese encephalitis virus
auaauguaaaugagaa

SEQ ID NO: 364427 - RNA, 19 nt, Japanese encephalitis virus
auauggagucaggccagca

SEQ ID NO: 364428 - RNA, 20 nt, Japanese encephalitis virus
augcauauggagucaggcca

SEQ ID NO: 364429 - RNA, 22 nt, Japanese encephalitis virus
cagaaccgucucggaaguaggu

SEQ ID NO: 364430 - RNA, 22 nt, Japanese encephalitis virus
caggccacaaauuugugccacc

SEQ ID NO: 364431 - RNA, 22 nt, Japanese encephalitis virus
caggccagcaaaagcugccacc

SEQ ID NO: 364432 - RNA, 17 nt, Japanese encephalitis virus
ccaccggauacugggua

SEQ ID NO: 364433 - RNA, 17 nt, Japanese encephalitis virus
ccaggaggacuggguua

SEQ ID NO: 364434 - RNA, 16 nt, Japanese encephalitis virus
cccaggaggacugggu

SEQ ID NO: 364435 - RNA, 19 nt, Japanese encephalitis virus
cugccaccggauacugggu

SEQ ID NO: 364436 - RNA, 15 nt, Japanese encephalitis virus
cuggaaguugaaaga

SEQ ID NO: 364437 - RNA, 13 nt, Japanese encephalitis virus
gaaacaacaauau

SEQ ID NO: 364438 - RNA, 19 nt, Japanese encephalitis virus
gaaagaccaacgucaggcc

SEQ ID NO: 364439 - RNA, 22 nt, Japanese encephalitis virus
gaccaacgucaggccacaaauu

SEQ ID NO: 364440 - RNA, 17 nt, Japanese encephalitis virus
gccaccggauacugggu

SEQ ID NO: 364441 - RNA, 18 nt, Japanese encephalitis virus
gccaccggauacugggua

SEQ ID NO: 364442 - RNA, 19 nt, Japanese encephalitis virus
gccccaggaggacuggguu

SEQ ID NO: 364443 - RNA, 19 nt, Japanese encephalitis virus
gucccaggaggacuggguu

SEQ ID NO: 364444 - RNA, 18 nt, Japanese encephalitis virus
gucuaggaugcaauagac

SEQ ID NO: 364445 - RNA, 19 nt, Japanese encephalitis virus
uauggagucaggccagcaa

SEQ ID NO: 364446 - RNA, 11 nt, Japanese encephalitis virus
ucaggccacaa

SEQ ID NO: 364447 - RNA, 17 nt, Japanese encephalitis virus
ucccaggaggacugggu

SEQ ID NO: 364448 - RNA, 21 nt, Japanese encephalitis virus
ugaaagaccaacgucaggcca

SEQ ID NO: 364449 - RNA, 18 nt, Japanese encephalitis virus
uggagucaggccagcaaa

SEQ ID NO: 364450 - RNA, 22 nt, Japanese encephalitis virus
uugaaagaccaacgucaggcca

SEQ ID NO: 364451 - RNA, 19 nt, Japanese encephalitis virus
uugagcccccacggcccaa

SEQ ID NO: 364452 - RNA, 17 nt, Japanese encephalitis virus
gcauauggagucaggcc

SEQ ID NO: 364453 - RNA, 18 nt, Japanese encephalitis virus
gccaccccgcuagggggu

SEQ ID NO: 364454 - RNA, 13 nt, Japanese encephalitis virus
ggagucaggccag

SEQ ID NO: 364455 - RNA, 23 nt, Japanese encephalitis virus
gguuaacaaaucugacaacagaa

SEQ ID NO: 364456 - RNA, 17 nt, Japanese encephalitis virus
gucuaggaugcaauaga

SEQ ID NO: 364457 - RNA, 15 nt, Japanese encephalitis virus
uauggagucaggcca

SEQ ID NO: 364458 - RNA, 22 nt, Japanese encephalitis virus
ucaggccagcaaaagcugccac

SEQ ID NO: 364459 - RNA, 11 nt, Japanese encephalitis virus
ucccugcucac

SEQ ID NO: 364460 - RNA, 22 nt, JC virus
aaaaacugagguuauaggggug

SEQ ID NO: 364461 - RNA, 11 nt, JC virus
aaaagugcagu

SEQ ID NO: 364462 - RNA, 23 nt, JC virus
aaacacaggaucccaacacucua

SEQ ID NO: 364463 - RNA, 14 nt, JC virus
aaacauaugcugua

SEQ ID NO: 364464 - RNA, 17 nt, JC virus
aaacauaugcuguaaua

SEQ ID NO: 364465 - RNA, 12 nt, JC virus
aaacaugccaca

SEQ ID NO: 364466 - RNA, 22 nt, JC virus
aaaccacuauuuuucuuuugca

SEQ ID NO: 364467 - RNA, 21 nt, JC virus
aaagccuuuacagaugugaaa

SEQ ID NO: 364468 - RNA, 23 nt, JC virus
aaagccuuuacagaugugaaaag

SEQ ID NO: 364469 - RNA, 18 nt, JC virus
aaagccuuuauuguaaua

SEQ ID NO: 364470 - RNA, 23 nt, JC virus
aaaggcuuuugauuacagcauuu

SEQ ID NO: 364471 - RNA, 21 nt, JC virus
aaagguagaagacccuaaaga

SEQ ID NO: 364472 - RNA, 23 nt, JC virus
aaagucaagaaugggucucccca

SEQ ID NO: 364473 - RNA, 14 nt, JC virus
aaagugacucccca

SEQ ID NO: 364474 - RNA, 12 nt, JC virus
aaauauacucau

SEQ ID NO: 364475 - RNA, 18 nt, JC virus
aaauccagccuuucuuuc

SEQ ID NO: 364476 - RNA, 20 nt, JC virus
aaauccagccuuucuuucca

SEQ ID NO: 364477 - RNA, 11 nt, JC virus
aaauguuugcc

SEQ ID NO: 364478 - RNA, 21 nt, JC virus
aaauugcaucccuugcuacug

SEQ ID NO: 364479 - RNA, 22 nt, JC virus
aaauugcaucccuugcuacugu

SEQ ID NO: 364480 - RNA, 12 nt, JC virus
aaauugcugcug

SEQ ID NO: 364481 - RNA, 21 nt, JC virus
aacacucuaccccaccuaaaa

SEQ ID NO: 364482 - RNA, 13 nt, JC virus
aacaguugcaguu

SEQ ID NO: 364483 - RNA, 19 nt, JC virus
aaccuguggaaauauacuc

SEQ ID NO: 364484 - RNA, 22 nt, JC virus
aacuccagaaaugggugaccca

SEQ ID NO: 364485 - RNA, 16 nt, JC virus
aacucuaggaguccuu

SEQ ID NO: 364486 - RNA, 19 nt, JC virus
aacuggugguagugcuauu

SEQ ID NO: 364487 - RNA, 14 nt, JC virus
aagaaauguuugcc

SEQ ID NO: 364488 - RNA, 16 nt, JC virus
aagaaauguuugccag

SEQ ID NO: 364489 - RNA, 22 nt, JC virus
aagaaauguuugccagugauga

SEQ ID NO: 364490 - RNA, 21 nt, JC virus
aagguagaagacccuaaagac

SEQ ID NO: 364491 - RNA, 14 nt, JC virus
aaguauaaccagcu

SEQ ID NO: 364492 - RNA, 13 nt, JC virus
aagucaauaucua

SEQ ID NO: 364493 - RNA, 14 nt, JC virus
aagugggaugaaga

SEQ ID NO: 364494 - RNA, 15 nt, JC virus
aagugggaugaagac

SEQ ID NO: 364495 - RNA, 16 nt, JC virus
aaguugaaauugcauc

SEQ ID NO: 364496 - RNA, 20 nt, JC virus
aauccugguggaauacauuu

SEQ ID NO: 364497 - RNA, 20 nt, JC virus
aaugggaauccugguggaau

SEQ ID NO: 364498 - RNA, 12 nt, JC virus
aauuacaggggg

SEQ ID NO: 364499 - RNA, 19 nt, JC virus
aauugcaucccuugcuacu

SEQ ID NO: 364500 - RNA, 20 nt, JC virus
aauugcaucccuugcuacug

SEQ ID NO: 364501 - RNA, 22 nt, JC virus
aauugcaucccuugcuacugua

SEQ ID NO: 364502 - RNA, 21 nt, JC virus
acaaguuugaugaaugugcac

SEQ ID NO: 364503 - RNA, 22 nt, JC virus
acacucuaccccaccuaaaaag

SEQ ID NO: 364504 - RNA, 16 nt, JC virus
acagacaucaacagcu

SEQ ID NO: 364505 - RNA, 19 nt, JC virus
acagaugugaaaagugcag

SEQ ID NO: 364506 - RNA, 23 nt, JC virus
acagaugugaaaagugcaguuuu

SEQ ID NO: 364507 - RNA, 20 nt, JC virus
acaggauuuucaguagcuga

SEQ ID NO: 364508 - RNA, 14 nt, JC virus
acaucaacagcuga

SEQ ID NO: 364509 - RNA, 23 nt, JC virus
acaugccacagacaucaacagcu

SEQ ID NO: 364510 - RNA, 22 nt, JC virus
acaugcuuauuucuaaauccag

SEQ ID NO: 364511 - RNA, 19 nt, JC virus
acauuugaaagugacuccc

SEQ ID NO: 364512 - RNA, 21 nt, JC virus
acauuugaaagugacucccca

SEQ ID NO: 364513 - RNA, 23 nt, JC virus
acauuugaaagugacuccccaaa

SEQ ID NO: 364514 - RNA, 16 nt, JC virus
accaacauuagcuuuc

SEQ ID NO: 364515 - RNA, 20 nt, JC virus
accacuauuuuucuuuugca

SEQ ID NO: 364516 - RNA, 16 nt, JC virus
acccagaugagcaucu

SEQ ID NO: 364517 - RNA, 11 nt, JC virus
acccuaaagac

SEQ ID NO: 364518 - RNA, 14 nt, JC virus
accuaguugcuacu

SEQ ID NO: 364519 - RNA, 17 nt, JC virus
accuaguugcuacuguu

SEQ ID NO: 364520 - RNA, 18 nt, JC virus
accuauggaacagaugaa

SEQ ID NO: 364521 - RNA, 22 nt, JC virus
accucugaggcuauagcugcua

SEQ ID NO: 364522 - RNA, 17 nt, JC virus
accuuaaaaacugaggu

SEQ ID NO: 364523 - RNA, 21 nt, JC virus
acuacccaaucuaaaugagga

SEQ ID NO: 364524 - RNA, 22 nt, JC virus
acuauagaaguugaaauugcau

SEQ ID NO: 364525 - RNA, 21 nt, JC virus
acuccugaaacauaugcugua

SEQ ID NO: 364526 - RNA, 22 nt, JC virus
acuccugaaacauaugcuguaa

SEQ ID NO: 364527 - RNA, 13 nt, JC virus
acucuaaugggca

SEQ ID NO: 364528 - RNA, 17 nt, JC virus
acuggugguagugcuau

SEQ ID NO: 364529 - RNA, 14 nt, JC virus
acuguugcuucuuu

SEQ ID NO: 364530 - RNA, 22 nt, JC virus
acuguuucugaggcugcugcug

SEQ ID NO: 364531 - RNA, 16 nt, JC virus
acuuaacaguugcagu

SEQ ID NO: 364532 - RNA, 18 nt, JC virus
acuuaacaguugcaguua

SEQ ID NO: 364533 - RNA, 19 nt, JC virus
acuugagcauccaugccau

SEQ ID NO: 364534 - RNA, 16 nt, JC virus
agaaaugggugaccca

SEQ ID NO: 364535 - RNA, 18 nt, JC virus
agaaguugaaauugcauc

SEQ ID NO: 364536 - RNA, 22 nt, JC virus
agaauuccacuacccaaucuaa

SEQ ID NO: 364537 - RNA, 22 nt, JC virus
agaccugggaaaagcauuguga

SEQ ID NO: 364538 - RNA, 15 nt, JC virus
agaccuguuuguaaa

SEQ ID NO: 364539 - RNA, 20 nt, JC virus
agaccuguuuguaaacaugc

SEQ ID NO: 364540 - RNA, 23 nt, JC virus
agaccuguuuguaaacaugccac

SEQ ID NO: 364541 - RNA, 22 nt, JC virus
agaccuguuuugccaugaagaa

SEQ ID NO: 364542 - RNA, 14 nt, JC virus
agaggcugcugcua

SEQ ID NO: 364543 - RNA, 16 nt, JC virus
agaggcugcugcuacu

SEQ ID NO: 364544 - RNA, 19 nt, JC virus
agaugagcaucuuaggggu

SEQ ID NO: 364545 - RNA, 19 nt, JC virus
agauuuuuugcugacuggg

SEQ ID NO: 364546 - RNA, 14 nt, JC virus
agcaacucaugaca

SEQ ID NO: 364547 - RNA, 23 nt, JC virus
agcauugugauugugauucagug

SEQ ID NO: 364548 - RNA, 21 nt, JC virus
agcuccgggggcuguagcugg

SEQ ID NO: 364549 - RNA, 16 nt, JC virus
agcugaaauugcugcu

SEQ ID NO: 364550 - RNA, 16 nt, JC virus
agcuggguuugcugca

SEQ ID NO: 364551 - RNA, 14 nt, JC virus
aggccuuacuccug

SEQ ID NO: 364552 - RNA, 14 nt, JC virus
aggcuauagcugcu

SEQ ID NO: 364553 - RNA, 16 nt, JC virus
aggcuauagcugcuau

SEQ ID NO: 364554 - RNA, 13 nt, JC virus
aggcugcugcuac

SEQ ID NO: 364555 - RNA, 21 nt, JC virus
aggcugcugcuacuauagaag

SEQ ID NO: 364556 - RNA, 12 nt, JC virus
aggcugcugcug

SEQ ID NO: 364557 - RNA, 13 nt, JC virus
aggcugugaccuu

SEQ ID NO: 364558 - RNA, 20 nt, JC virus
aggcuuuagaauuacagggg

SEQ ID NO: 364559 - RNA, 21 nt, JC virus
agggguuuuuaacccuccuuu

SEQ ID NO: 364560 - RNA, 17 nt, JC virus
agguuauaggggugaca

SEQ ID NO: 364561 - RNA, 18 nt, JC virus
aguaccucugaggcuaua

SEQ ID NO: 364562 - RNA, 19 nt, JC virus
aguagcugaaauugcugcu

SEQ ID NO: 364563 - RNA, 20 nt, JC virus
aguagcugaaauugcugcug

SEQ ID NO: 364564 - RNA, 13 nt, JC virus
aguauaaccagcu

SEQ ID NO: 364565 - RNA, 16 nt, JC virus
aguauaaguugucacc

SEQ ID NO: 364566 - RNA, 15 nt, JC virus
agucaagcuguguuu

SEQ ID NO: 364567 - RNA, 23 nt, JC virus
agugcagggcaccagcuuucauu

SEQ ID NO: 364568 - RNA, 11 nt, JC virus
aguugcuacug

SEQ ID NO: 364569 - RNA, 13 nt, JC virus
aguugcuacuguu

SEQ ID NO: 364570 - RNA, 13 nt, JC virus
auaaccagcuuua

SEQ ID NO: 364571 - RNA, 17 nt, JC virus
auaaccagcuuuacuua

SEQ ID NO: 364572 - RNA, 12 nt, JC virus
auaccacuaaag

SEQ ID NO: 364573 - RNA, 13 nt, JC virus
auaccacuaaaga

SEQ ID NO: 364574 - RNA, 14 nt, JC virus
auaccacuaaagaa

SEQ ID NO: 364575 - RNA, 11 nt, JC virus
auagcugcuau

SEQ ID NO: 364576 - RNA, 12 nt, JC virus
auaggggugaca

SEQ ID NO: 364577 - RNA, 12 nt, JC virus
auauacucaugu

SEQ ID NO: 364578 - RNA, 22 nt, JC virus
aucauaaaguuucaacaguugg

SEQ ID NO: 364579 - RNA, 13 nt, JC virus
aucccuugcuacu

SEQ ID NO: 364580 - RNA, 14 nt, JC virus
aucccuugcuacug

SEQ ID NO: 364581 - RNA, 15 nt, JC virus
aucccuugcuacugu

SEQ ID NO: 364582 - RNA, 19 nt, JC virus
aucccuugcuacuguagag

SEQ ID NO: 364583 - RNA, 16 nt, JC virus
aucuaaaugaggaucu

SEQ ID NO: 364584 - RNA, 14 nt, JC virus
augaaaacacagga

SEQ ID NO: 364585 - RNA, 18 nt, JC virus
augaagaccuguuuugcc

SEQ ID NO: 364586 - RNA, 20 nt, JC virus
augaagaccuguuuugccau

SEQ ID NO: 364587 - RNA, 19 nt, JC virus
augcuuauuucuaaaucca

SEQ ID NO: 364588 - RNA, 22 nt, JC virus
augcuuccuuguuacagugugg

SEQ ID NO: 364589 - RNA, 13 nt, JC virus
auggaacagauga

SEQ ID NO: 364590 - RNA, 22 nt, JC virus
gguagaagacccuaaagacuuu

SEQ ID NO: 364591 - RNA, 15 nt, JC virus
gguagaaugcuuuuu

SEQ ID NO: 364592 - RNA, 12 nt, JC virus
gguagugcuauu

SEQ ID NO: 364593 - RNA, 14 nt, JC virus
ggugguagugcuau

SEQ ID NO: 364594 - RNA, 13 nt, JC virus
gguuauaggggug

SEQ ID NO: 364595 - RNA, 17 nt, JC virus
gguugacucaauuacag

SEQ ID NO: 364596 - RNA, 21 nt, JC virus
guaacuggugguagugcuauu

SEQ ID NO: 364597 - RNA, 22 nt, JC virus
guaccucugaggcuauagcugc

SEQ ID NO: 364598 - RNA, 19 nt, JC virus
guagaaaauguauacaugc

SEQ ID NO: 364599 - RNA, 21 nt, JC virus
guagaaugcuuuuuaacucca

SEQ ID NO: 364600 - RNA, 23 nt, JC virus
guagaaugcuuuuuaacuccaga

SEQ ID NO: 364601 - RNA, 18 nt, JC virus
guagcuggguuugcugca

SEQ ID NO: 364602 - RNA, 15 nt, JC virus
guauaaccagcuuua

SEQ ID NO: 364603 - RNA, 14 nt, JC virus
gucaccuuugcaaa

SEQ ID NO: 364604 - RNA, 15 nt, JC virus
guccauauuugucaa

SEQ ID NO: 364605 - RNA, 18 nt, JC virus
guccccuggaagcuccuc

SEQ ID NO: 364606 - RNA, 13 nt, JC virus
gugcuauugcuca

SEQ ID NO: 364607 - RNA, 17 nt, JC virus
gugcuuuuuaauuacag

SEQ ID NO: 364608 - RNA, 13 nt, JC virus
gugguagugcuau

SEQ ID NO: 364609 - RNA, 15 nt, JC virus
guuauaggggugaca

SEQ ID NO: 364610 - RNA, 20 nt, JC virus
guuauaggggugacaaguuu

SEQ ID NO: 364611 - RNA, 16 nt, JC virus
guugacucaauuacag

SEQ ID NO: 364612 - RNA, 11 nt, JC virus
guugcuacugu

SEQ ID NO: 364613 - RNA, 12 nt, JC virus
uaaacaugccac

SEQ ID NO: 364614 - RNA, 19 nt, JC virus
uaaaguauaaccagcuuua

SEQ ID NO: 364615 - RNA, 16 nt, JC virus
uaaccagcuuuacuua

SEQ ID NO: 364616 - RNA, 19 nt, JC virus
uaacuggugguagugcuau

SEQ ID NO: 364617 - RNA, 18 nt, JC virus
uaauaaaguauaaccagc

SEQ ID NO: 364618 - RNA, 20 nt, JC virus
uaauaaaguauaaccagcuu

SEQ ID NO: 364619 - RNA, 21 nt, JC virus
uacaaguaccucugaggcuau

SEQ ID NO: 364620 - RNA, 20 nt, JC virus
uacagagguagaaugcuuuu

SEQ ID NO: 364621 - RNA, 21 nt, JC virus
uacagcauuuuugucugcaac

SEQ ID NO: 364622 - RNA, 15 nt, JC virus
uacauaggcugccca

SEQ ID NO: 364623 - RNA, 13 nt, JC virus
uaccaacauuagc

SEQ ID NO: 364624 - RNA, 19 nt, JC virus
uaccaacauuagcuuucau

SEQ ID NO: 364625 - RNA, 16 nt, JC virus
uacccaaucuaaauga

SEQ ID NO: 364626 - RNA, 12 nt, JC virus
uaccucugaggc

SEQ ID NO: 364627 - RNA, 16 nt, JC virus
uaccucugaggcuaua

SEQ ID NO: 364628 - RNA, 15 nt, JC virus
uacugcauauuacaa

SEQ ID NO: 364629 - RNA, 19 nt, JC virus
uacuugagcauccaugcca

SEQ ID NO: 364630 - RNA, 22 nt, JC virus
uacuuuauuaaaauguacugca

SEQ ID NO: 364631 - RNA, 10 nt, JC virus
uagaagaccc

SEQ ID NO: 364632 - RNA, 20 nt, JC virus
uagaaguugaaauugcaucc

SEQ ID NO: 364633 - RNA, 14 nt, JC virus
uagauuuuuugcug

SEQ ID NO: 364634 - RNA, 11 nt, JC virus
uagcugaaauu

SEQ ID NO: 364635 - RNA, 14 nt, JC virus
uagcugaaauugcu

SEQ ID NO: 364636 - RNA, 17 nt, JC virus
uagcugaaauugcugcu

SEQ ID NO: 364637 - RNA, 18 nt, JC virus
uagcugaaauugcugcug

SEQ ID NO: 364638 - RNA, 22 nt, JC virus
uagcugaaauugcugcuggaga

SEQ ID NO: 364639 - RNA, 20 nt, JC virus
uaggcugcccaucaacucua

SEQ ID NO: 364640 - RNA, 13 nt, JC virus
uaggggugacaag

SEQ ID NO: 364641 - RNA, 20 nt, JC virus
uaggugccaaccuauggaac

SEQ ID NO: 364642 - RNA, 15 nt, JC virus
uagugcuauugcuca

SEQ ID NO: 364643 - RNA, 11 nt, JC virus
uaguugcuacu

SEQ ID NO: 364644 - RNA, 12 nt, JC virus
uaguugcuacug

SEQ ID NO: 364645 - RNA, 13 nt, JC virus
uaguugcuacugu

SEQ ID NO: 364646 - RNA, 19 nt, JC virus
uauaagaaacuuauggaaa

SEQ ID NO: 364647 - RNA, 22 nt, JC virus
uauaaguugucaccuuugcaaa

SEQ ID NO: 364648 - RNA, 23 nt, JC virus
uauacuuuauuaaaauguacugc

SEQ ID NO: 364649 - RNA, 21 nt, JC virus
uauuucuaaauccagccuuuc

SEQ ID NO: 364650 - RNA, 16 nt, JC virus
ucaaacuguaacuggu

SEQ ID NO: 364651 - RNA, 18 nt, JC virus
ucaaacuguaacuggugg

SEQ ID NO: 364652 - RNA, 15 nt, JC virus
ucaauaucuauauca

SEQ ID NO: 364653 - RNA, 14 nt, JC virus
ucaccuuugcaaag

SEQ ID NO: 364654 - RNA, 20 nt, JC virus
ucaguagcugaaauugcugc

SEQ ID NO: 364655 - RNA, 21 nt, JC virus
ucaguagcugaaauugcugcu

SEQ ID NO: 364656 - RNA, 21 nt, JC virus
uccacugcacaauccucucau

SEQ ID NO: 364657 - RNA, 13 nt, JC virus
uccagaaaugggu

SEQ ID NO: 364658 - RNA, 16 nt, JC virus
ucccuugcuacuguag

SEQ ID NO: 364659 - RNA, 18 nt, JC virus
uccuuagcugcaccuuaa

SEQ ID NO: 364660 - RNA, 13 nt, JC virus
ucuaaauccagcc

SEQ ID NO: 364661 - RNA, 23 nt, JC virus
ucuaaccuguggaaauauacuca

SEQ ID NO: 364662 - RNA, 23 nt, JC virus
ucuaaugggcaagcaacucauga

SEQ ID NO: 364663 - RNA, 14 nt, JC virus
ucuaggaaagucaa

SEQ ID NO: 364664 - RNA, 23 nt, JC virus
ucucaugaauggcagcugcaaag

SEQ ID NO: 364665 - RNA, 16 nt, JC virus
ucucuaggaaagucaa

SEQ ID NO: 364666 - RNA, 14 nt, JC virus
ucuggagaguccuc

SEQ ID NO: 364667 - RNA, 14 nt, JC virus
ugaaaagugcaguu

SEQ ID NO: 364668 - RNA, 22 nt, JC virus
ugaaauugcaucccuugcuacu

SEQ ID NO: 364669 - RNA, 14 nt, JC virus
ugaaauugcugcug

SEQ ID NO: 364670 - RNA, 16 nt, JC virus
ugaaauugcugcugga

SEQ ID NO: 364671 - RNA, 21 nt, JC virus
ugaagaaauguuugccaguga

SEQ ID NO: 364672 - RNA, 16 nt, JC virus
ugaaugugcacucuaa

SEQ ID NO: 364673 - RNA, 19 nt, JC virus
ugacccagaugagcaucuu

SEQ ID NO: 364674 - RNA, 17 nt, JC virus
ugaccuuaaaaacugag

SEQ ID NO: 364675 - RNA, 19 nt, JC virus
ugagaccugggaaaagcau

SEQ ID NO: 364676 - RNA, 18 nt, JC virus
ugagcauccaugccauac

SEQ ID NO: 364677 - RNA, 18 nt, JC virus
ugaggcuauagcugcuau

SEQ ID NO: 364678 - RNA, 14 nt, JC virus
ugaggcugcugcug

SEQ ID NO: 364679 - RNA, 21 nt, JC virus
ugauccauguccagagucuuc

SEQ ID NO: 364680 - RNA, 19 nt, JC virus
ugaugaaugugcacucuaa

SEQ ID NO: 364681 - RNA, 21 nt, JC virus
ugcaacuguuaaguaaagcug

SEQ ID NO: 364682 - RNA, 16 nt, JC virus
ugcaccuuaaaauauc

SEQ ID NO: 364683 - RNA, 18 nt, JC virus
ugcacucuaaugggcaag

SEQ ID NO: 364684 - RNA, 21 nt, JC virus
ugcagggcaccagcuuucauu

SEQ ID NO: 364685 - RNA, 18 nt, JC virus
ugcaucccuugcuacugu

SEQ ID NO: 364686 - RNA, 16 nt, JC virus
ugccaaccuauggaac

SEQ ID NO: 364687 - RNA, 16 nt, JC virus
ugccagugaugaugaa

SEQ ID NO: 364688 - RNA, 13 nt, JC virus
ugcuacuguagag

SEQ ID NO: 364689 - RNA, 17 nt, JC virus
ugcuauugcucaguugg

SEQ ID NO: 364690 - RNA, 15 nt, JC virus
ugcucaguugggaua

SEQ ID NO: 364691 - RNA, 16 nt, JC virus
ugcuggagaggcugcu

SEQ ID NO: 364692 - RNA, 21 nt, JC virus
ugcuggagaggcugcugcuac

SEQ ID NO: 364693 - RNA, 17 nt, JC virus
ugcuguaauaacuggag

SEQ ID NO: 364694 - RNA, 16 nt, JC virus
uggaacagaugaaugg

SEQ ID NO: 364695 - RNA, 19 nt, JC virus
uggagaggcugcugcuacu

SEQ ID NO: 364696 - RNA, 14 nt, JC virus
uggcagcugcaaag

SEQ ID NO: 364697 - RNA, 22 nt, JC virus
ugggcaagcaacucaugacaau

SEQ ID NO: 364698 - RNA, 23 nt, JC virus
ugggggaccuaguugcuacuguu

SEQ ID NO: 364699 - RNA, 18 nt, JC virus
ugggugccgcacuugcac

SEQ ID NO: 364700 - RNA, 19 nt, JC virus
ugguuuuuugaaacauuga

SEQ ID NO: 364701 - RNA, 13 nt, JC virus
uguaaacaugcca

SEQ ID NO: 364702 - RNA, 21 nt, JC virus
uguaacuggugguagugcuau

SEQ ID NO: 364703 - RNA, 12 nt, JC virus
uguaacuuuuau

SEQ ID NO: 364704 - RNA, 14 nt, JC virus
uguaauaacuggag

SEQ ID NO: 364705 - RNA, 14 nt, JC virus
uguaauaugcagua

SEQ ID NO: 364706 - RNA, 19 nt, JC virus
uguaauaugcaguacauuu

SEQ ID NO: 364707 - RNA, 19 nt, JC virus
uguagcuggguuugcugca

SEQ ID NO: 364708 - RNA, 20 nt, JC virus
uguagcuggguuugcugcau

SEQ ID NO: 364709 - RNA, 21 nt, JC virus
ugucugcaccagaggcuucug

SEQ ID NO: 364710 - RNA, 14 nt, JC virus
ugugaaaagugcag

SEQ ID NO: 364711 - RNA, 15 nt, JC virus
ugugaaaagugcagu

SEQ ID NO: 364712 - RNA, 17 nt, JC virus
ugugauugugauucagu

SEQ ID NO: 364713 - RNA, 18 nt, JC virus
ugugauugugauucagug

SEQ ID NO: 364714 - RNA, 17 nt, JC virus
uguggaaauauacucau

SEQ ID NO: 364715 - RNA, 19 nt, JC virus
uguuucugaggcugcugcu

SEQ ID NO: 364716 - RNA, 16 nt, JC virus
uguuuugccaugaaga

SEQ ID NO: 364717 - RNA, 14 nt, JC virus
uuaacaguugcagu

SEQ ID NO: 364718 - RNA, 20 nt, JC virus
uuacaaguaccucugaggcu

SEQ ID NO: 364719 - RNA, 18 nt, JC virus
uuaguaagucaauaucua

SEQ ID NO: 364720 - RNA, 11 nt, JC virus
uuauaggggug

SEQ ID NO: 364721 - RNA, 18 nt, JC virus
uuauuaaaauguacugca

SEQ ID NO: 364722 - RNA, 23 nt, JC virus
uucaugggugccgcacuugcacu

SEQ ID NO: 364723 - RNA, 13 nt, JC virus
uuccacugcacaa

SEQ ID NO: 364724 - RNA, 17 nt, JC virus
uuccacugcacaauccu

SEQ ID NO: 364725 - RNA, 20 nt, JC virus
uuccucucuaggaaagucaa

SEQ ID NO: 364726 - RNA, 21 nt, JC virus
uuccugugugucugcaccaga

SEQ ID NO: 364727 - RNA, 17 nt, JC virus
uucugaggcugcugcug

SEQ ID NO: 364728 - RNA, 22 nt, JC virus
uugaaauugcaucccuugcuac

SEQ ID NO: 364729 - RNA, 20 nt, JC virus
uugcaucccuugcuacugua

SEQ ID NO: 364730 - RNA, 12 nt, JC virus
uugcuacuguag

SEQ ID NO: 364731 - RNA, 15 nt, JC virus
uugguucaaacugua

SEQ ID NO: 364732 - RNA, 17 nt, JC virus
uugguucaaacuguaac

SEQ ID NO: 364733 - RNA, 14 nt, JC virus
uuuaacuccagaaa

SEQ ID NO: 364734 - RNA, 16 nt, JC virus
uuuacaauaaacuuaa

SEQ ID NO: 364735 - RNA, 16 nt, JC virus
uuuagaauuacagggg

SEQ ID NO: 364736 - RNA, 16 nt, JC virus
uuucaacaguugggcu

SEQ ID NO: 364737 - RNA, 23 nt, JC virus
uuuccugugugucugcaccagag

SEQ ID NO: 364738 - RNA, 12 nt, JC virus
uuucuaaaucca

SEQ ID NO: 364739 - RNA, 19 nt, JC virus
uuucuaaauccagccuuuc

SEQ ID NO: 364740 - RNA, 21 nt, JC virus
uuugaugaaugugcacucuaa

SEQ ID NO: 364741 - RNA, 23 nt, JC virus
uuugggggaccuaguugcuacug

SEQ ID NO: 364742 - RNA, 17 nt, JC virus
uuuguaaacaugccaca

SEQ ID NO: 364743 - RNA, 18 nt, JC virus
uuuuaggugccaaccuau

SEQ ID NO: 364744 - RNA, 19 nt, JC virus
uuuuauauaagaaacuuau

SEQ ID NO: 364745 - RNA, 14 nt, JC virus
uuuugaaacauuga

SEQ ID NO: 364746 - RNA, 21 nt, JC virus
uuuugcugacugggaucauaa

SEQ ID NO: 364747 - RNA, 19 nt, JC virus
uuuuuaggugccaaccuau

SEQ ID NO: 364748 - RNA, 22 nt, JC virus
uuuuuaggugccaaccuaugga

SEQ ID NO: 364749 - RNA, 21 nt, JC virus
augggugccgcacuugcacuu

SEQ ID NO: 364750 - RNA, 15 nt, JC virus
augugaaaagugcag

SEQ ID NO: 364751 - RNA, 16 nt, JC virus
augugaaaagugcagu

SEQ ID NO: 364752 - RNA, 22 nt, JC virus
augugcacucuaaugggcaagc

SEQ ID NO: 364753 - RNA, 18 nt, JC virus
auuaaaauguacugcaua

SEQ ID NO: 364754 - RNA, 21 nt, JC virus
auuacaaguaccucugaggcu

SEQ ID NO: 364755 - RNA, 16 nt, JC virus
auucuguaacuuuuau

SEQ ID NO: 364756 - RNA, 21 nt, JC virus
auugcaucccuugcuacugua

SEQ ID NO: 364757 - RNA, 15 nt, JC virus
auuguaauaugcagu

SEQ ID NO: 364758 - RNA, 20 nt, JC virus
auuucuaaauccagccuuuc

SEQ ID NO: 364759 - RNA, 12 nt, JC virus
caaacuguaacu

SEQ ID NO: 364760 - RNA, 19 nt, JC virus
caaacuguaacugguggua

SEQ ID NO: 364761 - RNA, 23 nt, JC virus
caaccuauggaacagaugaaugg

SEQ ID NO: 364762 - RNA, 23 nt, JC virus
caacucuaggaguccuucuguua

SEQ ID NO: 364763 - RNA, 15 nt, JC virus
caagcaacucaugac

SEQ ID NO: 364764 - RNA, 23 nt, JC virus
caauuacagagguagaaugcuuu

SEQ ID NO: 364765 - RNA, 17 nt, JC virus
cacuacccaaucuaaau

SEQ ID NO: 364766 - RNA, 16 nt, JC virus
cagaaaugggugaccc

SEQ ID NO: 364767 - RNA, 16 nt, JC virus
cagacaucaacagcug

SEQ ID NO: 364768 - RNA, 21 nt, JC virus
cagagguagaaugcuuuuuaa

SEQ ID NO: 364769 - RNA, 21 nt, JC virus
cagaugugaaaagugcaguuu

SEQ ID NO: 364770 - RNA, 22 nt, JC virus
cagcaacuggccuaaaccagau

SEQ ID NO: 364771 - RNA, 14 nt, JC virus
cagcugcaaaguca

SEQ ID NO: 364772 - RNA, 16 nt, JC virus
cagcuuuacuuaacag

SEQ ID NO: 364773 - RNA, 19 nt, JC virus
caggauuuucaguagcuga

SEQ ID NO: 364774 - RNA, 16 nt, JC virus
cagggaagccagugca

SEQ ID NO: 364775 - RNA, 21 nt, JC virus
caguagcugaaauugcugcug

SEQ ID NO: 364776 - RNA, 19 nt, JC virus
cagugcagggcaccagcuu

SEQ ID NO: 364777 - RNA, 20 nt, JC virus
cauacauaggcugcccauca

SEQ ID NO: 364778 - RNA, 21 nt, JC virus
cauaggcugcccaucaacucu

SEQ ID NO: 364779 - RNA, 20 nt, JC virus
cauaugcuguaauaacugga

SEQ ID NO: 364780 - RNA, 12 nt, JC virus
cauccaugccau

SEQ ID NO: 364781 - RNA, 17 nt, JC virus
caucccuugcuacugua

SEQ ID NO: 364782 - RNA, 13 nt, JC virus
caucuuagggguu

SEQ ID NO: 364783 - RNA, 14 nt, JC virus
cauuagcuuucaua

SEQ ID NO: 364784 - RNA, 15 nt, JC virus
cauuuuugucugcaa

SEQ ID NO: 364785 - RNA, 23 nt, JC virus
cauuuuugucugcaacuguccau

SEQ ID NO: 364786 - RNA, 14 nt, JC virus
ccaaccuauggaac

SEQ ID NO: 364787 - RNA, 19 nt, JC virus
ccacuauuuuucuuuugca

SEQ ID NO: 364788 - RNA, 19 nt, JC virus
ccacugcugggaaccagac

SEQ ID NO: 364789 - RNA, 22 nt, JC virus
ccagaugagcaucuuagggguu

SEQ ID NO: 364790 - RNA, 20 nt, JC virus
ccagcuuuacuuaacaguug

SEQ ID NO: 364791 - RNA, 24 nt, JC virus
ccagcuuuacuuaacaguugcagu

SEQ ID NO: 364792 - RNA, 16 nt, JC virus
ccaucaacucuaggag

SEQ ID NO: 364793 - RNA, 14 nt, JC virus
ccgcacuugcacuu

SEQ ID NO: 364794 - RNA, 21 nt, JC virus
ccucugaggcuauagcugcua

SEQ ID NO: 364795 - RNA, 18 nt, JC virus
ccuguggaaauauacuca

SEQ ID NO: 364796 - RNA, 19 nt, JC virus
ccuguuuguaaacaugcca

SEQ ID NO: 364797 - RNA, 21 nt, JC virus
ccuguuuguaaacaugccaca

SEQ ID NO: 364798 - RNA, 12 nt, JC virus
ccuguuuugcca

SEQ ID NO: 364799 - RNA, 14 nt, JC virus
ccuugcuacuguag

SEQ ID NO: 364800 - RNA, 14 nt, JC virus
ccuuguuacagugu

SEQ ID NO: 364801 - RNA, 20 nt, JC virus
ccuuucuuuccacugcacaa

SEQ ID NO: 364802 - RNA, 18 nt, JC virus
ccuuuuccuuagcugcac

SEQ ID NO: 364803 - RNA, 21 nt, JC virus
cuacuguagaggggauuacaa

SEQ ID NO: 364804 - RNA, 12 nt, JC virus
cuaguugcuacu

SEQ ID NO: 364805 - RNA, 14 nt, JC virus
cuaguugcuacugu

SEQ ID NO: 364806 - RNA, 15 nt, JC virus
cuaguugcuacuguu

SEQ ID NO: 364807 - RNA, 21 nt, JC virus
cuauagaaguugaaauugcau

SEQ ID NO: 364808 - RNA, 13 nt, JC virus
cuauagcugcuau

SEQ ID NO: 364809 - RNA, 21 nt, JC virus
cucaauuacagagguagaaug

SEQ ID NO: 364810 - RNA, 21 nt, JC virus
cuccugaaacauaugcuguaa

SEQ ID NO: 364811 - RNA, 22 nt, JC virus
cucuacuugagcauccaugcca

SEQ ID NO: 364812 - RNA, 17 nt, JC virus
cugaaacauaugcugua

SEQ ID NO: 364813 - RNA, 18 nt, JC virus
cugaaacauaugcuguaa

SEQ ID NO: 364814 - RNA, 20 nt, JC virus
cugaaacauaugcuguaaua

SEQ ID NO: 364815 - RNA, 18 nt, JC virus
cugaggcuauagcugcua

SEQ ID NO: 364816 - RNA, 19 nt, JC virus
cugaggcuauagcugcuau

SEQ ID NO: 364817 - RNA, 17 nt, JC virus
cugagguuauaggggug

SEQ ID NO: 364818 - RNA, 10 nt, JC virus
cugcugcuac

SEQ ID NO: 364819 - RNA, 19 nt, JC virus
cuggagaggcugcugcuac

SEQ ID NO: 364820 - RNA, 23 nt, JC virus
cuggugguagugcuauugcucag

SEQ ID NO: 364821 - RNA, 21 nt, JC virus
cuguaacuggugguagugcua

SEQ ID NO: 364822 - RNA, 14 nt, JC virus
cuguaauaacugga

SEQ ID NO: 364823 - RNA, 15 nt, JC virus
cuguaauaacuggag

SEQ ID NO: 364824 - RNA, 21 nt, JC virus
cuguagcuggguuugcugcau

SEQ ID NO: 364825 - RNA, 14 nt, JC virus
cuucugcuucagaa

SEQ ID NO: 364826 - RNA, 17 nt, JC virus
cuugagcauccaugcca

SEQ ID NO: 364827 - RNA, 17 nt, JC virus
cuuuagaauuacagggg

SEQ ID NO: 364828 - RNA, 14 nt, JC virus
cuuucuuuccacug

SEQ ID NO: 364829 - RNA, 19 nt, JC virus
cuuucuuuccacugcacaa

SEQ ID NO: 364830 - RNA, 21 nt, JC virus
gaaaauguauacaugcuuauu

SEQ ID NO: 364831 - RNA, 15 nt, JC virus
gaaacauaugcugua

SEQ ID NO: 364832 - RNA, 19 nt, JC virus
gaaacauugaaagccuuua

SEQ ID NO: 364833 - RNA, 14 nt, JC virus
gaaacuuauggaaa

SEQ ID NO: 364834 - RNA, 12 nt, JC virus
gaaagugacucc

SEQ ID NO: 364835 - RNA, 15 nt, JC virus
gaaagugacucccca

SEQ ID NO: 364836 - RNA, 12 nt, JC virus
gaaauauacuca

SEQ ID NO: 364837 - RNA, 13 nt, JC virus
gaaaugggugacc

SEQ ID NO: 364838 - RNA, 17 nt, JC virus
gaaaugggugacccaga

SEQ ID NO: 364839 - RNA, 19 nt, JC virus
gaaaugggugacccagaug

SEQ ID NO: 364840 - RNA, 21 nt, JC virus
gaaauguuugccagugaugau

SEQ ID NO: 364841 - RNA, 22 nt, JC virus
gaaauugcaucccuugcuacug

SEQ ID NO: 364842 - RNA, 16 nt, JC virus
gaagaaauguuugcca

SEQ ID NO: 364843 - RNA, 17 nt, JC virus
gaagaaauguuugccag

SEQ ID NO: 364844 - RNA, 14 nt, JC virus
gaagacccuaaaga

SEQ ID NO: 364845 - RNA, 15 nt, JC virus
gaagacccuaaagac

SEQ ID NO: 364846 - RNA, 15 nt, JC virus
gaagugggaugaaga

SEQ ID NO: 364847 - RNA, 17 nt, JC virus
gaauggcagcugcaaag

SEQ ID NO: 364848 - RNA, 18 nt, JC virus
gaauuccacuacccaauc

SEQ ID NO: 364849 - RNA, 21 nt, JC virus
gaccuguuuguaaacaugcca

SEQ ID NO: 364850 - RNA, 16 nt, JC virus
gagaggcugcugcuac

SEQ ID NO: 364851 - RNA, 19 nt, JC virus
gagaggcugcugcuacuau

SEQ ID NO: 364852 - RNA, 16 nt, JC virus
gagcaucuuagggguu

SEQ ID NO: 364853 - RNA, 12 nt, JC virus
gaggcuauagcu

SEQ ID NO: 364854 - RNA, 17 nt, JC virus
gaggcuauagcugcuau

SEQ ID NO: 364855 - RNA, 16 nt, JC virus
gaggcugcugcugcca

SEQ ID NO: 364856 - RNA, 16 nt, JC virus
gaggcugugaccuuaa

SEQ ID NO: 364857 - RNA, 18 nt, JC virus
gaggcuuuagaauuacag

SEQ ID NO: 364858 - RNA, 15 nt, JC virus
gagguagaaugcuuu

SEQ ID NO: 364859 - RNA, 16 nt, JC virus
gaugaaaacacaggau

SEQ ID NO: 364860 - RNA, 20 nt, JC virus
gaugaagaccuguuuugcca

SEQ ID NO: 364861 - RNA, 17 nt, JC virus
gaugugaaaagugcagu

SEQ ID NO: 364862 - RNA, 19 nt, JC virus
gaugugaaaagugcaguuu

SEQ ID NO: 364863 - RNA, 15 nt, JC virus
gauuacaaguaccuc

SEQ ID NO: 364864 - RNA, 15 nt, JC virus
gauuuuuugcugacu

SEQ ID NO: 364865 - RNA, 15 nt, JC virus
gcaucccuugcuacu

SEQ ID NO: 364866 - RNA, 16 nt, JC virus
gcaucccuugcuacug

SEQ ID NO: 364867 - RNA, 14 nt, JC virus
gcaucuuagggguu

SEQ ID NO: 364868 - RNA, 21 nt, JC virus
gccacagacaucaacagcuga

SEQ ID NO: 364869 - RNA, 22 nt, JC virus
gccacaggauuuucaguagcug

SEQ ID NO: 364870 - RNA, 19 nt, JC virus
gccagaauuccacuaccca

SEQ ID NO: 364871 - RNA, 15 nt, JC virus
gccagugaugaugaa

SEQ ID NO: 364872 - RNA, 23 nt, JC virus
gcuacuguuucugaggcugcugc

SEQ ID NO: 364873 - RNA, 14 nt, JC virus
gcuauagcugcuau

SEQ ID NO: 364874 - RNA, 13 nt, JC virus
gcugcugcuacua

SEQ ID NO: 364875 - RNA, 12 nt, JC virus
gcugcugcugcc

SEQ ID NO: 364876 - RNA, 22 nt, JC virus
gcugcuggagaggcugcugcua

SEQ ID NO: 364877 - RNA, 15 nt, JC virus
gcuggguuugcugca

SEQ ID NO: 364878 - RNA, 23 nt, JC virus
gcuucuuuugcuguguauaccac

SEQ ID NO: 364879 - RNA, 23 nt, JC virus
gcuuuacuuaacaguugcaguua

SEQ ID NO: 364880 - RNA, 22 nt, JC virus
ggaauccugguggaauacauuu

SEQ ID NO: 364881 - RNA, 17 nt, JC virus
ggagaggcugcugcuac

SEQ ID NO: 364882 - RNA, 15 nt, JC virus
ggaugaagaccuguu

SEQ ID NO: 364883 - RNA, 22 nt, JC virus
ggaugaagaccuguuuugccau

SEQ ID NO: 364884 - RNA, 21 nt, JC virus
ggcaagcaacucaugacaaug

SEQ ID NO: 364885 - RNA, 16 nt, JC virus
ggcaccagcuuucauu

SEQ ID NO: 364886 - RNA, 16 nt, JC virus
ggcuauagcugcuaua

SEQ ID NO: 364887 - RNA, 16 nt, JC virus
ggcuuuagaauuacag

SEQ ID NO: 364888 - RNA, 19 nt, JC virus
gggugccgcacuugcacuu

SEQ ID NO: 364889 - RNA, 15 nt, JC virus
gguagaagacccuaa

SEQ ID NO: 364890 - RNA, 23 nt, JC virus
aaaaagguagaagacccuaaaga

SEQ ID NO: 364891 - RNA, 18 nt, JC virus
aaaaauauucuguaacuu

SEQ ID NO: 364892 - RNA, 20 nt, JC virus
aaaacugagguuauaggggu

SEQ ID NO: 364893 - RNA, 13 nt, JC virus
aaaagcauuguga

SEQ ID NO: 364894 - RNA, 12 nt, JC virus
aaaagugcaguu

SEQ ID NO: 364895 - RNA, 13 nt, JC virus
aaaauauucugua

SEQ ID NO: 364896 - RNA, 23 nt, JC virus
aaaauguacugcauauuacaaua

SEQ ID NO: 364897 - RNA, 22 nt, JC virus
aaaauguauacaugcuuauuuc

SEQ ID NO: 364898 - RNA, 16 nt, JC virus
aaacauaugcuguaau

SEQ ID NO: 364899 - RNA, 14 nt, JC virus
aaacuguaacuggu

SEQ ID NO: 364900 - RNA, 20 nt, JC virus
aaacuuauggaaaaauauuc

SEQ ID NO: 364901 - RNA, 15 nt, JC virus
aaagacuuuccugua

SEQ ID NO: 364902 - RNA, 18 nt, JC virus
aaagacuuuccuguagau

SEQ ID NO: 364903 - RNA, 14 nt, JC virus
aaagcauugugauu

SEQ ID NO: 364904 - RNA, 19 nt, JC virus
aaagccuuuacagauguga

SEQ ID NO: 364905 - RNA, 13 nt, JC virus
aaagguagaagac

SEQ ID NO: 364906 - RNA, 13 nt, JC virus
aaaguauaaccag

SEQ ID NO: 364907 - RNA, 15 nt, JC virus
aaauauacucaugug

SEQ ID NO: 364908 - RNA, 17 nt, JC virus
aaauguuugccagugau

SEQ ID NO: 364909 - RNA, 19 nt, JC virus
aaauugcaucccuugcuac

SEQ ID NO: 364910 - RNA, 11 nt, JC virus
aaauugcugcu

SEQ ID NO: 364911 - RNA, 15 nt, JC virus
aacagcugacaagua

SEQ ID NO: 364912 - RNA, 12 nt, JC virus
aacauuagcuuu

SEQ ID NO: 364913 - RNA, 23 nt, JC virus
aaccagcuuuacuuaacaguugc

SEQ ID NO: 364914 - RNA, 15 nt, JC virus
aacucaugacaaugg

SEQ ID NO: 364915 - RNA, 15 nt, JC virus
aacuccagaaauggg

SEQ ID NO: 364916 - RNA, 23 nt, JC virus
aacucuaggaguccuucuguuaa

SEQ ID NO: 364917 - RNA, 22 nt, JC virus
aacuggagcuccgggggcugua

SEQ ID NO: 364918 - RNA, 20 nt, JC virus
aagaccuguuuugccaugaa

SEQ ID NO: 364919 - RNA, 12 nt, JC virus
aagccuuuacag

SEQ ID NO: 364920 - RNA, 18 nt, JC virus
aagccuuuacagauguga

SEQ ID NO: 364921 - RNA, 22 nt, JC virus
aaggcuuuugauuacagcauuu

SEQ ID NO: 364922 - RNA, 15 nt, JC virus
aaguauaaccagcuu

SEQ ID NO: 364923 - RNA, 14 nt, JC virus
aaguugucaccuuu

SEQ ID NO: 364924 - RNA, 23 nt, JC virus
aaguuugaugaaugugcacucua

SEQ ID NO: 364925 - RNA, 16 nt, JC virus
aauagaacuguugcuu

SEQ ID NO: 364926 - RNA, 22 nt, JC virus
aauaucuauaucagauacauuu

SEQ ID NO: 364927 - RNA, 19 nt, JC virus
aauaucuggagaguccucu

SEQ ID NO: 364928 - RNA, 23 nt, JC virus
aauaucuggagaguccucuccac

SEQ ID NO: 364929 - RNA, 13 nt, JC virus
aauccucucauga

SEQ ID NO: 364930 - RNA, 15 nt, JC virus
aaugagaagugggau

SEQ ID NO: 364931 - RNA, 13 nt, JC virus
aauguuugccagu

SEQ ID NO: 364932 - RNA, 16 nt, JC virus
aauguuugccagugau

SEQ ID NO: 364933 - RNA, 22 nt, JC virus
aauuacagagguagaaugcuuu

SEQ ID NO: 364934 - RNA, 23 nt, JC virus
aauugcaucccuugcuacuguag

SEQ ID NO: 364935 - RNA, 20 nt, JC virus
acaaguaccucugaggcuau

SEQ ID NO: 364936 - RNA, 20 nt, JC virus
acaaguuugaugaaugugca

SEQ ID NO: 364937 - RNA, 15 nt, JC virus
acaauggugcaggga

SEQ ID NO: 364938 - RNA, 19 nt, JC virus
acagcauuuuugucugcaa

SEQ ID NO: 364939 - RNA, 20 nt, JC virus
acauaggcugcccaucaacu

SEQ ID NO: 364940 - RNA, 22 nt, JC virus
cuguaacuggugguagugcuau

SEQ ID NO: 364941 - RNA, 19 nt, JC virus
cuguagaucugcaugcauu

SEQ ID NO: 364942 - RNA, 20 nt, JC virus
cuguagcuggguuugcugca

SEQ ID NO: 364943 - RNA, 23 nt, JC virus
cugugaccuuaaaaacugagguu

SEQ ID NO: 364944 - RNA, 20 nt, JC virus
cuguguauaccacuaaagaa

SEQ ID NO: 364945 - RNA, 21 nt, JC virus
cuguucccucaaaaacucuaa

SEQ ID NO: 364946 - RNA, 13 nt, JC virus
cuguuucugaggc

SEQ ID NO: 364947 - RNA, 21 nt, JC virus
cuuagggguuuuaguaaguca

SEQ ID NO: 364948 - RNA, 10 nt, JC virus
cuuauggaaa

SEQ ID NO: 364949 - RNA, 15 nt, JC virus
cuuuacagaugugaa

SEQ ID NO: 364950 - RNA, 20 nt, JC virus
cuuuauuaaaauguacugca

SEQ ID NO: 364951 - RNA, 22 nt, JC virus
cuuucauaguagaaaauguaua

SEQ ID NO: 364952 - RNA, 22 nt, JC virus
cuuugguuuuuugaaacauuga

SEQ ID NO: 364953 - RNA, 22 nt, JC virus
cuuuugggggaccuaguugcua

SEQ ID NO: 364954 - RNA, 12 nt, JC virus
cuuuuuaacucc

SEQ ID NO: 364955 - RNA, 13 nt, JC virus
gaaaagugcaguu

SEQ ID NO: 364956 - RNA, 13 nt, JC virus
gaaauguuugcca

SEQ ID NO: 364957 - RNA, 21 nt, JC virus
gaagaaauguuugccagugau

SEQ ID NO: 364958 - RNA, 17 nt, JC virus
gaagaccuguuuugcca

SEQ ID NO: 364959 - RNA, 22 nt, JC virus
gaauccugguggaauacauuua

SEQ ID NO: 364960 - RNA, 19 nt, JC virus
gaauuacagggggugcuuu

SEQ ID NO: 364961 - RNA, 15 nt, JC virus
gaauuccacuaccca

SEQ ID NO: 364962 - RNA, 18 nt, JC virus
gacaucaacagcugacaa

SEQ ID NO: 364963 - RNA, 17 nt, JC virus
gaccuaguugcuacugu

SEQ ID NO: 364964 - RNA, 21 nt, JC virus
gagaggcugcugcuacuauag

SEQ ID NO: 364965 - RNA, 22 nt, JC virus
gagaggcugcugcuacuauaga

SEQ ID NO: 364966 - RNA, 14 nt, JC virus
gagcauccaugcca

SEQ ID NO: 364967 - RNA, 18 nt, JC virus
gaggcuauagcugcuaua

SEQ ID NO: 364968 - RNA, 13 nt, JC virus
gaggcugcugcug

SEQ ID NO: 364969 - RNA, 17 nt, JC virus
gaggcugcugcugccac

SEQ ID NO: 364970 - RNA, 13 nt, JC virus
gaggcugugaccu

SEQ ID NO: 364971 - RNA, 22 nt, JC virus
gaguccucuccacugcugggaa

SEQ ID NO: 364972 - RNA, 20 nt, JC virus
gauccauguccagagucuuc

SEQ ID NO: 364973 - RNA, 15 nt, JC virus
gaucugcaugcauuc

SEQ ID NO: 364974 - RNA, 22 nt, JC virus
gaugugaaaagugcaguuuucc

SEQ ID NO: 364975 - RNA, 19 nt, JC virus
gauuuuuugcugacuggga

SEQ ID NO: 364976 - RNA, 12 nt, JC virus
gcacuugcacuu

SEQ ID NO: 364977 - RNA, 16 nt, JC virus
gcagcugcaaagucag

SEQ ID NO: 364978 - RNA, 17 nt, JC virus
gcauauuacaauaaagg

SEQ ID NO: 364979 - RNA, 13 nt, JC virus
gcauccaugccau

SEQ ID NO: 364980 - RNA, 15 nt, JC virus
gcauuuuugucugca

SEQ ID NO: 364981 - RNA, 16 nt, JC virus
gccagugaugaugaaa

SEQ ID NO: 364982 - RNA, 22 nt, JC virus
gccuuuauuguaauaugcagua

SEQ ID NO: 364983 - RNA, 15 nt, JC virus
gcuauagcugcuaua

SEQ ID NO: 364984 - RNA, 21 nt, JC virus
gcugacaaguauaaguuguca

SEQ ID NO: 364985 - RNA, 11 nt, JC virus
gcugcugcuac

SEQ ID NO: 364986 - RNA, 15 nt, JC virus
gcugcugcuacuaua

SEQ ID NO: 364987 - RNA, 19 nt, JC virus
gcuggagaggcugcugcua

SEQ ID NO: 364988 - RNA, 13 nt, JC virus
gcuugauccaugu

SEQ ID NO: 364989 - RNA, 15 nt, JC virus
gcuuuuuaauuacag

SEQ ID NO: 364990 - RNA, 17 nt, JC virus
ggaagcuccucuguucc

SEQ ID NO: 364991 - RNA, 16 nt, JC virus
ggaccuaguugcuacu

SEQ ID NO: 364992 - RNA, 15 nt, JC virus
ggaguccuucuguua

SEQ ID NO: 364993 - RNA, 21 nt, JC virus
ggaugaagaccuguuuugcca

SEQ ID NO: 364994 - RNA, 18 nt, JC virus
ggcagcugcaaagucagc

SEQ ID NO: 364995 - RNA, 15 nt, JC virus
ggcuauagcugcuau

SEQ ID NO: 364996 - RNA, 15 nt, JC virus
ggcugcugcuacuau

SEQ ID NO: 364997 - RNA, 13 nt, JC virus
gggacaugcuucc

SEQ ID NO: 364998 - RNA, 23 nt, JC virus
gggaggcuuuagaauuacagggg

SEQ ID NO: 364999 - RNA, 20 nt, JC virus
ggugacaaguuugaugaaug

SEQ ID NO: 365000 - RNA, 17 nt, JC virus
ggugacccagaugagca

SEQ ID NO: 365001 - RNA, 18 nt, JC virus
ggugccgcacuugcacuu

SEQ ID NO: 365002 - RNA, 19 nt, JC virus
gguucaaacuguaacuggu

SEQ ID NO: 365003 - RNA, 12 nt, JC virus
guaaacaugcca

SEQ ID NO: 365004 - RNA, 12 nt, JC virus
guaauaacugga

SEQ ID NO: 365005 - RNA, 13 nt, JC virus
guaauaacuggag

SEQ ID NO: 365006 - RNA, 13 nt, JC virus
guaauaugcagua

SEQ ID NO: 365007 - RNA, 17 nt, JC virus
guaccucugaggcuaua

SEQ ID NO: 365008 - RNA, 17 nt, JC virus
guagcugaaauugcugc

SEQ ID NO: 365009 - RNA, 19 nt, JC virus
guagcuggguuugcugcau

SEQ ID NO: 365010 - RNA, 16 nt, JC virus
guagugcuauugcuca

SEQ ID NO: 365011 - RNA, 17 nt, JC virus
guccucuccacugcugg

SEQ ID NO: 365012 - RNA, 17 nt, JC virus
gugcagggaagccagug

SEQ ID NO: 365013 - RNA, 15 nt, JC virus
guggaaauauacuca

SEQ ID NO: 365014 - RNA, 12 nt, JC virus
guugcuacuguu

SEQ ID NO: 365015 - RNA, 17 nt, JC virus
guuucugaggcugcugc

SEQ ID NO: 365016 - RNA, 17 nt, JC virus
guuuguaaacaugccac

SEQ ID NO: 365017 - RNA, 16 nt, JC virus
guuuuuugaaacauug

SEQ ID NO: 365018 - RNA, 15 nt, JC virus
uaaaauguacugcau

SEQ ID NO: 365019 - RNA, 14 nt, JC virus
uaaacaugccacag

SEQ ID NO: 365020 - RNA, 12 nt, JC virus
uaaaccagauua

SEQ ID NO: 365021 - RNA, 16 nt, JC virus
uaaagaaaaagcucaa

SEQ ID NO: 365022 - RNA, 21 nt, JC virus
uaaaguauaaccagcuuuacu

SEQ ID NO: 365023 - RNA, 16 nt, JC virus
uaaaucaguaagaagg

SEQ ID NO: 365024 - RNA, 15 nt, JC virus
uaaauccagccuuuc

SEQ ID NO: 365025 - RNA, 15 nt, JC virus
uaacaguugcaguua

SEQ ID NO: 365026 - RNA, 18 nt, JC virus
uaacuggugguagugcua

SEQ ID NO: 365027 - RNA, 20 nt, JC virus
uaacuggugguagugcuauu

SEQ ID NO: 365028 - RNA, 20 nt, JC virus
uaagucaauaucuauaucag

SEQ ID NO: 365029 - RNA, 22 nt, JC virus
uaauaaaguauaaccagcuuua

SEQ ID NO: 365030 - RNA, 13 nt, JC virus
uaauaacuggagc

SEQ ID NO: 365031 - RNA, 19 nt, JC virus
uaaugggcaagcaacucau

SEQ ID NO: 365032 - RNA, 16 nt, JC virus
uacaaguaccucugag

SEQ ID NO: 365033 - RNA, 21 nt, JC virus
uacagagguagaaugcuuuuu

SEQ ID NO: 365034 - RNA, 20 nt, JC virus
uacagaugugaaaagugcag

SEQ ID NO: 365035 - RNA, 18 nt, JC virus
uacagcauuuuugucugc

SEQ ID NO: 365036 - RNA, 20 nt, JC virus
uacagcauuuuugucugcaa

SEQ ID NO: 365037 - RNA, 23 nt, JC virus
uacagcauuuuugucugcaacug

SEQ ID NO: 365038 - RNA, 16 nt, JC virus
uacagggggugcuuuu

SEQ ID NO: 365039 - RNA, 17 nt, JC virus
uacagggggugcuuuuu

SEQ ID NO: 365040 - RNA, 17 nt, JC virus
uaccaacauuagcuuuc

SEQ ID NO: 365041 - RNA, 23 nt, JC virus
uaccucugaggcuauagcugcua

SEQ ID NO: 365042 - RNA, 22 nt, JC virus
uacuccugaaacauaugcugua

SEQ ID NO: 365043 - RNA, 23 nt, JC virus
uacuccugaaacauaugcuguaa

SEQ ID NO: 365044 - RNA, 22 nt, JC virus
uacuguuucugaggcugcugcu

SEQ ID NO: 365045 - RNA, 18 nt, JC virus
uagaaguugaaauugcau

SEQ ID NO: 365046 - RNA, 19 nt, JC virus
uagaaguugaaauugcauc

SEQ ID NO: 365047 - RNA, 15 nt, JC virus
uagauuuuuugcuga

SEQ ID NO: 365048 - RNA, 17 nt, JC virus
uagauuuuuugcugacu

SEQ ID NO: 365049 - RNA, 21 nt, JC virus
uagauuuuuugcugacuggga

SEQ ID NO: 365050 - RNA, 18 nt, JC virus
uagcuggguuugcugcau

SEQ ID NO: 365051 - RNA, 16 nt, JC virus
uagugcuauugcucag

SEQ ID NO: 365052 - RNA, 14 nt, JC virus
uaguugcuacuguu

SEQ ID NO: 365053 - RNA, 17 nt, JC virus
uauagauuuuuugcuga

SEQ ID NO: 365054 - RNA, 12 nt, JC virus
uauagcugcuau

SEQ ID NO: 365055 - RNA, 18 nt, JC virus
uaugcuguaauaacugga

SEQ ID NO: 365056 - RNA, 16 nt, JC virus
uauuugucaacguauc

SEQ ID NO: 365057 - RNA, 21 nt, JC virus
ucaaaagccuuuauuguaaua

SEQ ID NO: 365058 - RNA, 20 nt, JC virus
ucaaacuguaacugguggua

SEQ ID NO: 365059 - RNA, 20 nt, JC virus
ucaacguaucucaucauguc

SEQ ID NO: 365060 - RNA, 15 nt, JC virus
ucaauuacagaggua

SEQ ID NO: 365061 - RNA, 21 nt, JC virus
ucagauacauuugaaagugac

SEQ ID NO: 365062 - RNA, 22 nt, JC virus
ucagcagccagcuauggcuuua

SEQ ID NO: 365063 - RNA, 22 nt, JC virus
uccacugcugggaaccagaccu

SEQ ID NO: 365064 - RNA, 11 nt, JC virus
uccagccuuuc

SEQ ID NO: 365065 - RNA, 15 nt, JC virus
uccauauuugucaac

SEQ ID NO: 365066 - RNA, 14 nt, JC virus
uccaugccauacau

SEQ ID NO: 365067 - RNA, 14 nt, JC virus
ucccuugcuacugu

SEQ ID NO: 365068 - RNA, 19 nt, JC virus
uccucucuaggaaagucaa

SEQ ID NO: 365069 - RNA, 20 nt, JC virus
uccugguggaauacauuuaa

SEQ ID NO: 365070 - RNA, 15 nt, JC virus
ucuaaccuccucuac

SEQ ID NO: 365071 - RNA, 19 nt, JC virus
ucuaaugggcaagcaacuc

SEQ ID NO: 365072 - RNA, 16 nt, JC virus
ucugaggcugcugcug

SEQ ID NO: 365073 - RNA, 17 nt, JC virus
ucugcuucagaaucuuc

SEQ ID NO: 365074 - RNA, 23 nt, JC virus
ucuggguccccuggaagcuccuc

SEQ ID NO: 365075 - RNA, 13 nt, JC virus
ucuguucccucaa

SEQ ID NO: 365076 - RNA, 13 nt, JC virus
ucuucugcuucag

SEQ ID NO: 365077 - RNA, 12 nt, JC virus
acauuagcuuuc

SEQ ID NO: 365078 - RNA, 14 nt, JC virus
acauuuaaugagaa

SEQ ID NO: 365079 - RNA, 19 nt, JC virus
acauuuuaauaaaguauaa

SEQ ID NO: 365080 - RNA, 14 nt, JC virus
accccaccuaaaaa

SEQ ID NO: 365081 - RNA, 16 nt, JC virus
accuaguugcuacugu

SEQ ID NO: 365082 - RNA, 19 nt, JC virus
accuauggaacagaugaau

SEQ ID NO: 365083 - RNA, 19 nt, JC virus
accucugaggcuauagcug

SEQ ID NO: 365084 - RNA, 18 nt, JC virus
acucaugacaauggugca

SEQ ID NO: 365085 - RNA, 21 nt, JC virus
acuccccaaauagggacaugc

SEQ ID NO: 365086 - RNA, 17 nt, JC virus
acugagguuauaggggu

SEQ ID NO: 365087 - RNA, 21 nt, JC virus
acugagguuauaggggugaca

SEQ ID NO: 365088 - RNA, 13 nt, JC virus
acugcacaauccu

SEQ ID NO: 365089 - RNA, 16 nt, JC virus
acuggccuaaaccaga

SEQ ID NO: 365090 - RNA, 14 nt, JC virus
acuguaacuggugg

SEQ ID NO: 365091 - RNA, 22 nt, JC virus
acuuuauuaaaauguacugcau

SEQ ID NO: 365092 - RNA, 18 nt, JC virus
agaaauguuugccaguga

SEQ ID NO: 365093 - RNA, 23 nt, JC virus
agaaugcuuuuuaacuccagaaa

SEQ ID NO: 365094 - RNA, 16 nt, JC virus
agaaugggucucccca

SEQ ID NO: 365095 - RNA, 16 nt, JC virus
agaauuccacuaccca

SEQ ID NO: 365096 - RNA, 23 nt, JC virus
agaggcuucugagaccugggaaa

SEQ ID NO: 365097 - RNA, 22 nt, JC virus
agauacauuugaaagugacucc

SEQ ID NO: 365098 - RNA, 22 nt, JC virus
agaucugcaugcauuccucagu

SEQ ID NO: 365099 - RNA, 22 nt, JC virus
agaugugaaaagugcaguuuuc

SEQ ID NO: 365100 - RNA, 16 nt, JC virus
agcaacucaugacaau

SEQ ID NO: 365101 - RNA, 15 nt, JC virus
agcauccaugccaua

SEQ ID NO: 365102 - RNA, 18 nt, JC virus
agcuuuacuuaacaguug

SEQ ID NO: 365103 - RNA, 20 nt, JC virus
agcuuuacuuaacaguugca

SEQ ID NO: 365104 - RNA, 16 nt, JC virus
agcuuucauaguagaa

SEQ ID NO: 365105 - RNA, 11 nt, JC virus
aggaaagucaa

SEQ ID NO: 365106 - RNA, 12 nt, JC virus
aggaaagucaag

SEQ ID NO: 365107 - RNA, 20 nt, JC virus
aggaucccaacacucuaccc

SEQ ID NO: 365108 - RNA, 12 nt, JC virus
aggcugcugcua

SEQ ID NO: 365109 - RNA, 15 nt, JC virus
aggcugcugcuacua

SEQ ID NO: 365110 - RNA, 16 nt, JC virus
aggcugcugcugccac

SEQ ID NO: 365111 - RNA, 21 nt, JC virus
aggggauuacaaguaccucug

SEQ ID NO: 365112 - RNA, 14 nt, JC virus
agggggugcuuuuu

SEQ ID NO: 365113 - RNA, 16 nt, JC virus
agguagaaugcuuuuu

SEQ ID NO: 365114 - RNA, 20 nt, JC virus
aguaaagcugguuauacuuu

SEQ ID NO: 365115 - RNA, 16 nt, JC virus
aguauaaccagcuuua

SEQ ID NO: 365116 - RNA, 14 nt, JC virus
agugcuauugcuca

SEQ ID NO: 365117 - RNA, 22 nt, JC virus
agugggaugaagaccuguuuug

SEQ ID NO: 365118 - RNA, 11 nt, JC virus
aguugcaguua

SEQ ID NO: 365119 - RNA, 21 nt, JC virus
auaaccagcuuuacuuaacag

SEQ ID NO: 365120 - RNA, 22 nt, JC virus
auaaguugucaccuuugcaaag

SEQ ID NO: 365121 - RNA, 14 nt, JC virus
auaggggugacaag

SEQ ID NO: 365122 - RNA, 12 nt, JC virus
auccagccuuuc

SEQ ID NO: 365123 - RNA, 16 nt, JC virus
aucccuugcuacugua

SEQ ID NO: 365124 - RNA, 14 nt, JC virus
aucuaaaugaggau

SEQ ID NO: 365125 - RNA, 14 nt, JC virus
aucugcaugcauuc

SEQ ID NO: 365126 - RNA, 22 nt, JC virus
aucugcaugcauuccucaguca

SEQ ID NO: 365127 - RNA, 23 nt, JC virus
aucuuccucucuaggaaagucaa

SEQ ID NO: 365128 - RNA, 22 nt, JC virus
augaagaaauguuugccaguga

SEQ ID NO: 365129 - RNA, 17 nt, JC virus
augaauggcagcugcaa

SEQ ID NO: 365130 - RNA, 16 nt, JC virus
augaaugugcacucua

SEQ ID NO: 365131 - RNA, 17 nt, JC virus
auuaaaauguacugcau

SEQ ID NO: 365132 - RNA, 20 nt, JC virus
auucagugcuugauccaugu

SEQ ID NO: 365133 - RNA, 23 nt, JC virus
auugguucaaacuguaacuggug

SEQ ID NO: 365134 - RNA, 16 nt, JC virus
auuuuaauaaaguaua

SEQ ID NO: 365135 - RNA, 16 nt, JC virus
auuuucaguagcugaa

SEQ ID NO: 365136 - RNA, 19 nt, JC virus
auuuuguuuuuuacaauaa

SEQ ID NO: 365137 - RNA, 13 nt, JC virus
auuuuuugcugac

SEQ ID NO: 365138 - RNA, 13 nt, JC virus
caaccuauggaac

SEQ ID NO: 365139 - RNA, 17 nt, JC virus
caacucuaggaguccuu

SEQ ID NO: 365140 - RNA, 19 nt, JC virus
caacuggccuaaaccagau

SEQ ID NO: 365141 - RNA, 19 nt, JC virus
caacuguccauauuuguca

SEQ ID NO: 365142 - RNA, 19 nt, JC virus
caaguaccucugaggcuau

SEQ ID NO: 365143 - RNA, 18 nt, JC virus
caaguauaaguugucacc

SEQ ID NO: 365144 - RNA, 21 nt, JC virus
caaguauaaguugucaccuuu

SEQ ID NO: 365145 - RNA, 13 nt, JC virus
caauccucucaug

SEQ ID NO: 365146 - RNA, 16 nt, JC virus
caauuacagagguaga

SEQ ID NO: 365147 - RNA, 17 nt, JC virus
cacagacaucaacagcu

SEQ ID NO: 365148 - RNA, 15 nt, JC virus
cacuacccaaucuaa

SEQ ID NO: 365149 - RNA, 18 nt, JC virus
cacuauuuuucuuuugca

SEQ ID NO: 365150 - RNA, 19 nt, JC virus
cagaugugaaaagugcagu

SEQ ID NO: 365151 - RNA, 23 nt, JC virus
cagcaacuggccuaaaccagauu

SEQ ID NO: 365152 - RNA, 23 nt, JC virus
caggauuuucaguagcugaaauu

SEQ ID NO: 365153 - RNA, 21 nt, JC virus
cagggcauuuuguuuuuuaca

SEQ ID NO: 365154 - RNA, 17 nt, JC virus
cagggggugcuuuuuaa

SEQ ID NO: 365155 - RNA, 12 nt, JC virus
cagugaugauga

SEQ ID NO: 365156 - RNA, 16 nt, JC virus
cagugcuugauccaug

SEQ ID NO: 365157 - RNA, 12 nt, JC virus
caguugcaguua

SEQ ID NO: 365158 - RNA, 21 nt, JC virus
caguuuuccugugugucugca

SEQ ID NO: 365159 - RNA, 22 nt, JC virus
cauaccaacauuagcuuucaua

SEQ ID NO: 365160 - RNA, 20 nt, JC virus
cauaguagaaaauguauaca

SEQ ID NO: 365161 - RNA, 14 nt, JC virus
cauaugcuguaaua

SEQ ID NO: 365162 - RNA, 13 nt, JC virus
cauauuugucaac

SEQ ID NO: 365163 - RNA, 12 nt, JC virus
caucaacucuag

SEQ ID NO: 365164 - RNA, 15 nt, JC virus
caucccuugcuacug

SEQ ID NO: 365165 - RNA, 15 nt, JC virus
cauugaaagccuuua

SEQ ID NO: 365166 - RNA, 18 nt, JC virus
cauugaaagccuuuacag

SEQ ID NO: 365167 - RNA, 17 nt, JC virus
cauugguucaaacugua

SEQ ID NO: 365168 - RNA, 18 nt, JC virus
cauugguucaaacuguaa

SEQ ID NO: 365169 - RNA, 20 nt, JC virus
cauugguucaaacuguaacu

SEQ ID NO: 365170 - RNA, 14 nt, JC virus
cauuuuugucugca

SEQ ID NO: 365171 - RNA, 19 nt, JC virus
ccagaaaugggugacccag

SEQ ID NO: 365172 - RNA, 21 nt, JC virus
ccagaaaugggugacccagau

SEQ ID NO: 365173 - RNA, 16 nt, JC virus
ccagcuauggcuuuac

SEQ ID NO: 365174 - RNA, 22 nt, JC virus
ccagugaugaugaaaacacagg

SEQ ID NO: 365175 - RNA, 19 nt, JC virus
ccagugcagggcaccagcu

SEQ ID NO: 365176 - RNA, 22 nt, JC virus
ccaugccauacauaggcugccc

SEQ ID NO: 365177 - RNA, 11 nt, JC virus
cccuugcuacu

SEQ ID NO: 365178 - RNA, 12 nt, JC virus
ccuaguugcuac

SEQ ID NO: 365179 - RNA, 19 nt, JC virus
ccuauggaacagaugaaug

SEQ ID NO: 365180 - RNA, 15 nt, JC virus
ccucuccacugcugg

SEQ ID NO: 365181 - RNA, 15 nt, JC virus
ccucuguucccucaa

SEQ ID NO: 365182 - RNA, 20 nt, JC virus
ccugugugucugcaccagag

SEQ ID NO: 365183 - RNA, 20 nt, JC virus
ccuguuuguaaacaugccac

SEQ ID NO: 365184 - RNA, 17 nt, JC virus
ccuuaaaauaucuggag

SEQ ID NO: 365185 - RNA, 22 nt, JC virus
ccuuacuccugaaacauaugcu

SEQ ID NO: 365186 - RNA, 12 nt, JC virus
ccuuagcugcac

SEQ ID NO: 365187 - RNA, 13 nt, JC virus
ccuugcuacugua

SEQ ID NO: 365188 - RNA, 14 nt, JC virus
ccuuuacagaugug

SEQ ID NO: 365189 - RNA, 23 nt, JC virus
cuacuauagaaguugaaauugca

SEQ ID NO: 365190 - RNA, 17 nt, JC virus
cuacuguuucugaggcu

SEQ ID NO: 365191 - RNA, 21 nt, JC virus
cuacuguuucugaggcugcug

SEQ ID NO: 365192 - RNA, 22 nt, JC virus
cuacuugagcauccaugccaua

SEQ ID NO: 365193 - RNA, 13 nt, JC virus
cuaguugcuacug

SEQ ID NO: 365194 - RNA, 23 nt, JC virus
cuauaggccuuacuccugaaaca

SEQ ID NO: 365195 - RNA, 14 nt, JC virus
cucaugaauggcag

SEQ ID NO: 365196 - RNA, 12 nt, JC virus
cucaugacaaug

SEQ ID NO: 365197 - RNA, 18 nt, JC virus
cuccagaaaugggugacc

SEQ ID NO: 365198 - RNA, 16 nt, JC virus
cuccgggggcuguagc

SEQ ID NO: 365199 - RNA, 17 nt, JC virus
cuccugaaacauaugcu

SEQ ID NO: 365200 - RNA, 23 nt, JC virus
cuccugaaacauaugcuguaaua

SEQ ID NO: 365201 - RNA, 16 nt, JC virus
cucucuaggaaaguca

SEQ ID NO: 365202 - RNA, 22 nt, JC virus
cucugaggcuauagcugcuaua

SEQ ID NO: 365203 - RNA, 22 nt, JC virus
cucuguucccucaaaaacucua

SEQ ID NO: 365204 - RNA, 15 nt, JC virus
cugaaauugcugcug

SEQ ID NO: 365205 - RNA, 17 nt, JC virus
cugaaauugcugcugga

SEQ ID NO: 365206 - RNA, 15 nt, JC virus
cugaggcugcugcug

SEQ ID NO: 365207 - RNA, 18 nt, JC virus
cugcuggagaggcugcug

SEQ ID NO: 365208 - RNA, 22 nt, JC virus
cugcuggagaggcugcugcuac

SEQ ID NO: 365209 - RNA, 22 nt, JC virus
cuggagaggcugcugcuacuau

SEQ ID NO: 365210 - RNA, 14 nt, JC virus
cugggaaaagcauu

SEQ ID NO: 365211 - RNA, 15 nt, JC virus
cugggguugacucaa

SEQ ID NO: 365212 - RNA, 15 nt, JC virus
cugguggaauacauu

SEQ ID NO: 365213 - RNA, 15 nt, JC virus
cuggugguagugcua

SEQ ID NO: 365214 - RNA, 13 nt, JC virus
ugaaaacacagga

SEQ ID NO: 365215 - RNA, 16 nt, JC virus
ugaaacauaugcugua

SEQ ID NO: 365216 - RNA, 14 nt, JC virus
ugaaacauugaaag

SEQ ID NO: 365217 - RNA, 17 nt, JC virus
ugaaacauugaaagccu

SEQ ID NO: 365218 - RNA, 20 nt, JC virus
ugaaacauugaaagccuuua

SEQ ID NO: 365219 - RNA, 12 nt, JC virus
ugaaagccuuua

SEQ ID NO: 365220 - RNA, 23 nt, JC virus
ugaaagugacuccccaaauaggg

SEQ ID NO: 365221 - RNA, 13 nt, JC virus
ugaaauugcugcu

SEQ ID NO: 365222 - RNA, 22 nt, JC virus
ugaaauugcugcuggagaggcu

SEQ ID NO: 365223 - RNA, 22 nt, JC virus
ugaauggcagcugcaaagucag

SEQ ID NO: 365224 - RNA, 15 nt, JC virus
ugaaugugcacucua

SEQ ID NO: 365225 - RNA, 17 nt, JC virus
ugacaauggugcaggga

SEQ ID NO: 365226 - RNA, 15 nt, JC virus
ugagcauccaugcca

SEQ ID NO: 365227 - RNA, 16 nt, JC virus
ugagcauccaugccau

SEQ ID NO: 365228 - RNA, 21 nt, JC virus
ugcaacuguccauauuuguca

SEQ ID NO: 365229 - RNA, 22 nt, JC virus
ugcaacuguccauauuugucaa

SEQ ID NO: 365230 - RNA, 13 nt, JC virus
ugcacucuaaugg

SEQ ID NO: 365231 - RNA, 20 nt, JC virus
ugcaucccuugcuacuguag

SEQ ID NO: 365232 - RNA, 19 nt, JC virus
ugcauugguucaaacugua

SEQ ID NO: 365233 - RNA, 23 nt, JC virus
ugccaaccuauggaacagaugaa

SEQ ID NO: 365234 - RNA, 15 nt, JC virus
ugccagugaugauga

SEQ ID NO: 365235 - RNA, 13 nt, JC virus
ugcugacugggau

SEQ ID NO: 365236 - RNA, 15 nt, JC virus
ugcugacugggauca

SEQ ID NO: 365237 - RNA, 14 nt, JC virus
ugcugcuacuauag

SEQ ID NO: 365238 - RNA, 16 nt, JC virus
ugcugcuacuauagaa

SEQ ID NO: 365239 - RNA, 16 nt, JC virus
ugcuguaauaacugga

SEQ ID NO: 365240 - RNA, 18 nt, JC virus
uggagaggcugcugcuac

SEQ ID NO: 365241 - RNA, 22 nt, JC virus
uggagaggcugcugcuacuaua

SEQ ID NO: 365242 - RNA, 14 nt, JC virus
uggagaguccucuc

SEQ ID NO: 365243 - RNA, 23 nt, JC virus
uggagcuccgggggcuguagcug

SEQ ID NO: 365244 - RNA, 15 nt, JC virus
uggccuaaaccagau

SEQ ID NO: 365245 - RNA, 19 nt, JC virus
ugggaggcugugaccuuaa

SEQ ID NO: 365246 - RNA, 23 nt, JC virus
ugggauauagauuuuuugcugac

SEQ ID NO: 365247 - RNA, 14 nt, JC virus
ugggaugaagaccu

SEQ ID NO: 365248 - RNA, 19 nt, JC virus
ugggggaccuaguugcuac

SEQ ID NO: 365249 - RNA, 21 nt, JC virus
ugggggaccuaguugcuacug

SEQ ID NO: 365250 - RNA, 20 nt, JC virus
ugggugccgcacuugcacuu

SEQ ID NO: 365251 - RNA, 21 nt, JC virus
ugggugccgcacuugcacuuu

SEQ ID NO: 365252 - RNA, 21 nt, JC virus
ugguagugcuauugcucaguu

SEQ ID NO: 365253 - RNA, 15 nt, JC virus
ugguucaaacuguaa

SEQ ID NO: 365254 - RNA, 23 nt, JC virus
ugguucaaacuguaacugguggu

SEQ ID NO: 365255 - RNA, 16 nt, JC virus
uguauacaugcuuauu

SEQ ID NO: 365256 - RNA, 16 nt, JC virus
uguauaccacuaaaga

SEQ ID NO: 365257 - RNA, 17 nt, JC virus
uguauaccacuaaagaa

SEQ ID NO: 365258 - RNA, 15 nt, JC virus
uguguauaccacuaa

SEQ ID NO: 365259 - RNA, 16 nt, JC virus
uguuucugaggcugcu

SEQ ID NO: 365260 - RNA, 18 nt, JC virus
uuaacuccagaaaugggu

SEQ ID NO: 365261 - RNA, 16 nt, JC virus
uuacuuaacaguugca

SEQ ID NO: 365262 - RNA, 15 nt, JC virus
uuagaauuacagggg

SEQ ID NO: 365263 - RNA, 22 nt, JC virus
uuauauaagaaacuuauggaaa

SEQ ID NO: 365264 - RNA, 18 nt, JC virus
uucaacaguugggcuuuu

SEQ ID NO: 365265 - RNA, 21 nt, JC virus
uucaguagcugaaauugcugc

SEQ ID NO: 365266 - RNA, 11 nt, JC virus
uugaaauugca

SEQ ID NO: 365267 - RNA, 14 nt, JC virus
uugagcauccaugc

SEQ ID NO: 365268 - RNA, 17 nt, JC virus
uugagcauccaugccau

SEQ ID NO: 365269 - RNA, 18 nt, JC virus
uugagcauccaugccaua

SEQ ID NO: 365270 - RNA, 22 nt, JC virus
uugagcauccaugccauacaua

SEQ ID NO: 365271 - RNA, 11 nt, JC virus
uugcuacuguu

SEQ ID NO: 365272 - RNA, 23 nt, JC virus
uugcugcuggagaggcugcugcu

SEQ ID NO: 365273 - RNA, 16 nt, JC virus
uuguaaacaugccaca

SEQ ID NO: 365274 - RNA, 17 nt, JC virus
uugucaacguaucucau

SEQ ID NO: 365275 - RNA, 22 nt, JC virus
uugucaacguaucucaucaugu

SEQ ID NO: 365276 - RNA, 23 nt, JC virus
uuuaaugagaagugggaugaaga

SEQ ID NO: 365277 - RNA, 15 nt, JC virus
uuuaauuacagaaca

SEQ ID NO: 365278 - RNA, 17 nt, JC virus
uuuacaauaaacuuaau

SEQ ID NO: 365279 - RNA, 18 nt, JC virus
uuuauauaagaaacuuau

SEQ ID NO: 365280 - RNA, 14 nt, JC virus
uuucugaggcugcu

SEQ ID NO: 365281 - RNA, 21 nt, JC virus
uuucugaggcugcugcugcca

SEQ ID NO: 365282 - RNA, 20 nt, JC virus
uuugcuguguauaccacuaa

SEQ ID NO: 365283 - RNA, 22 nt, JC virus
uuugggggaccuaguugcuacu

SEQ ID NO: 365284 - RNA, 13 nt, JC virus
uuuuaguaaguca

SEQ ID NO: 365285 - RNA, 22 nt, JC virus
uuuuauauaagaaacuuaugga

SEQ ID NO: 365286 - RNA, 22 nt, JC virus
uuuuccuuagcugcaccuuaaa

SEQ ID NO: 365287 - RNA, 19 nt, JC virus
uuuuuacaauaaacuuaau

SEQ ID NO: 365288 - RNA, 13 nt, JC virus
uuuuugucugcaa

SEQ ID NO: 365289 - RNA, 21 nt, Machupo virus
aaaauaaccugugauguugcu

SEQ ID NO: 365290 - RNA, 19 nt, Machupo virus
aaaucaugaacaaugguga

SEQ ID NO: 365291 - RNA, 20 nt, Machupo virus
aaccugugauguugcuuuca

SEQ ID NO: 365292 - RNA, 22 nt, Machupo virus
aauucgauccauucgccaaagc

SEQ ID NO: 365293 - RNA, 19 nt, Machupo virus
acaauggugaaaucuuccu

SEQ ID NO: 365294 - RNA, 15 nt, Machupo virus
acaguuggugcagca

SEQ ID NO: 365295 - RNA, 20 nt, Machupo virus
accgaguuuggggauguuca

SEQ ID NO: 365296 - RNA, 13 nt, Machupo virus
acuggguggggcu

SEQ ID NO: 365297 - RNA, 16 nt, Machupo virus
aggggucuacacauca

SEQ ID NO: 365298 - RNA, 20 nt, Machupo virus
aguaguggucguuacaugua

SEQ ID NO: 365299 - RNA, 14 nt, Machupo virus
auaaccugugaugu

SEQ ID NO: 365300 - RNA, 15 nt, Machupo virus
auaucacaagcucuu

SEQ ID NO: 365301 - RNA, 12 nt, Machupo virus
aucaugaacaau

SEQ ID NO: 365302 - RNA, 11 nt, Machupo virus
auggugggggg

SEQ ID NO: 365303 - RNA, 16 nt, Machupo virus
caauggugaaaucuuc

SEQ ID NO: 365304 - RNA, 13 nt, Machupo virus
cacaguuggugca

SEQ ID NO: 365305 - RNA, 16 nt, Machupo virus
cacaguuggugcagca

SEQ ID NO: 365306 - RNA, 22 nt, Machupo virus
cagcauagaaacaacacucuca

SEQ ID NO: 365307 - RNA, 22 nt, Machupo virus
cagcauaugugacagaguucag

SEQ ID NO: 365308 - RNA, 15 nt, Machupo virus
cauaugugacagagu

SEQ ID NO: 365309 - RNA, 15 nt, Machupo virus
caugaacaaugguga

SEQ ID NO: 365310 - RNA, 18 nt, Machupo virus
cauucgccaaagcuuuca

SEQ ID NO: 365311 - RNA, 22 nt, Machupo virus
cauucgccaaagcuuucaauug

SEQ ID NO: 365312 - RNA, 15 nt, Machupo virus
ccaacagcauuugca

SEQ ID NO: 365313 - RNA, 15 nt, Machupo virus
ccauucgccaaagcu

SEQ ID NO: 365314 - RNA, 20 nt, Machupo virus
cggggaucccccgugggggc

SEQ ID NO: 365315 - RNA, 18 nt, Machupo virus
cuccacgggaacugugau

SEQ ID NO: 365316 - RNA, 15 nt, Machupo virus
cugauaucacaagcu

SEQ ID NO: 365317 - RNA, 17 nt, Machupo virus
cuuccuguugaaacaaa

SEQ ID NO: 365318 - RNA, 22 nt, Machupo virus
cuugccaggggucuacacauca

SEQ ID NO: 365319 - RNA, 20 nt, Machupo virus
cuuguacaaaucaugaacaa

SEQ ID NO: 365320 - RNA, 16 nt, Machupo virus
gaauuccugagcauug

SEQ ID NO: 365321 - RNA, 12 nt, Machupo virus
gacagaguucag

SEQ ID NO: 365322 - RNA, 13 nt, Machupo virus
gaccccugggugu

SEQ ID NO: 365323 - RNA, 23 nt, Machupo virus
gagcauuguuugaugacaucuca

SEQ ID NO: 365324 - RNA, 23 nt, Machupo virus
gcaaaccaacagcauuugcaguu

SEQ ID NO: 365325 - RNA, 12 nt, Machupo virus
gcauuugcaguu

SEQ ID NO: 365326 - RNA, 14 nt, Machupo virus
gccaaagcuuucaa

SEQ ID NO: 365327 - RNA, 18 nt, Machupo virus
gcccaagacccccgggga

SEQ ID NO: 365328 - RNA, 12 nt, Machupo virus
gccccccggggg

SEQ ID NO: 365329 - RNA, 23 nt, Machupo virus
gcuugccaggggucuacacauca

SEQ ID NO: 365330 - RNA, 14 nt, Machupo virus
ggcuuauugcaguu

SEQ ID NO: 365331 - RNA, 19 nt, Machupo virus
ggucuacacaucacacccu

SEQ ID NO: 365332 - RNA, 22 nt, Machupo virus
guucagaauuccugagcauugu

SEQ ID NO: 365333 - RNA, 22 nt, Machupo virus
guucauggugggggggcacuug

SEQ ID NO: 365334 - RNA, 12 nt, Machupo virus
uccugagcauug

SEQ ID NO: 365335 - RNA, 22 nt, Machupo virus
uccugagcauuguuugaugaca

SEQ ID NO: 365336 - RNA, 14 nt, Machupo virus
uccuguugaaacaa

SEQ ID NO: 365337 - RNA, 17 nt, Machupo virus
ucuacacaucacacccu

SEQ ID NO: 365338 - RNA, 22 nt, Machupo virus
ucuagggcccccaaugcuuuca

SEQ ID NO: 365339 - RNA, 16 nt, Machupo virus
ucugauaucacaagcu

SEQ ID NO: 365340 - RNA, 14 nt, Machupo virus
ucuuguacaaauca

SEQ ID NO: 365341 - RNA, 23 nt, Machupo virus
ugagcuguuucuuguacaaauca

SEQ ID NO: 365342 - RNA, 18 nt, Machupo virus
ugauguugcuuucaaaua

SEQ ID NO: 365343 - RNA, 14 nt, Machupo virus
ugauuuugugagcu

SEQ ID NO: 365344 - RNA, 21 nt, Machupo virus
ugcugaggguugguuggauga

SEQ ID NO: 365345 - RNA, 17 nt, Machupo virus
uucuccugaacucugcu

SEQ ID NO: 365346 - RNA, 22 nt, Machupo virus
uuggcuccacgggaacugugau

SEQ ID NO: 365347 - RNA, 22 nt, Machupo virus
uugugagcuguuucuuguacaa

SEQ ID NO: 365348 - RNA, 18 nt, Machupo virus
uuuccagcauaugugaca

SEQ ID NO: 365349 - RNA, 18 nt, Machupo virus
aaaccaacagcauuugca

SEQ ID NO: 365350 - RNA, 22 nt, Machupo virus
aaauaaggccacaguuggugca

SEQ ID NO: 365351 - RNA, 17 nt, Machupo virus
aacucgguccacaagac

SEQ ID NO: 365352 - RNA, 16 nt, Machupo virus
acacccuucagucuga

SEQ ID NO: 365353 - RNA, 21 nt, Machupo virus
acaucacacccuucagucuga

SEQ ID NO: 365354 - RNA, 16 nt, Machupo virus
accauagagacugggu

SEQ ID NO: 365355 - RNA, 19 nt, Machupo virus
accugugauguugcuuuca

SEQ ID NO: 365356 - RNA, 18 nt, Machupo virus
acuggguggggcuguucu

SEQ ID NO: 365357 - RNA, 19 nt, Machupo virus
agaauuccugagcauuguu

SEQ ID NO: 365358 - RNA, 21 nt, Machupo virus
aggccucuugggaggcuuauu

SEQ ID NO: 365359 - RNA, 12 nt, Machupo virus
aggcuuauugca

SEQ ID NO: 365360 - RNA, 13 nt, Machupo virus
auuguggggagcu

SEQ ID NO: 365361 - RNA, 15 nt, Machupo virus
auuuugugagcuguu

SEQ ID NO: 365362 - RNA, 12 nt, Machupo virus
caaugcuuucac

SEQ ID NO: 365363 - RNA, 14 nt, Machupo virus
cacaaguagugguc

SEQ ID NO: 365364 - RNA, 15 nt, Machupo virus
cagcauuugcaguug

SEQ ID NO: 365365 - RNA, 18 nt, Machupo virus
cagcauuugcaguuguag

SEQ ID NO: 365366 - RNA, 15 nt, Machupo virus
cauagaaacaacacu

SEQ ID NO: 365367 - RNA, 15 nt, Machupo virus
ccagcauaugugaca

SEQ ID NO: 365368 - RNA, 11 nt, Machupo virus
cgguagugguu

SEQ ID NO: 365369 - RNA, 12 nt, Machupo virus
cuacacaucaca

SEQ ID NO: 365370 - RNA, 15 nt, Machupo virus
cuccugaacucugcu

SEQ ID NO: 365371 - RNA, 17 nt, Machupo virus
cucugcgcugucuugca

SEQ ID NO: 365372 - RNA, 20 nt, Machupo virus
cucuugggaggcuuauugca

SEQ ID NO: 365373 - RNA, 12 nt, Machupo virus
cugauaucacaa

SEQ ID NO: 365374 - RNA, 19 nt, Machupo virus
cuguuucuuguacaaauca

SEQ ID NO: 365375 - RNA, 13 nt, Machupo virus
cuuguacaaauca

SEQ ID NO: 365376 - RNA, 22 nt, Machupo virus
gaccgaguuuggggauguucau

SEQ ID NO: 365377 - RNA, 20 nt, Machupo virus
gagcucugcgcugucuugca

SEQ ID NO: 365378 - RNA, 17 nt, Machupo virus
gaggcuuauugcaguug

SEQ ID NO: 365379 - RNA, 12 nt, Machupo virus
gauccccggggg

SEQ ID NO: 365380 - RNA, 14 nt, Machupo virus
gauguugcuuucaa

SEQ ID NO: 365381 - RNA, 19 nt, Machupo virus
gcaaaccaacagcauuugc

SEQ ID NO: 365382 - RNA, 13 nt, Machupo virus
gcauaugugacag

SEQ ID NO: 365383 - RNA, 17 nt, Machupo virus
gcauuguuugaugacau

SEQ ID NO: 365384 - RNA, 13 nt, Machupo virus
gcuuauugcaguu

SEQ ID NO: 365385 - RNA, 22 nt, Machupo virus
ggugcagcauagaaacaacacu

SEQ ID NO: 365386 - RNA, 19 nt, Machupo virus
ucaauugauuuugugagcu

SEQ ID NO: 365387 - RNA, 19 nt, Machupo virus
uccacaagacccccggggg

SEQ ID NO: 365388 - RNA, 21 nt, Machupo virus
uccacuuggggcgugcuugcc

SEQ ID NO: 365389 - RNA, 17 nt, Machupo virus
uccugagcauuguuuga

SEQ ID NO: 365390 - RNA, 20 nt, Machupo virus
ucggcaaaccaacagcauuu

SEQ ID NO: 365391 - RNA, 18 nt, Machupo virus
ucuccugaacucugcuga

SEQ ID NO: 365392 - RNA, 23 nt, Machupo virus
ucugcugaggguugguuggauga

SEQ ID NO: 365393 - RNA, 21 nt, Machupo virus
ucuuguacaaaucaugaacaa

SEQ ID NO: 365394 - RNA, 22 nt, Machupo virus
ugaacaauggugaaaucuuccu

SEQ ID NO: 365395 - RNA, 11 nt, Machupo virus
ugauggauguc

SEQ ID NO: 365396 - RNA, 20 nt, Machupo virus
uggcuccacgggaacuguga

SEQ ID NO: 365397 - RNA, 12 nt, Machupo virus
ugugauggaugu

SEQ ID NO: 365398 - RNA, 16 nt, Machupo virus
ugugauguugcuuuca

SEQ ID NO: 365399 - RNA, 19 nt, Machupo virus
uguucauggugggggggca

SEQ ID NO: 365400 - RNA, 17 nt, Machupo virus
uucgccaaagcuuucaa

SEQ ID NO: 365401 - RNA, 15 nt, Machupo virus
uuggaugauguuugu

SEQ ID NO: 365402 - RNA, 19 nt, Marburg virus
aaaaaccaaugauggauau

SEQ ID NO: 365403 - RNA, 20 nt, Marburg virus
aaaacgugacuagaccaucu

SEQ ID NO: 365404 - RNA, 22 nt, Marburg virus
aaaacgugacuagaccaucuua

SEQ ID NO: 365405 - RNA, 17 nt, Marburg virus
aaagaaauaguaauguu

SEQ ID NO: 365406 - RNA, 15 nt, Marburg virus
aaauagugguaucau

SEQ ID NO: 365407 - RNA, 17 nt, Marburg virus
aaauauaucuuuugcaa

SEQ ID NO: 365408 - RNA, 21 nt, Marburg virus
aaauuuauuugaauauucaaa

SEQ ID NO: 365409 - RNA, 23 nt, Marburg virus
aacaggcuguuccuauaaucuga

SEQ ID NO: 365410 - RNA, 15 nt, Marburg virus
aacaugacuugauuc

SEQ ID NO: 365411 - RNA, 14 nt, Marburg virus
aaccguacacaagu

SEQ ID NO: 365412 - RNA, 22 nt, Marburg virus
aaccuuacauugcugcuuuaaa

SEQ ID NO: 365413 - RNA, 17 nt, Marburg virus
aacuaaacuugcauauc

SEQ ID NO: 365414 - RNA, 14 nt, Marburg virus
aacuaacaacauag

SEQ ID NO: 365415 - RNA, 23 nt, Marburg virus
aacucuuauugcgagacuugaac

SEQ ID NO: 365416 - RNA, 22 nt, Marburg virus
aacuucaauaagugaccccaaa

SEQ ID NO: 365417 - RNA, 18 nt, Marburg virus
aacuugaugaugcagcuc

SEQ ID NO: 365418 - RNA, 17 nt, Marburg virus
aagacacuaaacauuuc

SEQ ID NO: 365419 - RNA, 18 nt, Marburg virus
aagcuaucaaauaacaau

SEQ ID NO: 365420 - RNA, 19 nt, Marburg virus
aagcuuuuguggaugguuu

SEQ ID NO: 365421 - RNA, 19 nt, Marburg virus
aaguucucacaagauuagu

SEQ ID NO: 365422 - RNA, 23 nt, Marburg virus
aauaccagggguuucauaugcug

SEQ ID NO: 365423 - RNA, 17 nt, Marburg virus
aauacugagauauacua

SEQ ID NO: 365424 - RNA, 14 nt, Marburg virus
aauacuguaaucaa

SEQ ID NO: 365425 - RNA, 20 nt, Marburg virus
aauauucuuaagcuaucuua

SEQ ID NO: 365426 - RNA, 12 nt, Marburg virus
aaucacuuucag

SEQ ID NO: 365427 - RNA, 11 nt, Marburg virus
aauccuugaag

SEQ ID NO: 365428 - RNA, 15 nt, Marburg virus
aaucuacugaaauca

SEQ ID NO: 365429 - RNA, 15 nt, Marburg virus
aaugcucuccaguca

SEQ ID NO: 365430 - RNA, 21 nt, Marburg virus
aaugcuuuaaccuuacauugc

SEQ ID NO: 365431 - RNA, 21 nt, Marburg virus
aauguuggaggcacaguacau

SEQ ID NO: 365432 - RNA, 18 nt, Marburg virus
aauucuacuaacuucaau

SEQ ID NO: 365433 - RNA, 17 nt, Marburg virus
aauuguuaucauaguca

SEQ ID NO: 365434 - RNA, 16 nt, Marburg virus
aauuuaaugugaauca

SEQ ID NO: 365435 - RNA, 19 nt, Marburg virus
acaaaaggggucuaccuaa

SEQ ID NO: 365436 - RNA, 21 nt, Marburg virus
acaaaaggggucuaccuaaca

SEQ ID NO: 365437 - RNA, 16 nt, Marburg virus
acaaagacacuaaaca

SEQ ID NO: 365438 - RNA, 17 nt, Marburg virus
acaacauaagcuaucaa

SEQ ID NO: 365439 - RNA, 13 nt, Marburg virus
acaagauaaucuu

SEQ ID NO: 365440 - RNA, 15 nt, Marburg virus
acacaauucuacuaa

SEQ ID NO: 365441 - RNA, 19 nt, Marburg virus
acaggaguccaucugcaua

SEQ ID NO: 365442 - RNA, 21 nt, Marburg virus
acagguaugacugagugauca

SEQ ID NO: 365443 - RNA, 22 nt, Marburg virus
acagguaugacugagugaucag

SEQ ID NO: 365444 - RNA, 13 nt, Marburg virus
acauacuaauaac

SEQ ID NO: 365445 - RNA, 21 nt, Marburg virus
acgugccguucaaagagucuu

SEQ ID NO: 365446 - RNA, 18 nt, Marburg virus
acuaccucuuaagcuuuu

SEQ ID NO: 365447 - RNA, 15 nt, Marburg virus
acuauggugaugcga

SEQ ID NO: 365448 - RNA, 15 nt, Marburg virus
acuuaucuacuuuga

SEQ ID NO: 365449 - RNA, 16 nt, Marburg virus
acuuaucuacuuugau

SEQ ID NO: 365450 - RNA, 22 nt, Marburg virus
acuuuuuaagaaucaacuaaca

SEQ ID NO: 365451 - RNA, 18 nt, Marburg virus
agaacuucauuuaauuca

SEQ ID NO: 365452 - RNA, 15 nt, Marburg virus
agaagcauggccuaa

SEQ ID NO: 365453 - RNA, 18 nt, Marburg virus
agacacuaaacauuucaa

SEQ ID NO: 365454 - RNA, 19 nt, Marburg virus
agaucacaguaaucaaauu

SEQ ID NO: 365455 - RNA, 12 nt, Marburg virus
agcauauuucau

SEQ ID NO: 365456 - RNA, 21 nt, Marburg virus
agccaucugauuuaacuuaau

SEQ ID NO: 365457 - RNA, 19 nt, Marburg virus
agcuauaucuaagugucua

SEQ ID NO: 365458 - RNA, 12 nt, Marburg virus
agcuaucaaaua

SEQ ID NO: 365459 - RNA, 14 nt, Marburg virus
agcucuguuucacc

SEQ ID NO: 365460 - RNA, 14 nt, Marburg virus
agcugauaauuuaa

SEQ ID NO: 365461 - RNA, 18 nt, Marburg virus
agcuugcuuuacacaaga

SEQ ID NO: 365462 - RNA, 19 nt, Marburg virus
aguaagaaaaacuaaugaa

SEQ ID NO: 365463 - RNA, 21 nt, Marburg virus
aguaaucaaauuuauuugaau

SEQ ID NO: 365464 - RNA, 14 nt, Marburg virus
agugaucaguauau

SEQ ID NO: 365465 - RNA, 15 nt, Marburg virus
agugaucaguauauu

SEQ ID NO: 365466 - RNA, 21 nt, Marburg virus
aguugcagggggagugaucuu

SEQ ID NO: 365467 - RNA, 17 nt, Marburg virus
aguuggaauuaacuuuu

SEQ ID NO: 365468 - RNA, 15 nt, Marburg virus
aguuuuuaguuucaa

SEQ ID NO: 365469 - RNA, 17 nt, Marburg virus
auaacaaagaauauacc

SEQ ID NO: 365470 - RNA, 19 nt, Marburg virus
auaaucaccaauucauugu

SEQ ID NO: 365471 - RNA, 15 nt, Marburg virus
auacaaagacacuaa

SEQ ID NO: 365472 - RNA, 20 nt, Marburg virus
auacgucgauauaauacaua

SEQ ID NO: 365473 - RNA, 16 nt, Marburg virus
auaguuaagacuggcc

SEQ ID NO: 365474 - RNA, 16 nt, Marburg virus
auaguuuaaccacaua

SEQ ID NO: 365475 - RNA, 20 nt, Marburg virus
auaugcugccauauuuacua

SEQ ID NO: 365476 - RNA, 13 nt, Marburg virus
auauuacuaacaa

SEQ ID NO: 365477 - RNA, 15 nt, Marburg virus
auauucuuaagcuau

SEQ ID NO: 365478 - RNA, 21 nt, Marburg virus
auauuuauccuuguguaauuc

SEQ ID NO: 365479 - RNA, 23 nt, Marburg virus
aucaaauuuauuugaauauucaa

SEQ ID NO: 365480 - RNA, 14 nt, Marburg virus
aucaacuaacaaca

SEQ ID NO: 365481 - RNA, 12 nt, Marburg virus
aucaagcauauu

SEQ ID NO: 365482 - RNA, 17 nt, Marburg virus
auccuugaaguaacuuu

SEQ ID NO: 365483 - RNA, 19 nt, Marburg virus
auccuuuguugauacccuu

SEQ ID NO: 365484 - RNA, 21 nt, Marburg virus
aucgucucaaaccguacacaa

SEQ ID NO: 365485 - RNA, 15 nt, Marburg virus
aucuacuuugauccg

SEQ ID NO: 365486 - RNA, 18 nt, Marburg virus
aucuauaauggguuuacu

SEQ ID NO: 365487 - RNA, 18 nt, Marburg virus
aucucuccuucaagccau

SEQ ID NO: 365488 - RNA, 23 nt, Marburg virus
aucuuaauagaaguaguaauuua

SEQ ID NO: 365489 - RNA, 17 nt, Marburg virus
augcuuuaaccuuacau

SEQ ID NO: 365490 - RNA, 22 nt, Marburg virus
augcuuuaaccuuacauugcug

SEQ ID NO: 365491 - RNA, 14 nt, Marburg virus
auguuaguuacuca

SEQ ID NO: 365492 - RNA, 23 nt, Marburg virus
auguuauugauugagcuucucaa

SEQ ID NO: 365493 - RNA, 12 nt, Marburg virus
auuaaagcuuua

SEQ ID NO: 365494 - RNA, 13 nt, Marburg virus
auuaauccuugaa

SEQ ID NO: 365495 - RNA, 12 nt, Marburg virus
auuacuaacaaa

SEQ ID NO: 365496 - RNA, 15 nt, Marburg virus
auuauccuguauaac

SEQ ID NO: 365497 - RNA, 18 nt, Marburg virus
auuauccuguauaacaaa

SEQ ID NO: 365498 - RNA, 16 nt, Marburg virus
auucagugcuacaaau

SEQ ID NO: 365499 - RNA, 18 nt, Marburg virus
auucuuaagcuaucuuaa

SEQ ID NO: 365500 - RNA, 23 nt, Marburg virus
auucuugcuuaguuuuacuuuga

SEQ ID NO: 365501 - RNA, 14 nt, Marburg virus
auugagcuucucaa

SEQ ID NO: 365502 - RNA, 21 nt, Marburg virus
auugauuucaauaaugcuuua

SEQ ID NO: 365503 - RNA, 20 nt, Marburg virus
auuguugauuguuaugguuu

SEQ ID NO: 365504 - RNA, 18 nt, Marburg virus
auuuacugguauaaaaua

SEQ ID NO: 365505 - RNA, 19 nt, Marburg virus
auuucaauguuacagcuau

SEQ ID NO: 365506 - RNA, 14 nt, Marburg virus
auuugaauauucaa

SEQ ID NO: 365507 - RNA, 14 nt, Marburg virus
auuuucaccuugaa

SEQ ID NO: 365508 - RNA, 21 nt, Marburg virus
auuuuucaacuaaacuugcau

SEQ ID NO: 365509 - RNA, 17 nt, Marburg virus
caaaacgugacuagacc

SEQ ID NO: 365510 - RNA, 13 nt, Marburg virus
caaaucacuuuca

SEQ ID NO: 365511 - RNA, 14 nt, Marburg virus
caaaucacuuucag

SEQ ID NO: 365512 - RNA, 23 nt, Marburg virus
caacauaagcuaucaaauaacaa

SEQ ID NO: 365513 - RNA, 12 nt, Marburg virus
caagauaaucuu

SEQ ID NO: 365514 - RNA, 13 nt, Marburg virus
caagauaaucuua

SEQ ID NO: 365515 - RNA, 15 nt, Marburg virus
caagauaaucuuaua

SEQ ID NO: 365516 - RNA, 17 nt, Marburg virus
caauacuguaaucaaca

SEQ ID NO: 365517 - RNA, 16 nt, Marburg virus
caauguuaguuacuca

SEQ ID NO: 365518 - RNA, 13 nt, Marburg virus
caauucauuguaa

SEQ ID NO: 365519 - RNA, 14 nt, Marburg virus
caauugcuacugag

SEQ ID NO: 365520 - RNA, 15 nt, Marburg virus
cacaacuguugcaua

SEQ ID NO: 365521 - RNA, 13 nt, Marburg virus
cacaauucuacua

SEQ ID NO: 365522 - RNA, 18 nt, Marburg virus
cagaucacaguaaucaaa

SEQ ID NO: 365523 - RNA, 16 nt, Marburg virus
caguuuuuaguuucaa

SEQ ID NO: 365524 - RNA, 17 nt, Marburg virus
cauaauugguauugaua

SEQ ID NO: 365525 - RNA, 10 nt, Marburg virus
cauacuaugg

SEQ ID NO: 365526 - RNA, 14 nt, Marburg virus
cauacuauggugau

SEQ ID NO: 365527 - RNA, 14 nt, Marburg virus
cauaucuuccaaaa

SEQ ID NO: 365528 - RNA, 19 nt, Marburg virus
cauaugcugccauauuuac

SEQ ID NO: 365529 - RNA, 20 nt, Marburg virus
cauugugcccuucauugcua

SEQ ID NO: 365530 - RNA, 17 nt, Marburg virus
ccauacauuugccgcaa

SEQ ID NO: 365531 - RNA, 18 nt, Marburg virus
cccuugagagacaacuuu

SEQ ID NO: 365532 - RNA, 14 nt, Marburg virus
ccucuuaagcuuuu

SEQ ID NO: 365533 - RNA, 18 nt, Marburg virus
ccugauuuauauuuacug

SEQ ID NO: 365534 - RNA, 15 nt, Marburg virus
cuaagugucuaauua

SEQ ID NO: 365535 - RNA, 15 nt, Marburg virus
cuaauauuacuaaca

SEQ ID NO: 365536 - RNA, 16 nt, Marburg virus
cuaauauuacuaacaa

SEQ ID NO: 365537 - RNA, 17 nt, Marburg virus
cuaauuaacaacuugua

SEQ ID NO: 365538 - RNA, 22 nt, Marburg virus
cuacccugauuuauauuuacug

SEQ ID NO: 365539 - RNA, 15 nt, Marburg virus
cugccauauuuacua

SEQ ID NO: 365540 - RNA, 12 nt, Marburg virus
cuuaaacuugau

SEQ ID NO: 365541 - RNA, 18 nt, Marburg virus
cuuaaauuagcauggaua

SEQ ID NO: 365542 - RNA, 22 nt, Marburg virus
cuuaagcuaucuuaaacuugau

SEQ ID NO: 365543 - RNA, 20 nt, Marburg virus
cuuaauaaacaugacuugau

SEQ ID NO: 365544 - RNA, 22 nt, Marburg virus
cuuaguuuuacuuugauuuacu

SEQ ID NO: 365545 - RNA, 20 nt, Marburg virus
cuuauaucgucucaaaccgu

SEQ ID NO: 365546 - RNA, 14 nt, Marburg virus
cuuaucuacuuuga

SEQ ID NO: 365547 - RNA, 19 nt, Marburg virus
cuuauugcgagacuugaac

SEQ ID NO: 365548 - RNA, 22 nt, Marburg virus
cuuauugcgagacuugaacaca

SEQ ID NO: 365549 - RNA, 16 nt, Marburg virus
cuucucaaauggugca

SEQ ID NO: 365550 - RNA, 16 nt, Marburg virus
cuugagagacaacuuu

SEQ ID NO: 365551 - RNA, 21 nt, Marburg virus
cuuuuguggaugguuucaaua

SEQ ID NO: 365552 - RNA, 15 nt, Marburg virus
gaaaguugacaauca

SEQ ID NO: 365553 - RNA, 23 nt, Marburg virus
gaaaucaacuugggagauuuuua

SEQ ID NO: 365554 - RNA, 15 nt, Marburg virus
gaacguucggucaca

SEQ ID NO: 365555 - RNA, 20 nt, Marburg virus
gaauacgucgauauaauaca

SEQ ID NO: 365556 - RNA, 13 nt, Marburg virus
gaaucaacuaaca

SEQ ID NO: 365557 - RNA, 18 nt, Marburg virus
gacaacauaagcuaucaa

SEQ ID NO: 365558 - RNA, 22 nt, Marburg virus
gacaacauaagcuaucaaauaa

SEQ ID NO: 365559 - RNA, 20 nt, Marburg virus
gacaaucaaaucacuuucag

SEQ ID NO: 365560 - RNA, 16 nt, Marburg virus
gacaauugcuacugag

SEQ ID NO: 365561 - RNA, 20 nt, Marburg virus
gacuacgacgauaauaauca

SEQ ID NO: 365562 - RNA, 19 nt, Marburg virus
gagacuugaacacaauucu

SEQ ID NO: 365563 - RNA, 17 nt, Marburg virus
gaguugauacaaagaca

SEQ ID NO: 365564 - RNA, 19 nt, Marburg virus
gauaauaaucaccaauuca

SEQ ID NO: 365565 - RNA, 19 nt, Marburg virus
gauagauuaauccuugaag

SEQ ID NO: 365566 - RNA, 18 nt, Marburg virus
gauauucaauuguuauca

SEQ ID NO: 365567 - RNA, 17 nt, Marburg virus
gaucacaacuguugcau

SEQ ID NO: 365568 - RNA, 14 nt, Marburg virus
gaucagcuugcaag

SEQ ID NO: 365569 - RNA, 21 nt, Marburg virus
gaugauauuccuucugaaaua

SEQ ID NO: 365570 - RNA, 14 nt, Marburg virus
gauuaaaauauucu

SEQ ID NO: 365571 - RNA, 18 nt, Marburg virus
gauuaagaaaaaccaaug

SEQ ID NO: 365572 - RNA, 15 nt, Marburg virus
gauuuauauuuacug

SEQ ID NO: 365573 - RNA, 16 nt, Marburg virus
gauuuucaccuugaaa

SEQ ID NO: 365574 - RNA, 22 nt, Marburg virus
gcagaauaccagggguuucaua

SEQ ID NO: 365575 - RNA, 16 nt, Marburg virus
gcagggggagugaucu

SEQ ID NO: 365576 - RNA, 14 nt, Marburg virus
gcauggauauucau

SEQ ID NO: 365577 - RNA, 13 nt, Marburg virus
gcgagacuugaac

SEQ ID NO: 365578 - RNA, 24 nt, Marburg virus
ggauauucauaguuuaaccacaua

SEQ ID NO: 365579 - RNA, 16 nt, Marburg virus
guagagguuaauuuaa

SEQ ID NO: 365580 - RNA, 19 nt, Marburg virus
gucgauauaauacauacua

SEQ ID NO: 365581 - RNA, 20 nt, Marburg virus
gucucaaaccguacacaagu

SEQ ID NO: 365582 - RNA, 15 nt, Marburg virus
gucuuaagugugauu

SEQ ID NO: 365583 - RNA, 18 nt, Marburg virus
gugcacuauccuacuguu

SEQ ID NO: 365584 - RNA, 14 nt, Marburg virus
guuaaauggugaua

SEQ ID NO: 365585 - RNA, 22 nt, Marburg virus
guuaauuauccuguauaacaaa

SEQ ID NO: 365586 - RNA, 22 nt, Marburg virus
guuaccuacuuaucuacuuuga

SEQ ID NO: 365587 - RNA, 22 nt, Marburg virus
guucaaagagucuugauuuaua

SEQ ID NO: 365588 - RNA, 20 nt, Marburg virus
guugcagggggagugaucuu

SEQ ID NO: 365589 - RNA, 23 nt, Marburg virus
guuucaauaugugcguagagguu

SEQ ID NO: 365590 - RNA, 17 nt, Marburg virus
guuuguauugauuucaa

SEQ ID NO: 365591 - RNA, 19 nt, Marburg virus
uaaaauagugguaucaucu

SEQ ID NO: 365592 - RNA, 14 nt, Marburg virus
uaaaauauucuuaa

SEQ ID NO: 365593 - RNA, 19 nt, Marburg virus
uaaacauuucaaaagcaua

SEQ ID NO: 365594 - RNA, 14 nt, Marburg virus
uaaaccaagcaauu

SEQ ID NO: 365595 - RNA, 15 nt, Marburg virus
uaaaccaagcaauug

SEQ ID NO: 365596 - RNA, 14 nt, Marburg virus
uaaauauccaucaa

SEQ ID NO: 365597 - RNA, 22 nt, Marburg virus
uaaaugggugucuguuaaguuc

SEQ ID NO: 365598 - RNA, 18 nt, Marburg virus
uaacuuaauaaacaugac

SEQ ID NO: 365599 - RNA, 22 nt, Marburg virus
uaacuuaauaaacaugacuuga

SEQ ID NO: 365600 - RNA, 13 nt, Marburg virus
uaagaaaaacuaa

SEQ ID NO: 365601 - RNA, 16 nt, Marburg virus
uaagaaucaacuaaca

SEQ ID NO: 365602 - RNA, 17 nt, Marburg virus
uaagaaucaacuaacaa

SEQ ID NO: 365603 - RNA, 18 nt, Marburg virus
uaagcuaucaaauaacaa

SEQ ID NO: 365604 - RNA, 14 nt, Marburg virus
uaauacauacuaau

SEQ ID NO: 365605 - RNA, 22 nt, Marburg virus
uaaugauacaacuacgaaccuc

SEQ ID NO: 365606 - RNA, 16 nt, Marburg virus
uacacaagauaaucuu

SEQ ID NO: 365607 - RNA, 19 nt, Marburg virus
uaccagggguuucauaugc

SEQ ID NO: 365608 - RNA, 16 nt, Marburg virus
uaccguggaucacaac

SEQ ID NO: 365609 - RNA, 20 nt, Marburg virus
uacgucgauauaauacauac

SEQ ID NO: 365610 - RNA, 23 nt, Marburg virus
uagacagcuugcuuuacacaaga

SEQ ID NO: 365611 - RNA, 14 nt, Marburg virus
uagaggaacuaaua

SEQ ID NO: 365612 - RNA, 16 nt, Marburg virus
uaggacaauugcuacu

SEQ ID NO: 365613 - RNA, 21 nt, Marburg virus
uaguugaauugaguuaugaca

SEQ ID NO: 365614 - RNA, 21 nt, Marburg virus
uauaaucugauugugagauua

SEQ ID NO: 365615 - RNA, 11 nt, Marburg virus
uauauuuacug

SEQ ID NO: 365616 - RNA, 16 nt, Marburg virus
uauauuuacugguaua

SEQ ID NO: 365617 - RNA, 15 nt, Marburg virus
uauccuuaauauaau

SEQ ID NO: 365618 - RNA, 19 nt, Marburg virus
uaucuuccaaaauauaucu

SEQ ID NO: 365619 - RNA, 19 nt, Marburg virus
uaugcugccauauuuacua

SEQ ID NO: 365620 - RNA, 23 nt, Marburg virus
uauggugaugcgagggcauuauu

SEQ ID NO: 365621 - RNA, 22 nt, Marburg virus
uaugugggcaaaacgugacuag

SEQ ID NO: 365622 - RNA, 22 nt, Marburg virus
uauuaaauaguugucauauaac

SEQ ID NO: 365623 - RNA, 23 nt, Marburg virus
uauucauaguuuaaccacauaau

SEQ ID NO: 365624 - RNA, 22 nt, Marburg virus
ucaaauuuauuugaauauucaa

SEQ ID NO: 365625 - RNA, 15 nt, Marburg virus
ucaacuaaacuugca

SEQ ID NO: 365626 - RNA, 14 nt, Marburg virus
ucaauaaugcuuua

SEQ ID NO: 365627 - RNA, 16 nt, Marburg virus
ucacgaaaauaaucua

SEQ ID NO: 365628 - RNA, 11 nt, Marburg virus
ucauugcuaag

SEQ ID NO: 365629 - RNA, 14 nt, Marburg virus
ucgauauaauacau

SEQ ID NO: 365630 - RNA, 17 nt, Marburg virus
ucuacuaacuucaauaa

SEQ ID NO: 365631 - RNA, 18 nt, Marburg virus
ucuauaauggguuuacua

SEQ ID NO: 365632 - RNA, 13 nt, Marburg virus
ucuguuucaccuu

SEQ ID NO: 365633 - RNA, 14 nt, Marburg virus
ucuuauugcgagac

SEQ ID NO: 365634 - RNA, 23 nt, Marburg virus
ugaaagaguuaaauggugauaga

SEQ ID NO: 365635 - RNA, 17 nt, Marburg virus
ugaaaguugacaaucaa

SEQ ID NO: 365636 - RNA, 13 nt, Marburg virus
ugaaguaacuuuu

SEQ ID NO: 365637 - RNA, 17 nt, Marburg virus
ugacauaccauauauca

SEQ ID NO: 365638 - RNA, 21 nt, Marburg virus
ugagacaacauaagcuaucaa

SEQ ID NO: 365639 - RNA, 21 nt, Marburg virus
ugagcccuucuucuaaucuac

SEQ ID NO: 365640 - RNA, 20 nt, Marburg virus
ugaugcgagggcauuauuca

SEQ ID NO: 365641 - RNA, 13 nt, Marburg virus
ugauggauauuaa

SEQ ID NO: 365642 - RNA, 21 nt, Marburg virus
ugauucagagagugugcugaa

SEQ ID NO: 365643 - RNA, 14 nt, Marburg virus
ugauuguuaugguu

SEQ ID NO: 365644 - RNA, 22 nt, Marburg virus
ugcauaucuuccaaaauauauc

SEQ ID NO: 365645 - RNA, 15 nt, Marburg virus
uggauauuaaauauc

SEQ ID NO: 365646 - RNA, 14 nt, Marburg virus
uggauauucauagu

SEQ ID NO: 365647 - RNA, 12 nt, Marburg virus
uggguuuacuag

SEQ ID NO: 365648 - RNA, 18 nt, Marburg virus
ugguuugauauucaauug

SEQ ID NO: 365649 - RNA, 15 nt, Marburg virus
ugucgcagaauacca

SEQ ID NO: 365650 - RNA, 17 nt, Marburg virus
ugucuaauuaacaacuu

SEQ ID NO: 365651 - RNA, 14 nt, Marburg virus
uuaaauggugauag

SEQ ID NO: 365652 - RNA, 12 nt, Marburg virus
uuaccuacuuau

SEQ ID NO: 365653 - RNA, 22 nt, Marburg virus
uuacuauugugugagacaacau

SEQ ID NO: 365654 - RNA, 13 nt, Marburg virus
uuacuuguuacua

SEQ ID NO: 365655 - RNA, 15 nt, Marburg virus
uuaguuuguauugau

SEQ ID NO: 365656 - RNA, 16 nt, Marburg virus
uuaguuuuacuuugau

SEQ ID NO: 365657 - RNA, 16 nt, Marburg virus
uuauccuuguguaauu

SEQ ID NO: 365658 - RNA, 14 nt, Marburg virus
uuaugacauaccau

SEQ ID NO: 365659 - RNA, 17 nt, Marburg virus
uucaacuaaacuugcau

SEQ ID NO: 365660 - RNA, 18 nt, Marburg virus
uucaaguuuacugaagac

SEQ ID NO: 365661 - RNA, 18 nt, Marburg virus
uucacgaaaauaaucuau

SEQ ID NO: 365662 - RNA, 15 nt, Marburg virus
uuccaaaauauaucu

SEQ ID NO: 365663 - RNA, 14 nt, Marburg virus
uucuaaucuacuga

SEQ ID NO: 365664 - RNA, 15 nt, Marburg virus
uucuaaucuacugaa

SEQ ID NO: 365665 - RNA, 14 nt, Marburg virus
uucuauuugaugca

SEQ ID NO: 365666 - RNA, 21 nt, Marburg virus
uucucauuguuaacaguugca

SEQ ID NO: 365667 - RNA, 17 nt, Marburg virus
uucuuuuuucaauugcu

SEQ ID NO: 365668 - RNA, 22 nt, Marburg virus
uugauacaaagacacuaaacau

SEQ ID NO: 365669 - RNA, 14 nt, Marburg virus
uugauuucaauaau

SEQ ID NO: 365670 - RNA, 21 nt, Marburg virus
uugccgcaauacuguaaucaa

SEQ ID NO: 365671 - RNA, 13 nt, Marburg virus
uugcugcuuuaaa

SEQ ID NO: 365672 - RNA, 16 nt, Marburg virus
uugcuuaguuuuacuu

SEQ ID NO: 365673 - RNA, 15 nt, Marburg virus
uugcuuuacacaaga

SEQ ID NO: 365674 - RNA, 16 nt, Marburg virus
uuguaaauuacucgau

SEQ ID NO: 365675 - RNA, 14 nt, Marburg virus
uuguagaauuaccg

SEQ ID NO: 365676 - RNA, 16 nt, Marburg virus
uuuaaacuaccucuua

SEQ ID NO: 365677 - RNA, 17 nt, Marburg virus
uuuaacuuaauaaacau

SEQ ID NO: 365678 - RNA, 14 nt, Marburg virus
uuuaagaagcugau

SEQ ID NO: 365679 - RNA, 18 nt, Marburg virus
uuuaagaaucaacuaaca

SEQ ID NO: 365680 - RNA, 17 nt, Marburg virus
uuucaccuuucuguuga

SEQ ID NO: 365681 - RNA, 15 nt, Marburg virus
uuucuguugauuuca

SEQ ID NO: 365682 - RNA, 19 nt, Marburg virus
uuugaaaguugacaaucaa

SEQ ID NO: 365683 - RNA, 17 nt, Marburg virus
uuugccgcaauacugua

SEQ ID NO: 365684 - RNA, 14 nt, Marburg virus
uuuguugcaauuca

SEQ ID NO: 365685 - RNA, 21 nt, Marburg virus
uuuuaggauccuauuacuugu

SEQ ID NO: 365686 - RNA, 22 nt, Marburg virus
uuuuaggauccuauuacuuguu

SEQ ID NO: 365687 - RNA, 19 nt, Marburg virus
uuuuaguuucaacucuuau

SEQ ID NO: 365688 - RNA, 19 nt, Marburg virus
uuuuauaaacaauucuugc

SEQ ID NO: 365689 - RNA, 12 nt, Marburg virus
aaaaaacuauua

SEQ ID NO: 365690 - RNA, 14 nt, Marburg virus
aaacaugacuugau

SEQ ID NO: 365691 - RNA, 22 nt, Marburg virus
aaacgugacuagaccaucuuaa

SEQ ID NO: 365692 - RNA, 19 nt, Marburg virus
aaaguugacaaucaaauca

SEQ ID NO: 365693 - RNA, 22 nt, Marburg virus
aaauacugagauauacuaguug

SEQ ID NO: 365694 - RNA, 19 nt, Marburg virus
aaauagugguaucaucuua

SEQ ID NO: 365695 - RNA, 18 nt, Marburg virus
aaauaguugucauauaac

SEQ ID NO: 365696 - RNA, 15 nt, Marburg virus
aaauguuauugauug

SEQ ID NO: 365697 - RNA, 16 nt, Marburg virus
aaauuagcauggauau

SEQ ID NO: 365698 - RNA, 23 nt, Marburg virus
aacacaauucuacuaacuucaau

SEQ ID NO: 365699 - RNA, 16 nt, Marburg virus
aacauaagcuaucaaa

SEQ ID NO: 365700 - RNA, 16 nt, Marburg virus
aacauagaaaacauau

SEQ ID NO: 365701 - RNA, 17 nt, Marburg virus
aacauagaaaacauauu

SEQ ID NO: 365702 - RNA, 13 nt, Marburg virus
aacaugacuugau

SEQ ID NO: 365703 - RNA, 18 nt, Marburg virus
aacauuucaaaagcauau

SEQ ID NO: 365704 - RNA, 13 nt, Marburg virus
aaccguacacaag

SEQ ID NO: 365705 - RNA, 13 nt, Marburg virus
aacuuguaccucu

SEQ ID NO: 365706 - RNA, 15 nt, Marburg virus
aacuuguaccucuaa

SEQ ID NO: 365707 - RNA, 19 nt, Marburg virus
aacuuuuguugcaauucaa

SEQ ID NO: 365708 - RNA, 21 nt, Marburg virus
aagagaacuucauuuaauuca

SEQ ID NO: 365709 - RNA, 20 nt, Marburg virus
aagagauuucuuguugcaca

SEQ ID NO: 365710 - RNA, 13 nt, Marburg virus
aagagugauuaag

SEQ ID NO: 365711 - RNA, 14 nt, Marburg virus
aagcauggccuaaa

SEQ ID NO: 365712 - RNA, 22 nt, Marburg virus
aagccaucugauuuaacuuaau

SEQ ID NO: 365713 - RNA, 19 nt, Marburg virus
aagcuaucuuaaacuugau

SEQ ID NO: 365714 - RNA, 13 nt, Marburg virus
aaggauguucuua

SEQ ID NO: 365715 - RNA, 21 nt, Marburg virus
aauauaccuacccugauuuau

SEQ ID NO: 365716 - RNA, 12 nt, Marburg virus
aaucaacuaaca

SEQ ID NO: 365717 - RNA, 19 nt, Marburg virus
aaucugauugugagauuau

SEQ ID NO: 365718 - RNA, 22 nt, Marburg virus
aaugcuuuaaccuuacauugcu

SEQ ID NO: 365719 - RNA, 23 nt, Marburg virus
aaugcuuuaaccuuacauugcug

SEQ ID NO: 365720 - RNA, 14 nt, Marburg virus
aauuaccguggauc

SEQ ID NO: 365721 - RNA, 18 nt, Marburg virus
aauuagcauggauauuca

SEQ ID NO: 365722 - RNA, 19 nt, Marburg virus
aauuagcauggauauucau

SEQ ID NO: 365723 - RNA, 12 nt, Marburg virus
aauucaaguuua

SEQ ID NO: 365724 - RNA, 22 nt, Marburg virus
aauugccggguaagagugauua

SEQ ID NO: 365725 - RNA, 19 nt, Marburg virus
aauugcuauaaugauacaa

SEQ ID NO: 365726 - RNA, 18 nt, Marburg virus
acaacauagaaaacauau

SEQ ID NO: 365727 - RNA, 22 nt, Marburg virus
acaacuguugcauaucuuccaa

SEQ ID NO: 365728 - RNA, 17 nt, Marburg virus
acaaguagggaaaucac

SEQ ID NO: 365729 - RNA, 16 nt, Marburg virus
acaaucaaaucacuuu

SEQ ID NO: 365730 - RNA, 13 nt, Marburg virus
acaauucuacuaa

SEQ ID NO: 365731 - RNA, 17 nt, Marburg virus
acaauucuacuaacuuc

SEQ ID NO: 365732 - RNA, 19 nt, Marburg virus
acaauucuacuaacuucaa

SEQ ID NO: 365733 - RNA, 17 nt, Marburg virus
acaauugcuacugagcc

SEQ ID NO: 365734 - RNA, 16 nt, Marburg virus
acacuaaacauuucaa

SEQ ID NO: 365735 - RNA, 18 nt, Marburg virus
acaggcuguuccuauaau

SEQ ID NO: 365736 - RNA, 16 nt, Marburg virus
acaugacuugauucag

SEQ ID NO: 365737 - RNA, 16 nt, Marburg virus
acauugcugcuuuaaa

SEQ ID NO: 365738 - RNA, 13 nt, Marburg virus
accguacacaagu

SEQ ID NO: 365739 - RNA, 16 nt, Marburg virus
accuccauacauuugc

SEQ ID NO: 365740 - RNA, 15 nt, Marburg virus
accucuuaagcuuuu

SEQ ID NO: 365741 - RNA, 20 nt, Marburg virus
accuuucuguugauuucaau

SEQ ID NO: 365742 - RNA, 14 nt, Marburg virus
acgaaaauaaucua

SEQ ID NO: 365743 - RNA, 20 nt, Marburg virus
acgaaccuccauacauuugc

SEQ ID NO: 365744 - RNA, 20 nt, Marburg virus
acgugacuagaccaucuuaa

SEQ ID NO: 365745 - RNA, 16 nt, Marburg virus
acuaauauuacuaaca

SEQ ID NO: 365746 - RNA, 13 nt, Marburg virus
acucaacugauga

SEQ ID NO: 365747 - RNA, 21 nt, Marburg virus
acucuuauugcgagacuugaa

SEQ ID NO: 365748 - RNA, 22 nt, Marburg virus
acugguauaaaauagugguauc

SEQ ID NO: 365749 - RNA, 16 nt, Marburg virus
acuucauuuaauucac

SEQ ID NO: 365750 - RNA, 22 nt, Marburg virus
agaaucaacuaacaacauagaa

SEQ ID NO: 365751 - RNA, 12 nt, Marburg virus
agacaacauaag

SEQ ID NO: 365752 - RNA, 17 nt, Marburg virus
agaccaucuuaauagaa

SEQ ID NO: 365753 - RNA, 16 nt, Marburg virus
agcuugcuuuacacaa

SEQ ID NO: 365754 - RNA, 17 nt, Marburg virus
agcuugcuuuacacaag

SEQ ID NO: 365755 - RNA, 18 nt, Marburg virus
aggacaauugcuacugag

SEQ ID NO: 365756 - RNA, 15 nt, Marburg virus
aggcuguuccuauaa

SEQ ID NO: 365757 - RNA, 20 nt, Marburg virus
aguaauuuauuucugucuua

SEQ ID NO: 365758 - RNA, 22 nt, Marburg virus
aguauauuuuauaaaccaagca

SEQ ID NO: 365759 - RNA, 20 nt, Marburg virus
agugaucuuuccgaguugau

SEQ ID NO: 365760 - RNA, 14 nt, Marburg virus
agugcuacaaauuc

SEQ ID NO: 365761 - RNA, 19 nt, Marburg virus
aguucuuuaaauuugacca

SEQ ID NO: 365762 - RNA, 14 nt, Marburg virus
aguuggaauuaacu

SEQ ID NO: 365763 - RNA, 19 nt, Marburg virus
auaaaccaagcaauugacu

SEQ ID NO: 365764 - RNA, 18 nt, Marburg virus
auacaaagacacuaaaca

SEQ ID NO: 365765 - RNA, 13 nt, Marburg virus
auagaggaacuaa

SEQ ID NO: 365766 - RNA, 19 nt, Marburg virus
auaguuaauuauccuguau

SEQ ID NO: 365767 - RNA, 14 nt, Marburg virus
auaguuuaaccaca

SEQ ID NO: 365768 - RNA, 14 nt, Marburg virus
auauuaaauaucca

SEQ ID NO: 365769 - RNA, 20 nt, Marburg virus
auauuuuauaaaccaagcaa

SEQ ID NO: 365770 - RNA, 19 nt, Marburg virus
aucacaacuguugcauauc

SEQ ID NO: 365771 - RNA, 14 nt, Marburg virus
aucacaguaaucaa

SEQ ID NO: 365772 - RNA, 18 nt, Marburg virus
aucagaucuauaaugggu

SEQ ID NO: 365773 - RNA, 17 nt, Marburg virus
aucauugugcccuucau

SEQ ID NO: 365774 - RNA, 18 nt, Marburg virus
aucugauugugagauuau

SEQ ID NO: 365775 - RNA, 20 nt, Marburg virus
augaugcagcucuguuucac

SEQ ID NO: 365776 - RNA, 14 nt, Marburg virus
augcucuccaguca

SEQ ID NO: 365777 - RNA, 13 nt, Marburg virus
auggugcacuauc

SEQ ID NO: 365778 - RNA, 22 nt, Marburg virus
augugcguagagguuaauuuaa

SEQ ID NO: 365779 - RNA, 15 nt, Marburg virus
auguuacagcuauau

SEQ ID NO: 365780 - RNA, 23 nt, Marburg virus
auguuuuaaacuaccucuuaagc

SEQ ID NO: 365781 - RNA, 16 nt, Marburg virus
auugauuaaagcuuua

SEQ ID NO: 365782 - RNA, 19 nt, Marburg virus
auugauuaagaaaaaccaa

SEQ ID NO: 365783 - RNA, 17 nt, Marburg virus
auugcuacugagcccuu

SEQ ID NO: 365784 - RNA, 22 nt, Marburg virus
auugcuauaaugauacaacuac

SEQ ID NO: 365785 - RNA, 12 nt, Marburg virus
auugcugcuuua

SEQ ID NO: 365786 - RNA, 18 nt, Marburg virus
auugugcccuucauugcu

SEQ ID NO: 365787 - RNA, 21 nt, Marburg virus
auuguuaugguuugauauuca

SEQ ID NO: 365788 - RNA, 23 nt, Marburg virus
auuguuugaaaguugacaaucaa

SEQ ID NO: 365789 - RNA, 19 nt, Marburg virus
auuucugucuuaaguguga

SEQ ID NO: 365790 - RNA, 21 nt, Marburg virus
auuucugucuuaagugugauu

SEQ ID NO: 365791 - RNA, 22 nt, Marburg virus
auuucugucuuaagugugauuu

SEQ ID NO: 365792 - RNA, 22 nt, Marburg virus
auuuuauaaaccaagcaauuga

SEQ ID NO: 365793 - RNA, 20 nt, Marburg virus
auuuuucaacuaaacuugca

SEQ ID NO: 365794 - RNA, 18 nt, Marburg virus
caaagagaacuucauuua

SEQ ID NO: 365795 - RNA, 20 nt, Marburg virus
caagauaaucuuauaucguc

SEQ ID NO: 365796 - RNA, 14 nt, Marburg virus
caagcauauuucau

SEQ ID NO: 365797 - RNA, 13 nt, Marburg virus
caagcgaugugug

SEQ ID NO: 365798 - RNA, 21 nt, Marburg virus
caauacuguaaucaacacugc

SEQ ID NO: 365799 - RNA, 15 nt, Marburg virus
cacaagauaaucuua

SEQ ID NO: 365800 - RNA, 20 nt, Marburg virus
caccuuucuguugauuucaa

SEQ ID NO: 365801 - RNA, 15 nt, Marburg virus
cacuaaacauuucaa

SEQ ID NO: 365802 - RNA, 13 nt, Marburg virus
cagagagugugcu

SEQ ID NO: 365803 - RNA, 20 nt, Marburg virus
caggaguccaucugcauaag

SEQ ID NO: 365804 - RNA, 15 nt, Marburg virus
cagggggagugaucu

SEQ ID NO: 365805 - RNA, 13 nt, Marburg virus
caguaaucaaauu

SEQ ID NO: 365806 - RNA, 16 nt, Marburg virus
cauaagcuaucaaaua

SEQ ID NO: 365807 - RNA, 21 nt, Marburg virus
cauaguuuaaccacauaauaa

SEQ ID NO: 365808 - RNA, 19 nt, Marburg virus
caucugauuuaacuuaaua

SEQ ID NO: 365809 - RNA, 12 nt, Marburg virus
caugacuugauu

SEQ ID NO: 365810 - RNA, 14 nt, Marburg virus
cauugcugcuuuaa

SEQ ID NO: 365811 - RNA, 14 nt, Marburg virus
uuagggaaauacug

SEQ ID NO: 365812 - RNA, 18 nt, Marburg virus
uuauauuuacugguauaa

SEQ ID NO: 365813 - RNA, 15 nt, Marburg virus
uuauucagugcuaca

SEQ ID NO: 365814 - RNA, 16 nt, Marburg virus
uucaaagagucuugau

SEQ ID NO: 365815 - RNA, 12 nt, Marburg virus
uucaaguuuacu

SEQ ID NO: 365816 - RNA, 15 nt, Marburg virus
uucacgaaaauaauc

SEQ ID NO: 365817 - RNA, 17 nt, Marburg virus
uucacgaaaauaaucua

SEQ ID NO: 365818 - RNA, 15 nt, Marburg virus
uucagagagugugcu

SEQ ID NO: 365819 - RNA, 17 nt, Marburg virus
uucaguuuuuaguuuca

SEQ ID NO: 365820 - RNA, 17 nt, Marburg virus
uucuuauuuuucaacua

SEQ ID NO: 365821 - RNA, 14 nt, Marburg virus
uugaagacauaguu

SEQ ID NO: 365822 - RNA, 20 nt, Marburg virus
uugaauauucaaacuacuuu

SEQ ID NO: 365823 - RNA, 11 nt, Marburg virus
uugacaaucaa

SEQ ID NO: 365824 - RNA, 13 nt, Marburg virus
uugacuucucacu

SEQ ID NO: 365825 - RNA, 18 nt, Marburg virus
uugagagacaacuuuuga

SEQ ID NO: 365826 - RNA, 19 nt, Marburg virus
uugauuaagaaaaaccaau

SEQ ID NO: 365827 - RNA, 18 nt, Marburg virus
uugcaagauguaaucucu

SEQ ID NO: 365828 - RNA, 16 nt, Marburg virus
uugcuaaguaaacuca

SEQ ID NO: 365829 - RNA, 17 nt, Marburg virus
uugcuaaguaaacucaa

SEQ ID NO: 365830 - RNA, 19 nt, Marburg virus
uugcuauaaugauacaacu

SEQ ID NO: 365831 - RNA, 23 nt, Marburg virus
uugucauauaacaggcuguuccu

SEQ ID NO: 365832 - RNA, 17 nt, Marburg virus
uuuacuuugauuuacua

SEQ ID NO: 365833 - RNA, 20 nt, Marburg virus
uuuaggauccuauuacuugu

SEQ ID NO: 365834 - RNA, 13 nt, Marburg virus
uuucaacucuuau

SEQ ID NO: 365835 - RNA, 18 nt, Marburg virus
uuucaauaaugcuuuaac

SEQ ID NO: 365836 - RNA, 17 nt, Marburg virus
uuucauaugcugccaua

SEQ ID NO: 365837 - RNA, 14 nt, Marburg virus
uuuccgaguugaua

SEQ ID NO: 365838 - RNA, 12 nt, Marburg virus
uuucuuguugca

SEQ ID NO: 365839 - RNA, 21 nt, Marburg virus
uuuugggucaucagaucuaua

SEQ ID NO: 365840 - RNA, 15 nt, Marburg virus
ccauauuuacuaaau

SEQ ID NO: 365841 - RNA, 21 nt, Marburg virus
cccccucagaagagacgugcc

SEQ ID NO: 365842 - RNA, 17 nt, Marburg virus
ccucuaaggaaaaucau

SEQ ID NO: 365843 - RNA, 20 nt, Marburg virus
ccuuuucuauuugaugcauu

SEQ ID NO: 365844 - RNA, 21 nt, Marburg virus
cgauaauaaucaccaauucau

SEQ ID NO: 365845 - RNA, 21 nt, Marburg virus
cgggcauacuauggugaugcg

SEQ ID NO: 365846 - RNA, 11 nt, Marburg virus
cuaacauauau

SEQ ID NO: 365847 - RNA, 22 nt, Marburg virus
cuaacuucaauaagugacccca

SEQ ID NO: 365848 - RNA, 17 nt, Marburg virus
cuaaugaagaacauuaa

SEQ ID NO: 365849 - RNA, 15 nt, Marburg virus
cuaauuaacaacuug

SEQ ID NO: 365850 - RNA, 18 nt, Marburg virus
cuaucuuaaacuugauga

SEQ ID NO: 365851 - RNA, 13 nt, Marburg virus
cuauuacuuguua

SEQ ID NO: 365852 - RNA, 17 nt, Marburg virus
cucaacugaugaugaua

SEQ ID NO: 365853 - RNA, 15 nt, Marburg virus
cugauuuauauuuac

SEQ ID NO: 365854 - RNA, 23 nt, Marburg virus
cugucuuaagugugauuuucacc

SEQ ID NO: 365855 - RNA, 13 nt, Marburg virus
cuguugauuucaa

SEQ ID NO: 365856 - RNA, 16 nt, Marburg virus
cuucaagccaucugau

SEQ ID NO: 365857 - RNA, 14 nt, Marburg virus
cuucauuuaauuca

SEQ ID NO: 365858 - RNA, 23 nt, Marburg virus
cuuugauuuacuaacauauauca

SEQ ID NO: 365859 - RNA, 22 nt, Marburg virus
gaaaaaccaaugauggauauua

SEQ ID NO: 365860 - RNA, 12 nt, Marburg virus
gaaaauaaucua

SEQ ID NO: 365861 - RNA, 15 nt, Marburg virus
gacaauugcuacuga

SEQ ID NO: 365862 - RNA, 14 nt, Marburg virus
gauauaauacauac

SEQ ID NO: 365863 - RNA, 20 nt, Marburg virus
gauauaauacauacuaauaa

SEQ ID NO: 365864 - RNA, 13 nt, Marburg virus
gauauuaaauauc

SEQ ID NO: 365865 - RNA, 16 nt, Marburg virus
gaucaagcauauuuca

SEQ ID NO: 365866 - RNA, 18 nt, Marburg virus
gaucacggaucaagcaua

SEQ ID NO: 365867 - RNA, 20 nt, Marburg virus
gauggauauuaaauauccau

SEQ ID NO: 365868 - RNA, 23 nt, Marburg virus
gauuaaaauauucuuaagcuauc

SEQ ID NO: 365869 - RNA, 20 nt, Marburg virus
gauuucaauaaugcuuuaac

SEQ ID NO: 365870 - RNA, 21 nt, Marburg virus
gauuucaauguuacagcuaua

SEQ ID NO: 365871 - RNA, 18 nt, Marburg virus
gcuaucuuaaacuugaug

SEQ ID NO: 365872 - RNA, 22 nt, Marburg virus
gcugauaauuuaaugugaauca

SEQ ID NO: 365873 - RNA, 16 nt, Marburg virus
gcugccauauuuacua

SEQ ID NO: 365874 - RNA, 13 nt, Marburg virus
gcuuuacacaaga

SEQ ID NO: 365875 - RNA, 22 nt, Marburg virus
ggaaaaucaugaagaacauuaa

SEQ ID NO: 365876 - RNA, 19 nt, Marburg virus
ggaacuaauauuacuaaca

SEQ ID NO: 365877 - RNA, 22 nt, Marburg virus
ggagugaucuuuccgaguugau

SEQ ID NO: 365878 - RNA, 18 nt, Marburg virus
ggaucaagcauauuucau

SEQ ID NO: 365879 - RNA, 14 nt, Marburg virus
ggauccuauuacuu

SEQ ID NO: 365880 - RNA, 13 nt, Marburg virus
ggccuaaaugggu

SEQ ID NO: 365881 - RNA, 18 nt, Marburg virus
ggguuuacuagauuauau

SEQ ID NO: 365882 - RNA, 22 nt, Marburg virus
ggucaucagaucuauaaugggu

SEQ ID NO: 365883 - RNA, 16 nt, Marburg virus
ggugcacuauccuacu

SEQ ID NO: 365884 - RNA, 13 nt, Marburg virus
gguuaccuacuua

SEQ ID NO: 365885 - RNA, 19 nt, Marburg virus
gguuaccuacuuaucuacu

SEQ ID NO: 365886 - RNA, 20 nt, Marburg virus
gguuaccuacuuaucuacuu

SEQ ID NO: 365887 - RNA, 17 nt, Marburg virus
guauugauauugguaca

SEQ ID NO: 365888 - RNA, 18 nt, Marburg virus
guccucagaucacaguaa

SEQ ID NO: 365889 - RNA, 14 nt, Marburg virus
gucuuaagugugau

SEQ ID NO: 365890 - RNA, 14 nt, Marburg virus
gugaucaguauauu

SEQ ID NO: 365891 - RNA, 20 nt, Marburg virus
gugugauuuucaccuugaaa

SEQ ID NO: 365892 - RNA, 13 nt, Marburg virus
guuaccuacuuau

SEQ ID NO: 365893 - RNA, 14 nt, Marburg virus
guuuacuagauuau

SEQ ID NO: 365894 - RNA, 23 nt, Marburg virus
uaaacaauucuugcuuaguuuua

SEQ ID NO: 365895 - RNA, 18 nt, Marburg virus
uaaacaugacuugauuca

SEQ ID NO: 365896 - RNA, 20 nt, Marburg virus
uaaacauuucaaaagcauau

SEQ ID NO: 365897 - RNA, 14 nt, Marburg virus
uaaaugguuaauua

SEQ ID NO: 365898 - RNA, 16 nt, Marburg virus
uaaauuugaccaaagu

SEQ ID NO: 365899 - RNA, 17 nt, Marburg virus
uaacaaagaauauaccu

SEQ ID NO: 365900 - RNA, 18 nt, Marburg virus
uaacuuuuguugcaauuc

SEQ ID NO: 365901 - RNA, 22 nt, Marburg virus
uaagaaaaaccaaugauggaua

SEQ ID NO: 365902 - RNA, 17 nt, Marburg virus
uaagagugauuaaguuc

SEQ ID NO: 365903 - RNA, 18 nt, Marburg virus
uaagugaccccaaauuca

SEQ ID NO: 365904 - RNA, 17 nt, Marburg virus
uacaaagacacuaaaca

SEQ ID NO: 365905 - RNA, 23 nt, Marburg virus
uacccuugagagacaacuuuuga

SEQ ID NO: 365906 - RNA, 15 nt, Marburg virus
uacuaacuucaauaa

SEQ ID NO: 365907 - RNA, 22 nt, Marburg virus
uacuuugauccgauucguccuc

SEQ ID NO: 365908 - RNA, 17 nt, Marburg virus
uagaaaacauauuuauc

SEQ ID NO: 365909 - RNA, 20 nt, Marburg virus
uagaaaacauauuuauccuu

SEQ ID NO: 365910 - RNA, 12 nt, Marburg virus
uagaauuaccgu

SEQ ID NO: 365911 - RNA, 13 nt, Marburg virus
uaguuuaaccaca

SEQ ID NO: 365912 - RNA, 14 nt, Marburg virus
uaguuuaaccacau

SEQ ID NO: 365913 - RNA, 15 nt, Marburg virus
uaguuucaacucuua

SEQ ID NO: 365914 - RNA, 22 nt, Marburg virus
uaguuuuacuuugauuuacuaa

SEQ ID NO: 365915 - RNA, 13 nt, Marburg virus
uauaauggguuua

SEQ ID NO: 365916 - RNA, 19 nt, Marburg virus
uauaccuacccugauuuau

SEQ ID NO: 365917 - RNA, 16 nt, Marburg virus
uauagaggaacuaaua

SEQ ID NO: 365918 - RNA, 20 nt, Marburg virus
uauauuuuauaaaccaagca

SEQ ID NO: 365919 - RNA, 15 nt, Marburg virus
uauccuuuguugaua

SEQ ID NO: 365920 - RNA, 17 nt, Marburg virus
uaugacauaccauauau

SEQ ID NO: 365921 - RNA, 18 nt, Marburg virus
uaugacauaccauauauc

SEQ ID NO: 365922 - RNA, 15 nt, Marburg virus
uauucagugcuacaa

SEQ ID NO: 365923 - RNA, 17 nt, Marburg virus
uauugcgagacuugaac

SEQ ID NO: 365924 - RNA, 14 nt, Marburg virus
ucaaaucacuuuca

SEQ ID NO: 365925 - RNA, 15 nt, Marburg virus
ucaaguuuacugaag

SEQ ID NO: 365926 - RNA, 20 nt, Marburg virus
ucacaacuguugcauaucuu

SEQ ID NO: 365927 - RNA, 15 nt, Marburg virus
ucaccuuucuguuga

SEQ ID NO: 365928 - RNA, 18 nt, Marburg virus
ucauaauugguauugaua

SEQ ID NO: 365929 - RNA, 16 nt, Marburg virus
ucaucagaucuauaau

SEQ ID NO: 365930 - RNA, 24 nt, Marburg virus
uccuguauaacaaagaauauaccu

SEQ ID NO: 365931 - RNA, 15 nt, Marburg virus
ucuaaggaaaaucau

SEQ ID NO: 365932 - RNA, 18 nt, Marburg virus
ucuaaggaaaaucaugaa

SEQ ID NO: 365933 - RNA, 14 nt, Marburg virus
ucuaaucuacugaa

SEQ ID NO: 365934 - RNA, 13 nt, Marburg virus
ucuacuaacuuca

SEQ ID NO: 365935 - RNA, 19 nt, Marburg virus
ucucaaaccguacacaagu

SEQ ID NO: 365936 - RNA, 19 nt, Marburg virus
ucuuaaacuugaugaugca

SEQ ID NO: 365937 - RNA, 15 nt, Marburg virus
ucuuaagugugauuu

SEQ ID NO: 365938 - RNA, 20 nt, Marburg virus
ugaaaauguuauugauugag

SEQ ID NO: 365939 - RNA, 16 nt, Marburg virus
ugaaaguugacaauca

SEQ ID NO: 365940 - RNA, 12 nt, Marburg virus
ugaagaacauua

SEQ ID NO: 365941 - RNA, 22 nt, Marburg virus
ugagagacaacuuuugacacua

SEQ ID NO: 365942 - RNA, 22 nt, Marburg virus
ugauacccuugagagacaacuu

SEQ ID NO: 365943 - RNA, 13 nt, Marburg virus
ugauagauuaauc

SEQ ID NO: 365944 - RNA, 16 nt, Marburg virus
ugauagauuaauccuu

SEQ ID NO: 365945 - RNA, 21 nt, Marburg virus
ugauuuacuaacauauaucau

SEQ ID NO: 365946 - RNA, 14 nt, Marburg virus
ugauuucaauguua

SEQ ID NO: 365947 - RNA, 17 nt, Marburg virus
ugcaagauguaaucucu

SEQ ID NO: 365948 - RNA, 22 nt, Marburg virus
ugcagcucuguuucaccuuucu

SEQ ID NO: 365949 - RNA, 15 nt, Marburg virus
ugcuaaguaaacuca

SEQ ID NO: 365950 - RNA, 19 nt, Marburg virus
ugggcaaaacgugacuaga

SEQ ID NO: 365951 - RNA, 21 nt, Marburg virus
uguauaacaaagaauauaccu

SEQ ID NO: 365952 - RNA, 13 nt, Marburg virus
uguuaucauaguc

SEQ ID NO: 365953 - RNA, 12 nt, Marburg virus
uguugauuucaa

SEQ ID NO: 365954 - RNA, 16 nt, Marburg virus
uguuugaaaguugaca

SEQ ID NO: 365955 - RNA, 18 nt, Marburg virus
uuaacuuuuguugcaauu

SEQ ID NO: 365956 - RNA, 22 nt, Marburg virus
uuaagaaucaacuaacaacaua

SEQ ID NO: 365957 - RNA, 23 nt, Marburg virus
uuaauaaacaugacuugauucag

SEQ ID NO: 365958 - RNA, 16 nt, Marburg virus
uuaauuauccuguaua

SEQ ID NO: 365959 - RNA, 17 nt, Marburg virus
uuaauuauccuguauaa

SEQ ID NO: 365960 - RNA, 21 nt, Marburg virus
uuaauucacgaaaauaaucua

SEQ ID NO: 365961 - RNA, 18 nt, Marburg virus
uuacacaagauaaucuua

SEQ ID NO: 365962 - RNA, 19 nt, Marburg virus
uuacacaagauaaucuuau

SEQ ID NO: 365963 - RNA, 22 nt, Marburg virus
uuaccuacuuaucuacuuugau

SEQ ID NO: 365964 - RNA, 15 nt, Marburg virus
uuacuuguuacuauu

SEQ ID NO: 365965 - RNA, 15 nt, Marburg virus
uuaggauccuauuac

SEQ ID NO: 365966 - RNA, 14 nt, Mason-Pfizer monkey virus
cucuguuugcucua

SEQ ID NO: 365967 - RNA, 19 nt, Mason-Pfizer monkey virus
cucuguuugcucuagcucc

SEQ ID NO: 365968 - RNA, 17 nt, Mason-Pfizer monkey virus
cuggaugaugucuuggc

SEQ ID NO: 365969 - RNA, 17 nt, Mason-Pfizer monkey virus
cuguuugcucuagcucc

SEQ ID NO: 365970 - RNA, 20 nt, Mason-Pfizer monkey virus
cuuguucccuucaauuccca

SEQ ID NO: 365971 - RNA, 13 nt, Mason-Pfizer monkey virus
gacagccaaugac

SEQ ID NO: 365972 - RNA, 14 nt, Mason-Pfizer monkey virus
gacagccaaugacg

SEQ ID NO: 365973 - RNA, 22 nt, Mason-Pfizer monkey virus
gacauuucucacuaaccuaaga

SEQ ID NO: 365974 - RNA, 20 nt, Mason-Pfizer monkey virus
gacggguaagagagugacau

SEQ ID NO: 365975 - RNA, 15 nt, Mason-Pfizer monkey virus
gacuggaugaugucu

SEQ ID NO: 365976 - RNA, 20 nt, Mason-Pfizer monkey virus
gagacuugaucagaacacug

SEQ ID NO: 365977 - RNA, 20 nt, Mason-Pfizer monkey virus
gagggccgucaaagcuacug

SEQ ID NO: 365978 - RNA, 17 nt, Mason-Pfizer monkey virus
gccggcgcgaauguuuc

SEQ ID NO: 365979 - RNA, 17 nt, Mason-Pfizer monkey virus
gccgucaaagcuacugc

SEQ ID NO: 365980 - RNA, 13 nt, Mason-Pfizer monkey virus
gccucuguuugcu

SEQ ID NO: 365981 - RNA, 16 nt, Mason-Pfizer monkey virus
gccucuguuugcucua

SEQ ID NO: 365982 - RNA, 23 nt, Mason-Pfizer monkey virus
gcgaauguuucccgcucuugggc

SEQ ID NO: 365983 - RNA, 12 nt, Mason-Pfizer monkey virus
gcucugcuacug

SEQ ID NO: 365984 - RNA, 23 nt, Mason-Pfizer monkey virus
gcugcccggaugaugucuuggcc

SEQ ID NO: 365985 - RNA, 15 nt, Mason-Pfizer monkey virus
gcuuuccuugcucug

SEQ ID NO: 365986 - RNA, 22 nt, Mason-Pfizer monkey virus
gcuuuccuugcucugcuacuga

SEQ ID NO: 365987 - RNA, 17 nt, Mason-Pfizer monkey virus
ggccucuguuugcucua

SEQ ID NO: 365988 - RNA, 15 nt, Mason-Pfizer monkey virus
gguaagagagugaca

SEQ ID NO: 365989 - RNA, 14 nt, Mason-Pfizer monkey virus
guaagagagugaca

SEQ ID NO: 365990 - RNA, 20 nt, Mason-Pfizer monkey virus
guauauaaggcaacacauug

SEQ ID NO: 365991 - RNA, 20 nt, Mason-Pfizer monkey virus
guaucacuccaaccuaagac

SEQ ID NO: 365992 - RNA, 22 nt, Mason-Pfizer monkey virus
gucaaagcuacugccuaaucca

SEQ ID NO: 365993 - RNA, 20 nt, Mason-Pfizer monkey virus
gugacauuucucacuaaccu

SEQ ID NO: 365994 - RNA, 19 nt, Mason-Pfizer monkey virus
gugcugcccggaugauguc

SEQ ID NO: 365995 - RNA, 20 nt, Mason-Pfizer monkey virus
gugcugcccggaugaugucu

SEQ ID NO: 365996 - RNA, 14 nt, Mason-Pfizer monkey virus
uaagagagugacau

SEQ ID NO: 365997 - RNA, 18 nt, Mason-Pfizer monkey virus
uaagagagugacauuucu

SEQ ID NO: 365998 - RNA, 20 nt, Mason-Pfizer monkey virus
uaauuaaaaagggugacaug

SEQ ID NO: 365999 - RNA, 20 nt, Mason-Pfizer monkey virus
uagugacaagaaauguauca

SEQ ID NO: 366000 - RNA, 19 nt, Mason-Pfizer monkey virus
uaucacuccaaccuaagac

SEQ ID NO: 366001 - RNA, 22 nt, Mason-Pfizer monkey virus
uaucuuuccccucccacuugcu

SEQ ID NO: 366002 - RNA, 16 nt, Mason-Pfizer monkey virus
ucaauucccacucccu

SEQ ID NO: 366003 - RNA, 18 nt, Mason-Pfizer monkey virus
ucacuccaaccuaagaca

SEQ ID NO: 366004 - RNA, 14 nt, Mason-Pfizer monkey virus
uccaaccuaagaca

SEQ ID NO: 366005 - RNA, 15 nt, Mason-Pfizer monkey virus
uccaaccuaagacag

SEQ ID NO: 366006 - RNA, 16 nt, Mason-Pfizer monkey virus
uccuacuguugauccc

SEQ ID NO: 366007 - RNA, 23 nt, Mason-Pfizer monkey virus
uccuugcucugcuacugagcaug

SEQ ID NO: 366008 - RNA, 21 nt, Mason-Pfizer monkey virus
ucuaccgacuggaugaugucu

SEQ ID NO: 366009 - RNA, 23 nt, Mason-Pfizer monkey virus
ucuaccgacuggaugaugucuug

SEQ ID NO: 366010 - RNA, 14 nt, Mason-Pfizer monkey virus
ucucacuaaccuaa

SEQ ID NO: 366011 - RNA, 16 nt, Mason-Pfizer monkey virus
ucucacuaaccuaaga

SEQ ID NO: 366012 - RNA, 20 nt, Mason-Pfizer monkey virus
ucuucuccgucuuacuuucc

SEQ ID NO: 366013 - RNA, 23 nt, Mason-Pfizer monkey virus
ugacauuucucacuaaccuaaga

SEQ ID NO: 366014 - RNA, 21 nt, Mason-Pfizer monkey virus
ugacggguaagagagugacau

SEQ ID NO: 366015 - RNA, 19 nt, Mason-Pfizer monkey virus
ugacggguaauagugacaa

SEQ ID NO: 366016 - RNA, 13 nt, Mason-Pfizer monkey virus
ugaugucuuggcc

SEQ ID NO: 366017 - RNA, 17 nt, Mason-Pfizer monkey virus
ugaugucuuggccucug

SEQ ID NO: 366018 - RNA, 15 nt, Mason-Pfizer monkey virus
ugcccggaugauguc

SEQ ID NO: 366019 - RNA, 21 nt, Mason-Pfizer monkey virus
ugcccggaugaugucuuggcc

SEQ ID NO: 366020 - RNA, 21 nt, Mason-Pfizer monkey virus
ugccuaauccaaugacgggua

SEQ ID NO: 366021 - RNA, 17 nt, Mason-Pfizer monkey virus
ugcugcccggaugaugu

SEQ ID NO: 366022 - RNA, 19 nt, Mason-Pfizer monkey virus
ugcugcccggaugaugucu

SEQ ID NO: 366023 - RNA, 23 nt, Mason-Pfizer monkey virus
uggaugaugucuuggccucuguu

SEQ ID NO: 366024 - RNA, 19 nt, Mason-Pfizer monkey virus
uguaucacuccaaccuaag

SEQ ID NO: 366025 - RNA, 14 nt, Mason-Pfizer monkey virus
ugucuuggccucug

SEQ ID NO: 366026 - RNA, 24 nt, Mason-Pfizer monkey virus
ugucuuggccucuguuugcucuag

SEQ ID NO: 366027 - RNA, 22 nt, Mason-Pfizer monkey virus
uucccgccggcgcgaauguuuc

SEQ ID NO: 366028 - RNA, 22 nt, Mason-Pfizer monkey virus
uucccuucaauucccacucccu

SEQ ID NO: 366029 - RNA, 14 nt, Mason-Pfizer monkey virus
uucguuuucugucc

SEQ ID NO: 366030 - RNA, 15 nt, Mason-Pfizer monkey virus
uugcucugcuacuga

SEQ ID NO: 366031 - RNA, 16 nt, Mason-Pfizer monkey virus
uugcucugcuacugag

SEQ ID NO: 366032 - RNA, 19 nt, Mason-Pfizer monkey virus
uuggccucuguuugcucua

SEQ ID NO: 366033 - RNA, 17 nt, Mason-Pfizer monkey virus
uugugucucuuguuccc

SEQ ID NO: 366034 - RNA, 13 nt, Mason-Pfizer monkey virus
uuuccuugcucug

SEQ ID NO: 366035 - RNA, 18 nt, Mason-Pfizer monkey virus
uuuccuugcucugcuacu

SEQ ID NO: 366036 - RNA, 16 nt, Mason-Pfizer monkey virus
uuucucacuaaccuaa

SEQ ID NO: 366037 - RNA, 14 nt, Mason-Pfizer monkey virus
aaaugagacuugau

SEQ ID NO: 366038 - RNA, 15 nt, Mason-Pfizer monkey virus
aacacugucuugucu

SEQ ID NO: 366039 - RNA, 21 nt, Mason-Pfizer monkey virus
aacacugucuugucuccauuu

SEQ ID NO: 366040 - RNA, 13 nt, Mason-Pfizer monkey virus
aacccacgacccu

SEQ ID NO: 366041 - RNA, 13 nt, Mason-Pfizer monkey virus
aagagucccaugc

SEQ ID NO: 366042 - RNA, 13 nt, Mason-Pfizer monkey virus
aagcuacugccua

SEQ ID NO: 366043 - RNA, 23 nt, Mason-Pfizer monkey virus
aagcuacugccuaauccaaugac

SEQ ID NO: 366044 - RNA, 22 nt, Mason-Pfizer monkey virus
aauagugacaagaaauguauca

SEQ ID NO: 366045 - RNA, 17 nt, Mason-Pfizer monkey virus
aaugacggguaagagag

SEQ ID NO: 366046 - RNA, 23 nt, Mason-Pfizer monkey virus
aaugacggguaagagagugacau

SEQ ID NO: 366047 - RNA, 15 nt, Mason-Pfizer monkey virus
aaugagacuugauca

SEQ ID NO: 366048 - RNA, 21 nt, Mason-Pfizer monkey virus
aauguaucacuccaaccuaag

SEQ ID NO: 366049 - RNA, 14 nt, Mason-Pfizer monkey virus
aauucccacucccu

SEQ ID NO: 366050 - RNA, 13 nt, Mason-Pfizer monkey virus
acagccaaugacg

SEQ ID NO: 366051 - RNA, 15 nt, Mason-Pfizer monkey virus
acauugccaccauua

SEQ ID NO: 366052 - RNA, 24 nt, Mason-Pfizer monkey virus
acauuucucacuaaccuaagacag

SEQ ID NO: 366053 - RNA, 17 nt, Mason-Pfizer monkey virus
accgacuggaugauguc

SEQ ID NO: 366054 - RNA, 23 nt, Mason-Pfizer monkey virus
accgacuggaugaugucuuggcc

SEQ ID NO: 366055 - RNA, 12 nt, Mason-Pfizer monkey virus
acuaaccuaaga

SEQ ID NO: 366056 - RNA, 13 nt, Mason-Pfizer monkey virus
acuaaccuaagac

SEQ ID NO: 366057 - RNA, 15 nt, Mason-Pfizer monkey virus
acuaaccuaagacag

SEQ ID NO: 366058 - RNA, 18 nt, Mason-Pfizer monkey virus
acuaaccuaagacaggag

SEQ ID NO: 366059 - RNA, 14 nt, Mason-Pfizer monkey virus
acuccaaccuaaga

SEQ ID NO: 366060 - RNA, 17 nt, Mason-Pfizer monkey virus
acuccaaccuaagacag

SEQ ID NO: 366061 - RNA, 13 nt, Mason-Pfizer monkey virus
acucccuccucca

SEQ ID NO: 366062 - RNA, 22 nt, Mason-Pfizer monkey virus
acugagcaugcgcccaguaucu

SEQ ID NO: 366063 - RNA, 14 nt, Mason-Pfizer monkey virus
acuggaugaugucu

SEQ ID NO: 366064 - RNA, 17 nt, Mason-Pfizer monkey virus
acuggaugaugucuugg

SEQ ID NO: 366065 - RNA, 21 nt, Mason-Pfizer monkey virus
acuggaugaugucuuggccuc

SEQ ID NO: 366066 - RNA, 13 nt, Mason-Pfizer monkey virus
acugucuugucuc

SEQ ID NO: 366067 - RNA, 18 nt, Mason-Pfizer monkey virus
agaaauguaucacuccaa

SEQ ID NO: 366068 - RNA, 19 nt, Mason-Pfizer monkey virus
agacuggacagccaaugac

SEQ ID NO: 366069 - RNA, 19 nt, Mason-Pfizer monkey virus
agacuugaucagaacacug

SEQ ID NO: 366070 - RNA, 21 nt, Mason-Pfizer monkey virus
agacuugaucagaacacuguc

SEQ ID NO: 366071 - RNA, 16 nt, Mason-Pfizer monkey virus
agagugacauuucuca

SEQ ID NO: 366072 - RNA, 23 nt, Mason-Pfizer monkey virus
aggagggccgucaaagcuacugc

SEQ ID NO: 366073 - RNA, 14 nt, Mason-Pfizer monkey virus
agguuccuacuguu

SEQ ID NO: 366074 - RNA, 22 nt, Mason-Pfizer monkey virus
agucccaugcucuaccgacugg

SEQ ID NO: 366075 - RNA, 15 nt, Mason-Pfizer monkey virus
agugacauuucucac

SEQ ID NO: 366076 - RNA, 18 nt, Mason-Pfizer monkey virus
aguuuucguuuucugucc

SEQ ID NO: 366077 - RNA, 11 nt, Mason-Pfizer monkey virus
aucacuccaac

SEQ ID NO: 366078 - RNA, 21 nt, Mason-Pfizer monkey virus
aucacuccaaccuaagacagg

SEQ ID NO: 366079 - RNA, 22 nt, Mason-Pfizer monkey virus
aucagaacacugucuugucucc

SEQ ID NO: 366080 - RNA, 22 nt, Mason-Pfizer monkey virus
augacggguaagagagugacau

SEQ ID NO: 366081 - RNA, 12 nt, Mason-Pfizer monkey virus
augaugucuugg

SEQ ID NO: 366082 - RNA, 20 nt, Mason-Pfizer monkey virus
augcucuaccgacuggauga

SEQ ID NO: 366083 - RNA, 21 nt, Mason-Pfizer monkey virus
auguaucacuccaaccuaaga

SEQ ID NO: 366084 - RNA, 18 nt, Mason-Pfizer monkey virus
auuuccugguucuucucc

SEQ ID NO: 366085 - RNA, 18 nt, Mason-Pfizer monkey virus
auuucucacuaaccuaag

SEQ ID NO: 366086 - RNA, 15 nt, Mason-Pfizer monkey virus
caaagcuacugccua

SEQ ID NO: 366087 - RNA, 12 nt, Mason-Pfizer monkey virus
caaccuaagaca

SEQ ID NO: 366088 - RNA, 14 nt, Mason-Pfizer monkey virus
caaccuaagacagg

SEQ ID NO: 366089 - RNA, 19 nt, Mason-Pfizer monkey virus
caagaaauguaucacucca

SEQ ID NO: 366090 - RNA, 22 nt, Mason-Pfizer monkey virus
caaugacggguaagagagugac

SEQ ID NO: 366091 - RNA, 20 nt, Mason-Pfizer monkey virus
caaugacggguaauagugac

SEQ ID NO: 366092 - RNA, 16 nt, Mason-Pfizer monkey virus
caauucccacucccuc

SEQ ID NO: 366093 - RNA, 19 nt, Mason-Pfizer monkey virus
cacuccaaccuaagacagg

SEQ ID NO: 366094 - RNA, 17 nt, Mason-Pfizer monkey virus
caugcgcccaguaucuu

SEQ ID NO: 366095 - RNA, 20 nt, Mason-Pfizer monkey virus
caugcgcccaguaucuuucc

SEQ ID NO: 366096 - RNA, 17 nt, Mason-Pfizer monkey virus
cauuucucacuaaccua

SEQ ID NO: 366097 - RNA, 22 nt, Mason-Pfizer monkey virus
cauuucucacuaaccuaagaca

SEQ ID NO: 366098 - RNA, 12 nt, Mason-Pfizer monkey virus
ccaaugacgggu

SEQ ID NO: 366099 - RNA, 17 nt, Mason-Pfizer monkey virus
ccacuugcugccugugu

SEQ ID NO: 366100 - RNA, 19 nt, Mason-Pfizer monkey virus
ccagguuccuacuguugau

SEQ ID NO: 366101 - RNA, 23 nt, Mason-Pfizer monkey virus
ccaugcucuaccgacuggaugau

SEQ ID NO: 366102 - RNA, 19 nt, Mason-Pfizer monkey virus
ccauuaaaugagacuugau

SEQ ID NO: 366103 - RNA, 20 nt, Mason-Pfizer monkey virus
cccgcgggucgggacaguuu

SEQ ID NO: 366104 - RNA, 14 nt, Mason-Pfizer monkey virus
cccggaugaugucu

SEQ ID NO: 366105 - RNA, 17 nt, Mason-Pfizer monkey virus
ccgacuggaugaugucu

SEQ ID NO: 366106 - RNA, 21 nt, Mason-Pfizer monkey virus
ccgacuggaugaugucuuggc

SEQ ID NO: 366107 - RNA, 13 nt, Mason-Pfizer monkey virus
ccgagggaugugu

SEQ ID NO: 366108 - RNA, 13 nt, Mason-Pfizer monkey virus
ccucuguuugcuc

SEQ ID NO: 366109 - RNA, 15 nt, Mason-Pfizer monkey virus
cgagggaugugucuu

SEQ ID NO: 366110 - RNA, 16 nt, Mason-Pfizer monkey virus
cggaugaugucuuggc

SEQ ID NO: 366111 - RNA, 23 nt, Mason-Pfizer monkey virus
cggaugaugucuuggccucuguu

SEQ ID NO: 366112 - RNA, 16 nt, Mason-Pfizer monkey virus
cggcgcgaauguuucc

SEQ ID NO: 366113 - RNA, 15 nt, Mason-Pfizer monkey virus
cggguaauagugaca

SEQ ID NO: 366114 - RNA, 23 nt, Mason-Pfizer monkey virus
cgugcugcccggaugaugucuug

SEQ ID NO: 366115 - RNA, 19 nt, Mason-Pfizer monkey virus
cguggcuuuccuugcucug

SEQ ID NO: 366116 - RNA, 20 nt, Mason-Pfizer monkey virus
cuacugccuaauccaaugac

SEQ ID NO: 366117 - RNA, 15 nt, Mason-Pfizer monkey virus
cucacuaaccuaaga

SEQ ID NO: 366118 - RNA, 22 nt, Mason-Pfizer monkey virus
aaauguaucacuccaaccuaag

SEQ ID NO: 366119 - RNA, 23 nt, Mason-Pfizer monkey virus
aaauguaucacuccaaccuaaga

SEQ ID NO: 366120 - RNA, 13 nt, Mason-Pfizer monkey virus
aagaaauguauca

SEQ ID NO: 366121 - RNA, 23 nt, Mason-Pfizer monkey virus
aagaaauguaucacuccaaccua

SEQ ID NO: 366122 - RNA, 17 nt, Mason-Pfizer monkey virus
aagagucccaugcucua

SEQ ID NO: 366123 - RNA, 18 nt, Mason-Pfizer monkey virus
aagagucccaugcucuac

SEQ ID NO: 366124 - RNA, 15 nt, Mason-Pfizer monkey virus
aaugacggguaauag

SEQ ID NO: 366125 - RNA, 15 nt, Mason-Pfizer monkey virus
aauguaucacuccaa

SEQ ID NO: 366126 - RNA, 21 nt, Mason-Pfizer monkey virus
aauuaaaaagggugacauguc

SEQ ID NO: 366127 - RNA, 12 nt, Mason-Pfizer monkey virus
acagccaaugac

SEQ ID NO: 366128 - RNA, 20 nt, Mason-Pfizer monkey virus
acauuucucacuaaccuaag

SEQ ID NO: 366129 - RNA, 14 nt, Mason-Pfizer monkey virus
acccacgacccugg

SEQ ID NO: 366130 - RNA, 19 nt, Mason-Pfizer monkey virus
acggguaagagagugacau

SEQ ID NO: 366131 - RNA, 17 nt, Mason-Pfizer monkey virus
acggguaauagugacaa

SEQ ID NO: 366132 - RNA, 16 nt, Mason-Pfizer monkey virus
acuaaccuaagacagg

SEQ ID NO: 366133 - RNA, 12 nt, Mason-Pfizer monkey virus
acuccaaccuaa

SEQ ID NO: 366134 - RNA, 13 nt, Mason-Pfizer monkey virus
acuccaaccuaag

SEQ ID NO: 366135 - RNA, 15 nt, Mason-Pfizer monkey virus
acuccaaccuaagac

SEQ ID NO: 366136 - RNA, 15 nt, Mason-Pfizer monkey virus
acugccuaauccaau

SEQ ID NO: 366137 - RNA, 18 nt, Mason-Pfizer monkey virus
acugccuaauccaaugac

SEQ ID NO: 366138 - RNA, 19 nt, Mason-Pfizer monkey virus
acugccuaauccaaugacg

SEQ ID NO: 366139 - RNA, 17 nt, Mason-Pfizer monkey virus
acuggacagccaaugac

SEQ ID NO: 366140 - RNA, 19 nt, Mason-Pfizer monkey virus
acuggaugaugucuuggcc

SEQ ID NO: 366141 - RNA, 12 nt, Mason-Pfizer monkey virus
acugucuugucu

SEQ ID NO: 366142 - RNA, 14 nt, Mason-Pfizer monkey virus
acugucuugucucc

SEQ ID NO: 366143 - RNA, 15 nt, Mason-Pfizer monkey virus
acugucuugucucca

SEQ ID NO: 366144 - RNA, 23 nt, Mason-Pfizer monkey virus
acuugaucagaacacugucuugu

SEQ ID NO: 366145 - RNA, 21 nt, Mason-Pfizer monkey virus
acuugcugccuguguauauaa

SEQ ID NO: 366146 - RNA, 22 nt, Mason-Pfizer monkey virus
agacuugaucagaacacugucu

SEQ ID NO: 366147 - RNA, 23 nt, Mason-Pfizer monkey virus
agacuugaucagaacacugucuu

SEQ ID NO: 366148 - RNA, 12 nt, Mason-Pfizer monkey virus
agagagugacau

SEQ ID NO: 366149 - RNA, 23 nt, Mason-Pfizer monkey virus
agccgugcugcccggaugauguc

SEQ ID NO: 366150 - RNA, 18 nt, Mason-Pfizer monkey virus
agcuacugccuaauccaa

SEQ ID NO: 366151 - RNA, 17 nt, Mason-Pfizer monkey virus
aggcaacacauugccac

SEQ ID NO: 366152 - RNA, 14 nt, Mason-Pfizer monkey virus
agggugacaugucc

SEQ ID NO: 366153 - RNA, 16 nt, Mason-Pfizer monkey virus
agguuccuacuguuga

SEQ ID NO: 366154 - RNA, 14 nt, Mason-Pfizer monkey virus
agucccaugcucua

SEQ ID NO: 366155 - RNA, 16 nt, Mason-Pfizer monkey virus
agucccaugcucuacc

SEQ ID NO: 366156 - RNA, 14 nt, Mason-Pfizer monkey virus
agugacauuucuca

SEQ ID NO: 366157 - RNA, 20 nt, Mason-Pfizer monkey virus
aucacuccaaccuaagacag

SEQ ID NO: 366158 - RNA, 21 nt, Mason-Pfizer monkey virus
augacggguaauagugacaag

SEQ ID NO: 366159 - RNA, 14 nt, Mason-Pfizer monkey virus
augaugucuuggcc

SEQ ID NO: 366160 - RNA, 15 nt, Mason-Pfizer monkey virus
augaugucuuggccu

SEQ ID NO: 366161 - RNA, 20 nt, Mason-Pfizer monkey virus
auguaucacuccaaccuaag

SEQ ID NO: 366162 - RNA, 13 nt, Mason-Pfizer monkey virus
auucccacucccu

SEQ ID NO: 366163 - RNA, 19 nt, Mason-Pfizer monkey virus
auuucucacuaaccuaaga

SEQ ID NO: 366164 - RNA, 21 nt, Mason-Pfizer monkey virus
caagaaauguaucacuccaac

SEQ ID NO: 366165 - RNA, 22 nt, Mason-Pfizer monkey virus
caaugacggguaauagugacaa

SEQ ID NO: 366166 - RNA, 17 nt, Mason-Pfizer monkey virus
cacuaaccuaagacagg

SEQ ID NO: 366167 - RNA, 19 nt, Mason-Pfizer monkey virus
cagaacacugucuugucuc

SEQ ID NO: 366168 - RNA, 18 nt, Mason-Pfizer monkey virus
cauuaaaugagacuugau

SEQ ID NO: 366169 - RNA, 22 nt, Mason-Pfizer monkey virus
ccaccauuaaaugagacuugau

SEQ ID NO: 366170 - RNA, 20 nt, Mason-Pfizer monkey virus
ccaugcucuaccgacuggau

SEQ ID NO: 366171 - RNA, 19 nt, Mason-Pfizer monkey virus
cccgccggcgcgaauguuu

SEQ ID NO: 366172 - RNA, 13 nt, Mason-Pfizer monkey virus
cccggaugauguc

SEQ ID NO: 366173 - RNA, 22 nt, Mason-Pfizer monkey virus
ccgacuggaugaugucuuggcc

SEQ ID NO: 366174 - RNA, 18 nt, Mason-Pfizer monkey virus
ccgugcugcccggaugau

SEQ ID NO: 366175 - RNA, 18 nt, Mason-Pfizer monkey virus
ccuaauccaaugacgggu

SEQ ID NO: 366176 - RNA, 12 nt, Mason-Pfizer monkey virus
ccucuguuugcu

SEQ ID NO: 366177 - RNA, 15 nt, Mason-Pfizer monkey virus
ccucuguuugcucua

SEQ ID NO: 366178 - RNA, 17 nt, Mason-Pfizer monkey virus
ccuugcucugcuacuga

SEQ ID NO: 366179 - RNA, 15 nt, Mason-Pfizer monkey virus
cgcccaguaucuuuc

SEQ ID NO: 366180 - RNA, 17 nt, Mason-Pfizer monkey virus
cggaugaugucuuggcc

SEQ ID NO: 366181 - RNA, 17 nt, Mason-Pfizer monkey virus
cggguaagagagugaca

SEQ ID NO: 366182 - RNA, 23 nt, Mason-Pfizer monkey virus
cggguaagagagugacauuucuc

SEQ ID NO: 366183 - RNA, 15 nt, Mason-Pfizer monkey virus
cuaaccuaagacagg

SEQ ID NO: 366184 - RNA, 13 nt, Mason-Pfizer monkey virus
cuaauccaaugac

SEQ ID NO: 366185 - RNA, 13 nt, Mason-Pfizer monkey virus
cuaccgacuggau

SEQ ID NO: 366186 - RNA, 19 nt, Mason-Pfizer monkey virus
cuaccgacuggaugauguc

SEQ ID NO: 366187 - RNA, 22 nt, Mason-Pfizer monkey virus
cuaccgacuggaugaugucuug

SEQ ID NO: 366188 - RNA, 16 nt, Mason-Pfizer monkey virus
cuagacuggacagcca

SEQ ID NO: 366189 - RNA, 12 nt, Mason-Pfizer monkey virus
cuagcuccaugu

SEQ ID NO: 366190 - RNA, 14 nt, Mason-Pfizer monkey virus
cuagcuccauguua

SEQ ID NO: 366191 - RNA, 13 nt, Mason-Pfizer monkey virus
cuccaaccuaaga

SEQ ID NO: 366192 - RNA, 17 nt, Mason-Pfizer monkey virus
cuccaaccuaagacagg

SEQ ID NO: 366193 - RNA, 18 nt, Mason-Pfizer monkey virus
cugcccggaugaugucuu

SEQ ID NO: 366194 - RNA, 19 nt, Mason-Pfizer monkey virus
cugcccggaugaugucuug

SEQ ID NO: 366195 - RNA, 15 nt, Mason-Pfizer monkey virus
cuggaugaugucuug

SEQ ID NO: 366196 - RNA, 23 nt, Mason-Pfizer monkey virus
cugggauuaagagucccaugcuc

SEQ ID NO: 366197 - RNA, 16 nt, Mason-Pfizer monkey virus
cuguuugcucuagcuc

SEQ ID NO: 366198 - RNA, 18 nt, Mason-Pfizer monkey virus
cuucaauucccacucccu

SEQ ID NO: 366199 - RNA, 16 nt, Mason-Pfizer monkey virus
gaaauguaucacucca

SEQ ID NO: 366200 - RNA, 23 nt, Mason-Pfizer monkey virus
gacauuucucacuaaccuaagac

SEQ ID NO: 366201 - RNA, 18 nt, Mason-Pfizer monkey virus
gacggguaauagugacaa

SEQ ID NO: 366202 - RNA, 17 nt, Mason-Pfizer monkey virus
gacuggaugaugucuug

SEQ ID NO: 366203 - RNA, 19 nt, Mason-Pfizer monkey virus
gagcuagacuggacagcca

SEQ ID NO: 366204 - RNA, 12 nt, Mason-Pfizer monkey virus
gaugucuuggcc

SEQ ID NO: 366205 - RNA, 18 nt, Mason-Pfizer monkey virus
gcuacugccuaauccaau

SEQ ID NO: 366206 - RNA, 19 nt, Mason-Pfizer monkey virus
gcuagacuggacagccaau

SEQ ID NO: 366207 - RNA, 23 nt, Mason-Pfizer monkey virus
gcucuaccgacuggaugaugucu

SEQ ID NO: 366208 - RNA, 20 nt, Mason-Pfizer monkey virus
gcugcccggaugaugucuug

SEQ ID NO: 366209 - RNA, 23 nt, Mason-Pfizer monkey virus
gcuuacguggcuuuccuugcucu

SEQ ID NO: 366210 - RNA, 17 nt, Mason-Pfizer monkey virus
ggaugaugucuuggccu

SEQ ID NO: 366211 - RNA, 15 nt, Mason-Pfizer monkey virus
ggcaacacauugcca

SEQ ID NO: 366212 - RNA, 18 nt, Mason-Pfizer monkey virus
ggccucuguuugcucuag

SEQ ID NO: 366213 - RNA, 16 nt, Mason-Pfizer monkey virus
ggcuuuccuugcucug

SEQ ID NO: 366214 - RNA, 16 nt, Mason-Pfizer monkey virus
gguaagagagugacau

SEQ ID NO: 366215 - RNA, 13 nt, Mason-Pfizer monkey virus
gguaauagugaca

SEQ ID NO: 366216 - RNA, 15 nt, Mason-Pfizer monkey virus
guaagagagugacau

SEQ ID NO: 366217 - RNA, 13 nt, Mason-Pfizer monkey virus
guaauagugacaa

SEQ ID NO: 366218 - RNA, 23 nt, Mason-Pfizer monkey virus
guauauaaggcaacacauugcca

SEQ ID NO: 366219 - RNA, 19 nt, Mason-Pfizer monkey virus
guaucacuccaaccuaaga

SEQ ID NO: 366220 - RNA, 17 nt, Mason-Pfizer monkey virus
gucccaugcucuaccga

SEQ ID NO: 366221 - RNA, 18 nt, Mason-Pfizer monkey virus
guggcuuuccuugcucug

SEQ ID NO: 366222 - RNA, 13 nt, Mason-Pfizer monkey virus
gugucucuuguuc

SEQ ID NO: 366223 - RNA, 12 nt, Mason-Pfizer monkey virus
guuccuacuguu

SEQ ID NO: 366224 - RNA, 18 nt, Mason-Pfizer monkey virus
uaaaaagggugacauguc

SEQ ID NO: 366225 - RNA, 12 nt, Mason-Pfizer monkey virus
uaaccuaagaca

SEQ ID NO: 366226 - RNA, 14 nt, Mason-Pfizer monkey virus
uaaccuaagacagg

SEQ ID NO: 366227 - RNA, 12 nt, Mason-Pfizer monkey virus
uaauagugacaa

SEQ ID NO: 366228 - RNA, 13 nt, Mason-Pfizer monkey virus
uaauccaaugacg

SEQ ID NO: 366229 - RNA, 17 nt, Mason-Pfizer monkey virus
uaauccaaugacgggua

SEQ ID NO: 366230 - RNA, 18 nt, Mason-Pfizer monkey virus
uaccgacuggaugauguc

SEQ ID NO: 366231 - RNA, 22 nt, Mason-Pfizer monkey virus
uacguggcuuuccuugcucugc

SEQ ID NO: 366232 - RNA, 20 nt, Mason-Pfizer monkey virus
uauaaggcaacacauugcca

SEQ ID NO: 366233 - RNA, 15 nt, Mason-Pfizer monkey virus
uaucacuccaaccua

SEQ ID NO: 366234 - RNA, 18 nt, Mason-Pfizer monkey virus
uaucacuccaaccuaaga

SEQ ID NO: 366235 - RNA, 22 nt, Mason-Pfizer monkey virus
uaucacuccaaccuaagacagg

SEQ ID NO: 366236 - RNA, 13 nt, Mason-Pfizer monkey virus
ucaaagcuacugc

SEQ ID NO: 366237 - RNA, 17 nt, Mason-Pfizer monkey virus
ucacuaaccuaagacag

SEQ ID NO: 366238 - RNA, 23 nt, Mason-Pfizer monkey virus
uccaaugacggguaauagugaca

SEQ ID NO: 366239 - RNA, 12 nt, Mason-Pfizer monkey virus
ucccaugcucua

SEQ ID NO: 366240 - RNA, 16 nt, Mason-Pfizer monkey virus
uccgagggaugugucu

SEQ ID NO: 366241 - RNA, 14 nt, Mason-Pfizer monkey virus
uccuugcucugcua

SEQ ID NO: 366242 - RNA, 19 nt, Mason-Pfizer monkey virus
ucuaccgacuggaugaugu

SEQ ID NO: 366243 - RNA, 23 nt, Mason-Pfizer monkey virus
ugacaagaaauguaucacuccaa

SEQ ID NO: 366244 - RNA, 22 nt, Mason-Pfizer monkey virus
ugacauuucucacuaaccuaag

SEQ ID NO: 366245 - RNA, 14 nt, Mason-Pfizer monkey virus
ugaucagaacacug

SEQ ID NO: 366246 - RNA, 16 nt, Mason-Pfizer monkey virus
ugaucagaacacuguc

SEQ ID NO: 366247 - RNA, 20 nt, Mason-Pfizer monkey virus
ugccaccauuaaaugagacu

SEQ ID NO: 366248 - RNA, 16 nt, Mason-Pfizer monkey virus
ugcccggaugaugucu

SEQ ID NO: 366249 - RNA, 18 nt, Mason-Pfizer monkey virus
ugcccggaugaugucuug

SEQ ID NO: 366250 - RNA, 23 nt, Mason-Pfizer monkey virus
ugcucuaccgacuggaugauguc

SEQ ID NO: 366251 - RNA, 24 nt, Mason-Pfizer monkey virus
ugcucuaccgacuggaugaugucu

SEQ ID NO: 366252 - RNA, 14 nt, Mason-Pfizer monkey virus
ugcucugcuacuga

SEQ ID NO: 366253 - RNA, 20 nt, Mason-Pfizer monkey virus
uggacagccaaugacgggua

SEQ ID NO: 366254 - RNA, 21 nt, Mason-Pfizer monkey virus
uggccucuguuugcucuagcu

SEQ ID NO: 366255 - RNA, 15 nt, Mason-Pfizer monkey virus
uggcuuuccuugcuc

SEQ ID NO: 366256 - RNA, 21 nt, Mason-Pfizer monkey virus
uguauauaaggcaacacauug

SEQ ID NO: 366257 - RNA, 23 nt, Mason-Pfizer monkey virus
ugucuuggccucuguuugcucua

SEQ ID NO: 366258 - RNA, 17 nt, Mason-Pfizer monkey virus
uucucacuaaccuaaga

SEQ ID NO: 366259 - RNA, 22 nt, Mason-Pfizer monkey virus
uuuccccucccacuugcugccu

SEQ ID NO: 366260 - RNA, 12 nt, Mason-Pfizer monkey virus
uuuccuugcucu

SEQ ID NO: 366261 - RNA, 16 nt, Mason-Pfizer monkey virus
uuuccuugcucugcua

SEQ ID NO: 366262 - RNA, 20 nt, Mason-Pfizer monkey virus
uuuccuugcucugcuacuga

SEQ ID NO: 366263 - RNA, 20 nt, Mason-Pfizer monkey virus
uuucucacuaaccuaagaca

SEQ ID NO: 366264 - RNA, 24 nt, Measles virus
aaaacuuagggugcaagaucaucc

SEQ ID NO: 366265 - RNA, 12 nt, Measles virus
aacacagaccac

SEQ ID NO: 366266 - RNA, 19 nt, Measles virus
aacauccgccuacccucca

SEQ ID NO: 366267 - RNA, 13 nt, Measles virus
aaccaaccaucca

SEQ ID NO: 366268 - RNA, 21 nt, Measles virus
aacccaggacaggaccgagcc

SEQ ID NO: 366269 - RNA, 17 nt, Measles virus
aaccccaguagggccag

SEQ ID NO: 366270 - RNA, 20 nt, Measles virus
aaccuaccaccuacagugau

SEQ ID NO: 366271 - RNA, 19 nt, Measles virus
aacggacuggaaugcaucc

SEQ ID NO: 366272 - RNA, 20 nt, Measles virus
aacugaaggcggugcaccuc

SEQ ID NO: 366273 - RNA, 18 nt, Measles virus
aacuuaggagcaaaguga

SEQ ID NO: 366274 - RNA, 19 nt, Measles virus
aagcgagaggccagccagc

SEQ ID NO: 366275 - RNA, 17 nt, Measles virus
aaguccaagcuuaggag

SEQ ID NO: 366276 - RNA, 18 nt, Measles virus
aauaaaugccuucuacaa

SEQ ID NO: 366277 - RNA, 13 nt, Measles virus
aauagacaucaga

SEQ ID NO: 366278 - RNA, 18 nt, Measles virus
aaugccuucuacaaagac

SEQ ID NO: 366279 - RNA, 16 nt, Measles virus
aaugucaccacaacga

SEQ ID NO: 366280 - RNA, 15 nt, Measles virus
aauuaguacaaccua

SEQ ID NO: 366281 - RNA, 14 nt, Measles virus
acaaccuaccaccu

SEQ ID NO: 366282 - RNA, 15 nt, Measles virus
accaaccauccacuc

SEQ ID NO: 366283 - RNA, 11 nt, Measles virus
accauccacuc

SEQ ID NO: 366284 - RNA, 23 nt, Measles virus
accccccucauaaugacagccag

SEQ ID NO: 366285 - RNA, 16 nt, Measles virus
acguaggguccaagug

SEQ ID NO: 366286 - RNA, 16 nt, Measles virus
acucuugaaacacaga

SEQ ID NO: 366287 - RNA, 23 nt, Measles virus
agaagagcaggcacgccauguca

SEQ ID NO: 366288 - RNA, 14 nt, Measles virus
agagccucagcacc

SEQ ID NO: 366289 - RNA, 20 nt, Measles virus
agaucauccacaaugucacc

SEQ ID NO: 366290 - RNA, 17 nt, Measles virus
agcaaguguggacacca

SEQ ID NO: 366291 - RNA, 13 nt, Measles virus
agccaucuacacc

SEQ ID NO: 366292 - RNA, 18 nt, Measles virus
aggaagaggaggcaggca

SEQ ID NO: 366293 - RNA, 13 nt, Measles virus
aggauaguuauua

SEQ ID NO: 366294 - RNA, 18 nt, Measles virus
aggccgaggaccagaaca

SEQ ID NO: 366295 - RNA, 18 nt, Measles virus
aggcggcccaagcacaga

SEQ ID NO: 366296 - RNA, 23 nt, Measles virus
agguaguuaggcauuauuugcaa

SEQ ID NO: 366297 - RNA, 11 nt, Measles virus
aguagggccag

SEQ ID NO: 366298 - RNA, 12 nt, Measles virus
aguagggccagc

SEQ ID NO: 366299 - RNA, 17 nt, Measles virus
agucuccucuucgucau

SEQ ID NO: 366300 - RNA, 21 nt, Measles virus
auaaaaaacuuaggaaccagg

SEQ ID NO: 366301 - RNA, 11 nt, Measles virus
auaagagccuc

SEQ ID NO: 366302 - RNA, 15 nt, Measles virus
auaaugacagccaga

SEQ ID NO: 366303 - RNA, 22 nt, Measles virus
auaaugacagccagaaggcccg

SEQ ID NO: 366304 - RNA, 13 nt, Measles virus
auacaaccuacca

SEQ ID NO: 366305 - RNA, 22 nt, Measles virus
auagauccuggucuaggugaua

SEQ ID NO: 366306 - RNA, 17 nt, Measles virus
auaguuauuaacagaga

SEQ ID NO: 366307 - RNA, 20 nt, Measles virus
aucacaugaugucacccaga

SEQ ID NO: 366308 - RNA, 15 nt, Measles virus
aucagacaacccagg

SEQ ID NO: 366309 - RNA, 11 nt, Measles virus
aucagggccag

SEQ ID NO: 366310 - RNA, 16 nt, Measles virus
auccaaauuguaauca

SEQ ID NO: 366311 - RNA, 19 nt, Measles virus
auccacaaugucaccacaa

SEQ ID NO: 366312 - RNA, 16 nt, Measles virus
aucugucaaccagauc

SEQ ID NO: 366313 - RNA, 21 nt, Measles virus
aucuuaugauugauagaccuu

SEQ ID NO: 366314 - RNA, 18 nt, Measles virus
augcauccgggcucucaa

SEQ ID NO: 366315 - RNA, 19 nt, Measles virus
augucacccagacaucagg

SEQ ID NO: 366316 - RNA, 14 nt, Measles virus
auuaguacaaccua

SEQ ID NO: 366317 - RNA, 12 nt, Measles virus
auuucgacaagu

SEQ ID NO: 366318 - RNA, 13 nt, Measles virus
caacgcaagaacc

SEQ ID NO: 366319 - RNA, 13 nt, Measles virus
cacaaggccacca

SEQ ID NO: 366320 - RNA, 18 nt, Measles virus
cacaugaugucacccaga

SEQ ID NO: 366321 - RNA, 14 nt, Measles virus
cagaacaucaagca

SEQ ID NO: 366322 - RNA, 16 nt, Measles virus
cagacaacccaggaca

SEQ ID NO: 366323 - RNA, 13 nt, Measles virus
cagacaucaggca

SEQ ID NO: 366324 - RNA, 19 nt, Measles virus
cagacaucaggcauaccca

SEQ ID NO: 366325 - RNA, 16 nt, Measles virus
cagauuucccacaagu

SEQ ID NO: 366326 - RNA, 16 nt, Measles virus
cagcagccgacagcaa

SEQ ID NO: 366327 - RNA, 14 nt, Measles virus
cagccaaccaacca

SEQ ID NO: 366328 - RNA, 13 nt, Measles virus
cagccagaaggcc

SEQ ID NO: 366329 - RNA, 22 nt, Measles virus
caguucgggucucagcaaacca

SEQ ID NO: 366330 - RNA, 15 nt, Measles virus
cauauuccauaucca

SEQ ID NO: 366331 - RNA, 21 nt, Measles virus
caucgugcagccaucuacacc

SEQ ID NO: 366332 - RNA, 12 nt, Measles virus
ccaagcacagaa

SEQ ID NO: 366333 - RNA, 20 nt, Measles virus
ccaggcggcccaagcacaga

SEQ ID NO: 366334 - RNA, 19 nt, Measles virus
ccauggcagcauggucaga

SEQ ID NO: 366335 - RNA, 14 nt, Measles virus
cccacuagugugaa

SEQ ID NO: 366336 - RNA, 15 nt, Measles virus
cccacuagugugaaa

SEQ ID NO: 366337 - RNA, 18 nt, Measles virus
cccauuaaaaagggcaca

SEQ ID NO: 366338 - RNA, 15 nt, Measles virus
cccucggaaccauca

SEQ ID NO: 366339 - RNA, 22 nt, Measles virus
ccgaaggucgcuccgaacacag

SEQ ID NO: 366340 - RNA, 18 nt, Measles virus
ccuaauuaguacaaccua

SEQ ID NO: 366341 - RNA, 15 nt, Measles virus
ccuacacugugucag

SEQ ID NO: 366342 - RNA, 16 nt, Measles virus
ccuacacugugucaga

SEQ ID NO: 366343 - RNA, 13 nt, Measles virus
ccucggaaccauc

SEQ ID NO: 366344 - RNA, 14 nt, Measles virus
ccuggucuagguga

SEQ ID NO: 366345 - RNA, 17 nt, Measles virus
ccuuagguguugguaga

SEQ ID NO: 366346 - RNA, 15 nt, Measles virus
cgaaccgcacaagcg

SEQ ID NO: 366347 - RNA, 22 nt, Measles virus
cgaaggucgcuccgaacacaga

SEQ ID NO: 366348 - RNA, 17 nt, Measles virus
cgagccaccugcaagga

SEQ ID NO: 366349 - RNA, 15 nt, Measles virus
cgcauccccacagcu

SEQ ID NO: 366350 - RNA, 12 nt, Measles virus
cuacaaagacaa

SEQ ID NO: 366351 - RNA, 19 nt, Measles virus
cuacaacucuugaaacaca

SEQ ID NO: 366352 - RNA, 15 nt, Measles virus
cuacacugugucaga

SEQ ID NO: 366353 - RNA, 18 nt, Measles virus
cuacacugugucagaaca

SEQ ID NO: 366354 - RNA, 23 nt, Measles virus
cuagugugaaauagacaucagaa

SEQ ID NO: 366355 - RNA, 16 nt, Measles virus
cucauaaugacagcca

SEQ ID NO: 366356 - RNA, 14 nt, Measles virus
cuccacggaccaag

SEQ ID NO: 366357 - RNA, 22 nt, Measles virus
cuccagaagacuccacggacca

SEQ ID NO: 366358 - RNA, 13 nt, Measles virus
cuccgaacacaga

SEQ ID NO: 366359 - RNA, 14 nt, Measles virus
cucuugaaacacag

SEQ ID NO: 366360 - RNA, 13 nt, Measles virus
cugcccuuaggug

SEQ ID NO: 366361 - RNA, 18 nt, Measles virus
cugugucagaacaucaag

SEQ ID NO: 366362 - RNA, 21 nt, Measles virus
cuuagguguugguagauccac

SEQ ID NO: 366363 - RNA, 21 nt, Measles virus
cuugaucggguugcuagccau

SEQ ID NO: 366364 - RNA, 12 nt, Measles virus
gaaaacuuugaa

SEQ ID NO: 366365 - RNA, 18 nt, Measles virus
gaaccccaguagggccag

SEQ ID NO: 366366 - RNA, 13 nt, Measles virus
gaagccauggcag

SEQ ID NO: 366367 - RNA, 20 nt, Measles virus
gaaggucgcuccgaacacag

SEQ ID NO: 366368 - RNA, 19 nt, Measles virus
gacacaaggccaccaccag

SEQ ID NO: 366369 - RNA, 15 nt, Measles virus
gacacccauuaaaaa

SEQ ID NO: 366370 - RNA, 21 nt, Measles virus
gacagcaaguguggacaccag

SEQ ID NO: 366371 - RNA, 16 nt, Measles virus
gacagccagaaggccc

SEQ ID NO: 366372 - RNA, 18 nt, Measles virus
gacaucaaaacagccuug

SEQ ID NO: 366373 - RNA, 15 nt, Measles virus
gacuccacggaccaa

SEQ ID NO: 366374 - RNA, 15 nt, Measles virus
gagaggccagccagc

SEQ ID NO: 366375 - RNA, 18 nt, Measles virus
gaggaagccauggcagca

SEQ ID NO: 366376 - RNA, 16 nt, Measles virus
gaggugacccaaccgc

SEQ ID NO: 366377 - RNA, 12 nt, Measles virus
gaucauccacaa

SEQ ID NO: 366378 - RNA, 17 nt, Measles virus
gaucauccacaauguca

SEQ ID NO: 366379 - RNA, 18 nt, Measles virus
gaucuggagaaagcgaug

SEQ ID NO: 366380 - RNA, 20 nt, Measles virus
gaugucacccagacaucagg

SEQ ID NO: 366381 - RNA, 15 nt, Measles virus
gauucuccaaccaaa

SEQ ID NO: 366382 - RNA, 16 nt, Measles virus
gauuucccacaagucu

SEQ ID NO: 366383 - RNA, 18 nt, Measles virus
gcaagaaccccacaaccg

SEQ ID NO: 366384 - RNA, 17 nt, Measles virus
gcaaguguggacaccag

SEQ ID NO: 366385 - RNA, 17 nt, Measles virus
gcacuuccgagacaccc

SEQ ID NO: 366386 - RNA, 15 nt, Measles virus
gcagccgacagcaag

SEQ ID NO: 366387 - RNA, 15 nt, Measles virus
gcauccccacagcuc

SEQ ID NO: 366388 - RNA, 13 nt, Measles virus
gccccgacacaag

SEQ ID NO: 366389 - RNA, 17 nt, Measles virus
gcuaucugucaaccaga

SEQ ID NO: 366390 - RNA, 15 nt, Measles virus
gcuccgaacacagac

SEQ ID NO: 366391 - RNA, 17 nt, Measles virus
gcuccgaacacagacca

SEQ ID NO: 366392 - RNA, 18 nt, Measles virus
ggaaaacucucaauguuc

SEQ ID NO: 366393 - RNA, 17 nt, Measles virus
ggaaccaucagggccag

SEQ ID NO: 366394 - RNA, 14 nt, Measles virus
ggacucgcuaucug

SEQ ID NO: 366395 - RNA, 13 nt, Measles virus
ggcacgccauguc

SEQ ID NO: 366396 - RNA, 21 nt, Measles virus
ggccaccaccagccaucccaa

SEQ ID NO: 366397 - RNA, 17 nt, Measles virus
ggcccaagcacagaaca

SEQ ID NO: 366398 - RNA, 21 nt, Measles virus
ggccgucgaggaagccauggc

SEQ ID NO: 366399 - RNA, 13 nt, Measles virus
gggaucuggagaa

SEQ ID NO: 366400 - RNA, 12 nt, Measles virus
ggguccaagugg

SEQ ID NO: 366401 - RNA, 15 nt, Measles virus
gucgaggaagccaug

SEQ ID NO: 366402 - RNA, 19 nt, Measles virus
gugagcaaugccgcacuga

SEQ ID NO: 366403 - RNA, 21 nt, Measles virus
gugagcaaugccgcacugaua

SEQ ID NO: 366404 - RNA, 14 nt, Measles virus
uaaugacagccaga

SEQ ID NO: 366405 - RNA, 16 nt, Measles virus
uaauuaguacaaccua

SEQ ID NO: 366406 - RNA, 22 nt, Measles virus
uacaacucuugaaacacagauu

SEQ ID NO: 366407 - RNA, 19 nt, Measles virus
uagguguugguagauccac

SEQ ID NO: 366408 - RNA, 15 nt, Measles virus
ucaaccagaucuuau

SEQ ID NO: 366409 - RNA, 14 nt, Measles virus
ucacaugaugucac

SEQ ID NO: 366410 - RNA, 16 nt, Measles virus
ucacccagacaucagg

SEQ ID NO: 366411 - RNA, 17 nt, Measles virus
ucagagucauagauccu

SEQ ID NO: 366412 - RNA, 16 nt, Measles virus
uccaaauuguaaucag

SEQ ID NO: 366413 - RNA, 11 nt, Measles virus
uccaaccaaau

SEQ ID NO: 366414 - RNA, 13 nt, Measles virus
uccaaccaaauga

SEQ ID NO: 366415 - RNA, 21 nt, Measles virus
uccaagacaucaaaacagccu

SEQ ID NO: 366416 - RNA, 18 nt, Measles virus
uccacggaccaagcgaga

SEQ ID NO: 366417 - RNA, 23 nt, Measles virus
uccagaagacuccacggaccaag

SEQ ID NO: 366418 - RNA, 17 nt, Measles virus
uccagaggcaacaacuu

SEQ ID NO: 366419 - RNA, 17 nt, Measles virus
uccagcaucaagcccac

SEQ ID NO: 366420 - RNA, 16 nt, Measles virus
uccauaagagccucag

SEQ ID NO: 366421 - RNA, 13 nt, Measles virus
uccauauccaaau

SEQ ID NO: 366422 - RNA, 14 nt, Measles virus
ucccacaagucucc

SEQ ID NO: 366423 - RNA, 14 nt, Measles virus
uccgauacaaccua

SEQ ID NO: 366424 - RNA, 15 nt, Measles virus
uccgauacaaccuac

SEQ ID NO: 366425 - RNA, 23 nt, Measles virus
ucgaccuaauuaguacaaccuaa

SEQ ID NO: 366426 - RNA, 21 nt, Measles virus
ucgaucgcuccgauacaaccu

SEQ ID NO: 366427 - RNA, 18 nt, Measles virus
ugcaaggaagaggaggca

SEQ ID NO: 366428 - RNA, 17 nt, Measles virus
uggcagaagagcaggca

SEQ ID NO: 366429 - RNA, 21 nt, Measles virus
uggucagaaauaucagacaac

SEQ ID NO: 366430 - RNA, 19 nt, Measles virus
ugugucagaacaucaagca

SEQ ID NO: 366431 - RNA, 15 nt, Measles virus
uguucuauucgucau

SEQ ID NO: 366432 - RNA, 14 nt, Measles virus
uuauaaacaaugug

SEQ ID NO: 366433 - RNA, 16 nt, Measles virus
uuccauauccaaauug

SEQ ID NO: 366434 - RNA, 19 nt, Measles virus
agacaucaaaacagccuug

SEQ ID NO: 366435 - RNA, 16 nt, Measles virus
agaccgaauaaaugcc

SEQ ID NO: 366436 - RNA, 16 nt, Measles virus
agauaguagcuauccu

SEQ ID NO: 366437 - RNA, 17 nt, Measles virus
agaucauccacaauguc

SEQ ID NO: 366438 - RNA, 14 nt, Measles virus
agcaaaccaugccu

SEQ ID NO: 366439 - RNA, 18 nt, Measles virus
agcaaaccaugccucuca

SEQ ID NO: 366440 - RNA, 17 nt, Measles virus
agcaaccaccgcaucca

SEQ ID NO: 366441 - RNA, 12 nt, Measles virus
agccaucuacac

SEQ ID NO: 366442 - RNA, 21 nt, Measles virus
agccccgacacaaggccacca

SEQ ID NO: 366443 - RNA, 21 nt, Measles virus
agccucagcaccaaucuagau

SEQ ID NO: 366444 - RNA, 16 nt, Measles virus
aggcacgccaugucaa

SEQ ID NO: 366445 - RNA, 22 nt, Measles virus
aggcaguucgggucucagcaaa

SEQ ID NO: 366446 - RNA, 22 nt, Measles virus
aggcuggugccccaggucagag

SEQ ID NO: 366447 - RNA, 14 nt, Measles virus
agggccagcacuuc

SEQ ID NO: 366448 - RNA, 18 nt, Measles virus
agucccucacgcuuacag

SEQ ID NO: 366449 - RNA, 14 nt, Measles virus
aguuaggcauuauu

SEQ ID NO: 366450 - RNA, 18 nt, Measles virus
aguuccacaaugacagag

SEQ ID NO: 366451 - RNA, 16 nt, Measles virus
aucagacaacccagga

SEQ ID NO: 366452 - RNA, 12 nt, Measles virus
aucagggccagg

SEQ ID NO: 366453 - RNA, 14 nt, Measles virus
auccagaggcaaca

SEQ ID NO: 366454 - RNA, 23 nt, Measles virus
auccagcaucaagcccaccugaa

SEQ ID NO: 366455 - RNA, 15 nt, Measles virus
auccuggucuaggug

SEQ ID NO: 366456 - RNA, 13 nt, Measles virus
aucuacaccgcag

SEQ ID NO: 366457 - RNA, 21 nt, Measles virus
augaugucacccagacaucag

SEQ ID NO: 366458 - RNA, 15 nt, Measles virus
augccucucagcaau

SEQ ID NO: 366459 - RNA, 20 nt, Measles virus
auggcagcauggucagaaau

SEQ ID NO: 366460 - RNA, 16 nt, Measles virus
augucaucaaguccaa

SEQ ID NO: 366461 - RNA, 21 nt, Measles virus
auugacagguggugcaaccca

SEQ ID NO: 366462 - RNA, 13 nt, Measles virus
caacccacauccu

SEQ ID NO: 366463 - RNA, 18 nt, Measles virus
caacucuugaaacacaga

SEQ ID NO: 366464 - RNA, 23 nt, Measles virus
caacucuugaaacacagauuucc

SEQ ID NO: 366465 - RNA, 13 nt, Measles virus
caacuggaaggcc

SEQ ID NO: 366466 - RNA, 22 nt, Measles virus
caagucuccucuucgucaucaa

SEQ ID NO: 366467 - RNA, 14 nt, Measles virus
caaugccgcacuga

SEQ ID NO: 366468 - RNA, 15 nt, Measles virus
cacaaugucaccaca

SEQ ID NO: 366469 - RNA, 13 nt, Measles virus
caccacaacgaga

SEQ ID NO: 366470 - RNA, 21 nt, Measles virus
caccaggcggcccaagcacag

SEQ ID NO: 366471 - RNA, 14 nt, Measles virus
cacccagacaucag

SEQ ID NO: 366472 - RNA, 18 nt, Measles virus
caccgcauccagcaucaa

SEQ ID NO: 366473 - RNA, 21 nt, Measles virus
cagaacagccccgacacaagg

SEQ ID NO: 366474 - RNA, 13 nt, Measles virus
cagagauccauaa

SEQ ID NO: 366475 - RNA, 18 nt, Measles virus
cagcaauuggaucaacug

SEQ ID NO: 366476 - RNA, 12 nt, Measles virus
caggaguggaca

SEQ ID NO: 366477 - RNA, 16 nt, Measles virus
caggcacgccauguca

SEQ ID NO: 366478 - RNA, 22 nt, Measles virus
caucagggccaggugcaccugc

SEQ ID NO: 366479 - RNA, 16 nt, Measles virus
cauuaaaaagggcaca

SEQ ID NO: 366480 - RNA, 14 nt, Measles virus
cauuauuugcaaua

SEQ ID NO: 366481 - RNA, 14 nt, Measles virus
ccaccaccagccau

SEQ ID NO: 366482 - RNA, 19 nt, Measles virus
ccaggucagagucauagau

SEQ ID NO: 366483 - RNA, 24 nt, Measles virus
cccgaaggucgcuccgaacacaga

SEQ ID NO: 366484 - RNA, 13 nt, Measles virus
cccgaggaccaac

SEQ ID NO: 366485 - RNA, 18 nt, Measles virus
cccuagguaguuaggcau

SEQ ID NO: 366486 - RNA, 20 nt, Measles virus
cccucauaaugacagccaga

SEQ ID NO: 366487 - RNA, 23 nt, Measles virus
ccgaacgauaucgguaguuaauu

SEQ ID NO: 366488 - RNA, 23 nt, Measles virus
ccgaaggucgcuccgaacacaga

SEQ ID NO: 366489 - RNA, 20 nt, Measles virus
ccgaggaacuccucaaagag

SEQ ID NO: 366490 - RNA, 13 nt, Measles virus
ccgauacaaccua

SEQ ID NO: 366491 - RNA, 23 nt, Measles virus
ccucucagcaauuggaucaacug

SEQ ID NO: 366492 - RNA, 19 nt, Measles virus
ccugaaguucaccuagaua

SEQ ID NO: 366493 - RNA, 23 nt, Measles virus
ccugcccuagguaguuaggcauu

SEQ ID NO: 366494 - RNA, 22 nt, Measles virus
cgacagcaaguguggacaccag

SEQ ID NO: 366495 - RNA, 22 nt, Measles virus
cgugggacccccgaggaccaac

SEQ ID NO: 366496 - RNA, 16 nt, Measles virus
cuaauuaguacaaccu

SEQ ID NO: 366497 - RNA, 19 nt, Measles virus
cucauaaugacagccagaa

SEQ ID NO: 366498 - RNA, 17 nt, Measles virus
cuccaucgugcagccau

SEQ ID NO: 366499 - RNA, 15 nt, Measles virus
cuccgauacaaccua

SEQ ID NO: 366500 - RNA, 19 nt, Measles virus
cuccgauguccaagacauc

SEQ ID NO: 366501 - RNA, 18 nt, Measles virus
cugauacaggaguggaca

SEQ ID NO: 366502 - RNA, 20 nt, Measles virus
cugugucagaacaucaagca

SEQ ID NO: 366503 - RNA, 15 nt, Measles virus
cuucuacaaagacaa

SEQ ID NO: 366504 - RNA, 23 nt, Measles virus
gaaccagguccacacagccgcca

SEQ ID NO: 366505 - RNA, 17 nt, Measles virus
gaaccaucagggccagg

SEQ ID NO: 366506 - RNA, 13 nt, Measles virus
gacacaaggccac

SEQ ID NO: 366507 - RNA, 22 nt, Measles virus
gacccaaccgcaggcauccgac

SEQ ID NO: 366508 - RNA, 16 nt, Measles virus
gacccccgaggaccaa

SEQ ID NO: 366509 - RNA, 13 nt, Measles virus
gaccgagccaccu

SEQ ID NO: 366510 - RNA, 21 nt, Measles virus
gacuauuaugaugaugagcug

SEQ ID NO: 366511 - RNA, 18 nt, Measles virus
gagaccgaauaaaugccu

SEQ ID NO: 366512 - RNA, 17 nt, Measles virus
gagauccauaagagccu

SEQ ID NO: 366513 - RNA, 20 nt, Measles virus
gagcaggcacgccaugucaa

SEQ ID NO: 366514 - RNA, 22 nt, Measles virus
gagcccaucggcucacuggccg

SEQ ID NO: 366515 - RNA, 15 nt, Measles virus
gagccgauggcagaa

SEQ ID NO: 366516 - RNA, 19 nt, Measles virus
gauacaggaguggacaccc

SEQ ID NO: 366517 - RNA, 23 nt, Measles virus
gaucauccacaaugucaccacaa

SEQ ID NO: 366518 - RNA, 16 nt, Measles virus
gauuauaaacaaugug

SEQ ID NO: 366519 - RNA, 17 nt, Measles virus
gauuauaaacaaugugg

SEQ ID NO: 366520 - RNA, 12 nt, Measles virus
gauuucccacaa

SEQ ID NO: 366521 - RNA, 16 nt, Measles virus
gcacugauacaggagu

SEQ ID NO: 366522 - RNA, 23 nt, Measles virus
gcauccgacuccuuagacagauc

SEQ ID NO: 366523 - RNA, 16 nt, Measles virus
gccagccaaccaacca

SEQ ID NO: 366524 - RNA, 15 nt, Measles virus
gccaggugcaccugc

SEQ ID NO: 366525 - RNA, 16 nt, Measles virus
gccgaggaccagaaca

SEQ ID NO: 366526 - RNA, 17 nt, Measles virus
ggagacuauuaugauga

SEQ ID NO: 366527 - RNA, 14 nt, Measles virus
ggagccgauggcag

SEQ ID NO: 366528 - RNA, 23 nt, Measles virus
ggaguuauccggcccacucucau

SEQ ID NO: 366529 - RNA, 16 nt, Measles virus
ggcauuauuugcaaua

SEQ ID NO: 366530 - RNA, 11 nt, Measles virus
ggccagccagc

SEQ ID NO: 366531 - RNA, 23 nt, Measles virus
ggccgucgaggaagccauggcag

SEQ ID NO: 366532 - RNA, 13 nt, Measles virus
gggucucagcaaa

SEQ ID NO: 366533 - RNA, 19 nt, Measles virus
ggugcaacccaaugugcuc

SEQ ID NO: 366534 - RNA, 16 nt, Measles virus
guagggccagcacuuc

SEQ ID NO: 366535 - RNA, 17 nt, Measles virus
guccaagacaucaaaac

SEQ ID NO: 366536 - RNA, 23 nt, Measles virus
gucgaucgcuccgauacaaccua

SEQ ID NO: 366537 - RNA, 17 nt, Measles virus
gugaaauagacaucaga

SEQ ID NO: 366538 - RNA, 14 nt, Measles virus
uaaucaggauuuau

SEQ ID NO: 366539 - RNA, 15 nt, Measles virus
uaauuaguacaaccu

SEQ ID NO: 366540 - RNA, 15 nt, Measles virus
uacaccgcagagauc

SEQ ID NO: 366541 - RNA, 16 nt, Measles virus
uaccaccuacagugau

SEQ ID NO: 366542 - RNA, 17 nt, Measles virus
uaggcauuauuugcaau

SEQ ID NO: 366543 - RNA, 19 nt, Measles virus
uauuaaagaaaacuuugaa

SEQ ID NO: 366544 - RNA, 15 nt, Measles virus
ucacccagacaucag

SEQ ID NO: 366545 - RNA, 18 nt, Measles virus
ucacccucggaaccauca

SEQ ID NO: 366546 - RNA, 12 nt, Measles virus
ucagcaaaccau

SEQ ID NO: 366547 - RNA, 22 nt, Measles virus
ucagggaucuggagaaagcgau

SEQ ID NO: 366548 - RNA, 21 nt, Measles virus
uccacaaugucaccacaacga

SEQ ID NO: 366549 - RNA, 18 nt, Measles virus
uccaucgugcagccaucu

SEQ ID NO: 366550 - RNA, 16 nt, Measles virus
uccgggcucucaaggc

SEQ ID NO: 366551 - RNA, 23 nt, Measles virus
ucgaucgcuccgauacaaccuac

SEQ ID NO: 366552 - RNA, 19 nt, Measles virus
ucuacaaagacaacccaca

SEQ ID NO: 366553 - RNA, 20 nt, Measles virus
ucuacaacucuugaaacaca

SEQ ID NO: 366554 - RNA, 21 nt, Measles virus
ucuccgauguccaagacauca

SEQ ID NO: 366555 - RNA, 17 nt, Measles virus
ugcaacccaaugugcuc

SEQ ID NO: 366556 - RNA, 14 nt, Measles virus
ugcaagaucaucca

SEQ ID NO: 366557 - RNA, 23 nt, Measles virus
ugccuccuaaguuccacaaugac

SEQ ID NO: 366558 - RNA, 12 nt, Measles virus
ugcuagccauug

SEQ ID NO: 366559 - RNA, 22 nt, Measles virus
aaaaacuuaggagcaaagugau

SEQ ID NO: 366560 - RNA, 14 nt, Measles virus
aaacacagauuucc

SEQ ID NO: 366561 - RNA, 13 nt, Measles virus
aaauagacaucag

SEQ ID NO: 366562 - RNA, 17 nt, Measles virus
aacagagaacaucuuau

SEQ ID NO: 366563 - RNA, 18 nt, Measles virus
aaccagguccacacagcc

SEQ ID NO: 366564 - RNA, 15 nt, Measles virus
aaccauccacuccca

SEQ ID NO: 366565 - RNA, 18 nt, Measles virus
aaccaugccucucagcaa

SEQ ID NO: 366566 - RNA, 14 nt, Measles virus
aacccacauccuaa

SEQ ID NO: 366567 - RNA, 19 nt, Measles virus
aaccuaccaccuacaguga

SEQ ID NO: 366568 - RNA, 14 nt, Measles virus
aacuggaaggcccc

SEQ ID NO: 366569 - RNA, 13 nt, Measles virus
aacuuaccugcca

SEQ ID NO: 366570 - RNA, 16 nt, Measles virus
aacuuaggaaccaggu

SEQ ID NO: 366571 - RNA, 17 nt, Measles virus
aagacuccacggaccaa

SEQ ID NO: 366572 - RNA, 15 nt, Measles virus
aagcgagaggccagc

SEQ ID NO: 366573 - RNA, 18 nt, Measles virus
aagucacccucggaacca

SEQ ID NO: 366574 - RNA, 14 nt, Measles virus
aaguuccacaauga

SEQ ID NO: 366575 - RNA, 21 nt, Measles virus
aauaaaugccuucuacaaaga

SEQ ID NO: 366576 - RNA, 12 nt, Measles virus
aauagacaucag

SEQ ID NO: 366577 - RNA, 19 nt, Measles virus
aaugucaccacaacgagac

SEQ ID NO: 366578 - RNA, 15 nt, Measles virus
aaugucaucaagucc

SEQ ID NO: 366579 - RNA, 22 nt, Measles virus
acaaagacaacccacauccuaa

SEQ ID NO: 366580 - RNA, 14 nt, Measles virus
acaaugacagagau

SEQ ID NO: 366581 - RNA, 23 nt, Measles virus
acaccaggcggcccaagcacaga

SEQ ID NO: 366582 - RNA, 17 nt, Measles virus
acaccgcagagauccau

SEQ ID NO: 366583 - RNA, 19 nt, Measles virus
acagcaaguguggacacca

SEQ ID NO: 366584 - RNA, 21 nt, Measles virus
acagcaaguguggacaccagg

SEQ ID NO: 366585 - RNA, 15 nt, Measles virus
acagguggugcaacc

SEQ ID NO: 366586 - RNA, 22 nt, Measles virus
acaucaggcauacccacuagug

SEQ ID NO: 366587 - RNA, 18 nt, Measles virus
accaagcgagaggccagc

SEQ ID NO: 366588 - RNA, 19 nt, Measles virus
acccugaaguucaccuaga

SEQ ID NO: 366589 - RNA, 16 nt, Measles virus
accgagccaccugcaa

SEQ ID NO: 366590 - RNA, 19 nt, Measles virus
accuaccaccuacagugau

SEQ ID NO: 366591 - RNA, 17 nt, Measles virus
acggacuggaaugcauc

SEQ ID NO: 366592 - RNA, 23 nt, Measles virus
acuagugugaaauagacaucaga

SEQ ID NO: 366593 - RNA, 15 nt, Measles virus
acuccuuagacagau

SEQ ID NO: 366594 - RNA, 19 nt, Measles virus
acucgcuaucugucaacca

SEQ ID NO: 366595 - RNA, 21 nt, Measles virus
acugugucagaacaucaagca

SEQ ID NO: 366596 - RNA, 18 nt, Measles virus
acuuaggagcaaagugau

SEQ ID NO: 366597 - RNA, 13 nt, Measles virus
agaagagcaggca

SEQ ID NO: 366598 - RNA, 15 nt, Measles virus
agacaacccaggaca

SEQ ID NO: 366599 - RNA, 19 nt, Measles virus
uggaaguugggaaugucau

SEQ ID NO: 366600 - RNA, 19 nt, Measles virus
uggaggacccuacacugug

SEQ ID NO: 366601 - RNA, 13 nt, Measles virus
ugucaucaagucc

SEQ ID NO: 366602 - RNA, 23 nt, Measles virus
ugugugagcaaugccgcacugau

SEQ ID NO: 366603 - RNA, 13 nt, Measles virus
uuaguacaaccua

SEQ ID NO: 366604 - RNA, 14 nt, Measles virus
uuaguacaaccuaa

SEQ ID NO: 366605 - RNA, 14 nt, Measles virus
uuauugacaggugg

SEQ ID NO: 366606 - RNA, 17 nt, Measles virus
uuccacaaugacagaga

SEQ ID NO: 366607 - RNA, 22 nt, Measles virus
uuccacaaugacagagaucuac

SEQ ID NO: 366608 - RNA, 14 nt, Molluscum contagiosum virus
aaaacaugugccug

SEQ ID NO: 366609 - RNA, 13 nt, Molluscum contagiosum virus
aaaacuguuccca

SEQ ID NO: 366610 - RNA, 22 nt, Molluscum contagiosum virus
aaaagacaucgucgcggccgug

SEQ ID NO: 366611 - RNA, 19 nt, Molluscum contagiosum virus
aaaagacgagcugugcgag

SEQ ID NO: 366612 - RNA, 15 nt, Molluscum contagiosum virus
aaaagcacgcggcca

SEQ ID NO: 366613 - RNA, 21 nt, Molluscum contagiosum virus
aaaagcugucgcgcagcagcu

SEQ ID NO: 366614 - RNA, 17 nt, Molluscum contagiosum virus
aaaaggcucaggacaaa

SEQ ID NO: 366615 - RNA, 20 nt, Molluscum contagiosum virus
aaaagugaacuucuacgcca

SEQ ID NO: 366616 - RNA, 22 nt, Molluscum contagiosum virus
aaaauggaccagaaacugggcu

SEQ ID NO: 366617 - RNA, 19 nt, Molluscum contagiosum virus
aaaauggcugcgaccaaga

SEQ ID NO: 366618 - RNA, 21 nt, Molluscum contagiosum virus
aaaauggcugcgaccaagaca

SEQ ID NO: 366619 - RNA, 21 nt, Molluscum contagiosum virus
aaaaugggaaaccucaccucu

SEQ ID NO: 366620 - RNA, 12 nt, Molluscum contagiosum virus
aaacacaacaag

SEQ ID NO: 366621 - RNA, 12 nt, Molluscum contagiosum virus
aaacagccaugu

SEQ ID NO: 366622 - RNA, 17 nt, Molluscum contagiosum virus
aaacagccaugugucuu

SEQ ID NO: 366623 - RNA, 21 nt, Molluscum contagiosum virus
aaacagcggcuuguagucgcc

SEQ ID NO: 366624 - RNA, 15 nt, Molluscum contagiosum virus
aaacgcgaaacugga

SEQ ID NO: 366625 - RNA, 16 nt, Molluscum contagiosum virus
aaacgcgaaacuggac

SEQ ID NO: 366626 - RNA, 12 nt, Molluscum contagiosum virus
aaacucuugcac

SEQ ID NO: 366627 - RNA, 22 nt, Molluscum contagiosum virus
aaacuuaucccagaaaacgcac

SEQ ID NO: 366628 - RNA, 19 nt, Molluscum contagiosum virus
aaacuucauccucuaccgc

SEQ ID NO: 366629 - RNA, 21 nt, Molluscum contagiosum virus
aaagaagaaggagcccaagca

SEQ ID NO: 366630 - RNA, 23 nt, Molluscum contagiosum virus
aaagacgagcugugcgagccagu

SEQ ID NO: 366631 - RNA, 15 nt, Molluscum contagiosum virus
aaagagcguccagcc

SEQ ID NO: 366632 - RNA, 14 nt, Molluscum contagiosum virus
aaagaugaagcucu

SEQ ID NO: 366633 - RNA, 13 nt, Molluscum contagiosum virus
aaagcacaacaag

SEQ ID NO: 366634 - RNA, 14 nt, Molluscum contagiosum virus
aaagcacaacaaga

SEQ ID NO: 366635 - RNA, 10 nt, Molluscum contagiosum virus
aaagcacagu

SEQ ID NO: 366636 - RNA, 14 nt, Molluscum contagiosum virus
aaagcacaguccaa

SEQ ID NO: 366637 - RNA, 16 nt, Molluscum contagiosum virus
aaagcccgggugcacg

SEQ ID NO: 366638 - RNA, 13 nt, Molluscum contagiosum virus
aaagcucucuuag

SEQ ID NO: 366639 - RNA, 21 nt, Molluscum contagiosum virus
aaagcuggccgaggucuucca

SEQ ID NO: 366640 - RNA, 22 nt, Molluscum contagiosum virus
aaagcuggccgaggucuuccac

SEQ ID NO: 366641 - RNA, 19 nt, Molluscum contagiosum virus
aaagcugugcguacaccua

SEQ ID NO: 366642 - RNA, 14 nt, Molluscum contagiosum virus
aaagcuucucgcca

SEQ ID NO: 366643 - RNA, 13 nt, Molluscum contagiosum virus
aaagggcugcuug

SEQ ID NO: 366644 - RNA, 23 nt, Molluscum contagiosum virus
aaagucgcuaccaagaacagaga

SEQ ID NO: 366645 - RNA, 12 nt, Molluscum contagiosum virus
aaauaaagacaa

SEQ ID NO: 366646 - RNA, 18 nt, Molluscum contagiosum virus
aaaucccaagagccaugu

SEQ ID NO: 366647 - RNA, 22 nt, Molluscum contagiosum virus
aaaucuguucgagcaacagggg

SEQ ID NO: 366648 - RNA, 16 nt, Molluscum contagiosum virus
aaaugcgcacacuugc

SEQ ID NO: 366649 - RNA, 20 nt, Molluscum contagiosum virus
aaaugcgggaggcucucgag

SEQ ID NO: 366650 - RNA, 18 nt, Molluscum contagiosum virus
aaauuccguccccucucc

SEQ ID NO: 366651 - RNA, 24 nt, Molluscum contagiosum virus
aacaaaaagugaacuucuacgcca

SEQ ID NO: 366652 - RNA, 13 nt, Molluscum contagiosum virus
aacaaagaggcaa

SEQ ID NO: 366653 - RNA, 22 nt, Molluscum contagiosum virus
aacaaaugcagagugaucucca

SEQ ID NO: 366654 - RNA, 23 nt, Molluscum contagiosum virus
aacaacacgaucaaggugcagaa

SEQ ID NO: 366655 - RNA, 21 nt, Molluscum contagiosum virus
aacaacagcguguugcuguuc

SEQ ID NO: 366656 - RNA, 19 nt, Molluscum contagiosum virus
aacaagagcuuacuagacu

SEQ ID NO: 366657 - RNA, 22 nt, Molluscum contagiosum virus
aacaagaucaccccgcagcuca

SEQ ID NO: 366658 - RNA, 15 nt, Molluscum contagiosum virus
aacaagcacaugugu

SEQ ID NO: 366659 - RNA, 14 nt, Molluscum contagiosum virus
aacaagcagucuca

SEQ ID NO: 366660 - RNA, 14 nt, Molluscum contagiosum virus
aacaagcucaucca

SEQ ID NO: 366661 - RNA, 15 nt, Molluscum contagiosum virus
aacaagcucauccac

SEQ ID NO: 366662 - RNA, 11 nt, Molluscum contagiosum virus
aacaagcugca

SEQ ID NO: 366663 - RNA, 16 nt, Molluscum contagiosum virus
aacaaggccaaagccg

SEQ ID NO: 366664 - RNA, 20 nt, Molluscum contagiosum virus
aacaauggacacgcacuggc

SEQ ID NO: 366665 - RNA, 14 nt, Molluscum contagiosum virus
aacaccauccugcg

SEQ ID NO: 366666 - RNA, 15 nt, Molluscum contagiosum virus
aacacggccuccagc

SEQ ID NO: 366667 - RNA, 20 nt, Molluscum contagiosum virus
aacacuaccacagccauuaa

SEQ ID NO: 366668 - RNA, 12 nt, Molluscum contagiosum virus
aacacugcagaa

SEQ ID NO: 366669 - RNA, 21 nt, Molluscum contagiosum virus
aacagcacguuguucuugcgc

SEQ ID NO: 366670 - RNA, 18 nt, Molluscum contagiosum virus
aacagcauuagcgccaag

SEQ ID NO: 366671 - RNA, 18 nt, Molluscum contagiosum virus
aacagcccccucuuggca

SEQ ID NO: 366672 - RNA, 15 nt, Molluscum contagiosum virus
aacagccgugcuccg

SEQ ID NO: 366673 - RNA, 18 nt, Molluscum contagiosum virus
aacaggaaagcuucuguc

SEQ ID NO: 366674 - RNA, 20 nt, Molluscum contagiosum virus
aacauccugccacaccagcu

SEQ ID NO: 366675 - RNA, 22 nt, Molluscum contagiosum virus
aacaucugcaacucgcgcugca

SEQ ID NO: 366676 - RNA, 17 nt, Molluscum contagiosum virus
aacaugcggagacuguu

SEQ ID NO: 366677 - RNA, 12 nt, Molluscum contagiosum virus
aacaugcuguau

SEQ ID NO: 366678 - RNA, 18 nt, Molluscum contagiosum virus
aacauugugacaaagacg

SEQ ID NO: 366679 - RNA, 21 nt, Molluscum contagiosum virus
aaccaccacguggaccugauu

SEQ ID NO: 366680 - RNA, 14 nt, Molluscum contagiosum virus
aaccacucuuucac

SEQ ID NO: 366681 - RNA, 21 nt, Molluscum contagiosum virus
aaccauacgccuagccugcag

SEQ ID NO: 366682 - RNA, 14 nt, Molluscum contagiosum virus
aacccguauuucca

SEQ ID NO: 366683 - RNA, 18 nt, Molluscum contagiosum virus
aaccgcgugcgugcacag

SEQ ID NO: 366684 - RNA, 19 nt, Molluscum contagiosum virus
aaccgcgugcgugcacagc

SEQ ID NO: 366685 - RNA, 12 nt, Molluscum contagiosum virus
aaccgcugcuuc

SEQ ID NO: 366686 - RNA, 20 nt, Molluscum contagiosum virus
aaccguacgcacgguagcua

SEQ ID NO: 366687 - RNA, 19 nt, Molluscum contagiosum virus
aaccgugcuggucucggaa

SEQ ID NO: 366688 - RNA, 17 nt, Molluscum contagiosum virus
aaccuacgcuaccugaa

SEQ ID NO: 366689 - RNA, 17 nt, Molluscum contagiosum virus
aaccuacuugcucgugu

SEQ ID NO: 366690 - RNA, 22 nt, Molluscum contagiosum virus
aaccucacucacaugugcugcc

SEQ ID NO: 366691 - RNA, 23 nt, Molluscum contagiosum virus
aaccucuacacgcacgaccucac

SEQ ID NO: 366692 - RNA, 12 nt, Molluscum contagiosum virus
aacgaaaagcca

SEQ ID NO: 366693 - RNA, 14 nt, Molluscum contagiosum virus
aacgacuagcgugc

SEQ ID NO: 366694 - RNA, 21 nt, Molluscum contagiosum virus
aacgaggaaaggcacaccccu

SEQ ID NO: 366695 - RNA, 20 nt, Molluscum contagiosum virus
aacgcacagccccugcugcu

SEQ ID NO: 366696 - RNA, 19 nt, Molluscum contagiosum virus
aacgcacgcggaaacaagc

SEQ ID NO: 366697 - RNA, 19 nt, Molluscum contagiosum virus
aacgcaggacacuguaauc

SEQ ID NO: 366698 - RNA, 18 nt, Molluscum contagiosum virus
aacgccaggaacaucagc

SEQ ID NO: 366699 - RNA, 15 nt, Molluscum contagiosum virus
aacgcgaaacuggac

SEQ ID NO: 366700 - RNA, 22 nt, Molluscum contagiosum virus
aacgcgcccccguccgugccau

SEQ ID NO: 366701 - RNA, 13 nt, Molluscum contagiosum virus
aacgggcucgugc

SEQ ID NO: 366702 - RNA, 17 nt, Molluscum contagiosum virus
aacgggcucgugcugga

SEQ ID NO: 366703 - RNA, 14 nt, Molluscum contagiosum virus
aaugcuugcuuccg

SEQ ID NO: 366704 - RNA, 18 nt, Molluscum contagiosum virus
aauggaccacaagcagua

SEQ ID NO: 366705 - RNA, 15 nt, Molluscum contagiosum virus
aauggagcgucuucu

SEQ ID NO: 366706 - RNA, 22 nt, Molluscum contagiosum virus
aauggcaggugcgcaacugcga

SEQ ID NO: 366707 - RNA, 17 nt, Molluscum contagiosum virus
aauggccgagaaaaagc

SEQ ID NO: 366708 - RNA, 16 nt, Molluscum contagiosum virus
aauggcguuaccagga

SEQ ID NO: 366709 - RNA, 20 nt, Molluscum contagiosum virus
aauguacgcggugugcacau

SEQ ID NO: 366710 - RNA, 19 nt, Molluscum contagiosum virus
aauugagugcgggucacaa

SEQ ID NO: 366711 - RNA, 21 nt, Molluscum contagiosum virus
aauugagugcgggucacaaga

SEQ ID NO: 366712 - RNA, 21 nt, Molluscum contagiosum virus
aauugggcguuggucuuguga

SEQ ID NO: 366713 - RNA, 18 nt, Molluscum contagiosum virus
acaaaaaacaacucugcu

SEQ ID NO: 366714 - RNA, 12 nt, Molluscum contagiosum virus
acaaaacaugcu

SEQ ID NO: 366715 - RNA, 15 nt, Molluscum contagiosum virus
acaaaagccacuagc

SEQ ID NO: 366716 - RNA, 21 nt, Molluscum contagiosum virus
acaaaauggcugcgaccaaga

SEQ ID NO: 366717 - RNA, 16 nt, Molluscum contagiosum virus
acaaacauugugacaa

SEQ ID NO: 366718 - RNA, 19 nt, Molluscum contagiosum virus
acaaacauugugacaaaga

SEQ ID NO: 366719 - RNA, 18 nt, Molluscum contagiosum virus
acaaaggcgggcccgcga

SEQ ID NO: 366720 - RNA, 20 nt, Molluscum contagiosum virus
acaacacgcuguugcugcug

SEQ ID NO: 366721 - RNA, 15 nt, Molluscum contagiosum virus
acaacacucgugcuc

SEQ ID NO: 366722 - RNA, 19 nt, Molluscum contagiosum virus
acaacacucgugcucgugu

SEQ ID NO: 366723 - RNA, 12 nt, Molluscum contagiosum virus
acaacaugugau

SEQ ID NO: 366724 - RNA, 14 nt, Molluscum contagiosum virus
acaacgaacauguu

SEQ ID NO: 366725 - RNA, 14 nt, Molluscum contagiosum virus
acaacgaccagcuu

SEQ ID NO: 366726 - RNA, 13 nt, Molluscum contagiosum virus
acaacgugcugcu

SEQ ID NO: 366727 - RNA, 14 nt, Molluscum contagiosum virus
acaacgugcugcuc

SEQ ID NO: 366728 - RNA, 13 nt, Molluscum contagiosum virus
acaacucugcucg

SEQ ID NO: 366729 - RNA, 14 nt, Molluscum contagiosum virus
acaacugcgucuca

SEQ ID NO: 366730 - RNA, 16 nt, Molluscum contagiosum virus
acaacugcgucucaag

SEQ ID NO: 366731 - RNA, 12 nt, Molluscum contagiosum virus
acaagacaacac

SEQ ID NO: 366732 - RNA, 14 nt, Molluscum contagiosum virus
acaagagcuuacua

SEQ ID NO: 366733 - RNA, 16 nt, Molluscum contagiosum virus
acaagaucaaggucac

SEQ ID NO: 366734 - RNA, 19 nt, Molluscum contagiosum virus
acaagauggcgcagcacuu

SEQ ID NO: 366735 - RNA, 14 nt, Molluscum contagiosum virus
acaagcacaugugu

SEQ ID NO: 366736 - RNA, 22 nt, Molluscum contagiosum virus
acaagcaccgccugcugcagcu

SEQ ID NO: 366737 - RNA, 13 nt, Molluscum contagiosum virus
acaagcagucuca

SEQ ID NO: 366738 - RNA, 16 nt, Molluscum contagiosum virus
acaagccguccgccuc

SEQ ID NO: 366739 - RNA, 13 nt, Molluscum contagiosum virus
acaagcggugcag

SEQ ID NO: 366740 - RNA, 22 nt, Molluscum contagiosum virus
acaagcucauccaccugcgcaa

SEQ ID NO: 366741 - RNA, 13 nt, Molluscum contagiosum virus
acaagcucgaggc

SEQ ID NO: 366742 - RNA, 19 nt, Molluscum contagiosum virus
acaagcugcaccggcgcga

SEQ ID NO: 366743 - RNA, 21 nt, Molluscum contagiosum virus
acaagcuuucucacgcgcuac

SEQ ID NO: 366744 - RNA, 15 nt, Molluscum contagiosum virus
acaaggaaaaggcac

SEQ ID NO: 366745 - RNA, 14 nt, Molluscum contagiosum virus
acaaggaaaggcac

SEQ ID NO: 366746 - RNA, 21 nt, Molluscum contagiosum virus
acaaggaaaggcacccgcagg

SEQ ID NO: 366747 - RNA, 14 nt, Molluscum contagiosum virus
acaaggauggacaa

SEQ ID NO: 366748 - RNA, 17 nt, Molluscum contagiosum virus
acaaggauggacaaaga

SEQ ID NO: 366749 - RNA, 14 nt, Molluscum contagiosum virus
acaaggcugcguua

SEQ ID NO: 366750 - RNA, 18 nt, Molluscum contagiosum virus
acaagggcggucccgcga

SEQ ID NO: 366751 - RNA, 13 nt, Molluscum contagiosum virus
acaagguuguguu

SEQ ID NO: 366752 - RNA, 20 nt, Molluscum contagiosum virus
acaaguccgcggcucugaca

SEQ ID NO: 366753 - RNA, 13 nt, Molluscum contagiosum virus
acacaacaagaaa

SEQ ID NO: 366754 - RNA, 21 nt, Molluscum contagiosum virus
acacacucgcgcguccacaag

SEQ ID NO: 366755 - RNA, 11 nt, Molluscum contagiosum virus
acacacuugca

SEQ ID NO: 366756 - RNA, 18 nt, Molluscum contagiosum virus
acacauugccguugccag

SEQ ID NO: 366757 - RNA, 22 nt, Molluscum contagiosum virus
acacauugccguugccaguagc

SEQ ID NO: 366758 - RNA, 23 nt, Molluscum contagiosum virus
acacauugccguugccaguagcg

SEQ ID NO: 366759 - RNA, 14 nt, Molluscum contagiosum virus
acaccagcuggacg

SEQ ID NO: 366760 - RNA, 22 nt, Molluscum contagiosum virus
acaccagcuggacggugcuggu

SEQ ID NO: 366761 - RNA, 23 nt, Molluscum contagiosum virus
acaccagcuggcuacgcuggacu

SEQ ID NO: 366762 - RNA, 19 nt, Molluscum contagiosum virus
acaccaggcgcgugcccug

SEQ ID NO: 366763 - RNA, 23 nt, Molluscum contagiosum virus
acacccggcgcccgccaccaugc

SEQ ID NO: 366764 - RNA, 13 nt, Molluscum contagiosum virus
acaccuccugcuu

SEQ ID NO: 366765 - RNA, 20 nt, Molluscum contagiosum virus
acaccuggcgagcgcucugc

SEQ ID NO: 366766 - RNA, 22 nt, Molluscum contagiosum virus
acaccugugcccuguccacaaa

SEQ ID NO: 366767 - RNA, 23 nt, Molluscum contagiosum virus
acacgacgacggcugcucgcugc

SEQ ID NO: 366768 - RNA, 21 nt, Molluscum contagiosum virus
acacgaggggcaagcucgcgc

SEQ ID NO: 366769 - RNA, 14 nt, Molluscum contagiosum virus
acacgcacccaaau

SEQ ID NO: 366770 - RNA, 13 nt, Molluscum contagiosum virus
acacgcgcggcgg

SEQ ID NO: 366771 - RNA, 23 nt, Molluscum contagiosum virus
acacguagcccaggaacaucugc

SEQ ID NO: 366772 - RNA, 17 nt, Molluscum contagiosum virus
acacucgacuugcuaug

SEQ ID NO: 366773 - RNA, 16 nt, Molluscum contagiosum virus
acacucgugcucgugu

SEQ ID NO: 366774 - RNA, 20 nt, Molluscum contagiosum virus
acacuggugcgcgugacaca

SEQ ID NO: 366775 - RNA, 16 nt, Molluscum contagiosum virus
acacuuccugcuagaa

SEQ ID NO: 366776 - RNA, 18 nt, Molluscum contagiosum virus
acacuugcgcguccacaa

SEQ ID NO: 366777 - RNA, 21 nt, Molluscum contagiosum virus
acacuugcgcguccacaaagg

SEQ ID NO: 366778 - RNA, 13 nt, Molluscum contagiosum virus
acagagaaaggca

SEQ ID NO: 366779 - RNA, 19 nt, Molluscum contagiosum virus
acagagccccguucacuug

SEQ ID NO: 366780 - RNA, 21 nt, Molluscum contagiosum virus
acagaggcccgucuccacaaa

SEQ ID NO: 366781 - RNA, 16 nt, Molluscum contagiosum virus
acagcaagcagcgcgc

SEQ ID NO: 366782 - RNA, 20 nt, Molluscum contagiosum virus
acagcaccuugccucuucac

SEQ ID NO: 366783 - RNA, 16 nt, Molluscum contagiosum virus
acagccccugcugcuc

SEQ ID NO: 366784 - RNA, 18 nt, Molluscum contagiosum virus
acagccccugcugcucgc

SEQ ID NO: 366785 - RNA, 15 nt, Molluscum contagiosum virus
acagccgccugccgc

SEQ ID NO: 366786 - RNA, 19 nt, Molluscum contagiosum virus
acagccgcuuucugggcgc

SEQ ID NO: 366787 - RNA, 23 nt, Molluscum contagiosum virus
acagccguggaguccaugcccac

SEQ ID NO: 366788 - RNA, 14 nt, Molluscum contagiosum virus
acagccugcaccga

SEQ ID NO: 366789 - RNA, 14 nt, Molluscum contagiosum virus
acagcgcaagcuga

SEQ ID NO: 366790 - RNA, 13 nt, Molluscum contagiosum virus
acagcgcgcgugc

SEQ ID NO: 366791 - RNA, 16 nt, Molluscum contagiosum virus
acagcgcgcugcacac

SEQ ID NO: 366792 - RNA, 21 nt, Molluscum contagiosum virus
acagcguguucggggccgcga

SEQ ID NO: 366793 - RNA, 20 nt, Molluscum contagiosum virus
acagcuccuucuucaaguac

SEQ ID NO: 366794 - RNA, 14 nt, Molluscum contagiosum virus
acagcuugcugcug

SEQ ID NO: 366795 - RNA, 15 nt, Molluscum contagiosum virus
acaggauggcgcuga

SEQ ID NO: 366796 - RNA, 20 nt, Molluscum contagiosum virus
acaguaacugcugcagugug

SEQ ID NO: 366797 - RNA, 14 nt, Molluscum contagiosum virus
acagucggugccag

SEQ ID NO: 366798 - RNA, 14 nt, Molluscum contagiosum virus
acagugcgugccag

SEQ ID NO: 366799 - RNA, 19 nt, Molluscum contagiosum virus
acauaaaauggaccagaaa

SEQ ID NO: 366800 - RNA, 21 nt, Molluscum contagiosum virus
acauacgcacucguggcaaca

SEQ ID NO: 366801 - RNA, 14 nt, Molluscum contagiosum virus
acauccacaugacc

SEQ ID NO: 366802 - RNA, 22 nt, Molluscum contagiosum virus
acauccacaugaccaagcacau

SEQ ID NO: 366803 - RNA, 14 nt, Molluscum contagiosum virus
acauccgcuaccug

SEQ ID NO: 366804 - RNA, 17 nt, Molluscum contagiosum virus
acauccggcacgugccc

SEQ ID NO: 366805 - RNA, 19 nt, Molluscum contagiosum virus
acauccugccacaccagcu

SEQ ID NO: 366806 - RNA, 13 nt, Molluscum contagiosum virus
acgacgagcacua

SEQ ID NO: 366807 - RNA, 13 nt, Molluscum contagiosum virus
acgacgaugcaaa

SEQ ID NO: 366808 - RNA, 21 nt, Molluscum contagiosum virus
acgacgcggccccgggcugca

SEQ ID NO: 366809 - RNA, 23 nt, Molluscum contagiosum virus
acgacgcggccccgggcugcacg

SEQ ID NO: 366810 - RNA, 15 nt, Molluscum contagiosum virus
acgacggcugcucgc

SEQ ID NO: 366811 - RNA, 18 nt, Molluscum contagiosum virus
acgacggucacgcaagcu

SEQ ID NO: 366812 - RNA, 14 nt, Molluscum contagiosum virus
acgacgucuucgac

SEQ ID NO: 366813 - RNA, 14 nt, Molluscum contagiosum virus
acgacgugcugcug

SEQ ID NO: 366814 - RNA, 18 nt, Molluscum contagiosum virus
acgacuguauccuuggca

SEQ ID NO: 366815 - RNA, 20 nt, Molluscum contagiosum virus
acgacuguguucccggcugc

SEQ ID NO: 366816 - RNA, 14 nt, Molluscum contagiosum virus
acgagagacacgca

SEQ ID NO: 366817 - RNA, 15 nt, Molluscum contagiosum virus
acgagagacacgcac

SEQ ID NO: 366818 - RNA, 14 nt, Molluscum contagiosum virus
acgagcagcugcug

SEQ ID NO: 366819 - RNA, 17 nt, Molluscum contagiosum virus
acgagcagcugcugcgc

SEQ ID NO: 366820 - RNA, 20 nt, Molluscum contagiosum virus
acgagcccgcaagauucuuc

SEQ ID NO: 366821 - RNA, 17 nt, Molluscum contagiosum virus
acgagccgcugcuccug

SEQ ID NO: 366822 - RNA, 20 nt, Molluscum contagiosum virus
acgagcgccagccugugcgc

SEQ ID NO: 366823 - RNA, 15 nt, Molluscum contagiosum virus
acgagcgcuaccuga

SEQ ID NO: 366824 - RNA, 13 nt, Molluscum contagiosum virus
acgaggaaaggca

SEQ ID NO: 366825 - RNA, 14 nt, Molluscum contagiosum virus
acgaggaaaggcac

SEQ ID NO: 366826 - RNA, 21 nt, Molluscum contagiosum virus
acgaggacugggaacccgugg

SEQ ID NO: 366827 - RNA, 23 nt, Molluscum contagiosum virus
acgaggccuacagcgcgcugcac

SEQ ID NO: 366828 - RNA, 19 nt, Molluscum contagiosum virus
acgaggccuacgugcugcg

SEQ ID NO: 366829 - RNA, 14 nt, Molluscum contagiosum virus
acgagggacacgca

SEQ ID NO: 366830 - RNA, 15 nt, Molluscum contagiosum virus
acgagggacacgcac

SEQ ID NO: 366831 - RNA, 15 nt, Molluscum contagiosum virus
acgagggaugcacac

SEQ ID NO: 366832 - RNA, 22 nt, Molluscum contagiosum virus
acgaggucacucgcuacugcaa

SEQ ID NO: 366833 - RNA, 23 nt, Molluscum contagiosum virus
acgaggucgcguccacgcaggac

SEQ ID NO: 366834 - RNA, 13 nt, Molluscum contagiosum virus
acgaggugcgcgc

SEQ ID NO: 366835 - RNA, 13 nt, Molluscum contagiosum virus
acgaggugcugcg

SEQ ID NO: 366836 - RNA, 15 nt, Molluscum contagiosum virus
acgagugcgccgcgc

SEQ ID NO: 366837 - RNA, 22 nt, Molluscum contagiosum virus
acgaguucugcaucuucugcca

SEQ ID NO: 366838 - RNA, 15 nt, Molluscum contagiosum virus
acgaugcgcucgugg

SEQ ID NO: 366839 - RNA, 14 nt, Molluscum contagiosum virus
acgauguacuccac

SEQ ID NO: 366840 - RNA, 19 nt, Molluscum contagiosum virus
acgcaacgucgcacuggcc

SEQ ID NO: 366841 - RNA, 12 nt, Molluscum contagiosum virus
acgcaacguugu

SEQ ID NO: 366842 - RNA, 14 nt, Molluscum contagiosum virus
acgcaacugcccgc

SEQ ID NO: 366843 - RNA, 20 nt, Molluscum contagiosum virus
acgcaacugcccgccauuuc

SEQ ID NO: 366844 - RNA, 19 nt, Molluscum contagiosum virus
acgcaaguacaacccaaac

SEQ ID NO: 366845 - RNA, 16 nt, Molluscum contagiosum virus
acgcacaaaacacaaa

SEQ ID NO: 366846 - RNA, 22 nt, Molluscum contagiosum virus
acgcacacgagugcccgcgcgc

SEQ ID NO: 366847 - RNA, 20 nt, Molluscum contagiosum virus
acgcacagccccugcugcuc

SEQ ID NO: 366848 - RNA, 23 nt, Molluscum contagiosum virus
acgcaccgccuggugcugcgcga

SEQ ID NO: 366849 - RNA, 17 nt, Molluscum contagiosum virus
acgcacgcacguggcgc

SEQ ID NO: 366850 - RNA, 12 nt, Molluscum contagiosum virus
acgcacgcgcgc

SEQ ID NO: 366851 - RNA, 19 nt, Molluscum contagiosum virus
acgcacgugccgugcuguc

SEQ ID NO: 366852 - RNA, 14 nt, Molluscum contagiosum virus
acgcacuugcgcgc

SEQ ID NO: 366853 - RNA, 21 nt, Molluscum contagiosum virus
acgcagcuggcgggcgugccc

SEQ ID NO: 366854 - RNA, 23 nt, Molluscum contagiosum virus
acgcagcuguggcgccugcgcgc

SEQ ID NO: 366855 - RNA, 20 nt, Molluscum contagiosum virus
acgcaggaccuggcuggcgc

SEQ ID NO: 366856 - RNA, 17 nt, Molluscum contagiosum virus
acgcauguacgcggcgg

SEQ ID NO: 366857 - RNA, 21 nt, Molluscum contagiosum virus
acgccaagaggacgagcugcu

SEQ ID NO: 366858 - RNA, 21 nt, Molluscum contagiosum virus
acgccagcgcgcccaccagca

SEQ ID NO: 366859 - RNA, 18 nt, Molluscum contagiosum virus
acgccagcuguagcagga

SEQ ID NO: 366860 - RNA, 23 nt, Molluscum contagiosum virus
acgccccggcgcgaaacaagcgu

SEQ ID NO: 366861 - RNA, 22 nt, Molluscum contagiosum virus
acgcccgcgaaagaacacggac

SEQ ID NO: 366862 - RNA, 16 nt, Molluscum contagiosum virus
acgccgacaacaguga

SEQ ID NO: 366863 - RNA, 21 nt, Molluscum contagiosum virus
acgccgagcccgagcccgggc

SEQ ID NO: 366864 - RNA, 15 nt, Molluscum contagiosum virus
acgccgugcgcgugc

SEQ ID NO: 366865 - RNA, 14 nt, Molluscum contagiosum virus
acgccuccaagaag

SEQ ID NO: 366866 - RNA, 19 nt, Molluscum contagiosum virus
acgccuucuuccugcgcgu

SEQ ID NO: 366867 - RNA, 16 nt, Molluscum contagiosum virus
acgcgaaguuccugca

SEQ ID NO: 366868 - RNA, 17 nt, Molluscum contagiosum virus
acgcgacuucgcccgug

SEQ ID NO: 366869 - RNA, 16 nt, Molluscum contagiosum virus
acgcgagaaagaccuu

SEQ ID NO: 366870 - RNA, 13 nt, Molluscum contagiosum virus
acgcgagcacugc

SEQ ID NO: 366871 - RNA, 16 nt, Molluscum contagiosum virus
acgcgagcggcuuuuc

SEQ ID NO: 366872 - RNA, 23 nt, Molluscum contagiosum virus
acgcgagcggcuuuucgccggag

SEQ ID NO: 366873 - RNA, 15 nt, Molluscum contagiosum virus
acgcgcaagugugcg

SEQ ID NO: 366874 - RNA, 20 nt, Molluscum contagiosum virus
acgcgcacgggccugcgcgc

SEQ ID NO: 366875 - RNA, 14 nt, Molluscum contagiosum virus
acgcgcagcucgac

SEQ ID NO: 366876 - RNA, 19 nt, Molluscum contagiosum virus
acgcgccgacaugcgcacg

SEQ ID NO: 366877 - RNA, 18 nt, Molluscum contagiosum virus
acgcgccggggcgcgcgc

SEQ ID NO: 366878 - RNA, 18 nt, Molluscum contagiosum virus
acgcgcuggugaccuuca

SEQ ID NO: 366879 - RNA, 15 nt, Molluscum contagiosum virus
acgcggaaacaagca

SEQ ID NO: 366880 - RNA, 19 nt, Molluscum contagiosum virus
acgcggcucuggagcggcc

SEQ ID NO: 366881 - RNA, 17 nt, Molluscum contagiosum virus
acgcgggcccgugcuca

SEQ ID NO: 366882 - RNA, 23 nt, Molluscum contagiosum virus
acgcggugugcacaugcccgugc

SEQ ID NO: 366883 - RNA, 23 nt, Molluscum contagiosum virus
acgcguacguguccaugcacgac

SEQ ID NO: 366884 - RNA, 21 nt, Molluscum contagiosum virus
acgcgucgcgcgccgcaaaag

SEQ ID NO: 366885 - RNA, 15 nt, Molluscum contagiosum virus
acgcgugcugcgcgg

SEQ ID NO: 366886 - RNA, 20 nt, Molluscum contagiosum virus
acgcugcacgagcugcugua

SEQ ID NO: 366887 - RNA, 15 nt, Molluscum contagiosum virus
acgcuucgacuucuc

SEQ ID NO: 366888 - RNA, 20 nt, Molluscum contagiosum virus
acgcuucggcucgggaacaa

SEQ ID NO: 366889 - RNA, 18 nt, Molluscum contagiosum virus
acgcuugcgcaugugauu

SEQ ID NO: 366890 - RNA, 17 nt, Molluscum contagiosum virus
acggaaccgaagguuuu

SEQ ID NO: 366891 - RNA, 16 nt, Molluscum contagiosum virus
acggaacgagccugcc

SEQ ID NO: 366892 - RNA, 17 nt, Molluscum contagiosum virus
acggacaaaauggcugc

SEQ ID NO: 366893 - RNA, 13 nt, Molluscum contagiosum virus
acggacagcaccc

SEQ ID NO: 366894 - RNA, 14 nt, Molluscum contagiosum virus
acggacgcccuccu

SEQ ID NO: 366895 - RNA, 19 nt, Molluscum contagiosum virus
acggacgcccuccucgacc

SEQ ID NO: 366896 - RNA, 12 nt, Molluscum contagiosum virus
acggacgcggcc

SEQ ID NO: 366897 - RNA, 15 nt, Molluscum contagiosum virus
acggagauggacaca

SEQ ID NO: 366898 - RNA, 16 nt, Molluscum contagiosum virus
acggaggugguggcca

SEQ ID NO: 366899 - RNA, 13 nt, Molluscum contagiosum virus
acggcaaacgcca

SEQ ID NO: 366900 - RNA, 22 nt, Molluscum contagiosum virus
acggcacgugcguacgcggcgc

SEQ ID NO: 366901 - RNA, 20 nt, Molluscum contagiosum virus
acggcacuaaggccgucagc

SEQ ID NO: 366902 - RNA, 12 nt, Molluscum contagiosum virus
acggccgcgcgc

SEQ ID NO: 366903 - RNA, 16 nt, Molluscum contagiosum virus
acggccggcgccgcgc

SEQ ID NO: 366904 - RNA, 21 nt, Molluscum contagiosum virus
acggccguguacaugcucaag

SEQ ID NO: 366905 - RNA, 13 nt, Molluscum contagiosum virus
acggccuucgcgc

SEQ ID NO: 366906 - RNA, 14 nt, Molluscum contagiosum virus
acggcgcccaggaa

SEQ ID NO: 366907 - RNA, 13 nt, Molluscum contagiosum virus
acggcgcgcgcgc

SEQ ID NO: 366908 - RNA, 19 nt, Molluscum contagiosum virus
acggcgcggaucugcgcac

SEQ ID NO: 366909 - RNA, 17 nt, Molluscum contagiosum virus
acuucacacgucuugca

SEQ ID NO: 366910 - RNA, 18 nt, Molluscum contagiosum virus
acuucacacgucuugcag

SEQ ID NO: 366911 - RNA, 17 nt, Molluscum contagiosum virus
acuucauccucuaccgc

SEQ ID NO: 366912 - RNA, 13 nt, Molluscum contagiosum virus
acuucccgaggac

SEQ ID NO: 366913 - RNA, 23 nt, Molluscum contagiosum virus
acuuccguugcgagaacgggcgc

SEQ ID NO: 366914 - RNA, 20 nt, Molluscum contagiosum virus
acuucgacgcggugcgcgcg

SEQ ID NO: 366915 - RNA, 20 nt, Molluscum contagiosum virus
acuugcaaacgcuccaugag

SEQ ID NO: 366916 - RNA, 15 nt, Molluscum contagiosum virus
acuugcacgcgcacg

SEQ ID NO: 366917 - RNA, 14 nt, Molluscum contagiosum virus
acuugcgcagccau

SEQ ID NO: 366918 - RNA, 18 nt, Molluscum contagiosum virus
acuugcgcgcgugccugu

SEQ ID NO: 366919 - RNA, 13 nt, Molluscum contagiosum virus
acuugcggcgcua

SEQ ID NO: 366920 - RNA, 13 nt, Molluscum contagiosum virus
acuugcuaugcua

SEQ ID NO: 366921 - RNA, 19 nt, Molluscum contagiosum virus
acuuggaagagucgcgcua

SEQ ID NO: 366922 - RNA, 12 nt, Molluscum contagiosum virus
acuuuuccugcg

SEQ ID NO: 366923 - RNA, 14 nt, Molluscum contagiosum virus
agaaacagccaugu

SEQ ID NO: 366924 - RNA, 20 nt, Molluscum contagiosum virus
agaaacagccaugugucuug

SEQ ID NO: 366925 - RNA, 21 nt, Molluscum contagiosum virus
agaaacgacgggcgcgcuucu

SEQ ID NO: 366926 - RNA, 21 nt, Molluscum contagiosum virus
agaaacucuccgacgugcugc

SEQ ID NO: 366927 - RNA, 16 nt, Molluscum contagiosum virus
agaaacugggcuucaa

SEQ ID NO: 366928 - RNA, 13 nt, Molluscum contagiosum virus
agaaagacaaaga

SEQ ID NO: 366929 - RNA, 11 nt, Molluscum contagiosum virus
agaaagaccuu

SEQ ID NO: 366930 - RNA, 11 nt, Molluscum contagiosum virus
agaaagccaac

SEQ ID NO: 366931 - RNA, 20 nt, Molluscum contagiosum virus
agaaaucccaagagccaugu

SEQ ID NO: 366932 - RNA, 23 nt, Molluscum contagiosum virus
agaaaucccaagagccauguuuc

SEQ ID NO: 366933 - RNA, 17 nt, Molluscum contagiosum virus
agaacaauuacuccagc

SEQ ID NO: 366934 - RNA, 16 nt, Molluscum contagiosum virus
agaacagagaaaggca

SEQ ID NO: 366935 - RNA, 16 nt, Molluscum contagiosum virus
agaacaugcucgccag

SEQ ID NO: 366936 - RNA, 13 nt, Molluscum contagiosum virus
agaacaugugcuc

SEQ ID NO: 366937 - RNA, 21 nt, Molluscum contagiosum virus
agaaccgccgucaacauuuca

SEQ ID NO: 366938 - RNA, 21 nt, Molluscum contagiosum virus
agaacguaaaaaagagggccu

SEQ ID NO: 366939 - RNA, 22 nt, Molluscum contagiosum virus
agaacucgugccugucucgcaa

SEQ ID NO: 366940 - RNA, 20 nt, Molluscum contagiosum virus
agaacucuacacguggaauu

SEQ ID NO: 366941 - RNA, 13 nt, Molluscum contagiosum virus
agaagaacagcac

SEQ ID NO: 366942 - RNA, 22 nt, Molluscum contagiosum virus
agaagaggccagcacaagccgu

SEQ ID NO: 366943 - RNA, 20 nt, Molluscum contagiosum virus
agaagaggccggcacaagcc

SEQ ID NO: 366944 - RNA, 22 nt, Molluscum contagiosum virus
agaagaggccggcacaagccgu

SEQ ID NO: 366945 - RNA, 21 nt, Molluscum contagiosum virus
agaagugcuccgcacguggaa

SEQ ID NO: 366946 - RNA, 21 nt, Molluscum contagiosum virus
agacaacaaacauugugacaa

SEQ ID NO: 366947 - RNA, 19 nt, Molluscum contagiosum virus
agacaacaccagcgugccc

SEQ ID NO: 366948 - RNA, 16 nt, Molluscum contagiosum virus
agacaacacucgugcu

SEQ ID NO: 366949 - RNA, 17 nt, Molluscum contagiosum virus
agacaacugcgucucaa

SEQ ID NO: 366950 - RNA, 12 nt, Molluscum contagiosum virus
agacaccagcuc

SEQ ID NO: 366951 - RNA, 15 nt, Molluscum contagiosum virus
agacacgcacacucg

SEQ ID NO: 366952 - RNA, 15 nt, Molluscum contagiosum virus
agacagggugccuac

SEQ ID NO: 366953 - RNA, 15 nt, Molluscum contagiosum virus
agaccacgcgcgcug

SEQ ID NO: 366954 - RNA, 14 nt, Molluscum contagiosum virus
agacccacaauggu

SEQ ID NO: 366955 - RNA, 17 nt, Molluscum contagiosum virus
agacccagcaaggccca

SEQ ID NO: 366956 - RNA, 13 nt, Molluscum contagiosum virus
agaccccuugcua

SEQ ID NO: 366957 - RNA, 16 nt, Molluscum contagiosum virus
agaccuacgucaagca

SEQ ID NO: 366958 - RNA, 17 nt, Molluscum contagiosum virus
agaccuacgucaagcag

SEQ ID NO: 366959 - RNA, 16 nt, Molluscum contagiosum virus
agacgacucgcugcca

SEQ ID NO: 366960 - RNA, 12 nt, Molluscum contagiosum virus
agacgcacuugc

SEQ ID NO: 366961 - RNA, 20 nt, Molluscum contagiosum virus
agacgcagcgcgagcugugc

SEQ ID NO: 366962 - RNA, 15 nt, Molluscum contagiosum virus
agacgcuagcugugc

SEQ ID NO: 366963 - RNA, 19 nt, Molluscum contagiosum virus
agacgcugccggcaacgcu

SEQ ID NO: 366964 - RNA, 16 nt, Molluscum contagiosum virus
agacggaaauguuguu

SEQ ID NO: 366965 - RNA, 14 nt, Molluscum contagiosum virus
agacguacgagcag

SEQ ID NO: 366966 - RNA, 18 nt, Molluscum contagiosum virus
agacgucccgcagugugc

SEQ ID NO: 366967 - RNA, 22 nt, Molluscum contagiosum virus
agacgucuggcucguacugcug

SEQ ID NO: 366968 - RNA, 14 nt, Molluscum contagiosum virus
agacgugcacaaag

SEQ ID NO: 366969 - RNA, 22 nt, Molluscum contagiosum virus
agacguguguuguuuuguguug

SEQ ID NO: 366970 - RNA, 15 nt, Molluscum contagiosum virus
agacuacggcacuaa

SEQ ID NO: 366971 - RNA, 16 nt, Molluscum contagiosum virus
agacuggagcacggac

SEQ ID NO: 366972 - RNA, 22 nt, Molluscum contagiosum virus
agagaaagaacaaaaacugaaa

SEQ ID NO: 366973 - RNA, 15 nt, Molluscum contagiosum virus
agagaaaggcaccca

SEQ ID NO: 366974 - RNA, 22 nt, Molluscum contagiosum virus
agagaaaggcacccaccaggaa

SEQ ID NO: 366975 - RNA, 22 nt, Molluscum contagiosum virus
agagaaaucccaagagccaugu

SEQ ID NO: 366976 - RNA, 13 nt, Molluscum contagiosum virus
agagaaccugugc

SEQ ID NO: 366977 - RNA, 14 nt, Molluscum contagiosum virus
agagacaugcacac

SEQ ID NO: 366978 - RNA, 17 nt, Molluscum contagiosum virus
agagacaugcacacuca

SEQ ID NO: 366979 - RNA, 17 nt, Molluscum contagiosum virus
agagccccguucacuug

SEQ ID NO: 366980 - RNA, 22 nt, Molluscum contagiosum virus
agagccgggacgcggaugccac

SEQ ID NO: 366981 - RNA, 20 nt, Molluscum contagiosum virus
agagccugcugcucuucgug

SEQ ID NO: 366982 - RNA, 20 nt, Molluscum contagiosum virus
agagcggcgccccuccuauc

SEQ ID NO: 366983 - RNA, 16 nt, Molluscum contagiosum virus
agagcuccggcugcuc

SEQ ID NO: 366984 - RNA, 16 nt, Molluscum contagiosum virus
agagcucguggacagc

SEQ ID NO: 366985 - RNA, 17 nt, Molluscum contagiosum virus
agagcuuuucuuugugg

SEQ ID NO: 366986 - RNA, 21 nt, Molluscum contagiosum virus
agagcuuuucuuuguggucaa

SEQ ID NO: 366987 - RNA, 19 nt, Molluscum contagiosum virus
agaggaaagcgcacacuug

SEQ ID NO: 366988 - RNA, 11 nt, Molluscum contagiosum virus
agaggacaccg

SEQ ID NO: 366989 - RNA, 21 nt, Molluscum contagiosum virus
agaggacagcuccuucuucaa

SEQ ID NO: 366990 - RNA, 15 nt, Molluscum contagiosum virus
agaggacgagcugcu

SEQ ID NO: 366991 - RNA, 16 nt, Molluscum contagiosum virus
agaggacgagcugcua

SEQ ID NO: 366992 - RNA, 21 nt, Molluscum contagiosum virus
agaggacguguacgcacgggg

SEQ ID NO: 366993 - RNA, 17 nt, Molluscum contagiosum virus
agaggccggcacaagcc

SEQ ID NO: 366994 - RNA, 14 nt, Molluscum contagiosum virus
agaggggagccagc

SEQ ID NO: 366995 - RNA, 23 nt, Molluscum contagiosum virus
agaguacgacgcggaggucgagc

SEQ ID NO: 366996 - RNA, 13 nt, Molluscum contagiosum virus
agaguacuaggug

SEQ ID NO: 366997 - RNA, 20 nt, Molluscum contagiosum virus
agaguccgacccgugcugcu

SEQ ID NO: 366998 - RNA, 21 nt, Molluscum contagiosum virus
agaguccgacccgugcugcuu

SEQ ID NO: 366999 - RNA, 13 nt, Molluscum contagiosum virus
agagucgcgcuac

SEQ ID NO: 367000 - RNA, 15 nt, Molluscum contagiosum virus
agagugacgcugcaa

SEQ ID NO: 367001 - RNA, 14 nt, Molluscum contagiosum virus
agagugaucuccac

SEQ ID NO: 367002 - RNA, 18 nt, Molluscum contagiosum virus
agagugcgcaacaugucc

SEQ ID NO: 367003 - RNA, 13 nt, Molluscum contagiosum virus
agauacacauugc

SEQ ID NO: 367004 - RNA, 17 nt, Molluscum contagiosum virus
agauaguuuggacgagc

SEQ ID NO: 367005 - RNA, 12 nt, Molluscum contagiosum virus
agaucaagcacg

SEQ ID NO: 367006 - RNA, 21 nt, Molluscum contagiosum virus
agaucacggccgggauuugcc

SEQ ID NO: 367007 - RNA, 15 nt, Molluscum contagiosum virus
agaucacggcgugcg

SEQ ID NO: 367008 - RNA, 18 nt, Molluscum contagiosum virus
agaucaggcagcugcugc

SEQ ID NO: 367009 - RNA, 21 nt, Molluscum contagiosum virus
agaucguuuugcacuugucag

SEQ ID NO: 367010 - RNA, 17 nt, Molluscum contagiosum virus
agaugaaaagauagcuc

SEQ ID NO: 367011 - RNA, 13 nt, Molluscum contagiosum virus
agauucacgagcu

SEQ ID NO: 367012 - RNA, 18 nt, Molluscum contagiosum virus
agcgccgucucgcggaag

SEQ ID NO: 367013 - RNA, 20 nt, Molluscum contagiosum virus
agcgccuucugcaagcugcc

SEQ ID NO: 367014 - RNA, 14 nt, Molluscum contagiosum virus
agcgcgagcugugc

SEQ ID NO: 367015 - RNA, 14 nt, Molluscum contagiosum virus
agcgcgaggacaac

SEQ ID NO: 367016 - RNA, 17 nt, Molluscum contagiosum virus
agcgcgaguacaagcuc

SEQ ID NO: 367017 - RNA, 20 nt, Molluscum contagiosum virus
agcgcgaguacaagcucgac

SEQ ID NO: 367018 - RNA, 15 nt, Molluscum contagiosum virus
agcgcgcaguugugc

SEQ ID NO: 367019 - RNA, 18 nt, Molluscum contagiosum virus
agcgcgcccccgagcugc

SEQ ID NO: 367020 - RNA, 19 nt, Molluscum contagiosum virus
agcgcgcgccgacgugcgc

SEQ ID NO: 367021 - RNA, 13 nt, Molluscum contagiosum virus
agcgcgcugcaca

SEQ ID NO: 367022 - RNA, 14 nt, Molluscum contagiosum virus
agcgcggagcuggc

SEQ ID NO: 367023 - RNA, 18 nt, Molluscum contagiosum virus
agcgcggaggcgcuaccu

SEQ ID NO: 367024 - RNA, 15 nt, Molluscum contagiosum virus
agcgcggcaacagca

SEQ ID NO: 367025 - RNA, 19 nt, Molluscum contagiosum virus
agcgcggcaacagcacgac

SEQ ID NO: 367026 - RNA, 13 nt, Molluscum contagiosum virus
agcgcggcgcaca

SEQ ID NO: 367027 - RNA, 20 nt, Molluscum contagiosum virus
agcgcggcuuacacacgcac

SEQ ID NO: 367028 - RNA, 18 nt, Molluscum contagiosum virus
agcgcggggguguugcug

SEQ ID NO: 367029 - RNA, 21 nt, Molluscum contagiosum virus
agcgcggggguguugcugaug

SEQ ID NO: 367030 - RNA, 20 nt, Molluscum contagiosum virus
agcgcguucgcgcgugcugg

SEQ ID NO: 367031 - RNA, 17 nt, Molluscum contagiosum virus
agcgcuccaacuuccac

SEQ ID NO: 367032 - RNA, 10 nt, Molluscum contagiosum virus
agcgcugccg

SEQ ID NO: 367033 - RNA, 17 nt, Molluscum contagiosum virus
agcgcugccugugcuac

SEQ ID NO: 367034 - RNA, 13 nt, Molluscum contagiosum virus
agcgcugcucuac

SEQ ID NO: 367035 - RNA, 21 nt, Molluscum contagiosum virus
agcgcugcucuacgucuccuc

SEQ ID NO: 367036 - RNA, 17 nt, Molluscum contagiosum virus
agcgcuucuuccggcag

SEQ ID NO: 367037 - RNA, 13 nt, Molluscum contagiosum virus
agcgcuugcucuu

SEQ ID NO: 367038 - RNA, 18 nt, Molluscum contagiosum virus
agcggaagaaacagccau

SEQ ID NO: 367039 - RNA, 20 nt, Molluscum contagiosum virus
agcggaagaaacagccaugu

SEQ ID NO: 367040 - RNA, 23 nt, Molluscum contagiosum virus
agcggauuacgaacaagacgcua

SEQ ID NO: 367041 - RNA, 14 nt, Molluscum contagiosum virus
agcggccacucucc

SEQ ID NO: 367042 - RNA, 21 nt, Molluscum contagiosum virus
agcggcccugcacggugucca

SEQ ID NO: 367043 - RNA, 18 nt, Molluscum contagiosum virus
agcggcgacuugcugcgg

SEQ ID NO: 367044 - RNA, 14 nt, Molluscum contagiosum virus
agcgggccuaucuu

SEQ ID NO: 367045 - RNA, 15 nt, Molluscum contagiosum virus
agcgguugaccagcu

SEQ ID NO: 367046 - RNA, 18 nt, Molluscum contagiosum virus
agcgugaccagugcgugc

SEQ ID NO: 367047 - RNA, 14 nt, Molluscum contagiosum virus
agcgugcaagaagu

SEQ ID NO: 367048 - RNA, 16 nt, Molluscum contagiosum virus
agcgugcauagugggc

SEQ ID NO: 367049 - RNA, 19 nt, Molluscum contagiosum virus
agcgugcgcaccagcugca

SEQ ID NO: 367050 - RNA, 12 nt, Molluscum contagiosum virus
agcguggcgcgc

SEQ ID NO: 367051 - RNA, 19 nt, Molluscum contagiosum virus
agcgugucgaagcgcgcag

SEQ ID NO: 367052 - RNA, 14 nt, Molluscum contagiosum virus
agcguuccaggaac

SEQ ID NO: 367053 - RNA, 19 nt, Molluscum contagiosum virus
agcuacgaucgcgcucagg

SEQ ID NO: 367054 - RNA, 20 nt, Molluscum contagiosum virus
agcuacgaucgcgcucagga

SEQ ID NO: 367055 - RNA, 18 nt, Molluscum contagiosum virus
agcuacgcgcucuacgcu

SEQ ID NO: 367056 - RNA, 19 nt, Molluscum contagiosum virus
agcuagcguucccaagcaa

SEQ ID NO: 367057 - RNA, 17 nt, Molluscum contagiosum virus
agcuagcucugcgcgcg

SEQ ID NO: 367058 - RNA, 12 nt, Molluscum contagiosum virus
agcucaagcccg

SEQ ID NO: 367059 - RNA, 17 nt, Molluscum contagiosum virus
agcucaaucucgcccag

SEQ ID NO: 367060 - RNA, 21 nt, Molluscum contagiosum virus
agcucacgcucauggacaugc

SEQ ID NO: 367061 - RNA, 13 nt, Molluscum contagiosum virus
agcuccagcguuu

SEQ ID NO: 367062 - RNA, 16 nt, Molluscum contagiosum virus
agcuccgccgggaaua

SEQ ID NO: 367063 - RNA, 18 nt, Molluscum contagiosum virus
agcuccgcgcaugccaga

SEQ ID NO: 367064 - RNA, 22 nt, Molluscum contagiosum virus
agcuccggcuuuauuuccggcu

SEQ ID NO: 367065 - RNA, 19 nt, Molluscum contagiosum virus
agcuccuagcgcgcgugug

SEQ ID NO: 367066 - RNA, 18 nt, Molluscum contagiosum virus
agcuccuccacguccagg

SEQ ID NO: 367067 - RNA, 19 nt, Molluscum contagiosum virus
agcuccugcugguucaggu

SEQ ID NO: 367068 - RNA, 14 nt, Molluscum contagiosum virus
agcuccuucuucaa

SEQ ID NO: 367069 - RNA, 18 nt, Molluscum contagiosum virus
agcucgccuccuugcccg

SEQ ID NO: 367070 - RNA, 22 nt, Molluscum contagiosum virus
agcucgcgcgcaagaacaacca

SEQ ID NO: 367071 - RNA, 23 nt, Molluscum contagiosum virus
agcucgcguccacgaugcgcucg

SEQ ID NO: 367072 - RNA, 12 nt, Molluscum contagiosum virus
agcucguggaca

SEQ ID NO: 367073 - RNA, 18 nt, Molluscum contagiosum virus
agcugacucggacacugg

SEQ ID NO: 367074 - RNA, 14 nt, Molluscum contagiosum virus
agcugagcgcgcug

SEQ ID NO: 367075 - RNA, 19 nt, Molluscum contagiosum virus
agcugcaaacauugccugg

SEQ ID NO: 367076 - RNA, 19 nt, Molluscum contagiosum virus
agcugcagagcgugcuggu

SEQ ID NO: 367077 - RNA, 17 nt, Molluscum contagiosum virus
agcugcaggaccugcug

SEQ ID NO: 367078 - RNA, 19 nt, Molluscum contagiosum virus
agcugcaggaccugcuggu

SEQ ID NO: 367079 - RNA, 23 nt, Molluscum contagiosum virus
agcugcaucuuuuuuaugcacuu

SEQ ID NO: 367080 - RNA, 17 nt, Molluscum contagiosum virus
agcugccccccucgaau

SEQ ID NO: 367081 - RNA, 21 nt, Molluscum contagiosum virus
agcugcgggcgcgaccuuagc

SEQ ID NO: 367082 - RNA, 13 nt, Molluscum contagiosum virus
agcugcgugcgua

SEQ ID NO: 367083 - RNA, 15 nt, Molluscum contagiosum virus
agcugcuagcggcag

SEQ ID NO: 367084 - RNA, 15 nt, Molluscum contagiosum virus
agcugcugcgcuaca

SEQ ID NO: 367085 - RNA, 19 nt, Molluscum contagiosum virus
agcugcugcgcuccaugcu

SEQ ID NO: 367086 - RNA, 20 nt, Molluscum contagiosum virus
agcuggacggugcuggugcu

SEQ ID NO: 367087 - RNA, 19 nt, Molluscum contagiosum virus
agcuggagcgagugcgcgu

SEQ ID NO: 367088 - RNA, 13 nt, Molluscum contagiosum virus
agcuguaccuggu

SEQ ID NO: 367089 - RNA, 23 nt, Molluscum contagiosum virus
agcugugccaucucgcacacugc

SEQ ID NO: 367090 - RNA, 23 nt, Molluscum contagiosum virus
agcuucauggaggccaacuaccu

SEQ ID NO: 367091 - RNA, 18 nt, Molluscum contagiosum virus
agcuuccuuuuucacuuu

SEQ ID NO: 367092 - RNA, 14 nt, Molluscum contagiosum virus
agcuucgucuucac

SEQ ID NO: 367093 - RNA, 18 nt, Molluscum contagiosum virus
agcuucuuggagcccuug

SEQ ID NO: 367094 - RNA, 16 nt, Molluscum contagiosum virus
agcuugcucagcagcu

SEQ ID NO: 367095 - RNA, 12 nt, Molluscum contagiosum virus
agcuugcugcug

SEQ ID NO: 367096 - RNA, 14 nt, Molluscum contagiosum virus
agcuuggugcagcg

SEQ ID NO: 367097 - RNA, 15 nt, Molluscum contagiosum virus
agcuuggugcgcucg

SEQ ID NO: 367098 - RNA, 22 nt, Molluscum contagiosum virus
agcuuugcacgcacgcgcucuc

SEQ ID NO: 367099 - RNA, 18 nt, Molluscum contagiosum virus
aggaaagcgcacacuugc

SEQ ID NO: 367100 - RNA, 18 nt, Molluscum contagiosum virus
aggaaaggcacccaccag

SEQ ID NO: 367101 - RNA, 21 nt, Molluscum contagiosum virus
aggaaaggcacccaccaggaa

SEQ ID NO: 367102 - RNA, 21 nt, Molluscum contagiosum virus
aggaaaggcaccugcaggaaa

SEQ ID NO: 367103 - RNA, 17 nt, Molluscum contagiosum virus
aggaaaggcgcacccuc

SEQ ID NO: 367104 - RNA, 21 nt, Molluscum contagiosum virus
aggaaagguaccccgcaggaa

SEQ ID NO: 367105 - RNA, 22 nt, Molluscum contagiosum virus
aggaaagguaccccgcaggaaa

SEQ ID NO: 367106 - RNA, 21 nt, Molluscum contagiosum virus
aggaacaaugcugcaucuagc

SEQ ID NO: 367107 - RNA, 22 nt, Molluscum contagiosum virus
aggaacaaugcugcaucuagcc

SEQ ID NO: 367108 - RNA, 17 nt, Molluscum contagiosum virus
aggacaaagucgcgcgc

SEQ ID NO: 367109 - RNA, 13 nt, Molluscum contagiosum virus
aggacagugucuu

SEQ ID NO: 367110 - RNA, 17 nt, Molluscum contagiosum virus
aggacagugucuuguca

SEQ ID NO: 367111 - RNA, 14 nt, Molluscum contagiosum virus
aggacgacuucgag

SEQ ID NO: 367112 - RNA, 19 nt, Molluscum contagiosum virus
aggacgcguucuccaggaa

SEQ ID NO: 367113 - RNA, 22 nt, Molluscum contagiosum virus
aggacuuccgcgcgcucuugca

SEQ ID NO: 367114 - RNA, 12 nt, Molluscum contagiosum virus
auaaaagcacag

SEQ ID NO: 367115 - RNA, 13 nt, Molluscum contagiosum virus
auaaaagcacagu

SEQ ID NO: 367116 - RNA, 19 nt, Molluscum contagiosum virus
auaaagucuucaagacugg

SEQ ID NO: 367117 - RNA, 22 nt, Molluscum contagiosum virus
auaaagucuucaagacuggcac

SEQ ID NO: 367118 - RNA, 21 nt, Molluscum contagiosum virus
auacuccagacgcgaugacac

SEQ ID NO: 367119 - RNA, 16 nt, Molluscum contagiosum virus
auagaacacagcuagu

SEQ ID NO: 367120 - RNA, 20 nt, Molluscum contagiosum virus
auagacguauacuccaaaaa

SEQ ID NO: 367121 - RNA, 20 nt, Molluscum contagiosum virus
auagcgcccguaucccgcga

SEQ ID NO: 367122 - RNA, 20 nt, Molluscum contagiosum virus
auauaucuccaacuagacaa

SEQ ID NO: 367123 - RNA, 16 nt, Molluscum contagiosum virus
auaucugucgccgcgg

SEQ ID NO: 367124 - RNA, 13 nt, Molluscum contagiosum virus
auaugcauauaua

SEQ ID NO: 367125 - RNA, 18 nt, Molluscum contagiosum virus
auauggccgugcgcgacg

SEQ ID NO: 367126 - RNA, 15 nt, Molluscum contagiosum virus
aucaacaucuacaag

SEQ ID NO: 367127 - RNA, 16 nt, Molluscum contagiosum virus
aucaaccgcaaggaaa

SEQ ID NO: 367128 - RNA, 22 nt, Molluscum contagiosum virus
aucagcgcggaggcgcuaccuc

SEQ ID NO: 367129 - RNA, 21 nt, Molluscum contagiosum virus
aucaggcgauaggacaugacu

SEQ ID NO: 367130 - RNA, 19 nt, Molluscum contagiosum virus
auccaaaccaacgugagua

SEQ ID NO: 367131 - RNA, 15 nt, Molluscum contagiosum virus
auccaaacccccgag

SEQ ID NO: 367132 - RNA, 23 nt, Molluscum contagiosum virus
auccacucgauggacgccagcuu

SEQ ID NO: 367133 - RNA, 19 nt, Molluscum contagiosum virus
aucccagaaaacgcacugu

SEQ ID NO: 367134 - RNA, 16 nt, Molluscum contagiosum virus
aucccccgccaggaac

SEQ ID NO: 367135 - RNA, 21 nt, Molluscum contagiosum virus
auccucgaugagaacaacagc

SEQ ID NO: 367136 - RNA, 23 nt, Molluscum contagiosum virus
auccucuccaucaucgagcugca

SEQ ID NO: 367137 - RNA, 16 nt, Molluscum contagiosum virus
auccugccacaccagc

SEQ ID NO: 367138 - RNA, 14 nt, Molluscum contagiosum virus
aucgaaacucugca

SEQ ID NO: 367139 - RNA, 15 nt, Molluscum contagiosum virus
aucgcgcgcaccugc

SEQ ID NO: 367140 - RNA, 23 nt, Molluscum contagiosum virus
aucgcgcucaggaccaguugcau

SEQ ID NO: 367141 - RNA, 14 nt, Molluscum contagiosum virus
aucgcggagcugcg

SEQ ID NO: 367142 - RNA, 17 nt, Molluscum contagiosum virus
aucgcuacgugcgcacc

SEQ ID NO: 367143 - RNA, 21 nt, Molluscum contagiosum virus
aucggacucagcauguugcuc

SEQ ID NO: 367144 - RNA, 16 nt, Molluscum contagiosum virus
aucggagaagugcucc

SEQ ID NO: 367145 - RNA, 17 nt, Molluscum contagiosum virus
aucggagcgcagcugcc

SEQ ID NO: 367146 - RNA, 15 nt, Molluscum contagiosum virus
aucguuuugcacuug

SEQ ID NO: 367147 - RNA, 22 nt, Molluscum contagiosum virus
aucuacggcuguuguacuggag

SEQ ID NO: 367148 - RNA, 16 nt, Molluscum contagiosum virus
aucuacugcgacaucc

SEQ ID NO: 367149 - RNA, 17 nt, Molluscum contagiosum virus
aucuacugcgacaucca

SEQ ID NO: 367150 - RNA, 17 nt, Molluscum contagiosum virus
aucuagccuccuugucu

SEQ ID NO: 367151 - RNA, 15 nt, Molluscum contagiosum virus
aucuaugcacggcac

SEQ ID NO: 367152 - RNA, 22 nt, Molluscum contagiosum virus
aucucaaagaacgcgcgcucua

SEQ ID NO: 367153 - RNA, 19 nt, Molluscum contagiosum virus
aucuccacgucgaucagcu

SEQ ID NO: 367154 - RNA, 24 nt, Molluscum contagiosum virus
aucucgcaacaggaaagcuucugu

SEQ ID NO: 367155 - RNA, 24 nt, Molluscum contagiosum virus
aucucugcgccgcgcgcggugcug

SEQ ID NO: 367156 - RNA, 18 nt, Molluscum contagiosum virus
aucugucgccgcgggcug

SEQ ID NO: 367157 - RNA, 14 nt, Molluscum contagiosum virus
aucuucaacuucca

SEQ ID NO: 367158 - RNA, 17 nt, Molluscum contagiosum virus
aucuuuuuuaugcacuu

SEQ ID NO: 367159 - RNA, 19 nt, Molluscum contagiosum virus
augaaccugggcaucgucu

SEQ ID NO: 367160 - RNA, 18 nt, Molluscum contagiosum virus
augaacgcgcugcgccac

SEQ ID NO: 367161 - RNA, 17 nt, Molluscum contagiosum virus
augaacggcuccuugag

SEQ ID NO: 367162 - RNA, 12 nt, Molluscum contagiosum virus
augagcagcacc

SEQ ID NO: 367163 - RNA, 22 nt, Molluscum contagiosum virus
augaguaccuguaugaucugca

SEQ ID NO: 367164 - RNA, 16 nt, Molluscum contagiosum virus
augaugcuaacggacg

SEQ ID NO: 367165 - RNA, 24 nt, Molluscum contagiosum virus
augcaaggcggacgccgucgucaa

SEQ ID NO: 367166 - RNA, 11 nt, Molluscum contagiosum virus
augcacacuca

SEQ ID NO: 367167 - RNA, 16 nt, Molluscum contagiosum virus
augcacagccgcuuuc

SEQ ID NO: 367168 - RNA, 18 nt, Molluscum contagiosum virus
augcagugcggaugugcu

SEQ ID NO: 367169 - RNA, 19 nt, Molluscum contagiosum virus
augcagugcggaugugcua

SEQ ID NO: 367170 - RNA, 20 nt, Molluscum contagiosum virus
augcagugcggaugugcuag

SEQ ID NO: 367171 - RNA, 15 nt, Molluscum contagiosum virus
augcauccugaugcu

SEQ ID NO: 367172 - RNA, 13 nt, Molluscum contagiosum virus
augccacgcagcu

SEQ ID NO: 367173 - RNA, 14 nt, Molluscum contagiosum virus
augccagugcagug

SEQ ID NO: 367174 - RNA, 14 nt, Molluscum contagiosum virus
augccgcgcugcuc

SEQ ID NO: 367175 - RNA, 23 nt, Molluscum contagiosum virus
augccgcgcugcuccgugcccac

SEQ ID NO: 367176 - RNA, 15 nt, Molluscum contagiosum virus
augccuuucuuccag

SEQ ID NO: 367177 - RNA, 16 nt, Molluscum contagiosum virus
augcgagcgcggcuua

SEQ ID NO: 367178 - RNA, 15 nt, Molluscum contagiosum virus
augcgcacacuugcg

SEQ ID NO: 367179 - RNA, 16 nt, Molluscum contagiosum virus
augcgcacacuugcgc

SEQ ID NO: 367180 - RNA, 15 nt, Molluscum contagiosum virus
augcgcacagcacuu

SEQ ID NO: 367181 - RNA, 18 nt, Molluscum contagiosum virus
augcgcccucacgugcug

SEQ ID NO: 367182 - RNA, 12 nt, Molluscum contagiosum virus
augcgccugugc

SEQ ID NO: 367183 - RNA, 18 nt, Molluscum contagiosum virus
augcgcgccgcgcugcug

SEQ ID NO: 367184 - RNA, 19 nt, Molluscum contagiosum virus
augcgcgggaugcuggacg

SEQ ID NO: 367185 - RNA, 13 nt, Molluscum contagiosum virus
augcggcaggcgc

SEQ ID NO: 367186 - RNA, 18 nt, Molluscum contagiosum virus
augcucacguacgacugc

SEQ ID NO: 367187 - RNA, 19 nt, Molluscum contagiosum virus
augcucacguacgacugcu

SEQ ID NO: 367188 - RNA, 20 nt, Molluscum contagiosum virus
augcucguccccgugcacga

SEQ ID NO: 367189 - RNA, 17 nt, Molluscum contagiosum virus
augcucuacgugcugca

SEQ ID NO: 367190 - RNA, 14 nt, Molluscum contagiosum virus
augcuguuacuugc

SEQ ID NO: 367191 - RNA, 17 nt, Molluscum contagiosum virus
augcuguuacuugcacu

SEQ ID NO: 367192 - RNA, 21 nt, Molluscum contagiosum virus
augcuuucccguuagagacac

SEQ ID NO: 367193 - RNA, 14 nt, Molluscum contagiosum virus
auggacauccucac

SEQ ID NO: 367194 - RNA, 15 nt, Molluscum contagiosum virus
auggaccacaagcag

SEQ ID NO: 367195 - RNA, 14 nt, Molluscum contagiosum virus
auggacgcuugcua

SEQ ID NO: 367196 - RNA, 20 nt, Molluscum contagiosum virus
auggagcgcccgcugcucua

SEQ ID NO: 367197 - RNA, 15 nt, Molluscum contagiosum virus
auggcgcagcacuuc

SEQ ID NO: 367198 - RNA, 12 nt, Molluscum contagiosum virus
auggcugcucau

SEQ ID NO: 367199 - RNA, 19 nt, Molluscum contagiosum virus
augggcacaagucucgcgc

SEQ ID NO: 367200 - RNA, 19 nt, Molluscum contagiosum virus
augggcgugcucacgcugc

SEQ ID NO: 367201 - RNA, 15 nt, Molluscum contagiosum virus
auggucucgcugcug

SEQ ID NO: 367202 - RNA, 21 nt, Molluscum contagiosum virus
auguccuuggcggugcgcaaa

SEQ ID NO: 367203 - RNA, 14 nt, Molluscum contagiosum virus
auguccuuucagac

SEQ ID NO: 367204 - RNA, 17 nt, Molluscum contagiosum virus
augugcgagaacuggcg

SEQ ID NO: 367205 - RNA, 13 nt, Molluscum contagiosum virus
auuaccugagauc

SEQ ID NO: 367206 - RNA, 16 nt, Molluscum contagiosum virus
auuagcagcgaggaac

SEQ ID NO: 367207 - RNA, 14 nt, Molluscum contagiosum virus
auuccguccaguga

SEQ ID NO: 367208 - RNA, 18 nt, Molluscum contagiosum virus
auucucguggcguugcug

SEQ ID NO: 367209 - RNA, 20 nt, Molluscum contagiosum virus
auucucugcgcgcaagucac

SEQ ID NO: 367210 - RNA, 23 nt, Molluscum contagiosum virus
auucuggcguacucgugucacaa

SEQ ID NO: 367211 - RNA, 13 nt, Molluscum contagiosum virus
auucuuaauccag

SEQ ID NO: 367212 - RNA, 15 nt, Molluscum contagiosum virus
auucuucuccgaugu

SEQ ID NO: 367213 - RNA, 21 nt, Molluscum contagiosum virus
auucuucuccgaugugagcaa

SEQ ID NO: 367214 - RNA, 21 nt, Molluscum contagiosum virus
auugagcucgcgcgcaagaac

SEQ ID NO: 367215 - RNA, 18 nt, Molluscum contagiosum virus
auugcauggacauccuca

SEQ ID NO: 367216 - RNA, 13 nt, Molluscum contagiosum virus
auugcugggcaca

SEQ ID NO: 367217 - RNA, 12 nt, Molluscum contagiosum virus
caagcuuucuca

SEQ ID NO: 367218 - RNA, 14 nt, Molluscum contagiosum virus
caaggaaaaggcac

SEQ ID NO: 367219 - RNA, 17 nt, Molluscum contagiosum virus
caaggaaaggcacccgc

SEQ ID NO: 367220 - RNA, 20 nt, Molluscum contagiosum virus
caaggaggucuagccgugaa

SEQ ID NO: 367221 - RNA, 21 nt, Molluscum contagiosum virus
caaggaggucuagccgugaac

SEQ ID NO: 367222 - RNA, 16 nt, Molluscum contagiosum virus
caaggccgcgggcgcg

SEQ ID NO: 367223 - RNA, 13 nt, Molluscum contagiosum virus
caaggcgagucaa

SEQ ID NO: 367224 - RNA, 21 nt, Molluscum contagiosum virus
caaggcguaagagcgugaaca

SEQ ID NO: 367225 - RNA, 22 nt, Molluscum contagiosum virus
caagggcagcucaagcugcuca

SEQ ID NO: 367226 - RNA, 19 nt, Molluscum contagiosum virus
caaggugaacgaccucaac

SEQ ID NO: 367227 - RNA, 17 nt, Molluscum contagiosum virus
caagguuugcgggcgca

SEQ ID NO: 367228 - RNA, 21 nt, Molluscum contagiosum virus
caaguacaacccaaacauguc

SEQ ID NO: 367229 - RNA, 13 nt, Molluscum contagiosum virus
caaguacaugcac

SEQ ID NO: 367230 - RNA, 21 nt, Molluscum contagiosum virus
caagucggggcccucggcgcg

SEQ ID NO: 367231 - RNA, 15 nt, Molluscum contagiosum virus
caagugaacuacagu

SEQ ID NO: 367232 - RNA, 15 nt, Molluscum contagiosum virus
caagugcacaccaga

SEQ ID NO: 367233 - RNA, 16 nt, Molluscum contagiosum virus
caagugcacaccagac

SEQ ID NO: 367234 - RNA, 19 nt, Molluscum contagiosum virus
caagugcacaccagacaaa

SEQ ID NO: 367235 - RNA, 12 nt, Molluscum contagiosum virus
caagugugcgca

SEQ ID NO: 367236 - RNA, 19 nt, Molluscum contagiosum virus
caagugugcgcaucccucg

SEQ ID NO: 367237 - RNA, 22 nt, Molluscum contagiosum virus
caaucacggcuguaaugugcug

SEQ ID NO: 367238 - RNA, 18 nt, Molluscum contagiosum virus
caaucugacggugcaacc

SEQ ID NO: 367239 - RNA, 12 nt, Molluscum contagiosum virus
caaucuguccag

SEQ ID NO: 367240 - RNA, 15 nt, Molluscum contagiosum virus
caaucuucgugcgcu

SEQ ID NO: 367241 - RNA, 14 nt, Molluscum contagiosum virus
caaugcugcaucua

SEQ ID NO: 367242 - RNA, 15 nt, Molluscum contagiosum virus
caaugcuuucccguu

SEQ ID NO: 367243 - RNA, 15 nt, Molluscum contagiosum virus
caauggacacgcacu

SEQ ID NO: 367244 - RNA, 17 nt, Molluscum contagiosum virus
caauggacacgcacugg

SEQ ID NO: 367245 - RNA, 14 nt, Molluscum contagiosum virus
caauggcacuagcc

SEQ ID NO: 367246 - RNA, 18 nt, Molluscum contagiosum virus
caauggcgcgcgagcaca

SEQ ID NO: 367247 - RNA, 21 nt, Molluscum contagiosum virus
caauguuugcggaugcucgcu

SEQ ID NO: 367248 - RNA, 12 nt, Molluscum contagiosum virus
caauuacuccag

SEQ ID NO: 367249 - RNA, 17 nt, Molluscum contagiosum virus
caauucaaaggugcuca

SEQ ID NO: 367250 - RNA, 16 nt, Molluscum contagiosum virus
caauuccguccaguga

SEQ ID NO: 367251 - RNA, 16 nt, Molluscum contagiosum virus
cacaaagcccuccuga

SEQ ID NO: 367252 - RNA, 15 nt, Molluscum contagiosum virus
cacaacgaacauguu

SEQ ID NO: 367253 - RNA, 11 nt, Molluscum contagiosum virus
cacaagcuuuc

SEQ ID NO: 367254 - RNA, 17 nt, Molluscum contagiosum virus
cacaagggcagcucaag

SEQ ID NO: 367255 - RNA, 15 nt, Molluscum contagiosum virus
cacacacacacacuc

SEQ ID NO: 367256 - RNA, 10 nt, Molluscum contagiosum virus
cacacacacu

SEQ ID NO: 367257 - RNA, 18 nt, Molluscum contagiosum virus
cacacaccgcgagcacca

SEQ ID NO: 367258 - RNA, 15 nt, Molluscum contagiosum virus
cacacacgaacgcac

SEQ ID NO: 367259 - RNA, 22 nt, Molluscum contagiosum virus
cacacacggaagcucacaucug

SEQ ID NO: 367260 - RNA, 15 nt, Molluscum contagiosum virus
cacacacuugcucuc

SEQ ID NO: 367261 - RNA, 12 nt, Molluscum contagiosum virus
cacacaugcuag

SEQ ID NO: 367262 - RNA, 19 nt, Molluscum contagiosum virus
cacacgacgacggcugcuc

SEQ ID NO: 367263 - RNA, 14 nt, Molluscum contagiosum virus
cacacgcacccaaa

SEQ ID NO: 367264 - RNA, 14 nt, Molluscum contagiosum virus
cacacgcagugcca

SEQ ID NO: 367265 - RNA, 20 nt, Molluscum contagiosum virus
cacacgcuugcgcaugugau

SEQ ID NO: 367266 - RNA, 22 nt, Molluscum contagiosum virus
cacacucacgcguccacaaaga

SEQ ID NO: 367267 - RNA, 23 nt, Molluscum contagiosum virus
cacacucacgcguccacaaagac

SEQ ID NO: 367268 - RNA, 23 nt, Molluscum contagiosum virus
cacacucgcgcguccgcaaagac

SEQ ID NO: 367269 - RNA, 20 nt, Molluscum contagiosum virus
cacacugcagcacgucuugc

SEQ ID NO: 367270 - RNA, 17 nt, Molluscum contagiosum virus
cacacuugcacgcgcac

SEQ ID NO: 367271 - RNA, 23 nt, Molluscum contagiosum virus
cacacuugcgcguucgcaaagac

SEQ ID NO: 367272 - RNA, 14 nt, Molluscum contagiosum virus
cacagaaagccaac

SEQ ID NO: 367273 - RNA, 17 nt, Molluscum contagiosum virus
cacagacgugcacaaag

SEQ ID NO: 367274 - RNA, 18 nt, Molluscum contagiosum virus
cacagcugcucguguuca

SEQ ID NO: 367275 - RNA, 19 nt, Molluscum contagiosum virus
cacagcuucacguacuuga

SEQ ID NO: 367276 - RNA, 23 nt, Molluscum contagiosum virus
cacagcuucacguacuugagcac

SEQ ID NO: 367277 - RNA, 17 nt, Molluscum contagiosum virus
cacagcuuccuggagua

SEQ ID NO: 367278 - RNA, 23 nt, Molluscum contagiosum virus
cacagguagugguccaccagcug

SEQ ID NO: 367279 - RNA, 21 nt, Molluscum contagiosum virus
cacaguccaacccgcggcgcg

SEQ ID NO: 367280 - RNA, 16 nt, Molluscum contagiosum virus
cacagucggugccaga

SEQ ID NO: 367281 - RNA, 22 nt, Molluscum contagiosum virus
cacauccuugauaaaagcacag

SEQ ID NO: 367282 - RNA, 21 nt, Molluscum contagiosum virus
cacaucugucccuugauccag

SEQ ID NO: 367283 - RNA, 17 nt, Molluscum contagiosum virus
cacauguguuuguagcc

SEQ ID NO: 367284 - RNA, 15 nt, Molluscum contagiosum virus
cacauugcgaggcac

SEQ ID NO: 367285 - RNA, 14 nt, Molluscum contagiosum virus
caccaccuccaggu

SEQ ID NO: 367286 - RNA, 17 nt, Molluscum contagiosum virus
caccagcuccgccggga

SEQ ID NO: 367287 - RNA, 21 nt, Molluscum contagiosum virus
caccaucuucaacuuccacau

SEQ ID NO: 367288 - RNA, 18 nt, Molluscum contagiosum virus
caccaugcgcacagcacu

SEQ ID NO: 367289 - RNA, 13 nt, Molluscum contagiosum virus
cacccaccaggaa

SEQ ID NO: 367290 - RNA, 18 nt, Molluscum contagiosum virus
cacccagguucagcgcuc

SEQ ID NO: 367291 - RNA, 15 nt, Molluscum contagiosum virus
caccccgaaaggcac

SEQ ID NO: 367292 - RNA, 17 nt, Molluscum contagiosum virus
caccccgcugggccgca

SEQ ID NO: 367293 - RNA, 16 nt, Molluscum contagiosum virus
cacccgcaacaaggaa

SEQ ID NO: 367294 - RNA, 22 nt, Molluscum contagiosum virus
cacccgugcgcgcgcugagaua

SEQ ID NO: 367295 - RNA, 23 nt, Molluscum contagiosum virus
cacccuucugaggggcaguguuc

SEQ ID NO: 367296 - RNA, 19 nt, Molluscum contagiosum virus
caccgagcgcuacgacgac

SEQ ID NO: 367297 - RNA, 17 nt, Molluscum contagiosum virus
caccgccuggugcugcg

SEQ ID NO: 367298 - RNA, 17 nt, Molluscum contagiosum virus
caccgcgacccagaagc

SEQ ID NO: 367299 - RNA, 20 nt, Molluscum contagiosum virus
caccgcgagcaccacuacug

SEQ ID NO: 367300 - RNA, 19 nt, Molluscum contagiosum virus
caccgcgcaggaccgucac

SEQ ID NO: 367301 - RNA, 15 nt, Molluscum contagiosum virus
caccgcggcgcggag

SEQ ID NO: 367302 - RNA, 18 nt, Molluscum contagiosum virus
caccggcgcgagaugcuc

SEQ ID NO: 367303 - RNA, 16 nt, Molluscum contagiosum virus
caccuagagcacgaag

SEQ ID NO: 367304 - RNA, 11 nt, Molluscum contagiosum virus
caccucaagaa

SEQ ID NO: 367305 - RNA, 20 nt, Molluscum contagiosum virus
caccucaccgcgcacaucuc

SEQ ID NO: 367306 - RNA, 13 nt, Molluscum contagiosum virus
caccucgcacgug

SEQ ID NO: 367307 - RNA, 11 nt, Molluscum contagiosum virus
caccugcgcaa

SEQ ID NO: 367308 - RNA, 17 nt, Molluscum contagiosum virus
caccugcgcaacgugcu

SEQ ID NO: 367309 - RNA, 20 nt, Molluscum contagiosum virus
caccugcgccgccucaugcg

SEQ ID NO: 367310 - RNA, 22 nt, Molluscum contagiosum virus
caccuuggcgcugcacaguuca

SEQ ID NO: 367311 - RNA, 21 nt, Molluscum contagiosum virus
caccuuucauucgcuggugcg

SEQ ID NO: 367312 - RNA, 17 nt, Molluscum contagiosum virus
caccuuucucuuucuca

SEQ ID NO: 367313 - RNA, 18 nt, Molluscum contagiosum virus
caccuuuugcuccaugac

SEQ ID NO: 367314 - RNA, 16 nt, Molluscum contagiosum virus
cacgaccacgcuggca

SEQ ID NO: 367315 - RNA, 22 nt, Molluscum contagiosum virus
cacgacggaacguuggcccgca

SEQ ID NO: 367316 - RNA, 16 nt, Molluscum contagiosum virus
cacgacggacuucuug

SEQ ID NO: 367317 - RNA, 20 nt, Molluscum contagiosum virus
cacgacgggcucaucccggg

SEQ ID NO: 367318 - RNA, 22 nt, Molluscum contagiosum virus
cacgacggucacgcaagcuuug

SEQ ID NO: 367319 - RNA, 13 nt, Molluscum contagiosum virus
cacgagagaggcu

SEQ ID NO: 367320 - RNA, 19 nt, Molluscum contagiosum virus
cagaggacuuuaucucuca

SEQ ID NO: 367321 - RNA, 22 nt, Molluscum contagiosum virus
cagaggguggcuugcugcagua

SEQ ID NO: 367322 - RNA, 20 nt, Molluscum contagiosum virus
cagagugacgucuuccagac

SEQ ID NO: 367323 - RNA, 22 nt, Molluscum contagiosum virus
cagcaaaagcuuuuucuucaga

SEQ ID NO: 367324 - RNA, 13 nt, Molluscum contagiosum virus
cagcaaacagccu

SEQ ID NO: 367325 - RNA, 16 nt, Molluscum contagiosum virus
cagcaaacugugcucc

SEQ ID NO: 367326 - RNA, 23 nt, Molluscum contagiosum virus
cagcacaaagagcacggacagca

SEQ ID NO: 367327 - RNA, 11 nt, Molluscum contagiosum virus
cagcacaagcc

SEQ ID NO: 367328 - RNA, 21 nt, Molluscum contagiosum virus
cagcacaggugcguaaugcug

SEQ ID NO: 367329 - RNA, 14 nt, Molluscum contagiosum virus
cagcacgcgcgggc

SEQ ID NO: 367330 - RNA, 23 nt, Molluscum contagiosum virus
cagcacgcgcucguccgccgcgu

SEQ ID NO: 367331 - RNA, 16 nt, Molluscum contagiosum virus
cagcagagcugcccgc

SEQ ID NO: 367332 - RNA, 16 nt, Molluscum contagiosum virus
cagcagccccgacgcc

SEQ ID NO: 367333 - RNA, 18 nt, Molluscum contagiosum virus
cagcagccgcagcccacg

SEQ ID NO: 367334 - RNA, 22 nt, Molluscum contagiosum virus
cagcagcguugcuauuaccuga

SEQ ID NO: 367335 - RNA, 14 nt, Molluscum contagiosum virus
cagcagcucggggc

SEQ ID NO: 367336 - RNA, 14 nt, Molluscum contagiosum virus
cagcagcuggcgcg

SEQ ID NO: 367337 - RNA, 15 nt, Molluscum contagiosum virus
cagcaggcuguguuc

SEQ ID NO: 367338 - RNA, 15 nt, Molluscum contagiosum virus
cagcaguaguugcuc

SEQ ID NO: 367339 - RNA, 16 nt, Molluscum contagiosum virus
cagcauucccggcgcg

SEQ ID NO: 367340 - RNA, 24 nt, Molluscum contagiosum virus
cagccaggcuaggcgcgacugcac

SEQ ID NO: 367341 - RNA, 13 nt, Molluscum contagiosum virus
cagcccaccagca

SEQ ID NO: 367342 - RNA, 14 nt, Molluscum contagiosum virus
cagccccgcgccag

SEQ ID NO: 367343 - RNA, 15 nt, Molluscum contagiosum virus
cagccccugcugcuc

SEQ ID NO: 367344 - RNA, 20 nt, Molluscum contagiosum virus
cagccgcaccgggacgaaga

SEQ ID NO: 367345 - RNA, 14 nt, Molluscum contagiosum virus
cagccgcgcggcag

SEQ ID NO: 367346 - RNA, 17 nt, Molluscum contagiosum virus
cagccgcugcgccgcca

SEQ ID NO: 367347 - RNA, 15 nt, Molluscum contagiosum virus
cagccgcugcugcug

SEQ ID NO: 367348 - RNA, 22 nt, Molluscum contagiosum virus
cagccuccgguuuucgcgggag

SEQ ID NO: 367349 - RNA, 20 nt, Molluscum contagiosum virus
cagccuccgugcgccagucc

SEQ ID NO: 367350 - RNA, 21 nt, Molluscum contagiosum virus
cagccucuacuccacuaccaa

SEQ ID NO: 367351 - RNA, 19 nt, Molluscum contagiosum virus
cagccugcaccgagugcug

SEQ ID NO: 367352 - RNA, 20 nt, Molluscum contagiosum virus
cagcgagaucaacgcgcgcg

SEQ ID NO: 367353 - RNA, 19 nt, Molluscum contagiosum virus
cagcgauugcccgcgcgcg

SEQ ID NO: 367354 - RNA, 24 nt, Molluscum contagiosum virus
cagcgauugcccgcgcgcggacag

SEQ ID NO: 367355 - RNA, 20 nt, Molluscum contagiosum virus
cagcgccagccugcuggcac

SEQ ID NO: 367356 - RNA, 18 nt, Molluscum contagiosum virus
cagcgccugcuugcgcac

SEQ ID NO: 367357 - RNA, 17 nt, Molluscum contagiosum virus
cagcgcgcccaccagca

SEQ ID NO: 367358 - RNA, 16 nt, Molluscum contagiosum virus
cagcgcgcgacugucu

SEQ ID NO: 367359 - RNA, 19 nt, Molluscum contagiosum virus
cagcgcgcgacugucuuga

SEQ ID NO: 367360 - RNA, 22 nt, Molluscum contagiosum virus
cagcgcgcgcagcaccgcggcg

SEQ ID NO: 367361 - RNA, 16 nt, Molluscum contagiosum virus
cagcgcguccaugcug

SEQ ID NO: 367362 - RNA, 18 nt, Molluscum contagiosum virus
cagcgcgucuuugucaca

SEQ ID NO: 367363 - RNA, 14 nt, Molluscum contagiosum virus
cagcgcuggagcug

SEQ ID NO: 367364 - RNA, 22 nt, Molluscum contagiosum virus
cagcgcuuuguugccucaguac

SEQ ID NO: 367365 - RNA, 20 nt, Molluscum contagiosum virus
cagcggcaaaggcccgcgag

SEQ ID NO: 367366 - RNA, 16 nt, Molluscum contagiosum virus
cagcggcacugcgcgc

SEQ ID NO: 367367 - RNA, 14 nt, Molluscum contagiosum virus
cagcggcgccgcag

SEQ ID NO: 367368 - RNA, 13 nt, Molluscum contagiosum virus
cagcggcgcgugc

SEQ ID NO: 367369 - RNA, 22 nt, Molluscum contagiosum virus
cagcgguggucuccgcgggcag

SEQ ID NO: 367370 - RNA, 19 nt, Molluscum contagiosum virus
cagcguauggaucuucuca

SEQ ID NO: 367371 - RNA, 21 nt, Molluscum contagiosum virus
cagcgugacaaucucugcgcc

SEQ ID NO: 367372 - RNA, 16 nt, Molluscum contagiosum virus
cagcgugccgcggcac

SEQ ID NO: 367373 - RNA, 16 nt, Molluscum contagiosum virus
cagcucauagcccaug

SEQ ID NO: 367374 - RNA, 22 nt, Molluscum contagiosum virus
cagcuccgccgggaauaccgga

SEQ ID NO: 367375 - RNA, 15 nt, Molluscum contagiosum virus
cagcuccgcgcggcg

SEQ ID NO: 367376 - RNA, 13 nt, Molluscum contagiosum virus
cagcuccugguag

SEQ ID NO: 367377 - RNA, 21 nt, Molluscum contagiosum virus
cagcuccugguaguugcagcc

SEQ ID NO: 367378 - RNA, 14 nt, Molluscum contagiosum virus
cagcuccuucuuca

SEQ ID NO: 367379 - RNA, 15 nt, Molluscum contagiosum virus
cagcucgaugggcuc

SEQ ID NO: 367380 - RNA, 13 nt, Molluscum contagiosum virus
cagcucgccgcgc

SEQ ID NO: 367381 - RNA, 12 nt, Molluscum contagiosum virus
cagcucgcgcag

SEQ ID NO: 367382 - RNA, 17 nt, Molluscum contagiosum virus
cagcugcaaacauugcc

SEQ ID NO: 367383 - RNA, 19 nt, Molluscum contagiosum virus
cagcugcugcgcuccaugc

SEQ ID NO: 367384 - RNA, 22 nt, Molluscum contagiosum virus
cagcugcugcgcuucgccgcgc

SEQ ID NO: 367385 - RNA, 15 nt, Molluscum contagiosum virus
cagcugcugucgcuc

SEQ ID NO: 367386 - RNA, 19 nt, Molluscum contagiosum virus
cagcugcugucgcucgugg

SEQ ID NO: 367387 - RNA, 17 nt, Molluscum contagiosum virus
cagcuguccaaggugaa

SEQ ID NO: 367388 - RNA, 12 nt, Molluscum contagiosum virus
caggaaaggcac

SEQ ID NO: 367389 - RNA, 14 nt, Molluscum contagiosum virus
caggaacaucugca

SEQ ID NO: 367390 - RNA, 18 nt, Molluscum contagiosum virus
caggaacgcaccacggcc

SEQ ID NO: 367391 - RNA, 16 nt, Molluscum contagiosum virus
caggaacgcgccgcgg

SEQ ID NO: 367392 - RNA, 18 nt, Molluscum contagiosum virus
caggaacugcccgcgucg

SEQ ID NO: 367393 - RNA, 15 nt, Molluscum contagiosum virus
caggaagcuggcgcg

SEQ ID NO: 367394 - RNA, 18 nt, Molluscum contagiosum virus
caggacgacgacacagcc

SEQ ID NO: 367395 - RNA, 17 nt, Molluscum contagiosum virus
caggacuggcaccugcg

SEQ ID NO: 367396 - RNA, 18 nt, Molluscum contagiosum virus
caggagaacuacaaaacu

SEQ ID NO: 367397 - RNA, 17 nt, Molluscum contagiosum virus
caggaugcuggggcucg

SEQ ID NO: 367398 - RNA, 14 nt, Molluscum contagiosum virus
caggcaacgcacaa

SEQ ID NO: 367399 - RNA, 16 nt, Molluscum contagiosum virus
caggcagcugcugcgc

SEQ ID NO: 367400 - RNA, 18 nt, Molluscum contagiosum virus
caggcagugccgccgcgc

SEQ ID NO: 367401 - RNA, 18 nt, Molluscum contagiosum virus
caggcauggcauggcgcg

SEQ ID NO: 367402 - RNA, 14 nt, Molluscum contagiosum virus
caggccauggagcg

SEQ ID NO: 367403 - RNA, 17 nt, Molluscum contagiosum virus
caggccggucgcggaag

SEQ ID NO: 367404 - RNA, 21 nt, Molluscum contagiosum virus
caggccucuuuugcgucgcga

SEQ ID NO: 367405 - RNA, 14 nt, Molluscum contagiosum virus
caggcgccggcgcg

SEQ ID NO: 367406 - RNA, 18 nt, Molluscum contagiosum virus
caggcgcgcgccauccag

SEQ ID NO: 367407 - RNA, 18 nt, Molluscum contagiosum virus
caggcgcugcgcggcgcg

SEQ ID NO: 367408 - RNA, 15 nt, Molluscum contagiosum virus
caggcuaggcgcgac

SEQ ID NO: 367409 - RNA, 21 nt, Molluscum contagiosum virus
cagggaaaaaucccccgccag

SEQ ID NO: 367410 - RNA, 16 nt, Molluscum contagiosum virus
cagggaaagagcacgc

SEQ ID NO: 367411 - RNA, 18 nt, Molluscum contagiosum virus
cagggaugccagugcagu

SEQ ID NO: 367412 - RNA, 16 nt, Molluscum contagiosum virus
caggggccacaagcac

SEQ ID NO: 367413 - RNA, 14 nt, Molluscum contagiosum virus
caggucagguucuu

SEQ ID NO: 367414 - RNA, 23 nt, Molluscum contagiosum virus
caggucaucgacgagcacgagca

SEQ ID NO: 367415 - RNA, 20 nt, Molluscum contagiosum virus
cagguccgguguccacgaca

SEQ ID NO: 367416 - RNA, 17 nt, Molluscum contagiosum virus
caggugcacgugcugca

SEQ ID NO: 367417 - RNA, 18 nt, Molluscum contagiosum virus
caggugcgcaacugcgau

SEQ ID NO: 367418 - RNA, 14 nt, Molluscum contagiosum virus
caggugcugggcga

SEQ ID NO: 367419 - RNA, 20 nt, Molluscum contagiosum virus
cagguggccgcgcgcgcacg

SEQ ID NO: 367420 - RNA, 12 nt, Molluscum contagiosum virus
caguaccagcuc

SEQ ID NO: 367421 - RNA, 17 nt, Molluscum contagiosum virus
caguaccaguaccugcu

SEQ ID NO: 367422 - RNA, 23 nt, Molluscum contagiosum virus
caguacuucaucuucaagccgca

SEQ ID NO: 367423 - RNA, 16 nt, Molluscum contagiosum virus
ccaacacuaccacagc

SEQ ID NO: 367424 - RNA, 22 nt, Molluscum contagiosum virus
ccaaccgagcuugccacgagaa

SEQ ID NO: 367425 - RNA, 21 nt, Molluscum contagiosum virus
ccaacgcaccggcagggaaau

SEQ ID NO: 367426 - RNA, 22 nt, Molluscum contagiosum virus
ccaagaacagagaaaggcaccc

SEQ ID NO: 367427 - RNA, 17 nt, Molluscum contagiosum virus
ccaagaagaagcagcag

SEQ ID NO: 367428 - RNA, 19 nt, Molluscum contagiosum virus
ccaagaagaggccagcaca

SEQ ID NO: 367429 - RNA, 23 nt, Molluscum contagiosum virus
ccaagaagaggccggcacaagcc

SEQ ID NO: 367430 - RNA, 12 nt, Molluscum contagiosum virus
ccaagagccaug

SEQ ID NO: 367431 - RNA, 13 nt, Molluscum contagiosum virus
ccaagagccaugu

SEQ ID NO: 367432 - RNA, 19 nt, Molluscum contagiosum virus
ccaagaggacgagcugcua

SEQ ID NO: 367433 - RNA, 22 nt, Molluscum contagiosum virus
ccaagaggacgagcugcuaaca

SEQ ID NO: 367434 - RNA, 13 nt, Molluscum contagiosum virus
ccaagcgcuugcu

SEQ ID NO: 367435 - RNA, 19 nt, Molluscum contagiosum virus
ccaaggcgcugaaggcaua

SEQ ID NO: 367436 - RNA, 16 nt, Molluscum contagiosum virus
ccaaggggagacauau

SEQ ID NO: 367437 - RNA, 16 nt, Molluscum contagiosum virus
ccaauaaaugaugcua

SEQ ID NO: 367438 - RNA, 20 nt, Molluscum contagiosum virus
ccacacagaaguugccgcag

SEQ ID NO: 367439 - RNA, 22 nt, Molluscum contagiosum virus
ccacaccugugcccuguccaca

SEQ ID NO: 367440 - RNA, 21 nt, Molluscum contagiosum virus
ccacaccuuuugcuccaugac

SEQ ID NO: 367441 - RNA, 23 nt, Molluscum contagiosum virus
ccacauccuugauaaaagcacag

SEQ ID NO: 367442 - RNA, 18 nt, Molluscum contagiosum virus
ccacaugaccaagcacau

SEQ ID NO: 367443 - RNA, 19 nt, Molluscum contagiosum virus
ccacaugaccaagcacauu

SEQ ID NO: 367444 - RNA, 23 nt, Molluscum contagiosum virus
ccaccaugcgcacagcacuucuu

SEQ ID NO: 367445 - RNA, 16 nt, Molluscum contagiosum virus
ccaccguggaggagcc

SEQ ID NO: 367446 - RNA, 16 nt, Molluscum contagiosum virus
ccaccucgagcucguu

SEQ ID NO: 367447 - RNA, 15 nt, Molluscum contagiosum virus
ccacgacgggcucau

SEQ ID NO: 367448 - RNA, 23 nt, Molluscum contagiosum virus
ccacgcaaaaaacgaaaagccag

SEQ ID NO: 367449 - RNA, 22 nt, Molluscum contagiosum virus
ccacgcagaucaggagcauggc

SEQ ID NO: 367450 - RNA, 18 nt, Molluscum contagiosum virus
ccacgcgcaugaggcggc

SEQ ID NO: 367451 - RNA, 23 nt, Molluscum contagiosum virus
ccacgcggagcucgccaaagcgc

SEQ ID NO: 367452 - RNA, 15 nt, Molluscum contagiosum virus
ccacgcuguacaugc

SEQ ID NO: 367453 - RNA, 13 nt, Molluscum contagiosum virus
ccacguacuugcu

SEQ ID NO: 367454 - RNA, 18 nt, Molluscum contagiosum virus
ccacgucuccaacaagcu

SEQ ID NO: 367455 - RNA, 15 nt, Molluscum contagiosum virus
ccacgugcucaagug

SEQ ID NO: 367456 - RNA, 19 nt, Molluscum contagiosum virus
ccacgugcuccgugugcca

SEQ ID NO: 367457 - RNA, 15 nt, Molluscum contagiosum virus
ccacuaccaacucug

SEQ ID NO: 367458 - RNA, 13 nt, Molluscum contagiosum virus
ccacuacugggag

SEQ ID NO: 367459 - RNA, 18 nt, Molluscum contagiosum virus
ccacugccacggcugcaa

SEQ ID NO: 367460 - RNA, 22 nt, Molluscum contagiosum virus
ccacugccacggcugcaagcac

SEQ ID NO: 367461 - RNA, 16 nt, Molluscum contagiosum virus
ccagaaaacgcacugu

SEQ ID NO: 367462 - RNA, 14 nt, Molluscum contagiosum virus
ccagacgcacuugc

SEQ ID NO: 367463 - RNA, 15 nt, Molluscum contagiosum virus
ccagacgcagagcca

SEQ ID NO: 367464 - RNA, 12 nt, Molluscum contagiosum virus
ccagagcacugc

SEQ ID NO: 367465 - RNA, 23 nt, Molluscum contagiosum virus
ccagaggguggcuugcugcagua

SEQ ID NO: 367466 - RNA, 12 nt, Molluscum contagiosum virus
ccagcacaagcc

SEQ ID NO: 367467 - RNA, 14 nt, Molluscum contagiosum virus
ccagcagagcugcc

SEQ ID NO: 367468 - RNA, 20 nt, Molluscum contagiosum virus
ccagcagagcugcccgccag

SEQ ID NO: 367469 - RNA, 19 nt, Molluscum contagiosum virus
ccagcagcguugcuauuac

SEQ ID NO: 367470 - RNA, 21 nt, Molluscum contagiosum virus
ccagcauggcgccacaccagu

SEQ ID NO: 367471 - RNA, 16 nt, Molluscum contagiosum virus
ccagccaucgugcgcg

SEQ ID NO: 367472 - RNA, 15 nt, Molluscum contagiosum virus
ccagcccgacuucuc

SEQ ID NO: 367473 - RNA, 19 nt, Molluscum contagiosum virus
ccagcccgcugcgcauggc

SEQ ID NO: 367474 - RNA, 15 nt, Molluscum contagiosum virus
ccagccucucucgga

SEQ ID NO: 367475 - RNA, 13 nt, Molluscum contagiosum virus
ccagcgagaucaa

SEQ ID NO: 367476 - RNA, 18 nt, Molluscum contagiosum virus
ccagcgauugcccgcgcg

SEQ ID NO: 367477 - RNA, 18 nt, Molluscum contagiosum virus
ccagcggcagacuaagaa

SEQ ID NO: 367478 - RNA, 15 nt, Molluscum contagiosum virus
ccagcgugugaccgc

SEQ ID NO: 367479 - RNA, 15 nt, Molluscum contagiosum virus
ccagcucgcgcaguu

SEQ ID NO: 367480 - RNA, 20 nt, Molluscum contagiosum virus
ccagcucuuggcgggcaccg

SEQ ID NO: 367481 - RNA, 13 nt, Molluscum contagiosum virus
ccagcuucagcag

SEQ ID NO: 367482 - RNA, 21 nt, Molluscum contagiosum virus
ccaggaaaacggaaacagcac

SEQ ID NO: 367483 - RNA, 20 nt, Molluscum contagiosum virus
ccagguucucgcgguuguag

SEQ ID NO: 367484 - RNA, 20 nt, Molluscum contagiosum virus
ccagucucgaugugacaaca

SEQ ID NO: 367485 - RNA, 16 nt, Molluscum contagiosum virus
ccagugcgugcacugu

SEQ ID NO: 367486 - RNA, 17 nt, Molluscum contagiosum virus
ccagugcgugcacuguc

SEQ ID NO: 367487 - RNA, 15 nt, Molluscum contagiosum virus
ccaucgaaacucugc

SEQ ID NO: 367488 - RNA, 17 nt, Molluscum contagiosum virus
ccaucggagaagugcuc

SEQ ID NO: 367489 - RNA, 20 nt, Molluscum contagiosum virus
ccaugcucucgcugcugccc

SEQ ID NO: 367490 - RNA, 21 nt, Molluscum contagiosum virus
ccauggaggcgcuagugcaga

SEQ ID NO: 367491 - RNA, 22 nt, Molluscum contagiosum virus
ccauggaggcgcuagugcagau

SEQ ID NO: 367492 - RNA, 17 nt, Molluscum contagiosum virus
ccauggucacgcgcacg

SEQ ID NO: 367493 - RNA, 14 nt, Molluscum contagiosum virus
ccaugugcgaagac

SEQ ID NO: 367494 - RNA, 16 nt, Molluscum contagiosum virus
ccauucucucgagaga

SEQ ID NO: 367495 - RNA, 23 nt, Molluscum contagiosum virus
cccaaaagugaagaucaagcacg

SEQ ID NO: 367496 - RNA, 12 nt, Molluscum contagiosum virus
cccaaacauguc

SEQ ID NO: 367497 - RNA, 14 nt, Molluscum contagiosum virus
cccaagagccaugu

SEQ ID NO: 367498 - RNA, 15 nt, Molluscum contagiosum virus
cccaccagcaggugg

SEQ ID NO: 367499 - RNA, 12 nt, Molluscum contagiosum virus
cccaccaggaac

SEQ ID NO: 367500 - RNA, 17 nt, Molluscum contagiosum virus
cccagugcgagaucgac

SEQ ID NO: 367501 - RNA, 18 nt, Molluscum contagiosum virus
cccauguaggagcagggu

SEQ ID NO: 367502 - RNA, 14 nt, Molluscum contagiosum virus
cccauuccuuguga

SEQ ID NO: 367503 - RNA, 12 nt, Molluscum contagiosum virus
cccccgcggagc

SEQ ID NO: 367504 - RNA, 13 nt, Molluscum contagiosum virus
cccccucuuggca

SEQ ID NO: 367505 - RNA, 20 nt, Molluscum contagiosum virus
ccccgaacugcugggcgugg

SEQ ID NO: 367506 - RNA, 19 nt, Molluscum contagiosum virus
ccccggcguccggcgcucg

SEQ ID NO: 367507 - RNA, 19 nt, Molluscum contagiosum virus
ccccgugcacgauagcuuc

SEQ ID NO: 367508 - RNA, 20 nt, Molluscum contagiosum virus
ccccuacguggucauggugc

SEQ ID NO: 367509 - RNA, 15 nt, Molluscum contagiosum virus
ccccuccaagaacga

SEQ ID NO: 367510 - RNA, 13 nt, Molluscum contagiosum virus
ccccucuuggcaa

SEQ ID NO: 367511 - RNA, 12 nt, Molluscum contagiosum virus
ccccugcugcuc

SEQ ID NO: 367512 - RNA, 19 nt, Molluscum contagiosum virus
ccccugcugcucgcggagg

SEQ ID NO: 367513 - RNA, 13 nt, Molluscum contagiosum virus
cccgaacaaaaag

SEQ ID NO: 367514 - RNA, 15 nt, Molluscum contagiosum virus
cccgaccccaagaag

SEQ ID NO: 367515 - RNA, 19 nt, Molluscum contagiosum virus
cccgaccuuggugcucauc

SEQ ID NO: 367516 - RNA, 14 nt, Molluscum contagiosum virus
cccgagcuggugau

SEQ ID NO: 367517 - RNA, 18 nt, Molluscum contagiosum virus
cccgaguacgcucuccau

SEQ ID NO: 367518 - RNA, 21 nt, Molluscum contagiosum virus
cccgcaacaaggaaaggcacc

SEQ ID NO: 367519 - RNA, 14 nt, Molluscum contagiosum virus
cccgcaaugcaagc

SEQ ID NO: 367520 - RNA, 19 nt, Molluscum contagiosum virus
cccgcacaagggcagcuca

SEQ ID NO: 367521 - RNA, 23 nt, Molluscum contagiosum virus
cccgcaugaaaagcauccaggcc

SEQ ID NO: 367522 - RNA, 17 nt, Molluscum contagiosum virus
cccgccagaagugaaau

SEQ ID NO: 367523 - RNA, 22 nt, Molluscum contagiosum virus
cccgccgaguaccgcgcgcacg

SEQ ID NO: 367524 - RNA, 18 nt, Molluscum contagiosum virus
cccgccgcgugcccgucu

SEQ ID NO: 367525 - RNA, 19 nt, Molluscum contagiosum virus
cccgcgcgcgacuacgcac

SEQ ID NO: 367526 - RNA, 14 nt, Molluscum contagiosum virus
ccggcacgcacaaa

SEQ ID NO: 367527 - RNA, 15 nt, Molluscum contagiosum virus
ccggcacgcacaaag

SEQ ID NO: 367528 - RNA, 15 nt, Molluscum contagiosum virus
ccggcaggcucccgc

SEQ ID NO: 367529 - RNA, 17 nt, Molluscum contagiosum virus
ccggcaugggcaaggac

SEQ ID NO: 367530 - RNA, 19 nt, Molluscum contagiosum virus
ccggcaugggcaaggacau

SEQ ID NO: 367531 - RNA, 13 nt, Molluscum contagiosum virus
ccggccuagagcu

SEQ ID NO: 367532 - RNA, 20 nt, Molluscum contagiosum virus
ccggccuuguucgcgcuucu

SEQ ID NO: 367533 - RNA, 17 nt, Molluscum contagiosum virus
ccggcgccgcuaccagc

SEQ ID NO: 367534 - RNA, 19 nt, Molluscum contagiosum virus
ccggcgccgcuaccagcuc

SEQ ID NO: 367535 - RNA, 14 nt, Molluscum contagiosum virus
ccggcucaagaaca

SEQ ID NO: 367536 - RNA, 18 nt, Molluscum contagiosum virus
ccggcucaagaacaccaa

SEQ ID NO: 367537 - RNA, 21 nt, Molluscum contagiosum virus
ccggcucaagaacaccaagag

SEQ ID NO: 367538 - RNA, 15 nt, Molluscum contagiosum virus
ccgggaaacgcacag

SEQ ID NO: 367539 - RNA, 17 nt, Molluscum contagiosum virus
ccggggcccaugcucac

SEQ ID NO: 367540 - RNA, 22 nt, Molluscum contagiosum virus
ccggguuuuuucccaugcucga

SEQ ID NO: 367541 - RNA, 17 nt, Molluscum contagiosum virus
ccgguacguacagugcg

SEQ ID NO: 367542 - RNA, 19 nt, Molluscum contagiosum virus
ccggugcugcugccaauac

SEQ ID NO: 367543 - RNA, 14 nt, Molluscum contagiosum virus
ccgguguccacgac

SEQ ID NO: 367544 - RNA, 17 nt, Molluscum contagiosum virus
ccgguugcgcgugugca

SEQ ID NO: 367545 - RNA, 19 nt, Molluscum contagiosum virus
ccguaagucgaagaggguc

SEQ ID NO: 367546 - RNA, 22 nt, Molluscum contagiosum virus
ccgucagggaugccagugcagu

SEQ ID NO: 367547 - RNA, 17 nt, Molluscum contagiosum virus
ccguccgugccauuucg

SEQ ID NO: 367548 - RNA, 17 nt, Molluscum contagiosum virus
ccgucucgcggggcaag

SEQ ID NO: 367549 - RNA, 13 nt, Molluscum contagiosum virus
ccgugaacucgac

SEQ ID NO: 367550 - RNA, 21 nt, Molluscum contagiosum virus
ccgugacggccguguacaugc

SEQ ID NO: 367551 - RNA, 19 nt, Molluscum contagiosum virus
ccgugcgcagggcaaucgc

SEQ ID NO: 367552 - RNA, 22 nt, Molluscum contagiosum virus
ccgugcgcgacggcgagcucuu

SEQ ID NO: 367553 - RNA, 23 nt, Molluscum contagiosum virus
ccgugcugcgucacaagcaccgc

SEQ ID NO: 367554 - RNA, 23 nt, Molluscum contagiosum virus
ccgugcuugcgcacggaccucaa

SEQ ID NO: 367555 - RNA, 16 nt, Molluscum contagiosum virus
ccguggaguccaugcc

SEQ ID NO: 367556 - RNA, 12 nt, Molluscum contagiosum virus
ccguggcacuga

SEQ ID NO: 367557 - RNA, 15 nt, Molluscum contagiosum virus
ccguguacgcauuca

SEQ ID NO: 367558 - RNA, 16 nt, Molluscum contagiosum virus
ccgugugaaaguccac

SEQ ID NO: 367559 - RNA, 11 nt, Molluscum contagiosum virus
ccguucacuug

SEQ ID NO: 367560 - RNA, 13 nt, Molluscum contagiosum virus
ccguuccacuaca

SEQ ID NO: 367561 - RNA, 12 nt, Molluscum contagiosum virus
ccguugcugcgc

SEQ ID NO: 367562 - RNA, 14 nt, Molluscum contagiosum virus
ccguuggacaucag

SEQ ID NO: 367563 - RNA, 17 nt, Molluscum contagiosum virus
ccuacaucgacaagcac

SEQ ID NO: 367564 - RNA, 19 nt, Molluscum contagiosum virus
ccuacgcgcgcgugcugcu

SEQ ID NO: 367565 - RNA, 13 nt, Molluscum contagiosum virus
ccuacgcuaccug

SEQ ID NO: 367566 - RNA, 14 nt, Molluscum contagiosum virus
ccuacgcuaccuga

SEQ ID NO: 367567 - RNA, 15 nt, Molluscum contagiosum virus
ccuacgcuaccugaa

SEQ ID NO: 367568 - RNA, 17 nt, Molluscum contagiosum virus
ccuacgucaagcaggca

SEQ ID NO: 367569 - RNA, 20 nt, Molluscum contagiosum virus
ccuacguggcgucgcgccgc

SEQ ID NO: 367570 - RNA, 17 nt, Molluscum contagiosum virus
ccuacuucgucaagcag

SEQ ID NO: 367571 - RNA, 17 nt, Molluscum contagiosum virus
ccuagaaacgacgggcg

SEQ ID NO: 367572 - RNA, 22 nt, Molluscum contagiosum virus
ccuagcagacaacugcgucuca

SEQ ID NO: 367573 - RNA, 18 nt, Molluscum contagiosum virus
ccuaggcacuccgcgcac

SEQ ID NO: 367574 - RNA, 21 nt, Molluscum contagiosum virus
ccuaggcacuccgcgcaccgc

SEQ ID NO: 367575 - RNA, 18 nt, Molluscum contagiosum virus
ccuagguccacauuucaa

SEQ ID NO: 367576 - RNA, 18 nt, Molluscum contagiosum virus
ccucaaccgcauguccac

SEQ ID NO: 367577 - RNA, 15 nt, Molluscum contagiosum virus
ccucaccgcgcacau

SEQ ID NO: 367578 - RNA, 18 nt, Molluscum contagiosum virus
ccucaccgcgcacaucuc

SEQ ID NO: 367579 - RNA, 21 nt, Molluscum contagiosum virus
ccucaccuuucucuuucucaa

SEQ ID NO: 367580 - RNA, 23 nt, Molluscum contagiosum virus
ccucagccgagcgccgccagcuc

SEQ ID NO: 367581 - RNA, 21 nt, Molluscum contagiosum virus
ccucaucgugagccuggucga

SEQ ID NO: 367582 - RNA, 14 nt, Molluscum contagiosum virus
ccuccagggcacga

SEQ ID NO: 367583 - RNA, 16 nt, Molluscum contagiosum virus
ccucccugguaguccu

SEQ ID NO: 367584 - RNA, 22 nt, Molluscum contagiosum virus
ccuccgcgaccgcgaacugcaa

SEQ ID NO: 367585 - RNA, 12 nt, Molluscum contagiosum virus
ccuccgcucuga

SEQ ID NO: 367586 - RNA, 14 nt, Molluscum contagiosum virus
ccuccggggcgcaa

SEQ ID NO: 367587 - RNA, 17 nt, Molluscum contagiosum virus
ccucgaggucgugcagg

SEQ ID NO: 367588 - RNA, 18 nt, Molluscum contagiosum virus
ccucgcgcgccgccgcaa

SEQ ID NO: 367589 - RNA, 20 nt, Molluscum contagiosum virus
ccucgcguagcagcgccugc

SEQ ID NO: 367590 - RNA, 16 nt, Molluscum contagiosum virus
ccucgcucgugcucuu

SEQ ID NO: 367591 - RNA, 13 nt, Molluscum contagiosum virus
ccucggcgcacac

SEQ ID NO: 367592 - RNA, 13 nt, Molluscum contagiosum virus
ccucguggaacaa

SEQ ID NO: 367593 - RNA, 13 nt, Molluscum contagiosum virus
ccucuacaccagc

SEQ ID NO: 367594 - RNA, 15 nt, Molluscum contagiosum virus
ccucuacaccagcug

SEQ ID NO: 367595 - RNA, 21 nt, Molluscum contagiosum virus
ccucuacacgcacgaccucac

SEQ ID NO: 367596 - RNA, 19 nt, Molluscum contagiosum virus
ccucucgaggccggcacga

SEQ ID NO: 367597 - RNA, 18 nt, Molluscum contagiosum virus
ccucugagcgagcgcagu

SEQ ID NO: 367598 - RNA, 22 nt, Molluscum contagiosum virus
ccucugggcgucgcacaguuca

SEQ ID NO: 367599 - RNA, 19 nt, Molluscum contagiosum virus
ccugacggcagcaagcgca

SEQ ID NO: 367600 - RNA, 13 nt, Molluscum contagiosum virus
ccugagaagcaau

SEQ ID NO: 367601 - RNA, 14 nt, Molluscum contagiosum virus
ccugagaagcaaug

SEQ ID NO: 367602 - RNA, 21 nt, Molluscum contagiosum virus
ccugagaagcuguaccuggug

SEQ ID NO: 367603 - RNA, 15 nt, Molluscum contagiosum virus
ccugaggaagcaaga

SEQ ID NO: 367604 - RNA, 13 nt, Molluscum contagiosum virus
ccugauaugcaua

SEQ ID NO: 367605 - RNA, 13 nt, Molluscum contagiosum virus
ccugcacaagcag

SEQ ID NO: 367606 - RNA, 16 nt, Molluscum contagiosum virus
ccugcacgacccucuu

SEQ ID NO: 367607 - RNA, 15 nt, Molluscum contagiosum virus
ccugcacgcgcacuu

SEQ ID NO: 367608 - RNA, 17 nt, Molluscum contagiosum virus
ccugcacgcgcacuugc

SEQ ID NO: 367609 - RNA, 18 nt, Molluscum contagiosum virus
ccugcacgcgcacuugcc

SEQ ID NO: 367610 - RNA, 22 nt, Molluscum contagiosum virus
ccugcaggaaaggcacccgcag

SEQ ID NO: 367611 - RNA, 14 nt, Molluscum contagiosum virus
ccugccacaccagc

SEQ ID NO: 367612 - RNA, 15 nt, Molluscum contagiosum virus
ccugccacaccagcu

SEQ ID NO: 367613 - RNA, 22 nt, Molluscum contagiosum virus
ccugcgcaacgugcugcgccgc

SEQ ID NO: 367614 - RNA, 15 nt, Molluscum contagiosum virus
ccugcgccauccacg

SEQ ID NO: 367615 - RNA, 14 nt, Molluscum contagiosum virus
ccugcgccuggcau

SEQ ID NO: 367616 - RNA, 20 nt, Molluscum contagiosum virus
ccugcgcuuccucuacacca

SEQ ID NO: 367617 - RNA, 17 nt, Molluscum contagiosum virus
ccugcgggcggcacaca

SEQ ID NO: 367618 - RNA, 14 nt, Molluscum contagiosum virus
ccugcgugcuuccc

SEQ ID NO: 367619 - RNA, 23 nt, Molluscum contagiosum virus
ccugcuagugcgcgccaagaaca

SEQ ID NO: 367620 - RNA, 16 nt, Molluscum contagiosum virus
ccugcugcagcuccgc

SEQ ID NO: 367621 - RNA, 13 nt, Molluscum contagiosum virus
ccugcuugcccgc

SEQ ID NO: 367622 - RNA, 20 nt, Molluscum contagiosum virus
ccuggaacgcgaccuucacu

SEQ ID NO: 367623 - RNA, 18 nt, Molluscum contagiosum virus
ccuggaacucuacgccgc

SEQ ID NO: 367624 - RNA, 21 nt, Molluscum contagiosum virus
ccuggaagcuuccuuuuucac

SEQ ID NO: 367625 - RNA, 13 nt, Molluscum contagiosum virus
ccuggaccuccau

SEQ ID NO: 367626 - RNA, 15 nt, Molluscum contagiosum virus
ccuggagcgcagucc

SEQ ID NO: 367627 - RNA, 22 nt, Molluscum contagiosum virus
ccuggagggguguuuccuugcc

SEQ ID NO: 367628 - RNA, 21 nt, Molluscum contagiosum virus
ccuggagggucacgcgcacau

SEQ ID NO: 367629 - RNA, 16 nt, Molluscum contagiosum virus
cgagcgccgccagcuc

SEQ ID NO: 367630 - RNA, 21 nt, Molluscum contagiosum virus
cgagcgccgccagcuccgcgc

SEQ ID NO: 367631 - RNA, 14 nt, Molluscum contagiosum virus
cgagcgccugcgag

SEQ ID NO: 367632 - RNA, 16 nt, Molluscum contagiosum virus
cgagcgcgccgcgcgc

SEQ ID NO: 367633 - RNA, 13 nt, Molluscum contagiosum virus
cgagcgcgcgcgc

SEQ ID NO: 367634 - RNA, 14 nt, Molluscum contagiosum virus
cgagcgcgggcgcc

SEQ ID NO: 367635 - RNA, 16 nt, Molluscum contagiosum virus
cgagcgcguccaugag

SEQ ID NO: 367636 - RNA, 20 nt, Molluscum contagiosum virus
cgagcgcguccaugagcauc

SEQ ID NO: 367637 - RNA, 15 nt, Molluscum contagiosum virus
cgagcgcgugcucuu

SEQ ID NO: 367638 - RNA, 14 nt, Molluscum contagiosum virus
cgagcgcuaccuga

SEQ ID NO: 367639 - RNA, 19 nt, Molluscum contagiosum virus
cgagcgcuaccugaugcgc

SEQ ID NO: 367640 - RNA, 12 nt, Molluscum contagiosum virus
cgagcgcugccg

SEQ ID NO: 367641 - RNA, 17 nt, Molluscum contagiosum virus
cgagcggagcgggcacg

SEQ ID NO: 367642 - RNA, 14 nt, Molluscum contagiosum virus
cgagcuacugcgcg

SEQ ID NO: 367643 - RNA, 15 nt, Molluscum contagiosum virus
cgagcuacugcgcgc

SEQ ID NO: 367644 - RNA, 17 nt, Molluscum contagiosum virus
cgagcucaaggacaucu

SEQ ID NO: 367645 - RNA, 23 nt, Molluscum contagiosum virus
cgagcugcaucuuuuuuaugcac

SEQ ID NO: 367646 - RNA, 14 nt, Molluscum contagiosum virus
cgagcugcggcgcg

SEQ ID NO: 367647 - RNA, 14 nt, Molluscum contagiosum virus
cgagcugcugcgcg

SEQ ID NO: 367648 - RNA, 21 nt, Molluscum contagiosum virus
cgagcuggugauccuggauau

SEQ ID NO: 367649 - RNA, 23 nt, Molluscum contagiosum virus
cgagcuuugugcgaccugcugcg

SEQ ID NO: 367650 - RNA, 14 nt, Molluscum contagiosum virus
cgaggaauaccugc

SEQ ID NO: 367651 - RNA, 20 nt, Molluscum contagiosum virus
cgaggccugcguggacagca

SEQ ID NO: 367652 - RNA, 17 nt, Molluscum contagiosum virus
cgagggcgccgggcgca

SEQ ID NO: 367653 - RNA, 22 nt, Molluscum contagiosum virus
cgaggucacucgcuacugcaac

SEQ ID NO: 367654 - RNA, 21 nt, Molluscum contagiosum virus
cgaggugcgcgcaacacugca

SEQ ID NO: 367655 - RNA, 13 nt, Molluscum contagiosum virus
cgagguggccaag

SEQ ID NO: 367656 - RNA, 22 nt, Molluscum contagiosum virus
cgaguacgcucuccaugcgcgc

SEQ ID NO: 367657 - RNA, 16 nt, Molluscum contagiosum virus
cgaguacugcugcggc

SEQ ID NO: 367658 - RNA, 20 nt, Molluscum contagiosum virus
cgaguccccagacuucucca

SEQ ID NO: 367659 - RNA, 17 nt, Molluscum contagiosum virus
cgaguccuacguuuuca

SEQ ID NO: 367660 - RNA, 15 nt, Molluscum contagiosum virus
cgagucgcgggcgcg

SEQ ID NO: 367661 - RNA, 19 nt, Molluscum contagiosum virus
cgagugauccuugccaagc

SEQ ID NO: 367662 - RNA, 14 nt, Molluscum contagiosum virus
cgagugcuggccga

SEQ ID NO: 367663 - RNA, 12 nt, Molluscum contagiosum virus
cgagugugcaug

SEQ ID NO: 367664 - RNA, 19 nt, Molluscum contagiosum virus
cgagugugugcaucccucg

SEQ ID NO: 367665 - RNA, 16 nt, Molluscum contagiosum virus
cgaucaaggugcagaa

SEQ ID NO: 367666 - RNA, 23 nt, Molluscum contagiosum virus
cgaucauguccacagccgugagc

SEQ ID NO: 367667 - RNA, 15 nt, Molluscum contagiosum virus
cgaucccgacacugc

SEQ ID NO: 367668 - RNA, 15 nt, Molluscum contagiosum virus
cgauccuguccaucu

SEQ ID NO: 367669 - RNA, 13 nt, Molluscum contagiosum virus
cgaugacaucugg

SEQ ID NO: 367670 - RNA, 17 nt, Molluscum contagiosum virus
cgaugagaacaacagcg

SEQ ID NO: 367671 - RNA, 14 nt, Molluscum contagiosum virus
cgauggacgccagc

SEQ ID NO: 367672 - RNA, 18 nt, Molluscum contagiosum virus
cgauggccggcaacuggc

SEQ ID NO: 367673 - RNA, 18 nt, Molluscum contagiosum virus
cgauguacgcgugcagga

SEQ ID NO: 367674 - RNA, 21 nt, Molluscum contagiosum virus
cgaugucggaacccagaaaga

SEQ ID NO: 367675 - RNA, 21 nt, Molluscum contagiosum virus
cgaugugacaacaugugaucc

SEQ ID NO: 367676 - RNA, 12 nt, Molluscum contagiosum virus
cgaugugcaccu

SEQ ID NO: 367677 - RNA, 19 nt, Molluscum contagiosum virus
cgaugugcgcgcgacgugu

SEQ ID NO: 367678 - RNA, 18 nt, Molluscum contagiosum virus
cgauuacaucgaaaccau

SEQ ID NO: 367679 - RNA, 23 nt, Molluscum contagiosum virus
cgauuuaacuaagcuaaaagagc

SEQ ID NO: 367680 - RNA, 12 nt, Molluscum contagiosum virus
cgcaacaaggaa

SEQ ID NO: 367681 - RNA, 20 nt, Molluscum contagiosum virus
cgcaaccgcgugcgugcaca

SEQ ID NO: 367682 - RNA, 12 nt, Molluscum contagiosum virus
cgcaacgcuggc

SEQ ID NO: 367683 - RNA, 18 nt, Molluscum contagiosum virus
cgcaacgucgcacuggcc

SEQ ID NO: 367684 - RNA, 18 nt, Molluscum contagiosum virus
cgcaagcgcugcucguag

SEQ ID NO: 367685 - RNA, 21 nt, Molluscum contagiosum virus
cgcaaggccgcgcccaagaag

SEQ ID NO: 367686 - RNA, 18 nt, Molluscum contagiosum virus
cgcaagucaccgcuccgc

SEQ ID NO: 367687 - RNA, 14 nt, Molluscum contagiosum virus
cgcaagugugcgca

SEQ ID NO: 367688 - RNA, 17 nt, Molluscum contagiosum virus
cgcaaugcagugcacca

SEQ ID NO: 367689 - RNA, 15 nt, Molluscum contagiosum virus
cgcacaaaacacaaa

SEQ ID NO: 367690 - RNA, 23 nt, Molluscum contagiosum virus
cgcacacgaaucgcucgcggugc

SEQ ID NO: 367691 - RNA, 20 nt, Molluscum contagiosum virus
cgcacacgagugcccgcgcg

SEQ ID NO: 367692 - RNA, 12 nt, Molluscum contagiosum virus
cgcacacuugcg

SEQ ID NO: 367693 - RNA, 22 nt, Molluscum contagiosum virus
cgcacacuugcgcguccacaaa

SEQ ID NO: 367694 - RNA, 16 nt, Molluscum contagiosum virus
cgcacagaaagccaac

SEQ ID NO: 367695 - RNA, 18 nt, Molluscum contagiosum virus
cgcacagccccugcugcu

SEQ ID NO: 367696 - RNA, 10 nt, Molluscum contagiosum virus
cgcacaguuc

SEQ ID NO: 367697 - RNA, 12 nt, Molluscum contagiosum virus
cgcacaguucac

SEQ ID NO: 367698 - RNA, 22 nt, Molluscum contagiosum virus
cgcaccagcugcaaacauugcc

SEQ ID NO: 367699 - RNA, 21 nt, Molluscum contagiosum virus
cgcaccgccuggugcugcgcg

SEQ ID NO: 367700 - RNA, 14 nt, Molluscum contagiosum virus
cgcaccguacucgc

SEQ ID NO: 367701 - RNA, 19 nt, Molluscum contagiosum virus
cgcaccuugacgccgcgcg

SEQ ID NO: 367702 - RNA, 20 nt, Molluscum contagiosum virus
cgcacgcgaacgccuacgcg

SEQ ID NO: 367703 - RNA, 13 nt, Molluscum contagiosum virus
cgcacgcgagcac

SEQ ID NO: 367704 - RNA, 14 nt, Molluscum contagiosum virus
cgcacggccugcgg

SEQ ID NO: 367705 - RNA, 16 nt, Molluscum contagiosum virus
cgcacgggccugcgcg

SEQ ID NO: 367706 - RNA, 12 nt, Molluscum contagiosum virus
cgcacgggcgca

SEQ ID NO: 367707 - RNA, 14 nt, Molluscum contagiosum virus
cgcacgugcugcgc

SEQ ID NO: 367708 - RNA, 19 nt, Molluscum contagiosum virus
cgcacgugcugcgcuacca

SEQ ID NO: 367709 - RNA, 13 nt, Molluscum contagiosum virus
cgcacguggaauc

SEQ ID NO: 367710 - RNA, 22 nt, Molluscum contagiosum virus
cgcacuauggacgcuugcuagc

SEQ ID NO: 367711 - RNA, 20 nt, Molluscum contagiosum virus
cgcacucguggcaacaacau

SEQ ID NO: 367712 - RNA, 18 nt, Molluscum contagiosum virus
cgcacuggcgcugcuaua

SEQ ID NO: 367713 - RNA, 13 nt, Molluscum contagiosum virus
cgcagaagccaac

SEQ ID NO: 367714 - RNA, 18 nt, Molluscum contagiosum virus
cgcagacgcagcgcgagc

SEQ ID NO: 367715 - RNA, 15 nt, Molluscum contagiosum virus
cgcagagccagcgcg

SEQ ID NO: 367716 - RNA, 15 nt, Molluscum contagiosum virus
cgcagagccaugccc

SEQ ID NO: 367717 - RNA, 22 nt, Molluscum contagiosum virus
cgcagagcuccccgcgcgcagc

SEQ ID NO: 367718 - RNA, 22 nt, Molluscum contagiosum virus
cgcagcaggugcacgugcugca

SEQ ID NO: 367719 - RNA, 23 nt, Molluscum contagiosum virus
cgcagcaggugcacgugcugcag

SEQ ID NO: 367720 - RNA, 16 nt, Molluscum contagiosum virus
cgcagccgguacucgu

SEQ ID NO: 367721 - RNA, 18 nt, Molluscum contagiosum virus
cgcagccgguacucgugc

SEQ ID NO: 367722 - RNA, 15 nt, Molluscum contagiosum virus
cgcagcgcgcaaaag

SEQ ID NO: 367723 - RNA, 16 nt, Molluscum contagiosum virus
cgcagcuccuagcgcg

SEQ ID NO: 367724 - RNA, 16 nt, Molluscum contagiosum virus
cgcagcucgccgcgcg

SEQ ID NO: 367725 - RNA, 21 nt, Molluscum contagiosum virus
cgcagcuguggcgccugcgcg

SEQ ID NO: 367726 - RNA, 13 nt, Molluscum contagiosum virus
cgcaggacacugu

SEQ ID NO: 367727 - RNA, 13 nt, Molluscum contagiosum virus
cgcaggagcaguc

SEQ ID NO: 367728 - RNA, 12 nt, Molluscum contagiosum virus
cgcaggaugcug

SEQ ID NO: 367729 - RNA, 18 nt, Molluscum contagiosum virus
cgcaggcacaaaacacaa

SEQ ID NO: 367730 - RNA, 17 nt, Molluscum contagiosum virus
cgcaggcgucaugcgcg

SEQ ID NO: 367731 - RNA, 15 nt, Molluscum contagiosum virus
cgcaggcucuggcaa

SEQ ID NO: 367732 - RNA, 20 nt, Molluscum contagiosum virus
cgcgccucucgaggccggca

SEQ ID NO: 367733 - RNA, 15 nt, Molluscum contagiosum virus
cgcgccugcgcgagc

SEQ ID NO: 367734 - RNA, 13 nt, Molluscum contagiosum virus
cgcgccugcuggc

SEQ ID NO: 367735 - RNA, 15 nt, Molluscum contagiosum virus
cgcgcgacacgagcg

SEQ ID NO: 367736 - RNA, 21 nt, Molluscum contagiosum virus
cgcgcgacgugugcucugugc

SEQ ID NO: 367737 - RNA, 13 nt, Molluscum contagiosum virus
cgcgcgcacugcg

SEQ ID NO: 367738 - RNA, 22 nt, Molluscum contagiosum virus
cgcgcgcagcaggugcacgugc

SEQ ID NO: 367739 - RNA, 17 nt, Molluscum contagiosum virus
cgcgcgcaugcucgcgc

SEQ ID NO: 367740 - RNA, 12 nt, Molluscum contagiosum virus
cgcgcgccagca

SEQ ID NO: 367741 - RNA, 22 nt, Molluscum contagiosum virus
cgcgcgccagcaagcucgaugc

SEQ ID NO: 367742 - RNA, 12 nt, Molluscum contagiosum virus
cgcgcgccgcgc

SEQ ID NO: 367743 - RNA, 17 nt, Molluscum contagiosum virus
cgcgcgccucgccaaag

SEQ ID NO: 367744 - RNA, 17 nt, Molluscum contagiosum virus
cgcgcgccuugcagcgc

SEQ ID NO: 367745 - RNA, 15 nt, Molluscum contagiosum virus
cgcgcgcgagcacgu

SEQ ID NO: 367746 - RNA, 14 nt, Molluscum contagiosum virus
cgcgcgcgccgcag

SEQ ID NO: 367747 - RNA, 16 nt, Molluscum contagiosum virus
cgcgcgcgcgcggcgc

SEQ ID NO: 367748 - RNA, 13 nt, Molluscum contagiosum virus
cgcgcgcgcggcg

SEQ ID NO: 367749 - RNA, 14 nt, Molluscum contagiosum virus
cgcgcgcgcucugc

SEQ ID NO: 367750 - RNA, 12 nt, Molluscum contagiosum virus
cgcgcgcggcaa

SEQ ID NO: 367751 - RNA, 12 nt, Molluscum contagiosum virus
cgcgcgcggcac

SEQ ID NO: 367752 - RNA, 12 nt, Molluscum contagiosum virus
cgcgcgcgugcc

SEQ ID NO: 367753 - RNA, 20 nt, Molluscum contagiosum virus
cgcgcgcguuugucgcgggc

SEQ ID NO: 367754 - RNA, 19 nt, Molluscum contagiosum virus
cgcgcgcugagcgcggagc

SEQ ID NO: 367755 - RNA, 14 nt, Molluscum contagiosum virus
cgcgcgcugcgcgc

SEQ ID NO: 367756 - RNA, 12 nt, Molluscum contagiosum virus
cgcgcggcagca

SEQ ID NO: 367757 - RNA, 14 nt, Molluscum contagiosum virus
cgcgcggcgcagug

SEQ ID NO: 367758 - RNA, 15 nt, Molluscum contagiosum virus
cgcgcggcgcucugc

SEQ ID NO: 367759 - RNA, 18 nt, Molluscum contagiosum virus
cgcgcggcuaagcucugc

SEQ ID NO: 367760 - RNA, 14 nt, Molluscum contagiosum virus
cgcgcgguccgcca

SEQ ID NO: 367761 - RNA, 14 nt, Molluscum contagiosum virus
cgcgcgugcucgac

SEQ ID NO: 367762 - RNA, 14 nt, Molluscum contagiosum virus
cgcgcucacugcag

SEQ ID NO: 367763 - RNA, 15 nt, Molluscum contagiosum virus
cgcgcucgcgcuucc

SEQ ID NO: 367764 - RNA, 17 nt, Molluscum contagiosum virus
cgcgcucuacgccagcg

SEQ ID NO: 367765 - RNA, 20 nt, Molluscum contagiosum virus
cgcgcugaucaccgaggagc

SEQ ID NO: 367766 - RNA, 13 nt, Molluscum contagiosum virus
cgcgcugcuuccc

SEQ ID NO: 367767 - RNA, 20 nt, Molluscum contagiosum virus
cgcgcugcuucccgcugagc

SEQ ID NO: 367768 - RNA, 16 nt, Molluscum contagiosum virus
cgcggaaacaagcaca

SEQ ID NO: 367769 - RNA, 13 nt, Molluscum contagiosum virus
cgcggacgcgggc

SEQ ID NO: 367770 - RNA, 15 nt, Molluscum contagiosum virus
cgcggagagcagugc

SEQ ID NO: 367771 - RNA, 22 nt, Molluscum contagiosum virus
cgcggagcgcuagcagggcggc

SEQ ID NO: 367772 - RNA, 19 nt, Molluscum contagiosum virus
cgcggcagacaacaccagc

SEQ ID NO: 367773 - RNA, 14 nt, Molluscum contagiosum virus
cgcggccgcggagg

SEQ ID NO: 367774 - RNA, 17 nt, Molluscum contagiosum virus
cgcggcgagucgcgggc

SEQ ID NO: 367775 - RNA, 20 nt, Molluscum contagiosum virus
cgcggcgagugcggccacca

SEQ ID NO: 367776 - RNA, 15 nt, Molluscum contagiosum virus
cgcggcgcacggugu

SEQ ID NO: 367777 - RNA, 13 nt, Molluscum contagiosum virus
cgcggcgcagugc

SEQ ID NO: 367778 - RNA, 20 nt, Molluscum contagiosum virus
cgcggcgccgcagcacgcgu

SEQ ID NO: 367779 - RNA, 18 nt, Molluscum contagiosum virus
cgcggcggaaguggugcc

SEQ ID NO: 367780 - RNA, 16 nt, Molluscum contagiosum virus
cgcggcgggggcagca

SEQ ID NO: 367781 - RNA, 22 nt, Molluscum contagiosum virus
cgcggcgguugcccgccugccg

SEQ ID NO: 367782 - RNA, 23 nt, Molluscum contagiosum virus
cgcggcuaccacgggcccgcgcg

SEQ ID NO: 367783 - RNA, 13 nt, Molluscum contagiosum virus
cgcgggagcggcc

SEQ ID NO: 367784 - RNA, 19 nt, Molluscum contagiosum virus
cgcgggcguguccgcgggc

SEQ ID NO: 367785 - RNA, 18 nt, Molluscum contagiosum virus
cgcggugagugcgcgcac

SEQ ID NO: 367786 - RNA, 15 nt, Molluscum contagiosum virus
cgcggugcagcugcc

SEQ ID NO: 367787 - RNA, 15 nt, Molluscum contagiosum virus
cgcggugcgggcgcg

SEQ ID NO: 367788 - RNA, 16 nt, Molluscum contagiosum virus
cgcguaaagagcgucc

SEQ ID NO: 367789 - RNA, 14 nt, Molluscum contagiosum virus
cgcguacagcgcgc

SEQ ID NO: 367790 - RNA, 17 nt, Molluscum contagiosum virus
cgcguacauccgcgagc

SEQ ID NO: 367791 - RNA, 15 nt, Molluscum contagiosum virus
cgcguaccagcgccu

SEQ ID NO: 367792 - RNA, 13 nt, Molluscum contagiosum virus
cgcguagcagcgc

SEQ ID NO: 367793 - RNA, 20 nt, Molluscum contagiosum virus
cgcgucaucgcugcacgcga

SEQ ID NO: 367794 - RNA, 14 nt, Molluscum contagiosum virus
cgcguccacaaaga

SEQ ID NO: 367795 - RNA, 22 nt, Molluscum contagiosum virus
cgcguccacgaacgacagcgcc

SEQ ID NO: 367796 - RNA, 12 nt, Molluscum contagiosum virus
cgcguccacgca

SEQ ID NO: 367797 - RNA, 22 nt, Molluscum contagiosum virus
cgcguccacggguagcagcgcc

SEQ ID NO: 367798 - RNA, 15 nt, Molluscum contagiosum virus
cgcguccgcaaagac

SEQ ID NO: 367799 - RNA, 15 nt, Molluscum contagiosum virus
cgcgugaacaauaca

SEQ ID NO: 367800 - RNA, 18 nt, Molluscum contagiosum virus
cgcgugcauggcacgcga

SEQ ID NO: 367801 - RNA, 15 nt, Molluscum contagiosum virus
cgcgugccgcccgag

SEQ ID NO: 367802 - RNA, 23 nt, Molluscum contagiosum virus
cgcgugcggcggcgcgugcugcg

SEQ ID NO: 367803 - RNA, 14 nt, Molluscum contagiosum virus
cgcguggugcuuac

SEQ ID NO: 367804 - RNA, 13 nt, Molluscum contagiosum virus
cgcgugugcagca

SEQ ID NO: 367805 - RNA, 19 nt, Molluscum contagiosum virus
cgcguuugucgcgggcgcg

SEQ ID NO: 367806 - RNA, 17 nt, Molluscum contagiosum virus
cgcuaccugguggagca

SEQ ID NO: 367807 - RNA, 20 nt, Molluscum contagiosum virus
cgcuacuucacacgucuugc

SEQ ID NO: 367808 - RNA, 18 nt, Molluscum contagiosum virus
cgcucaaccgaucccggc

SEQ ID NO: 367809 - RNA, 19 nt, Molluscum contagiosum virus
cgcucacagcuucgcgagc

SEQ ID NO: 367810 - RNA, 12 nt, Molluscum contagiosum virus
cgcuccaugcug

SEQ ID NO: 367811 - RNA, 17 nt, Molluscum contagiosum virus
cgcuccgagacugcuac

SEQ ID NO: 367812 - RNA, 16 nt, Molluscum contagiosum virus
cgcuccgcagccggag

SEQ ID NO: 367813 - RNA, 13 nt, Molluscum contagiosum virus
cgcucgcgcuucc

SEQ ID NO: 367814 - RNA, 16 nt, Molluscum contagiosum virus
cgcucgcucgcucagc

SEQ ID NO: 367815 - RNA, 15 nt, Molluscum contagiosum virus
cgcucugcucuugau

SEQ ID NO: 367816 - RNA, 19 nt, Molluscum contagiosum virus
cgcugagagacuucuugca

SEQ ID NO: 367817 - RNA, 19 nt, Molluscum contagiosum virus
cgcugagcaagcucaagaa

SEQ ID NO: 367818 - RNA, 14 nt, Molluscum contagiosum virus
cgcugcacaguuca

SEQ ID NO: 367819 - RNA, 16 nt, Molluscum contagiosum virus
cgcugccaacgcggac

SEQ ID NO: 367820 - RNA, 23 nt, Molluscum contagiosum virus
cgcugccgcuucgugcgcggaga

SEQ ID NO: 367821 - RNA, 21 nt, Molluscum contagiosum virus
cgcugccuggugcacacacac

SEQ ID NO: 367822 - RNA, 13 nt, Molluscum contagiosum virus
cgcugcgggcgcc

SEQ ID NO: 367823 - RNA, 23 nt, Molluscum contagiosum virus
cgcugcuacaagcggugcagcua

SEQ ID NO: 367824 - RNA, 19 nt, Molluscum contagiosum virus
cgcugcuagagaaccugug

SEQ ID NO: 367825 - RNA, 22 nt, Molluscum contagiosum virus
cgcugcucuacgucuccucgcg

SEQ ID NO: 367826 - RNA, 16 nt, Molluscum contagiosum virus
cgcugcuggcgcacau

SEQ ID NO: 367827 - RNA, 19 nt, Molluscum contagiosum virus
cgcugcugggcaucgugcu

SEQ ID NO: 367828 - RNA, 15 nt, Molluscum contagiosum virus
cgcugcuguccuuca

SEQ ID NO: 367829 - RNA, 20 nt, Molluscum contagiosum virus
cgcugcuguccuucaagaac

SEQ ID NO: 367830 - RNA, 17 nt, Molluscum contagiosum virus
cgcuggcccacgcuggc

SEQ ID NO: 367831 - RNA, 22 nt, Molluscum contagiosum virus
cgcuggccgacguacuggugcc

SEQ ID NO: 367832 - RNA, 19 nt, Molluscum contagiosum virus
cgcuuagccaacagcgcaa

SEQ ID NO: 367833 - RNA, 22 nt, Molluscum contagiosum virus
cgcuuagccaacagcgcaagcu

SEQ ID NO: 367834 - RNA, 14 nt, Molluscum contagiosum virus
cgcuucgagcacgc

SEQ ID NO: 367835 - RNA, 16 nt, Molluscum contagiosum virus
cgggcacguccgccuc

SEQ ID NO: 367836 - RNA, 16 nt, Molluscum contagiosum virus
cgggccaggcacuggc

SEQ ID NO: 367837 - RNA, 17 nt, Molluscum contagiosum virus
cgggccccugcgcgagc

SEQ ID NO: 367838 - RNA, 17 nt, Molluscum contagiosum virus
cgggccuguccgcgggc

SEQ ID NO: 367839 - RNA, 18 nt, Molluscum contagiosum virus
cgggcgaaagcgccgcgc

SEQ ID NO: 367840 - RNA, 18 nt, Molluscum contagiosum virus
cgggcgccaacacgagcg

SEQ ID NO: 367841 - RNA, 15 nt, Molluscum contagiosum virus
cgggcgcugcaccgc

SEQ ID NO: 367842 - RNA, 13 nt, Molluscum contagiosum virus
cgggcucgggcag

SEQ ID NO: 367843 - RNA, 23 nt, Molluscum contagiosum virus
cgggcuugcucccucgcgcgcag

SEQ ID NO: 367844 - RNA, 21 nt, Molluscum contagiosum virus
cggggacggcgugacggugcu

SEQ ID NO: 367845 - RNA, 20 nt, Molluscum contagiosum virus
cggggcugcuggcggugcuc

SEQ ID NO: 367846 - RNA, 20 nt, Molluscum contagiosum virus
cggguaccgugcgcgugagc

SEQ ID NO: 367847 - RNA, 12 nt, Molluscum contagiosum virus
cggguccgucuu

SEQ ID NO: 367848 - RNA, 16 nt, Molluscum contagiosum virus
cggguccgucuuugcg

SEQ ID NO: 367849 - RNA, 13 nt, Molluscum contagiosum virus
cgggucucggggc

SEQ ID NO: 367850 - RNA, 15 nt, Molluscum contagiosum virus
cgguagcuagcucug

SEQ ID NO: 367851 - RNA, 21 nt, Molluscum contagiosum virus
cggucuuccagcacugcgcca

SEQ ID NO: 367852 - RNA, 18 nt, Molluscum contagiosum virus
cggugccggccgccggcg

SEQ ID NO: 367853 - RNA, 15 nt, Molluscum contagiosum virus
cggugcgcaaagcaa

SEQ ID NO: 367854 - RNA, 14 nt, Molluscum contagiosum virus
cgguggacgcacag

SEQ ID NO: 367855 - RNA, 22 nt, Molluscum contagiosum virus
cgguggccgcgccgggcgccag

SEQ ID NO: 367856 - RNA, 23 nt, Molluscum contagiosum virus
cgguggcggcucugccgcgcaau

SEQ ID NO: 367857 - RNA, 18 nt, Molluscum contagiosum virus
cggugguuuacaucggcu

SEQ ID NO: 367858 - RNA, 18 nt, Molluscum contagiosum virus
cgguguccacgacacugg

SEQ ID NO: 367859 - RNA, 17 nt, Molluscum contagiosum virus
cggugucgguaccugca

SEQ ID NO: 367860 - RNA, 14 nt, Molluscum contagiosum virus
cgguugaccagcuc

SEQ ID NO: 367861 - RNA, 14 nt, Molluscum contagiosum virus
cgguugagcgccgu

SEQ ID NO: 367862 - RNA, 22 nt, Molluscum contagiosum virus
cguaacaauggacacgcacugg

SEQ ID NO: 367863 - RNA, 17 nt, Molluscum contagiosum virus
cguacagcgcgcgugcc

SEQ ID NO: 367864 - RNA, 20 nt, Molluscum contagiosum virus
cguacagcuccccgcgcaag

SEQ ID NO: 367865 - RNA, 22 nt, Molluscum contagiosum virus
cguacaucccgcacgugggcua

SEQ ID NO: 367866 - RNA, 14 nt, Molluscum contagiosum virus
cguacgagcaggcg

SEQ ID NO: 367867 - RNA, 15 nt, Molluscum contagiosum virus
cguacgugcacgugg

SEQ ID NO: 367868 - RNA, 15 nt, Molluscum contagiosum virus
cguacucgugucaca

SEQ ID NO: 367869 - RNA, 17 nt, Molluscum contagiosum virus
cguacuugcugguugcc

SEQ ID NO: 367870 - RNA, 21 nt, Molluscum contagiosum virus
cguagcaaaugcgcugcucgc

SEQ ID NO: 367871 - RNA, 19 nt, Molluscum contagiosum virus
cguagcagcgccugcacgc

SEQ ID NO: 367872 - RNA, 23 nt, Molluscum contagiosum virus
cguauacuccaaaaaggugcgag

SEQ ID NO: 367873 - RNA, 21 nt, Molluscum contagiosum virus
cgucaacaugccuuucuucca

SEQ ID NO: 367874 - RNA, 21 nt, Molluscum contagiosum virus
cgucaaccugcugccucccaa

SEQ ID NO: 367875 - RNA, 14 nt, Molluscum contagiosum virus
cgucacggccuucg

SEQ ID NO: 367876 - RNA, 21 nt, Molluscum contagiosum virus
cgucagggaugccagugcagu

SEQ ID NO: 367877 - RNA, 22 nt, Molluscum contagiosum virus
cgucagggaugccagugcagug

SEQ ID NO: 367878 - RNA, 14 nt, Molluscum contagiosum virus
cguccacaaagacg

SEQ ID NO: 367879 - RNA, 21 nt, Molluscum contagiosum virus
cguccagcugcgcgagcucgu

SEQ ID NO: 367880 - RNA, 14 nt, Molluscum contagiosum virus
cguccgcaaagacg

SEQ ID NO: 367881 - RNA, 18 nt, Molluscum contagiosum virus
cgucgaagaccaccagca

SEQ ID NO: 367882 - RNA, 20 nt, Molluscum contagiosum virus
cgucgcacuggccugcaaac

SEQ ID NO: 367883 - RNA, 14 nt, Molluscum contagiosum virus
cgucgcgcacagaa

SEQ ID NO: 367884 - RNA, 18 nt, Molluscum contagiosum virus
cgucgcgcgcuaccugcg

SEQ ID NO: 367885 - RNA, 17 nt, Molluscum contagiosum virus
cgucgggaaguguugcc

SEQ ID NO: 367886 - RNA, 13 nt, Molluscum contagiosum virus
cgucgucaaggau

SEQ ID NO: 367887 - RNA, 21 nt, Molluscum contagiosum virus
cgucguccggaggcacgggcu

SEQ ID NO: 367888 - RNA, 14 nt, Molluscum contagiosum virus
cgucucaagacaag

SEQ ID NO: 367889 - RNA, 18 nt, Molluscum contagiosum virus
cgucuccaacaagcucau

SEQ ID NO: 367890 - RNA, 14 nt, Molluscum contagiosum virus
cgucuccacaaaga

SEQ ID NO: 367891 - RNA, 22 nt, Molluscum contagiosum virus
cgucucgcggaagaauuccuuc

SEQ ID NO: 367892 - RNA, 14 nt, Molluscum contagiosum virus
cgucucguaguccg

SEQ ID NO: 367893 - RNA, 21 nt, Molluscum contagiosum virus
cgugaaaaaagaauccuucuc

SEQ ID NO: 367894 - RNA, 16 nt, Molluscum contagiosum virus
cgugaacuccaagguc

SEQ ID NO: 367895 - RNA, 15 nt, Molluscum contagiosum virus
cgugaccagugcgug

SEQ ID NO: 367896 - RNA, 15 nt, Molluscum contagiosum virus
cgugaccuucgugcu

SEQ ID NO: 367897 - RNA, 22 nt, Molluscum contagiosum virus
cgugcaacaagcggacuacauc

SEQ ID NO: 367898 - RNA, 18 nt, Molluscum contagiosum virus
cgugcaagcccagcagcg

SEQ ID NO: 367899 - RNA, 16 nt, Molluscum contagiosum virus
cgugcaccucaagaag

SEQ ID NO: 367900 - RNA, 15 nt, Molluscum contagiosum virus
cgugcacguccucca

SEQ ID NO: 367901 - RNA, 14 nt, Molluscum contagiosum virus
cgugcacugucuuu

SEQ ID NO: 367902 - RNA, 19 nt, Molluscum contagiosum virus
cgugcagggcgugcuugcc

SEQ ID NO: 367903 - RNA, 18 nt, Molluscum contagiosum virus
cgugcauggcacgcgagc

SEQ ID NO: 367904 - RNA, 14 nt, Molluscum contagiosum virus
cgugccagcucaua

SEQ ID NO: 367905 - RNA, 20 nt, Molluscum contagiosum virus
cgugccccgcgcgugcaguu

SEQ ID NO: 367906 - RNA, 18 nt, Molluscum contagiosum virus
cgugcccuggaccuccau

SEQ ID NO: 367907 - RNA, 15 nt, Molluscum contagiosum virus
cgugccgcugcgcgg

SEQ ID NO: 367908 - RNA, 22 nt, Molluscum contagiosum virus
cgugcgcaguuuuuuuccgcaa

SEQ ID NO: 367909 - RNA, 23 nt, Molluscum contagiosum virus
cgugcgccgccgcaggcccggcg

SEQ ID NO: 367910 - RNA, 22 nt, Molluscum contagiosum virus
cgugcgcgacggcgagcucuuu

SEQ ID NO: 367911 - RNA, 21 nt, Molluscum contagiosum virus
cgugcggcggcgcgugcugcg

SEQ ID NO: 367912 - RNA, 21 nt, Molluscum contagiosum virus
cgugcggugacuugccguguu

SEQ ID NO: 367913 - RNA, 14 nt, Molluscum contagiosum virus
cgugcgugcacagc

SEQ ID NO: 367914 - RNA, 15 nt, Molluscum contagiosum virus
cgugcgugcacagcg

SEQ ID NO: 367915 - RNA, 15 nt, Molluscum contagiosum virus
cgugcuacuacugua

SEQ ID NO: 367916 - RNA, 16 nt, Molluscum contagiosum virus
cgugcuccacgcgcag

SEQ ID NO: 367917 - RNA, 17 nt, Molluscum contagiosum virus
cgugcuccucgcguagc

SEQ ID NO: 367918 - RNA, 19 nt, Molluscum contagiosum virus
cgugcugcgccgccugcuc

SEQ ID NO: 367919 - RNA, 13 nt, Molluscum contagiosum virus
cgugcugcucaag

SEQ ID NO: 367920 - RNA, 18 nt, Molluscum contagiosum virus
cgugcugucaguggacaa

SEQ ID NO: 367921 - RNA, 16 nt, Molluscum contagiosum virus
cguggaugaacaccau

SEQ ID NO: 367922 - RNA, 16 nt, Molluscum contagiosum virus
cguggccaaggucucg

SEQ ID NO: 367923 - RNA, 13 nt, Molluscum contagiosum virus
cguggcgccauug

SEQ ID NO: 367924 - RNA, 16 nt, Molluscum contagiosum virus
cguggcgccauugcuc

SEQ ID NO: 367925 - RNA, 23 nt, Molluscum contagiosum virus
cguggcgcuuggcgagcgcugcc

SEQ ID NO: 367926 - RNA, 20 nt, Molluscum contagiosum virus
cguggcgugcuuguagcgca

SEQ ID NO: 367927 - RNA, 15 nt, Molluscum contagiosum virus
cgugguccaccagca

SEQ ID NO: 367928 - RNA, 19 nt, Molluscum contagiosum virus
cguggugcuggccaacacu

SEQ ID NO: 367929 - RNA, 24 nt, Molluscum contagiosum virus
cgugguguucgccggcaucgcgcu

SEQ ID NO: 367930 - RNA, 21 nt, Molluscum contagiosum virus
cguguacaacucgguggugcg

SEQ ID NO: 367931 - RNA, 23 nt, Molluscum contagiosum virus
cguguacaugaugcccuggugaa

SEQ ID NO: 367932 - RNA, 16 nt, Molluscum contagiosum virus
cguguacaugcucaag

SEQ ID NO: 367933 - RNA, 20 nt, Molluscum contagiosum virus
cguguacaugcucaagcacc

SEQ ID NO: 367934 - RNA, 17 nt, Molluscum contagiosum virus
cguguacguaauccaug

SEQ ID NO: 367935 - RNA, 14 nt, Molluscum contagiosum virus
cguguacgucuuuc

SEQ ID NO: 367936 - RNA, 14 nt, Molluscum contagiosum virus
cguguacgugcuug

SEQ ID NO: 367937 - RNA, 14 nt, Molluscum contagiosum virus
cuccgcgcaccgcg

SEQ ID NO: 367938 - RNA, 21 nt, Molluscum contagiosum virus
cuccgcggaggccaagcaaac

SEQ ID NO: 367939 - RNA, 22 nt, Molluscum contagiosum virus
cuccgcuggaccccgagcugcg

SEQ ID NO: 367940 - RNA, 20 nt, Molluscum contagiosum virus
cuccggaggccgcucccgcg

SEQ ID NO: 367941 - RNA, 20 nt, Molluscum contagiosum virus
cuccggcgucgaaacacugc

SEQ ID NO: 367942 - RNA, 14 nt, Molluscum contagiosum virus
cuccguuucccgcg

SEQ ID NO: 367943 - RNA, 23 nt, Molluscum contagiosum virus
cuccuacacgacggacuucuugc

SEQ ID NO: 367944 - RNA, 15 nt, Molluscum contagiosum virus
cuccucgaccugcac

SEQ ID NO: 367945 - RNA, 18 nt, Molluscum contagiosum virus
cuccucggcgcuacgcac

SEQ ID NO: 367946 - RNA, 14 nt, Molluscum contagiosum virus
cuccugagaagcaa

SEQ ID NO: 367947 - RNA, 17 nt, Molluscum contagiosum virus
cuccugagaagcaaugc

SEQ ID NO: 367948 - RNA, 15 nt, Molluscum contagiosum virus
cuccugaggaagcaa

SEQ ID NO: 367949 - RNA, 23 nt, Molluscum contagiosum virus
cuccuggaacgagagugugcaug

SEQ ID NO: 367950 - RNA, 16 nt, Molluscum contagiosum virus
cuccuuccggagacac

SEQ ID NO: 367951 - RNA, 18 nt, Molluscum contagiosum virus
cuccuuccggagacacca

SEQ ID NO: 367952 - RNA, 21 nt, Molluscum contagiosum virus
cuccuuccggagacaccagcu

SEQ ID NO: 367953 - RNA, 22 nt, Molluscum contagiosum virus
cuccuuccggagacaccagcuc

SEQ ID NO: 367954 - RNA, 22 nt, Molluscum contagiosum virus
cucgaacgcgcgugcgcgugcc

SEQ ID NO: 367955 - RNA, 23 nt, Molluscum contagiosum virus
cucgaagaguuggacagccauga

SEQ ID NO: 367956 - RNA, 16 nt, Molluscum contagiosum virus
cucgaccugcacgacc

SEQ ID NO: 367957 - RNA, 19 nt, Molluscum contagiosum virus
cucgaccugcacgacccuc

SEQ ID NO: 367958 - RNA, 16 nt, Molluscum contagiosum virus
cucgagagacaacaaa

SEQ ID NO: 367959 - RNA, 23 nt, Molluscum contagiosum virus
cucgagcacgccuccaagaagag

SEQ ID NO: 367960 - RNA, 21 nt, Molluscum contagiosum virus
cucgagcacguagugcucguc

SEQ ID NO: 367961 - RNA, 12 nt, Molluscum contagiosum virus
cucgagcagcgg

SEQ ID NO: 367962 - RNA, 20 nt, Molluscum contagiosum virus
cucgagcaggucaucgggcu

SEQ ID NO: 367963 - RNA, 15 nt, Molluscum contagiosum virus
cucgagcuuccucaa

SEQ ID NO: 367964 - RNA, 21 nt, Molluscum contagiosum virus
cucgagggcgccgugcugcgu

SEQ ID NO: 367965 - RNA, 19 nt, Molluscum contagiosum virus
cucgaugugacaacaugug

SEQ ID NO: 367966 - RNA, 12 nt, Molluscum contagiosum virus
cucgcacgggcg

SEQ ID NO: 367967 - RNA, 16 nt, Molluscum contagiosum virus
cucgcagcacaugcag

SEQ ID NO: 367968 - RNA, 19 nt, Molluscum contagiosum virus
cucgcaugcgccugcacuu

SEQ ID NO: 367969 - RNA, 13 nt, Molluscum contagiosum virus
cucgccggcacca

SEQ ID NO: 367970 - RNA, 18 nt, Molluscum contagiosum virus
cucgccggcgagaugcga

SEQ ID NO: 367971 - RNA, 13 nt, Molluscum contagiosum virus
cucgccuccgggc

SEQ ID NO: 367972 - RNA, 19 nt, Molluscum contagiosum virus
cucgcgcacgaccacgugc

SEQ ID NO: 367973 - RNA, 15 nt, Molluscum contagiosum virus
cucgcgcgcaagaac

SEQ ID NO: 367974 - RNA, 19 nt, Molluscum contagiosum virus
cucgcgcguccgcaaagac

SEQ ID NO: 367975 - RNA, 15 nt, Molluscum contagiosum virus
cucgcgcugcuuccc

SEQ ID NO: 367976 - RNA, 18 nt, Molluscum contagiosum virus
cucgcgcuuccaguacga

SEQ ID NO: 367977 - RNA, 21 nt, Molluscum contagiosum virus
cucggacacacgcacccaaau

SEQ ID NO: 367978 - RNA, 12 nt, Molluscum contagiosum virus
cucggacacugg

SEQ ID NO: 367979 - RNA, 21 nt, Molluscum contagiosum virus
cucggagaagaacagcacgaa

SEQ ID NO: 367980 - RNA, 18 nt, Molluscum contagiosum virus
cucggaggcuugccccgc

SEQ ID NO: 367981 - RNA, 14 nt, Molluscum contagiosum virus
cucggcacaaaacc

SEQ ID NO: 367982 - RNA, 14 nt, Molluscum contagiosum virus
cucggcgugaucuu

SEQ ID NO: 367983 - RNA, 14 nt, Molluscum contagiosum virus
cucggcguggugcu

SEQ ID NO: 367984 - RNA, 22 nt, Molluscum contagiosum virus
cucggcguggugcuggccaaca

SEQ ID NO: 367985 - RNA, 19 nt, Molluscum contagiosum virus
cucgggcuagcaagcacgc

SEQ ID NO: 367986 - RNA, 15 nt, Molluscum contagiosum virus
cucguacugcugcag

SEQ ID NO: 367987 - RNA, 13 nt, Molluscum contagiosum virus
cucgugcucucug

SEQ ID NO: 367988 - RNA, 15 nt, Molluscum contagiosum virus
cucguggaacaaaga

SEQ ID NO: 367989 - RNA, 20 nt, Molluscum contagiosum virus
cucgugggauaggcacacac

SEQ ID NO: 367990 - RNA, 22 nt, Molluscum contagiosum virus
cucgugucacaauggcacuagc

SEQ ID NO: 367991 - RNA, 21 nt, Molluscum contagiosum virus
cucguguguccgcacgcacac

SEQ ID NO: 367992 - RNA, 22 nt, Molluscum contagiosum virus
cucguugccgugcccaucuccu

SEQ ID NO: 367993 - RNA, 19 nt, Molluscum contagiosum virus
cucuacacgcacgaccuca

SEQ ID NO: 367994 - RNA, 18 nt, Molluscum contagiosum virus
cucuacgccguguaccgc

SEQ ID NO: 367995 - RNA, 16 nt, Molluscum contagiosum virus
cucucagagcauuagc

SEQ ID NO: 367996 - RNA, 16 nt, Molluscum contagiosum virus
cucuccaucaucgagc

SEQ ID NO: 367997 - RNA, 20 nt, Molluscum contagiosum virus
cucuccgacgugcugcgcaa

SEQ ID NO: 367998 - RNA, 20 nt, Molluscum contagiosum virus
cucucgagagacaacaaaca

SEQ ID NO: 367999 - RNA, 13 nt, Molluscum contagiosum virus
cucucgagcacuu

SEQ ID NO: 368000 - RNA, 14 nt, Molluscum contagiosum virus
cucucgcaaaagag

SEQ ID NO: 368001 - RNA, 14 nt, Molluscum contagiosum virus
cucucggccaugga

SEQ ID NO: 368002 - RNA, 13 nt, Molluscum contagiosum virus
cucucguucuucc

SEQ ID NO: 368003 - RNA, 17 nt, Molluscum contagiosum virus
cucugagcgagcgcagu

SEQ ID NO: 368004 - RNA, 18 nt, Molluscum contagiosum virus
cucugccaccaugcgcac

SEQ ID NO: 368005 - RNA, 16 nt, Molluscum contagiosum virus
cucugcgcgagcagcu

SEQ ID NO: 368006 - RNA, 22 nt, Molluscum contagiosum virus
cucugcguaagcgccugcacac

SEQ ID NO: 368007 - RNA, 23 nt, Molluscum contagiosum virus
cucugcucgugcccgcacacgca

SEQ ID NO: 368008 - RNA, 17 nt, Molluscum contagiosum virus
cucuggagccucccccg

SEQ ID NO: 368009 - RNA, 17 nt, Molluscum contagiosum virus
cucugggcgucgcacag

SEQ ID NO: 368010 - RNA, 17 nt, Molluscum contagiosum virus
cucugucccugcauaca

SEQ ID NO: 368011 - RNA, 22 nt, Molluscum contagiosum virus
cucugucccugcauacacuucc

SEQ ID NO: 368012 - RNA, 19 nt, Molluscum contagiosum virus
cucuucaagcggucaggcc

SEQ ID NO: 368013 - RNA, 17 nt, Molluscum contagiosum virus
cucuuccgcgagcacgu

SEQ ID NO: 368014 - RNA, 20 nt, Molluscum contagiosum virus
cucuucgcaggcgugcucag

SEQ ID NO: 368015 - RNA, 20 nt, Molluscum contagiosum virus
cucuucgucuuaacucagcg

SEQ ID NO: 368016 - RNA, 22 nt, Molluscum contagiosum virus
cucuugcacgccuacgagcaca

SEQ ID NO: 368017 - RNA, 14 nt, Molluscum contagiosum virus
cucuugugaggaaa

SEQ ID NO: 368018 - RNA, 22 nt, Molluscum contagiosum virus
cucuugugaggaaacacccagg

SEQ ID NO: 368019 - RNA, 22 nt, Molluscum contagiosum virus
cucuuuuugcgccgcaaaauga

SEQ ID NO: 368020 - RNA, 20 nt, Molluscum contagiosum virus
cugaaaggacaugggcacaa

SEQ ID NO: 368021 - RNA, 20 nt, Molluscum contagiosum virus
cugaacaucuucgugcccac

SEQ ID NO: 368022 - RNA, 22 nt, Molluscum contagiosum virus
cugaagaaggagcccuugccac

SEQ ID NO: 368023 - RNA, 21 nt, Molluscum contagiosum virus
cugaaguccaucggugggcuc

SEQ ID NO: 368024 - RNA, 15 nt, Molluscum contagiosum virus
cugacaacacgagcc

SEQ ID NO: 368025 - RNA, 16 nt, Molluscum contagiosum virus
cugacuagaugcauag

SEQ ID NO: 368026 - RNA, 22 nt, Molluscum contagiosum virus
cugacuccguuuuucugugcuc

SEQ ID NO: 368027 - RNA, 16 nt, Molluscum contagiosum virus
cugacucggacacugg

SEQ ID NO: 368028 - RNA, 21 nt, Molluscum contagiosum virus
cugagauacaaccgcugcuau

SEQ ID NO: 368029 - RNA, 14 nt, Molluscum contagiosum virus
cugagcaagcucaa

SEQ ID NO: 368030 - RNA, 23 nt, Molluscum contagiosum virus
cugagcaagcucaagaagcccaa

SEQ ID NO: 368031 - RNA, 15 nt, Molluscum contagiosum virus
cugagcgagcgcagu

SEQ ID NO: 368032 - RNA, 19 nt, Molluscum contagiosum virus
cugagcuagugccgagcuc

SEQ ID NO: 368033 - RNA, 13 nt, Molluscum contagiosum virus
cugaggaagcaag

SEQ ID NO: 368034 - RNA, 15 nt, Molluscum contagiosum virus
cugagugcugagcca

SEQ ID NO: 368035 - RNA, 16 nt, Molluscum contagiosum virus
cugaucggaugcaaag

SEQ ID NO: 368036 - RNA, 14 nt, Molluscum contagiosum virus
cugaucguagucca

SEQ ID NO: 368037 - RNA, 19 nt, Molluscum contagiosum virus
cugaucugcccgaccacca

SEQ ID NO: 368038 - RNA, 15 nt, Molluscum contagiosum virus
cugcaacucgcgcug

SEQ ID NO: 368039 - RNA, 19 nt, Molluscum contagiosum virus
cugggcgucgcacaguuca

SEQ ID NO: 368040 - RNA, 14 nt, Molluscum contagiosum virus
cuggucacacuggu

SEQ ID NO: 368041 - RNA, 20 nt, Molluscum contagiosum virus
cuggucgagcaccugucgcg

SEQ ID NO: 368042 - RNA, 19 nt, Molluscum contagiosum virus
cuggugaccuucaccauca

SEQ ID NO: 368043 - RNA, 13 nt, Molluscum contagiosum virus
cuggugcacacac

SEQ ID NO: 368044 - RNA, 21 nt, Molluscum contagiosum virus
cuggugcgcgugacacaccgc

SEQ ID NO: 368045 - RNA, 16 nt, Molluscum contagiosum virus
cuggugugcacugaug

SEQ ID NO: 368046 - RNA, 13 nt, Molluscum contagiosum virus
cugguucugcucg

SEQ ID NO: 368047 - RNA, 15 nt, Molluscum contagiosum virus
cuguacaugccgcag

SEQ ID NO: 368048 - RNA, 14 nt, Molluscum contagiosum virus
cuguacgugcugcc

SEQ ID NO: 368049 - RNA, 21 nt, Molluscum contagiosum virus
cuguacucgccguuccacuac

SEQ ID NO: 368050 - RNA, 22 nt, Molluscum contagiosum virus
cuguacucgccguuccacuaca

SEQ ID NO: 368051 - RNA, 13 nt, Molluscum contagiosum virus
cuguauccuuggc

SEQ ID NO: 368052 - RNA, 15 nt, Molluscum contagiosum virus
cuguauccuuggcaa

SEQ ID NO: 368053 - RNA, 13 nt, Molluscum contagiosum virus
cuguaugaucugc

SEQ ID NO: 368054 - RNA, 18 nt, Molluscum contagiosum virus
cuguaugaucugcaguuc

SEQ ID NO: 368055 - RNA, 18 nt, Molluscum contagiosum virus
cugucagaggauucuugc

SEQ ID NO: 368056 - RNA, 19 nt, Molluscum contagiosum virus
cugucaucaccccgcuggg

SEQ ID NO: 368057 - RNA, 23 nt, Molluscum contagiosum virus
cuguccaaggugaacgaccucaa

SEQ ID NO: 368058 - RNA, 19 nt, Molluscum contagiosum virus
cuguccacaaaaccaaaac

SEQ ID NO: 368059 - RNA, 12 nt, Molluscum contagiosum virus
cuguccgaggac

SEQ ID NO: 368060 - RNA, 16 nt, Molluscum contagiosum virus
cugucgcgcacgagcg

SEQ ID NO: 368061 - RNA, 21 nt, Molluscum contagiosum virus
cugucgcuggaggauucuugu

SEQ ID NO: 368062 - RNA, 23 nt, Molluscum contagiosum virus
cugucguggaggaaacacccgcg

SEQ ID NO: 368063 - RNA, 19 nt, Molluscum contagiosum virus
cugucguugucgccgugaa

SEQ ID NO: 368064 - RNA, 13 nt, Molluscum contagiosum virus
cugucucuguccc

SEQ ID NO: 368065 - RNA, 23 nt, Molluscum contagiosum virus
cugucuuuuccucacgucgcugg

SEQ ID NO: 368066 - RNA, 17 nt, Molluscum contagiosum virus
cugugcagaacuucucg

SEQ ID NO: 368067 - RNA, 14 nt, Molluscum contagiosum virus
cugugccugcaaga

SEQ ID NO: 368068 - RNA, 17 nt, Molluscum contagiosum virus
cugugcgcgguggugcu

SEQ ID NO: 368069 - RNA, 19 nt, Molluscum contagiosum virus
cugugcuacgcgagcacug

SEQ ID NO: 368070 - RNA, 18 nt, Molluscum contagiosum virus
cuguucggcaugcagcgc

SEQ ID NO: 368071 - RNA, 12 nt, Molluscum contagiosum virus
cuguuugccacg

SEQ ID NO: 368072 - RNA, 23 nt, Molluscum contagiosum virus
cuuaacggccaauaaaugaugcu

SEQ ID NO: 368073 - RNA, 13 nt, Molluscum contagiosum virus
cuuacgcuacagc

SEQ ID NO: 368074 - RNA, 21 nt, Molluscum contagiosum virus
cuuacgcuugucguaagggcg

SEQ ID NO: 368075 - RNA, 14 nt, Molluscum contagiosum virus
cuuacugcugcaau

SEQ ID NO: 368076 - RNA, 20 nt, Molluscum contagiosum virus
cuuagccaacagcgcaagcu

SEQ ID NO: 368077 - RNA, 12 nt, Molluscum contagiosum virus
cuuauaccaugg

SEQ ID NO: 368078 - RNA, 23 nt, Molluscum contagiosum virus
cuuaucccagaaaacgcacuguc

SEQ ID NO: 368079 - RNA, 11 nt, Molluscum contagiosum virus
cuuaugcaucc

SEQ ID NO: 368080 - RNA, 19 nt, Molluscum contagiosum virus
cuuaugcauccugaugcuu

SEQ ID NO: 368081 - RNA, 21 nt, Molluscum contagiosum virus
cuuauuggacguccacaaagc

SEQ ID NO: 368082 - RNA, 17 nt, Molluscum contagiosum virus
cuucaacuacaaggugc

SEQ ID NO: 368083 - RNA, 12 nt, Molluscum contagiosum virus
cuucaacuucca

SEQ ID NO: 368084 - RNA, 15 nt, Molluscum contagiosum virus
cuucaagacuggcac

SEQ ID NO: 368085 - RNA, 22 nt, Molluscum contagiosum virus
cuucaagcacgagcugcugcgc

SEQ ID NO: 368086 - RNA, 13 nt, Molluscum contagiosum virus
cuucaaguaccug

SEQ ID NO: 368087 - RNA, 21 nt, Molluscum contagiosum virus
cuucacacagacgugcacaaa

SEQ ID NO: 368088 - RNA, 17 nt, Molluscum contagiosum virus
cuucaucaagcacggcu

SEQ ID NO: 368089 - RNA, 20 nt, Molluscum contagiosum virus
cuucaucaccgggauggucu

SEQ ID NO: 368090 - RNA, 18 nt, Molluscum contagiosum virus
cuucaugaaauacuucaa

SEQ ID NO: 368091 - RNA, 13 nt, Molluscum contagiosum virus
cuucaugggaacu

SEQ ID NO: 368092 - RNA, 14 nt, Molluscum contagiosum virus
cuuccacgucucca

SEQ ID NO: 368093 - RNA, 16 nt, Molluscum contagiosum virus
cuuccagaagguacug

SEQ ID NO: 368094 - RNA, 20 nt, Molluscum contagiosum virus
cuuccaggcgccgcaccuca

SEQ ID NO: 368095 - RNA, 18 nt, Molluscum contagiosum virus
cuuccauugcauggacau

SEQ ID NO: 368096 - RNA, 16 nt, Molluscum contagiosum virus
cuuccggagacaccag

SEQ ID NO: 368097 - RNA, 18 nt, Molluscum contagiosum virus
cuuccggagacaccagcu

SEQ ID NO: 368098 - RNA, 15 nt, Molluscum contagiosum virus
cuuccucuacaccag

SEQ ID NO: 368099 - RNA, 17 nt, Molluscum contagiosum virus
cuuccucuacaccagcu

SEQ ID NO: 368100 - RNA, 20 nt, Molluscum contagiosum virus
cuuccugcugcgcagcaucc

SEQ ID NO: 368101 - RNA, 16 nt, Molluscum contagiosum virus
cuuccuggggcuggac

SEQ ID NO: 368102 - RNA, 18 nt, Molluscum contagiosum virus
cuucgacaacaugcucgu

SEQ ID NO: 368103 - RNA, 16 nt, Molluscum contagiosum virus
cuucgacuucuccgcg

SEQ ID NO: 368104 - RNA, 21 nt, Molluscum contagiosum virus
cuucgaggugcgcgagucgcg

SEQ ID NO: 368105 - RNA, 18 nt, Molluscum contagiosum virus
cuucgcaagugcacacca

SEQ ID NO: 368106 - RNA, 22 nt, Molluscum contagiosum virus
cuucgcagacgacucgcugcca

SEQ ID NO: 368107 - RNA, 13 nt, Molluscum contagiosum virus
cuucgcauugacc

SEQ ID NO: 368108 - RNA, 20 nt, Molluscum contagiosum virus
cuucgcgacgacgagcacua

SEQ ID NO: 368109 - RNA, 19 nt, Molluscum contagiosum virus
cuucgcgggauacgggcgc

SEQ ID NO: 368110 - RNA, 20 nt, Molluscum contagiosum virus
cuucggacgcgaacugcccg

SEQ ID NO: 368111 - RNA, 20 nt, Molluscum contagiosum virus
cuucggcucgggaacaaagg

SEQ ID NO: 368112 - RNA, 14 nt, Molluscum contagiosum virus
cuucgucaagcagc

SEQ ID NO: 368113 - RNA, 20 nt, Molluscum contagiosum virus
cuucgucaagcagcgcgcca

SEQ ID NO: 368114 - RNA, 15 nt, Molluscum contagiosum virus
cuucgucuuaacuca

SEQ ID NO: 368115 - RNA, 15 nt, Molluscum contagiosum virus
cuucgugcgcggaga

SEQ ID NO: 368116 - RNA, 13 nt, Molluscum contagiosum virus
cuucguggccaaa

SEQ ID NO: 368117 - RNA, 11 nt, Molluscum contagiosum virus
cuucuagcucg

SEQ ID NO: 368118 - RNA, 18 nt, Molluscum contagiosum virus
cuucucgcagcguuccag

SEQ ID NO: 368119 - RNA, 13 nt, Molluscum contagiosum virus
cuucucgccagaa

SEQ ID NO: 368120 - RNA, 22 nt, Molluscum contagiosum virus
cuucucgcgagcgccacuagca

SEQ ID NO: 368121 - RNA, 10 nt, Molluscum contagiosum virus
cuucugcucg

SEQ ID NO: 368122 - RNA, 21 nt, Molluscum contagiosum virus
cuucuggaucaccacuggaca

SEQ ID NO: 368123 - RNA, 19 nt, Molluscum contagiosum virus
cuucuucgcaagugcacac

SEQ ID NO: 368124 - RNA, 17 nt, Molluscum contagiosum virus
cuugauaaaagcacagu

SEQ ID NO: 368125 - RNA, 16 nt, Molluscum contagiosum virus
cuugaugcuguuacuu

SEQ ID NO: 368126 - RNA, 20 nt, Molluscum contagiosum virus
cuugcaagauggggucugau

SEQ ID NO: 368127 - RNA, 17 nt, Molluscum contagiosum virus
cuugcagcgcagcagcg

SEQ ID NO: 368128 - RNA, 22 nt, Molluscum contagiosum virus
cuugccgucgcgcauagugccg

SEQ ID NO: 368129 - RNA, 17 nt, Molluscum contagiosum virus
cuugcgagcgcugccug

SEQ ID NO: 368130 - RNA, 18 nt, Molluscum contagiosum virus
cuugcgcacggaccucaa

SEQ ID NO: 368131 - RNA, 19 nt, Molluscum contagiosum virus
cuugcuagcaacuugcucu

SEQ ID NO: 368132 - RNA, 19 nt, Molluscum contagiosum virus
cuugcucacgcugcgcucg

SEQ ID NO: 368133 - RNA, 18 nt, Molluscum contagiosum virus
cuugcucggacacacgca

SEQ ID NO: 368134 - RNA, 20 nt, Molluscum contagiosum virus
cuugcucggacacacgcacc

SEQ ID NO: 368135 - RNA, 18 nt, Molluscum contagiosum virus
cuugcuggcgcgcggaga

SEQ ID NO: 368136 - RNA, 20 nt, Molluscum contagiosum virus
cuuggccaagcuuugcacgc

SEQ ID NO: 368137 - RNA, 20 nt, Molluscum contagiosum virus
cuuggcgcgccgcugcccgc

SEQ ID NO: 368138 - RNA, 17 nt, Molluscum contagiosum virus
cuuggcgcugcacaguu

SEQ ID NO: 368139 - RNA, 19 nt, Molluscum contagiosum virus
cuuggcgcugcacaguuca

SEQ ID NO: 368140 - RNA, 20 nt, Molluscum contagiosum virus
cuuggcggcgcggcuagcac

SEQ ID NO: 368141 - RNA, 16 nt, Molluscum contagiosum virus
gaaggagcccaagcac

SEQ ID NO: 368142 - RNA, 12 nt, Molluscum contagiosum virus
gaaggcaaccgc

SEQ ID NO: 368143 - RNA, 16 nt, Molluscum contagiosum virus
gaaggcucgagcugca

SEQ ID NO: 368144 - RNA, 21 nt, Molluscum contagiosum virus
gaagucguuccggacgugcac

SEQ ID NO: 368145 - RNA, 23 nt, Molluscum contagiosum virus
gaagugcgagccgugaccuucgu

SEQ ID NO: 368146 - RNA, 17 nt, Molluscum contagiosum virus
gaagugcuccgcacgug

SEQ ID NO: 368147 - RNA, 18 nt, Molluscum contagiosum virus
gaaguggccgucgcgagc

SEQ ID NO: 368148 - RNA, 21 nt, Molluscum contagiosum virus
gaaguguugccgccggccuug

SEQ ID NO: 368149 - RNA, 22 nt, Molluscum contagiosum virus
gaauaaauggacgaggcucagc

SEQ ID NO: 368150 - RNA, 20 nt, Molluscum contagiosum virus
gaauccuuuacugcaagauc

SEQ ID NO: 368151 - RNA, 23 nt, Molluscum contagiosum virus
gaaucuacggcuguuguacugga

SEQ ID NO: 368152 - RNA, 21 nt, Molluscum contagiosum virus
gaauuccgugucguuccacga

SEQ ID NO: 368153 - RNA, 20 nt, Molluscum contagiosum virus
gacaacaccagcgugcccuu

SEQ ID NO: 368154 - RNA, 19 nt, Molluscum contagiosum virus
gacaacacucggcaugugc

SEQ ID NO: 368155 - RNA, 11 nt, Molluscum contagiosum virus
gacaacaugug

SEQ ID NO: 368156 - RNA, 16 nt, Molluscum contagiosum virus
gacaagcgcgucugca

SEQ ID NO: 368157 - RNA, 18 nt, Molluscum contagiosum virus
gacaaggauggacaaaga

SEQ ID NO: 368158 - RNA, 22 nt, Molluscum contagiosum virus
gacaaucucugcgccgcgcgcg

SEQ ID NO: 368159 - RNA, 13 nt, Molluscum contagiosum virus
gacaaugagcacu

SEQ ID NO: 368160 - RNA, 14 nt, Molluscum contagiosum virus
gacaaugagcacuu

SEQ ID NO: 368161 - RNA, 16 nt, Molluscum contagiosum virus
gacacacgcacccaaa

SEQ ID NO: 368162 - RNA, 12 nt, Molluscum contagiosum virus
gacaccgcgggc

SEQ ID NO: 368163 - RNA, 17 nt, Molluscum contagiosum virus
gacacgagcgcggcaac

SEQ ID NO: 368164 - RNA, 14 nt, Molluscum contagiosum virus
gacacgcacacucg

SEQ ID NO: 368165 - RNA, 14 nt, Molluscum contagiosum virus
gacacgcacuugcg

SEQ ID NO: 368166 - RNA, 17 nt, Molluscum contagiosum virus
gacacguugcacugcgc

SEQ ID NO: 368167 - RNA, 16 nt, Molluscum contagiosum virus
gacacuguaaucguca

SEQ ID NO: 368168 - RNA, 11 nt, Molluscum contagiosum virus
gacacuugcuc

SEQ ID NO: 368169 - RNA, 17 nt, Molluscum contagiosum virus
gacagcacggcacgugc

SEQ ID NO: 368170 - RNA, 22 nt, Molluscum contagiosum virus
gacagcauccccaacauccugc

SEQ ID NO: 368171 - RNA, 14 nt, Molluscum contagiosum virus
gacagcaugaacuc

SEQ ID NO: 368172 - RNA, 13 nt, Molluscum contagiosum virus
gacagcgcgcgca

SEQ ID NO: 368173 - RNA, 21 nt, Molluscum contagiosum virus
gacagcggaagaaacagccau

SEQ ID NO: 368174 - RNA, 16 nt, Molluscum contagiosum virus
gacagcggauagcuuu

SEQ ID NO: 368175 - RNA, 20 nt, Molluscum contagiosum virus
gacagcgugcgcgggcacgc

SEQ ID NO: 368176 - RNA, 18 nt, Molluscum contagiosum virus
gacaggggccacaagcac

SEQ ID NO: 368177 - RNA, 23 nt, Molluscum contagiosum virus
gacagucagcggcgugcugcagc

SEQ ID NO: 368178 - RNA, 17 nt, Molluscum contagiosum virus
gacaucuggaggcaauc

SEQ ID NO: 368179 - RNA, 21 nt, Molluscum contagiosum virus
gacaucuggaggcaaucuguc

SEQ ID NO: 368180 - RNA, 18 nt, Molluscum contagiosum virus
gacaugcucgcgcucuac

SEQ ID NO: 368181 - RNA, 23 nt, Molluscum contagiosum virus
gacauggucaaccucuacacgca

SEQ ID NO: 368182 - RNA, 16 nt, Molluscum contagiosum virus
gaccaaaugcgcgugc

SEQ ID NO: 368183 - RNA, 22 nt, Molluscum contagiosum virus
gaccaaggacuucgagaccuac

SEQ ID NO: 368184 - RNA, 17 nt, Molluscum contagiosum virus
gaccacgcuggcacggc

SEQ ID NO: 368185 - RNA, 16 nt, Molluscum contagiosum virus
gaccagauccgggcgc

SEQ ID NO: 368186 - RNA, 13 nt, Molluscum contagiosum virus
gaccaguacauca

SEQ ID NO: 368187 - RNA, 20 nt, Molluscum contagiosum virus
gaccaguacaucaccgccau

SEQ ID NO: 368188 - RNA, 16 nt, Molluscum contagiosum virus
gacccagcaaggccca

SEQ ID NO: 368189 - RNA, 21 nt, Molluscum contagiosum virus
gacccaucggagaagugcucc

SEQ ID NO: 368190 - RNA, 22 nt, Molluscum contagiosum virus
gacccaucggagaagugcuccg

SEQ ID NO: 368191 - RNA, 12 nt, Molluscum contagiosum virus
gaccccaagaag

SEQ ID NO: 368192 - RNA, 23 nt, Molluscum contagiosum virus
gacccgcucgugaagcugucaac

SEQ ID NO: 368193 - RNA, 15 nt, Molluscum contagiosum virus
gacccucuucgacuu

SEQ ID NO: 368194 - RNA, 21 nt, Molluscum contagiosum virus
gaccgcaagugcacgcggcgc

SEQ ID NO: 368195 - RNA, 19 nt, Molluscum contagiosum virus
gaccuacgaggugcugcgc

SEQ ID NO: 368196 - RNA, 19 nt, Molluscum contagiosum virus
gaccucgcugcugagcccu

SEQ ID NO: 368197 - RNA, 12 nt, Molluscum contagiosum virus
gaccuggcgcgu

SEQ ID NO: 368198 - RNA, 13 nt, Molluscum contagiosum virus
gacgaagcugugc

SEQ ID NO: 368199 - RNA, 12 nt, Molluscum contagiosum virus
gacgacaugcac

SEQ ID NO: 368200 - RNA, 18 nt, Molluscum contagiosum virus
gacgacgaugcaaacaug

SEQ ID NO: 368201 - RNA, 13 nt, Molluscum contagiosum virus
gacgacggcacgc

SEQ ID NO: 368202 - RNA, 17 nt, Molluscum contagiosum virus
gacgacuucggcgcaac

SEQ ID NO: 368203 - RNA, 20 nt, Molluscum contagiosum virus
gacgagcagagccgggacgc

SEQ ID NO: 368204 - RNA, 22 nt, Molluscum contagiosum virus
gacgagggaugcgcacacuugc

SEQ ID NO: 368205 - RNA, 16 nt, Molluscum contagiosum virus
gacgagugcgccgcgc

SEQ ID NO: 368206 - RNA, 15 nt, Molluscum contagiosum virus
gacgcacgcuugccu

SEQ ID NO: 368207 - RNA, 18 nt, Molluscum contagiosum virus
gacgcaggacgcggucgc

SEQ ID NO: 368208 - RNA, 21 nt, Molluscum contagiosum virus
gacgcccuccucgaccugcac

SEQ ID NO: 368209 - RNA, 23 nt, Molluscum contagiosum virus
gacgccgucgaugaaggcgcggc

SEQ ID NO: 368210 - RNA, 21 nt, Molluscum contagiosum virus
gacgccgucgucaacaacacg

SEQ ID NO: 368211 - RNA, 21 nt, Molluscum contagiosum virus
gacgccuuccugcuggcgcgc

SEQ ID NO: 368212 - RNA, 14 nt, Molluscum contagiosum virus
gacgcgagacugug

SEQ ID NO: 368213 - RNA, 17 nt, Molluscum contagiosum virus
gacgcgcaagugugcgc

SEQ ID NO: 368214 - RNA, 18 nt, Molluscum contagiosum virus
gacgcgcacgcgggacgc

SEQ ID NO: 368215 - RNA, 15 nt, Molluscum contagiosum virus
gacgcgcgagugugc

SEQ ID NO: 368216 - RNA, 17 nt, Molluscum contagiosum virus
gacgcgcgagugugcgu

SEQ ID NO: 368217 - RNA, 24 nt, Molluscum contagiosum virus
gacgcgcguggagcgcgcggacgc

SEQ ID NO: 368218 - RNA, 14 nt, Molluscum contagiosum virus
gacgcgggccuguc

SEQ ID NO: 368219 - RNA, 23 nt, Molluscum contagiosum virus
gacgcgugcauggcacgcgagca

SEQ ID NO: 368220 - RNA, 22 nt, Molluscum contagiosum virus
gacgcuccgagcgaggacgaaa

SEQ ID NO: 368221 - RNA, 17 nt, Molluscum contagiosum virus
gacgcucgggccggcgc

SEQ ID NO: 368222 - RNA, 15 nt, Molluscum contagiosum virus
gacgcugcuggcgca

SEQ ID NO: 368223 - RNA, 17 nt, Molluscum contagiosum virus
gacggaauuugcggcgc

SEQ ID NO: 368224 - RNA, 21 nt, Molluscum contagiosum virus
gacggacuucuugcgcggcgg

SEQ ID NO: 368225 - RNA, 16 nt, Molluscum contagiosum virus
gacggagacagugaca

SEQ ID NO: 368226 - RNA, 19 nt, Molluscum contagiosum virus
gacggagacagugacagac

SEQ ID NO: 368227 - RNA, 17 nt, Molluscum contagiosum virus
gacggaggugguggcca

SEQ ID NO: 368228 - RNA, 21 nt, Molluscum contagiosum virus
gacggaguccucgacaaugag

SEQ ID NO: 368229 - RNA, 23 nt, Molluscum contagiosum virus
gacggaguccucgacaaugagca

SEQ ID NO: 368230 - RNA, 16 nt, Molluscum contagiosum virus
gacggcacgggcacgc

SEQ ID NO: 368231 - RNA, 14 nt, Molluscum contagiosum virus
gacggcgcgggcgc

SEQ ID NO: 368232 - RNA, 18 nt, Molluscum contagiosum virus
gacggcgcugcgcgugga

SEQ ID NO: 368233 - RNA, 23 nt, Molluscum contagiosum virus
gacggcugguguuaccgggucgc

SEQ ID NO: 368234 - RNA, 19 nt, Molluscum contagiosum virus
gacggcuucauccgcgcgc

SEQ ID NO: 368235 - RNA, 15 nt, Molluscum contagiosum virus
gacgggaaccgugcu

SEQ ID NO: 368236 - RNA, 22 nt, Molluscum contagiosum virus
gacgggagagguugcgcggggc

SEQ ID NO: 368237 - RNA, 12 nt, Molluscum contagiosum virus
gacggugcaacc

SEQ ID NO: 368238 - RNA, 21 nt, Molluscum contagiosum virus
gacggugcaaccgcugcucga

SEQ ID NO: 368239 - RNA, 15 nt, Molluscum contagiosum virus
gacggugcugcgcac

SEQ ID NO: 368240 - RNA, 21 nt, Molluscum contagiosum virus
gacgucacgcuggucacgcgc

SEQ ID NO: 368241 - RNA, 21 nt, Molluscum contagiosum virus
gacgucuggcucguacugcug

SEQ ID NO: 368242 - RNA, 21 nt, Molluscum contagiosum virus
gacgugcacgugguuugcucg

SEQ ID NO: 368243 - RNA, 22 nt, Molluscum contagiosum virus
gagcguugucuugaugcuguua

SEQ ID NO: 368244 - RNA, 23 nt, Molluscum contagiosum virus
gagcguugucuugaugcuguuac

SEQ ID NO: 368245 - RNA, 22 nt, Molluscum contagiosum virus
gagcuagcgcgcgccgacgugc

SEQ ID NO: 368246 - RNA, 19 nt, Molluscum contagiosum virus
gagcugacucggacacugg

SEQ ID NO: 368247 - RNA, 17 nt, Molluscum contagiosum virus
gagcugccgcugcgcga

SEQ ID NO: 368248 - RNA, 16 nt, Molluscum contagiosum virus
gagcugcggcgcgugc

SEQ ID NO: 368249 - RNA, 14 nt, Molluscum contagiosum virus
gagcugcgugugcc

SEQ ID NO: 368250 - RNA, 19 nt, Molluscum contagiosum virus
gagcugcuaacaacaugag

SEQ ID NO: 368251 - RNA, 20 nt, Molluscum contagiosum virus
gagcugcugcgcgaguaccu

SEQ ID NO: 368252 - RNA, 18 nt, Molluscum contagiosum virus
gagcuggagcgagugcgc

SEQ ID NO: 368253 - RNA, 22 nt, Molluscum contagiosum virus
gagcuggagcgagugcgcgugc

SEQ ID NO: 368254 - RNA, 15 nt, Molluscum contagiosum virus
gagcuggccacucuc

SEQ ID NO: 368255 - RNA, 22 nt, Molluscum contagiosum virus
gagcuggccgaagucgcagcag

SEQ ID NO: 368256 - RNA, 15 nt, Molluscum contagiosum virus
gagcuggcugggcac

SEQ ID NO: 368257 - RNA, 23 nt, Molluscum contagiosum virus
gagcugggauaacaggcgugcgc

SEQ ID NO: 368258 - RNA, 15 nt, Molluscum contagiosum virus
gagcuggugauccug

SEQ ID NO: 368259 - RNA, 13 nt, Molluscum contagiosum virus
gagcugugccaac

SEQ ID NO: 368260 - RNA, 22 nt, Molluscum contagiosum virus
gagcugugccgcagcaacccgc

SEQ ID NO: 368261 - RNA, 19 nt, Molluscum contagiosum virus
gagcugugcgagccaguuu

SEQ ID NO: 368262 - RNA, 18 nt, Molluscum contagiosum virus
gaggaaaagcacgcggcc

SEQ ID NO: 368263 - RNA, 10 nt, Molluscum contagiosum virus
gaggacaaaa

SEQ ID NO: 368264 - RNA, 21 nt, Molluscum contagiosum virus
gaggaccgcgagcgcaugcgc

SEQ ID NO: 368265 - RNA, 22 nt, Molluscum contagiosum virus
gaggaccucgcgcgccgccgca

SEQ ID NO: 368266 - RNA, 22 nt, Molluscum contagiosum virus
gaggacgagccccgcgccggcg

SEQ ID NO: 368267 - RNA, 16 nt, Molluscum contagiosum virus
gaggacgagcugcuaa

SEQ ID NO: 368268 - RNA, 12 nt, Molluscum contagiosum virus
gaggacgcgggc

SEQ ID NO: 368269 - RNA, 22 nt, Molluscum contagiosum virus
gaggacgcgugcaagcccagca

SEQ ID NO: 368270 - RNA, 17 nt, Molluscum contagiosum virus
gaggacggcgcgggcgc

SEQ ID NO: 368271 - RNA, 12 nt, Molluscum contagiosum virus
gaggacuaccug

SEQ ID NO: 368272 - RNA, 19 nt, Molluscum contagiosum virus
gaggacuaccuggcggcgc

SEQ ID NO: 368273 - RNA, 14 nt, Molluscum contagiosum virus
gaggagagcggcgc

SEQ ID NO: 368274 - RNA, 19 nt, Molluscum contagiosum virus
gaggccaaggucuucagga

SEQ ID NO: 368275 - RNA, 19 nt, Molluscum contagiosum virus
gaggcccgucuccacaaag

SEQ ID NO: 368276 - RNA, 19 nt, Molluscum contagiosum virus
gaggccggagacguaccca

SEQ ID NO: 368277 - RNA, 20 nt, Molluscum contagiosum virus
gaggccuacgugcugcgcac

SEQ ID NO: 368278 - RNA, 21 nt, Molluscum contagiosum virus
gaggccuacgugcugcgcacg

SEQ ID NO: 368279 - RNA, 18 nt, Molluscum contagiosum virus
gaggcgcgcacgcugcgc

SEQ ID NO: 368280 - RNA, 21 nt, Molluscum contagiosum virus
gaggcgcgcucuacgagacuc

SEQ ID NO: 368281 - RNA, 19 nt, Molluscum contagiosum virus
gaggcgcuugggcacugcu

SEQ ID NO: 368282 - RNA, 21 nt, Molluscum contagiosum virus
gaggcguacuccguggugcgc

SEQ ID NO: 368283 - RNA, 18 nt, Molluscum contagiosum virus
gaggcguccugcgggagc

SEQ ID NO: 368284 - RNA, 20 nt, Molluscum contagiosum virus
gaggcuagugccauugugac

SEQ ID NO: 368285 - RNA, 17 nt, Molluscum contagiosum virus
gaggcucgagcgcgcgc

SEQ ID NO: 368286 - RNA, 19 nt, Molluscum contagiosum virus
gagggacacgcacuugcgc

SEQ ID NO: 368287 - RNA, 17 nt, Molluscum contagiosum virus
gagggccuuggcggcgc

SEQ ID NO: 368288 - RNA, 15 nt, Molluscum contagiosum virus
gagggccuuucucag

SEQ ID NO: 368289 - RNA, 15 nt, Molluscum contagiosum virus
gagggcgaggccaag

SEQ ID NO: 368290 - RNA, 22 nt, Molluscum contagiosum virus
gagggcgagucucccguggcgc

SEQ ID NO: 368291 - RNA, 15 nt, Molluscum contagiosum virus
gagggcgccgggcgc

SEQ ID NO: 368292 - RNA, 17 nt, Molluscum contagiosum virus
gagggcgccgugcugcg

SEQ ID NO: 368293 - RNA, 21 nt, Molluscum contagiosum virus
gaggggagccagccucucucg

SEQ ID NO: 368294 - RNA, 14 nt, Molluscum contagiosum virus
gagggucgugcagg

SEQ ID NO: 368295 - RNA, 20 nt, Molluscum contagiosum virus
gagggugcgccuuuccucuc

SEQ ID NO: 368296 - RNA, 17 nt, Molluscum contagiosum virus
gaggguggcuugcugca

SEQ ID NO: 368297 - RNA, 16 nt, Molluscum contagiosum virus
gaguacgacgcggagg

SEQ ID NO: 368298 - RNA, 22 nt, Molluscum contagiosum virus
gaguacgccagcgcgcgccuug

SEQ ID NO: 368299 - RNA, 20 nt, Molluscum contagiosum virus
gaguacgccaucguggugga

SEQ ID NO: 368300 - RNA, 20 nt, Molluscum contagiosum virus
gaguccccgagcagcgggga

SEQ ID NO: 368301 - RNA, 13 nt, Molluscum contagiosum virus
gaguccgcggcga

SEQ ID NO: 368302 - RNA, 15 nt, Molluscum contagiosum virus
gagucgcgccuggag

SEQ ID NO: 368303 - RNA, 20 nt, Molluscum contagiosum virus
gagucgcgccuggagcgcaa

SEQ ID NO: 368304 - RNA, 20 nt, Molluscum contagiosum virus
gagucuccacgucgucccug

SEQ ID NO: 368305 - RNA, 14 nt, Molluscum contagiosum virus
gagugaaucuugcc

SEQ ID NO: 368306 - RNA, 12 nt, Molluscum contagiosum virus
gagugacgccuc

SEQ ID NO: 368307 - RNA, 14 nt, Molluscum contagiosum virus
gagugacgcugcaa

SEQ ID NO: 368308 - RNA, 15 nt, Molluscum contagiosum virus
gagugacgcugcaag

SEQ ID NO: 368309 - RNA, 21 nt, Molluscum contagiosum virus
gagugaucuccacaugccuuc

SEQ ID NO: 368310 - RNA, 18 nt, Molluscum contagiosum virus
gagugcugagccacaaac

SEQ ID NO: 368311 - RNA, 13 nt, Molluscum contagiosum virus
gauaaaagcacag

SEQ ID NO: 368312 - RNA, 14 nt, Molluscum contagiosum virus
gauaaaagcacagu

SEQ ID NO: 368313 - RNA, 15 nt, Molluscum contagiosum virus
gauaaaagcacaguc

SEQ ID NO: 368314 - RNA, 17 nt, Molluscum contagiosum virus
gauaaaagcacagucca

SEQ ID NO: 368315 - RNA, 18 nt, Molluscum contagiosum virus
gauaguuuggacgagcug

SEQ ID NO: 368316 - RNA, 18 nt, Molluscum contagiosum virus
gaucaagcacgcuacugc

SEQ ID NO: 368317 - RNA, 19 nt, Molluscum contagiosum virus
gaucaagcacgcuacugcg

SEQ ID NO: 368318 - RNA, 20 nt, Molluscum contagiosum virus
gaucaccacuggacacgugc

SEQ ID NO: 368319 - RNA, 23 nt, Molluscum contagiosum virus
gaucaccacuggacacgugccuu

SEQ ID NO: 368320 - RNA, 19 nt, Molluscum contagiosum virus
gaucacgcucgcgacgugc

SEQ ID NO: 368321 - RNA, 15 nt, Molluscum contagiosum virus
gaucacggcgugcgc

SEQ ID NO: 368322 - RNA, 19 nt, Molluscum contagiosum virus
gaucagccccgcgccagca

SEQ ID NO: 368323 - RNA, 15 nt, Molluscum contagiosum virus
gaucccgacacugcg

SEQ ID NO: 368324 - RNA, 20 nt, Molluscum contagiosum virus
gaucccggaacgcaaguaca

SEQ ID NO: 368325 - RNA, 15 nt, Molluscum contagiosum virus
gaucguuuugcacuu

SEQ ID NO: 368326 - RNA, 22 nt, Molluscum contagiosum virus
gaucucgcgcacgaccacgugc

SEQ ID NO: 368327 - RNA, 19 nt, Molluscum contagiosum virus
gaucuuccgcgacgagcuc

SEQ ID NO: 368328 - RNA, 13 nt, Molluscum contagiosum virus
gaucuucucaaga

SEQ ID NO: 368329 - RNA, 20 nt, Molluscum contagiosum virus
gaucuucuucuugcgcaccu

SEQ ID NO: 368330 - RNA, 18 nt, Molluscum contagiosum virus
gaugaacccgcauugggc

SEQ ID NO: 368331 - RNA, 16 nt, Molluscum contagiosum virus
gaugaacgcgcugcgc

SEQ ID NO: 368332 - RNA, 17 nt, Molluscum contagiosum virus
gaugacgggcacgcuca

SEQ ID NO: 368333 - RNA, 19 nt, Molluscum contagiosum virus
gaugacgggcacgcucaua

SEQ ID NO: 368334 - RNA, 17 nt, Molluscum contagiosum virus
gaugagggcgauacaaa

SEQ ID NO: 368335 - RNA, 18 nt, Molluscum contagiosum virus
gaugaguaccgcgggcgc

SEQ ID NO: 368336 - RNA, 14 nt, Molluscum contagiosum virus
gaugcacacacucg

SEQ ID NO: 368337 - RNA, 15 nt, Molluscum contagiosum virus
gaugcacacacucgc

SEQ ID NO: 368338 - RNA, 18 nt, Molluscum contagiosum virus
gaugccgugguacacgua

SEQ ID NO: 368339 - RNA, 17 nt, Molluscum contagiosum virus
gaugcgcacacuugcgc

SEQ ID NO: 368340 - RNA, 17 nt, Molluscum contagiosum virus
gaugcgcugccggugga

SEQ ID NO: 368341 - RNA, 16 nt, Molluscum contagiosum virus
gaugcuagcgugugcc

SEQ ID NO: 368342 - RNA, 14 nt, Molluscum contagiosum virus
gaugcucgcuugcc

SEQ ID NO: 368343 - RNA, 15 nt, Molluscum contagiosum virus
gaugcugcgcgugga

SEQ ID NO: 368344 - RNA, 17 nt, Molluscum contagiosum virus
gauggaaggcgaccagc

SEQ ID NO: 368345 - RNA, 14 nt, Molluscum contagiosum virus
gcacgcucuucgag

SEQ ID NO: 368346 - RNA, 19 nt, Molluscum contagiosum virus
gcacggacccgggcgcggc

SEQ ID NO: 368347 - RNA, 19 nt, Molluscum contagiosum virus
gcacggcacccgccagcuu

SEQ ID NO: 368348 - RNA, 17 nt, Molluscum contagiosum virus
gcacggcuaggcgcggc

SEQ ID NO: 368349 - RNA, 20 nt, Molluscum contagiosum virus
gcacgggcucgaucugcgcc

SEQ ID NO: 368350 - RNA, 18 nt, Molluscum contagiosum virus
gcacggugugcuacugca

SEQ ID NO: 368351 - RNA, 19 nt, Molluscum contagiosum virus
gcacgugccccgcgcgugc

SEQ ID NO: 368352 - RNA, 17 nt, Molluscum contagiosum virus
gcacgugccgugcuguc

SEQ ID NO: 368353 - RNA, 14 nt, Molluscum contagiosum virus
gcacgugcgugccc

SEQ ID NO: 368354 - RNA, 12 nt, Molluscum contagiosum virus
gcacgugcugcu

SEQ ID NO: 368355 - RNA, 17 nt, Molluscum contagiosum virus
gcacguggacagcaucc

SEQ ID NO: 368356 - RNA, 21 nt, Molluscum contagiosum virus
gcacgugugcaggaacugccc

SEQ ID NO: 368357 - RNA, 15 nt, Molluscum contagiosum virus
gcacguuccaaaaga

SEQ ID NO: 368358 - RNA, 21 nt, Molluscum contagiosum virus
gcacguuguucuugcgcgugg

SEQ ID NO: 368359 - RNA, 21 nt, Molluscum contagiosum virus
gcacuaccgcaaccagcugcu

SEQ ID NO: 368360 - RNA, 21 nt, Molluscum contagiosum virus
gcacucaauucaaguuugaca

SEQ ID NO: 368361 - RNA, 18 nt, Molluscum contagiosum virus
gcacucguggcaacaaca

SEQ ID NO: 368362 - RNA, 17 nt, Molluscum contagiosum virus
gcacugacgguacucau

SEQ ID NO: 368363 - RNA, 18 nt, Molluscum contagiosum virus
gcacugcagcgagcucgc

SEQ ID NO: 368364 - RNA, 20 nt, Molluscum contagiosum virus
gcacugcgcgcaugccuugc

SEQ ID NO: 368365 - RNA, 23 nt, Molluscum contagiosum virus
gcacugcgcgcgcggcgcagugc

SEQ ID NO: 368366 - RNA, 15 nt, Molluscum contagiosum virus
gcacuuucaacucuc

SEQ ID NO: 368367 - RNA, 12 nt, Molluscum contagiosum virus
gcagaagccaac

SEQ ID NO: 368368 - RNA, 22 nt, Molluscum contagiosum virus
gcagacaacaccagcgugcccu

SEQ ID NO: 368369 - RNA, 20 nt, Molluscum contagiosum virus
gcagacguggugcucgugga

SEQ ID NO: 368370 - RNA, 20 nt, Molluscum contagiosum virus
gcagagaccgucaaccugcu

SEQ ID NO: 368371 - RNA, 19 nt, Molluscum contagiosum virus
gcagagcgucgaacuucuc

SEQ ID NO: 368372 - RNA, 20 nt, Molluscum contagiosum virus
gcagagcgucgaacuucucc

SEQ ID NO: 368373 - RNA, 15 nt, Molluscum contagiosum virus
gcagaggcaugcuuu

SEQ ID NO: 368374 - RNA, 17 nt, Molluscum contagiosum virus
gcagaugaggcugcucu

SEQ ID NO: 368375 - RNA, 22 nt, Molluscum contagiosum virus
gcagcacaccgucgcguggugc

SEQ ID NO: 368376 - RNA, 13 nt, Molluscum contagiosum virus
gcagcaccugcag

SEQ ID NO: 368377 - RNA, 18 nt, Molluscum contagiosum virus
gcagcaccugcaguucca

SEQ ID NO: 368378 - RNA, 14 nt, Molluscum contagiosum virus
gcagcagaccaaga

SEQ ID NO: 368379 - RNA, 23 nt, Molluscum contagiosum virus
gcagcagcuccagcauggcgcca

SEQ ID NO: 368380 - RNA, 12 nt, Molluscum contagiosum virus
gcagcaugcuca

SEQ ID NO: 368381 - RNA, 15 nt, Molluscum contagiosum virus
gcagccgcuggacgc

SEQ ID NO: 368382 - RNA, 17 nt, Molluscum contagiosum virus
gcagccuccgugcgcca

SEQ ID NO: 368383 - RNA, 17 nt, Molluscum contagiosum virus
gcagcgcccggugcggc

SEQ ID NO: 368384 - RNA, 22 nt, Molluscum contagiosum virus
gcagcgccgcgcgcgcgcguga

SEQ ID NO: 368385 - RNA, 15 nt, Molluscum contagiosum virus
gcagcgcgcgcguag

SEQ ID NO: 368386 - RNA, 23 nt, Molluscum contagiosum virus
gcagcgcgugacgcucacggccu

SEQ ID NO: 368387 - RNA, 14 nt, Molluscum contagiosum virus
gcagcgcuugcgcg

SEQ ID NO: 368388 - RNA, 22 nt, Molluscum contagiosum virus
gcagcggcgcgugcuccucgcg

SEQ ID NO: 368389 - RNA, 18 nt, Molluscum contagiosum virus
gcagcggcuacuuggacg

SEQ ID NO: 368390 - RNA, 13 nt, Molluscum contagiosum virus
gcagcgugcgcac

SEQ ID NO: 368391 - RNA, 15 nt, Molluscum contagiosum virus
gcagcguuccaggaa

SEQ ID NO: 368392 - RNA, 14 nt, Molluscum contagiosum virus
gcagcuaccgcgcg

SEQ ID NO: 368393 - RNA, 15 nt, Molluscum contagiosum virus
gcagcucaagcugcu

SEQ ID NO: 368394 - RNA, 13 nt, Molluscum contagiosum virus
gcagcucacgaga

SEQ ID NO: 368395 - RNA, 14 nt, Molluscum contagiosum virus
gcagcucugcagcg

SEQ ID NO: 368396 - RNA, 12 nt, Molluscum contagiosum virus
gcagcugcgcca

SEQ ID NO: 368397 - RNA, 16 nt, Molluscum contagiosum virus
gcagcuggcgcgcgcc

SEQ ID NO: 368398 - RNA, 17 nt, Molluscum contagiosum virus
gcaggaaccgcgugcgc

SEQ ID NO: 368399 - RNA, 21 nt, Molluscum contagiosum virus
gcaggaccugcugguggugcu

SEQ ID NO: 368400 - RNA, 19 nt, Molluscum contagiosum virus
gcaggaccuggcuggcgcu

SEQ ID NO: 368401 - RNA, 17 nt, Molluscum contagiosum virus
gcaggacgugcacgugg

SEQ ID NO: 368402 - RNA, 14 nt, Molluscum contagiosum virus
gcaggagaugcgcc

SEQ ID NO: 368403 - RNA, 16 nt, Molluscum contagiosum virus
gcaggcacaaaacaca

SEQ ID NO: 368404 - RNA, 17 nt, Molluscum contagiosum virus
gcaggccccuacacgca

SEQ ID NO: 368405 - RNA, 18 nt, Molluscum contagiosum virus
gcaggcggccgcguugca

SEQ ID NO: 368406 - RNA, 14 nt, Molluscum contagiosum virus
gcaggcgugcucag

SEQ ID NO: 368407 - RNA, 14 nt, Molluscum contagiosum virus
gcaggcuguguucc

SEQ ID NO: 368408 - RNA, 15 nt, Molluscum contagiosum virus
gcaggcuguguucca

SEQ ID NO: 368409 - RNA, 22 nt, Molluscum contagiosum virus
gcagguaggccaugaucauggc

SEQ ID NO: 368410 - RNA, 18 nt, Molluscum contagiosum virus
gcaggugcacgugcugca

SEQ ID NO: 368411 - RNA, 22 nt, Molluscum contagiosum virus
gcaggugcgggcuagcacgcau

SEQ ID NO: 368412 - RNA, 14 nt, Molluscum contagiosum virus
gcagguugaagcuc

SEQ ID NO: 368413 - RNA, 19 nt, Molluscum contagiosum virus
gcagucacgacuguguucc

SEQ ID NO: 368414 - RNA, 14 nt, Molluscum contagiosum virus
gcagucagauugua

SEQ ID NO: 368415 - RNA, 19 nt, Molluscum contagiosum virus
gcagucgccuuccugcgcc

SEQ ID NO: 368416 - RNA, 13 nt, Molluscum contagiosum virus
gcagugcaccagc

SEQ ID NO: 368417 - RNA, 15 nt, Molluscum contagiosum virus
gcagugcaccagcac

SEQ ID NO: 368418 - RNA, 11 nt, Molluscum contagiosum virus
gcagugcucuu

SEQ ID NO: 368419 - RNA, 13 nt, Molluscum contagiosum virus
gcagugcucuuua

SEQ ID NO: 368420 - RNA, 14 nt, Molluscum contagiosum virus
gcagugcugcgcga

SEQ ID NO: 368421 - RNA, 21 nt, Molluscum contagiosum virus
gcagugcuugagcaucucgau

SEQ ID NO: 368422 - RNA, 16 nt, Molluscum contagiosum virus
gcaguggccgucgggc

SEQ ID NO: 368423 - RNA, 22 nt, Molluscum contagiosum virus
gcaguucggcgacacgcccgcg

SEQ ID NO: 368424 - RNA, 23 nt, Molluscum contagiosum virus
gcauacaccuaaauagcauguca

SEQ ID NO: 368425 - RNA, 18 nt, Molluscum contagiosum virus
gcauaccagauguucucg

SEQ ID NO: 368426 - RNA, 18 nt, Molluscum contagiosum virus
gcaucagagaagugcucc

SEQ ID NO: 368427 - RNA, 22 nt, Molluscum contagiosum virus
gcaucagagaagugcuccgcac

SEQ ID NO: 368428 - RNA, 14 nt, Molluscum contagiosum virus
gcaucagcaacaag

SEQ ID NO: 368429 - RNA, 15 nt, Molluscum contagiosum virus
gcaucagcacacguc

SEQ ID NO: 368430 - RNA, 18 nt, Molluscum contagiosum virus
gcaucccucgucuuugcg

SEQ ID NO: 368431 - RNA, 15 nt, Molluscum contagiosum virus
gcauccucuccauca

SEQ ID NO: 368432 - RNA, 20 nt, Molluscum contagiosum virus
gcaucgugcucuucgcggga

SEQ ID NO: 368433 - RNA, 17 nt, Molluscum contagiosum virus
gcaucuagccuccuugu

SEQ ID NO: 368434 - RNA, 23 nt, Molluscum contagiosum virus
gcaucuucuuguuguugugacac

SEQ ID NO: 368435 - RNA, 16 nt, Molluscum contagiosum virus
gcaugacagccauggc

SEQ ID NO: 368436 - RNA, 22 nt, Molluscum contagiosum virus
gcaugcagucacgacuguguuc

SEQ ID NO: 368437 - RNA, 17 nt, Molluscum contagiosum virus
gcaugcgccugcacuuc

SEQ ID NO: 368438 - RNA, 17 nt, Molluscum contagiosum virus
gcaugcgcgcagugccg

SEQ ID NO: 368439 - RNA, 14 nt, Molluscum contagiosum virus
gcaugcgugcuuca

SEQ ID NO: 368440 - RNA, 19 nt, Molluscum contagiosum virus
gcaugggcaaggacaucua

SEQ ID NO: 368441 - RNA, 22 nt, Molluscum contagiosum virus
gcauggggaacagcuuggcaca

SEQ ID NO: 368442 - RNA, 17 nt, Molluscum contagiosum virus
gcaugguugugcuuguu

SEQ ID NO: 368443 - RNA, 22 nt, Molluscum contagiosum virus
gcaugguugugcuuguucucuu

SEQ ID NO: 368444 - RNA, 21 nt, Molluscum contagiosum virus
gcauguccuuggcggugcgca

SEQ ID NO: 368445 - RNA, 11 nt, Molluscum contagiosum virus
gcauguucucu

SEQ ID NO: 368446 - RNA, 13 nt, Molluscum contagiosum virus
gcauguugcucua

SEQ ID NO: 368447 - RNA, 21 nt, Molluscum contagiosum virus
gcauguugucgaagaacauau

SEQ ID NO: 368448 - RNA, 20 nt, Molluscum contagiosum virus
gccgcgccgcacgugcugcg

SEQ ID NO: 368449 - RNA, 18 nt, Molluscum contagiosum virus
gccgcgccgggcgccaga

SEQ ID NO: 368450 - RNA, 17 nt, Molluscum contagiosum virus
gccgcgcgucaccucuu

SEQ ID NO: 368451 - RNA, 15 nt, Molluscum contagiosum virus
gccgcgcuggcgcgc

SEQ ID NO: 368452 - RNA, 19 nt, Molluscum contagiosum virus
gccgcggacgccggcgccc

SEQ ID NO: 368453 - RNA, 23 nt, Molluscum contagiosum virus
gccgcguagcuagcucugcgcgc

SEQ ID NO: 368454 - RNA, 20 nt, Molluscum contagiosum virus
gccgcugacuagaugcauag

SEQ ID NO: 368455 - RNA, 22 nt, Molluscum contagiosum virus
gccgcugagagacuucuugcac

SEQ ID NO: 368456 - RNA, 16 nt, Molluscum contagiosum virus
gccgcugcccgcgcac

SEQ ID NO: 368457 - RNA, 12 nt, Molluscum contagiosum virus
gccgcugcgcga

SEQ ID NO: 368458 - RNA, 21 nt, Molluscum contagiosum virus
gccgcugcgcuggaugcugcu

SEQ ID NO: 368459 - RNA, 18 nt, Molluscum contagiosum virus
gccgcuggcgcuaccuac

SEQ ID NO: 368460 - RNA, 19 nt, Molluscum contagiosum virus
gccgcuucgcguacauccc

SEQ ID NO: 368461 - RNA, 19 nt, Molluscum contagiosum virus
gccgcuucgugcgcggaga

SEQ ID NO: 368462 - RNA, 19 nt, Molluscum contagiosum virus
gccggaaacggaccuggag

SEQ ID NO: 368463 - RNA, 17 nt, Molluscum contagiosum virus
gccggaaguagaucucg

SEQ ID NO: 368464 - RNA, 19 nt, Molluscum contagiosum virus
gccggaguuuguagcucua

SEQ ID NO: 368465 - RNA, 23 nt, Molluscum contagiosum virus
gccggcaacgcugccgcuggcgc

SEQ ID NO: 368466 - RNA, 14 nt, Molluscum contagiosum virus
gccggcaacuggcu

SEQ ID NO: 368467 - RNA, 18 nt, Molluscum contagiosum virus
gccggcgaaccgacugcc

SEQ ID NO: 368468 - RNA, 13 nt, Molluscum contagiosum virus
gccggcgcggcga

SEQ ID NO: 368469 - RNA, 19 nt, Molluscum contagiosum virus
gccggcguccgcggcacgc

SEQ ID NO: 368470 - RNA, 17 nt, Molluscum contagiosum virus
gccggcguucgcggagc

SEQ ID NO: 368471 - RNA, 18 nt, Molluscum contagiosum virus
gccggcucagcguggagc

SEQ ID NO: 368472 - RNA, 15 nt, Molluscum contagiosum virus
gccggcugcgccacc

SEQ ID NO: 368473 - RNA, 15 nt, Molluscum contagiosum virus
gccgggaaugcugcg

SEQ ID NO: 368474 - RNA, 16 nt, Molluscum contagiosum virus
gccgggauuugccggu

SEQ ID NO: 368475 - RNA, 19 nt, Molluscum contagiosum virus
gccgggccugcggcggcgc

SEQ ID NO: 368476 - RNA, 19 nt, Molluscum contagiosum virus
gccggggccggacguccau

SEQ ID NO: 368477 - RNA, 19 nt, Molluscum contagiosum virus
gccggguguugaccaaagg

SEQ ID NO: 368478 - RNA, 14 nt, Molluscum contagiosum virus
gccgguggaagagc

SEQ ID NO: 368479 - RNA, 18 nt, Molluscum contagiosum virus
gccgguugcgcgugugca

SEQ ID NO: 368480 - RNA, 18 nt, Molluscum contagiosum virus
gccguagacgauuuugcc

SEQ ID NO: 368481 - RNA, 20 nt, Molluscum contagiosum virus
gccguagucuuucuccaugu

SEQ ID NO: 368482 - RNA, 14 nt, Molluscum contagiosum virus
gccguagugcucau

SEQ ID NO: 368483 - RNA, 14 nt, Molluscum contagiosum virus
gccgucaacauuuc

SEQ ID NO: 368484 - RNA, 13 nt, Molluscum contagiosum virus
gccgucacggccg

SEQ ID NO: 368485 - RNA, 22 nt, Molluscum contagiosum virus
gccguccaugugcccgcggcgc

SEQ ID NO: 368486 - RNA, 17 nt, Molluscum contagiosum virus
gccguccccgcgcucac

SEQ ID NO: 368487 - RNA, 19 nt, Molluscum contagiosum virus
gccgugcccaucuccuugu

SEQ ID NO: 368488 - RNA, 19 nt, Molluscum contagiosum virus
gccguggaugaacaccauc

SEQ ID NO: 368489 - RNA, 22 nt, Molluscum contagiosum virus
gccguguaagcccgcuaugaac

SEQ ID NO: 368490 - RNA, 22 nt, Molluscum contagiosum virus
gccguguacaugcucaagcacc

SEQ ID NO: 368491 - RNA, 23 nt, Molluscum contagiosum virus
gccguguacgucuuucccagaag

SEQ ID NO: 368492 - RNA, 15 nt, Molluscum contagiosum virus
gccgugugcacauug

SEQ ID NO: 368493 - RNA, 14 nt, Molluscum contagiosum virus
gccuacgugcugcg

SEQ ID NO: 368494 - RNA, 12 nt, Molluscum contagiosum virus
gccuccaagaag

SEQ ID NO: 368495 - RNA, 21 nt, Molluscum contagiosum virus
gccuccagcagcggcgcgugc

SEQ ID NO: 368496 - RNA, 15 nt, Molluscum contagiosum virus
gccucgagcacgccu

SEQ ID NO: 368497 - RNA, 21 nt, Molluscum contagiosum virus
gccucgagcacgccuccaaga

SEQ ID NO: 368498 - RNA, 22 nt, Molluscum contagiosum virus
gccucgagcacgccuccaagaa

SEQ ID NO: 368499 - RNA, 23 nt, Molluscum contagiosum virus
gccucgagcacgccuccaagaag

SEQ ID NO: 368500 - RNA, 17 nt, Molluscum contagiosum virus
gccucgcgcgcacugcg

SEQ ID NO: 368501 - RNA, 21 nt, Molluscum contagiosum virus
gccucggacggaggucugcuu

SEQ ID NO: 368502 - RNA, 23 nt, Molluscum contagiosum virus
gccucguucacggcuagaccucc

SEQ ID NO: 368503 - RNA, 23 nt, Molluscum contagiosum virus
gccucucucguggggaggacaaa

SEQ ID NO: 368504 - RNA, 16 nt, Molluscum contagiosum virus
gccucugccagccgcu

SEQ ID NO: 368505 - RNA, 16 nt, Molluscum contagiosum virus
gccugcacaagcagga

SEQ ID NO: 368506 - RNA, 13 nt, Molluscum contagiosum virus
gccugcacuacug

SEQ ID NO: 368507 - RNA, 14 nt, Molluscum contagiosum virus
gccugcaggcaaaa

SEQ ID NO: 368508 - RNA, 15 nt, Molluscum contagiosum virus
gccugcccugcucau

SEQ ID NO: 368509 - RNA, 21 nt, Molluscum contagiosum virus
gccugcugaagaaggagcccu

SEQ ID NO: 368510 - RNA, 16 nt, Molluscum contagiosum virus
gccuggugcugcgcga

SEQ ID NO: 368511 - RNA, 16 nt, Molluscum contagiosum virus
gccuguaccugcgaca

SEQ ID NO: 368512 - RNA, 19 nt, Molluscum contagiosum virus
gccuguaguagcagcuucu

SEQ ID NO: 368513 - RNA, 17 nt, Molluscum contagiosum virus
gccugucggcacaucuc

SEQ ID NO: 368514 - RNA, 23 nt, Molluscum contagiosum virus
gccugucggcacaucucucaggg

SEQ ID NO: 368515 - RNA, 19 nt, Molluscum contagiosum virus
gccugugcgccaacaacca

SEQ ID NO: 368516 - RNA, 21 nt, Molluscum contagiosum virus
gccugugcuacgcgagcacug

SEQ ID NO: 368517 - RNA, 14 nt, Molluscum contagiosum virus
gccugugcuggcga

SEQ ID NO: 368518 - RNA, 23 nt, Molluscum contagiosum virus
gccuucguggagcccgugcugga

SEQ ID NO: 368519 - RNA, 19 nt, Molluscum contagiosum virus
gccuucucgucgagagcgc

SEQ ID NO: 368520 - RNA, 22 nt, Molluscum contagiosum virus
gccuugccgaggaggugcucug

SEQ ID NO: 368521 - RNA, 16 nt, Molluscum contagiosum virus
gccuugcgagaauuga

SEQ ID NO: 368522 - RNA, 23 nt, Molluscum contagiosum virus
gccuuggcggcgcggcuagcacc

SEQ ID NO: 368523 - RNA, 12 nt, Molluscum contagiosum virus
gccuuguucaca

SEQ ID NO: 368524 - RNA, 16 nt, Molluscum contagiosum virus
gccuuugcgcugucuc

SEQ ID NO: 368525 - RNA, 22 nt, Molluscum contagiosum virus
gccuuuguucuuagcagcgccg

SEQ ID NO: 368526 - RNA, 19 nt, Molluscum contagiosum virus
gcgaaacacgcuacgcagc

SEQ ID NO: 368527 - RNA, 19 nt, Molluscum contagiosum virus
gcgaaacuggacugagccg

SEQ ID NO: 368528 - RNA, 15 nt, Molluscum contagiosum virus
gcgaaccgcggcagc

SEQ ID NO: 368529 - RNA, 18 nt, Molluscum contagiosum virus
gcgaacgagagacacgca

SEQ ID NO: 368530 - RNA, 16 nt, Molluscum contagiosum virus
gcgaaguccugggcga

SEQ ID NO: 368531 - RNA, 20 nt, Molluscum contagiosum virus
gcgacauagcgcaccagcug

SEQ ID NO: 368532 - RNA, 16 nt, Molluscum contagiosum virus
gcgaccagcucuuggc

SEQ ID NO: 368533 - RNA, 16 nt, Molluscum contagiosum virus
gcgaccggcgugccuu

SEQ ID NO: 368534 - RNA, 16 nt, Molluscum contagiosum virus
gcgacgacgagcacua

SEQ ID NO: 368535 - RNA, 17 nt, Molluscum contagiosum virus
gcgacgagcagcugcuu

SEQ ID NO: 368536 - RNA, 20 nt, Molluscum contagiosum virus
gcgacgccauuuucgugcgc

SEQ ID NO: 368537 - RNA, 17 nt, Molluscum contagiosum virus
gcgacgcgaucgugcgc

SEQ ID NO: 368538 - RNA, 14 nt, Molluscum contagiosum virus
gcgacggcaggccc

SEQ ID NO: 368539 - RNA, 16 nt, Molluscum contagiosum virus
gcgacuccaucugcgc

SEQ ID NO: 368540 - RNA, 18 nt, Molluscum contagiosum virus
gcgacuccaucugcgcga

SEQ ID NO: 368541 - RNA, 21 nt, Molluscum contagiosum virus
gcgacuccaucugcgcgacgc

SEQ ID NO: 368542 - RNA, 17 nt, Molluscum contagiosum virus
gcgacuugcugcggagc

SEQ ID NO: 368543 - RNA, 15 nt, Molluscum contagiosum virus
gcgagaacuggcgca

SEQ ID NO: 368544 - RNA, 18 nt, Molluscum contagiosum virus
gcgagaacuggcgcagca

SEQ ID NO: 368545 - RNA, 22 nt, Molluscum contagiosum virus
gcgagaauugaacaucuaugca

SEQ ID NO: 368546 - RNA, 15 nt, Molluscum contagiosum virus
gcgagagcuacagca

SEQ ID NO: 368547 - RNA, 22 nt, Molluscum contagiosum virus
gcgagaguucgaggaacucuac

SEQ ID NO: 368548 - RNA, 14 nt, Molluscum contagiosum virus
gcgagcacgggcgc

SEQ ID NO: 368549 - RNA, 12 nt, Molluscum contagiosum virus
gcgagcacgugg

SEQ ID NO: 368550 - RNA, 12 nt, Molluscum contagiosum virus
gcgcgcgccgca

SEQ ID NO: 368551 - RNA, 14 nt, Molluscum contagiosum virus
gcgcgcgcgcaagu

SEQ ID NO: 368552 - RNA, 16 nt, Molluscum contagiosum virus
gcgcgcgcgcgccgga

SEQ ID NO: 368553 - RNA, 15 nt, Molluscum contagiosum virus
gcgcgcgcgcggcgc

SEQ ID NO: 368554 - RNA, 14 nt, Molluscum contagiosum virus
gcgcgcgcgcucac

SEQ ID NO: 368555 - RNA, 13 nt, Molluscum contagiosum virus
gcgcgcgcggcgc

SEQ ID NO: 368556 - RNA, 22 nt, Molluscum contagiosum virus
gcgcgcggcaguggcgugacag

SEQ ID NO: 368557 - RNA, 19 nt, Molluscum contagiosum virus
gcgcgcgugccuguggcgc

SEQ ID NO: 368558 - RNA, 14 nt, Molluscum contagiosum virus
gcgcgcgugcugcu

SEQ ID NO: 368559 - RNA, 22 nt, Molluscum contagiosum virus
gcgcgcguucauuugcgugagg

SEQ ID NO: 368560 - RNA, 12 nt, Molluscum contagiosum virus
gcgcgcguugcc

SEQ ID NO: 368561 - RNA, 16 nt, Molluscum contagiosum virus
gcgcgcuacugcgcgc

SEQ ID NO: 368562 - RNA, 19 nt, Molluscum contagiosum virus
gcgcgcuagagcgcggcgc

SEQ ID NO: 368563 - RNA, 20 nt, Molluscum contagiosum virus
gcgcgcuauucucguggcgu

SEQ ID NO: 368564 - RNA, 14 nt, Molluscum contagiosum virus
gcgcgcucgcucgc

SEQ ID NO: 368565 - RNA, 22 nt, Molluscum contagiosum virus
gcgcgcucugccgcccgcgccc

SEQ ID NO: 368566 - RNA, 13 nt, Molluscum contagiosum virus
gcgcgcugcacac

SEQ ID NO: 368567 - RNA, 13 nt, Molluscum contagiosum virus
gcgcgcugcgaac

SEQ ID NO: 368568 - RNA, 13 nt, Molluscum contagiosum virus
gcgcgcugcgcac

SEQ ID NO: 368569 - RNA, 13 nt, Molluscum contagiosum virus
gcgcgcugcgcgc

SEQ ID NO: 368570 - RNA, 15 nt, Molluscum contagiosum virus
gcgcgcugcgggcgc

SEQ ID NO: 368571 - RNA, 15 nt, Molluscum contagiosum virus
gcgcgcuuagcacac

SEQ ID NO: 368572 - RNA, 13 nt, Molluscum contagiosum virus
gcgcggagcucgc

SEQ ID NO: 368573 - RNA, 16 nt, Molluscum contagiosum virus
gcgcggaucugcgcac

SEQ ID NO: 368574 - RNA, 22 nt, Molluscum contagiosum virus
gcgcggccauggucacgcgcac

SEQ ID NO: 368575 - RNA, 22 nt, Molluscum contagiosum virus
gcgcggccguggcaaacaggca

SEQ ID NO: 368576 - RNA, 15 nt, Molluscum contagiosum virus
gcgcggcgcacaauc

SEQ ID NO: 368577 - RNA, 14 nt, Molluscum contagiosum virus
gcgcggcgcagugc

SEQ ID NO: 368578 - RNA, 22 nt, Molluscum contagiosum virus
gcgcggcgcgugccagucgcgc

SEQ ID NO: 368579 - RNA, 18 nt, Molluscum contagiosum virus
gcgcggggcacugcgcac

SEQ ID NO: 368580 - RNA, 14 nt, Molluscum contagiosum virus
gcgcguaaaagacu

SEQ ID NO: 368581 - RNA, 14 nt, Molluscum contagiosum virus
gcgcguccacaaag

SEQ ID NO: 368582 - RNA, 16 nt, Molluscum contagiosum virus
gcgcgucucugcgcag

SEQ ID NO: 368583 - RNA, 19 nt, Molluscum contagiosum virus
gcgcgucugcaucgugggc

SEQ ID NO: 368584 - RNA, 13 nt, Molluscum contagiosum virus
gcgcgugccgggc

SEQ ID NO: 368585 - RNA, 21 nt, Molluscum contagiosum virus
gcgcgugcguacgugcacgug

SEQ ID NO: 368586 - RNA, 14 nt, Molluscum contagiosum virus
gcgcgugcucuuuc

SEQ ID NO: 368587 - RNA, 23 nt, Molluscum contagiosum virus
gcgcgugucuacccggcacgugc

SEQ ID NO: 368588 - RNA, 19 nt, Molluscum contagiosum virus
gcgcgugugcagcagguag

SEQ ID NO: 368589 - RNA, 16 nt, Molluscum contagiosum virus
gcgcguucgcaaagac

SEQ ID NO: 368590 - RNA, 15 nt, Molluscum contagiosum virus
gcgcguugccugaga

SEQ ID NO: 368591 - RNA, 17 nt, Molluscum contagiosum virus
gcgcguugccugagaag

SEQ ID NO: 368592 - RNA, 16 nt, Molluscum contagiosum virus
gcgcguuugucgcggg

SEQ ID NO: 368593 - RNA, 14 nt, Molluscum contagiosum virus
gcgcuacguggcgc

SEQ ID NO: 368594 - RNA, 13 nt, Molluscum contagiosum virus
gcgcuacuugcug

SEQ ID NO: 368595 - RNA, 16 nt, Molluscum contagiosum virus
gcgcuagugaaccgca

SEQ ID NO: 368596 - RNA, 19 nt, Molluscum contagiosum virus
gcgcuaguggcaagggccu

SEQ ID NO: 368597 - RNA, 16 nt, Molluscum contagiosum virus
gcgcuauugcgcggcg

SEQ ID NO: 368598 - RNA, 19 nt, Molluscum contagiosum virus
gcgcucacugcagcagccc

SEQ ID NO: 368599 - RNA, 18 nt, Molluscum contagiosum virus
gcgcuccgacgcgguggu

SEQ ID NO: 368600 - RNA, 20 nt, Molluscum contagiosum virus
gcgcucgaacgcgcgugcgc

SEQ ID NO: 368601 - RNA, 11 nt, Molluscum contagiosum virus
gcgcucgccuu

SEQ ID NO: 368602 - RNA, 19 nt, Molluscum contagiosum virus
gcgcucgugguugcgcacg

SEQ ID NO: 368603 - RNA, 13 nt, Molluscum contagiosum virus
gcgcugcacaguu

SEQ ID NO: 368604 - RNA, 13 nt, Molluscum contagiosum virus
gcgcugcgcaagc

SEQ ID NO: 368605 - RNA, 14 nt, Molluscum contagiosum virus
gcgcugcgcggcgg

SEQ ID NO: 368606 - RNA, 14 nt, Molluscum contagiosum virus
gcgcugcucuucgc

SEQ ID NO: 368607 - RNA, 20 nt, Molluscum contagiosum virus
gcgcugcugguucugcucgc

SEQ ID NO: 368608 - RNA, 22 nt, Molluscum contagiosum virus
gcgcuggagacggcaguguccu

SEQ ID NO: 368609 - RNA, 14 nt, Molluscum contagiosum virus
gcgcuggcccgugc

SEQ ID NO: 368610 - RNA, 16 nt, Molluscum contagiosum virus
gcgcugguggaggagc

SEQ ID NO: 368611 - RNA, 20 nt, Molluscum contagiosum virus
gcgcugguuaccaagggcau

SEQ ID NO: 368612 - RNA, 22 nt, Molluscum contagiosum virus
gcgcuguauucggcguacgugc

SEQ ID NO: 368613 - RNA, 14 nt, Molluscum contagiosum virus
gcgcugucgcgcag

SEQ ID NO: 368614 - RNA, 21 nt, Molluscum contagiosum virus
gcgcuucguggacgagcgcua

SEQ ID NO: 368615 - RNA, 17 nt, Molluscum contagiosum virus
gcgcuugggcacugcua

SEQ ID NO: 368616 - RNA, 19 nt, Molluscum contagiosum virus
gcggaaaaaaacugcgcac

SEQ ID NO: 368617 - RNA, 14 nt, Molluscum contagiosum virus
gcggaaacaagcac

SEQ ID NO: 368618 - RNA, 15 nt, Molluscum contagiosum virus
gcggaaacaagcaca

SEQ ID NO: 368619 - RNA, 16 nt, Molluscum contagiosum virus
gcggaaacaagcacau

SEQ ID NO: 368620 - RNA, 14 nt, Molluscum contagiosum virus
gcggaaguggugcc

SEQ ID NO: 368621 - RNA, 14 nt, Molluscum contagiosum virus
gcggacgccggcgc

SEQ ID NO: 368622 - RNA, 12 nt, Molluscum contagiosum virus
gcggacgcgggc

SEQ ID NO: 368623 - RNA, 17 nt, Molluscum contagiosum virus
gcggacgcguagcacga

SEQ ID NO: 368624 - RNA, 14 nt, Molluscum contagiosum virus
gcggacguggucgc

SEQ ID NO: 368625 - RNA, 18 nt, Molluscum contagiosum virus
gcggacguggucgcgcgc

SEQ ID NO: 368626 - RNA, 21 nt, Molluscum contagiosum virus
gcggagacuuccuugcgcagg

SEQ ID NO: 368627 - RNA, 18 nt, Molluscum contagiosum virus
gcggagagcagugccgcu

SEQ ID NO: 368628 - RNA, 17 nt, Molluscum contagiosum virus
gcggagaucgccgcgca

SEQ ID NO: 368629 - RNA, 20 nt, Molluscum contagiosum virus
gcggagaucgccgcgcaagu

SEQ ID NO: 368630 - RNA, 14 nt, Molluscum contagiosum virus
gcggagcuggccga

SEQ ID NO: 368631 - RNA, 12 nt, Molluscum contagiosum virus
gcggagcugugc

SEQ ID NO: 368632 - RNA, 20 nt, Molluscum contagiosum virus
gcggagcugugccaucucgc

SEQ ID NO: 368633 - RNA, 19 nt, Molluscum contagiosum virus
gcggagcugugccgcagca

SEQ ID NO: 368634 - RNA, 19 nt, Molluscum contagiosum virus
gcggagggugcacgcgggc

SEQ ID NO: 368635 - RNA, 17 nt, Molluscum contagiosum virus
gcggcaacugccugcgc

SEQ ID NO: 368636 - RNA, 21 nt, Molluscum contagiosum virus
gcggcacacacuugcacgcgc

SEQ ID NO: 368637 - RNA, 18 nt, Molluscum contagiosum virus
gcggcacaugcagcugca

SEQ ID NO: 368638 - RNA, 19 nt, Molluscum contagiosum virus
gcggcacccgccgcggugc

SEQ ID NO: 368639 - RNA, 13 nt, Molluscum contagiosum virus
gcggcacugcuag

SEQ ID NO: 368640 - RNA, 16 nt, Molluscum contagiosum virus
gcggcaggcgcugcgc

SEQ ID NO: 368641 - RNA, 19 nt, Molluscum contagiosum virus
gcggcauggaaagcuucuc

SEQ ID NO: 368642 - RNA, 18 nt, Molluscum contagiosum virus
gcggccacgcucgcgcgc

SEQ ID NO: 368643 - RNA, 20 nt, Molluscum contagiosum virus
gcggccccgggcugcacgac

SEQ ID NO: 368644 - RNA, 14 nt, Molluscum contagiosum virus
gcggcccgcggcgc

SEQ ID NO: 368645 - RNA, 13 nt, Molluscum contagiosum virus
gcggcccgcgggc

SEQ ID NO: 368646 - RNA, 21 nt, Molluscum contagiosum virus
gcggcccuucguguucgcgga

SEQ ID NO: 368647 - RNA, 17 nt, Molluscum contagiosum virus
gcggccgagucacgccc

SEQ ID NO: 368648 - RNA, 16 nt, Molluscum contagiosum virus
gcggccguggcacuga

SEQ ID NO: 368649 - RNA, 23 nt, Molluscum contagiosum virus
gcggccuguucuuccaguggcgc

SEQ ID NO: 368650 - RNA, 17 nt, Molluscum contagiosum virus
gcggcgacuugcugcgg

SEQ ID NO: 368651 - RNA, 21 nt, Molluscum contagiosum virus
gcggcgcaucucgauucacau

SEQ ID NO: 368652 - RNA, 14 nt, Molluscum contagiosum virus
gcggcgcgccggcc

SEQ ID NO: 368653 - RNA, 17 nt, Molluscum contagiosum virus
gcucccgucgagcacga

SEQ ID NO: 368654 - RNA, 14 nt, Molluscum contagiosum virus
gcuccgcacgugga

SEQ ID NO: 368655 - RNA, 15 nt, Molluscum contagiosum virus
gcuccgccgggaaua

SEQ ID NO: 368656 - RNA, 23 nt, Molluscum contagiosum virus
gcuccgccgggaauaccggagac

SEQ ID NO: 368657 - RNA, 16 nt, Molluscum contagiosum virus
gcuccugaggaagcaa

SEQ ID NO: 368658 - RNA, 22 nt, Molluscum contagiosum virus
gcuccuucuucaaguaccuguc

SEQ ID NO: 368659 - RNA, 22 nt, Molluscum contagiosum virus
gcucgaaaaaguucuuggugga

SEQ ID NO: 368660 - RNA, 18 nt, Molluscum contagiosum virus
gcucgacucggaugcgcu

SEQ ID NO: 368661 - RNA, 21 nt, Molluscum contagiosum virus
gcucgagggcgccgugcugcg

SEQ ID NO: 368662 - RNA, 17 nt, Molluscum contagiosum virus
gcucgaguucaacacgc

SEQ ID NO: 368663 - RNA, 15 nt, Molluscum contagiosum virus
gcucgcagcacaugc

SEQ ID NO: 368664 - RNA, 16 nt, Molluscum contagiosum virus
gcucgcagcacaugca

SEQ ID NO: 368665 - RNA, 22 nt, Molluscum contagiosum virus
gcucgcagccuccgugcgccag

SEQ ID NO: 368666 - RNA, 19 nt, Molluscum contagiosum virus
gcucgcaggcggugggcgc

SEQ ID NO: 368667 - RNA, 15 nt, Molluscum contagiosum virus
gcucgccaugugcga

SEQ ID NO: 368668 - RNA, 14 nt, Molluscum contagiosum virus
gcucgccuuucccc

SEQ ID NO: 368669 - RNA, 15 nt, Molluscum contagiosum virus
gcucgcgcacuacuc

SEQ ID NO: 368670 - RNA, 13 nt, Molluscum contagiosum virus
gcucgcgcgcaag

SEQ ID NO: 368671 - RNA, 20 nt, Molluscum contagiosum virus
gcucgcgcucuacgccagcg

SEQ ID NO: 368672 - RNA, 16 nt, Molluscum contagiosum virus
gcucgcggugcagcug

SEQ ID NO: 368673 - RNA, 21 nt, Molluscum contagiosum virus
gcucggacacacgcacccaaa

SEQ ID NO: 368674 - RNA, 22 nt, Molluscum contagiosum virus
gcucggacacacgcacccaaau

SEQ ID NO: 368675 - RNA, 17 nt, Molluscum contagiosum virus
gcucggaggcuugcccc

SEQ ID NO: 368676 - RNA, 15 nt, Molluscum contagiosum virus
gcucggcguggugcu

SEQ ID NO: 368677 - RNA, 15 nt, Molluscum contagiosum virus
gcucgggaacaaagg

SEQ ID NO: 368678 - RNA, 17 nt, Molluscum contagiosum virus
gcucgggaagcacguag

SEQ ID NO: 368679 - RNA, 18 nt, Molluscum contagiosum virus
gcucgguacaacuuuucc

SEQ ID NO: 368680 - RNA, 15 nt, Molluscum contagiosum virus
gcucguacugcugca

SEQ ID NO: 368681 - RNA, 13 nt, Molluscum contagiosum virus
gcucguccagcug

SEQ ID NO: 368682 - RNA, 20 nt, Molluscum contagiosum virus
gcucguggcgcgggagcuca

SEQ ID NO: 368683 - RNA, 20 nt, Molluscum contagiosum virus
gcucgugguugcgcacguug

SEQ ID NO: 368684 - RNA, 17 nt, Molluscum contagiosum virus
gcucguguucguguguu

SEQ ID NO: 368685 - RNA, 13 nt, Molluscum contagiosum virus
gcucuacgugcug

SEQ ID NO: 368686 - RNA, 14 nt, Molluscum contagiosum virus
gcucucgagcacuu

SEQ ID NO: 368687 - RNA, 18 nt, Molluscum contagiosum virus
gcucucgggcaugcacuu

SEQ ID NO: 368688 - RNA, 14 nt, Molluscum contagiosum virus
gcucugcauugugu

SEQ ID NO: 368689 - RNA, 16 nt, Molluscum contagiosum virus
gcucuucguggccaaa

SEQ ID NO: 368690 - RNA, 13 nt, Molluscum contagiosum virus
gcugagcgcagca

SEQ ID NO: 368691 - RNA, 14 nt, Molluscum contagiosum virus
gcugagcgcagcac

SEQ ID NO: 368692 - RNA, 18 nt, Molluscum contagiosum virus
gcugagcgcagcacacuu

SEQ ID NO: 368693 - RNA, 22 nt, Molluscum contagiosum virus
gcugaguccgaucuugaugacc

SEQ ID NO: 368694 - RNA, 18 nt, Molluscum contagiosum virus
gcugcaaacauugccugg

SEQ ID NO: 368695 - RNA, 23 nt, Molluscum contagiosum virus
gcugcaagccagcccgcugcgca

SEQ ID NO: 368696 - RNA, 19 nt, Molluscum contagiosum virus
gcugcaaggcgcgcgcugg

SEQ ID NO: 368697 - RNA, 19 nt, Molluscum contagiosum virus
gcugcacaguucacggcgc

SEQ ID NO: 368698 - RNA, 18 nt, Molluscum contagiosum virus
gcugcacaugugcgugca

SEQ ID NO: 368699 - RNA, 11 nt, Molluscum contagiosum virus
gcugcacgugc

SEQ ID NO: 368700 - RNA, 21 nt, Molluscum contagiosum virus
gcugcacuacaaccauggcgc

SEQ ID NO: 368701 - RNA, 18 nt, Molluscum contagiosum virus
gcugcagagcgugcuggu

SEQ ID NO: 368702 - RNA, 13 nt, Molluscum contagiosum virus
gcugcagcaccug

SEQ ID NO: 368703 - RNA, 15 nt, Molluscum contagiosum virus
gcugcaucuagccuc

SEQ ID NO: 368704 - RNA, 19 nt, Molluscum contagiosum virus
gcugccaauaccaggccac

SEQ ID NO: 368705 - RNA, 14 nt, Molluscum contagiosum virus
gcugccccucgggg

SEQ ID NO: 368706 - RNA, 14 nt, Molluscum contagiosum virus
gcugcccgcgcgcg

SEQ ID NO: 368707 - RNA, 22 nt, Molluscum contagiosum virus
gcugcccgugcccgaguuugcc

SEQ ID NO: 368708 - RNA, 21 nt, Molluscum contagiosum virus
gcugcccuuuagcguggcgcg

SEQ ID NO: 368709 - RNA, 15 nt, Molluscum contagiosum virus
gcugccgcgcgcgcc

SEQ ID NO: 368710 - RNA, 16 nt, Molluscum contagiosum virus
gcugccgcugcgcgac

SEQ ID NO: 368711 - RNA, 17 nt, Molluscum contagiosum virus
gcugccgggagaggaaa

SEQ ID NO: 368712 - RNA, 16 nt, Molluscum contagiosum virus
gcugccgucgcgcgcu

SEQ ID NO: 368713 - RNA, 16 nt, Molluscum contagiosum virus
gcugcgccacugccac

SEQ ID NO: 368714 - RNA, 21 nt, Molluscum contagiosum virus
gcugcgcgcgcucauggcgcg

SEQ ID NO: 368715 - RNA, 22 nt, Molluscum contagiosum virus
gcugcgcggcgccgcagcacgc

SEQ ID NO: 368716 - RNA, 16 nt, Molluscum contagiosum virus
gcugcgcuacauguau

SEQ ID NO: 368717 - RNA, 19 nt, Molluscum contagiosum virus
gcugcgcucggcgcgcgcc

SEQ ID NO: 368718 - RNA, 20 nt, Molluscum contagiosum virus
gcugcgcuucgccgcgcgcg

SEQ ID NO: 368719 - RNA, 13 nt, Molluscum contagiosum virus
gcugcgcuucuau

SEQ ID NO: 368720 - RNA, 17 nt, Molluscum contagiosum virus
gcugcgcuugcgcguga

SEQ ID NO: 368721 - RNA, 22 nt, Molluscum contagiosum virus
gcugcucaaggacuaccagcuc

SEQ ID NO: 368722 - RNA, 17 nt, Molluscum contagiosum virus
gcugcuccccgccagca

SEQ ID NO: 368723 - RNA, 12 nt, Molluscum contagiosum virus
gcugcugcacag

SEQ ID NO: 368724 - RNA, 23 nt, Molluscum contagiosum virus
gcugcugcagaacugccugguca

SEQ ID NO: 368725 - RNA, 15 nt, Molluscum contagiosum virus
gcugcugcgcgcgcu

SEQ ID NO: 368726 - RNA, 20 nt, Molluscum contagiosum virus
gcugcuggaacaggugcgca

SEQ ID NO: 368727 - RNA, 15 nt, Molluscum contagiosum virus
gcugcugguucugcu

SEQ ID NO: 368728 - RNA, 19 nt, Molluscum contagiosum virus
gcugcuguuucugugucac

SEQ ID NO: 368729 - RNA, 22 nt, Molluscum contagiosum virus
gcuggaccccgagcugcggcgc

SEQ ID NO: 368730 - RNA, 18 nt, Molluscum contagiosum virus
gcuggaccugcgccagcg

SEQ ID NO: 368731 - RNA, 22 nt, Molluscum contagiosum virus
gcuggacgggcacgagcacguc

SEQ ID NO: 368732 - RNA, 21 nt, Molluscum contagiosum virus
gcuggacuuccugcugcgcag

SEQ ID NO: 368733 - RNA, 19 nt, Molluscum contagiosum virus
gcuggagaaagaagugugc

SEQ ID NO: 368734 - RNA, 12 nt, Molluscum contagiosum virus
gcuggagcagac

SEQ ID NO: 368735 - RNA, 12 nt, Molluscum contagiosum virus
gcuggagggcac

SEQ ID NO: 368736 - RNA, 13 nt, Molluscum contagiosum virus
gcuggcacggccg

SEQ ID NO: 368737 - RNA, 16 nt, Molluscum contagiosum virus
gcuggccagccucauc

SEQ ID NO: 368738 - RNA, 15 nt, Molluscum contagiosum virus
gcuggcccacgcugg

SEQ ID NO: 368739 - RNA, 17 nt, Molluscum contagiosum virus
gcuggcccgugcacguc

SEQ ID NO: 368740 - RNA, 15 nt, Molluscum contagiosum virus
gcuggccgagcguga

SEQ ID NO: 368741 - RNA, 17 nt, Molluscum contagiosum virus
gcuggcgcucggcgugg

SEQ ID NO: 368742 - RNA, 20 nt, Molluscum contagiosum virus
gcuggcgcucggcguggugc

SEQ ID NO: 368743 - RNA, 17 nt, Molluscum contagiosum virus
gcuggcggcgcacgcga

SEQ ID NO: 368744 - RNA, 18 nt, Molluscum contagiosum virus
gcuggcggggcuggcaga

SEQ ID NO: 368745 - RNA, 18 nt, Molluscum contagiosum virus
gcuggcgugcgcagugcu

SEQ ID NO: 368746 - RNA, 17 nt, Molluscum contagiosum virus
gcugggagcuugcacga

SEQ ID NO: 368747 - RNA, 14 nt, Molluscum contagiosum virus
gcugggcguggcgc

SEQ ID NO: 368748 - RNA, 15 nt, Molluscum contagiosum virus
gcugggcguggcgca

SEQ ID NO: 368749 - RNA, 22 nt, Molluscum contagiosum virus
gcuggggcaaagaguugcgcga

SEQ ID NO: 368750 - RNA, 18 nt, Molluscum contagiosum virus
gcuggggccugugcugug

SEQ ID NO: 368751 - RNA, 17 nt, Molluscum contagiosum virus
gcuggugcucgccugca

SEQ ID NO: 368752 - RNA, 12 nt, Molluscum contagiosum virus
gcugguggugcu

SEQ ID NO: 368753 - RNA, 15 nt, Molluscum contagiosum virus
gcugguggugcugga

SEQ ID NO: 368754 - RNA, 12 nt, Molluscum contagiosum virus
gcugugccuagg

SEQ ID NO: 368755 - RNA, 15 nt, Molluscum contagiosum virus
gcugugcgagccagu

SEQ ID NO: 368756 - RNA, 20 nt, Molluscum contagiosum virus
ggagcagacguacgagcagg

SEQ ID NO: 368757 - RNA, 15 nt, Molluscum contagiosum virus
ggagcagccuccgaa

SEQ ID NO: 368758 - RNA, 15 nt, Molluscum contagiosum virus
ggagcgcgcgcagga

SEQ ID NO: 368759 - RNA, 23 nt, Molluscum contagiosum virus
ggagcgcuucuagcucgcgcgcg

SEQ ID NO: 368760 - RNA, 19 nt, Molluscum contagiosum virus
ggagcggcauggaaagcuu

SEQ ID NO: 368761 - RNA, 15 nt, Molluscum contagiosum virus
ggagcugcgcgcgcu

SEQ ID NO: 368762 - RNA, 14 nt, Molluscum contagiosum virus
ggagcugcggacgc

SEQ ID NO: 368763 - RNA, 17 nt, Molluscum contagiosum virus
ggagcugugccgcagca

SEQ ID NO: 368764 - RNA, 20 nt, Molluscum contagiosum virus
ggaggaaggacagugucuug

SEQ ID NO: 368765 - RNA, 17 nt, Molluscum contagiosum virus
ggaggaccgcgagcgca

SEQ ID NO: 368766 - RNA, 20 nt, Molluscum contagiosum virus
ggaggaccgcgagcgcaugc

SEQ ID NO: 368767 - RNA, 20 nt, Molluscum contagiosum virus
ggaggauucuuguacgggcg

SEQ ID NO: 368768 - RNA, 22 nt, Molluscum contagiosum virus
ggagggcaagaacgacugcuac

SEQ ID NO: 368769 - RNA, 16 nt, Molluscum contagiosum virus
ggagggcagugccaag

SEQ ID NO: 368770 - RNA, 22 nt, Molluscum contagiosum virus
ggaggucugcuuugucugcagg

SEQ ID NO: 368771 - RNA, 15 nt, Molluscum contagiosum virus
ggauagccccucgag

SEQ ID NO: 368772 - RNA, 20 nt, Molluscum contagiosum virus
ggaucacgaugugcgcgcga

SEQ ID NO: 368773 - RNA, 17 nt, Molluscum contagiosum virus
ggaucagccccgcgcca

SEQ ID NO: 368774 - RNA, 15 nt, Molluscum contagiosum virus
ggaugaacgcgcugc

SEQ ID NO: 368775 - RNA, 18 nt, Molluscum contagiosum virus
ggaugcagaacagcacgu

SEQ ID NO: 368776 - RNA, 11 nt, Molluscum contagiosum virus
ggaugcugcuc

SEQ ID NO: 368777 - RNA, 19 nt, Molluscum contagiosum virus
ggauguccuugaugccgug

SEQ ID NO: 368778 - RNA, 22 nt, Molluscum contagiosum virus
ggcaaagccugcugcgcgcgcc

SEQ ID NO: 368779 - RNA, 19 nt, Molluscum contagiosum virus
ggcaacgcacaaaacacaa

SEQ ID NO: 368780 - RNA, 12 nt, Molluscum contagiosum virus
ggcaacgcugcc

SEQ ID NO: 368781 - RNA, 15 nt, Molluscum contagiosum virus
ggcaagaaacgggag

SEQ ID NO: 368782 - RNA, 23 nt, Molluscum contagiosum virus
ggcaagggccugcgggcggcaca

SEQ ID NO: 368783 - RNA, 22 nt, Molluscum contagiosum virus
ggcacaccccuguaacaaggaa

SEQ ID NO: 368784 - RNA, 12 nt, Molluscum contagiosum virus
ggcacacgcagu

SEQ ID NO: 368785 - RNA, 18 nt, Molluscum contagiosum virus
ggcacauccgcuaccugg

SEQ ID NO: 368786 - RNA, 15 nt, Molluscum contagiosum virus
ggcacccaccaggaa

SEQ ID NO: 368787 - RNA, 15 nt, Molluscum contagiosum virus
ggcaccccgaaggaa

SEQ ID NO: 368788 - RNA, 18 nt, Molluscum contagiosum virus
ggcacccgcaacaaggaa

SEQ ID NO: 368789 - RNA, 21 nt, Molluscum contagiosum virus
ggcacgaggcagccgcggcgc

SEQ ID NO: 368790 - RNA, 19 nt, Molluscum contagiosum virus
ggcacggcacccgccagcu

SEQ ID NO: 368791 - RNA, 15 nt, Molluscum contagiosum virus
ggcacuccagcgcgc

SEQ ID NO: 368792 - RNA, 17 nt, Molluscum contagiosum virus
ggcacugcucacggugc

SEQ ID NO: 368793 - RNA, 16 nt, Molluscum contagiosum virus
ggcacugcuggcgcgc

SEQ ID NO: 368794 - RNA, 19 nt, Molluscum contagiosum virus
ggcacugcuggcgcgcgcg

SEQ ID NO: 368795 - RNA, 19 nt, Molluscum contagiosum virus
ggcacuggcgcgcacgcgc

SEQ ID NO: 368796 - RNA, 14 nt, Molluscum contagiosum virus
ggcacuucucgcgc

SEQ ID NO: 368797 - RNA, 24 nt, Molluscum contagiosum virus
ggcagaaacucuccgacgugcugc

SEQ ID NO: 368798 - RNA, 14 nt, Molluscum contagiosum virus
ggcagacgccagcg

SEQ ID NO: 368799 - RNA, 23 nt, Molluscum contagiosum virus
ggcagcgccgcgcgcgcgcguga

SEQ ID NO: 368800 - RNA, 21 nt, Molluscum contagiosum virus
ggcagcgucgcggagcgcgca

SEQ ID NO: 368801 - RNA, 17 nt, Molluscum contagiosum virus
ggcagcuaccgcgcgcg

SEQ ID NO: 368802 - RNA, 23 nt, Molluscum contagiosum virus
ggcagcugcugcgcuccaugcug

SEQ ID NO: 368803 - RNA, 19 nt, Molluscum contagiosum virus
ggcagcuucugcucgcgca

SEQ ID NO: 368804 - RNA, 12 nt, Molluscum contagiosum virus
ggcaggcagugc

SEQ ID NO: 368805 - RNA, 13 nt, Molluscum contagiosum virus
ggcaggucgcggu

SEQ ID NO: 368806 - RNA, 21 nt, Molluscum contagiosum virus
ggcaucgucucgcucuuccgc

SEQ ID NO: 368807 - RNA, 17 nt, Molluscum contagiosum virus
ggcaucgugcucuucgc

SEQ ID NO: 368808 - RNA, 14 nt, Molluscum contagiosum virus
ggcaugcacagcug

SEQ ID NO: 368809 - RNA, 19 nt, Molluscum contagiosum virus
ggcaugcgcccucacgugc

SEQ ID NO: 368810 - RNA, 16 nt, Molluscum contagiosum virus
ggcaugcgcgcagugc

SEQ ID NO: 368811 - RNA, 22 nt, Molluscum contagiosum virus
ggccaagcgcuccaacuuccac

SEQ ID NO: 368812 - RNA, 19 nt, Molluscum contagiosum virus
ggccaaggcaaaguucucg

SEQ ID NO: 368813 - RNA, 13 nt, Molluscum contagiosum virus
ggccacaagcacg

SEQ ID NO: 368814 - RNA, 17 nt, Molluscum contagiosum virus
ggcccaccgcgccagcg

SEQ ID NO: 368815 - RNA, 13 nt, Molluscum contagiosum virus
ggcccaugcucac

SEQ ID NO: 368816 - RNA, 13 nt, Molluscum contagiosum virus
ggccccagcaaca

SEQ ID NO: 368817 - RNA, 19 nt, Molluscum contagiosum virus
ggccccccgcaacaaggaa

SEQ ID NO: 368818 - RNA, 16 nt, Molluscum contagiosum virus
ggcccgcgcgugaagg

SEQ ID NO: 368819 - RNA, 15 nt, Molluscum contagiosum virus
ggccgagcgugacca

SEQ ID NO: 368820 - RNA, 16 nt, Molluscum contagiosum virus
ggccgaggucuuccac

SEQ ID NO: 368821 - RNA, 21 nt, Molluscum contagiosum virus
ggccgcccacgcucaaccagu

SEQ ID NO: 368822 - RNA, 18 nt, Molluscum contagiosum virus
ggccgccgcugacuagau

SEQ ID NO: 368823 - RNA, 17 nt, Molluscum contagiosum virus
ggccgcgcgcgacuuug

SEQ ID NO: 368824 - RNA, 13 nt, Molluscum contagiosum virus
ggccggucgcgga

SEQ ID NO: 368825 - RNA, 22 nt, Molluscum contagiosum virus
ggccguagugcucaucgugccc

SEQ ID NO: 368826 - RNA, 12 nt, Molluscum contagiosum virus
ggccguggcacu

SEQ ID NO: 368827 - RNA, 16 nt, Molluscum contagiosum virus
ggccguguacaugcuc

SEQ ID NO: 368828 - RNA, 17 nt, Molluscum contagiosum virus
ggccguuggacaucagc

SEQ ID NO: 368829 - RNA, 15 nt, Molluscum contagiosum virus
ggccuguaccugcga

SEQ ID NO: 368830 - RNA, 19 nt, Molluscum contagiosum virus
ggcgaccagcugguccuga

SEQ ID NO: 368831 - RNA, 16 nt, Molluscum contagiosum virus
ggcgacuuguagugcc

SEQ ID NO: 368832 - RNA, 14 nt, Molluscum contagiosum virus
ggcgauacaaaaca

SEQ ID NO: 368833 - RNA, 22 nt, Molluscum contagiosum virus
ggcgcaaccgcgugcgugcaca

SEQ ID NO: 368834 - RNA, 12 nt, Molluscum contagiosum virus
ggcgcaagcacc

SEQ ID NO: 368835 - RNA, 12 nt, Molluscum contagiosum virus
ggcgcagcacuu

SEQ ID NO: 368836 - RNA, 17 nt, Molluscum contagiosum virus
ggcgcagucccuuguca

SEQ ID NO: 368837 - RNA, 17 nt, Molluscum contagiosum virus
ggcgcaucucgauucac

SEQ ID NO: 368838 - RNA, 18 nt, Molluscum contagiosum virus
ggcgccccuccuaucuca

SEQ ID NO: 368839 - RNA, 14 nt, Molluscum contagiosum virus
ggcgccgaugcagu

SEQ ID NO: 368840 - RNA, 22 nt, Molluscum contagiosum virus
ggcgccggguguugaccaaagg

SEQ ID NO: 368841 - RNA, 19 nt, Molluscum contagiosum virus
ggcgccgugcugcgucaca

SEQ ID NO: 368842 - RNA, 19 nt, Molluscum contagiosum virus
ggcgccuucgucgcgcgcu

SEQ ID NO: 368843 - RNA, 22 nt, Molluscum contagiosum virus
ggcgcgaacucgcggcagugcu

SEQ ID NO: 368844 - RNA, 13 nt, Molluscum contagiosum virus
ggcgcgccauggc

SEQ ID NO: 368845 - RNA, 15 nt, Molluscum contagiosum virus
ggcgcgccgcgcgcg

SEQ ID NO: 368846 - RNA, 14 nt, Molluscum contagiosum virus
ggcgcgcgccagca

SEQ ID NO: 368847 - RNA, 16 nt, Molluscum contagiosum virus
ggcgcgcuccauguac

SEQ ID NO: 368848 - RNA, 19 nt, Molluscum contagiosum virus
ggcgcgcucgcgugcuagg

SEQ ID NO: 368849 - RNA, 16 nt, Molluscum contagiosum virus
ggcgcgcugugagcgc

SEQ ID NO: 368850 - RNA, 22 nt, Molluscum contagiosum virus
ggcgcgugccagucgcgcgaga

SEQ ID NO: 368851 - RNA, 21 nt, Molluscum contagiosum virus
ggcgcguugcucccgucgagc

SEQ ID NO: 368852 - RNA, 14 nt, Molluscum contagiosum virus
ggcgcuagugcaga

SEQ ID NO: 368853 - RNA, 17 nt, Molluscum contagiosum virus
ggcgcuagugcagauga

SEQ ID NO: 368854 - RNA, 21 nt, Molluscum contagiosum virus
ggcgcugcugcccggcagcga

SEQ ID NO: 368855 - RNA, 18 nt, Molluscum contagiosum virus
ggcgcuugggcacugcua

SEQ ID NO: 368856 - RNA, 15 nt, Molluscum contagiosum virus
ggcggacagcaaaca

SEQ ID NO: 368857 - RNA, 13 nt, Molluscum contagiosum virus
ggcggagagcucc

SEQ ID NO: 368858 - RNA, 21 nt, Molluscum contagiosum virus
ggcggcaaaagggcucugcca

SEQ ID NO: 368859 - RNA, 17 nt, Molluscum contagiosum virus
ggucgacgacgcgcgca

SEQ ID NO: 368860 - RNA, 20 nt, Molluscum contagiosum virus
ggucgagcgcgccgcgcgcu

SEQ ID NO: 368861 - RNA, 17 nt, Molluscum contagiosum virus
ggucgaguucacggcga

SEQ ID NO: 368862 - RNA, 20 nt, Molluscum contagiosum virus
ggucgaucccgacacugcga

SEQ ID NO: 368863 - RNA, 19 nt, Molluscum contagiosum virus
ggucgccuacgaggugcgc

SEQ ID NO: 368864 - RNA, 18 nt, Molluscum contagiosum virus
ggucgcguccacgcagga

SEQ ID NO: 368865 - RNA, 23 nt, Molluscum contagiosum virus
ggugaauccacucgauggacgcc

SEQ ID NO: 368866 - RNA, 14 nt, Molluscum contagiosum virus
ggugcaaccgcugc

SEQ ID NO: 368867 - RNA, 16 nt, Molluscum contagiosum virus
ggugcacggugaucau

SEQ ID NO: 368868 - RNA, 15 nt, Molluscum contagiosum virus
ggugcacgugcugca

SEQ ID NO: 368869 - RNA, 21 nt, Molluscum contagiosum virus
ggugcagccgcugcugcugca

SEQ ID NO: 368870 - RNA, 19 nt, Molluscum contagiosum virus
ggugccguccccgcgcuca

SEQ ID NO: 368871 - RNA, 23 nt, Molluscum contagiosum virus
ggugcgcauucccguggaccuca

SEQ ID NO: 368872 - RNA, 15 nt, Molluscum contagiosum virus
ggugcgcccgcggca

SEQ ID NO: 368873 - RNA, 19 nt, Molluscum contagiosum virus
ggugcgccugcacuacugc

SEQ ID NO: 368874 - RNA, 17 nt, Molluscum contagiosum virus
ggugcgcgcaacacugc

SEQ ID NO: 368875 - RNA, 15 nt, Molluscum contagiosum virus
gguggcuugcugcag

SEQ ID NO: 368876 - RNA, 14 nt, Molluscum contagiosum virus
gguguauccaggau

SEQ ID NO: 368877 - RNA, 23 nt, Molluscum contagiosum virus
ggugucgagcucgcgcgccagca

SEQ ID NO: 368878 - RNA, 15 nt, Molluscum contagiosum virus
ggugugcacaugccc

SEQ ID NO: 368879 - RNA, 15 nt, Molluscum contagiosum virus
gguguugaccaaagg

SEQ ID NO: 368880 - RNA, 22 nt, Molluscum contagiosum virus
gguucacgcccgcaaugcagug

SEQ ID NO: 368881 - RNA, 11 nt, Molluscum contagiosum virus
gguucugcucg

SEQ ID NO: 368882 - RNA, 14 nt, Molluscum contagiosum virus
gguugccgcucgca

SEQ ID NO: 368883 - RNA, 17 nt, Molluscum contagiosum virus
gguugugcuuguucucu

SEQ ID NO: 368884 - RNA, 14 nt, Molluscum contagiosum virus
guaaaagacuggcu

SEQ ID NO: 368885 - RNA, 13 nt, Molluscum contagiosum virus
guaaacgcgguga

SEQ ID NO: 368886 - RNA, 21 nt, Molluscum contagiosum virus
guaaauggaccacaagcagua

SEQ ID NO: 368887 - RNA, 14 nt, Molluscum contagiosum virus
guaacagcgcgcga

SEQ ID NO: 368888 - RNA, 19 nt, Molluscum contagiosum virus
guaaccaugaagaugucgc

SEQ ID NO: 368889 - RNA, 18 nt, Molluscum contagiosum virus
guaauaguacacuuugag

SEQ ID NO: 368890 - RNA, 19 nt, Molluscum contagiosum virus
guaaugauugucaagcacu

SEQ ID NO: 368891 - RNA, 18 nt, Molluscum contagiosum virus
guacaacccaaacauguc

SEQ ID NO: 368892 - RNA, 19 nt, Molluscum contagiosum virus
guacacauggccgcgcgcu

SEQ ID NO: 368893 - RNA, 15 nt, Molluscum contagiosum virus
guacagcgcgcgugc

SEQ ID NO: 368894 - RNA, 17 nt, Molluscum contagiosum virus
guacagcuccccgcgca

SEQ ID NO: 368895 - RNA, 21 nt, Molluscum contagiosum virus
guacauaaaauggaccagaaa

SEQ ID NO: 368896 - RNA, 21 nt, Molluscum contagiosum virus
guacauauucccuuguacaau

SEQ ID NO: 368897 - RNA, 15 nt, Molluscum contagiosum virus
guacauccgcgagca

SEQ ID NO: 368898 - RNA, 13 nt, Molluscum contagiosum virus
guacaugcucaag

SEQ ID NO: 368899 - RNA, 22 nt, Molluscum contagiosum virus
guacgagcagcugcugcgcacg

SEQ ID NO: 368900 - RNA, 22 nt, Molluscum contagiosum virus
guacgcucuccaugcgcgcgcg

SEQ ID NO: 368901 - RNA, 14 nt, Molluscum contagiosum virus
guacgugcacgugg

SEQ ID NO: 368902 - RNA, 22 nt, Molluscum contagiosum virus
guacuucaagcacgagcugcug

SEQ ID NO: 368903 - RNA, 15 nt, Molluscum contagiosum virus
guagacgggcuccuu

SEQ ID NO: 368904 - RNA, 17 nt, Molluscum contagiosum virus
guagagcaacaugcuga

SEQ ID NO: 368905 - RNA, 17 nt, Molluscum contagiosum virus
guagagggcagaacagu

SEQ ID NO: 368906 - RNA, 21 nt, Molluscum contagiosum virus
guagcccaggaacaucugcaa

SEQ ID NO: 368907 - RNA, 22 nt, Molluscum contagiosum virus
guagcccaggaacaucugcaac

SEQ ID NO: 368908 - RNA, 12 nt, Molluscum contagiosum virus
guagccgcgcga

SEQ ID NO: 368909 - RNA, 15 nt, Molluscum contagiosum virus
guagcgaaugcagug

SEQ ID NO: 368910 - RNA, 17 nt, Molluscum contagiosum virus
guagcgguugaccagcu

SEQ ID NO: 368911 - RNA, 18 nt, Molluscum contagiosum virus
guagcgguugaccagcuc

SEQ ID NO: 368912 - RNA, 22 nt, Molluscum contagiosum virus
guagcuagcguucccaagcaaa

SEQ ID NO: 368913 - RNA, 19 nt, Molluscum contagiosum virus
guagggugccgaggcgcug

SEQ ID NO: 368914 - RNA, 14 nt, Molluscum contagiosum virus
guaguacugcagca

SEQ ID NO: 368915 - RNA, 16 nt, Molluscum contagiosum virus
guagugguccaccagc

SEQ ID NO: 368916 - RNA, 20 nt, Molluscum contagiosum virus
guauauacuccccgcgcgcg

SEQ ID NO: 368917 - RNA, 16 nt, Molluscum contagiosum virus
guauauucuuuacuac

SEQ ID NO: 368918 - RNA, 23 nt, Molluscum contagiosum virus
guauccucgacgcgcugcucucg

SEQ ID NO: 368919 - RNA, 16 nt, Molluscum contagiosum virus
gucaaacugcuugucg

SEQ ID NO: 368920 - RNA, 21 nt, Molluscum contagiosum virus
gucaacaacacgaucaaggug

SEQ ID NO: 368921 - RNA, 22 nt, Molluscum contagiosum virus
gucaagcacuacauggacgugc

SEQ ID NO: 368922 - RNA, 23 nt, Molluscum contagiosum virus
gucacagacacgcuggucagcuu

SEQ ID NO: 368923 - RNA, 15 nt, Molluscum contagiosum virus
gucacgacuguguuc

SEQ ID NO: 368924 - RNA, 16 nt, Molluscum contagiosum virus
gucacgacuguguucc

SEQ ID NO: 368925 - RNA, 17 nt, Molluscum contagiosum virus
gucagagggacaacuca

SEQ ID NO: 368926 - RNA, 18 nt, Molluscum contagiosum virus
gucagauuguacacggua

SEQ ID NO: 368927 - RNA, 19 nt, Molluscum contagiosum virus
gucaucaccccgcugggcc

SEQ ID NO: 368928 - RNA, 14 nt, Molluscum contagiosum virus
gucaugcgcgcgcg

SEQ ID NO: 368929 - RNA, 14 nt, Molluscum contagiosum virus
guccaaggugaacg

SEQ ID NO: 368930 - RNA, 21 nt, Molluscum contagiosum virus
guccaaggugaacgaccucaa

SEQ ID NO: 368931 - RNA, 12 nt, Molluscum contagiosum virus
guccacaaagac

SEQ ID NO: 368932 - RNA, 11 nt, Molluscum contagiosum virus
guccaccagcu

SEQ ID NO: 368933 - RNA, 23 nt, Molluscum contagiosum virus
guccacgcaggacuggcaccugc

SEQ ID NO: 368934 - RNA, 17 nt, Molluscum contagiosum virus
guccacggcgcgcaccu

SEQ ID NO: 368935 - RNA, 23 nt, Molluscum contagiosum virus
guccacggcgcgcaccuacauga

SEQ ID NO: 368936 - RNA, 13 nt, Molluscum contagiosum virus
guccaugcccacg

SEQ ID NO: 368937 - RNA, 14 nt, Molluscum contagiosum virus
guccccugagcgag

SEQ ID NO: 368938 - RNA, 18 nt, Molluscum contagiosum virus
guccgcagcggcgccacc

SEQ ID NO: 368939 - RNA, 13 nt, Molluscum contagiosum virus
guccgcaguaccg

SEQ ID NO: 368940 - RNA, 19 nt, Molluscum contagiosum virus
guccgcgggcgcacgcuug

SEQ ID NO: 368941 - RNA, 14 nt, Molluscum contagiosum virus
guccuacguuuuca

SEQ ID NO: 368942 - RNA, 21 nt, Molluscum contagiosum virus
guccucgacaaugagcacuug

SEQ ID NO: 368943 - RNA, 16 nt, Molluscum contagiosum virus
guccucuccgucaggg

SEQ ID NO: 368944 - RNA, 18 nt, Molluscum contagiosum virus
guccucucuccccuucag

SEQ ID NO: 368945 - RNA, 14 nt, Molluscum contagiosum virus
guccuucaagaacg

SEQ ID NO: 368946 - RNA, 14 nt, Molluscum contagiosum virus
guccuugccaaguc

SEQ ID NO: 368947 - RNA, 18 nt, Molluscum contagiosum virus
gucgaagaccaccagcac

SEQ ID NO: 368948 - RNA, 14 nt, Molluscum contagiosum virus
gucgagaauagcug

SEQ ID NO: 368949 - RNA, 20 nt, Molluscum contagiosum virus
gucgagaccuuccuccaggg

SEQ ID NO: 368950 - RNA, 15 nt, Molluscum contagiosum virus
gucgagaugcucuac

SEQ ID NO: 368951 - RNA, 15 nt, Molluscum contagiosum virus
gucgagcgcgccgcg

SEQ ID NO: 368952 - RNA, 19 nt, Molluscum contagiosum virus
gucgaggccuucgcgcccg

SEQ ID NO: 368953 - RNA, 12 nt, Molluscum contagiosum virus
gucgcacaguuc

SEQ ID NO: 368954 - RNA, 19 nt, Molluscum contagiosum virus
gucgcacaguucacggcgc

SEQ ID NO: 368955 - RNA, 20 nt, Molluscum contagiosum virus
gucgcgacggagauggacac

SEQ ID NO: 368956 - RNA, 19 nt, Molluscum contagiosum virus
gucgcgccuggagcgcaaa

SEQ ID NO: 368957 - RNA, 16 nt, Molluscum contagiosum virus
gucgcgggcgcgcuag

SEQ ID NO: 368958 - RNA, 16 nt, Molluscum contagiosum virus
gucgcguccacgcagg

SEQ ID NO: 368959 - RNA, 21 nt, Molluscum contagiosum virus
gucguaagggcggacgcacua

SEQ ID NO: 368960 - RNA, 12 nt, Molluscum contagiosum virus
gucguuugcucg

SEQ ID NO: 368961 - RNA, 14 nt, Molluscum contagiosum virus
gucuccaacaagcu

SEQ ID NO: 368962 - RNA, 20 nt, Molluscum contagiosum virus
gucuccaacaagcucaucca

SEQ ID NO: 368963 - RNA, 23 nt, Molluscum contagiosum virus
gucuccaacaagcucauccaccu

SEQ ID NO: 368964 - RNA, 19 nt, Molluscum contagiosum virus
gucuccucgcgcacagaca

SEQ ID NO: 368965 - RNA, 16 nt, Molluscum contagiosum virus
gucucggagaagaaca

SEQ ID NO: 368966 - RNA, 18 nt, Molluscum contagiosum virus
gucucggagaagaacagc

SEQ ID NO: 368967 - RNA, 23 nt, Molluscum contagiosum virus
gucucggagaagaacagcacgaa

SEQ ID NO: 368968 - RNA, 13 nt, Molluscum contagiosum virus
gucucucugucuc

SEQ ID NO: 368969 - RNA, 16 nt, Molluscum contagiosum virus
gucugcgaguggcgcg

SEQ ID NO: 368970 - RNA, 18 nt, Molluscum contagiosum virus
gucugucguggaggaaac

SEQ ID NO: 368971 - RNA, 20 nt, Molluscum contagiosum virus
gucugucguuuuacaaugac

SEQ ID NO: 368972 - RNA, 18 nt, Molluscum contagiosum virus
gucuucaagacuggcacu

SEQ ID NO: 368973 - RNA, 19 nt, Molluscum contagiosum virus
gucuucuucgcaagugcac

SEQ ID NO: 368974 - RNA, 22 nt, Molluscum contagiosum virus
gucuugacaggcgcgcaagugc

SEQ ID NO: 368975 - RNA, 23 nt, Molluscum contagiosum virus
gucuugcagagugaaucuugccu

SEQ ID NO: 368976 - RNA, 21 nt, Molluscum contagiosum virus
gucuugcgcacacacuugcuc

SEQ ID NO: 368977 - RNA, 21 nt, Molluscum contagiosum virus
gucuuggcaugcgugcuucac

SEQ ID NO: 368978 - RNA, 23 nt, Molluscum contagiosum virus
gucuuguggcgccgaugcagugc

SEQ ID NO: 368979 - RNA, 22 nt, Molluscum contagiosum virus
gucuuugcgaacgcgcaagugu

SEQ ID NO: 368980 - RNA, 17 nt, Molluscum contagiosum virus
gucuuuuuccugugguu

SEQ ID NO: 368981 - RNA, 14 nt, Molluscum contagiosum virus
gugaaucuugccug

SEQ ID NO: 368982 - RNA, 18 nt, Molluscum contagiosum virus
gugacaaggauggacaaa

SEQ ID NO: 368983 - RNA, 12 nt, Molluscum contagiosum virus
gugacacuaccg

SEQ ID NO: 368984 - RNA, 23 nt, Molluscum contagiosum virus
gugacagguccgguguccacgac

SEQ ID NO: 368985 - RNA, 16 nt, Molluscum contagiosum virus
gugaccucgcugcuga

SEQ ID NO: 368986 - RNA, 22 nt, Molluscum contagiosum virus
gugacggccguguacaugcuca

SEQ ID NO: 368987 - RNA, 22 nt, Molluscum contagiosum virus
gugacucgccgugugaucaaga

SEQ ID NO: 368988 - RNA, 17 nt, Molluscum contagiosum virus
gugagcguucgcuacuu

SEQ ID NO: 368989 - RNA, 18 nt, Molluscum contagiosum virus
gugaggaggcggcacugc

SEQ ID NO: 368990 - RNA, 21 nt, Molluscum contagiosum virus
gugaggaggcggcacugcuag

SEQ ID NO: 368991 - RNA, 23 nt, Molluscum contagiosum virus
gugaugauuugauggcugcucau

SEQ ID NO: 368992 - RNA, 16 nt, Molluscum contagiosum virus
gugcacaccagacaaa

SEQ ID NO: 368993 - RNA, 16 nt, Molluscum contagiosum virus
gugcaccucaagaaga

SEQ ID NO: 368994 - RNA, 14 nt, Molluscum contagiosum virus
gugcacgcacgcgc

SEQ ID NO: 368995 - RNA, 19 nt, Molluscum contagiosum virus
gugcacgcacgcgcgggca

SEQ ID NO: 368996 - RNA, 20 nt, Molluscum contagiosum virus
gugcacgcggcgcgugucgc

SEQ ID NO: 368997 - RNA, 22 nt, Molluscum contagiosum virus
gugcagacgaccgucacgacuc

SEQ ID NO: 368998 - RNA, 22 nt, Molluscum contagiosum virus
gugcagagcaaggcgagucaau

SEQ ID NO: 368999 - RNA, 17 nt, Molluscum contagiosum virus
gugcagccgcugcugcu

SEQ ID NO: 369000 - RNA, 16 nt, Molluscum contagiosum virus
gugcagcgcgugcgca

SEQ ID NO: 369001 - RNA, 16 nt, Molluscum contagiosum virus
gugcagcggcgccacg

SEQ ID NO: 369002 - RNA, 22 nt, Molluscum contagiosum virus
gugcaggaacgcgcgcucguca

SEQ ID NO: 369003 - RNA, 19 nt, Molluscum contagiosum virus
gugccagcgccucugcgag

SEQ ID NO: 369004 - RNA, 21 nt, Molluscum contagiosum virus
gugcccaagugcgcgugucug

SEQ ID NO: 369005 - RNA, 13 nt, Molluscum contagiosum virus
gugcccacgcugg

SEQ ID NO: 369006 - RNA, 13 nt, Molluscum contagiosum virus
gugcccgcgcgcu

SEQ ID NO: 369007 - RNA, 22 nt, Molluscum contagiosum virus
gugcccgcggcguucccgcuca

SEQ ID NO: 369008 - RNA, 20 nt, Molluscum contagiosum virus
gugccgccgugggcgccgcg

SEQ ID NO: 369009 - RNA, 16 nt, Molluscum contagiosum virus
gugccgcucgcugucc

SEQ ID NO: 369010 - RNA, 15 nt, Molluscum contagiosum virus
gugccgggcuugcuc

SEQ ID NO: 369011 - RNA, 20 nt, Molluscum contagiosum virus
gugccuccgcggacgcgccc

SEQ ID NO: 369012 - RNA, 15 nt, Molluscum contagiosum virus
gugccuggcuugcgc

SEQ ID NO: 369013 - RNA, 20 nt, Molluscum contagiosum virus
gugccuggcuugcgcgcgcc

SEQ ID NO: 369014 - RNA, 18 nt, Molluscum contagiosum virus
gugccuguggcgcacacg

SEQ ID NO: 369015 - RNA, 12 nt, Molluscum contagiosum virus
gugcgaagggcu

SEQ ID NO: 369016 - RNA, 14 nt, Molluscum contagiosum virus
gugcgacaaaguac

SEQ ID NO: 369017 - RNA, 16 nt, Molluscum contagiosum virus
gugcgagaucgacugc

SEQ ID NO: 369018 - RNA, 13 nt, Molluscum contagiosum virus
gugcgagcacgag

SEQ ID NO: 369019 - RNA, 13 nt, Molluscum contagiosum virus
gugcgagcuuugu

SEQ ID NO: 369020 - RNA, 17 nt, Molluscum contagiosum virus
gugcgcaccgcgggcug

SEQ ID NO: 369021 - RNA, 13 nt, Molluscum contagiosum virus
gugcgccgcgccc

SEQ ID NO: 369022 - RNA, 21 nt, Molluscum contagiosum virus
gugcgccucggacuucgacgc

SEQ ID NO: 369023 - RNA, 20 nt, Molluscum contagiosum virus
gugcgcgaccaguacaucac

SEQ ID NO: 369024 - RNA, 14 nt, Molluscum contagiosum virus
gugcgcgcuacaga

SEQ ID NO: 369025 - RNA, 18 nt, Molluscum contagiosum virus
gugcgcgcugcgcgcgcu

SEQ ID NO: 369026 - RNA, 15 nt, Molluscum contagiosum virus
gugcgcgugagccaa

SEQ ID NO: 369027 - RNA, 18 nt, Molluscum contagiosum virus
gugcgcuacguggcgcga

SEQ ID NO: 369028 - RNA, 19 nt, Molluscum contagiosum virus
gugcggccaccagcgcggc

SEQ ID NO: 369029 - RNA, 16 nt, Molluscum contagiosum virus
gugcggcggcgcgugc

SEQ ID NO: 369030 - RNA, 18 nt, Molluscum contagiosum virus
gugcguacgugcacgugg

SEQ ID NO: 369031 - RNA, 12 nt, Molluscum contagiosum virus
gugcgugacacg

SEQ ID NO: 369032 - RNA, 15 nt, Molluscum contagiosum virus
gugcuacugcacugc

SEQ ID NO: 369033 - RNA, 15 nt, Molluscum contagiosum virus
gugcuccgcacgugg

SEQ ID NO: 369034 - RNA, 16 nt, Molluscum contagiosum virus
gugcuccgcacgugga

SEQ ID NO: 369035 - RNA, 20 nt, Molluscum contagiosum virus
gugcuccugaggaagcaaga

SEQ ID NO: 369036 - RNA, 16 nt, Molluscum contagiosum virus
gugcucguguguccgc

SEQ ID NO: 369037 - RNA, 15 nt, Molluscum contagiosum virus
gugcucugugcgcgc

SEQ ID NO: 369038 - RNA, 14 nt, Molluscum contagiosum virus
gugcucuucgggga

SEQ ID NO: 369039 - RNA, 16 nt, Molluscum contagiosum virus
gugcugcgccacgugc

SEQ ID NO: 369040 - RNA, 18 nt, Molluscum contagiosum virus
gugcugcgcgacaugcug

SEQ ID NO: 369041 - RNA, 19 nt, Molluscum contagiosum virus
gugcugcggcgcgugccgc

SEQ ID NO: 369042 - RNA, 21 nt, Molluscum contagiosum virus
gugcuggagggcacgcugcac

SEQ ID NO: 369043 - RNA, 16 nt, Molluscum contagiosum virus
gugcuggucaagaaca

SEQ ID NO: 369044 - RNA, 20 nt, Molluscum contagiosum virus
gugcuggucaagaaggcgcu

SEQ ID NO: 369045 - RNA, 17 nt, Molluscum contagiosum virus
gugcuuacugcgggcug

SEQ ID NO: 369046 - RNA, 19 nt, Molluscum contagiosum virus
gugcuucccgaguacuacu

SEQ ID NO: 369047 - RNA, 13 nt, Molluscum contagiosum virus
gugcuuguucucu

SEQ ID NO: 369048 - RNA, 12 nt, Molluscum contagiosum virus
guggaacaaaga

SEQ ID NO: 369049 - RNA, 12 nt, Molluscum contagiosum virus
guggaccucauc

SEQ ID NO: 369050 - RNA, 14 nt, Molluscum contagiosum virus
guggaccuuggcgc

SEQ ID NO: 369051 - RNA, 19 nt, Molluscum contagiosum virus
guggaccuuggcgcgccgc

SEQ ID NO: 369052 - RNA, 17 nt, Molluscum contagiosum virus
guggacgaugguggcgc

SEQ ID NO: 369053 - RNA, 18 nt, Molluscum contagiosum virus
guggacgaugguggcgcu

SEQ ID NO: 369054 - RNA, 21 nt, Molluscum contagiosum virus
guggacgcgcgagugugugca

SEQ ID NO: 369055 - RNA, 14 nt, Molluscum contagiosum virus
guggagcacuuccg

SEQ ID NO: 369056 - RNA, 14 nt, Molluscum contagiosum virus
guggaucgcgcgca

SEQ ID NO: 369057 - RNA, 20 nt, Molluscum contagiosum virus
guggcaugcgcccucacgug

SEQ ID NO: 369058 - RNA, 16 nt, Molluscum contagiosum virus
guggccuacguggcgu

SEQ ID NO: 369059 - RNA, 17 nt, Molluscum contagiosum virus
guggcgagcaucugcgc

SEQ ID NO: 369060 - RNA, 14 nt, Molluscum contagiosum virus
guggcgauccuguc

SEQ ID NO: 369061 - RNA, 17 nt, Molluscum contagiosum virus
guggcgauccuguccau

SEQ ID NO: 369062 - RNA, 21 nt, Molluscum contagiosum virus
guggcgccauugcucgcggug

SEQ ID NO: 369063 - RNA, 14 nt, Molluscum contagiosum virus
guggcgcgaaguga

SEQ ID NO: 369064 - RNA, 14 nt, Molluscum contagiosum virus
uacggacgcccucc

SEQ ID NO: 369065 - RNA, 17 nt, Molluscum contagiosum virus
uacggcgcauccuccac

SEQ ID NO: 369066 - RNA, 21 nt, Molluscum contagiosum virus
uacguggucauggugcccaug

SEQ ID NO: 369067 - RNA, 15 nt, Molluscum contagiosum virus
uacguggugcgcgac

SEQ ID NO: 369068 - RNA, 18 nt, Molluscum contagiosum virus
uacguguccaugcacgac

SEQ ID NO: 369069 - RNA, 18 nt, Molluscum contagiosum virus
uacuaagccgcgugcugg

SEQ ID NO: 369070 - RNA, 20 nt, Molluscum contagiosum virus
uacuacggagcgacauagcg

SEQ ID NO: 369071 - RNA, 17 nt, Molluscum contagiosum virus
uacucaacaagcugcug

SEQ ID NO: 369072 - RNA, 17 nt, Molluscum contagiosum virus
uacugcgacauccacau

SEQ ID NO: 369073 - RNA, 20 nt, Molluscum contagiosum virus
uacuucaagcacgagcugcu

SEQ ID NO: 369074 - RNA, 19 nt, Molluscum contagiosum virus
uacuucgcgaugugcaccu

SEQ ID NO: 369075 - RNA, 22 nt, Molluscum contagiosum virus
uacuugcucguguucguguguu

SEQ ID NO: 369076 - RNA, 17 nt, Molluscum contagiosum virus
uacuuggaagagucgcg

SEQ ID NO: 369077 - RNA, 21 nt, Molluscum contagiosum virus
uacuuugucgcacgagcaugu

SEQ ID NO: 369078 - RNA, 19 nt, Molluscum contagiosum virus
uagaacgccaggaacauca

SEQ ID NO: 369079 - RNA, 22 nt, Molluscum contagiosum virus
uagacuucuugguggacagccu

SEQ ID NO: 369080 - RNA, 15 nt, Molluscum contagiosum virus
uagcacacgcgcgcg

SEQ ID NO: 369081 - RNA, 22 nt, Molluscum contagiosum virus
uagcaccgcaugggcccuggcg

SEQ ID NO: 369082 - RNA, 14 nt, Molluscum contagiosum virus
uagcagcgugcgca

SEQ ID NO: 369083 - RNA, 15 nt, Molluscum contagiosum virus
uagcauuccuucaca

SEQ ID NO: 369084 - RNA, 20 nt, Molluscum contagiosum virus
uagccccucgagcagcggua

SEQ ID NO: 369085 - RNA, 14 nt, Molluscum contagiosum virus
uagccgccgcugcc

SEQ ID NO: 369086 - RNA, 16 nt, Molluscum contagiosum virus
uagcgcaccagcugcg

SEQ ID NO: 369087 - RNA, 13 nt, Molluscum contagiosum virus
uagcgcaggcagu

SEQ ID NO: 369088 - RNA, 22 nt, Molluscum contagiosum virus
uagcgcgcgccgacgugcgcgu

SEQ ID NO: 369089 - RNA, 18 nt, Molluscum contagiosum virus
uagcggcgcuugaugucc

SEQ ID NO: 369090 - RNA, 17 nt, Molluscum contagiosum virus
uagcguccgcauccuca

SEQ ID NO: 369091 - RNA, 19 nt, Molluscum contagiosum virus
uagcguugguaacaagagc

SEQ ID NO: 369092 - RNA, 14 nt, Molluscum contagiosum virus
uagucaucaaagca

SEQ ID NO: 369093 - RNA, 22 nt, Molluscum contagiosum virus
uagugcgcgccaagaacaagcu

SEQ ID NO: 369094 - RNA, 20 nt, Molluscum contagiosum virus
uaguuccggcggcauugugg

SEQ ID NO: 369095 - RNA, 19 nt, Molluscum contagiosum virus
uaguugcagcccaccagca

SEQ ID NO: 369096 - RNA, 20 nt, Molluscum contagiosum virus
uauacuccccgcgcgcgugc

SEQ ID NO: 369097 - RNA, 21 nt, Molluscum contagiosum virus
uauagacguauacuccaaaaa

SEQ ID NO: 369098 - RNA, 19 nt, Molluscum contagiosum virus
uaucaggcgauaggacaug

SEQ ID NO: 369099 - RNA, 22 nt, Molluscum contagiosum virus
uaucgacgacgaugacaucugg

SEQ ID NO: 369100 - RNA, 19 nt, Molluscum contagiosum virus
uaugacuugcgagcgccaa

SEQ ID NO: 369101 - RNA, 12 nt, Molluscum contagiosum virus
uaugcacuuuca

SEQ ID NO: 369102 - RNA, 14 nt, Molluscum contagiosum virus
uaugcacuuucaac

SEQ ID NO: 369103 - RNA, 15 nt, Molluscum contagiosum virus
uaugcaucuagucag

SEQ ID NO: 369104 - RNA, 15 nt, Molluscum contagiosum virus
uauggacgcuugcua

SEQ ID NO: 369105 - RNA, 14 nt, Molluscum contagiosum virus
uauggaucuucuca

SEQ ID NO: 369106 - RNA, 20 nt, Molluscum contagiosum virus
uauucgcccaucaucgccag

SEQ ID NO: 369107 - RNA, 23 nt, Molluscum contagiosum virus
uauuguuuuucgggaagcacagu

SEQ ID NO: 369108 - RNA, 17 nt, Molluscum contagiosum virus
uauuucaaugcaguaug

SEQ ID NO: 369109 - RNA, 21 nt, Molluscum contagiosum virus
ucaacaacacgaucaaggugc

SEQ ID NO: 369110 - RNA, 22 nt, Molluscum contagiosum virus
ucaacaagcugcuggcacaaau

SEQ ID NO: 369111 - RNA, 17 nt, Molluscum contagiosum virus
ucaacaucuacaaggag

SEQ ID NO: 369112 - RNA, 22 nt, Molluscum contagiosum virus
ucaaccaguacuucaucuucaa

SEQ ID NO: 369113 - RNA, 14 nt, Molluscum contagiosum virus
ucaaccgcaaggaa

SEQ ID NO: 369114 - RNA, 16 nt, Molluscum contagiosum virus
ucaaccgcugcaauaa

SEQ ID NO: 369115 - RNA, 21 nt, Molluscum contagiosum virus
ucaaccucgagaagaccuguu

SEQ ID NO: 369116 - RNA, 15 nt, Molluscum contagiosum virus
ucaacuacaaggugc

SEQ ID NO: 369117 - RNA, 16 nt, Molluscum contagiosum virus
ucaacucguaggacaa

SEQ ID NO: 369118 - RNA, 22 nt, Molluscum contagiosum virus
ucaagaacagucgcgcgccugc

SEQ ID NO: 369119 - RNA, 16 nt, Molluscum contagiosum virus
ucaagaagcccaagga

SEQ ID NO: 369120 - RNA, 23 nt, Molluscum contagiosum virus
ucaagaaguucaucuacugcgac

SEQ ID NO: 369121 - RNA, 18 nt, Molluscum contagiosum virus
ucaagaucguuuugcacu

SEQ ID NO: 369122 - RNA, 19 nt, Molluscum contagiosum virus
ucaagaucguuuugcacuu

SEQ ID NO: 369123 - RNA, 15 nt, Molluscum contagiosum virus
ucaagcaccugcgcu

SEQ ID NO: 369124 - RNA, 19 nt, Molluscum contagiosum virus
ucaagcaccugcgcuuccu

SEQ ID NO: 369125 - RNA, 16 nt, Molluscum contagiosum virus
ucaagcacgagcugcu

SEQ ID NO: 369126 - RNA, 17 nt, Molluscum contagiosum virus
ucaagcacgcuacugcg

SEQ ID NO: 369127 - RNA, 21 nt, Molluscum contagiosum virus
ucaagcacggcuuccggcacc

SEQ ID NO: 369128 - RNA, 16 nt, Molluscum contagiosum virus
ucaagcacuacaugga

SEQ ID NO: 369129 - RNA, 19 nt, Molluscum contagiosum virus
ucaagcagguggccgcgcg

SEQ ID NO: 369130 - RNA, 16 nt, Molluscum contagiosum virus
ucaaggacuaccagcu

SEQ ID NO: 369131 - RNA, 12 nt, Molluscum contagiosum virus
ucaaggugcaga

SEQ ID NO: 369132 - RNA, 23 nt, Molluscum contagiosum virus
ucaagugcgucgacguggagccu

SEQ ID NO: 369133 - RNA, 22 nt, Molluscum contagiosum virus
ucaaugcaguaugugaacacga

SEQ ID NO: 369134 - RNA, 18 nt, Molluscum contagiosum virus
ucaauucaaaggugcuca

SEQ ID NO: 369135 - RNA, 19 nt, Molluscum contagiosum virus
ucaauucaaaggugcucac

SEQ ID NO: 369136 - RNA, 17 nt, Molluscum contagiosum virus
ucaauucaaguuugaca

SEQ ID NO: 369137 - RNA, 14 nt, Molluscum contagiosum virus
ucacaagguaguca

SEQ ID NO: 369138 - RNA, 17 nt, Molluscum contagiosum virus
ucacaauggcacuagcc

SEQ ID NO: 369139 - RNA, 22 nt, Molluscum contagiosum virus
ucacagccguggaguccaugcc

SEQ ID NO: 369140 - RNA, 13 nt, Molluscum contagiosum virus
ucacaucuguccc

SEQ ID NO: 369141 - RNA, 21 nt, Molluscum contagiosum virus
ucacaugcuucgcgcaaacaa

SEQ ID NO: 369142 - RNA, 14 nt, Molluscum contagiosum virus
ucacaugugcugcc

SEQ ID NO: 369143 - RNA, 18 nt, Molluscum contagiosum virus
ucaccacuggacacgugc

SEQ ID NO: 369144 - RNA, 19 nt, Molluscum contagiosum virus
ucaccacuggacacgugcc

SEQ ID NO: 369145 - RNA, 15 nt, Molluscum contagiosum virus
ucaccaucaacaucu

SEQ ID NO: 369146 - RNA, 21 nt, Molluscum contagiosum virus
ucacccuuaauaaaaaaucaa

SEQ ID NO: 369147 - RNA, 19 nt, Molluscum contagiosum virus
ucaccgcgcagaagccaac

SEQ ID NO: 369148 - RNA, 22 nt, Molluscum contagiosum virus
ucaccggaacaacuugggagca

SEQ ID NO: 369149 - RNA, 16 nt, Molluscum contagiosum virus
ucacgaccgacccauc

SEQ ID NO: 369150 - RNA, 15 nt, Molluscum contagiosum virus
ucacgaugaugauga

SEQ ID NO: 369151 - RNA, 16 nt, Molluscum contagiosum virus
ucacgcguccacaaag

SEQ ID NO: 369152 - RNA, 19 nt, Molluscum contagiosum virus
ucacgcuagcgggccugua

SEQ ID NO: 369153 - RNA, 13 nt, Molluscum contagiosum virus
ucacgcuggucac

SEQ ID NO: 369154 - RNA, 15 nt, Molluscum contagiosum virus
ucacguacuugagca

SEQ ID NO: 369155 - RNA, 17 nt, Molluscum contagiosum virus
ucacuagcgcaggcagu

SEQ ID NO: 369156 - RNA, 20 nt, Molluscum contagiosum virus
ucacuagcgcaggcaguugc

SEQ ID NO: 369157 - RNA, 18 nt, Molluscum contagiosum virus
ucacucacaugugcugcc

SEQ ID NO: 369158 - RNA, 13 nt, Molluscum contagiosum virus
ucagaacgacacc

SEQ ID NO: 369159 - RNA, 17 nt, Molluscum contagiosum virus
ucagacagcggauagcu

SEQ ID NO: 369160 - RNA, 22 nt, Molluscum contagiosum virus
ucagagaaaucccaagagccau

SEQ ID NO: 369161 - RNA, 15 nt, Molluscum contagiosum virus
ucagagaagugcucc

SEQ ID NO: 369162 - RNA, 23 nt, Molluscum contagiosum virus
ucagagaagugcuccgcacgugg

SEQ ID NO: 369163 - RNA, 22 nt, Molluscum contagiosum virus
ucagauuuugcgucaaggugaa

SEQ ID NO: 369164 - RNA, 21 nt, Molluscum contagiosum virus
ucagcaggcuguguuccagcu

SEQ ID NO: 369165 - RNA, 13 nt, Molluscum contagiosum virus
ucagccgagcgcc

SEQ ID NO: 369166 - RNA, 22 nt, Molluscum contagiosum virus
ucgagcugacucggacacugga

SEQ ID NO: 369167 - RNA, 14 nt, Molluscum contagiosum virus
ucgaggccuucgcg

SEQ ID NO: 369168 - RNA, 21 nt, Molluscum contagiosum virus
ucgaggcgcuugggcacugcu

SEQ ID NO: 369169 - RNA, 20 nt, Molluscum contagiosum virus
ucgagggcgaggccaagguc

SEQ ID NO: 369170 - RNA, 17 nt, Molluscum contagiosum virus
ucgaggugugccuguuu

SEQ ID NO: 369171 - RNA, 19 nt, Molluscum contagiosum virus
ucgaucauguccacagccg

SEQ ID NO: 369172 - RNA, 13 nt, Molluscum contagiosum virus
ucgaugggcucca

SEQ ID NO: 369173 - RNA, 13 nt, Molluscum contagiosum virus
ucgauucuguccg

SEQ ID NO: 369174 - RNA, 14 nt, Molluscum contagiosum virus
ucgcaacaaaagag

SEQ ID NO: 369175 - RNA, 20 nt, Molluscum contagiosum virus
ucgcaaccccgcgcugcgcg

SEQ ID NO: 369176 - RNA, 19 nt, Molluscum contagiosum virus
ucgcaagauacacauugcg

SEQ ID NO: 369177 - RNA, 17 nt, Molluscum contagiosum virus
ucgcaagugcacaccag

SEQ ID NO: 369178 - RNA, 13 nt, Molluscum contagiosum virus
ucgcacaguucac

SEQ ID NO: 369179 - RNA, 14 nt, Molluscum contagiosum virus
ucgcacaguucacg

SEQ ID NO: 369180 - RNA, 17 nt, Molluscum contagiosum virus
ucgcacuggccugcaaa

SEQ ID NO: 369181 - RNA, 17 nt, Molluscum contagiosum virus
ucgcacuuaaaugggaa

SEQ ID NO: 369182 - RNA, 18 nt, Molluscum contagiosum virus
ucgcagaacugcugcgcg

SEQ ID NO: 369183 - RNA, 16 nt, Molluscum contagiosum virus
ucgcagacgacucgcu

SEQ ID NO: 369184 - RNA, 20 nt, Molluscum contagiosum virus
ucgcagacgacucgcugcca

SEQ ID NO: 369185 - RNA, 14 nt, Molluscum contagiosum virus
ucgcaggcgugcuc

SEQ ID NO: 369186 - RNA, 18 nt, Molluscum contagiosum virus
ucgcaugcgccugcacuu

SEQ ID NO: 369187 - RNA, 17 nt, Molluscum contagiosum virus
ucgccaauggagccgcu

SEQ ID NO: 369188 - RNA, 15 nt, Molluscum contagiosum virus
ucgccagaagucaga

SEQ ID NO: 369189 - RNA, 22 nt, Molluscum contagiosum virus
ucgcccaucaucgccagcauca

SEQ ID NO: 369190 - RNA, 17 nt, Molluscum contagiosum virus
ucgcccgccgagcucuu

SEQ ID NO: 369191 - RNA, 16 nt, Molluscum contagiosum virus
ucgcccugcccgcgcg

SEQ ID NO: 369192 - RNA, 22 nt, Molluscum contagiosum virus
ucgccgaagacgcguaccagcg

SEQ ID NO: 369193 - RNA, 19 nt, Molluscum contagiosum virus
ucgccgcgcgccgcugcuc

SEQ ID NO: 369194 - RNA, 19 nt, Molluscum contagiosum virus
ucgccgggccccugucgcg

SEQ ID NO: 369195 - RNA, 15 nt, Molluscum contagiosum virus
ucgccuuugugacaa

SEQ ID NO: 369196 - RNA, 18 nt, Molluscum contagiosum virus
ucgccuuugugacaagga

SEQ ID NO: 369197 - RNA, 18 nt, Molluscum contagiosum virus
ucgcgaccuggcgcgugc

SEQ ID NO: 369198 - RNA, 17 nt, Molluscum contagiosum virus
ucgcgacgacgagcacu

SEQ ID NO: 369199 - RNA, 14 nt, Molluscum contagiosum virus
ucgcgacgugcgcg

SEQ ID NO: 369200 - RNA, 15 nt, Molluscum contagiosum virus
ucgcgagugugcaug

SEQ ID NO: 369201 - RNA, 18 nt, Molluscum contagiosum virus
ucgcgcaaguccagcgcg

SEQ ID NO: 369202 - RNA, 18 nt, Molluscum contagiosum virus
ucgcgcacagaaagccaa

SEQ ID NO: 369203 - RNA, 22 nt, Molluscum contagiosum virus
ucgcgcacgaccacgugcagga

SEQ ID NO: 369204 - RNA, 14 nt, Molluscum contagiosum virus
ucgcgcagcagcua

SEQ ID NO: 369205 - RNA, 14 nt, Molluscum contagiosum virus
ucgcgcgcaccugc

SEQ ID NO: 369206 - RNA, 14 nt, Molluscum contagiosum virus
ucgcgcgccugccg

SEQ ID NO: 369207 - RNA, 13 nt, Molluscum contagiosum virus
ucgcgcgccugcg

SEQ ID NO: 369208 - RNA, 19 nt, Molluscum contagiosum virus
ucgcgcgcggccguggcaa

SEQ ID NO: 369209 - RNA, 20 nt, Molluscum contagiosum virus
ucgcgcgcggccguggcaaa

SEQ ID NO: 369210 - RNA, 18 nt, Molluscum contagiosum virus
ucgcgcgcuaccugcgca

SEQ ID NO: 369211 - RNA, 20 nt, Molluscum contagiosum virus
ucgcgcguaaaagacuggcu

SEQ ID NO: 369212 - RNA, 17 nt, Molluscum contagiosum virus
ucgcgcguccgcaaaga

SEQ ID NO: 369213 - RNA, 17 nt, Molluscum contagiosum virus
ucgcgcuccgcaagaag

SEQ ID NO: 369214 - RNA, 18 nt, Molluscum contagiosum virus
ucgcggguccgucuuugc

SEQ ID NO: 369215 - RNA, 20 nt, Molluscum contagiosum virus
ucgcguaccaagccgugacg

SEQ ID NO: 369216 - RNA, 22 nt, Molluscum contagiosum virus
ucgcguagcagcgccugcacgc

SEQ ID NO: 369217 - RNA, 15 nt, Molluscum contagiosum virus
ucgcucgcucgcuca

SEQ ID NO: 369218 - RNA, 12 nt, Molluscum contagiosum virus
ucgcugcugcuc

SEQ ID NO: 369219 - RNA, 17 nt, Molluscum contagiosum virus
ucgcugcuggcagacac

SEQ ID NO: 369220 - RNA, 19 nt, Molluscum contagiosum virus
ucgcuggaggauucuugua

SEQ ID NO: 369221 - RNA, 15 nt, Molluscum contagiosum virus
ucgcuggugugcacu

SEQ ID NO: 369222 - RNA, 18 nt, Molluscum contagiosum virus
ucggaacuagcccuagcc

SEQ ID NO: 369223 - RNA, 19 nt, Molluscum contagiosum virus
ucggaauuccuugugcaau

SEQ ID NO: 369224 - RNA, 18 nt, Molluscum contagiosum virus
ucggacagugccuccgcg

SEQ ID NO: 369225 - RNA, 15 nt, Molluscum contagiosum virus
ucggacucagcaugu

SEQ ID NO: 369226 - RNA, 18 nt, Molluscum contagiosum virus
ucggagaagugcuccgca

SEQ ID NO: 369227 - RNA, 22 nt, Molluscum contagiosum virus
ucggcgcuacgcacuucacggc

SEQ ID NO: 369228 - RNA, 15 nt, Molluscum contagiosum virus
ucggcggcaugcgcg

SEQ ID NO: 369229 - RNA, 22 nt, Molluscum contagiosum virus
ucggcggcaugcgcgcgcagca

SEQ ID NO: 369230 - RNA, 17 nt, Molluscum contagiosum virus
ucggcggcugugcccgc

SEQ ID NO: 369231 - RNA, 15 nt, Molluscum contagiosum virus
ucggcguggugcugg

SEQ ID NO: 369232 - RNA, 18 nt, Molluscum contagiosum virus
ucggcucgggaacaaagg

SEQ ID NO: 369233 - RNA, 13 nt, Molluscum contagiosum virus
ucgggaagcacag

SEQ ID NO: 369234 - RNA, 18 nt, Molluscum contagiosum virus
ucgggaagcacaguccag

SEQ ID NO: 369235 - RNA, 22 nt, Molluscum contagiosum virus
ucgggaaggaacaaugcugcau

SEQ ID NO: 369236 - RNA, 11 nt, Molluscum contagiosum virus
ucggggcuccg

SEQ ID NO: 369237 - RNA, 15 nt, Molluscum contagiosum virus
ucggggcugacggcc

SEQ ID NO: 369238 - RNA, 16 nt, Molluscum contagiosum virus
ucggugcucaugcgcg

SEQ ID NO: 369239 - RNA, 12 nt, Molluscum contagiosum virus
ucguacugcugc

SEQ ID NO: 369240 - RNA, 17 nt, Molluscum contagiosum virus
ucguccggcgcucgccu

SEQ ID NO: 369241 - RNA, 22 nt, Molluscum contagiosum virus
ucgucgaucgccucgacgcugg

SEQ ID NO: 369242 - RNA, 21 nt, Molluscum contagiosum virus
ucgucgugaacgcggacacgu

SEQ ID NO: 369243 - RNA, 21 nt, Molluscum contagiosum virus
ucgugcaaagcaucgacgugc

SEQ ID NO: 369244 - RNA, 20 nt, Molluscum contagiosum virus
ucgugcucuuggcguucgca

SEQ ID NO: 369245 - RNA, 14 nt, Molluscum contagiosum virus
ucguggaacaaaga

SEQ ID NO: 369246 - RNA, 16 nt, Molluscum contagiosum virus
ucguggaguuuagcaa

SEQ ID NO: 369247 - RNA, 21 nt, Molluscum contagiosum virus
ucguggcguugcugcugcgcg

SEQ ID NO: 369248 - RNA, 19 nt, Molluscum contagiosum virus
ucguguguccgcacgcaca

SEQ ID NO: 369249 - RNA, 15 nt, Molluscum contagiosum virus
ucuacaacgagcucu

SEQ ID NO: 369250 - RNA, 15 nt, Molluscum contagiosum virus
ucuacacguggaauu

SEQ ID NO: 369251 - RNA, 14 nt, Molluscum contagiosum virus
ucuaccacagguuu

SEQ ID NO: 369252 - RNA, 17 nt, Molluscum contagiosum virus
ucuauugccgcgugcuc

SEQ ID NO: 369253 - RNA, 15 nt, Molluscum contagiosum virus
ucucaacgagcgcau

SEQ ID NO: 369254 - RNA, 21 nt, Molluscum contagiosum virus
ucucaagacaagucacacucu

SEQ ID NO: 369255 - RNA, 23 nt, Molluscum contagiosum virus
ucucaagaucguuuugcacuugu

SEQ ID NO: 369256 - RNA, 19 nt, Molluscum contagiosum virus
ucucaccucgcaugaugaa

SEQ ID NO: 369257 - RNA, 21 nt, Molluscum contagiosum virus
ucucacgcccgcgcugcgcaa

SEQ ID NO: 369258 - RNA, 16 nt, Molluscum contagiosum virus
ucuccaacaagcucau

SEQ ID NO: 369259 - RNA, 12 nt, Molluscum contagiosum virus
ucuccacaaaga

SEQ ID NO: 369260 - RNA, 13 nt, Molluscum contagiosum virus
ucuccacaaagac

SEQ ID NO: 369261 - RNA, 22 nt, Molluscum contagiosum virus
ucuccaugucgucaaaggcaaa

SEQ ID NO: 369262 - RNA, 17 nt, Molluscum contagiosum virus
ucucccgccgcgugccc

SEQ ID NO: 369263 - RNA, 21 nt, Molluscum contagiosum virus
ucucccgcggccgccacuguu

SEQ ID NO: 369264 - RNA, 23 nt, Molluscum contagiosum virus
ucucccgcggccgccacuguugc

SEQ ID NO: 369265 - RNA, 15 nt, Molluscum contagiosum virus
ucuccgaccgugccc

SEQ ID NO: 369266 - RNA, 14 nt, Molluscum contagiosum virus
ucuccgcgcugcac

SEQ ID NO: 369267 - RNA, 20 nt, Molluscum contagiosum virus
ucuccuccggggcgcaagca

SEQ ID NO: 369268 - RNA, 14 nt, Molluscum contagiosum virus
ucuccuccugaugc

SEQ ID NO: 369269 - RNA, 14 nt, Molluscum contagiosum virus
ugcacaccagacaa

SEQ ID NO: 369270 - RNA, 18 nt, Molluscum contagiosum virus
ugcacaccagacaaaguc

SEQ ID NO: 369271 - RNA, 13 nt, Molluscum contagiosum virus
ugcacaccgagcg

SEQ ID NO: 369272 - RNA, 21 nt, Molluscum contagiosum virus
ugcacacucacgcguccacaa

SEQ ID NO: 369273 - RNA, 22 nt, Molluscum contagiosum virus
ugcacagcugcucguguucacu

SEQ ID NO: 369274 - RNA, 19 nt, Molluscum contagiosum virus
ugcaccacgugcuccgugu

SEQ ID NO: 369275 - RNA, 20 nt, Molluscum contagiosum virus
ugcacgacccucuucgacuu

SEQ ID NO: 369276 - RNA, 22 nt, Molluscum contagiosum virus
ugcacgacguacgagugcugga

SEQ ID NO: 369277 - RNA, 15 nt, Molluscum contagiosum virus
ugcacgcgcacgcgc

SEQ ID NO: 369278 - RNA, 16 nt, Molluscum contagiosum virus
ugcacgcggcgcgugu

SEQ ID NO: 369279 - RNA, 15 nt, Molluscum contagiosum virus
ugcacguccugcgag

SEQ ID NO: 369280 - RNA, 21 nt, Molluscum contagiosum virus
ugcacgucgaagaccaccagc

SEQ ID NO: 369281 - RNA, 13 nt, Molluscum contagiosum virus
ugcacgugcugca

SEQ ID NO: 369282 - RNA, 23 nt, Molluscum contagiosum virus
ugcacuuucaacucucuaccucu

SEQ ID NO: 369283 - RNA, 15 nt, Molluscum contagiosum virus
ugcagacaaggagau

SEQ ID NO: 369284 - RNA, 14 nt, Molluscum contagiosum virus
ugcagacgcucaac

SEQ ID NO: 369285 - RNA, 20 nt, Molluscum contagiosum virus
ugcagagugaaucuugccug

SEQ ID NO: 369286 - RNA, 18 nt, Molluscum contagiosum virus
ugcagcacgucuugcgcg

SEQ ID NO: 369287 - RNA, 14 nt, Molluscum contagiosum virus
ugcagcccuuccac

SEQ ID NO: 369288 - RNA, 19 nt, Molluscum contagiosum virus
ugcagccgcugcugcugca

SEQ ID NO: 369289 - RNA, 20 nt, Molluscum contagiosum virus
ugcagccgcugcugcugcaa

SEQ ID NO: 369290 - RNA, 22 nt, Molluscum contagiosum virus
ugcagcgagcucgcguaccugu

SEQ ID NO: 369291 - RNA, 12 nt, Molluscum contagiosum virus
ugcagcgcccgg

SEQ ID NO: 369292 - RNA, 19 nt, Molluscum contagiosum virus
ugcagcggaugcagaacag

SEQ ID NO: 369293 - RNA, 17 nt, Molluscum contagiosum virus
ugcaggauuuccucgcg

SEQ ID NO: 369294 - RNA, 21 nt, Molluscum contagiosum virus
ugcaggcguaugccgucuacg

SEQ ID NO: 369295 - RNA, 22 nt, Molluscum contagiosum virus
ugcaggcucuaagcgcacgcgc

SEQ ID NO: 369296 - RNA, 18 nt, Molluscum contagiosum virus
ugcagucacgacuguguu

SEQ ID NO: 369297 - RNA, 12 nt, Molluscum contagiosum virus
ugcagugcacca

SEQ ID NO: 369298 - RNA, 13 nt, Molluscum contagiosum virus
ugcagugcaccag

SEQ ID NO: 369299 - RNA, 15 nt, Molluscum contagiosum virus
ugcagugcaccagca

SEQ ID NO: 369300 - RNA, 22 nt, Molluscum contagiosum virus
ugcaguugagagcagcggcuac

SEQ ID NO: 369301 - RNA, 15 nt, Molluscum contagiosum virus
ugcauacacuuccug

SEQ ID NO: 369302 - RNA, 21 nt, Molluscum contagiosum virus
ugcauaggacgcaucuaguca

SEQ ID NO: 369303 - RNA, 19 nt, Molluscum contagiosum virus
ugcauauccacaccgggaa

SEQ ID NO: 369304 - RNA, 19 nt, Molluscum contagiosum virus
ugcaucuuuuuuaugcacu

SEQ ID NO: 369305 - RNA, 17 nt, Molluscum contagiosum virus
ugcaugacggcgcgagc

SEQ ID NO: 369306 - RNA, 12 nt, Molluscum contagiosum virus
ugcauguucucu

SEQ ID NO: 369307 - RNA, 22 nt, Molluscum contagiosum virus
ugcauugcgucuuacugcugca

SEQ ID NO: 369308 - RNA, 15 nt, Molluscum contagiosum virus
ugccagauugccggc

SEQ ID NO: 369309 - RNA, 18 nt, Molluscum contagiosum virus
ugccaggcggucuuccag

SEQ ID NO: 369310 - RNA, 13 nt, Molluscum contagiosum virus
ugcccaaacagcg

SEQ ID NO: 369311 - RNA, 15 nt, Molluscum contagiosum virus
ugcccaaccuacgcu

SEQ ID NO: 369312 - RNA, 13 nt, Molluscum contagiosum virus
ugccccgcgcgcc

SEQ ID NO: 369313 - RNA, 15 nt, Molluscum contagiosum virus
ugccccguccucgcu

SEQ ID NO: 369314 - RNA, 13 nt, Molluscum contagiosum virus
ugcccgacgugcc

SEQ ID NO: 369315 - RNA, 20 nt, Molluscum contagiosum virus
ugcccgcacacgcaaacaaa

SEQ ID NO: 369316 - RNA, 19 nt, Molluscum contagiosum virus
ugcccgccagaagugaaau

SEQ ID NO: 369317 - RNA, 16 nt, Molluscum contagiosum virus
ugcccgcgcgcggaca

SEQ ID NO: 369318 - RNA, 16 nt, Molluscum contagiosum virus
ugcccgcgcgcuguau

SEQ ID NO: 369319 - RNA, 22 nt, Molluscum contagiosum virus
ugcccuacgcgcgcgugcugcu

SEQ ID NO: 369320 - RNA, 21 nt, Molluscum contagiosum virus
ugcccuggaccuccaucuugc

SEQ ID NO: 369321 - RNA, 14 nt, Molluscum contagiosum virus
ugccgaggcgcugc

SEQ ID NO: 369322 - RNA, 13 nt, Molluscum contagiosum virus
ugccgcaguacgu

SEQ ID NO: 369323 - RNA, 21 nt, Molluscum contagiosum virus
ugccgcaguuggucaccgccu

SEQ ID NO: 369324 - RNA, 21 nt, Molluscum contagiosum virus
ugccgccgcgcaaaagcacag

SEQ ID NO: 369325 - RNA, 13 nt, Molluscum contagiosum virus
ugccgcgcaauac

SEQ ID NO: 369326 - RNA, 15 nt, Molluscum contagiosum virus
ugccgcucacagcuu

SEQ ID NO: 369327 - RNA, 21 nt, Molluscum contagiosum virus
ugccggaguuuguagcucuag

SEQ ID NO: 369328 - RNA, 21 nt, Molluscum contagiosum virus
ugccggcaacgcugccgcugg

SEQ ID NO: 369329 - RNA, 12 nt, Molluscum contagiosum virus
ugccggcucagc

SEQ ID NO: 369330 - RNA, 19 nt, Molluscum contagiosum virus
ugccggggaugaacgcgcu

SEQ ID NO: 369331 - RNA, 14 nt, Molluscum contagiosum virus
ugccgucgcccgug

SEQ ID NO: 369332 - RNA, 16 nt, Molluscum contagiosum virus
ugccuaggaggagaac

SEQ ID NO: 369333 - RNA, 14 nt, Molluscum contagiosum virus
ugccucgugccuuu

SEQ ID NO: 369334 - RNA, 23 nt, Molluscum contagiosum virus
ugccucgugcucggcgugaucuu

SEQ ID NO: 369335 - RNA, 18 nt, Molluscum contagiosum virus
ugccucguggaacaaaga

SEQ ID NO: 369336 - RNA, 16 nt, Molluscum contagiosum virus
ugccugagaagcugua

SEQ ID NO: 369337 - RNA, 16 nt, Molluscum contagiosum virus
ugccuuggcgcccgug

SEQ ID NO: 369338 - RNA, 13 nt, Molluscum contagiosum virus
ugccuuucagggg

SEQ ID NO: 369339 - RNA, 13 nt, Molluscum contagiosum virus
ugccuuuugcaca

SEQ ID NO: 369340 - RNA, 14 nt, Molluscum contagiosum virus
ugccuuuugcacag

SEQ ID NO: 369341 - RNA, 13 nt, Molluscum contagiosum virus
ugcgacacuugcu

SEQ ID NO: 369342 - RNA, 17 nt, Molluscum contagiosum virus
ugcgaccccagugcgag

SEQ ID NO: 369343 - RNA, 14 nt, Molluscum contagiosum virus
ugcgagaacuggcg

SEQ ID NO: 369344 - RNA, 17 nt, Molluscum contagiosum virus
ugcgagaucguggacga

SEQ ID NO: 369345 - RNA, 13 nt, Molluscum contagiosum virus
ugcgcaaccugga

SEQ ID NO: 369346 - RNA, 14 nt, Molluscum contagiosum virus
ugcgcaaccuggau

SEQ ID NO: 369347 - RNA, 17 nt, Molluscum contagiosum virus
ugcgcaacgcgggccag

SEQ ID NO: 369348 - RNA, 14 nt, Molluscum contagiosum virus
ugcgcaagcucagc

SEQ ID NO: 369349 - RNA, 21 nt, Molluscum contagiosum virus
ugcgcaaggccguccccggaa

SEQ ID NO: 369350 - RNA, 18 nt, Molluscum contagiosum virus
ugcgcaauaaggcggugg

SEQ ID NO: 369351 - RNA, 14 nt, Molluscum contagiosum virus
ugcgcacacuugcg

SEQ ID NO: 369352 - RNA, 23 nt, Molluscum contagiosum virus
ugcgcacacuugcgcguccacaa

SEQ ID NO: 369353 - RNA, 13 nt, Molluscum contagiosum virus
ugcgcaccagcug

SEQ ID NO: 369354 - RNA, 16 nt, Molluscum contagiosum virus
ugcgcaccaucuucaa

SEQ ID NO: 369355 - RNA, 16 nt, Molluscum contagiosum virus
ugcgcacggaccucaa

SEQ ID NO: 369356 - RNA, 19 nt, Molluscum contagiosum virus
ugcgcauucccguggaccu

SEQ ID NO: 369357 - RNA, 14 nt, Molluscum contagiosum virus
ugcgccaacaacca

SEQ ID NO: 369358 - RNA, 15 nt, Molluscum contagiosum virus
ugcgccaacaaccac

SEQ ID NO: 369359 - RNA, 19 nt, Molluscum contagiosum virus
ugcgcccgugcgaggagca

SEQ ID NO: 369360 - RNA, 18 nt, Molluscum contagiosum virus
ugcgccgugcgucucucu

SEQ ID NO: 369361 - RNA, 15 nt, Molluscum contagiosum virus
ugcgcgaccaguaca

SEQ ID NO: 369362 - RNA, 16 nt, Molluscum contagiosum virus
ugcgcgaccaguacau

SEQ ID NO: 369363 - RNA, 20 nt, Molluscum contagiosum virus
ugcgcgacuccaucugcgcg

SEQ ID NO: 369364 - RNA, 16 nt, Molluscum contagiosum virus
ugcgcgagacgcugcu

SEQ ID NO: 369365 - RNA, 17 nt, Molluscum contagiosum virus
ugcgcgagccgcugcac

SEQ ID NO: 369366 - RNA, 14 nt, Molluscum contagiosum virus
ugcgcgaguaccug

SEQ ID NO: 369367 - RNA, 13 nt, Molluscum contagiosum virus
ugcgcgagucgcg

SEQ ID NO: 369368 - RNA, 21 nt, Molluscum contagiosum virus
ugcgcgcacggcuaggcgcgg

SEQ ID NO: 369369 - RNA, 16 nt, Molluscum contagiosum virus
ugcgcgcgcugagaua

SEQ ID NO: 369370 - RNA, 11 nt, Molluscum contagiosum virus
ugcgcgcgugc

SEQ ID NO: 369371 - RNA, 22 nt, Molluscum contagiosum virus
ugcgcggcccgcgggcugcaag

SEQ ID NO: 369372 - RNA, 14 nt, Molluscum contagiosum virus
uguccuuucagaca

SEQ ID NO: 369373 - RNA, 15 nt, Molluscum contagiosum virus
ugucgcacgagcaug

SEQ ID NO: 369374 - RNA, 19 nt, Molluscum contagiosum virus
ugucgcgcaucaccgagcg

SEQ ID NO: 369375 - RNA, 20 nt, Molluscum contagiosum virus
ugucgcuggaggauucuugu

SEQ ID NO: 369376 - RNA, 16 nt, Molluscum contagiosum virus
ugucguaacaauggac

SEQ ID NO: 369377 - RNA, 20 nt, Molluscum contagiosum virus
ugucucccgccgcgugcccg

SEQ ID NO: 369378 - RNA, 22 nt, Molluscum contagiosum virus
ugucugaaaggacaugggcaca

SEQ ID NO: 369379 - RNA, 24 nt, Molluscum contagiosum virus
ugugcauugcgucuuacugcugca

SEQ ID NO: 369380 - RNA, 13 nt, Molluscum contagiosum virus
ugugcgagccagu

SEQ ID NO: 369381 - RNA, 15 nt, Molluscum contagiosum virus
ugugcgccugugcug

SEQ ID NO: 369382 - RNA, 13 nt, Molluscum contagiosum virus
ugugcggacaugc

SEQ ID NO: 369383 - RNA, 15 nt, Molluscum contagiosum virus
ugugcgugucucucg

SEQ ID NO: 369384 - RNA, 13 nt, Molluscum contagiosum virus
ugugcuacugcac

SEQ ID NO: 369385 - RNA, 16 nt, Molluscum contagiosum virus
ugugcuccugaggaag

SEQ ID NO: 369386 - RNA, 19 nt, Molluscum contagiosum virus
ugugugcuuauaccaugga

SEQ ID NO: 369387 - RNA, 14 nt, Molluscum contagiosum virus
uguuccacaucaug

SEQ ID NO: 369388 - RNA, 24 nt, Molluscum contagiosum virus
uguuccacgaccgcaagugcacgc

SEQ ID NO: 369389 - RNA, 21 nt, Molluscum contagiosum virus
uguucucgcucgugcucucug

SEQ ID NO: 369390 - RNA, 16 nt, Molluscum contagiosum virus
uguuguucguacucaa

SEQ ID NO: 369391 - RNA, 15 nt, Molluscum contagiosum virus
uguuguugcaucuuc

SEQ ID NO: 369392 - RNA, 23 nt, Molluscum contagiosum virus
uguuuccugcggcgcugcuacaa

SEQ ID NO: 369393 - RNA, 12 nt, Molluscum contagiosum virus
uguuuccuugcc

SEQ ID NO: 369394 - RNA, 13 nt, Molluscum contagiosum virus
uguuuccuugccu

SEQ ID NO: 369395 - RNA, 23 nt, Molluscum contagiosum virus
uguuucucgcgaaucacaaacac

SEQ ID NO: 369396 - RNA, 20 nt, Molluscum contagiosum virus
uguuucuuccggcgguucuc

SEQ ID NO: 369397 - RNA, 18 nt, Molluscum contagiosum virus
uguuuucagggcucgaua

SEQ ID NO: 369398 - RNA, 12 nt, Molluscum contagiosum virus
uguuuuucggga

SEQ ID NO: 369399 - RNA, 13 nt, Molluscum contagiosum virus
uuaaucacgauga

SEQ ID NO: 369400 - RNA, 17 nt, Molluscum contagiosum virus
uuaaucacgaugaugau

SEQ ID NO: 369401 - RNA, 21 nt, Molluscum contagiosum virus
uuaccaagucgcgcucuucaa

SEQ ID NO: 369402 - RNA, 12 nt, Molluscum contagiosum virus
uuaccugagauc

SEQ ID NO: 369403 - RNA, 16 nt, Molluscum contagiosum virus
uuacgcuacagcagcc

SEQ ID NO: 369404 - RNA, 12 nt, Molluscum contagiosum virus
uuacugcaagau

SEQ ID NO: 369405 - RNA, 14 nt, Molluscum contagiosum virus
uuagcgaggugcgc

SEQ ID NO: 369406 - RNA, 21 nt, Molluscum contagiosum virus
uuagcgaggugcgcuaucgcu

SEQ ID NO: 369407 - RNA, 23 nt, Molluscum contagiosum virus
uuagcguggcgcgcgagcugcua

SEQ ID NO: 369408 - RNA, 13 nt, Molluscum contagiosum virus
uucaaaggugcuc

SEQ ID NO: 369409 - RNA, 15 nt, Molluscum contagiosum virus
uucaaauccugguuc

SEQ ID NO: 369410 - RNA, 16 nt, Molluscum contagiosum virus
uucaacuacaaggugc

SEQ ID NO: 369411 - RNA, 13 nt, Molluscum contagiosum virus
uucaaguuugaca

SEQ ID NO: 369412 - RNA, 17 nt, Molluscum contagiosum virus
uucaaugcaguauguga

SEQ ID NO: 369413 - RNA, 13 nt, Molluscum contagiosum virus
uucaccauccagc

SEQ ID NO: 369414 - RNA, 15 nt, Molluscum contagiosum virus
uucacgauccaugag

SEQ ID NO: 369415 - RNA, 20 nt, Molluscum contagiosum virus
uucacgcccgcaaugcagug

SEQ ID NO: 369416 - RNA, 12 nt, Molluscum contagiosum virus
uucacgcugcuc

SEQ ID NO: 369417 - RNA, 14 nt, Molluscum contagiosum virus
uucaucuacugcga

SEQ ID NO: 369418 - RNA, 16 nt, Molluscum contagiosum virus
uucaucuacugcgaca

SEQ ID NO: 369419 - RNA, 20 nt, Molluscum contagiosum virus
uucaucuacugcgacaucca

SEQ ID NO: 369420 - RNA, 18 nt, Molluscum contagiosum virus
uuccaagaagacuaccac

SEQ ID NO: 369421 - RNA, 20 nt, Molluscum contagiosum virus
uuccacgaccgcaagugcac

SEQ ID NO: 369422 - RNA, 14 nt, Molluscum contagiosum virus
uuccagagcacugc

SEQ ID NO: 369423 - RNA, 16 nt, Molluscum contagiosum virus
uuccagagcacugcgc

SEQ ID NO: 369424 - RNA, 18 nt, Molluscum contagiosum virus
uuccagcacugcgccaag

SEQ ID NO: 369425 - RNA, 15 nt, Molluscum contagiosum virus
uuccccguccuugcu

SEQ ID NO: 369426 - RNA, 15 nt, Molluscum contagiosum virus
uuccgagcgcgcacg

SEQ ID NO: 369427 - RNA, 18 nt, Molluscum contagiosum virus
uuccgcgugagagccauu

SEQ ID NO: 369428 - RNA, 16 nt, Molluscum contagiosum virus
uuccggagacaccagc

SEQ ID NO: 369429 - RNA, 13 nt, Molluscum contagiosum virus
uuccggcaccacg

SEQ ID NO: 369430 - RNA, 14 nt, Molluscum contagiosum virus
uuccggcaccacgu

SEQ ID NO: 369431 - RNA, 23 nt, Molluscum contagiosum virus
uuccggcaccacgugcgcuggcc

SEQ ID NO: 369432 - RNA, 21 nt, Molluscum contagiosum virus
uuccggcgcggccuggccacg

SEQ ID NO: 369433 - RNA, 20 nt, Molluscum contagiosum virus
uuccguagccguccaguaag

SEQ ID NO: 369434 - RNA, 17 nt, Molluscum contagiosum virus
uuccgugcuugacaagu

SEQ ID NO: 369435 - RNA, 17 nt, Molluscum contagiosum virus
uuccucuacaccagcug

SEQ ID NO: 369436 - RNA, 23 nt, Molluscum contagiosum virus
uuccugcgcccauuccuguugcu

SEQ ID NO: 369437 - RNA, 21 nt, Molluscum contagiosum virus
uuccugcuagaaugcgugugg

SEQ ID NO: 369438 - RNA, 21 nt, Molluscum contagiosum virus
uuccuggcucgcgagugugca

SEQ ID NO: 369439 - RNA, 15 nt, Molluscum contagiosum virus
uuccuuuuucacuuu

SEQ ID NO: 369440 - RNA, 12 nt, Molluscum contagiosum virus
uucgacgcugcc

SEQ ID NO: 369441 - RNA, 19 nt, Molluscum contagiosum virus
uucgagacgcugcgcgacg

SEQ ID NO: 369442 - RNA, 12 nt, Molluscum contagiosum virus
uucgagcugcug

SEQ ID NO: 369443 - RNA, 23 nt, Molluscum contagiosum virus
uucgccggaggaaggacaguguc

SEQ ID NO: 369444 - RNA, 19 nt, Molluscum contagiosum virus
uucgcgacgacgagcacua

SEQ ID NO: 369445 - RNA, 23 nt, Molluscum contagiosum virus
uucgcgggaccgcccuuguggac

SEQ ID NO: 369446 - RNA, 19 nt, Molluscum contagiosum virus
uucgcggguccgucuuugc

SEQ ID NO: 369447 - RNA, 23 nt, Molluscum contagiosum virus
uucgcuggugcgaaauugccaca

SEQ ID NO: 369448 - RNA, 19 nt, Molluscum contagiosum virus
uucggcucgggaacaaagg

SEQ ID NO: 369449 - RNA, 23 nt, Molluscum contagiosum virus
uucgggaaggaacaaugcugcau

SEQ ID NO: 369450 - RNA, 16 nt, Molluscum contagiosum virus
uucgucaacaugccuu

SEQ ID NO: 369451 - RNA, 22 nt, Molluscum contagiosum virus
uucguccguccgcggggcuccu

SEQ ID NO: 369452 - RNA, 21 nt, Molluscum contagiosum virus
uucguggagcccgugcuggag

SEQ ID NO: 369453 - RNA, 18 nt, Molluscum contagiosum virus
uucuacgggaagcugcac

SEQ ID NO: 369454 - RNA, 22 nt, Molluscum contagiosum virus
uucucgaaaaugaaaauaaaga

SEQ ID NO: 369455 - RNA, 17 nt, Molluscum contagiosum virus
uucucgcgaaucacaaa

SEQ ID NO: 369456 - RNA, 19 nt, Molluscum contagiosum virus
uucucgcucgugcucucug

SEQ ID NO: 369457 - RNA, 20 nt, Molluscum contagiosum virus
uucucuuuguuccugcggaa

SEQ ID NO: 369458 - RNA, 21 nt, Molluscum contagiosum virus
uucuggcguacucgugucaca

SEQ ID NO: 369459 - RNA, 18 nt, Molluscum contagiosum virus
uucuguccgucuugcgca

SEQ ID NO: 369460 - RNA, 22 nt, Molluscum contagiosum virus
uucuucuuucuggguuccgaca

SEQ ID NO: 369461 - RNA, 18 nt, Molluscum contagiosum virus
uucuugacgcgagacugu

SEQ ID NO: 369462 - RNA, 13 nt, Molluscum contagiosum virus
uucuugcacgggc

SEQ ID NO: 369463 - RNA, 12 nt, Molluscum contagiosum virus
uucuugguggag

SEQ ID NO: 369464 - RNA, 20 nt, Molluscum contagiosum virus
uucuugguugccaggcacac

SEQ ID NO: 369465 - RNA, 17 nt, Molluscum contagiosum virus
uucuuguugugcuuuga

SEQ ID NO: 369466 - RNA, 20 nt, Molluscum contagiosum virus
uugaaaaaacaugugccugc

SEQ ID NO: 369467 - RNA, 18 nt, Molluscum contagiosum virus
uugaaaugauugguucuu

SEQ ID NO: 369468 - RNA, 17 nt, Molluscum contagiosum virus
uugaacaucuaugcacg

SEQ ID NO: 369469 - RNA, 15 nt, Molluscum contagiosum virus
uugaacucgagcacg

SEQ ID NO: 369470 - RNA, 16 nt, Molluscum contagiosum virus
uugacaaguacaugca

SEQ ID NO: 369471 - RNA, 18 nt, Molluscum contagiosum virus
uugacaaguacaugcacg

SEQ ID NO: 369472 - RNA, 15 nt, Molluscum contagiosum virus
uugacaugcaccagc

SEQ ID NO: 369473 - RNA, 22 nt, Molluscum contagiosum virus
uugagagcagcggcuacuugga

SEQ ID NO: 369474 - RNA, 14 nt, Molluscum contagiosum virus
agcgccgccaugcu

SEQ ID NO: 369475 - RNA, 15 nt, Molluscum contagiosum virus
agcgccgccaugcug

SEQ ID NO: 369476 - RNA, 15 nt, Molluscum contagiosum virus
agcgccgcucgcacg

SEQ ID NO: 369477 - RNA, 19 nt, Molluscum contagiosum virus
agcgccgcucgcacggcga

SEQ ID NO: 369478 - RNA, 15 nt, Molluscum contagiosum virus
agcgccuucugcaag

SEQ ID NO: 369479 - RNA, 13 nt, Molluscum contagiosum virus
agcgcgagcuugc

SEQ ID NO: 369480 - RNA, 16 nt, Molluscum contagiosum virus
agcgcgcccaccagca

SEQ ID NO: 369481 - RNA, 19 nt, Molluscum contagiosum virus
agcgcgcccaccagcagcc

SEQ ID NO: 369482 - RNA, 18 nt, Molluscum contagiosum virus
agcgcgccccgaacaaaa

SEQ ID NO: 369483 - RNA, 12 nt, Molluscum contagiosum virus
agcgcgccgcgc

SEQ ID NO: 369484 - RNA, 18 nt, Molluscum contagiosum virus
agcgcggccgcgcucguc

SEQ ID NO: 369485 - RNA, 18 nt, Molluscum contagiosum virus
agcgcgucucugcgcaga

SEQ ID NO: 369486 - RNA, 13 nt, Molluscum contagiosum virus
agcgcgugcucuu

SEQ ID NO: 369487 - RNA, 17 nt, Molluscum contagiosum virus
agcgcguucgcgcgugc

SEQ ID NO: 369488 - RNA, 12 nt, Molluscum contagiosum virus
agcgcuaccuga

SEQ ID NO: 369489 - RNA, 13 nt, Molluscum contagiosum virus
agcgcuaccugau

SEQ ID NO: 369490 - RNA, 16 nt, Molluscum contagiosum virus
agcgcuaucucuggau

SEQ ID NO: 369491 - RNA, 11 nt, Molluscum contagiosum virus
agcgcuugcuc

SEQ ID NO: 369492 - RNA, 20 nt, Molluscum contagiosum virus
agcgcuuuguugccucagua

SEQ ID NO: 369493 - RNA, 17 nt, Molluscum contagiosum virus
agcggacguggucgcgc

SEQ ID NO: 369494 - RNA, 21 nt, Molluscum contagiosum virus
agcggagaaaaggaagcuugc

SEQ ID NO: 369495 - RNA, 23 nt, Molluscum contagiosum virus
agcggagaaaaggaagcuugcca

SEQ ID NO: 369496 - RNA, 19 nt, Molluscum contagiosum virus
agcggagcgggcacgggug

SEQ ID NO: 369497 - RNA, 15 nt, Molluscum contagiosum virus
agcggcaagccgugc

SEQ ID NO: 369498 - RNA, 18 nt, Molluscum contagiosum virus
agcggccuguucuuccag

SEQ ID NO: 369499 - RNA, 23 nt, Molluscum contagiosum virus
agcggcgccgacaacgugcugcu

SEQ ID NO: 369500 - RNA, 18 nt, Molluscum contagiosum virus
agcggcgccgcagcuuuu

SEQ ID NO: 369501 - RNA, 16 nt, Molluscum contagiosum virus
agcggcgcuugauguc

SEQ ID NO: 369502 - RNA, 14 nt, Molluscum contagiosum virus
agcggcggacagca

SEQ ID NO: 369503 - RNA, 17 nt, Molluscum contagiosum virus
agcguagcggacgaagc

SEQ ID NO: 369504 - RNA, 19 nt, Molluscum contagiosum virus
agcgucgcgcgccgugccu

SEQ ID NO: 369505 - RNA, 11 nt, Molluscum contagiosum virus
agcgugcagac

SEQ ID NO: 369506 - RNA, 14 nt, Molluscum contagiosum virus
agcgugcagacgac

SEQ ID NO: 369507 - RNA, 15 nt, Molluscum contagiosum virus
agcgugcgcaccagc

SEQ ID NO: 369508 - RNA, 19 nt, Molluscum contagiosum virus
agcguggcgcgcgagcugc

SEQ ID NO: 369509 - RNA, 21 nt, Molluscum contagiosum virus
agcguggcgcgcgagcugcua

SEQ ID NO: 369510 - RNA, 22 nt, Molluscum contagiosum virus
agcguggcgcgcgagcugcuag

SEQ ID NO: 369511 - RNA, 18 nt, Molluscum contagiosum virus
agcguugguaacaagagc

SEQ ID NO: 369512 - RNA, 16 nt, Molluscum contagiosum virus
agcuaaaagagcugcu

SEQ ID NO: 369513 - RNA, 16 nt, Molluscum contagiosum virus
agcuaaucagcgccau

SEQ ID NO: 369514 - RNA, 15 nt, Molluscum contagiosum virus
agcuacgcgcucuac

SEQ ID NO: 369515 - RNA, 14 nt, Molluscum contagiosum virus
agcuacgcuccgua

SEQ ID NO: 369516 - RNA, 20 nt, Molluscum contagiosum virus
agcuagcguucccaagcaaa

SEQ ID NO: 369517 - RNA, 22 nt, Molluscum contagiosum virus
agcuagcucuggcagcccgucg

SEQ ID NO: 369518 - RNA, 14 nt, Molluscum contagiosum virus
agcucaagcugcuc

SEQ ID NO: 369519 - RNA, 13 nt, Molluscum contagiosum virus
agcucacaucugu

SEQ ID NO: 369520 - RNA, 14 nt, Molluscum contagiosum virus
agcucacaucuguc

SEQ ID NO: 369521 - RNA, 20 nt, Molluscum contagiosum virus
agcucacgagauggcugcuc

SEQ ID NO: 369522 - RNA, 12 nt, Molluscum contagiosum virus
agcucacgcuca

SEQ ID NO: 369523 - RNA, 22 nt, Molluscum contagiosum virus
agcuccagcauagaacacagcu

SEQ ID NO: 369524 - RNA, 21 nt, Molluscum contagiosum virus
agcuccgcgacgaacucgaca

SEQ ID NO: 369525 - RNA, 20 nt, Molluscum contagiosum virus
agcuccugguaguugcagcc

SEQ ID NO: 369526 - RNA, 23 nt, Molluscum contagiosum virus
agcuccuucuucaaguaccuguc

SEQ ID NO: 369527 - RNA, 14 nt, Molluscum contagiosum virus
agcucgcaaacaca

SEQ ID NO: 369528 - RNA, 15 nt, Molluscum contagiosum virus
agcucgcaaacacaa

SEQ ID NO: 369529 - RNA, 22 nt, Molluscum contagiosum virus
agcucgccaaagcgcgccuucc

SEQ ID NO: 369530 - RNA, 23 nt, Molluscum contagiosum virus
agcucgcgcgcaagaacaaccag

SEQ ID NO: 369531 - RNA, 22 nt, Molluscum contagiosum virus
agcucgcguccacgaugcgcuc

SEQ ID NO: 369532 - RNA, 16 nt, Molluscum contagiosum virus
aggaagcaacaacagc

SEQ ID NO: 369533 - RNA, 18 nt, Molluscum contagiosum virus
aggaagcaacaacagcgu

SEQ ID NO: 369534 - RNA, 12 nt, Molluscum contagiosum virus
aggaagcaagac

SEQ ID NO: 369535 - RNA, 14 nt, Molluscum contagiosum virus
aggaaguagaucac

SEQ ID NO: 369536 - RNA, 17 nt, Molluscum contagiosum virus
aggacagcuugcugcug

SEQ ID NO: 369537 - RNA, 16 nt, Molluscum contagiosum virus
aggacaugggcacaag

SEQ ID NO: 369538 - RNA, 20 nt, Molluscum contagiosum virus
aggaccaguugcauauccac

SEQ ID NO: 369539 - RNA, 21 nt, Molluscum contagiosum virus
aggaccucgcgcgccgccgca

SEQ ID NO: 369540 - RNA, 21 nt, Molluscum contagiosum virus
aggaccugcugguggugcugg

SEQ ID NO: 369541 - RNA, 15 nt, Molluscum contagiosum virus
aggacgagcugcuaa

SEQ ID NO: 369542 - RNA, 14 nt, Molluscum contagiosum virus
aggacgcgcggagc

SEQ ID NO: 369543 - RNA, 14 nt, Molluscum contagiosum virus
aggacuaccagcuc

SEQ ID NO: 369544 - RNA, 19 nt, Molluscum contagiosum virus
aggagagagagacaugcac

SEQ ID NO: 369545 - RNA, 19 nt, Molluscum contagiosum virus
aggagaggaaccaggauuu

SEQ ID NO: 369546 - RNA, 22 nt, Molluscum contagiosum virus
aggagccguggaugaacaccau

SEQ ID NO: 369547 - RNA, 14 nt, Molluscum contagiosum virus
aggagccucugucc

SEQ ID NO: 369548 - RNA, 21 nt, Molluscum contagiosum virus
aggagccucuguccugcgugc

SEQ ID NO: 369549 - RNA, 14 nt, Molluscum contagiosum virus
aggagcuccgugcu

SEQ ID NO: 369550 - RNA, 19 nt, Molluscum contagiosum virus
aggagcuccgugcugcggc

SEQ ID NO: 369551 - RNA, 18 nt, Molluscum contagiosum virus
aggaggcggcacugcuag

SEQ ID NO: 369552 - RNA, 15 nt, Molluscum contagiosum virus
aggagggagagcugc

SEQ ID NO: 369553 - RNA, 23 nt, Molluscum contagiosum virus
aggagggcaagaacgacugcuac

SEQ ID NO: 369554 - RNA, 14 nt, Molluscum contagiosum virus
aggaguuggcgcgc

SEQ ID NO: 369555 - RNA, 14 nt, Molluscum contagiosum virus
aggauggacaaaga

SEQ ID NO: 369556 - RNA, 18 nt, Molluscum contagiosum virus
aggcaaagccugcugcgc

SEQ ID NO: 369557 - RNA, 20 nt, Molluscum contagiosum virus
aggcaaagcggggcgcgcgc

SEQ ID NO: 369558 - RNA, 17 nt, Molluscum contagiosum virus
aggcaaccgcgacgagc

SEQ ID NO: 369559 - RNA, 23 nt, Molluscum contagiosum virus
aggcacaccccuguaacaaggaa

SEQ ID NO: 369560 - RNA, 22 nt, Molluscum contagiosum virus
aggcacccaccaggaacaggga

SEQ ID NO: 369561 - RNA, 19 nt, Molluscum contagiosum virus
aggcaccccgaaaggcacc

SEQ ID NO: 369562 - RNA, 15 nt, Molluscum contagiosum virus
aggcaccccgcagga

SEQ ID NO: 369563 - RNA, 16 nt, Molluscum contagiosum virus
aggcaccccgcaggaa

SEQ ID NO: 369564 - RNA, 19 nt, Molluscum contagiosum virus
aggcacccgcaacaaggaa

SEQ ID NO: 369565 - RNA, 14 nt, Molluscum contagiosum virus
aggcaccugcagga

SEQ ID NO: 369566 - RNA, 22 nt, Molluscum contagiosum virus
aggcaccugcaggaaaggcacc

SEQ ID NO: 369567 - RNA, 20 nt, Molluscum contagiosum virus
aggcaccugcggcucgcacu

SEQ ID NO: 369568 - RNA, 21 nt, Molluscum contagiosum virus
aggcaccugcggcucgcacuu

SEQ ID NO: 369569 - RNA, 19 nt, Molluscum contagiosum virus
aggcagcggaacucgaaga

SEQ ID NO: 369570 - RNA, 23 nt, Molluscum contagiosum virus
aggcauaccagauguucucgcca

SEQ ID NO: 369571 - RNA, 16 nt, Molluscum contagiosum virus
aggcaugauucaaaac

SEQ ID NO: 369572 - RNA, 17 nt, Molluscum contagiosum virus
aggcaugcgcgcagugc

SEQ ID NO: 369573 - RNA, 19 nt, Molluscum contagiosum virus
aggccaaggucuucaggaa

SEQ ID NO: 369574 - RNA, 15 nt, Molluscum contagiosum virus
aggccagcacaagcc

SEQ ID NO: 369575 - RNA, 21 nt, Molluscum contagiosum virus
aggcccgucuccacaaagacg

SEQ ID NO: 369576 - RNA, 14 nt, Molluscum contagiosum virus
aggccgagaugagc

SEQ ID NO: 369577 - RNA, 16 nt, Molluscum contagiosum virus
aggccgcccacgcuca

SEQ ID NO: 369578 - RNA, 18 nt, Molluscum contagiosum virus
aggccgcgugaacaauac

SEQ ID NO: 369579 - RNA, 22 nt, Molluscum contagiosum virus
aggccggagacguacccaugau

SEQ ID NO: 369580 - RNA, 15 nt, Molluscum contagiosum virus
aggccgguccugacu

SEQ ID NO: 369581 - RNA, 23 nt, Molluscum contagiosum virus
aggccguccccggaaagcagcaa

SEQ ID NO: 369582 - RNA, 12 nt, Molluscum contagiosum virus
aggccgugcuca

SEQ ID NO: 369583 - RNA, 17 nt, Molluscum contagiosum virus
aggccuucgcgcccgac

SEQ ID NO: 369584 - RNA, 12 nt, Molluscum contagiosum virus
aggcgagucaau

SEQ ID NO: 369585 - RNA, 23 nt, Molluscum contagiosum virus
aggcgcaccuugacgccgcgcgc

SEQ ID NO: 369586 - RNA, 14 nt, Molluscum contagiosum virus
aggcgcgacugcac

SEQ ID NO: 369587 - RNA, 14 nt, Molluscum contagiosum virus
aggcgcgcaagugc

SEQ ID NO: 369588 - RNA, 24 nt, Molluscum contagiosum virus
aggcgcgccauggcgagcuagugc

SEQ ID NO: 369589 - RNA, 19 nt, Molluscum contagiosum virus
aggcgcuugggcacugcua

SEQ ID NO: 369590 - RNA, 18 nt, Molluscum contagiosum virus
aggcggcuccuacaucga

SEQ ID NO: 369591 - RNA, 14 nt, Molluscum contagiosum virus
aggcggucuuccag

SEQ ID NO: 369592 - RNA, 22 nt, Molluscum contagiosum virus
aggcggucuuccagcacugcgc

SEQ ID NO: 369593 - RNA, 13 nt, Molluscum contagiosum virus
aggcuagugccau

SEQ ID NO: 369594 - RNA, 16 nt, Molluscum contagiosum virus
agggagcggcauggaa

SEQ ID NO: 369595 - RNA, 13 nt, Molluscum contagiosum virus
agggcgaggccaa

SEQ ID NO: 369596 - RNA, 16 nt, Molluscum contagiosum virus
agggcgcaacuccaag

SEQ ID NO: 369597 - RNA, 16 nt, Molluscum contagiosum virus
agggcgccgugcugcg

SEQ ID NO: 369598 - RNA, 12 nt, Molluscum contagiosum virus
agggcgcucgau

SEQ ID NO: 369599 - RNA, 15 nt, Molluscum contagiosum virus
agggcgugcuugccu

SEQ ID NO: 369600 - RNA, 16 nt, Molluscum contagiosum virus
agggcgugcuugccug

SEQ ID NO: 369601 - RNA, 15 nt, Molluscum contagiosum virus
agggcuaguuccgau

SEQ ID NO: 369602 - RNA, 20 nt, Molluscum contagiosum virus
agggcuuccccccacggcag

SEQ ID NO: 369603 - RNA, 22 nt, Molluscum contagiosum virus
aggggagccagccucucucgga

SEQ ID NO: 369604 - RNA, 16 nt, Molluscum contagiosum virus
aggggcaagcucgcgc

SEQ ID NO: 369605 - RNA, 19 nt, Molluscum contagiosum virus
aggggugauggcggugagc

SEQ ID NO: 369606 - RNA, 16 nt, Molluscum contagiosum virus
agggguguuuccuugc

SEQ ID NO: 369607 - RNA, 15 nt, Molluscum contagiosum virus
agggucacgcgcaca

SEQ ID NO: 369608 - RNA, 22 nt, Molluscum contagiosum virus
agggugguuugacgcccggugc

SEQ ID NO: 369609 - RNA, 20 nt, Molluscum contagiosum virus
aggguuccgcgccugcccau

SEQ ID NO: 369610 - RNA, 21 nt, Molluscum contagiosum virus
agguacugucacguucaagac

SEQ ID NO: 369611 - RNA, 17 nt, Molluscum contagiosum virus
agguaggccaugaucau

SEQ ID NO: 369612 - RNA, 14 nt, Molluscum contagiosum virus
agguagugguccac

SEQ ID NO: 369613 - RNA, 16 nt, Molluscum contagiosum virus
aggucacgacgagcga

SEQ ID NO: 369614 - RNA, 17 nt, Molluscum contagiosum virus
aggucagguucuugugg

SEQ ID NO: 369615 - RNA, 18 nt, Molluscum contagiosum virus
aggucgagcgcgccgcgc

SEQ ID NO: 369616 - RNA, 17 nt, Molluscum contagiosum virus
aggucucgagcuccagg

SEQ ID NO: 369617 - RNA, 18 nt, Molluscum contagiosum virus
aggucugcuuugucugca

SEQ ID NO: 369618 - RNA, 18 nt, Molluscum contagiosum virus
agguggccaacggcgcca

SEQ ID NO: 369619 - RNA, 22 nt, Molluscum contagiosum virus
aggugggaaugcccgcaaugca

SEQ ID NO: 369620 - RNA, 14 nt, Molluscum contagiosum virus
aggugugccuguuu

SEQ ID NO: 369621 - RNA, 18 nt, Molluscum contagiosum virus
agguucguccgcucgugc

SEQ ID NO: 369622 - RNA, 13 nt, Molluscum contagiosum virus
aguacaacccaaa

SEQ ID NO: 369623 - RNA, 19 nt, Molluscum contagiosum virus
aguacaacccaaacauguc

SEQ ID NO: 369624 - RNA, 17 nt, Molluscum contagiosum virus
aguacccgagcugugcc

SEQ ID NO: 369625 - RNA, 18 nt, Molluscum contagiosum virus
aguacccgagcugugcca

SEQ ID NO: 369626 - RNA, 18 nt, Molluscum contagiosum virus
aguaccggcucaagaaca

SEQ ID NO: 369627 - RNA, 15 nt, Molluscum contagiosum virus
aguacgagagcgcau

SEQ ID NO: 369628 - RNA, 22 nt, Molluscum contagiosum virus
aguacgagcgcguaagaccaug

SEQ ID NO: 369629 - RNA, 19 nt, Molluscum contagiosum virus
aguacgccaucguggugga

SEQ ID NO: 369630 - RNA, 18 nt, Molluscum contagiosum virus
aguacuacuacacugucg

SEQ ID NO: 369631 - RNA, 19 nt, Molluscum contagiosum virus
aguacuucgcgaugugcac

SEQ ID NO: 369632 - RNA, 21 nt, Molluscum contagiosum virus
aguaguagcgcucgcccagcu

SEQ ID NO: 369633 - RNA, 13 nt, Molluscum contagiosum virus
aguauccgugacg

SEQ ID NO: 369634 - RNA, 20 nt, Molluscum contagiosum virus
aucgagccgcgcuucgagca

SEQ ID NO: 369635 - RNA, 23 nt, Molluscum contagiosum virus
aucgagcugcagagcgugcuggu

SEQ ID NO: 369636 - RNA, 16 nt, Molluscum contagiosum virus
aucgagcugguggccu

SEQ ID NO: 369637 - RNA, 17 nt, Molluscum contagiosum virus
aucgccagcaucaaggg

SEQ ID NO: 369638 - RNA, 16 nt, Molluscum contagiosum virus
aucgccuuugugacaa

SEQ ID NO: 369639 - RNA, 13 nt, Molluscum contagiosum virus
aucgcgcaggcgc

SEQ ID NO: 369640 - RNA, 16 nt, Molluscum contagiosum virus
aucgcgcgcaccugca

SEQ ID NO: 369641 - RNA, 16 nt, Molluscum contagiosum virus
aucgcgcugcuggugc

SEQ ID NO: 369642 - RNA, 18 nt, Molluscum contagiosum virus
aucgcggagcugcgcgcg

SEQ ID NO: 369643 - RNA, 22 nt, Molluscum contagiosum virus
aucgcuuugccaaagcucucuu

SEQ ID NO: 369644 - RNA, 17 nt, Molluscum contagiosum virus
aucggagaagugcuccg

SEQ ID NO: 369645 - RNA, 18 nt, Molluscum contagiosum virus
aucggagcgcagcugccg

SEQ ID NO: 369646 - RNA, 16 nt, Molluscum contagiosum virus
aucggcacugcucacg

SEQ ID NO: 369647 - RNA, 13 nt, Molluscum contagiosum virus
aucggugggcucg

SEQ ID NO: 369648 - RNA, 21 nt, Molluscum contagiosum virus
aucgucgcguugcuacucuac

SEQ ID NO: 369649 - RNA, 17 nt, Molluscum contagiosum virus
aucgugggcaucgaccc

SEQ ID NO: 369650 - RNA, 12 nt, Molluscum contagiosum virus
aucuacuuccug

SEQ ID NO: 369651 - RNA, 19 nt, Molluscum contagiosum virus
aucuagccuccuugucuuc

SEQ ID NO: 369652 - RNA, 22 nt, Molluscum contagiosum virus
aucuagucagcggcggucucaa

SEQ ID NO: 369653 - RNA, 23 nt, Molluscum contagiosum virus
aucuaucacgcgucgacuaucag

SEQ ID NO: 369654 - RNA, 23 nt, Molluscum contagiosum virus
aucucaccucgcaugaugaacuu

SEQ ID NO: 369655 - RNA, 20 nt, Molluscum contagiosum virus
aucucgcacacugcagcacg

SEQ ID NO: 369656 - RNA, 17 nt, Molluscum contagiosum virus
aucucgcagacgcagcg

SEQ ID NO: 369657 - RNA, 12 nt, Molluscum contagiosum virus
aucucugcgccg

SEQ ID NO: 369658 - RNA, 18 nt, Molluscum contagiosum virus
aucugccucguggaacaa

SEQ ID NO: 369659 - RNA, 19 nt, Molluscum contagiosum virus
aucugccucguggaacaaa

SEQ ID NO: 369660 - RNA, 19 nt, Molluscum contagiosum virus
aucuggaggcaaucugucc

SEQ ID NO: 369661 - RNA, 20 nt, Molluscum contagiosum virus
aucuggaggcaaucugucca

SEQ ID NO: 369662 - RNA, 20 nt, Molluscum contagiosum virus
aucuguucgagcaacagggg

SEQ ID NO: 369663 - RNA, 17 nt, Molluscum contagiosum virus
aucuuccgcgacgagcu

SEQ ID NO: 369664 - RNA, 19 nt, Molluscum contagiosum virus
aucuuccgcgacgagcuca

SEQ ID NO: 369665 - RNA, 21 nt, Molluscum contagiosum virus
aucuucuucgggaaggaacaa

SEQ ID NO: 369666 - RNA, 23 nt, Molluscum contagiosum virus
aucuucuuguuguugugacacga

SEQ ID NO: 369667 - RNA, 18 nt, Molluscum contagiosum virus
aucuuuuuuaugcacuuu

SEQ ID NO: 369668 - RNA, 21 nt, Molluscum contagiosum virus
aucuuuuuuaugcacuuucaa

SEQ ID NO: 369669 - RNA, 12 nt, Molluscum contagiosum virus
augaacaccauc

SEQ ID NO: 369670 - RNA, 23 nt, Molluscum contagiosum virus
augaacgcgcugcgccacugcca

SEQ ID NO: 369671 - RNA, 17 nt, Molluscum contagiosum virus
augaacucgcugcugcu

SEQ ID NO: 369672 - RNA, 18 nt, Molluscum contagiosum virus
augaacucgcugcugcuc

SEQ ID NO: 369673 - RNA, 23 nt, Molluscum contagiosum virus
augaacucgcugcugcucuucca

SEQ ID NO: 369674 - RNA, 21 nt, Molluscum contagiosum virus
augacacgcgugucugcgcuc

SEQ ID NO: 369675 - RNA, 16 nt, Molluscum contagiosum virus
augaccaaggagggag

SEQ ID NO: 369676 - RNA, 19 nt, Molluscum contagiosum virus
augacgcgcacgccagccu

SEQ ID NO: 369677 - RNA, 17 nt, Molluscum contagiosum virus
augagccagucucgcgc

SEQ ID NO: 369678 - RNA, 16 nt, Molluscum contagiosum virus
augagcggcacgggaa

SEQ ID NO: 369679 - RNA, 18 nt, Molluscum contagiosum virus
augaggagaggaaccagg

SEQ ID NO: 369680 - RNA, 19 nt, Molluscum contagiosum virus
augaggaggccaacgccag

SEQ ID NO: 369681 - RNA, 12 nt, Molluscum contagiosum virus
augaggcugcuc

SEQ ID NO: 369682 - RNA, 18 nt, Molluscum contagiosum virus
augaguaccgcgggcgca

SEQ ID NO: 369683 - RNA, 20 nt, Molluscum contagiosum virus
augaguaccuguaugaucug

SEQ ID NO: 369684 - RNA, 19 nt, Molluscum contagiosum virus
augauguaguccagguggu

SEQ ID NO: 369685 - RNA, 15 nt, Molluscum contagiosum virus
augauugucaagcac

SEQ ID NO: 369686 - RNA, 18 nt, Molluscum contagiosum virus
augauuugauggcugcuc

SEQ ID NO: 369687 - RNA, 20 nt, Molluscum contagiosum virus
augauuugauggcugcucau

SEQ ID NO: 369688 - RNA, 19 nt, Molluscum contagiosum virus
augcaacgcaggacacugu

SEQ ID NO: 369689 - RNA, 13 nt, Molluscum contagiosum virus
augcacacacucg

SEQ ID NO: 369690 - RNA, 18 nt, Molluscum contagiosum virus
augcacacgcaccgccug

SEQ ID NO: 369691 - RNA, 22 nt, Molluscum contagiosum virus
augcacuucucgagaccucgcg

SEQ ID NO: 369692 - RNA, 12 nt, Molluscum contagiosum virus
augcacuuucaa

SEQ ID NO: 369693 - RNA, 21 nt, Molluscum contagiosum virus
augcagcugcaggaccugcug

SEQ ID NO: 369694 - RNA, 15 nt, Molluscum contagiosum virus
augcaguaugugaac

SEQ ID NO: 369695 - RNA, 21 nt, Molluscum contagiosum virus
augcaguaugugaacacgaca

SEQ ID NO: 369696 - RNA, 22 nt, Molluscum contagiosum virus
augcagucacgacuguguuccc

SEQ ID NO: 369697 - RNA, 16 nt, Molluscum contagiosum virus
augcagugcaccagca

SEQ ID NO: 369698 - RNA, 18 nt, Molluscum contagiosum virus
augcauucguaacgugau

SEQ ID NO: 369699 - RNA, 22 nt, Molluscum contagiosum virus
augccagacccgaaagcugccc

SEQ ID NO: 369700 - RNA, 17 nt, Molluscum contagiosum virus
augccgcgugcucugcu

SEQ ID NO: 369701 - RNA, 21 nt, Molluscum contagiosum virus
augccggggaugaacgcgcug

SEQ ID NO: 369702 - RNA, 12 nt, Molluscum contagiosum virus
augccuucagga

SEQ ID NO: 369703 - RNA, 20 nt, Molluscum contagiosum virus
augccuuuccgagcucgcaa

SEQ ID NO: 369704 - RNA, 14 nt, Molluscum contagiosum virus
augcgcacacuugc

SEQ ID NO: 369705 - RNA, 15 nt, Molluscum contagiosum virus
augcgccugcacuuc

SEQ ID NO: 369706 - RNA, 18 nt, Molluscum contagiosum virus
augcgguccgacucggug

SEQ ID NO: 369707 - RNA, 18 nt, Molluscum contagiosum virus
augcgguguguguucuca

SEQ ID NO: 369708 - RNA, 12 nt, Molluscum contagiosum virus
augcgucuuccu

SEQ ID NO: 369709 - RNA, 18 nt, Molluscum contagiosum virus
augcugcaucuagccucc

SEQ ID NO: 369710 - RNA, 22 nt, Molluscum contagiosum virus
augcugccguguacgucuuucc

SEQ ID NO: 369711 - RNA, 18 nt, Molluscum contagiosum virus
augcugcucgacgggcgc

SEQ ID NO: 369712 - RNA, 19 nt, Molluscum contagiosum virus
augcugcucgacgggcgca

SEQ ID NO: 369713 - RNA, 17 nt, Molluscum contagiosum virus
augcuucgcgcaaacaa

SEQ ID NO: 369714 - RNA, 18 nt, Molluscum contagiosum virus
auggacaaagaugcagcc

SEQ ID NO: 369715 - RNA, 16 nt, Molluscum contagiosum virus
auggacacagcaaaag

SEQ ID NO: 369716 - RNA, 16 nt, Molluscum contagiosum virus
auggacacgcacuggc

SEQ ID NO: 369717 - RNA, 15 nt, Molluscum contagiosum virus
auggacacgcugcgc

SEQ ID NO: 369718 - RNA, 15 nt, Molluscum contagiosum virus
auggacgcgccgcgc

SEQ ID NO: 369719 - RNA, 17 nt, Molluscum contagiosum virus
auggagcaggagaacua

SEQ ID NO: 369720 - RNA, 18 nt, Molluscum contagiosum virus
auggagcgcccgcugcuc

SEQ ID NO: 369721 - RNA, 18 nt, Molluscum contagiosum virus
auggaggcgcuagugcag

SEQ ID NO: 369722 - RNA, 23 nt, Molluscum contagiosum virus
auggccgcgagacauaguaccau

SEQ ID NO: 369723 - RNA, 15 nt, Molluscum contagiosum virus
auggccgcgccgcgc

SEQ ID NO: 369724 - RNA, 20 nt, Molluscum contagiosum virus
auggcgauagcgauggcugu

SEQ ID NO: 369725 - RNA, 14 nt, Molluscum contagiosum virus
auggcgcgcgagca

SEQ ID NO: 369726 - RNA, 17 nt, Molluscum contagiosum virus
auggcgcgcgagcacag

SEQ ID NO: 369727 - RNA, 22 nt, Molluscum contagiosum virus
auggcguccucgcuccgcagca

SEQ ID NO: 369728 - RNA, 15 nt, Molluscum contagiosum virus
augggagggggacaa

SEQ ID NO: 369729 - RNA, 17 nt, Molluscum contagiosum virus
augggcaaggacaucua

SEQ ID NO: 369730 - RNA, 14 nt, Molluscum contagiosum virus
auggggauguggac

SEQ ID NO: 369731 - RNA, 20 nt, Molluscum contagiosum virus
augggguuucggaacgcuau

SEQ ID NO: 369732 - RNA, 21 nt, Molluscum contagiosum virus
auggucaaccucuacacgcac

SEQ ID NO: 369733 - RNA, 20 nt, Molluscum contagiosum virus
augguguacgaaaguacuuu

SEQ ID NO: 369734 - RNA, 23 nt, Molluscum contagiosum virus
auguacgcggugugcacaugccc

SEQ ID NO: 369735 - RNA, 11 nt, Molluscum contagiosum virus
auguacuccac

SEQ ID NO: 369736 - RNA, 15 nt, Molluscum contagiosum virus
ccugguggagcacuu

SEQ ID NO: 369737 - RNA, 14 nt, Molluscum contagiosum virus
ccuguaacaaggaa

SEQ ID NO: 369738 - RNA, 19 nt, Molluscum contagiosum virus
ccuguccgcggacgcgggc

SEQ ID NO: 369739 - RNA, 18 nt, Molluscum contagiosum virus
ccugucgcgcgagcgcua

SEQ ID NO: 369740 - RNA, 16 nt, Molluscum contagiosum virus
ccugucucgcaagcaa

SEQ ID NO: 369741 - RNA, 21 nt, Molluscum contagiosum virus
ccugugcgccaacaaccacuc

SEQ ID NO: 369742 - RNA, 18 nt, Molluscum contagiosum virus
ccugugcgcgguggugcu

SEQ ID NO: 369743 - RNA, 21 nt, Molluscum contagiosum virus
ccugugcuacgcgagcacugc

SEQ ID NO: 369744 - RNA, 13 nt, Molluscum contagiosum virus
ccuguucuuccag

SEQ ID NO: 369745 - RNA, 18 nt, Molluscum contagiosum virus
ccuguucuuucagcgcgc

SEQ ID NO: 369746 - RNA, 12 nt, Molluscum contagiosum virus
ccuguugcgcga

SEQ ID NO: 369747 - RNA, 14 nt, Molluscum contagiosum virus
ccuuccggagacac

SEQ ID NO: 369748 - RNA, 22 nt, Molluscum contagiosum virus
ccuugauaaaagcacaguccaa

SEQ ID NO: 369749 - RNA, 14 nt, Molluscum contagiosum virus
ccuugcagcgcagc

SEQ ID NO: 369750 - RNA, 17 nt, Molluscum contagiosum virus
ccuugccuucucgaaaa

SEQ ID NO: 369751 - RNA, 21 nt, Molluscum contagiosum virus
ccuuucuugcggcacccucag

SEQ ID NO: 369752 - RNA, 22 nt, Molluscum contagiosum virus
ccuuuguucuuagcagcgccgc

SEQ ID NO: 369753 - RNA, 12 nt, Molluscum contagiosum virus
ccuuuugcacag

SEQ ID NO: 369754 - RNA, 16 nt, Molluscum contagiosum virus
cgaaacuggacugagc

SEQ ID NO: 369755 - RNA, 20 nt, Molluscum contagiosum virus
cgaaagcugcccugcgauac

SEQ ID NO: 369756 - RNA, 10 nt, Molluscum contagiosum virus
cgaaaggcac

SEQ ID NO: 369757 - RNA, 21 nt, Molluscum contagiosum virus
cgaaaggcacccgcaggaaag

SEQ ID NO: 369758 - RNA, 15 nt, Molluscum contagiosum virus
cgaaaucgcaaagca

SEQ ID NO: 369759 - RNA, 23 nt, Molluscum contagiosum virus
cgaacaccuccugcuuugcacgc

SEQ ID NO: 369760 - RNA, 12 nt, Molluscum contagiosum virus
cgaacagagcgc

SEQ ID NO: 369761 - RNA, 18 nt, Molluscum contagiosum virus
cgaacgagaaaugcgcac

SEQ ID NO: 369762 - RNA, 18 nt, Molluscum contagiosum virus
cgaacgagggaugcacac

SEQ ID NO: 369763 - RNA, 18 nt, Molluscum contagiosum virus
cgaacucgugcgccgcgc

SEQ ID NO: 369764 - RNA, 18 nt, Molluscum contagiosum virus
cgaacugcucgaccaaau

SEQ ID NO: 369765 - RNA, 12 nt, Molluscum contagiosum virus
cgaacugcuggg

SEQ ID NO: 369766 - RNA, 19 nt, Molluscum contagiosum virus
cgaagacgcguaccagcgc

SEQ ID NO: 369767 - RNA, 16 nt, Molluscum contagiosum virus
cgaagagggucgugca

SEQ ID NO: 369768 - RNA, 17 nt, Molluscum contagiosum virus
cgaagagggucgugcag

SEQ ID NO: 369769 - RNA, 13 nt, Molluscum contagiosum virus
cgaagaggucucu

SEQ ID NO: 369770 - RNA, 19 nt, Molluscum contagiosum virus
cgaagaguuggacagccau

SEQ ID NO: 369771 - RNA, 18 nt, Molluscum contagiosum virus
cgaaggcucgagcugcau

SEQ ID NO: 369772 - RNA, 13 nt, Molluscum contagiosum virus
cgaagggcuuuuu

SEQ ID NO: 369773 - RNA, 22 nt, Molluscum contagiosum virus
cgaaguacuucgcgaugugcac

SEQ ID NO: 369774 - RNA, 18 nt, Molluscum contagiosum virus
cgaauccuuuacugcaag

SEQ ID NO: 369775 - RNA, 12 nt, Molluscum contagiosum virus
cgacaacaugcu

SEQ ID NO: 369776 - RNA, 16 nt, Molluscum contagiosum virus
cgacaacgugcugcuc

SEQ ID NO: 369777 - RNA, 18 nt, Molluscum contagiosum virus
cgacaagcguaagccacc

SEQ ID NO: 369778 - RNA, 17 nt, Molluscum contagiosum virus
cgacaaggaaaggcacc

SEQ ID NO: 369779 - RNA, 17 nt, Molluscum contagiosum virus
cgacagcauccuggagu

SEQ ID NO: 369780 - RNA, 12 nt, Molluscum contagiosum virus
cgacagcucuuc

SEQ ID NO: 369781 - RNA, 16 nt, Molluscum contagiosum virus
cgacaggucagguucu

SEQ ID NO: 369782 - RNA, 16 nt, Molluscum contagiosum virus
cgacagucuagugcgu

SEQ ID NO: 369783 - RNA, 22 nt, Molluscum contagiosum virus
cgacccgcucgugaagcuguca

SEQ ID NO: 369784 - RNA, 14 nt, Molluscum contagiosum virus
cgaccgacccaucg

SEQ ID NO: 369785 - RNA, 18 nt, Molluscum contagiosum virus
cgaccugcacgacccucu

SEQ ID NO: 369786 - RNA, 18 nt, Molluscum contagiosum virus
cgacgaggccuacagcgc

SEQ ID NO: 369787 - RNA, 21 nt, Molluscum contagiosum virus
cgacgauuacaucgaaaccau

SEQ ID NO: 369788 - RNA, 19 nt, Molluscum contagiosum virus
cgacgcguucuagcagcgu

SEQ ID NO: 369789 - RNA, 19 nt, Molluscum contagiosum virus
cgacggagauggacacagc

SEQ ID NO: 369790 - RNA, 24 nt, Molluscum contagiosum virus
cgacggagauggacacagcaaaag

SEQ ID NO: 369791 - RNA, 23 nt, Molluscum contagiosum virus
cgacggcgccucgagcgcgcugg

SEQ ID NO: 369792 - RNA, 19 nt, Molluscum contagiosum virus
cgacgguaaacucuugcac

SEQ ID NO: 369793 - RNA, 20 nt, Molluscum contagiosum virus
cgacggucacgcaagcuuug

SEQ ID NO: 369794 - RNA, 17 nt, Molluscum contagiosum virus
cgacgugaucgcgcagg

SEQ ID NO: 369795 - RNA, 22 nt, Molluscum contagiosum virus
cgacgugcugcgcaaccucacu

SEQ ID NO: 369796 - RNA, 17 nt, Molluscum contagiosum virus
cgacuccuuccggagac

SEQ ID NO: 369797 - RNA, 23 nt, Molluscum contagiosum virus
cgacuccuuccggagacaccagc

SEQ ID NO: 369798 - RNA, 13 nt, Molluscum contagiosum virus
cgacuucucgcgc

SEQ ID NO: 369799 - RNA, 13 nt, Molluscum contagiosum virus
cgacuugcugcgg

SEQ ID NO: 369800 - RNA, 13 nt, Molluscum contagiosum virus
cgagaacuggcgc

SEQ ID NO: 369801 - RNA, 15 nt, Molluscum contagiosum virus
cgagaagacggggcg

SEQ ID NO: 369802 - RNA, 20 nt, Molluscum contagiosum virus
cgagaagagggucgugcagg

SEQ ID NO: 369803 - RNA, 17 nt, Molluscum contagiosum virus
cgagaccagccgcgagc

SEQ ID NO: 369804 - RNA, 15 nt, Molluscum contagiosum virus
cgagacgcugcgcga

SEQ ID NO: 369805 - RNA, 12 nt, Molluscum contagiosum virus
cgagacgcugcu

SEQ ID NO: 369806 - RNA, 21 nt, Molluscum contagiosum virus
cgagacggaaauguuguuuga

SEQ ID NO: 369807 - RNA, 23 nt, Molluscum contagiosum virus
cgagacuauaugcgaagcgucga

SEQ ID NO: 369808 - RNA, 12 nt, Molluscum contagiosum virus
cgagacugagug

SEQ ID NO: 369809 - RNA, 19 nt, Molluscum contagiosum virus
cgagacugagugcugagcc

SEQ ID NO: 369810 - RNA, 19 nt, Molluscum contagiosum virus
cgagagacacgcacacucg

SEQ ID NO: 369811 - RNA, 13 nt, Molluscum contagiosum virus
cgagagcgcgcgc

SEQ ID NO: 369812 - RNA, 22 nt, Molluscum contagiosum virus
cgagaugcgguccgacucggug

SEQ ID NO: 369813 - RNA, 15 nt, Molluscum contagiosum virus
cgagauucguggcga

SEQ ID NO: 369814 - RNA, 17 nt, Molluscum contagiosum virus
cgagcacgccugcacgc

SEQ ID NO: 369815 - RNA, 14 nt, Molluscum contagiosum virus
cgagcacgggcgcc

SEQ ID NO: 369816 - RNA, 19 nt, Molluscum contagiosum virus
cgagcacguggacagcauc

SEQ ID NO: 369817 - RNA, 16 nt, Molluscum contagiosum virus
cgagcacugccugccg

SEQ ID NO: 369818 - RNA, 22 nt, Molluscum contagiosum virus
cgagcaguccgccucgagcacg

SEQ ID NO: 369819 - RNA, 16 nt, Molluscum contagiosum virus
cgagcaguucgcgcgc

SEQ ID NO: 369820 - RNA, 14 nt, Molluscum contagiosum virus
cgagcaucugcgcg

SEQ ID NO: 369821 - RNA, 23 nt, Molluscum contagiosum virus
cgagccaaggaugccugccagca

SEQ ID NO: 369822 - RNA, 14 nt, Molluscum contagiosum virus
cgagcccgcggcgc

SEQ ID NO: 369823 - RNA, 21 nt, Molluscum contagiosum virus
cgagcccuucuuuccggcgcg

SEQ ID NO: 369824 - RNA, 17 nt, Molluscum contagiosum virus
cgagccgcgcgagcgcg

SEQ ID NO: 369825 - RNA, 19 nt, Molluscum contagiosum virus
cgagcgacuacaccuggcg

SEQ ID NO: 369826 - RNA, 13 nt, Molluscum contagiosum virus
cgagcgagcacgc

SEQ ID NO: 369827 - RNA, 16 nt, Molluscum contagiosum virus
cgagcgcaaaugcauu

SEQ ID NO: 369828 - RNA, 17 nt, Molluscum contagiosum virus
cgagcgccgcgugcgcg

SEQ ID NO: 369829 - RNA, 21 nt, Molluscum contagiosum virus
cgagcgcgagauucuggcgcg

SEQ ID NO: 369830 - RNA, 15 nt, Molluscum contagiosum virus
cgagcgcgggcaaug

SEQ ID NO: 369831 - RNA, 19 nt, Molluscum contagiosum virus
cgagcgcuacaugcacgua

SEQ ID NO: 369832 - RNA, 13 nt, Molluscum contagiosum virus
cgagcgcucugca

SEQ ID NO: 369833 - RNA, 23 nt, Molluscum contagiosum virus
cgagcgcugccgcuucgugcgcg

SEQ ID NO: 369834 - RNA, 20 nt, Molluscum contagiosum virus
cgagcgcugccugugcuacg

SEQ ID NO: 369835 - RNA, 15 nt, Molluscum contagiosum virus
cgagcgcuucuuccg

SEQ ID NO: 369836 - RNA, 14 nt, Molluscum contagiosum virus
cgagcggcgcgcgc

SEQ ID NO: 369837 - RNA, 15 nt, Molluscum contagiosum virus
cgagcgggcaauggg

SEQ ID NO: 369838 - RNA, 15 nt, Molluscum contagiosum virus
cgagcguugucuuga

SEQ ID NO: 369839 - RNA, 22 nt, Molluscum contagiosum virus
cgagcucuuccccgcgggccgc

SEQ ID NO: 369840 - RNA, 23 nt, Molluscum contagiosum virus
cacacgcgcgcgugcugcuggag

SEQ ID NO: 369841 - RNA, 13 nt, Molluscum contagiosum virus
cacacgucuugca

SEQ ID NO: 369842 - RNA, 20 nt, Molluscum contagiosum virus
cacacgugcacguccugcga

SEQ ID NO: 369843 - RNA, 16 nt, Molluscum contagiosum virus
cacacucgacuugcua

SEQ ID NO: 369844 - RNA, 18 nt, Molluscum contagiosum virus
cacagccguggaguccau

SEQ ID NO: 369845 - RNA, 22 nt, Molluscum contagiosum virus
cacagguagugguccaccagcu

SEQ ID NO: 369846 - RNA, 15 nt, Molluscum contagiosum virus
cacagugcuggacac

SEQ ID NO: 369847 - RNA, 13 nt, Molluscum contagiosum virus
cacauccgcuacc

SEQ ID NO: 369848 - RNA, 15 nt, Molluscum contagiosum virus
cacauccgcuaccug

SEQ ID NO: 369849 - RNA, 16 nt, Molluscum contagiosum virus
cacauccgcuaccugg

SEQ ID NO: 369850 - RNA, 17 nt, Molluscum contagiosum virus
cacaugcagcugcagga

SEQ ID NO: 369851 - RNA, 14 nt, Molluscum contagiosum virus
cacaugugcgugca

SEQ ID NO: 369852 - RNA, 13 nt, Molluscum contagiosum virus
cacaugugcugcc

SEQ ID NO: 369853 - RNA, 13 nt, Molluscum contagiosum virus
cacauguguuugu

SEQ ID NO: 369854 - RNA, 15 nt, Molluscum contagiosum virus
cacauugcugcugca

SEQ ID NO: 369855 - RNA, 15 nt, Molluscum contagiosum virus
caccacaacugaaaa

SEQ ID NO: 369856 - RNA, 18 nt, Molluscum contagiosum virus
caccacggccgacggcac

SEQ ID NO: 369857 - RNA, 19 nt, Molluscum contagiosum virus
caccacggugguuuacauc

SEQ ID NO: 369858 - RNA, 18 nt, Molluscum contagiosum virus
caccacgugcuccgugug

SEQ ID NO: 369859 - RNA, 20 nt, Molluscum contagiosum virus
caccagacaaagucgacgac

SEQ ID NO: 369860 - RNA, 21 nt, Molluscum contagiosum virus
caccagcuacgagccgcugcu

SEQ ID NO: 369861 - RNA, 20 nt, Molluscum contagiosum virus
caccagcuccgccgggaaua

SEQ ID NO: 369862 - RNA, 15 nt, Molluscum contagiosum virus
caccagcugccgcuu

SEQ ID NO: 369863 - RNA, 16 nt, Molluscum contagiosum virus
caccagguacuccuug

SEQ ID NO: 369864 - RNA, 20 nt, Molluscum contagiosum virus
caccagugccgacgugugcc

SEQ ID NO: 369865 - RNA, 13 nt, Molluscum contagiosum virus
cacccccgcugca

SEQ ID NO: 369866 - RNA, 16 nt, Molluscum contagiosum virus
caccgcaucccccgcg

SEQ ID NO: 369867 - RNA, 17 nt, Molluscum contagiosum virus
caccgccgacaacgcac

SEQ ID NO: 369868 - RNA, 14 nt, Molluscum contagiosum virus
caccgccugcugca

SEQ ID NO: 369869 - RNA, 23 nt, Molluscum contagiosum virus
caccgcgacaggggccacaagca

SEQ ID NO: 369870 - RNA, 18 nt, Molluscum contagiosum virus
caccgcgcagaagccaac

SEQ ID NO: 369871 - RNA, 14 nt, Molluscum contagiosum virus
caccgcguggacaa

SEQ ID NO: 369872 - RNA, 21 nt, Molluscum contagiosum virus
caccgggauggucucgcugcu

SEQ ID NO: 369873 - RNA, 17 nt, Molluscum contagiosum virus
caccguugccgcggcag

SEQ ID NO: 369874 - RNA, 18 nt, Molluscum contagiosum virus
caccguuggcuaugagga

SEQ ID NO: 369875 - RNA, 13 nt, Molluscum contagiosum virus
caccuaaauagca

SEQ ID NO: 369876 - RNA, 20 nt, Molluscum contagiosum virus
caccucaacuguugccugga

SEQ ID NO: 369877 - RNA, 15 nt, Molluscum contagiosum virus
caccucaccgcgcac

SEQ ID NO: 369878 - RNA, 15 nt, Molluscum contagiosum virus
caccucccugugaac

SEQ ID NO: 369879 - RNA, 16 nt, Molluscum contagiosum virus
caccucgcaugaugaa

SEQ ID NO: 369880 - RNA, 16 nt, Molluscum contagiosum virus
caccugcacgacguac

SEQ ID NO: 369881 - RNA, 13 nt, Molluscum contagiosum virus
caccugcgacgcc

SEQ ID NO: 369882 - RNA, 19 nt, Molluscum contagiosum virus
caccugcuggaacgcuugg

SEQ ID NO: 369883 - RNA, 19 nt, Molluscum contagiosum virus
caccugugcccuguccaca

SEQ ID NO: 369884 - RNA, 18 nt, Molluscum contagiosum virus
caccuucggaacugcgga

SEQ ID NO: 369885 - RNA, 19 nt, Molluscum contagiosum virus
caccuuucucuuucucaag

SEQ ID NO: 369886 - RNA, 15 nt, Molluscum contagiosum virus
cacgaccacgcuggc

SEQ ID NO: 369887 - RNA, 23 nt, Molluscum contagiosum virus
cacgacgacggcugcucgcugcc

SEQ ID NO: 369888 - RNA, 21 nt, Molluscum contagiosum virus
cacgacguacgagugcuggag

SEQ ID NO: 369889 - RNA, 19 nt, Molluscum contagiosum virus
cacgacucgcgucugcaag

SEQ ID NO: 369890 - RNA, 12 nt, Molluscum contagiosum virus
cacgacucucaa

SEQ ID NO: 369891 - RNA, 15 nt, Molluscum contagiosum virus
cacgagaagaucaac

SEQ ID NO: 369892 - RNA, 21 nt, Molluscum contagiosum virus
cacgagaugggcccgcgcgcg

SEQ ID NO: 369893 - RNA, 14 nt, Molluscum contagiosum virus
cacgagcacugccu

SEQ ID NO: 369894 - RNA, 15 nt, Molluscum contagiosum virus
cacgagcacugccug

SEQ ID NO: 369895 - RNA, 14 nt, Molluscum contagiosum virus
cacgagcgcggcaa

SEQ ID NO: 369896 - RNA, 14 nt, Molluscum contagiosum virus
cacgagcugcugua

SEQ ID NO: 369897 - RNA, 15 nt, Molluscum contagiosum virus
cacgauguacuccac

SEQ ID NO: 369898 - RNA, 13 nt, Molluscum contagiosum virus
cacgcaacugccc

SEQ ID NO: 369899 - RNA, 12 nt, Molluscum contagiosum virus
cacgcacacucg

SEQ ID NO: 369900 - RNA, 13 nt, Molluscum contagiosum virus
cacgcacccaaau

SEQ ID NO: 369901 - RNA, 17 nt, Molluscum contagiosum virus
cacgcaggaccuggcug

SEQ ID NO: 369902 - RNA, 20 nt, Molluscum contagiosum virus
cacgcaggacuggcaccugc

SEQ ID NO: 369903 - RNA, 17 nt, Molluscum contagiosum virus
cacgccagccuggagua

SEQ ID NO: 369904 - RNA, 22 nt, Molluscum contagiosum virus
cacgccgacuuccgacgggccg

SEQ ID NO: 369905 - RNA, 13 nt, Molluscum contagiosum virus
cacgccgcucggc

SEQ ID NO: 369906 - RNA, 20 nt, Molluscum contagiosum virus
cacgccgguggcgcgcgagc

SEQ ID NO: 369907 - RNA, 14 nt, Molluscum contagiosum virus
cacgccuccaagaa

SEQ ID NO: 369908 - RNA, 23 nt, Molluscum contagiosum virus
cacgccugcacgcgcacuugccu

SEQ ID NO: 369909 - RNA, 22 nt, Molluscum contagiosum virus
cacgccuucguggagcccgugc

SEQ ID NO: 369910 - RNA, 15 nt, Molluscum contagiosum virus
cacgcgagcaauggc

SEQ ID NO: 369911 - RNA, 21 nt, Molluscum contagiosum virus
cacgcgcacacgcugaguuac

SEQ ID NO: 369912 - RNA, 22 nt, Molluscum contagiosum virus
cacgcgcacgcucucgcuggcu

SEQ ID NO: 369913 - RNA, 14 nt, Molluscum contagiosum virus
cacgcgcacuugcc

SEQ ID NO: 369914 - RNA, 15 nt, Molluscum contagiosum virus
cacgcgcgacaucuu

SEQ ID NO: 369915 - RNA, 15 nt, Molluscum contagiosum virus
cacgcgcgagcggag

SEQ ID NO: 369916 - RNA, 14 nt, Molluscum contagiosum virus
cacgcgcgggcgca

SEQ ID NO: 369917 - RNA, 11 nt, Molluscum contagiosum virus
cacgcgcuucg

SEQ ID NO: 369918 - RNA, 21 nt, Molluscum contagiosum virus
cacgcggcgcgugucgcggag

SEQ ID NO: 369919 - RNA, 18 nt, Molluscum contagiosum virus
cacgcgggcccgugcuca

SEQ ID NO: 369920 - RNA, 18 nt, Molluscum contagiosum virus
cacgcucauacuccugcu

SEQ ID NO: 369921 - RNA, 13 nt, Molluscum contagiosum virus
cacgcucaucucg

SEQ ID NO: 369922 - RNA, 21 nt, Molluscum contagiosum virus
cacgcugcacgagcugcugua

SEQ ID NO: 369923 - RNA, 21 nt, Molluscum contagiosum virus
cacgcuggcgcgcuccaugua

SEQ ID NO: 369924 - RNA, 23 nt, Molluscum contagiosum virus
cacgcuguuuggaauugugcugc

SEQ ID NO: 369925 - RNA, 19 nt, Molluscum contagiosum virus
cacgcuugugcgcacgcug

SEQ ID NO: 369926 - RNA, 20 nt, Molluscum contagiosum virus
cacggacccgggcgcggcac

SEQ ID NO: 369927 - RNA, 15 nt, Molluscum contagiosum virus
cacggauacgcgcac

SEQ ID NO: 369928 - RNA, 18 nt, Molluscum contagiosum virus
cacggccuccagcagcgg

SEQ ID NO: 369929 - RNA, 20 nt, Molluscum contagiosum virus
cacggcggcgcucaacaucc

SEQ ID NO: 369930 - RNA, 22 nt, Molluscum contagiosum virus
cacggcguucaccuuggcgcug

SEQ ID NO: 369931 - RNA, 12 nt, Molluscum contagiosum virus
cacggcucugcg

SEQ ID NO: 369932 - RNA, 13 nt, Molluscum contagiosum virus
cacggcugcaagc

SEQ ID NO: 369933 - RNA, 18 nt, Molluscum contagiosum virus
cacggcuguaaugugcug

SEQ ID NO: 369934 - RNA, 18 nt, Molluscum contagiosum virus
cacggcuugccgcucggc

SEQ ID NO: 369935 - RNA, 21 nt, Molluscum contagiosum virus
cacgucgaagaccaccagcac

SEQ ID NO: 369936 - RNA, 21 nt, Molluscum contagiosum virus
cacgucggaguccgugcaaca

SEQ ID NO: 369937 - RNA, 20 nt, Molluscum contagiosum virus
cacgugccccgcgcgugcag

SEQ ID NO: 369938 - RNA, 12 nt, Molluscum contagiosum virus
cacgugcugcug

SEQ ID NO: 369939 - RNA, 14 nt, Molluscum contagiosum virus
cacguggagucacg

SEQ ID NO: 369940 - RNA, 18 nt, Molluscum contagiosum virus
cacguggccagacauguc

SEQ ID NO: 369941 - RNA, 24 nt, Molluscum contagiosum virus
cacguggugguuggcgugcucgcu

SEQ ID NO: 369942 - RNA, 18 nt, Molluscum contagiosum virus
cacguuccagagcacugc

SEQ ID NO: 369943 - RNA, 22 nt, Molluscum contagiosum virus
cacguugggguugucgggcgcu

SEQ ID NO: 369944 - RNA, 13 nt, Molluscum contagiosum virus
cuccggcuuuauu

SEQ ID NO: 369945 - RNA, 21 nt, Molluscum contagiosum virus
cuccgggcagauagcaaccuc

SEQ ID NO: 369946 - RNA, 17 nt, Molluscum contagiosum virus
cuccguccuuucacaca

SEQ ID NO: 369947 - RNA, 14 nt, Molluscum contagiosum virus
cuccucgaccugca

SEQ ID NO: 369948 - RNA, 20 nt, Molluscum contagiosum virus
cugcaagcgugacucaccuc

SEQ ID NO: 369949 - RNA, 13 nt, Molluscum contagiosum virus
cugcacagcuucc

SEQ ID NO: 369950 - RNA, 20 nt, Molluscum contagiosum virus
cugcacagcuuccuggagua

SEQ ID NO: 369951 - RNA, 17 nt, Molluscum contagiosum virus
cugcacgagcugcugua

SEQ ID NO: 369952 - RNA, 16 nt, Molluscum contagiosum virus
cugcacuacaaccaug

SEQ ID NO: 369953 - RNA, 15 nt, Molluscum contagiosum virus
cugcagaacugccug

SEQ ID NO: 369954 - RNA, 21 nt, Molluscum contagiosum virus
cugcagcccgacgcgggcgcg

SEQ ID NO: 369955 - RNA, 14 nt, Molluscum contagiosum virus
cugcagguguguau

SEQ ID NO: 369956 - RNA, 21 nt, Molluscum contagiosum virus
cugcaucuuuuuuaugcacuu

SEQ ID NO: 369957 - RNA, 15 nt, Molluscum contagiosum virus
cugccacaugcagua

SEQ ID NO: 369958 - RNA, 19 nt, Molluscum contagiosum virus
cugccagccgcucguccag

SEQ ID NO: 369959 - RNA, 18 nt, Molluscum contagiosum virus
cugcccgcgcacaacaag

SEQ ID NO: 369960 - RNA, 13 nt, Molluscum contagiosum virus
cugcccgcggaga

SEQ ID NO: 369961 - RNA, 16 nt, Molluscum contagiosum virus
cugccgucgcccguga

SEQ ID NO: 369962 - RNA, 20 nt, Molluscum contagiosum virus
cugccuagguccacauuuca

SEQ ID NO: 369963 - RNA, 21 nt, Molluscum contagiosum virus
cugccucguggaacaaagagg

SEQ ID NO: 369964 - RNA, 12 nt, Molluscum contagiosum virus
cugccugcucaa

SEQ ID NO: 369965 - RNA, 13 nt, Molluscum contagiosum virus
cugccugcucaac

SEQ ID NO: 369966 - RNA, 13 nt, Molluscum contagiosum virus
cugccuuugccaa

SEQ ID NO: 369967 - RNA, 21 nt, Molluscum contagiosum virus
cugcgaaggucaucaccagcc

SEQ ID NO: 369968 - RNA, 14 nt, Molluscum contagiosum virus
cugcgagagcaugc

SEQ ID NO: 369969 - RNA, 17 nt, Molluscum contagiosum virus
cugcgagaucguggacg

SEQ ID NO: 369970 - RNA, 12 nt, Molluscum contagiosum virus
cugcgagcagcc

SEQ ID NO: 369971 - RNA, 17 nt, Molluscum contagiosum virus
cugcgaguggcgcgcau

SEQ ID NO: 369972 - RNA, 15 nt, Molluscum contagiosum virus
cugcgcacacgucag

SEQ ID NO: 369973 - RNA, 20 nt, Molluscum contagiosum virus
cugcgccacugccacggcug

SEQ ID NO: 369974 - RNA, 14 nt, Molluscum contagiosum virus
cugcgccagucgcg

SEQ ID NO: 369975 - RNA, 23 nt, Molluscum contagiosum virus
cugcgccgcgcgcggugcugcgc

SEQ ID NO: 369976 - RNA, 20 nt, Molluscum contagiosum virus
cugcgcgagccgcugcacgc

SEQ ID NO: 369977 - RNA, 15 nt, Molluscum contagiosum virus
cugcgcgagcucguc

SEQ ID NO: 369978 - RNA, 16 nt, Molluscum contagiosum virus
cugcgcgccgccgacg

SEQ ID NO: 369979 - RNA, 14 nt, Molluscum contagiosum virus
cugcgcgcgcggcg

SEQ ID NO: 369980 - RNA, 16 nt, Molluscum contagiosum virus
cugcgcgcggggagcu

SEQ ID NO: 369981 - RNA, 18 nt, Molluscum contagiosum virus
cugcgcgcguugccugag

SEQ ID NO: 369982 - RNA, 23 nt, Molluscum contagiosum virus
cugcgcgcuaggguccaccugcg

SEQ ID NO: 369983 - RNA, 17 nt, Molluscum contagiosum virus
cugcgcggugagccguu

SEQ ID NO: 369984 - RNA, 23 nt, Molluscum contagiosum virus
cugcgcguggaguacagccgcgc

SEQ ID NO: 369985 - RNA, 15 nt, Molluscum contagiosum virus
cugcgcuccaugcug

SEQ ID NO: 369986 - RNA, 21 nt, Molluscum contagiosum virus
cugcgcucgccugcuugucug

SEQ ID NO: 369987 - RNA, 16 nt, Molluscum contagiosum virus
cugcgcuggaugcugc

SEQ ID NO: 369988 - RNA, 17 nt, Molluscum contagiosum virus
cugcgcuggaugcugcu

SEQ ID NO: 369989 - RNA, 21 nt, Molluscum contagiosum virus
cugcgcuuccucuacaccagc

SEQ ID NO: 369990 - RNA, 19 nt, Molluscum contagiosum virus
cugcgcuuuuuuuguccug

SEQ ID NO: 369991 - RNA, 15 nt, Molluscum contagiosum virus
cugcggacaagacaa

SEQ ID NO: 369992 - RNA, 13 nt, Molluscum contagiosum virus
cugcggcaaccgc

SEQ ID NO: 369993 - RNA, 19 nt, Molluscum contagiosum virus
cugcggcgcucgcagcaca

SEQ ID NO: 369994 - RNA, 12 nt, Molluscum contagiosum virus
cugcggcugcug

SEQ ID NO: 369995 - RNA, 15 nt, Molluscum contagiosum virus
cugcgucacaagcac

SEQ ID NO: 369996 - RNA, 18 nt, Molluscum contagiosum virus
cugcgucacaagcaccgc

SEQ ID NO: 369997 - RNA, 24 nt, Molluscum contagiosum virus
cugcgucgccugagcuucuuuggc

SEQ ID NO: 369998 - RNA, 16 nt, Molluscum contagiosum virus
cugcgucucgcggccg

SEQ ID NO: 369999 - RNA, 18 nt, Molluscum contagiosum virus
cugcguguacgacgugcu

SEQ ID NO: 370000 - RNA, 18 nt, Molluscum contagiosum virus
cugcguuuugcgcggcac

SEQ ID NO: 370001 - RNA, 19 nt, Molluscum contagiosum virus
cugcuaacaacaugagggg

SEQ ID NO: 370002 - RNA, 17 nt, Molluscum contagiosum virus
cugcuagagcauauccu

SEQ ID NO: 370003 - RNA, 18 nt, Molluscum contagiosum virus
cugcuauuaccugagauc

SEQ ID NO: 370004 - RNA, 13 nt, Molluscum contagiosum virus
cugcucaucggcg

SEQ ID NO: 370005 - RNA, 18 nt, Molluscum contagiosum virus
cugcucgagauucguggc

SEQ ID NO: 370006 - RNA, 23 nt, Molluscum contagiosum virus
cugcucgcacccgcgccgcggcg

SEQ ID NO: 370007 - RNA, 21 nt, Molluscum contagiosum virus
cugcucuacuuccacgagcug

SEQ ID NO: 370008 - RNA, 18 nt, Molluscum contagiosum virus
cugcucuugaugcugaac

SEQ ID NO: 370009 - RNA, 21 nt, Molluscum contagiosum virus
cugcugaagaaggagcccuug

SEQ ID NO: 370010 - RNA, 13 nt, Molluscum contagiosum virus
cugcugcaggcaa

SEQ ID NO: 370011 - RNA, 15 nt, Molluscum contagiosum virus
cugcugcgcgaccgc

SEQ ID NO: 370012 - RNA, 17 nt, Molluscum contagiosum virus
cugcugcgcuacaugua

SEQ ID NO: 370013 - RNA, 20 nt, Molluscum contagiosum virus
cugcugcgguaucuacacuc

SEQ ID NO: 370014 - RNA, 22 nt, Molluscum contagiosum virus
cugcugcugcaaagcgcggccg

SEQ ID NO: 370015 - RNA, 12 nt, Molluscum contagiosum virus
cugcuggagcua

SEQ ID NO: 370016 - RNA, 16 nt, Molluscum contagiosum virus
cugcuggaguauggca

SEQ ID NO: 370017 - RNA, 17 nt, Molluscum contagiosum virus
cugcugggagcuugcac

SEQ ID NO: 370018 - RNA, 22 nt, Molluscum contagiosum virus
cugcuggugcucgccugcaucu

SEQ ID NO: 370019 - RNA, 15 nt, Molluscum contagiosum virus
cugcugguggugcug

SEQ ID NO: 370020 - RNA, 16 nt, Molluscum contagiosum virus
cugcugguucugcucg

SEQ ID NO: 370021 - RNA, 13 nt, Molluscum contagiosum virus
cugcuguccuuca

SEQ ID NO: 370022 - RNA, 15 nt, Molluscum contagiosum virus
cuggaaacacguggc

SEQ ID NO: 370023 - RNA, 20 nt, Molluscum contagiosum virus
cuggaaacacguggccaagg

SEQ ID NO: 370024 - RNA, 17 nt, Molluscum contagiosum virus
cuggaagaacaggccgc

SEQ ID NO: 370025 - RNA, 16 nt, Molluscum contagiosum virus
cuggacgggcacgagc

SEQ ID NO: 370026 - RNA, 19 nt, Molluscum contagiosum virus
cuggacggugcuggugcug

SEQ ID NO: 370027 - RNA, 20 nt, Molluscum contagiosum virus
cuggacugagccgcaagcac

SEQ ID NO: 370028 - RNA, 18 nt, Molluscum contagiosum virus
cuggaguuuaaugacgcg

SEQ ID NO: 370029 - RNA, 22 nt, Molluscum contagiosum virus
cuggauggccuugggcacuucc

SEQ ID NO: 370030 - RNA, 22 nt, Molluscum contagiosum virus
cuggauugucuuuuucgaggca

SEQ ID NO: 370031 - RNA, 14 nt, Molluscum contagiosum virus
cuggcagccgagcc

SEQ ID NO: 370032 - RNA, 11 nt, Molluscum contagiosum virus
cuggccaacac

SEQ ID NO: 370033 - RNA, 18 nt, Molluscum contagiosum virus
cuggccaacccucgcaag

SEQ ID NO: 370034 - RNA, 15 nt, Molluscum contagiosum virus
cuggccaucgagcuu

SEQ ID NO: 370035 - RNA, 14 nt, Molluscum contagiosum virus
cuggcccugcuagu

SEQ ID NO: 370036 - RNA, 21 nt, Molluscum contagiosum virus
cuggccggcucgcuacgcgua

SEQ ID NO: 370037 - RNA, 14 nt, Molluscum contagiosum virus
cuggcgaaaccugg

SEQ ID NO: 370038 - RNA, 14 nt, Molluscum contagiosum virus
cuggcgacacauug

SEQ ID NO: 370039 - RNA, 13 nt, Molluscum contagiosum virus
cuggcgagcacgu

SEQ ID NO: 370040 - RNA, 21 nt, Molluscum contagiosum virus
cuggcgcgcggagagcagugc

SEQ ID NO: 370041 - RNA, 23 nt, Molluscum contagiosum virus
cuggcgcgcggagagcagugccg

SEQ ID NO: 370042 - RNA, 21 nt, Molluscum contagiosum virus
cuggcgcucggcguggugcug

SEQ ID NO: 370043 - RNA, 14 nt, Molluscum contagiosum virus
cuggcgcugcuaua

SEQ ID NO: 370044 - RNA, 20 nt, Molluscum contagiosum virus
cuggcguacucgugucacaa

SEQ ID NO: 370045 - RNA, 17 nt, Molluscum contagiosum virus
cugggagcuuuccuugc

SEQ ID NO: 370046 - RNA, 21 nt, Molluscum contagiosum virus
cugggcaacgcgcgcgcgcug

SEQ ID NO: 370047 - RNA, 19 nt, Molluscum contagiosum virus
cugggcacaagcuuucuca

SEQ ID NO: 370048 - RNA, 20 nt, Molluscum contagiosum virus
cugggccccuacguggucau

SEQ ID NO: 370049 - RNA, 18 nt, Molluscum contagiosum virus
cugggccgcaugcaccua

SEQ ID NO: 370050 - RNA, 15 nt, Molluscum contagiosum virus
cugggccugccgcaa

SEQ ID NO: 370051 - RNA, 19 nt, Molluscum contagiosum virus
cuuggaagacaacucuugu

SEQ ID NO: 370052 - RNA, 15 nt, Molluscum contagiosum virus
cuuggaagagucgcg

SEQ ID NO: 370053 - RNA, 21 nt, Molluscum contagiosum virus
cuuggacagcaagcagcgcgc

SEQ ID NO: 370054 - RNA, 11 nt, Molluscum contagiosum virus
cuuggcaaagg

SEQ ID NO: 370055 - RNA, 17 nt, Molluscum contagiosum virus
cuuggcgagcgcugccg

SEQ ID NO: 370056 - RNA, 12 nt, Molluscum contagiosum virus
cuugggcacugc

SEQ ID NO: 370057 - RNA, 17 nt, Molluscum contagiosum virus
cuugguggugaccgaga

SEQ ID NO: 370058 - RNA, 18 nt, Molluscum contagiosum virus
cuugugcaauuccgucca

SEQ ID NO: 370059 - RNA, 21 nt, Molluscum contagiosum virus
cuugugcgccugugcuggcga

SEQ ID NO: 370060 - RNA, 15 nt, Molluscum contagiosum virus
cuuguuguugugaca

SEQ ID NO: 370061 - RNA, 14 nt, Molluscum contagiosum virus
cuuuacugcaagau

SEQ ID NO: 370062 - RNA, 14 nt, Molluscum contagiosum virus
cuuuagaggggcaa

SEQ ID NO: 370063 - RNA, 20 nt, Molluscum contagiosum virus
cuuuagaggggcaacaugcg

SEQ ID NO: 370064 - RNA, 21 nt, Molluscum contagiosum virus
cuuucacacacggaagcucac

SEQ ID NO: 370065 - RNA, 19 nt, Molluscum contagiosum virus
cuuucacgcugcacgagcu

SEQ ID NO: 370066 - RNA, 21 nt, Molluscum contagiosum virus
cuuucagagugacgcugcaag

SEQ ID NO: 370067 - RNA, 15 nt, Molluscum contagiosum virus
cuuuccaucggaacu

SEQ ID NO: 370068 - RNA, 23 nt, Molluscum contagiosum virus
cuuucucacgcccgcgcugcgca

SEQ ID NO: 370069 - RNA, 13 nt, Molluscum contagiosum virus
cuuucucuauuca

SEQ ID NO: 370070 - RNA, 16 nt, Molluscum contagiosum virus
cuuuguccugagccuu

SEQ ID NO: 370071 - RNA, 18 nt, Molluscum contagiosum virus
cuuuguggucaagacugg

SEQ ID NO: 370072 - RNA, 13 nt, Molluscum contagiosum virus
cuuuguuccugcg

SEQ ID NO: 370073 - RNA, 15 nt, Molluscum contagiosum virus
cuuuuccgacccgug

SEQ ID NO: 370074 - RNA, 20 nt, Molluscum contagiosum virus
cuuuucgcgccgcgggcaca

SEQ ID NO: 370075 - RNA, 19 nt, Molluscum contagiosum virus
cuuuuuccugaacaagcug

SEQ ID NO: 370076 - RNA, 22 nt, Molluscum contagiosum virus
cuuuuucuucagaggacaccgc

SEQ ID NO: 370077 - RNA, 13 nt, Molluscum contagiosum virus
gaaaaaguucuug

SEQ ID NO: 370078 - RNA, 15 nt, Molluscum contagiosum virus
gaaaacgcacugucg

SEQ ID NO: 370079 - RNA, 10 nt, Molluscum contagiosum virus
gaaacaagcg

SEQ ID NO: 370080 - RNA, 11 nt, Molluscum contagiosum virus
gaaacagccau

SEQ ID NO: 370081 - RNA, 19 nt, Molluscum contagiosum virus
gaaacgaacgcugcagcua

SEQ ID NO: 370082 - RNA, 18 nt, Molluscum contagiosum virus
gaaacgcgcccgagcuaa

SEQ ID NO: 370083 - RNA, 14 nt, Molluscum contagiosum virus
gaaacuggacugag

SEQ ID NO: 370084 - RNA, 15 nt, Molluscum contagiosum virus
gaaagcagcaaacug

SEQ ID NO: 370085 - RNA, 16 nt, Molluscum contagiosum virus
gaaagcgccgcgcgcg

SEQ ID NO: 370086 - RNA, 15 nt, Molluscum contagiosum virus
gaaagcuucucgcca

SEQ ID NO: 370087 - RNA, 20 nt, Molluscum contagiosum virus
gaaaggcacccaccaggaac

SEQ ID NO: 370088 - RNA, 21 nt, Molluscum contagiosum virus
gaaaggcaccccgaaaggcac

SEQ ID NO: 370089 - RNA, 14 nt, Molluscum contagiosum virus
gaaaggcaccccgc

SEQ ID NO: 370090 - RNA, 14 nt, Molluscum contagiosum virus
gaaaggcacccgca

SEQ ID NO: 370091 - RNA, 14 nt, Molluscum contagiosum virus
gaaagggcugcuug

SEQ ID NO: 370092 - RNA, 14 nt, Molluscum contagiosum virus
gaaagguaccccgc

SEQ ID NO: 370093 - RNA, 21 nt, Molluscum contagiosum virus
gaaagguaccccgcaggaaag

SEQ ID NO: 370094 - RNA, 23 nt, Molluscum contagiosum virus
gaaaguccacgugguccaccagc

SEQ ID NO: 370095 - RNA, 17 nt, Molluscum contagiosum virus
gaaaucccaagagccau

SEQ ID NO: 370096 - RNA, 18 nt, Molluscum contagiosum virus
gaaaucccaagagccaug

SEQ ID NO: 370097 - RNA, 20 nt, Molluscum contagiosum virus
gaaaucccaagagccauguu

SEQ ID NO: 370098 - RNA, 19 nt, Molluscum contagiosum virus
gaacaacagcguguugcug

SEQ ID NO: 370099 - RNA, 15 nt, Molluscum contagiosum virus
gaacaacauggugcu

SEQ ID NO: 370100 - RNA, 16 nt, Molluscum contagiosum virus
gaacaacauggugcug

SEQ ID NO: 370101 - RNA, 21 nt, Molluscum contagiosum virus
gaacaacauggugcuggccau

SEQ ID NO: 370102 - RNA, 22 nt, Molluscum contagiosum virus
gaacaagaagcgcuucuuugcg

SEQ ID NO: 370103 - RNA, 12 nt, Molluscum contagiosum virus
gaacaaggccaa

SEQ ID NO: 370104 - RNA, 22 nt, Molluscum contagiosum virus
gaacaauuacuccagcguggug

SEQ ID NO: 370105 - RNA, 15 nt, Molluscum contagiosum virus
gaacaccaagagcau

SEQ ID NO: 370106 - RNA, 21 nt, Molluscum contagiosum virus
gaacaccaagagcaucgagcu

SEQ ID NO: 370107 - RNA, 18 nt, Molluscum contagiosum virus
gaacaccccgagcuggug

SEQ ID NO: 370108 - RNA, 13 nt, Molluscum contagiosum virus
gaacacgacaugu

SEQ ID NO: 370109 - RNA, 19 nt, Molluscum contagiosum virus
gaacaggugcgcaagcauu

SEQ ID NO: 370110 - RNA, 16 nt, Molluscum contagiosum virus
gaaccgugcgagcuuu

SEQ ID NO: 370111 - RNA, 17 nt, Molluscum contagiosum virus
gaacgaccucaaccgca

SEQ ID NO: 370112 - RNA, 17 nt, Molluscum contagiosum virus
gaacgacgguaaacucu

SEQ ID NO: 370113 - RNA, 20 nt, Molluscum contagiosum virus
gaacgacgguaaacucuugc

SEQ ID NO: 370114 - RNA, 23 nt, Molluscum contagiosum virus
gaacgagaaaugcgcacacuugc

SEQ ID NO: 370115 - RNA, 16 nt, Molluscum contagiosum virus
gaacgaggaaaggcac

SEQ ID NO: 370116 - RNA, 19 nt, Molluscum contagiosum virus
gaacgagggacacgcacuu

SEQ ID NO: 370117 - RNA, 13 nt, Molluscum contagiosum virus
gaacgaucucuga

SEQ ID NO: 370118 - RNA, 20 nt, Molluscum contagiosum virus
gaacgcaaguacaacccaaa

SEQ ID NO: 370119 - RNA, 15 nt, Molluscum contagiosum virus
gaacgcgcaagugug

SEQ ID NO: 370120 - RNA, 18 nt, Molluscum contagiosum virus
gaacgcgcaagugugcgc

SEQ ID NO: 370121 - RNA, 18 nt, Molluscum contagiosum virus
gaacgcgcgcucuacuaa

SEQ ID NO: 370122 - RNA, 22 nt, Molluscum contagiosum virus
gaacgcgcugcgccacugccac

SEQ ID NO: 370123 - RNA, 14 nt, Molluscum contagiosum virus
gaacgcggacacgu

SEQ ID NO: 370124 - RNA, 20 nt, Molluscum contagiosum virus
gaacggcgugcgaguguucc

SEQ ID NO: 370125 - RNA, 21 nt, Molluscum contagiosum virus
gaacuccaggcgcaccuugac

SEQ ID NO: 370126 - RNA, 16 nt, Molluscum contagiosum virus
gaacucgagcacguag

SEQ ID NO: 370127 - RNA, 14 nt, Molluscum contagiosum virus
gaacucgcugcugc

SEQ ID NO: 370128 - RNA, 20 nt, Molluscum contagiosum virus
gaacucuacgacaugcucgc

SEQ ID NO: 370129 - RNA, 23 nt, Molluscum contagiosum virus
gaacugcugggcguggcgcaccu

SEQ ID NO: 370130 - RNA, 19 nt, Molluscum contagiosum virus
gaacuggacgccguugcgc

SEQ ID NO: 370131 - RNA, 20 nt, Molluscum contagiosum virus
gaagaacgucuucuaccgcc

SEQ ID NO: 370132 - RNA, 19 nt, Molluscum contagiosum virus
gaagaaggagcccuugcca

SEQ ID NO: 370133 - RNA, 14 nt, Molluscum contagiosum virus
gaagaccacauccu

SEQ ID NO: 370134 - RNA, 15 nt, Molluscum contagiosum virus
gaagacgcauaguca

SEQ ID NO: 370135 - RNA, 15 nt, Molluscum contagiosum virus
gaagagcgugucagc

SEQ ID NO: 370136 - RNA, 19 nt, Molluscum contagiosum virus
gaagaggccggcacaagcc

SEQ ID NO: 370137 - RNA, 17 nt, Molluscum contagiosum virus
gaagaugcugcgcgugg

SEQ ID NO: 370138 - RNA, 22 nt, Molluscum contagiosum virus
gaagcaagacccagcaaggccc

SEQ ID NO: 370139 - RNA, 10 nt, Molluscum contagiosum virus
gaagcacagu

SEQ ID NO: 370140 - RNA, 13 nt, Molluscum contagiosum virus
gaagcacagucca

SEQ ID NO: 370141 - RNA, 14 nt, Molluscum contagiosum virus
gaagcccgaggugc

SEQ ID NO: 370142 - RNA, 15 nt, Molluscum contagiosum virus
gaagcccgucggggc

SEQ ID NO: 370143 - RNA, 14 nt, Molluscum contagiosum virus
gaagcccucagggg

SEQ ID NO: 370144 - RNA, 17 nt, Molluscum contagiosum virus
gaagcgcccgugaugca

SEQ ID NO: 370145 - RNA, 15 nt, Molluscum contagiosum virus
gaagcgcuucuuugc

SEQ ID NO: 370146 - RNA, 18 nt, Molluscum contagiosum virus
gaagcggcggacagcaaa

SEQ ID NO: 370147 - RNA, 19 nt, Molluscum contagiosum virus
gaagcucacaucugucccu

SEQ ID NO: 370148 - RNA, 16 nt, Molluscum contagiosum virus
gaagcugcacgugcag

SEQ ID NO: 370149 - RNA, 13 nt, Molluscum contagiosum virus
gaagcugugcaag

SEQ ID NO: 370150 - RNA, 21 nt, Molluscum contagiosum virus
gaaggaucccugcccgcguga

SEQ ID NO: 370151 - RNA, 19 nt, Molluscum contagiosum virus
gaaggcucgagcugcaucu

SEQ ID NO: 370152 - RNA, 15 nt, Molluscum contagiosum virus
gaaguagaucacggc

SEQ ID NO: 370153 - RNA, 22 nt, Molluscum contagiosum virus
gaagucgcagcagcggucucgg

SEQ ID NO: 370154 - RNA, 17 nt, Molluscum contagiosum virus
gacguauacuccaaaaa

SEQ ID NO: 370155 - RNA, 17 nt, Molluscum contagiosum virus
gacgucggggcgcgugc

SEQ ID NO: 370156 - RNA, 19 nt, Molluscum contagiosum virus
gacgugaucgcgcaggcgc

SEQ ID NO: 370157 - RNA, 17 nt, Molluscum contagiosum virus
gacgugcacgcacgcgc

SEQ ID NO: 370158 - RNA, 17 nt, Molluscum contagiosum virus
gacgugcuacuacugua

SEQ ID NO: 370159 - RNA, 17 nt, Molluscum contagiosum virus
gacgugcugcugcagaa

SEQ ID NO: 370160 - RNA, 17 nt, Molluscum contagiosum virus
gacguguacgugcuugc

SEQ ID NO: 370161 - RNA, 19 nt, Molluscum contagiosum virus
gacuacgcacggcggacgc

SEQ ID NO: 370162 - RNA, 14 nt, Molluscum contagiosum virus
gacuacgcacuggc

SEQ ID NO: 370163 - RNA, 23 nt, Molluscum contagiosum virus
gacuacgcgcugcuagagaaccu

SEQ ID NO: 370164 - RNA, 17 nt, Molluscum contagiosum virus
gacuacuacguggugcg

SEQ ID NO: 370165 - RNA, 23 nt, Molluscum contagiosum virus
gacuagaugcguccuaugcaucu

SEQ ID NO: 370166 - RNA, 23 nt, Molluscum contagiosum virus
gacuagcauuccuucacacagac

SEQ ID NO: 370167 - RNA, 16 nt, Molluscum contagiosum virus
gacuagccugugcccu

SEQ ID NO: 370168 - RNA, 19 nt, Molluscum contagiosum virus
gacucagcauguugcucua

SEQ ID NO: 370169 - RNA, 22 nt, Molluscum contagiosum virus
gacuccuuccggagacaccagc

SEQ ID NO: 370170 - RNA, 23 nt, Molluscum contagiosum virus
gacuccuuccggagacaccagcu

SEQ ID NO: 370171 - RNA, 22 nt, Molluscum contagiosum virus
gacuccuuugcgagcacuguac

SEQ ID NO: 370172 - RNA, 13 nt, Molluscum contagiosum virus
gacucgagcauuu

SEQ ID NO: 370173 - RNA, 17 nt, Molluscum contagiosum virus
gacucgcgcccgcuccc

SEQ ID NO: 370174 - RNA, 14 nt, Molluscum contagiosum virus
gacucggacacugg

SEQ ID NO: 370175 - RNA, 16 nt, Molluscum contagiosum virus
gacucggacacuggag

SEQ ID NO: 370176 - RNA, 14 nt, Molluscum contagiosum virus
gacucggugcucau

SEQ ID NO: 370177 - RNA, 16 nt, Molluscum contagiosum virus
gacugacgccgauguc

SEQ ID NO: 370178 - RNA, 16 nt, Molluscum contagiosum virus
gacugagccgcaagca

SEQ ID NO: 370179 - RNA, 17 nt, Molluscum contagiosum virus
gacugcuacgucgcggc

SEQ ID NO: 370180 - RNA, 19 nt, Molluscum contagiosum virus
gacugcuacgucgcggcgc

SEQ ID NO: 370181 - RNA, 23 nt, Molluscum contagiosum virus
gacugcugcccccgccgcggcgc

SEQ ID NO: 370182 - RNA, 16 nt, Molluscum contagiosum virus
gacuggcacgcgccgc

SEQ ID NO: 370183 - RNA, 20 nt, Molluscum contagiosum virus
gacuucuugguggacagccu

SEQ ID NO: 370184 - RNA, 19 nt, Molluscum contagiosum virus
gacuugcugcggagcgccu

SEQ ID NO: 370185 - RNA, 18 nt, Molluscum contagiosum virus
gacuuuguccugagccuu

SEQ ID NO: 370186 - RNA, 18 nt, Molluscum contagiosum virus
gagaaaggcacccaccag

SEQ ID NO: 370187 - RNA, 19 nt, Molluscum contagiosum virus
gagaaaucccaagagccau

SEQ ID NO: 370188 - RNA, 19 nt, Molluscum contagiosum virus
gagaaaugcgcacacuugc

SEQ ID NO: 370189 - RNA, 22 nt, Molluscum contagiosum virus
gagaaccgccgucaacauuuca

SEQ ID NO: 370190 - RNA, 23 nt, Molluscum contagiosum virus
gagaaccugugcgcgguggugcu

SEQ ID NO: 370191 - RNA, 21 nt, Molluscum contagiosum virus
gagaacggacaaaauggcugc

SEQ ID NO: 370192 - RNA, 13 nt, Molluscum contagiosum virus
gagaacucgugcc

SEQ ID NO: 370193 - RNA, 14 nt, Molluscum contagiosum virus
gagaagaacagcac

SEQ ID NO: 370194 - RNA, 17 nt, Molluscum contagiosum virus
gagaagagggucgugca

SEQ ID NO: 370195 - RNA, 13 nt, Molluscum contagiosum virus
gagaagugcuccg

SEQ ID NO: 370196 - RNA, 21 nt, Molluscum contagiosum virus
gagaagugcuccgcacgugga

SEQ ID NO: 370197 - RNA, 19 nt, Molluscum contagiosum virus
gagaaguucugcacagcac

SEQ ID NO: 370198 - RNA, 12 nt, Molluscum contagiosum virus
gagacaccagcu

SEQ ID NO: 370199 - RNA, 15 nt, Molluscum contagiosum virus
gagacacgaguuucu

SEQ ID NO: 370200 - RNA, 20 nt, Molluscum contagiosum virus
gagacacgaguuucuucacg

SEQ ID NO: 370201 - RNA, 16 nt, Molluscum contagiosum virus
gagacagggugccuac

SEQ ID NO: 370202 - RNA, 15 nt, Molluscum contagiosum virus
gagacauaguaccau

SEQ ID NO: 370203 - RNA, 14 nt, Molluscum contagiosum virus
gagacauauguucu

SEQ ID NO: 370204 - RNA, 18 nt, Molluscum contagiosum virus
gagacaucaucgcggagc

SEQ ID NO: 370205 - RNA, 13 nt, Molluscum contagiosum virus
gagacaugcacac

SEQ ID NO: 370206 - RNA, 14 nt, Molluscum contagiosum virus
gagaccuggucaca

SEQ ID NO: 370207 - RNA, 19 nt, Molluscum contagiosum virus
gagaccuggucacacuggu

SEQ ID NO: 370208 - RNA, 14 nt, Molluscum contagiosum virus
gagacgcugcgcga

SEQ ID NO: 370209 - RNA, 20 nt, Molluscum contagiosum virus
gagacggaaauguuguuuga

SEQ ID NO: 370210 - RNA, 15 nt, Molluscum contagiosum virus
gagacggcagugucc

SEQ ID NO: 370211 - RNA, 14 nt, Molluscum contagiosum virus
gagacguugccgga

SEQ ID NO: 370212 - RNA, 19 nt, Molluscum contagiosum virus
gagacguugccggagcuga

SEQ ID NO: 370213 - RNA, 20 nt, Molluscum contagiosum virus
gagagagacaugcacacuca

SEQ ID NO: 370214 - RNA, 18 nt, Molluscum contagiosum virus
gagagcaaagaaugcaug

SEQ ID NO: 370215 - RNA, 19 nt, Molluscum contagiosum virus
gagagcacuucucgccgca

SEQ ID NO: 370216 - RNA, 14 nt, Molluscum contagiosum virus
gagagcagugccgc

SEQ ID NO: 370217 - RNA, 16 nt, Molluscum contagiosum virus
gagagcagugccgcuc

SEQ ID NO: 370218 - RNA, 22 nt, Molluscum contagiosum virus
gagagcaugcugucucuguccc

SEQ ID NO: 370219 - RNA, 17 nt, Molluscum contagiosum virus
gagagccauucuuaauc

SEQ ID NO: 370220 - RNA, 19 nt, Molluscum contagiosum virus
gagagccgccuuugcgcug

SEQ ID NO: 370221 - RNA, 13 nt, Molluscum contagiosum virus
gagagcgcgcgca

SEQ ID NO: 370222 - RNA, 22 nt, Molluscum contagiosum virus
gagaggauucuucucgaaaaug

SEQ ID NO: 370223 - RNA, 14 nt, Molluscum contagiosum virus
gagauacaaccgcu

SEQ ID NO: 370224 - RNA, 18 nt, Molluscum contagiosum virus
gagauacaaccgcugcua

SEQ ID NO: 370225 - RNA, 19 nt, Molluscum contagiosum virus
gagauacaaccgcugcuau

SEQ ID NO: 370226 - RNA, 19 nt, Molluscum contagiosum virus
gagaucaugggcgugcuca

SEQ ID NO: 370227 - RNA, 21 nt, Molluscum contagiosum virus
gagaucccuccgagacgucug

SEQ ID NO: 370228 - RNA, 14 nt, Molluscum contagiosum virus
gagaugauguaguc

SEQ ID NO: 370229 - RNA, 18 nt, Molluscum contagiosum virus
gagaugcgccgcaaaaug

SEQ ID NO: 370230 - RNA, 22 nt, Molluscum contagiosum virus
gagcaagcgcguucgcgcgugc

SEQ ID NO: 370231 - RNA, 14 nt, Molluscum contagiosum virus
gagcaaggccuggc

SEQ ID NO: 370232 - RNA, 20 nt, Molluscum contagiosum virus
gagcacaaagagacgcggcc

SEQ ID NO: 370233 - RNA, 17 nt, Molluscum contagiosum virus
gagcacauacacgcgca

SEQ ID NO: 370234 - RNA, 16 nt, Molluscum contagiosum virus
gagcaccgcguggcgc

SEQ ID NO: 370235 - RNA, 16 nt, Molluscum contagiosum virus
gagcacgccuccaaga

SEQ ID NO: 370236 - RNA, 17 nt, Molluscum contagiosum virus
gagcacgccuccaagaa

SEQ ID NO: 370237 - RNA, 18 nt, Molluscum contagiosum virus
gagcacgccugcacgcgc

SEQ ID NO: 370238 - RNA, 12 nt, Molluscum contagiosum virus
gagcacgcgcga

SEQ ID NO: 370239 - RNA, 15 nt, Molluscum contagiosum virus
gagcacguggacagc

SEQ ID NO: 370240 - RNA, 17 nt, Molluscum contagiosum virus
gagcacguggacagcau

SEQ ID NO: 370241 - RNA, 15 nt, Molluscum contagiosum virus
gagcacugcgcgcgc

SEQ ID NO: 370242 - RNA, 16 nt, Molluscum contagiosum virus
gagcacugcgcgcgcg

SEQ ID NO: 370243 - RNA, 18 nt, Molluscum contagiosum virus
gagcacuguacgcacgca

SEQ ID NO: 370244 - RNA, 16 nt, Molluscum contagiosum virus
gagcacuuccgcgcgc

SEQ ID NO: 370245 - RNA, 17 nt, Molluscum contagiosum virus
gagcagaggcaugcuuu

SEQ ID NO: 370246 - RNA, 18 nt, Molluscum contagiosum virus
gagcagauucacgagcuc

SEQ ID NO: 370247 - RNA, 21 nt, Molluscum contagiosum virus
gagcagcaccgcacgccagca

SEQ ID NO: 370248 - RNA, 22 nt, Molluscum contagiosum virus
gagcagcccgugcgccugccgc

SEQ ID NO: 370249 - RNA, 21 nt, Molluscum contagiosum virus
gagcagcugcugcgcacgugc

SEQ ID NO: 370250 - RNA, 13 nt, Molluscum contagiosum virus
gagcaggacgugc

SEQ ID NO: 370251 - RNA, 19 nt, Molluscum contagiosum virus
gagcaggacgugcacgugg

SEQ ID NO: 370252 - RNA, 18 nt, Molluscum contagiosum virus
gagcagggcuacgaguuc

SEQ ID NO: 370253 - RNA, 17 nt, Molluscum contagiosum virus
gagcaggucggccagca

SEQ ID NO: 370254 - RNA, 18 nt, Molluscum contagiosum virus
gagcagugccgccgcgca

SEQ ID NO: 370255 - RNA, 13 nt, Molluscum contagiosum virus
gagcagugccgcu

SEQ ID NO: 370256 - RNA, 16 nt, Molluscum contagiosum virus
cgccgcaacauaguca

SEQ ID NO: 370257 - RNA, 17 nt, Molluscum contagiosum virus
cgccgccaugcugcgcg

SEQ ID NO: 370258 - RNA, 15 nt, Molluscum contagiosum virus
cgccgcgcaccugga

SEQ ID NO: 370259 - RNA, 14 nt, Molluscum contagiosum virus
cgccgcgcgcgcca

SEQ ID NO: 370260 - RNA, 16 nt, Molluscum contagiosum virus
cgccgcgcgcgccagc

SEQ ID NO: 370261 - RNA, 16 nt, Molluscum contagiosum virus
cgccgcggcgguugcc

SEQ ID NO: 370262 - RNA, 14 nt, Molluscum contagiosum virus
cgccgcggcugccu

SEQ ID NO: 370263 - RNA, 19 nt, Molluscum contagiosum virus
cgccgcuccggucaccgcg

SEQ ID NO: 370264 - RNA, 17 nt, Molluscum contagiosum virus
cgccgcucgucgcugcg

SEQ ID NO: 370265 - RNA, 14 nt, Molluscum contagiosum virus
cgccgcugcuggaa

SEQ ID NO: 370266 - RNA, 16 nt, Molluscum contagiosum virus
cgccgcugucacgcga

SEQ ID NO: 370267 - RNA, 16 nt, Molluscum contagiosum virus
cgccggacagcucagc

SEQ ID NO: 370268 - RNA, 23 nt, Molluscum contagiosum virus
cgccggccagcgagucucgcgcg

SEQ ID NO: 370269 - RNA, 19 nt, Molluscum contagiosum virus
cgcggccguggcacugacg

SEQ ID NO: 370270 - RNA, 17 nt, Molluscum contagiosum virus
cgcggcguucccgcuca

SEQ ID NO: 370271 - RNA, 22 nt, Molluscum contagiosum virus
cgcggcucuggucgagaugcuc

SEQ ID NO: 370272 - RNA, 16 nt, Molluscum contagiosum virus
cgcgggagagcacuuc

SEQ ID NO: 370273 - RNA, 18 nt, Molluscum contagiosum virus
cgcgggcacgcagcucuu

SEQ ID NO: 370274 - RNA, 22 nt, Molluscum contagiosum virus
cgcgggccuguccgcgggcgca

SEQ ID NO: 370275 - RNA, 22 nt, Molluscum contagiosum virus
cgcgggccuguccgcgggcgcg

SEQ ID NO: 370276 - RNA, 21 nt, Molluscum contagiosum virus
cgcggggcccucgagcaaugc

SEQ ID NO: 370277 - RNA, 19 nt, Molluscum contagiosum virus
cgcgguccuguccgcggac

SEQ ID NO: 370278 - RNA, 18 nt, Molluscum contagiosum virus
cgcggucgcccgccgagc

SEQ ID NO: 370279 - RNA, 13 nt, Molluscum contagiosum virus
cgcggucgcggag

SEQ ID NO: 370280 - RNA, 14 nt, Molluscum contagiosum virus
cgcguacacgugca

SEQ ID NO: 370281 - RNA, 14 nt, Molluscum contagiosum virus
cgcguagcagcgcc

SEQ ID NO: 370282 - RNA, 17 nt, Molluscum contagiosum virus
cgcgucaagaucaaccg

SEQ ID NO: 370283 - RNA, 14 nt, Molluscum contagiosum virus
cgcguccacaaagg

SEQ ID NO: 370284 - RNA, 15 nt, Molluscum contagiosum virus
cgcguccaugcugau

SEQ ID NO: 370285 - RNA, 13 nt, Molluscum contagiosum virus
cgcguccgcgcag

SEQ ID NO: 370286 - RNA, 12 nt, Molluscum contagiosum virus
cgcgucgcgcag

SEQ ID NO: 370287 - RNA, 19 nt, Molluscum contagiosum virus
cgcgucgcggucgcggagc

SEQ ID NO: 370288 - RNA, 17 nt, Molluscum contagiosum virus
cgcgucuauccugucag

SEQ ID NO: 370289 - RNA, 16 nt, Molluscum contagiosum virus
cgcgugacacaccgcg

SEQ ID NO: 370290 - RNA, 23 nt, Molluscum contagiosum virus
cgcgugaggaggcggcacugcua

SEQ ID NO: 370291 - RNA, 17 nt, Molluscum contagiosum virus
cgcgugaguccgcggcg

SEQ ID NO: 370292 - RNA, 15 nt, Molluscum contagiosum virus
cgcgugccccgggaa

SEQ ID NO: 370293 - RNA, 14 nt, Molluscum contagiosum virus
cgcgugcgcgccag

SEQ ID NO: 370294 - RNA, 15 nt, Molluscum contagiosum virus
cgcgugcucgcgagc

SEQ ID NO: 370295 - RNA, 14 nt, Molluscum contagiosum virus
cgcgugcuguccua

SEQ ID NO: 370296 - RNA, 16 nt, Molluscum contagiosum virus
cgcgugucgcggagca

SEQ ID NO: 370297 - RNA, 18 nt, Molluscum contagiosum virus
cgcgugugguugcuugca

SEQ ID NO: 370298 - RNA, 15 nt, Molluscum contagiosum virus
cgcguucgcaaagac

SEQ ID NO: 370299 - RNA, 22 nt, Molluscum contagiosum virus
cgcguucuucguggcgcugggc

SEQ ID NO: 370300 - RNA, 20 nt, Molluscum contagiosum virus
cgcguuuuuucuugguugcc

SEQ ID NO: 370301 - RNA, 18 nt, Molluscum contagiosum virus
cgcuacccguugcugcgc

SEQ ID NO: 370302 - RNA, 19 nt, Molluscum contagiosum virus
cgcuaccgcaagcucaugg

SEQ ID NO: 370303 - RNA, 19 nt, Molluscum contagiosum virus
cgcuaccugguggagcacu

SEQ ID NO: 370304 - RNA, 22 nt, Molluscum contagiosum virus
cgcuacgacgacaugcacacgc

SEQ ID NO: 370305 - RNA, 23 nt, Molluscum contagiosum virus
cgcuacuugcuggcgcgcggaga

SEQ ID NO: 370306 - RNA, 12 nt, Molluscum contagiosum virus
cgcuagugcaga

SEQ ID NO: 370307 - RNA, 18 nt, Molluscum contagiosum virus
cgcucauccacgcggagg

SEQ ID NO: 370308 - RNA, 22 nt, Molluscum contagiosum virus
cgcucauggcgcgcaaccagcu

SEQ ID NO: 370309 - RNA, 23 nt, Molluscum contagiosum virus
cgcuccgacgcgguggugaaauc

SEQ ID NO: 370310 - RNA, 15 nt, Molluscum contagiosum virus
cgcuccuucucaggg

SEQ ID NO: 370311 - RNA, 18 nt, Molluscum contagiosum virus
cgcucggcguggugcugg

SEQ ID NO: 370312 - RNA, 16 nt, Molluscum contagiosum virus
cgcucuacgccagcga

SEQ ID NO: 370313 - RNA, 22 nt, Molluscum contagiosum virus
cgcugaucaccgaggagccgcg

SEQ ID NO: 370314 - RNA, 14 nt, Molluscum contagiosum virus
cgcugaugcuagcg

SEQ ID NO: 370315 - RNA, 15 nt, Molluscum contagiosum virus
cgcugcacaguucac

SEQ ID NO: 370316 - RNA, 20 nt, Molluscum contagiosum virus
cgcugccagagauccgcccg

SEQ ID NO: 370317 - RNA, 20 nt, Molluscum contagiosum virus
cgcugccuggugcacacaca

SEQ ID NO: 370318 - RNA, 16 nt, Molluscum contagiosum virus
cgcugcggacaagaca

SEQ ID NO: 370319 - RNA, 21 nt, Molluscum contagiosum virus
cgcugcuagagaaccugugcg

SEQ ID NO: 370320 - RNA, 18 nt, Molluscum contagiosum virus
cgcugcuauacgcgccag

SEQ ID NO: 370321 - RNA, 18 nt, Molluscum contagiosum virus
cgcugcuauuaccugaga

SEQ ID NO: 370322 - RNA, 16 nt, Molluscum contagiosum virus
cgcugcuccccgccag

SEQ ID NO: 370323 - RNA, 20 nt, Molluscum contagiosum virus
cgcugcucgacauuaacuga

SEQ ID NO: 370324 - RNA, 21 nt, Molluscum contagiosum virus
cgcugcucgcuugcccggagc

SEQ ID NO: 370325 - RNA, 12 nt, Molluscum contagiosum virus
cgcugcugcaca

SEQ ID NO: 370326 - RNA, 14 nt, Molluscum contagiosum virus
cgcugcugcacagc

SEQ ID NO: 370327 - RNA, 11 nt, Molluscum contagiosum virus
cgcugcugcgg

SEQ ID NO: 370328 - RNA, 16 nt, Molluscum contagiosum virus
cgcugcugcgugcgcg

SEQ ID NO: 370329 - RNA, 17 nt, Molluscum contagiosum virus
cgcugcugcucuuccag

SEQ ID NO: 370330 - RNA, 14 nt, Molluscum contagiosum virus
cgcugcugcugcaa

SEQ ID NO: 370331 - RNA, 19 nt, Molluscum contagiosum virus
cgcugcuguccuucaagaa

SEQ ID NO: 370332 - RNA, 18 nt, Molluscum contagiosum virus
cgcuggacuugcgcgagc

SEQ ID NO: 370333 - RNA, 16 nt, Molluscum contagiosum virus
cgcuggccgugcccgc

SEQ ID NO: 370334 - RNA, 15 nt, Molluscum contagiosum virus
cgcuggcgcuaccua

SEQ ID NO: 370335 - RNA, 21 nt, Molluscum contagiosum virus
cgcuggcgcucggcguggugc

SEQ ID NO: 370336 - RNA, 20 nt, Molluscum contagiosum virus
cgcuggcuucuuguugucug

SEQ ID NO: 370337 - RNA, 17 nt, Molluscum contagiosum virus
cgcugggccgcaugcac

SEQ ID NO: 370338 - RNA, 18 nt, Molluscum contagiosum virus
cgcugggccgcaugcacc

SEQ ID NO: 370339 - RNA, 21 nt, Molluscum contagiosum virus
cgcuggugaccuucaccauca

SEQ ID NO: 370340 - RNA, 12 nt, Molluscum contagiosum virus
cgcuggugcgaa

SEQ ID NO: 370341 - RNA, 19 nt, Molluscum contagiosum virus
cgcuggugcgaaauugcca

SEQ ID NO: 370342 - RNA, 14 nt, Molluscum contagiosum virus
cgcuggugugcacu

SEQ ID NO: 370343 - RNA, 16 nt, Molluscum contagiosum virus
cgcuguacaugccgca

SEQ ID NO: 370344 - RNA, 16 nt, Molluscum contagiosum virus
cgcuguacgugcugcc

SEQ ID NO: 370345 - RNA, 20 nt, Molluscum contagiosum virus
cgcuuagccaacagcgcaag

SEQ ID NO: 370346 - RNA, 13 nt, Molluscum contagiosum virus
cgcuucuagcucg

SEQ ID NO: 370347 - RNA, 15 nt, Molluscum contagiosum virus
cgcuugcacggggaa

SEQ ID NO: 370348 - RNA, 15 nt, Molluscum contagiosum virus
cgcuuggcgagcgcu

SEQ ID NO: 370349 - RNA, 17 nt, Molluscum contagiosum virus
cgcuugggcacugcuac

SEQ ID NO: 370350 - RNA, 16 nt, Molluscum contagiosum virus
cgcuuuuuuuguccug

SEQ ID NO: 370351 - RNA, 20 nt, Molluscum contagiosum virus
cggaagcgcccgugaugcac

SEQ ID NO: 370352 - RNA, 13 nt, Molluscum contagiosum virus
cggaaguggugcc

SEQ ID NO: 370353 - RNA, 14 nt, Molluscum contagiosum virus
cggacacuggcacc

SEQ ID NO: 370354 - RNA, 18 nt, Molluscum contagiosum virus
cggacagcaaacagccug

SEQ ID NO: 370355 - RNA, 22 nt, Molluscum contagiosum virus
cggacagugccuccgcggacgc

SEQ ID NO: 370356 - RNA, 16 nt, Molluscum contagiosum virus
cggacgcccuccucga

SEQ ID NO: 370357 - RNA, 19 nt, Molluscum contagiosum virus
cggacgcggugaccggagc

SEQ ID NO: 370358 - RNA, 17 nt, Molluscum contagiosum virus
cggacggcgcgcagcgc

SEQ ID NO: 370359 - RNA, 16 nt, Molluscum contagiosum virus
cggacgugcacgcacg

SEQ ID NO: 370360 - RNA, 13 nt, Molluscum contagiosum virus
cggacucgcgagc

SEQ ID NO: 370361 - RNA, 20 nt, Molluscum contagiosum virus
cggacuucgacgcgcggcag

SEQ ID NO: 370362 - RNA, 20 nt, Molluscum contagiosum virus
cggacuuuucgcgcgugcgc

SEQ ID NO: 370363 - RNA, 16 nt, Molluscum contagiosum virus
cggagaaagacaaaga

SEQ ID NO: 370364 - RNA, 18 nt, Molluscum contagiosum virus
cggagaagaacagcacga

SEQ ID NO: 370365 - RNA, 14 nt, Molluscum contagiosum virus
cggagaagugcucc

SEQ ID NO: 370366 - RNA, 23 nt, Molluscum contagiosum virus
cggagaagugcuccgcacgugga

SEQ ID NO: 370367 - RNA, 13 nt, Molluscum contagiosum virus
cggagacaccagc

SEQ ID NO: 370368 - RNA, 15 nt, Molluscum contagiosum virus
cggagacaccagcuc

SEQ ID NO: 370369 - RNA, 20 nt, Molluscum contagiosum virus
cggagaguuguuccacgacc

SEQ ID NO: 370370 - RNA, 22 nt, Molluscum contagiosum virus
cggagcggaucgugcuggagau

SEQ ID NO: 370371 - RNA, 13 nt, Molluscum contagiosum virus
cggagcuggccga

SEQ ID NO: 370372 - RNA, 13 nt, Molluscum contagiosum virus
cguacgagcaggc

SEQ ID NO: 370373 - RNA, 12 nt, Molluscum contagiosum virus
cguacgcggagg

SEQ ID NO: 370374 - RNA, 16 nt, Molluscum contagiosum virus
cguacguguccaugca

SEQ ID NO: 370375 - RNA, 16 nt, Molluscum contagiosum virus
cguagacgauuuugcc

SEQ ID NO: 370376 - RNA, 16 nt, Molluscum contagiosum virus
cguagccuagccauac

SEQ ID NO: 370377 - RNA, 13 nt, Molluscum contagiosum virus
cguagcgcgucuc

SEQ ID NO: 370378 - RNA, 14 nt, Molluscum contagiosum virus
cguauacuccaaaa

SEQ ID NO: 370379 - RNA, 16 nt, Molluscum contagiosum virus
cguauggaucuucuca

SEQ ID NO: 370380 - RNA, 15 nt, Molluscum contagiosum virus
cgucccggaaaaaga

SEQ ID NO: 370381 - RNA, 14 nt, Molluscum contagiosum virus
cguccgcacgcacg

SEQ ID NO: 370382 - RNA, 19 nt, Molluscum contagiosum virus
cguccgugcgcagggcaau

SEQ ID NO: 370383 - RNA, 22 nt, Molluscum contagiosum virus
cguccucucgugcgucgugaau

SEQ ID NO: 370384 - RNA, 21 nt, Molluscum contagiosum virus
cgucgaaguccgucacggaca

SEQ ID NO: 370385 - RNA, 15 nt, Molluscum contagiosum virus
cgucgcacaguucac

SEQ ID NO: 370386 - RNA, 21 nt, Molluscum contagiosum virus
cgucgcugcggacaagacaac

SEQ ID NO: 370387 - RNA, 20 nt, Molluscum contagiosum virus
cgucguccggaggcacgggc

SEQ ID NO: 370388 - RNA, 15 nt, Molluscum contagiosum virus
cgucgugcuguugcc

SEQ ID NO: 370389 - RNA, 20 nt, Molluscum contagiosum virus
cgucucaagacaagucacac

SEQ ID NO: 370390 - RNA, 18 nt, Molluscum contagiosum virus
cgucucucgaacaccgac

SEQ ID NO: 370391 - RNA, 14 nt, Molluscum contagiosum virus
cgucuucaccugca

SEQ ID NO: 370392 - RNA, 21 nt, Molluscum contagiosum virus
cgucuugacaggcgcgcaagu

SEQ ID NO: 370393 - RNA, 13 nt, Molluscum contagiosum virus
cgugacacuaccg

SEQ ID NO: 370394 - RNA, 20 nt, Molluscum contagiosum virus
cgugacagagugccuggcgc

SEQ ID NO: 370395 - RNA, 19 nt, Molluscum contagiosum virus
cgugacucggccgcggggc

SEQ ID NO: 370396 - RNA, 16 nt, Molluscum contagiosum virus
cgugagcgccuaccgc

SEQ ID NO: 370397 - RNA, 23 nt, Molluscum contagiosum virus
cgugaggaagaccuuggacacgu

SEQ ID NO: 370398 - RNA, 19 nt, Molluscum contagiosum virus
cgugcaccucccugugaac

SEQ ID NO: 370399 - RNA, 15 nt, Molluscum contagiosum virus
cgugcacgccgucuu

SEQ ID NO: 370400 - RNA, 17 nt, Molluscum contagiosum virus
cgugcacguccuccaau

SEQ ID NO: 370401 - RNA, 17 nt, Molluscum contagiosum virus
cgugcacugucuuuucc

SEQ ID NO: 370402 - RNA, 15 nt, Molluscum contagiosum virus
cgugcagacgcucaa

SEQ ID NO: 370403 - RNA, 22 nt, Molluscum contagiosum virus
cgugcagagcaaggcgagucaa

SEQ ID NO: 370404 - RNA, 17 nt, Molluscum contagiosum virus
cgugcaggaacgcgcgc

SEQ ID NO: 370405 - RNA, 12 nt, Molluscum contagiosum virus
cgugccauuucg

SEQ ID NO: 370406 - RNA, 15 nt, Molluscum contagiosum virus
cgugcccgucuuucc

SEQ ID NO: 370407 - RNA, 13 nt, Molluscum contagiosum virus
cgugccgccggcg

SEQ ID NO: 370408 - RNA, 19 nt, Molluscum contagiosum virus
cgugccgcggacgccggcg

SEQ ID NO: 370409 - RNA, 18 nt, Molluscum contagiosum virus
cgugccgcugcgcggagc

SEQ ID NO: 370410 - RNA, 18 nt, Molluscum contagiosum virus
cgugcgaugaacccgcau

SEQ ID NO: 370411 - RNA, 21 nt, Molluscum contagiosum virus
cgugcgcgagacuuguguuga

SEQ ID NO: 370412 - RNA, 14 nt, Molluscum contagiosum virus
cgugcgcugcgcgc

SEQ ID NO: 370413 - RNA, 17 nt, Molluscum contagiosum virus
cgugcggugacuugccg

SEQ ID NO: 370414 - RNA, 13 nt, Molluscum contagiosum virus
cgugcuacuacug

SEQ ID NO: 370415 - RNA, 20 nt, Molluscum contagiosum virus
cgugcuagcccgcaccugcg

SEQ ID NO: 370416 - RNA, 13 nt, Molluscum contagiosum virus
cgugcucacgcug

SEQ ID NO: 370417 - RNA, 16 nt, Molluscum contagiosum virus
cgugcucacgcugccc

SEQ ID NO: 370418 - RNA, 17 nt, Molluscum contagiosum virus
cgugcuccacgcgcagc

SEQ ID NO: 370419 - RNA, 20 nt, Molluscum contagiosum virus
cgugcucgguagcguggagc

SEQ ID NO: 370420 - RNA, 15 nt, Molluscum contagiosum virus
cgugcucguguuguu

SEQ ID NO: 370421 - RNA, 19 nt, Molluscum contagiosum virus
cgugcucugcuccgcggag

SEQ ID NO: 370422 - RNA, 20 nt, Molluscum contagiosum virus
cgugcucugcuccgcggagg

SEQ ID NO: 370423 - RNA, 16 nt, Molluscum contagiosum virus
cgugcugcgcuaccac

SEQ ID NO: 370424 - RNA, 19 nt, Molluscum contagiosum virus
cgugcugcgucacaagcac

SEQ ID NO: 370425 - RNA, 16 nt, Molluscum contagiosum virus
cgugcugcucaaggac

SEQ ID NO: 370426 - RNA, 14 nt, Molluscum contagiosum virus
cgugcugcucugcg

SEQ ID NO: 370427 - RNA, 13 nt, Molluscum contagiosum virus
cgugcugcugcgg

SEQ ID NO: 370428 - RNA, 19 nt, Molluscum contagiosum virus
cgugcuggagggcacgcug

SEQ ID NO: 370429 - RNA, 23 nt, Molluscum contagiosum virus
cgugcuggagggcacgcugcaca

SEQ ID NO: 370430 - RNA, 18 nt, Molluscum contagiosum virus
cgugcuggccagccucau

SEQ ID NO: 370431 - RNA, 19 nt, Molluscum contagiosum virus
cgugcuggccagccucauc

SEQ ID NO: 370432 - RNA, 14 nt, Molluscum contagiosum virus
cgugcuugcgcacg

SEQ ID NO: 370433 - RNA, 13 nt, Molluscum contagiosum virus
cguggaccucauc

SEQ ID NO: 370434 - RNA, 20 nt, Molluscum contagiosum virus
cguggacgagcgcuaccuga

SEQ ID NO: 370435 - RNA, 17 nt, Molluscum contagiosum virus
cguggacgaggccaacc

SEQ ID NO: 370436 - RNA, 16 nt, Molluscum contagiosum virus
cguggaggaaacaccc

SEQ ID NO: 370437 - RNA, 15 nt, Molluscum contagiosum virus
cguggaguccaugcc

SEQ ID NO: 370438 - RNA, 17 nt, Molluscum contagiosum virus
cguggaugaacaccauc

SEQ ID NO: 370439 - RNA, 23 nt, Molluscum contagiosum virus
cguggccagcuucaucaagcacg

SEQ ID NO: 370440 - RNA, 15 nt, Molluscum contagiosum virus
cguggcgaugucgcc

SEQ ID NO: 370441 - RNA, 21 nt, Molluscum contagiosum virus
cguggcgcgcgacgugugcuc

SEQ ID NO: 370442 - RNA, 22 nt, Molluscum contagiosum virus
cguggcgugcuuguagcgcaag

SEQ ID NO: 370443 - RNA, 19 nt, Molluscum contagiosum virus
cguggcuugcucggacaca

SEQ ID NO: 370444 - RNA, 14 nt, Molluscum contagiosum virus
cgugggcaccugca

SEQ ID NO: 370445 - RNA, 16 nt, Molluscum contagiosum virus
cgugggcgagcgcacg

SEQ ID NO: 370446 - RNA, 21 nt, Molluscum contagiosum virus
cguggucgcgcgcgcucugcc

SEQ ID NO: 370447 - RNA, 11 nt, Molluscum contagiosum virus
cguggugcugg

SEQ ID NO: 370448 - RNA, 22 nt, Molluscum contagiosum virus
cguggugcuggccaacacuacc

SEQ ID NO: 370449 - RNA, 20 nt, Molluscum contagiosum virus
cguguaagcccgcuaugaac

SEQ ID NO: 370450 - RNA, 18 nt, Molluscum contagiosum virus
cguguacgacgugcugcu

SEQ ID NO: 370451 - RNA, 22 nt, Molluscum contagiosum virus
cgugucuggagcccacguugcc

SEQ ID NO: 370452 - RNA, 21 nt, Molluscum contagiosum virus
cgugucugguguauccaggau

SEQ ID NO: 370453 - RNA, 17 nt, Molluscum contagiosum virus
cgugugcagcagguagg

SEQ ID NO: 370454 - RNA, 14 nt, Molluscum contagiosum virus
cgugugcgagcacg

SEQ ID NO: 370455 - RNA, 17 nt, Molluscum contagiosum virus
cgugugcguacugggag

SEQ ID NO: 370456 - RNA, 15 nt, Molluscum contagiosum virus
cgugugcgugacacg

SEQ ID NO: 370457 - RNA, 22 nt, Molluscum contagiosum virus
cguucacuugcgcgcgugccug

SEQ ID NO: 370458 - RNA, 14 nt, Molluscum contagiosum virus
cguucgcgaccugg

SEQ ID NO: 370459 - RNA, 17 nt, Molluscum contagiosum virus
cguugcacgugcgugcc

SEQ ID NO: 370460 - RNA, 13 nt, Molluscum contagiosum virus
cguugcagcagca

SEQ ID NO: 370461 - RNA, 15 nt, Molluscum contagiosum virus
cguugccugcacuga

SEQ ID NO: 370462 - RNA, 16 nt, Molluscum contagiosum virus
cguugcugcugcgcgc

SEQ ID NO: 370463 - RNA, 22 nt, Molluscum contagiosum virus
cguugguaacaagagcuuacua

SEQ ID NO: 370464 - RNA, 22 nt, Molluscum contagiosum virus
cguuugccaggcaacgcacaaa

SEQ ID NO: 370465 - RNA, 16 nt, Molluscum contagiosum virus
cguuuugcacuuguca

SEQ ID NO: 370466 - RNA, 17 nt, Molluscum contagiosum virus
cguuuugcacuugucag

SEQ ID NO: 370467 - RNA, 14 nt, Molluscum contagiosum virus
cguuuuuucuuggu

SEQ ID NO: 370468 - RNA, 23 nt, Molluscum contagiosum virus
cuaaggagcgagaagacauugcc

SEQ ID NO: 370469 - RNA, 18 nt, Molluscum contagiosum virus
cuacaagcagccgcagua

SEQ ID NO: 370470 - RNA, 17 nt, Molluscum contagiosum virus
cuacaagcggugcagcu

SEQ ID NO: 370471 - RNA, 18 nt, Molluscum contagiosum virus
cuacaagcggugcagcua

SEQ ID NO: 370472 - RNA, 15 nt, Molluscum contagiosum virus
cuacaccgagaucau

SEQ ID NO: 370473 - RNA, 14 nt, Molluscum contagiosum virus
cuacacgcacgacc

SEQ ID NO: 370474 - RNA, 16 nt, Molluscum contagiosum virus
cuacaucgacaagcac

SEQ ID NO: 370475 - RNA, 19 nt, Molluscum contagiosum virus
cacguuuuucgcgggcgcc

SEQ ID NO: 370476 - RNA, 13 nt, Molluscum contagiosum virus
cacuacugcucca

SEQ ID NO: 370477 - RNA, 12 nt, Molluscum contagiosum virus
cacuacugggag

SEQ ID NO: 370478 - RNA, 16 nt, Molluscum contagiosum virus
cacuagcgcaggcagu

SEQ ID NO: 370479 - RNA, 17 nt, Molluscum contagiosum virus
cacuagcgcaggcaguu

SEQ ID NO: 370480 - RNA, 18 nt, Molluscum contagiosum virus
cacuccgcacagcuucac

SEQ ID NO: 370481 - RNA, 16 nt, Molluscum contagiosum virus
cacucgaccgucuuca

SEQ ID NO: 370482 - RNA, 22 nt, Molluscum contagiosum virus
cacucgcgaacuacgagcgcac

SEQ ID NO: 370483 - RNA, 23 nt, Molluscum contagiosum virus
cacucgggugcccggacagagcc

SEQ ID NO: 370484 - RNA, 17 nt, Molluscum contagiosum virus
cacucuuucgaacaggu

SEQ ID NO: 370485 - RNA, 16 nt, Molluscum contagiosum virus
cacugcagaaacagcc

SEQ ID NO: 370486 - RNA, 23 nt, Molluscum contagiosum virus
cacugccacggcugcaagcacaa

SEQ ID NO: 370487 - RNA, 18 nt, Molluscum contagiosum virus
cacugcggcaacgagcac

SEQ ID NO: 370488 - RNA, 13 nt, Molluscum contagiosum virus
cacugcguacaca

SEQ ID NO: 370489 - RNA, 17 nt, Molluscum contagiosum virus
cacuggccugcaaacgc

SEQ ID NO: 370490 - RNA, 16 nt, Molluscum contagiosum virus
cacugggucuguucac

SEQ ID NO: 370491 - RNA, 19 nt, Molluscum contagiosum virus
cacugucguaacaauggac

SEQ ID NO: 370492 - RNA, 14 nt, Molluscum contagiosum virus
cacuguugcuuccg

SEQ ID NO: 370493 - RNA, 13 nt, Molluscum contagiosum virus
cacuuccaguaug

SEQ ID NO: 370494 - RNA, 21 nt, Molluscum contagiosum virus
cacuuccgcgcgcuaggggug

SEQ ID NO: 370495 - RNA, 21 nt, Molluscum contagiosum virus
cacuucucgccgcaccacaac

SEQ ID NO: 370496 - RNA, 20 nt, Molluscum contagiosum virus
cacuugcgcgcgugccugug

SEQ ID NO: 370497 - RNA, 16 nt, Molluscum contagiosum virus
cagaaaacgcacuguc

SEQ ID NO: 370498 - RNA, 17 nt, Molluscum contagiosum virus
cagaaaacgcacugucg

SEQ ID NO: 370499 - RNA, 12 nt, Molluscum contagiosum virus
cagaaagccaac

SEQ ID NO: 370500 - RNA, 17 nt, Molluscum contagiosum virus
cagaaauacaccggcuu

SEQ ID NO: 370501 - RNA, 13 nt, Molluscum contagiosum virus
cagaacagcacgu

SEQ ID NO: 370502 - RNA, 11 nt, Molluscum contagiosum virus
cagaagccaac

SEQ ID NO: 370503 - RNA, 20 nt, Molluscum contagiosum virus
cagaagcccugagaaggagc

SEQ ID NO: 370504 - RNA, 15 nt, Molluscum contagiosum virus
cagaagcgagagcgc

SEQ ID NO: 370505 - RNA, 22 nt, Molluscum contagiosum virus
cagaagugaaauuucagcgaug

SEQ ID NO: 370506 - RNA, 15 nt, Molluscum contagiosum virus
cagaaucgcuuugcc

SEQ ID NO: 370507 - RNA, 13 nt, Molluscum contagiosum virus
cagaccccugaaa

SEQ ID NO: 370508 - RNA, 18 nt, Molluscum contagiosum virus
cagacccgaaagcugccc

SEQ ID NO: 370509 - RNA, 17 nt, Molluscum contagiosum virus
cagacguaugcguagua

SEQ ID NO: 370510 - RNA, 21 nt, Molluscum contagiosum virus
cagacguggugcucguggaaa

SEQ ID NO: 370511 - RNA, 21 nt, Molluscum contagiosum virus
cagagaaaucccaagagccau

SEQ ID NO: 370512 - RNA, 22 nt, Molluscum contagiosum virus
cagagaaaucccaagagccaug

SEQ ID NO: 370513 - RNA, 14 nt, Molluscum contagiosum virus
cagagaagugcucc

SEQ ID NO: 370514 - RNA, 15 nt, Molluscum contagiosum virus
cagagaagugcuccg

SEQ ID NO: 370515 - RNA, 19 nt, Molluscum contagiosum virus
cagagaccgucaaccugcu

SEQ ID NO: 370516 - RNA, 19 nt, Molluscum contagiosum virus
cagagcaguuccggucuca

SEQ ID NO: 370517 - RNA, 17 nt, Molluscum contagiosum virus
cagagcauuagcagcga

SEQ ID NO: 370518 - RNA, 18 nt, Molluscum contagiosum virus
cagagccccguucacuug

SEQ ID NO: 370519 - RNA, 19 nt, Molluscum contagiosum virus
cagagcuccccgcgcgcag

SEQ ID NO: 370520 - RNA, 13 nt, Molluscum contagiosum virus
cagaggacaccgc

SEQ ID NO: 370521 - RNA, 19 nt, Molluscum contagiosum virus
cagaggauacccgugaucu

SEQ ID NO: 370522 - RNA, 22 nt, Molluscum contagiosum virus
cagaggcccgucuccacaaaga

SEQ ID NO: 370523 - RNA, 15 nt, Molluscum contagiosum virus
cagagggacaacuca

SEQ ID NO: 370524 - RNA, 16 nt, Molluscum contagiosum virus
cagagugacgcugcaa

SEQ ID NO: 370525 - RNA, 22 nt, Molluscum contagiosum virus
cagauaguuuggacgagcugcu

SEQ ID NO: 370526 - RNA, 23 nt, Molluscum contagiosum virus
cagauaguuuggacgagcugcuu

SEQ ID NO: 370527 - RNA, 15 nt, Molluscum contagiosum virus
cagcaaaagcuuuuu

SEQ ID NO: 370528 - RNA, 19 nt, Molluscum contagiosum virus
cagcaaacugugcuccuga

SEQ ID NO: 370529 - RNA, 23 nt, Molluscum contagiosum virus
cagcaaacugugcuccugaggaa

SEQ ID NO: 370530 - RNA, 22 nt, Molluscum contagiosum virus
cagcacaccgucgcguggugcu

SEQ ID NO: 370531 - RNA, 12 nt, Molluscum contagiosum virus
cagcacugcgcc

SEQ ID NO: 370532 - RNA, 15 nt, Molluscum contagiosum virus
cagcagaccaagaag

SEQ ID NO: 370533 - RNA, 23 nt, Molluscum contagiosum virus
cagcagcacaggugcguaaugcu

SEQ ID NO: 370534 - RNA, 15 nt, Molluscum contagiosum virus
cagcagccucguuca

SEQ ID NO: 370535 - RNA, 21 nt, Molluscum contagiosum virus
cagcagcgcgacuagccugug

SEQ ID NO: 370536 - RNA, 20 nt, Molluscum contagiosum virus
cagcagcggucucggcagca

SEQ ID NO: 370537 - RNA, 15 nt, Molluscum contagiosum virus
cagcagcuccuccac

SEQ ID NO: 370538 - RNA, 22 nt, Molluscum contagiosum virus
cagcagcuccugguaguugcag

SEQ ID NO: 370539 - RNA, 12 nt, Molluscum contagiosum virus
cagcaggaugcu

SEQ ID NO: 370540 - RNA, 20 nt, Molluscum contagiosum virus
cagcaggugcacgugcugca

SEQ ID NO: 370541 - RNA, 16 nt, Molluscum contagiosum virus
cagcagguugaagcuc

SEQ ID NO: 370542 - RNA, 20 nt, Molluscum contagiosum virus
cagcagucaguuccgcggcg

SEQ ID NO: 370543 - RNA, 15 nt, Molluscum contagiosum virus
cagcauccuggaguu

SEQ ID NO: 370544 - RNA, 16 nt, Molluscum contagiosum virus
cagcaugcgugcaaca

SEQ ID NO: 370545 - RNA, 17 nt, Molluscum contagiosum virus
cagcauucccggcgcgc

SEQ ID NO: 370546 - RNA, 18 nt, Molluscum contagiosum virus
cagccaugaggacagcuu

SEQ ID NO: 370547 - RNA, 11 nt, Molluscum contagiosum virus
cagccaugugu

SEQ ID NO: 370548 - RNA, 12 nt, Molluscum contagiosum virus
cagccauguguc

SEQ ID NO: 370549 - RNA, 20 nt, Molluscum contagiosum virus
cagcccacgugccagcucau

SEQ ID NO: 370550 - RNA, 13 nt, Molluscum contagiosum virus
cagcccgacuucu

SEQ ID NO: 370551 - RNA, 23 nt, Molluscum contagiosum virus
cagcccgcggugcgcacaugccg

SEQ ID NO: 370552 - RNA, 21 nt, Molluscum contagiosum virus
cagcccgucggccacagugaa

SEQ ID NO: 370553 - RNA, 18 nt, Molluscum contagiosum virus
cagcccuggacgacguaa

SEQ ID NO: 370554 - RNA, 21 nt, Molluscum contagiosum virus
cagccgcggcgcccggugcca

SEQ ID NO: 370555 - RNA, 18 nt, Molluscum contagiosum virus
cagccgcugcugcugcaa

SEQ ID NO: 370556 - RNA, 14 nt, Molluscum contagiosum virus
cagccguggagucc

SEQ ID NO: 370557 - RNA, 12 nt, Molluscum contagiosum virus
cagcgagaucaa

SEQ ID NO: 370558 - RNA, 21 nt, Molluscum contagiosum virus
cagcgagugauccuugccaag

SEQ ID NO: 370559 - RNA, 16 nt, Molluscum contagiosum virus
cagcgccagccugcug

SEQ ID NO: 370560 - RNA, 14 nt, Molluscum contagiosum virus
cagcgcgacuagcc

SEQ ID NO: 370561 - RNA, 23 nt, Molluscum contagiosum virus
cagcgcgagcugugcauugcguc

SEQ ID NO: 370562 - RNA, 12 nt, Molluscum contagiosum virus
cagcgcgcgcac

SEQ ID NO: 370563 - RNA, 13 nt, Molluscum contagiosum virus
cagcgcgcggaag

SEQ ID NO: 370564 - RNA, 12 nt, Molluscum contagiosum virus
cagcgcgcggcg

SEQ ID NO: 370565 - RNA, 22 nt, Molluscum contagiosum virus
cagcgcuagccccagcaccagg

SEQ ID NO: 370566 - RNA, 18 nt, Molluscum contagiosum virus
cagcggaagaaacagcca

SEQ ID NO: 370567 - RNA, 23 nt, Molluscum contagiosum virus
cagcggaagaaacagccaugugu

SEQ ID NO: 370568 - RNA, 21 nt, Molluscum contagiosum virus
cagcggacguggucgcgcgcg

SEQ ID NO: 370569 - RNA, 19 nt, Molluscum contagiosum virus
cagcggcaaaggcccgcga

SEQ ID NO: 370570 - RNA, 18 nt, Molluscum contagiosum virus
cagcggcugcccgcggag

SEQ ID NO: 370571 - RNA, 18 nt, Molluscum contagiosum virus
cagcgucgcgcgccgugc

SEQ ID NO: 370572 - RNA, 13 nt, Molluscum contagiosum virus
cagcgucgcggag

SEQ ID NO: 370573 - RNA, 17 nt, Molluscum contagiosum virus
cagcgucgcggagcgcg

SEQ ID NO: 370574 - RNA, 22 nt, Molluscum contagiosum virus
cagcgugcgcaccagcugcaaa

SEQ ID NO: 370575 - RNA, 23 nt, Molluscum contagiosum virus
cagcgugcgcgggcacgccgcag

SEQ ID NO: 370576 - RNA, 14 nt, Molluscum contagiosum virus
cagcguuccaggaa

SEQ ID NO: 370577 - RNA, 18 nt, Molluscum contagiosum virus
cagcucaagacgcugcug

SEQ ID NO: 370578 - RNA, 14 nt, Molluscum contagiosum virus
cagcucaagcugcu

SEQ ID NO: 370579 - RNA, 22 nt, Molluscum contagiosum virus
cagcucagcaggcuguguucca

SEQ ID NO: 370580 - RNA, 23 nt, Molluscum contagiosum virus
cagcuccgccgggaauaccggag

SEQ ID NO: 370581 - RNA, 22 nt, Molluscum contagiosum virus
cagcuccuucuucaaguaccug

SEQ ID NO: 370582 - RNA, 21 nt, Molluscum contagiosum virus
cagcucgacgccauugugaag

SEQ ID NO: 370583 - RNA, 18 nt, Molluscum contagiosum virus
cagcucgcgccgccgcgc

SEQ ID NO: 370584 - RNA, 21 nt, Molluscum contagiosum virus
cagcucggcgagagcgcgcag

SEQ ID NO: 370585 - RNA, 14 nt, Molluscum contagiosum virus
cagcucggguucca

SEQ ID NO: 370586 - RNA, 18 nt, Molluscum contagiosum virus
cagcugcaggaccugcug

SEQ ID NO: 370587 - RNA, 17 nt, Molluscum contagiosum virus
cagcuggcuacgcugga

SEQ ID NO: 370588 - RNA, 13 nt, Molluscum contagiosum virus
cagcuucugcucg

SEQ ID NO: 370589 - RNA, 13 nt, Molluscum contagiosum virus
cagcuugcugcug

SEQ ID NO: 370590 - RNA, 15 nt, Molluscum contagiosum virus
caggaacaucugcaa

SEQ ID NO: 370591 - RNA, 19 nt, Molluscum contagiosum virus
caggaacgaggaaaggcac

SEQ ID NO: 370592 - RNA, 14 nt, Molluscum contagiosum virus
caggaacgccgcca

SEQ ID NO: 370593 - RNA, 19 nt, Molluscum contagiosum virus
caggaagacgcauagucau

SEQ ID NO: 370594 - RNA, 14 nt, Molluscum contagiosum virus
caggaccugcuggu

SEQ ID NO: 370595 - RNA, 16 nt, Molluscum contagiosum virus
caggacuggcaccugc

SEQ ID NO: 370596 - RNA, 15 nt, Molluscum contagiosum virus
caggagaacuacaaa

SEQ ID NO: 370597 - RNA, 22 nt, Molluscum contagiosum virus
caggagaacuacaaaacugaau

SEQ ID NO: 370598 - RNA, 20 nt, Molluscum contagiosum virus
caggaggaccgcgagcgcau

SEQ ID NO: 370599 - RNA, 22 nt, Molluscum contagiosum virus
caggaucggagcgcagcugccg

SEQ ID NO: 370600 - RNA, 14 nt, Molluscum contagiosum virus
caggauggcgcuga

SEQ ID NO: 370601 - RNA, 17 nt, Molluscum contagiosum virus
caggcacacgcagugcc

SEQ ID NO: 370602 - RNA, 21 nt, Molluscum contagiosum virus
caggcagugccgccgcgcgcg

SEQ ID NO: 370603 - RNA, 14 nt, Molluscum contagiosum virus
caggcaugcaaggc

SEQ ID NO: 370604 - RNA, 13 nt, Molluscum contagiosum virus
caggccgcggcag

SEQ ID NO: 370605 - RNA, 20 nt, Molluscum contagiosum virus
caggcgauaggacaugacug

SEQ ID NO: 370606 - RNA, 20 nt, Molluscum contagiosum virus
caggcgcgaacucgcggcag

SEQ ID NO: 370607 - RNA, 20 nt, Molluscum contagiosum virus
caggcgcggucgcccgccga

SEQ ID NO: 370608 - RNA, 20 nt, Molluscum contagiosum virus
caggcggccgcguugcagca

SEQ ID NO: 370609 - RNA, 22 nt, Molluscum contagiosum virus
caggcggucuuccagcacugcg

SEQ ID NO: 370610 - RNA, 14 nt, Molluscum contagiosum virus
caggcggugggcgc

SEQ ID NO: 370611 - RNA, 19 nt, Molluscum contagiosum virus
caggcggugggcgccgcgg

SEQ ID NO: 370612 - RNA, 14 nt, Molluscum contagiosum virus
cagggagcugcgga

SEQ ID NO: 370613 - RNA, 18 nt, Molluscum contagiosum virus
cagggagcugcggacgcg

SEQ ID NO: 370614 - RNA, 17 nt, Molluscum contagiosum virus
caggggccacaagcacg

SEQ ID NO: 370615 - RNA, 18 nt, Molluscum contagiosum virus
caggggccacaagcacgc

SEQ ID NO: 370616 - RNA, 20 nt, Molluscum contagiosum virus
cagguacguguccacuccug

SEQ ID NO: 370617 - RNA, 14 nt, Molluscum contagiosum virus
cagguaguggucca

SEQ ID NO: 370618 - RNA, 20 nt, Molluscum contagiosum virus
cagguagugguccaccagcu

SEQ ID NO: 370619 - RNA, 21 nt, Molluscum contagiosum virus
cagguagugguccaccagcug

SEQ ID NO: 370620 - RNA, 22 nt, Molluscum contagiosum virus
caggucgaggagggcguccgua

SEQ ID NO: 370621 - RNA, 18 nt, Molluscum contagiosum virus
caggugcacgugcugcag

SEQ ID NO: 370622 - RNA, 17 nt, Molluscum contagiosum virus
caggugcguaaugcugg

SEQ ID NO: 370623 - RNA, 22 nt, Molluscum contagiosum virus
caggugcguaaugcuggcgcgu

SEQ ID NO: 370624 - RNA, 20 nt, Molluscum contagiosum virus
caguaacaccgccaaauacc

SEQ ID NO: 370625 - RNA, 19 nt, Molluscum contagiosum virus
caguacgacaaaggcauuu

SEQ ID NO: 370626 - RNA, 14 nt, Molluscum contagiosum virus
caguaguugcucua

SEQ ID NO: 370627 - RNA, 18 nt, Molluscum contagiosum virus
cagucagcggcgugcugc

SEQ ID NO: 370628 - RNA, 17 nt, Molluscum contagiosum virus
cagucgcaguacccgag

SEQ ID NO: 370629 - RNA, 17 nt, Molluscum contagiosum virus
cagucucgaugugacaa

SEQ ID NO: 370630 - RNA, 16 nt, Molluscum contagiosum virus
cagugcgugcacuguc

SEQ ID NO: 370631 - RNA, 10 nt, Molluscum contagiosum virus
cagugcucuu

SEQ ID NO: 370632 - RNA, 20 nt, Molluscum contagiosum virus
cagugcucuuuaguacaacg

SEQ ID NO: 370633 - RNA, 14 nt, Molluscum contagiosum virus
cagugugaugccgc

SEQ ID NO: 370634 - RNA, 15 nt, Molluscum contagiosum virus
caguuccggucucau

SEQ ID NO: 370635 - RNA, 15 nt, Molluscum contagiosum virus
cauacacuuccugcu

SEQ ID NO: 370636 - RNA, 16 nt, Molluscum contagiosum virus
cauagcaagaugugaa

SEQ ID NO: 370637 - RNA, 23 nt, Molluscum contagiosum virus
caucagcgcggaggcgcuaccuc

SEQ ID NO: 370638 - RNA, 15 nt, Molluscum contagiosum virus
caucaucgagcugca

SEQ ID NO: 370639 - RNA, 16 nt, Molluscum contagiosum virus
caucaugagccagucu

SEQ ID NO: 370640 - RNA, 19 nt, Molluscum contagiosum virus
cauccccaacauccugcca

SEQ ID NO: 370641 - RNA, 15 nt, Molluscum contagiosum virus
cauccggcacgcaca

SEQ ID NO: 370642 - RNA, 15 nt, Molluscum contagiosum virus
cauccucaaccgcug

SEQ ID NO: 370643 - RNA, 14 nt, Molluscum contagiosum virus
cauccuccacgcug

SEQ ID NO: 370644 - RNA, 21 nt, Molluscum contagiosum virus
cauccuggggaaccgcugcuu

SEQ ID NO: 370645 - RNA, 15 nt, Molluscum contagiosum virus
caucgacgagcacga

SEQ ID NO: 370646 - RNA, 22 nt, Molluscum contagiosum virus
caucgagaugcucaagcacugc

SEQ ID NO: 370647 - RNA, 19 nt, Molluscum contagiosum virus
caucgcaguucggcgacac

SEQ ID NO: 370648 - RNA, 21 nt, Molluscum contagiosum virus
caucggagagcccggacacgu

SEQ ID NO: 370649 - RNA, 12 nt, Molluscum contagiosum virus
caucgugcucuu

SEQ ID NO: 370650 - RNA, 13 nt, Molluscum contagiosum virus
caucguggcgcgc

SEQ ID NO: 370651 - RNA, 16 nt, Molluscum contagiosum virus
caucuacugcgacauc

SEQ ID NO: 370652 - RNA, 22 nt, Molluscum contagiosum virus
caucugccucguggaacaaaga

SEQ ID NO: 370653 - RNA, 17 nt, Molluscum contagiosum virus
caucugcgcgugcuguc

SEQ ID NO: 370654 - RNA, 20 nt, Molluscum contagiosum virus
caucuuuuuuaugcacuuuc

SEQ ID NO: 370655 - RNA, 21 nt, Molluscum contagiosum virus
caucuuuuuuaugcacuuuca

SEQ ID NO: 370656 - RNA, 19 nt, Molluscum contagiosum virus
caugaacucgcugcugcuc

SEQ ID NO: 370657 - RNA, 16 nt, Molluscum contagiosum virus
caugcacacgcaccgc

SEQ ID NO: 370658 - RNA, 12 nt, Molluscum contagiosum virus
caugcacacuca

SEQ ID NO: 370659 - RNA, 14 nt, Molluscum contagiosum virus
caugcacagcugcu

SEQ ID NO: 370660 - RNA, 14 nt, Molluscum contagiosum virus
caugcaggccgaga

SEQ ID NO: 370661 - RNA, 11 nt, Molluscum contagiosum virus
caugcagucac

SEQ ID NO: 370662 - RNA, 22 nt, Molluscum contagiosum virus
caugccuccguuucccgcggcg

SEQ ID NO: 370663 - RNA, 15 nt, Molluscum contagiosum virus
caugcgcaagcagcu

SEQ ID NO: 370664 - RNA, 19 nt, Molluscum contagiosum virus
caugcgcaagcagcucggc

SEQ ID NO: 370665 - RNA, 16 nt, Molluscum contagiosum virus
caugcgcacagcacuu

SEQ ID NO: 370666 - RNA, 15 nt, Molluscum contagiosum virus
caugcgccugcacuu

SEQ ID NO: 370667 - RNA, 16 nt, Molluscum contagiosum virus
caugcgccugcacuuc

SEQ ID NO: 370668 - RNA, 14 nt, Molluscum contagiosum virus
caugcgcgcagugc

SEQ ID NO: 370669 - RNA, 14 nt, Molluscum contagiosum virus
caugcgcgccgcgc

SEQ ID NO: 370670 - RNA, 15 nt, Molluscum contagiosum virus
caugcgcgcgcagca

SEQ ID NO: 370671 - RNA, 16 nt, Molluscum contagiosum virus
caugcgcgcgcagcag

SEQ ID NO: 370672 - RNA, 22 nt, Molluscum contagiosum virus
caugcgcgcgcgauugcguguu

SEQ ID NO: 370673 - RNA, 22 nt, Molluscum contagiosum virus
caugcgcguggcucgcgaccgc

SEQ ID NO: 370674 - RNA, 18 nt, Molluscum contagiosum virus
caugcgcuugcggucgcg

SEQ ID NO: 370675 - RNA, 17 nt, Molluscum contagiosum virus
caugcucgacgugaucg

SEQ ID NO: 370676 - RNA, 17 nt, Molluscum contagiosum virus
caugcugcccgcgcgcg

SEQ ID NO: 370677 - RNA, 17 nt, Molluscum contagiosum virus
caugcugcgcgagcgcg

SEQ ID NO: 370678 - RNA, 14 nt, Molluscum contagiosum virus
caugcuguaugucu

SEQ ID NO: 370679 - RNA, 15 nt, Molluscum contagiosum virus
cauggaaagcuucuc

SEQ ID NO: 370680 - RNA, 13 nt, Molluscum contagiosum virus
cauggacaugcuc

SEQ ID NO: 370681 - RNA, 22 nt, Molluscum contagiosum virus
cauggaggacggcgcgggcgcg

SEQ ID NO: 370682 - RNA, 21 nt, Molluscum contagiosum virus
cauggaggccaacuaccuggg

SEQ ID NO: 370683 - RNA, 18 nt, Molluscum contagiosum virus
cauggaggcgcuagugca

SEQ ID NO: 370684 - RNA, 22 nt, Molluscum contagiosum virus
cauggcucccgcacgcaccgcg

SEQ ID NO: 370685 - RNA, 17 nt, Molluscum contagiosum virus
caugggcaaggacaucu

SEQ ID NO: 370686 - RNA, 22 nt, Molluscum contagiosum virus
caugggcucgggcaagaccauc

SEQ ID NO: 370687 - RNA, 20 nt, Molluscum contagiosum virus
caugguugugcuuguucucu

SEQ ID NO: 370688 - RNA, 21 nt, Molluscum contagiosum virus
caugguugugcuuguucucuu

SEQ ID NO: 370689 - RNA, 20 nt, Molluscum contagiosum virus
cauguccuuggcggugcgca

SEQ ID NO: 370690 - RNA, 21 nt, Molluscum contagiosum virus
caugucgaacaccuccugcuu

SEQ ID NO: 370691 - RNA, 21 nt, Molluscum contagiosum virus
caugucgagcccugauguucc

SEQ ID NO: 370692 - RNA, 17 nt, Molluscum contagiosum virus
caugugcgagaacuggc

SEQ ID NO: 370693 - RNA, 18 nt, Molluscum contagiosum virus
caugugcgagaacuggcg

SEQ ID NO: 370694 - RNA, 14 nt, Molluscum contagiosum virus
caugugcgugcacc

SEQ ID NO: 370695 - RNA, 21 nt, Molluscum contagiosum virus
caugugcgugcaccucaagaa

SEQ ID NO: 370696 - RNA, 10 nt, Molluscum contagiosum virus
cauguucucu

SEQ ID NO: 370697 - RNA, 18 nt, Molluscum contagiosum virus
cauucccguggaccucau

SEQ ID NO: 370698 - RNA, 22 nt, Molluscum contagiosum virus
cauucgaugacagcaucgggcu

SEQ ID NO: 370699 - RNA, 22 nt, Molluscum contagiosum virus
cauugcgucuuacugcugcaau

SEQ ID NO: 370700 - RNA, 23 nt, Molluscum contagiosum virus
cauuggcauccggcacgcacaaa

SEQ ID NO: 370701 - RNA, 18 nt, Molluscum contagiosum virus
cauuucgccuuguucaca

SEQ ID NO: 370702 - RNA, 22 nt, Molluscum contagiosum virus
cauuuuuguuucgaaguuucac

SEQ ID NO: 370703 - RNA, 18 nt, Molluscum contagiosum virus
ccaacaaccacucuuuca

SEQ ID NO: 370704 - RNA, 19 nt, Molluscum contagiosum virus
ccaacacuaccacagccau

SEQ ID NO: 370705 - RNA, 16 nt, Molluscum contagiosum virus
ccaacagcagcuggcg

SEQ ID NO: 370706 - RNA, 23 nt, Molluscum contagiosum virus
ccaaccaccacguggaccugauu

SEQ ID NO: 370707 - RNA, 15 nt, Molluscum contagiosum virus
ccaacgauggcgugg

SEQ ID NO: 370708 - RNA, 20 nt, Molluscum contagiosum virus
ccaacguuuucggcuuugac

SEQ ID NO: 370709 - RNA, 20 nt, Molluscum contagiosum virus
ccaacucugugaccugcgcc

SEQ ID NO: 370710 - RNA, 18 nt, Molluscum contagiosum virus
ccaagaggacgagcugcu

SEQ ID NO: 370711 - RNA, 13 nt, Molluscum contagiosum virus
ccaagccgugacg

SEQ ID NO: 370712 - RNA, 17 nt, Molluscum contagiosum virus
ccaaggcgcugaaggca

SEQ ID NO: 370713 - RNA, 15 nt, Molluscum contagiosum virus
ccaaggucuucagga

SEQ ID NO: 370714 - RNA, 19 nt, Molluscum contagiosum virus
ccaaggugaacgaccucaa

SEQ ID NO: 370715 - RNA, 17 nt, Molluscum contagiosum virus
ccacaaagcccuccuga

SEQ ID NO: 370716 - RNA, 18 nt, Molluscum contagiosum virus
ccacaagcaguaccugcu

SEQ ID NO: 370717 - RNA, 16 nt, Molluscum contagiosum virus
ccacagucggugccag

SEQ ID NO: 370718 - RNA, 18 nt, Molluscum contagiosum virus
ccaccacguggaccugau

SEQ ID NO: 370719 - RNA, 15 nt, Molluscum contagiosum virus
ccaccagguacuccu

SEQ ID NO: 370720 - RNA, 19 nt, Molluscum contagiosum virus
ccaccgcgcaggaccguca

SEQ ID NO: 370721 - RNA, 14 nt, Molluscum contagiosum virus
ccaccgcggcgcgg

SEQ ID NO: 370722 - RNA, 13 nt, Molluscum contagiosum virus
ccacgagcgccgc

SEQ ID NO: 370723 - RNA, 12 nt, Molluscum contagiosum virus
ccacgaucuucu

SEQ ID NO: 370724 - RNA, 15 nt, Molluscum contagiosum virus
ccacgcgcgugagca

SEQ ID NO: 370725 - RNA, 18 nt, Molluscum contagiosum virus
ccacgcgugcgcgccagg

SEQ ID NO: 370726 - RNA, 16 nt, Molluscum contagiosum virus
ccacgcuugcacgggg

SEQ ID NO: 370727 - RNA, 18 nt, Molluscum contagiosum virus
ccacgcuugcacggggaa

SEQ ID NO: 370728 - RNA, 13 nt, Molluscum contagiosum virus
ccacgugcgcugg

SEQ ID NO: 370729 - RNA, 13 nt, Molluscum contagiosum virus
ccacgugcucaag

SEQ ID NO: 370730 - RNA, 17 nt, Molluscum contagiosum virus
ccacguugggguugucg

SEQ ID NO: 370731 - RNA, 14 nt, Molluscum contagiosum virus
ccacugggucuguu

SEQ ID NO: 370732 - RNA, 15 nt, Molluscum contagiosum virus
ccacuguugcuuccg

SEQ ID NO: 370733 - RNA, 15 nt, Molluscum contagiosum virus
ccagaacauugccac

SEQ ID NO: 370734 - RNA, 13 nt, Molluscum contagiosum virus
ccagagcacugcg

SEQ ID NO: 370735 - RNA, 17 nt, Molluscum contagiosum virus
ccagauccgggcgcugc

SEQ ID NO: 370736 - RNA, 17 nt, Molluscum contagiosum virus
ccagauguucucgccag

SEQ ID NO: 370737 - RNA, 13 nt, Molluscum contagiosum virus
ccagcacaagccg

SEQ ID NO: 370738 - RNA, 15 nt, Molluscum contagiosum virus
ccagcagccaggcua

SEQ ID NO: 370739 - RNA, 18 nt, Molluscum contagiosum virus
ccagcagcgaggccggag

SEQ ID NO: 370740 - RNA, 19 nt, Molluscum contagiosum virus
ccagcagcgcgaagcucau

SEQ ID NO: 370741 - RNA, 14 nt, Molluscum contagiosum virus
ccagcagcguugcu

SEQ ID NO: 370742 - RNA, 17 nt, Molluscum contagiosum virus
ccagcauagaacacagc

SEQ ID NO: 370743 - RNA, 19 nt, Molluscum contagiosum virus
ccagccaggcgccggcgcg

SEQ ID NO: 370744 - RNA, 18 nt, Molluscum contagiosum virus
ccagccgcucguccagcu

SEQ ID NO: 370745 - RNA, 23 nt, Molluscum contagiosum virus
ccagccgcucguccagcugcgcg

SEQ ID NO: 370746 - RNA, 19 nt, Molluscum contagiosum virus
ccagccgcugcgccgccag

SEQ ID NO: 370747 - RNA, 11 nt, Molluscum contagiosum virus
ccagccucauc

SEQ ID NO: 370748 - RNA, 21 nt, Molluscum contagiosum virus
ccagccugcuggcaccgcgcg

SEQ ID NO: 370749 - RNA, 12 nt, Molluscum contagiosum virus
ccagccuggagu

SEQ ID NO: 370750 - RNA, 16 nt, Molluscum contagiosum virus
ccagccugugcgccaa

SEQ ID NO: 370751 - RNA, 15 nt, Molluscum contagiosum virus
ccagcgauugcccgc

SEQ ID NO: 370752 - RNA, 15 nt, Molluscum contagiosum virus
ccagcgcaucaugcg

SEQ ID NO: 370753 - RNA, 16 nt, Molluscum contagiosum virus
ccagcgccgccucgcg

SEQ ID NO: 370754 - RNA, 14 nt, Molluscum contagiosum virus
ccagcgccuccgcg

SEQ ID NO: 370755 - RNA, 16 nt, Molluscum contagiosum virus
ccagcgcgcccaccag

SEQ ID NO: 370756 - RNA, 18 nt, Molluscum contagiosum virus
ccagcgcgcccaccagca

SEQ ID NO: 370757 - RNA, 15 nt, Molluscum contagiosum virus
ccagcgcggccgugg

SEQ ID NO: 370758 - RNA, 15 nt, Molluscum contagiosum virus
ccagcggcugcccgc

SEQ ID NO: 370759 - RNA, 23 nt, Molluscum contagiosum virus
ccagcgggaccugguucaugcug

SEQ ID NO: 370760 - RNA, 15 nt, Molluscum contagiosum virus
ccagcuaagccggag

SEQ ID NO: 370761 - RNA, 13 nt, Molluscum contagiosum virus
ccagcuccgcgcg

SEQ ID NO: 370762 - RNA, 14 nt, Molluscum contagiosum virus
ccagcuggcuacgc

SEQ ID NO: 370763 - RNA, 20 nt, Molluscum contagiosum virus
ccagcugguccugaacagca

SEQ ID NO: 370764 - RNA, 21 nt, Molluscum contagiosum virus
ccagcugguccugaacagcau

SEQ ID NO: 370765 - RNA, 16 nt, Molluscum contagiosum virus
ccaggaacaucugcaa

SEQ ID NO: 370766 - RNA, 16 nt, Molluscum contagiosum virus
ccaggcaacgcacaaa

SEQ ID NO: 370767 - RNA, 17 nt, Molluscum contagiosum virus
ccaggcaacgcacaaaa

SEQ ID NO: 370768 - RNA, 17 nt, Molluscum contagiosum virus
ccaguaccugcugccga

SEQ ID NO: 370769 - RNA, 22 nt, Molluscum contagiosum virus
ccagucucgaugugacaacaug

SEQ ID NO: 370770 - RNA, 18 nt, Molluscum contagiosum virus
ccaucaaggccuacggca

SEQ ID NO: 370771 - RNA, 15 nt, Molluscum contagiosum virus
ccaucggaacuagcc

SEQ ID NO: 370772 - RNA, 13 nt, Molluscum contagiosum virus
ccaucuccaagca

SEQ ID NO: 370773 - RNA, 18 nt, Molluscum contagiosum virus
ccaucuccuugucugcaa

SEQ ID NO: 370774 - RNA, 19 nt, Molluscum contagiosum virus
ccaucucgcacacugcagc

SEQ ID NO: 370775 - RNA, 20 nt, Molluscum contagiosum virus
ccaucucgcacacugcagca

SEQ ID NO: 370776 - RNA, 16 nt, Molluscum contagiosum virus
ccaucuucaacuucca

SEQ ID NO: 370777 - RNA, 20 nt, Molluscum contagiosum virus
ccaugacagaaaaaacacaa

SEQ ID NO: 370778 - RNA, 18 nt, Molluscum contagiosum virus
ccaugagguacuccacgc

SEQ ID NO: 370779 - RNA, 11 nt, Molluscum contagiosum virus
ccaugcugcgc

SEQ ID NO: 370780 - RNA, 15 nt, Molluscum contagiosum virus
ccauggaggcgcuag

SEQ ID NO: 370781 - RNA, 21 nt, Molluscum contagiosum virus
ccaugucgaacaccuccugcu

SEQ ID NO: 370782 - RNA, 21 nt, Molluscum contagiosum virus
ccauguuuccugcggcgcugc

SEQ ID NO: 370783 - RNA, 22 nt, Molluscum contagiosum virus
ccauuaacgaagaguggcucac

SEQ ID NO: 370784 - RNA, 17 nt, Molluscum contagiosum virus
ccauucuuaauccagua

SEQ ID NO: 370785 - RNA, 18 nt, Molluscum contagiosum virus
ccauucuuaauccaguag

SEQ ID NO: 370786 - RNA, 12 nt, Molluscum contagiosum virus
ccauugugaagg

SEQ ID NO: 370787 - RNA, 13 nt, Molluscum contagiosum virus
cccaagaccugcu

SEQ ID NO: 370788 - RNA, 19 nt, Molluscum contagiosum virus
cccaaggccgcgggcgcgg

SEQ ID NO: 370789 - RNA, 19 nt, Molluscum contagiosum virus
cccacgcuggcgcgcucca

SEQ ID NO: 370790 - RNA, 17 nt, Molluscum contagiosum virus
cccacgugccagcucau

SEQ ID NO: 370791 - RNA, 18 nt, Molluscum contagiosum virus
cccagaaaacgcacuguc

SEQ ID NO: 370792 - RNA, 17 nt, Molluscum contagiosum virus
cccagguggagcugucg

SEQ ID NO: 370793 - RNA, 22 nt, Molluscum contagiosum virus
cccauacucgaacgcaaggugu

SEQ ID NO: 370794 - RNA, 17 nt, Molluscum contagiosum virus
cccccgcgcacugccac

SEQ ID NO: 370795 - RNA, 19 nt, Molluscum contagiosum virus
ccccgcgcgcccgcugcgc

SEQ ID NO: 370796 - RNA, 21 nt, Molluscum contagiosum virus
ccccgcugggccgcaugcacc

SEQ ID NO: 370797 - RNA, 22 nt, Molluscum contagiosum virus
ccccgcugggccgcaugcaccu

SEQ ID NO: 370798 - RNA, 21 nt, Molluscum contagiosum virus
ccccuacacgcaacuagggag

SEQ ID NO: 370799 - RNA, 12 nt, Molluscum contagiosum virus
ccccuccaagaa

SEQ ID NO: 370800 - RNA, 20 nt, Molluscum contagiosum virus
ccccucgaauuucgagagaa

SEQ ID NO: 370801 - RNA, 21 nt, Molluscum contagiosum virus
cccgagcacguuccaaaagac

SEQ ID NO: 370802 - RNA, 23 nt, Molluscum contagiosum virus
cccgagggcgcgaccggcgugcc

SEQ ID NO: 370803 - RNA, 14 nt, Molluscum contagiosum virus
cccgagguggccaa

SEQ ID NO: 370804 - RNA, 12 nt, Molluscum contagiosum virus
cccgcaaaagau

SEQ ID NO: 370805 - RNA, 14 nt, Molluscum contagiosum virus
cccgcaacaaggaa

SEQ ID NO: 370806 - RNA, 15 nt, Molluscum contagiosum virus
cccgcaccgccuuuc

SEQ ID NO: 370807 - RNA, 21 nt, Molluscum contagiosum virus
cccgcagugugcccccggagg

SEQ ID NO: 370808 - RNA, 13 nt, Molluscum contagiosum virus
cccgccgcgugcc

SEQ ID NO: 370809 - RNA, 22 nt, Molluscum contagiosum virus
cccgcgcgcagcgcgucuuugu

SEQ ID NO: 370810 - RNA, 18 nt, Molluscum contagiosum virus
cccgcgcggcucgcgcac

SEQ ID NO: 370811 - RNA, 22 nt, Molluscum contagiosum virus
cccgcgcucgacgcgugcaugg

SEQ ID NO: 370812 - RNA, 16 nt, Molluscum contagiosum virus
cccgcgcucgccgcac

SEQ ID NO: 370813 - RNA, 13 nt, Molluscum contagiosum virus
cccgcggcgcacg

SEQ ID NO: 370814 - RNA, 13 nt, Molluscum contagiosum virus
cccgcggcgugcc

SEQ ID NO: 370815 - RNA, 23 nt, Molluscum contagiosum virus
cccgcguccgugcgcagggcaau

SEQ ID NO: 370816 - RNA, 17 nt, Molluscum contagiosum virus
cccgcgugagaacaaga

SEQ ID NO: 370817 - RNA, 18 nt, Molluscum contagiosum virus
cccgcugcacuuccagua

SEQ ID NO: 370818 - RNA, 17 nt, Molluscum contagiosum virus
cccggaugacggcaacg

SEQ ID NO: 370819 - RNA, 19 nt, Molluscum contagiosum virus
cccggcgggcacauccgcu

SEQ ID NO: 370820 - RNA, 22 nt, Molluscum contagiosum virus
cccgggaacgaggaaaggcacc

SEQ ID NO: 370821 - RNA, 19 nt, Molluscum contagiosum virus
cccguccgugccauuucgu

SEQ ID NO: 370822 - RNA, 20 nt, Molluscum contagiosum virus
cccguggcgcgccggcgcgg

SEQ ID NO: 370823 - RNA, 22 nt, Molluscum contagiosum virus
cccguggugggccgcggcgcgg

SEQ ID NO: 370824 - RNA, 20 nt, Molluscum contagiosum virus
cccucacaccuagagcacga

SEQ ID NO: 370825 - RNA, 13 nt, Molluscum contagiosum virus
cccuccuaucuca

SEQ ID NO: 370826 - RNA, 16 nt, Molluscum contagiosum virus
cccucgucgcgcuucc

SEQ ID NO: 370827 - RNA, 14 nt, Molluscum contagiosum virus
cccugauaugcaua

SEQ ID NO: 370828 - RNA, 16 nt, Molluscum contagiosum virus
cccugccuuugccaag

SEQ ID NO: 370829 - RNA, 19 nt, Molluscum contagiosum virus
ccgaagacgcguaccagcg

SEQ ID NO: 370830 - RNA, 17 nt, Molluscum contagiosum virus
ccgaagguuuugugccg

SEQ ID NO: 370831 - RNA, 19 nt, Molluscum contagiosum virus
ccgaauccuuuacugcaag

SEQ ID NO: 370832 - RNA, 16 nt, Molluscum contagiosum virus
ccgacaacgugcugcu

SEQ ID NO: 370833 - RNA, 18 nt, Molluscum contagiosum virus
ccgacccaucggagaagu

SEQ ID NO: 370834 - RNA, 15 nt, Molluscum contagiosum virus
ccgacgcggugguga

SEQ ID NO: 370835 - RNA, 17 nt, Molluscum contagiosum virus
ccgacguuuucuuugcg

SEQ ID NO: 370836 - RNA, 16 nt, Molluscum contagiosum virus
ccgagacccgcaccgc

SEQ ID NO: 370837 - RNA, 14 nt, Molluscum contagiosum virus
ccgagcccggccag

SEQ ID NO: 370838 - RNA, 17 nt, Molluscum contagiosum virus
ccgagcgccgccagcuc

SEQ ID NO: 370839 - RNA, 16 nt, Molluscum contagiosum virus
ccgagcgugaccagug

SEQ ID NO: 370840 - RNA, 20 nt, Molluscum contagiosum virus
ccgaggaaacgcagcacuuc

SEQ ID NO: 370841 - RNA, 13 nt, Molluscum contagiosum virus
ccgaggucuucca

SEQ ID NO: 370842 - RNA, 14 nt, Molluscum contagiosum virus
ccgagguggccaag

SEQ ID NO: 370843 - RNA, 22 nt, Molluscum contagiosum virus
ccgaguacgccaucguggugga

SEQ ID NO: 370844 - RNA, 18 nt, Molluscum contagiosum virus
ccgaguauucgcccauca

SEQ ID NO: 370845 - RNA, 18 nt, Molluscum contagiosum virus
ccgauuuggacgcggcac

SEQ ID NO: 370846 - RNA, 20 nt, Molluscum contagiosum virus
ccgcaacaaggaaaggcacc

SEQ ID NO: 370847 - RNA, 17 nt, Molluscum contagiosum virus
ccgcaacguggcgcuga

SEQ ID NO: 370848 - RNA, 17 nt, Molluscum contagiosum virus
ccgcaaguaccuagugc

SEQ ID NO: 370849 - RNA, 20 nt, Molluscum contagiosum virus
ccgcaccgucaagaacaauu

SEQ ID NO: 370850 - RNA, 21 nt, Molluscum contagiosum virus
ccgcacuauggacgcuugcua

SEQ ID NO: 370851 - RNA, 18 nt, Molluscum contagiosum virus
ccgcacucgccgcggaac

SEQ ID NO: 370852 - RNA, 16 nt, Molluscum contagiosum virus
ccgcagcccacgugcc

SEQ ID NO: 370853 - RNA, 16 nt, Molluscum contagiosum virus
ccgcaggaaaggcacc

SEQ ID NO: 370854 - RNA, 11 nt, Molluscum contagiosum virus
ccgcaugucca

SEQ ID NO: 370855 - RNA, 16 nt, Molluscum contagiosum virus
ccgccagaagugaaau

SEQ ID NO: 370856 - RNA, 12 nt, Molluscum contagiosum virus
ccgccagcacca

SEQ ID NO: 370857 - RNA, 22 nt, Molluscum contagiosum virus
ccgccaggaaaacggaaacagc

SEQ ID NO: 370858 - RNA, 19 nt, Molluscum contagiosum virus
ccgcccagcguggccagcu

SEQ ID NO: 370859 - RNA, 14 nt, Molluscum contagiosum virus
ccgccgcaaguacc

SEQ ID NO: 370860 - RNA, 17 nt, Molluscum contagiosum virus
ccgccgcacuauggacg

SEQ ID NO: 370861 - RNA, 22 nt, Molluscum contagiosum virus
ccgccgcugacuagaugcauag

SEQ ID NO: 370862 - RNA, 16 nt, Molluscum contagiosum virus
ccgccgugugcacauu

SEQ ID NO: 370863 - RNA, 23 nt, Molluscum contagiosum virus
ccgccguguugcguagagcaaag

SEQ ID NO: 370864 - RNA, 23 nt, Molluscum contagiosum virus
ccgcgaaagaggaaagcgcacac

SEQ ID NO: 370865 - RNA, 23 nt, Molluscum contagiosum virus
ccgcgaacgagaaaugcgcacac

SEQ ID NO: 370866 - RNA, 19 nt, Molluscum contagiosum virus
ccgcgacaggggccacaag

SEQ ID NO: 370867 - RNA, 13 nt, Molluscum contagiosum virus
ccgcgacgagcuc

SEQ ID NO: 370868 - RNA, 13 nt, Molluscum contagiosum virus
ccgcgagcacugg

SEQ ID NO: 370869 - RNA, 15 nt, Molluscum contagiosum virus
ccgcgcagaagccaa

SEQ ID NO: 370870 - RNA, 20 nt, Molluscum contagiosum virus
ccgcgcaugacagccauggc

SEQ ID NO: 370871 - RNA, 22 nt, Molluscum contagiosum virus
ccgcgccagcgacagacaccgg

SEQ ID NO: 370872 - RNA, 19 nt, Molluscum contagiosum virus
ccgcgcccaagaagaagca

SEQ ID NO: 370873 - RNA, 14 nt, Molluscum contagiosum virus
ccgcgccgggcgcc

SEQ ID NO: 370874 - RNA, 15 nt, Molluscum contagiosum virus
ccgcgcgagcgcgcc

SEQ ID NO: 370875 - RNA, 14 nt, Molluscum contagiosum virus
ccgcgcgagugcca

SEQ ID NO: 370876 - RNA, 13 nt, Molluscum contagiosum virus
ccgcgcgcgccag

SEQ ID NO: 370877 - RNA, 17 nt, Molluscum contagiosum virus
ccgcgcgcgcgcgugag

SEQ ID NO: 370878 - RNA, 22 nt, Molluscum contagiosum virus
ccgcgcgcggcuaagcucugcg

SEQ ID NO: 370879 - RNA, 18 nt, Molluscum contagiosum virus
ccgcgcggcgcucugcca

SEQ ID NO: 370880 - RNA, 14 nt, Molluscum contagiosum virus
ccgcgcggcuccua

SEQ ID NO: 370881 - RNA, 12 nt, Molluscum contagiosum virus
ccgcgcguugcu

SEQ ID NO: 370882 - RNA, 21 nt, Molluscum contagiosum virus
ccgcgcucgacgcgugcaugg

SEQ ID NO: 370883 - RNA, 14 nt, Molluscum contagiosum virus
ccgcggagcugugc

SEQ ID NO: 370884 - RNA, 20 nt, Molluscum contagiosum virus
ccgcggauguccuugaugcc

SEQ ID NO: 370885 - RNA, 21 nt, Molluscum contagiosum virus
ccgcggccgccacuguugcuu

SEQ ID NO: 370886 - RNA, 13 nt, Molluscum contagiosum virus
ccgcggcguuccc

SEQ ID NO: 370887 - RNA, 22 nt, Molluscum contagiosum virus
ccgcgggcacauggacggcgcc

SEQ ID NO: 370888 - RNA, 20 nt, Molluscum contagiosum virus
ccgcgguguccuugcgccgc

SEQ ID NO: 370889 - RNA, 20 nt, Molluscum contagiosum virus
ccgcgucguagcaaaugcgc

SEQ ID NO: 370890 - RNA, 14 nt, Molluscum contagiosum virus
ccgcgugcucgugu

SEQ ID NO: 370891 - RNA, 13 nt, Molluscum contagiosum virus
ccgcgugcucugc

SEQ ID NO: 370892 - RNA, 21 nt, Molluscum contagiosum virus
ccgcguuuuuucuugguugcc

SEQ ID NO: 370893 - RNA, 18 nt, Molluscum contagiosum virus
ccgcucggcacugcuggc

SEQ ID NO: 370894 - RNA, 22 nt, Molluscum contagiosum virus
ccgcucguccagcugcgcgagc

SEQ ID NO: 370895 - RNA, 16 nt, Molluscum contagiosum virus
ccgcucguguuuguca

SEQ ID NO: 370896 - RNA, 13 nt, Molluscum contagiosum virus
ccgcugcgcggag

SEQ ID NO: 370897 - RNA, 18 nt, Molluscum contagiosum virus
ccgcugcuccugcucugu

SEQ ID NO: 370898 - RNA, 15 nt, Molluscum contagiosum virus
ccgcugcugcugcaa

SEQ ID NO: 370899 - RNA, 16 nt, Molluscum contagiosum virus
ccgcuggagcacgacu

SEQ ID NO: 370900 - RNA, 16 nt, Molluscum contagiosum virus
ccgcuggcgcuaccua

SEQ ID NO: 370901 - RNA, 14 nt, Molluscum contagiosum virus
ccgcuugagcagca

SEQ ID NO: 370902 - RNA, 16 nt, Molluscum contagiosum virus
ccggaacaacuuggga

SEQ ID NO: 370903 - RNA, 22 nt, Molluscum contagiosum virus
ccggacagagccccguucacuu

SEQ ID NO: 370904 - RNA, 14 nt, Molluscum contagiosum virus
ccggacguccaucc

SEQ ID NO: 370905 - RNA, 20 nt, Molluscum contagiosum virus
ccggagaagcuuuaguccau

SEQ ID NO: 370906 - RNA, 16 nt, Molluscum contagiosum virus
ccggagacaccagcuc

SEQ ID NO: 370907 - RNA, 19 nt, Molluscum contagiosum virus
ccggagacaccagcuccgc

SEQ ID NO: 370908 - RNA, 17 nt, Molluscum contagiosum virus
ccggcaagccgagccaa

SEQ ID NO: 370909 - RNA, 18 nt, Molluscum contagiosum virus
ccggcagcuggagcugcc

SEQ ID NO: 370910 - RNA, 20 nt, Molluscum contagiosum virus
ccggcagcuggagcugccgc

SEQ ID NO: 370911 - RNA, 23 nt, Molluscum contagiosum virus
ccggcaucgcgcugcuggugcuc

SEQ ID NO: 370912 - RNA, 15 nt, Molluscum contagiosum virus
ccggccagcgagucu

SEQ ID NO: 370913 - RNA, 17 nt, Molluscum contagiosum virus
ccggcggcgcaagcacc

SEQ ID NO: 370914 - RNA, 12 nt, Molluscum contagiosum virus
ccggcucaagaa

SEQ ID NO: 370915 - RNA, 19 nt, Molluscum contagiosum virus
ccggcucaagcuggcaacg

SEQ ID NO: 370916 - RNA, 15 nt, Molluscum contagiosum virus
ccggcuuggccaagc

SEQ ID NO: 370917 - RNA, 19 nt, Molluscum contagiosum virus
ccgggaauaccggagacac

SEQ ID NO: 370918 - RNA, 22 nt, Molluscum contagiosum virus
ccgggcaccggcgcucacugcg

SEQ ID NO: 370919 - RNA, 12 nt, Molluscum contagiosum virus
ccgggcgcacaa

SEQ ID NO: 370920 - RNA, 18 nt, Molluscum contagiosum virus
ccgggcgccggcucugcc

SEQ ID NO: 370921 - RNA, 22 nt, Molluscum contagiosum virus
ccgggggaacacgcuugagugg

SEQ ID NO: 370922 - RNA, 20 nt, Molluscum contagiosum virus
ccgggugcgagucucuguaa

SEQ ID NO: 370923 - RNA, 14 nt, Molluscum contagiosum virus
ccgguacugcugca

SEQ ID NO: 370924 - RNA, 17 nt, Molluscum contagiosum virus
ccgguggaagagcccgc

SEQ ID NO: 370925 - RNA, 20 nt, Molluscum contagiosum virus
ccgguugcgcgugugcagca

SEQ ID NO: 370926 - RNA, 19 nt, Molluscum contagiosum virus
ccguccgccucgagcacgc

SEQ ID NO: 370927 - RNA, 14 nt, Molluscum contagiosum virus
ccgucguacuuuca

SEQ ID NO: 370928 - RNA, 23 nt, Molluscum contagiosum virus
ccgucguacuuucacgacuguau

SEQ ID NO: 370929 - RNA, 22 nt, Molluscum contagiosum virus
ccgugacggccguguacaugcu

SEQ ID NO: 370930 - RNA, 12 nt, Molluscum contagiosum virus
ccgugagcgcgc

SEQ ID NO: 370931 - RNA, 13 nt, Molluscum contagiosum virus
ccgugaugcaccc

SEQ ID NO: 370932 - RNA, 16 nt, Molluscum contagiosum virus
ccgugcagagcaaggc

SEQ ID NO: 370933 - RNA, 17 nt, Molluscum contagiosum virus
ccgugcgcgcgcugaga

SEQ ID NO: 370934 - RNA, 19 nt, Molluscum contagiosum virus
ccgugcgcgcgcugagaua

SEQ ID NO: 370935 - RNA, 18 nt, Molluscum contagiosum virus
ccgugggcagcuucugcu

SEQ ID NO: 370936 - RNA, 20 nt, Molluscum contagiosum virus
ccgugggcagcuucugcucg

SEQ ID NO: 370937 - RNA, 13 nt, Molluscum contagiosum virus
ccgugggcgccgc

SEQ ID NO: 370938 - RNA, 14 nt, Molluscum contagiosum virus
ccguguaccgccgc

SEQ ID NO: 370939 - RNA, 23 nt, Molluscum contagiosum virus
ccguguaccgccgcggccgcgag

SEQ ID NO: 370940 - RNA, 16 nt, Molluscum contagiosum virus
ccguguacgucuuucc

SEQ ID NO: 370941 - RNA, 18 nt, Molluscum contagiosum virus
ccguguccuacacgccgc

SEQ ID NO: 370942 - RNA, 21 nt, Molluscum contagiosum virus
ccguucacgauccaugagaga

SEQ ID NO: 370943 - RNA, 18 nt, Molluscum contagiosum virus
ccuacaucgacaagcacg

SEQ ID NO: 370944 - RNA, 13 nt, Molluscum contagiosum virus
ccuacgugcugcg

SEQ ID NO: 370945 - RNA, 22 nt, Molluscum contagiosum virus
ccuacuccuuucgacgcugccu

SEQ ID NO: 370946 - RNA, 14 nt, Molluscum contagiosum virus
ccuagacacgagcg

SEQ ID NO: 370947 - RNA, 20 nt, Molluscum contagiosum virus
ccuagaggaugcggauccuc

SEQ ID NO: 370948 - RNA, 13 nt, Molluscum contagiosum virus
ccuagccauacag

SEQ ID NO: 370949 - RNA, 15 nt, Molluscum contagiosum virus
ccuagcccagcacgc

SEQ ID NO: 370950 - RNA, 16 nt, Molluscum contagiosum virus
ccucaccgcgcacauc

SEQ ID NO: 370951 - RNA, 17 nt, Molluscum contagiosum virus
ccucagccgagcgccgc

SEQ ID NO: 370952 - RNA, 16 nt, Molluscum contagiosum virus
ccucauguacuucuac

SEQ ID NO: 370953 - RNA, 13 nt, Molluscum contagiosum virus
ccuccacguccag

SEQ ID NO: 370954 - RNA, 16 nt, Molluscum contagiosum virus
ccuccgcgaccgcgaa

SEQ ID NO: 370955 - RNA, 17 nt, Molluscum contagiosum virus
ccuccugcuuugcacgc

SEQ ID NO: 370956 - RNA, 17 nt, Molluscum contagiosum virus
ccucgaccugcacgacc

SEQ ID NO: 370957 - RNA, 21 nt, Molluscum contagiosum virus
ccucgacgcgcugcucucggc

SEQ ID NO: 370958 - RNA, 12 nt, Molluscum contagiosum virus
ccucgagcacgc

SEQ ID NO: 370959 - RNA, 21 nt, Molluscum contagiosum virus
ccucgagcacgccuccaagaa

SEQ ID NO: 370960 - RNA, 13 nt, Molluscum contagiosum virus
ccucgagcgccgc

SEQ ID NO: 370961 - RNA, 19 nt, Molluscum contagiosum virus
ccucgaugagaacaacagc

SEQ ID NO: 370962 - RNA, 22 nt, Molluscum contagiosum virus
ccucgccuccgggcgcacaacu

SEQ ID NO: 370963 - RNA, 13 nt, Molluscum contagiosum virus
ccucgucuuugcg

SEQ ID NO: 370964 - RNA, 16 nt, Molluscum contagiosum virus
ccucguggaacaaaga

SEQ ID NO: 370965 - RNA, 22 nt, Molluscum contagiosum virus
ccucucgcaugcgccugcacuu

SEQ ID NO: 370966 - RNA, 20 nt, Molluscum contagiosum virus
ccucugggcgucgcacaguu

SEQ ID NO: 370967 - RNA, 21 nt, Molluscum contagiosum virus
ccucuguccugcgugcuuccc

SEQ ID NO: 370968 - RNA, 22 nt, Molluscum contagiosum virus
ccugaaaggcauccucgccgaa

SEQ ID NO: 370969 - RNA, 13 nt, Molluscum contagiosum virus
ccugaacaagcug

SEQ ID NO: 370970 - RNA, 21 nt, Molluscum contagiosum virus
ccugacagcguguucggggcc

SEQ ID NO: 370971 - RNA, 20 nt, Molluscum contagiosum virus
ccugacggcagcaagcgcac

SEQ ID NO: 370972 - RNA, 20 nt, Molluscum contagiosum virus
ccugagaagcuguaccuggu

SEQ ID NO: 370973 - RNA, 21 nt, Molluscum contagiosum virus
ccugcacgcggcguacaucga

SEQ ID NO: 370974 - RNA, 16 nt, Molluscum contagiosum virus
ccugcacggcuaccgc

SEQ ID NO: 370975 - RNA, 20 nt, Molluscum contagiosum virus
ccugcacuucggacaccuca

SEQ ID NO: 370976 - RNA, 17 nt, Molluscum contagiosum virus
ccugcaggaaaggcacc

SEQ ID NO: 370977 - RNA, 13 nt, Molluscum contagiosum virus
ccugcccucggga

SEQ ID NO: 370978 - RNA, 13 nt, Molluscum contagiosum virus
ccugccuuugcca

SEQ ID NO: 370979 - RNA, 15 nt, Molluscum contagiosum virus
ccugccuuugccaag

SEQ ID NO: 370980 - RNA, 19 nt, Molluscum contagiosum virus
ccugcgcgagcaagcgccc

SEQ ID NO: 370981 - RNA, 22 nt, Molluscum contagiosum virus
ccugcgcuuccucuacaccagc

SEQ ID NO: 370982 - RNA, 12 nt, Molluscum contagiosum virus
ccugcgggcgcu

SEQ ID NO: 370983 - RNA, 16 nt, Molluscum contagiosum virus
ccugcguggacagcau

SEQ ID NO: 370984 - RNA, 14 nt, Molluscum contagiosum virus
ccugcuggcaccgc

SEQ ID NO: 370985 - RNA, 20 nt, Molluscum contagiosum virus
ccuggaguacuucaagcacg

SEQ ID NO: 370986 - RNA, 18 nt, Molluscum contagiosum virus
ccuggccuucuaccacag

SEQ ID NO: 370987 - RNA, 19 nt, Molluscum contagiosum virus
ccuggcggcagcacgggcg

SEQ ID NO: 370988 - RNA, 14 nt, Molluscum contagiosum virus
ccuggcggcgcugg

SEQ ID NO: 370989 - RNA, 20 nt, Molluscum contagiosum virus
ccuggcggcuuuccugucau

SEQ ID NO: 370990 - RNA, 19 nt, Molluscum contagiosum virus
ccuggcucgcgagugugca

SEQ ID NO: 370991 - RNA, 21 nt, Molluscum contagiosum virus
ccuggcucgcgagugugcaug

SEQ ID NO: 370992 - RNA, 14 nt, Molluscum contagiosum virus
ccuggcugcugcgc

SEQ ID NO: 370993 - RNA, 12 nt, Molluscum contagiosum virus
ccuggugcugcg

SEQ ID NO: 370994 - RNA, 16 nt, Molluscum contagiosum virus
acagagugccuggcgc

SEQ ID NO: 370995 - RNA, 16 nt, Molluscum contagiosum virus
acagcacggcacgugc

SEQ ID NO: 370996 - RNA, 12 nt, Molluscum contagiosum virus
acagcagccgca

SEQ ID NO: 370997 - RNA, 12 nt, Molluscum contagiosum virus
acagcaugaacu

SEQ ID NO: 370998 - RNA, 10 nt, Molluscum contagiosum virus
acagccaugu

SEQ ID NO: 370999 - RNA, 19 nt, Molluscum contagiosum virus
acagcccccucuuggcaaa

SEQ ID NO: 371000 - RNA, 22 nt, Molluscum contagiosum virus
acagccuagaaacgacgggcgc

SEQ ID NO: 371001 - RNA, 17 nt, Molluscum contagiosum virus
acagccugcaccgagug

SEQ ID NO: 371002 - RNA, 18 nt, Molluscum contagiosum virus
acagccuguguugcgcgc

SEQ ID NO: 371003 - RNA, 13 nt, Molluscum contagiosum virus
acagccuuugugu

SEQ ID NO: 371004 - RNA, 13 nt, Molluscum contagiosum virus
acagcgcaagcug

SEQ ID NO: 371005 - RNA, 14 nt, Molluscum contagiosum virus
acagcgcgcugcac

SEQ ID NO: 371006 - RNA, 20 nt, Molluscum contagiosum virus
acagcguguugcuguuccac

SEQ ID NO: 371007 - RNA, 13 nt, Molluscum contagiosum virus
acagcuuggcaca

SEQ ID NO: 371008 - RNA, 15 nt, Molluscum contagiosum virus
acaggagcauuccuu

SEQ ID NO: 371009 - RNA, 18 nt, Molluscum contagiosum virus
acaggggccacaagcacg

SEQ ID NO: 371010 - RNA, 22 nt, Molluscum contagiosum virus
acaggguuccgcgccugcccau

SEQ ID NO: 371011 - RNA, 21 nt, Molluscum contagiosum virus
acagguagugguccaccagcu

SEQ ID NO: 371012 - RNA, 20 nt, Molluscum contagiosum virus
acagguccgguguccacgac

SEQ ID NO: 371013 - RNA, 21 nt, Molluscum contagiosum virus
acaguaacugcugcagugugu

SEQ ID NO: 371014 - RNA, 12 nt, Molluscum contagiosum virus
acaguccgucuc

SEQ ID NO: 371015 - RNA, 15 nt, Molluscum contagiosum virus
acagucggugccaga

SEQ ID NO: 371016 - RNA, 14 nt, Molluscum contagiosum virus
acagucuagugcgu

SEQ ID NO: 371017 - RNA, 15 nt, Molluscum contagiosum virus
acagugucuugucac

SEQ ID NO: 371018 - RNA, 15 nt, Molluscum contagiosum virus
acauaaaauggacca

SEQ ID NO: 371019 - RNA, 18 nt, Molluscum contagiosum virus
acauacgcacucguggca

SEQ ID NO: 371020 - RNA, 15 nt, Molluscum contagiosum virus
acauaguaccaugac

SEQ ID NO: 371021 - RNA, 22 nt, Molluscum contagiosum virus
acaucaucgcggagcugcgcgc

SEQ ID NO: 371022 - RNA, 15 nt, Molluscum contagiosum virus
acauccgcuaccugg

SEQ ID NO: 371023 - RNA, 15 nt, Molluscum contagiosum virus
acauccggcacgugc

SEQ ID NO: 371024 - RNA, 19 nt, Molluscum contagiosum virus
acaucuacaaggaggucau

SEQ ID NO: 371025 - RNA, 22 nt, Molluscum contagiosum virus
acaucucgagacgcugccugac

SEQ ID NO: 371026 - RNA, 13 nt, Molluscum contagiosum virus
acaucucucaggg

SEQ ID NO: 371027 - RNA, 14 nt, Molluscum contagiosum virus
acaucucucagggc

SEQ ID NO: 371028 - RNA, 16 nt, Molluscum contagiosum virus
acaucuucgugcccac

SEQ ID NO: 371029 - RNA, 22 nt, Molluscum contagiosum virus
acaugaccaagcacauucucaa

SEQ ID NO: 371030 - RNA, 17 nt, Molluscum contagiosum virus
acaugaugcccugguga

SEQ ID NO: 371031 - RNA, 16 nt, Molluscum contagiosum virus
acaugcaacgcaggac

SEQ ID NO: 371032 - RNA, 13 nt, Molluscum contagiosum virus
acaugcacacuca

SEQ ID NO: 371033 - RNA, 14 nt, Molluscum contagiosum virus
acaugcagcugcag

SEQ ID NO: 371034 - RNA, 15 nt, Molluscum contagiosum virus
acaugcggagacugu

SEQ ID NO: 371035 - RNA, 14 nt, Molluscum contagiosum virus
acaugcgugcuagc

SEQ ID NO: 371036 - RNA, 17 nt, Molluscum contagiosum virus
acaugcucgcgcucuac

SEQ ID NO: 371037 - RNA, 20 nt, Molluscum contagiosum virus
acauggaccgcgucaagauc

SEQ ID NO: 371038 - RNA, 12 nt, Molluscum contagiosum virus
acaugugcugcc

SEQ ID NO: 371039 - RNA, 17 nt, Molluscum contagiosum virus
acauuacgcucguggaa

SEQ ID NO: 371040 - RNA, 22 nt, Molluscum contagiosum virus
acauuuacuucgggcgcaauca

SEQ ID NO: 371041 - RNA, 23 nt, Molluscum contagiosum virus
acauuucuccuccggggcgcaag

SEQ ID NO: 371042 - RNA, 21 nt, Molluscum contagiosum virus
accaaagguccaguauuucaa

SEQ ID NO: 371043 - RNA, 22 nt, Molluscum contagiosum virus
accaagaacagagaaaggcacc

SEQ ID NO: 371044 - RNA, 19 nt, Molluscum contagiosum virus
accaagguggggcgcaucc

SEQ ID NO: 371045 - RNA, 13 nt, Molluscum contagiosum virus
accacaacugaaa

SEQ ID NO: 371046 - RNA, 20 nt, Molluscum contagiosum virus
accacaagcaguaccugcua

SEQ ID NO: 371047 - RNA, 17 nt, Molluscum contagiosum virus
accacagucggugccag

SEQ ID NO: 371048 - RNA, 19 nt, Molluscum contagiosum virus
acgagcagcgcuugcgcgc

SEQ ID NO: 371049 - RNA, 23 nt, Molluscum contagiosum virus
acgagcagcugcugcgcacgugc

SEQ ID NO: 371050 - RNA, 16 nt, Molluscum contagiosum virus
acgagcaguccgccuc

SEQ ID NO: 371051 - RNA, 16 nt, Molluscum contagiosum virus
acgagcgaguugagca

SEQ ID NO: 371052 - RNA, 14 nt, Molluscum contagiosum virus
acgagcgcaucagc

SEQ ID NO: 371053 - RNA, 12 nt, Molluscum contagiosum virus
acgagcugcuaa

SEQ ID NO: 371054 - RNA, 16 nt, Molluscum contagiosum virus
acgagcugcugcccgc

SEQ ID NO: 371055 - RNA, 16 nt, Molluscum contagiosum virus
acgagcugcugcgcgc

SEQ ID NO: 371056 - RNA, 14 nt, Molluscum contagiosum virus
acgagcugugcgag

SEQ ID NO: 371057 - RNA, 22 nt, Molluscum contagiosum virus
acgaggccuacgugcugcgcac

SEQ ID NO: 371058 - RNA, 19 nt, Molluscum contagiosum virus
acgagggacacgcacuugc

SEQ ID NO: 371059 - RNA, 21 nt, Molluscum contagiosum virus
acgagggaugcgcacacuugc

SEQ ID NO: 371060 - RNA, 21 nt, Molluscum contagiosum virus
acgaggugcgcgcaacacugc

SEQ ID NO: 371061 - RNA, 23 nt, Molluscum contagiosum virus
acgaggugcgcgcaacacugcag

SEQ ID NO: 371062 - RNA, 16 nt, Molluscum contagiosum virus
acgagugcccgcgcgc

SEQ ID NO: 371063 - RNA, 21 nt, Molluscum contagiosum virus
acgagugcccgcgcgcuguau

SEQ ID NO: 371064 - RNA, 16 nt, Molluscum contagiosum virus
acgaguucugcaucuu

SEQ ID NO: 371065 - RNA, 16 nt, Molluscum contagiosum virus
acgauggccacgcaga

SEQ ID NO: 371066 - RNA, 20 nt, Molluscum contagiosum virus
acgauggccggcaacuggcu

SEQ ID NO: 371067 - RNA, 23 nt, Molluscum contagiosum virus
acgauuccgcuguacgugcugcc

SEQ ID NO: 371068 - RNA, 15 nt, Molluscum contagiosum virus
acgauuuuuucgugu

SEQ ID NO: 371069 - RNA, 14 nt, Molluscum contagiosum virus
acgcaaaugcgcgc

SEQ ID NO: 371070 - RNA, 16 nt, Molluscum contagiosum virus
acgcaagcccgcgcgc

SEQ ID NO: 371071 - RNA, 12 nt, Molluscum contagiosum virus
acgcaagcuuug

SEQ ID NO: 371072 - RNA, 17 nt, Molluscum contagiosum virus
acgcaaggcaugcgcgc

SEQ ID NO: 371073 - RNA, 17 nt, Molluscum contagiosum virus
acgcaaggugugcgcgc

SEQ ID NO: 371074 - RNA, 23 nt, Molluscum contagiosum virus
acgcaaggugugcgcgcugcacg

SEQ ID NO: 371075 - RNA, 13 nt, Molluscum contagiosum virus
acgcaaguacaac

SEQ ID NO: 371076 - RNA, 18 nt, Molluscum contagiosum virus
acgcaaguacaacccaaa

SEQ ID NO: 371077 - RNA, 14 nt, Molluscum contagiosum virus
acgcaaucgcgcgc

SEQ ID NO: 371078 - RNA, 15 nt, Molluscum contagiosum virus
acgcacaaaacacaa

SEQ ID NO: 371079 - RNA, 22 nt, Molluscum contagiosum virus
acgcacaaaguucauggggcuc

SEQ ID NO: 371080 - RNA, 14 nt, Molluscum contagiosum virus
acgcacacucgcgc

SEQ ID NO: 371081 - RNA, 20 nt, Molluscum contagiosum virus
acgcaccgccuggugcugcg

SEQ ID NO: 371082 - RNA, 14 nt, Molluscum contagiosum virus
acgcacgcgcgggc

SEQ ID NO: 371083 - RNA, 15 nt, Molluscum contagiosum virus
acgcacgguagcuag

SEQ ID NO: 371084 - RNA, 20 nt, Molluscum contagiosum virus
acgcacgguagcuagcucug

SEQ ID NO: 371085 - RNA, 19 nt, Molluscum contagiosum virus
acgcacuggcgauguccau

SEQ ID NO: 371086 - RNA, 22 nt, Molluscum contagiosum virus
acgcagaaguggcgcugugcgu

SEQ ID NO: 371087 - RNA, 14 nt, Molluscum contagiosum virus
acgcaggacacugu

SEQ ID NO: 371088 - RNA, 15 nt, Molluscum contagiosum virus
acgcaggacacugua

SEQ ID NO: 371089 - RNA, 18 nt, Molluscum contagiosum virus
acgcauagucaucaaagc

SEQ ID NO: 371090 - RNA, 14 nt, Molluscum contagiosum virus
acgccaacuucguc

SEQ ID NO: 371091 - RNA, 24 nt, Molluscum contagiosum virus
acgccaagaggacgagcugcuaac

SEQ ID NO: 371092 - RNA, 15 nt, Molluscum contagiosum virus
acgccaaucccaaga

SEQ ID NO: 371093 - RNA, 17 nt, Molluscum contagiosum virus
acgccaggaacaucagc

SEQ ID NO: 371094 - RNA, 15 nt, Molluscum contagiosum virus
acgccagguguuccu

SEQ ID NO: 371095 - RNA, 14 nt, Molluscum contagiosum virus
acgccagugcuuug

SEQ ID NO: 371096 - RNA, 22 nt, Molluscum contagiosum virus
acgcccgagggcgggcacgugc

SEQ ID NO: 371097 - RNA, 17 nt, Molluscum contagiosum virus
acgccgcgcaccuggag

SEQ ID NO: 371098 - RNA, 16 nt, Molluscum contagiosum virus
acgccguccgcgcagc

SEQ ID NO: 371099 - RNA, 23 nt, Molluscum contagiosum virus
acgccgugggcagcuucugcucg

SEQ ID NO: 371100 - RNA, 17 nt, Molluscum contagiosum virus
acgccuagccugcagua

SEQ ID NO: 371101 - RNA, 13 nt, Molluscum contagiosum virus
acgccuccaagaa

SEQ ID NO: 371102 - RNA, 23 nt, Molluscum contagiosum virus
acgccuccaagaagaggccagca

SEQ ID NO: 371103 - RNA, 23 nt, Molluscum contagiosum virus
acgccuccaagaagaggccggca

SEQ ID NO: 371104 - RNA, 21 nt, Molluscum contagiosum virus
acgccugcuagcggccuguuc

SEQ ID NO: 371105 - RNA, 20 nt, Molluscum contagiosum virus
acgcgaaacuggacugagcc

SEQ ID NO: 371106 - RNA, 23 nt, Molluscum contagiosum virus
acgcgaccuucacucgcucgcgc

SEQ ID NO: 371107 - RNA, 17 nt, Molluscum contagiosum virus
acgcgacgccccggcgc

SEQ ID NO: 371108 - RNA, 16 nt, Molluscum contagiosum virus
acgcgacggugugccg

SEQ ID NO: 371109 - RNA, 13 nt, Molluscum contagiosum virus
acgcgagacugug

SEQ ID NO: 371110 - RNA, 14 nt, Molluscum contagiosum virus
acgcgagacugugc

SEQ ID NO: 371111 - RNA, 17 nt, Molluscum contagiosum virus
acgcgagcggagcuggc

SEQ ID NO: 371112 - RNA, 20 nt, Molluscum contagiosum virus
acgcgagcucuugcggaaaa

SEQ ID NO: 371113 - RNA, 23 nt, Molluscum contagiosum virus
acgcgaguugcgucucccgcggc

SEQ ID NO: 371114 - RNA, 21 nt, Molluscum contagiosum virus
acgcgcaaggccgcgcccaag

SEQ ID NO: 371115 - RNA, 21 nt, Molluscum contagiosum virus
acgcgcacgccagccuggagu

SEQ ID NO: 371116 - RNA, 21 nt, Molluscum contagiosum virus
acgcgcagcuguuucugccgc

SEQ ID NO: 371117 - RNA, 18 nt, Molluscum contagiosum virus
acgcgcagggagcugcgg

SEQ ID NO: 371118 - RNA, 20 nt, Molluscum contagiosum virus
acgcgccagugcgugcacug

SEQ ID NO: 371119 - RNA, 18 nt, Molluscum contagiosum virus
acgcgccgacaugcgcac

SEQ ID NO: 371120 - RNA, 20 nt, Molluscum contagiosum virus
acgcgccgcgcgagugccag

SEQ ID NO: 371121 - RNA, 14 nt, Molluscum contagiosum virus
acgcgcgacaucuu

SEQ ID NO: 371122 - RNA, 15 nt, Molluscum contagiosum virus
acgcgcgagugugcg

SEQ ID NO: 371123 - RNA, 20 nt, Molluscum contagiosum virus
acgcgcgcguaacagcgcgc

SEQ ID NO: 371124 - RNA, 16 nt, Molluscum contagiosum virus
acgcgcgcgugcugcu

SEQ ID NO: 371125 - RNA, 13 nt, Molluscum contagiosum virus
acgcgcgcuuagc

SEQ ID NO: 371126 - RNA, 17 nt, Molluscum contagiosum virus
acgcgcguucuuugugc

SEQ ID NO: 371127 - RNA, 19 nt, Molluscum contagiosum virus
acgcgcuaccgcaagcuca

SEQ ID NO: 371128 - RNA, 15 nt, Molluscum contagiosum virus
acgcggacgcgcagc

SEQ ID NO: 371129 - RNA, 19 nt, Molluscum contagiosum virus
acgcggcgcgugucgcgga

SEQ ID NO: 371130 - RNA, 14 nt, Molluscum contagiosum virus
acgcggcucuggag

SEQ ID NO: 371131 - RNA, 14 nt, Molluscum contagiosum virus
acgcgggccugucc

SEQ ID NO: 371132 - RNA, 15 nt, Molluscum contagiosum virus
acgcggugagugcgc

SEQ ID NO: 371133 - RNA, 17 nt, Molluscum contagiosum virus
acgcggugcgcgcgugc

SEQ ID NO: 371134 - RNA, 16 nt, Molluscum contagiosum virus
acgcguacguguccau

SEQ ID NO: 371135 - RNA, 14 nt, Molluscum contagiosum virus
acgcguccacaaag

SEQ ID NO: 371136 - RNA, 23 nt, Molluscum contagiosum virus
acgcguccgccucuuccucgugc

SEQ ID NO: 371137 - RNA, 20 nt, Molluscum contagiosum virus
acgcgugcggugacuugccg

SEQ ID NO: 371138 - RNA, 20 nt, Molluscum contagiosum virus
acgcgugugguugcuugcau

SEQ ID NO: 371139 - RNA, 17 nt, Molluscum contagiosum virus
acgcuagcugugcgcua

SEQ ID NO: 371140 - RNA, 18 nt, Molluscum contagiosum virus
acgcucauggacaugcuc

SEQ ID NO: 371141 - RNA, 17 nt, Molluscum contagiosum virus
acgcucggcugccgugc

SEQ ID NO: 371142 - RNA, 11 nt, Molluscum contagiosum virus
acgcugcacau

SEQ ID NO: 371143 - RNA, 19 nt, Molluscum contagiosum virus
acgcugccuagguccacau

SEQ ID NO: 371144 - RNA, 14 nt, Molluscum contagiosum virus
acgcugcguuucca

SEQ ID NO: 371145 - RNA, 17 nt, Molluscum contagiosum virus
acgcugcucgugcugcu

SEQ ID NO: 371146 - RNA, 14 nt, Molluscum contagiosum virus
acgcugcugcacag

SEQ ID NO: 371147 - RNA, 16 nt, Molluscum contagiosum virus
acgcugcuguccuuca

SEQ ID NO: 371148 - RNA, 15 nt, Molluscum contagiosum virus
acgcuggcgcucggc

SEQ ID NO: 371149 - RNA, 23 nt, Molluscum contagiosum virus
acgcuggcgcucggcguggugcu

SEQ ID NO: 371150 - RNA, 21 nt, Molluscum contagiosum virus
acgcuggugaucacgcacgaa

SEQ ID NO: 371151 - RNA, 21 nt, Molluscum contagiosum virus
acgcuucggcucgggaacaaa

SEQ ID NO: 371152 - RNA, 23 nt, Molluscum contagiosum virus
acgcuucggcucgggaacaaagg

SEQ ID NO: 371153 - RNA, 11 nt, Molluscum contagiosum virus
acgcuuguccg

SEQ ID NO: 371154 - RNA, 12 nt, Molluscum contagiosum virus
acggacccgcga

SEQ ID NO: 371155 - RNA, 15 nt, Molluscum contagiosum virus
acggacucgccgcgc

SEQ ID NO: 371156 - RNA, 21 nt, Molluscum contagiosum virus
acggacuuuucgcgcgugcgc

SEQ ID NO: 371157 - RNA, 20 nt, Molluscum contagiosum virus
acggcaaacgccacuggguc

SEQ ID NO: 371158 - RNA, 16 nt, Molluscum contagiosum virus
acggcacccgccagcu

SEQ ID NO: 371159 - RNA, 14 nt, Molluscum contagiosum virus
acggcacgcugagc

SEQ ID NO: 371160 - RNA, 15 nt, Molluscum contagiosum virus
acggcagaccccuug

SEQ ID NO: 371161 - RNA, 16 nt, Molluscum contagiosum virus
acggcccgaaggccac

SEQ ID NO: 371162 - RNA, 17 nt, Molluscum contagiosum virus
acggcccgggugcgcgc

SEQ ID NO: 371163 - RNA, 19 nt, Molluscum contagiosum virus
acggcccgggugcgcgcgc

SEQ ID NO: 371164 - RNA, 23 nt, Molluscum contagiosum virus
acggccggcgggcgcgugcucac

SEQ ID NO: 371165 - RNA, 12 nt, Molluscum contagiosum virus
acggccugcggc

SEQ ID NO: 371166 - RNA, 18 nt, Molluscum contagiosum virus
acggcgacgcgaucgugc

SEQ ID NO: 371167 - RNA, 20 nt, Molluscum contagiosum virus
acggcgccuucgucgcgcgc

SEQ ID NO: 371168 - RNA, 19 nt, Molluscum contagiosum virus
acggcggcacccgccgcgg

SEQ ID NO: 371169 - RNA, 21 nt, Molluscum contagiosum virus
acggcggcgcucaacauccaa

SEQ ID NO: 371170 - RNA, 23 nt, Molluscum contagiosum virus
acggcuaccacgagcacugccug

SEQ ID NO: 371171 - RNA, 17 nt, Molluscum contagiosum virus
acggcuaggcgcggcgg

SEQ ID NO: 371172 - RNA, 18 nt, Molluscum contagiosum virus
acggcuucauccgcgcgc

SEQ ID NO: 371173 - RNA, 18 nt, Molluscum contagiosum virus
acggcuugccgcucggca

SEQ ID NO: 371174 - RNA, 23 nt, Molluscum contagiosum virus
acggcuugccgcucggcacaaaa

SEQ ID NO: 371175 - RNA, 14 nt, Molluscum contagiosum virus
acgggagucacuuc

SEQ ID NO: 371176 - RNA, 15 nt, Molluscum contagiosum virus
acgggcacgccgcgg

SEQ ID NO: 371177 - RNA, 17 nt, Molluscum contagiosum virus
acgggcaugcacagcug

SEQ ID NO: 371178 - RNA, 12 nt, Molluscum contagiosum virus
acgggcccgcga

SEQ ID NO: 371179 - RNA, 18 nt, Molluscum contagiosum virus
acgggcgccacuggaaga

SEQ ID NO: 371180 - RNA, 13 nt, Molluscum contagiosum virus
acgggcgccagcu

SEQ ID NO: 371181 - RNA, 14 nt, Molluscum contagiosum virus
acgggcgccagcua

SEQ ID NO: 371182 - RNA, 15 nt, Molluscum contagiosum virus
acgggcgcgcuucuc

SEQ ID NO: 371183 - RNA, 21 nt, Molluscum contagiosum virus
acgggcgcuauugcgcggcgc

SEQ ID NO: 371184 - RNA, 16 nt, Molluscum contagiosum virus
acgggcgugcgcagca

SEQ ID NO: 371185 - RNA, 15 nt, Molluscum contagiosum virus
acgggugagcucgcc

SEQ ID NO: 371186 - RNA, 16 nt, Molluscum contagiosum virus
acgguaaacucuugca

SEQ ID NO: 371187 - RNA, 17 nt, Molluscum contagiosum virus
acggucacgcaagcuuu

SEQ ID NO: 371188 - RNA, 15 nt, Molluscum contagiosum virus
acggugugcuacugc

SEQ ID NO: 371189 - RNA, 12 nt, Molluscum contagiosum virus
acguaauccaug

SEQ ID NO: 371190 - RNA, 20 nt, Molluscum contagiosum virus
acguaaugauugucaagcac

SEQ ID NO: 371191 - RNA, 15 nt, Molluscum contagiosum virus
acguacagugcgcgc

SEQ ID NO: 371192 - RNA, 16 nt, Molluscum contagiosum virus
acguacuugagcacca

SEQ ID NO: 371193 - RNA, 17 nt, Molluscum contagiosum virus
acguccguugcacgugc

SEQ ID NO: 371194 - RNA, 18 nt, Molluscum contagiosum virus
acgucgcacuggccugca

SEQ ID NO: 371195 - RNA, 14 nt, Molluscum contagiosum virus
acgugcagcggcgc

SEQ ID NO: 371196 - RNA, 11 nt, Molluscum contagiosum virus
acgugcccuac

SEQ ID NO: 371197 - RNA, 19 nt, Molluscum contagiosum virus
acgugcgcaccaucuucaa

SEQ ID NO: 371198 - RNA, 21 nt, Molluscum contagiosum virus
acgugcgccagcucugggcgc

SEQ ID NO: 371199 - RNA, 20 nt, Molluscum contagiosum virus
acgugcgcuggcccacgcug

SEQ ID NO: 371200 - RNA, 19 nt, Molluscum contagiosum virus
acgugcuccgaguccagcu

SEQ ID NO: 371201 - RNA, 19 nt, Molluscum contagiosum virus
acgugcugcagcugcgcga

SEQ ID NO: 371202 - RNA, 11 nt, Molluscum contagiosum virus
acgugcugcgc

SEQ ID NO: 371203 - RNA, 13 nt, Molluscum contagiosum virus
acgugcugcgccg

SEQ ID NO: 371204 - RNA, 14 nt, Molluscum contagiosum virus
acgugcugcucaag

SEQ ID NO: 371205 - RNA, 23 nt, Molluscum contagiosum virus
acguggcgcuuggcgagcgcugc

SEQ ID NO: 371206 - RNA, 16 nt, Molluscum contagiosum virus
acguggugcucgugga

SEQ ID NO: 371207 - RNA, 13 nt, Molluscum contagiosum virus
acguguccaugca

SEQ ID NO: 371208 - RNA, 17 nt, Molluscum contagiosum virus
acguguccaugcacgac

SEQ ID NO: 371209 - RNA, 12 nt, Molluscum contagiosum virus
acgugugcucug

SEQ ID NO: 371210 - RNA, 20 nt, Molluscum contagiosum virus
acguugcgcguucagcgcac

SEQ ID NO: 371211 - RNA, 14 nt, Molluscum contagiosum virus
acguuggcccgcaa

SEQ ID NO: 371212 - RNA, 14 nt, Molluscum contagiosum virus
acguuuucuuugcg

SEQ ID NO: 371213 - RNA, 15 nt, Molluscum contagiosum virus
acuacacugucgcgc

SEQ ID NO: 371214 - RNA, 15 nt, Molluscum contagiosum virus
acuacaucgcucucu

SEQ ID NO: 371215 - RNA, 14 nt, Molluscum contagiosum virus
acuaccacagccau

SEQ ID NO: 371216 - RNA, 15 nt, Molluscum contagiosum virus
acuacgcgcugcuag

SEQ ID NO: 371217 - RNA, 20 nt, Molluscum contagiosum virus
acuacgugcucgaguucaac

SEQ ID NO: 371218 - RNA, 13 nt, Molluscum contagiosum virus
acuacguggugcg

SEQ ID NO: 371219 - RNA, 14 nt, Molluscum contagiosum virus
acuacguggugcgc

SEQ ID NO: 371220 - RNA, 16 nt, Molluscum contagiosum virus
acuacuacguggugcg

SEQ ID NO: 371221 - RNA, 15 nt, Molluscum contagiosum virus
acuacucgucuugcg

SEQ ID NO: 371222 - RNA, 18 nt, Molluscum contagiosum virus
acuacugggaggacacgc

SEQ ID NO: 371223 - RNA, 18 nt, Molluscum contagiosum virus
acuagcacgggcgggaca

SEQ ID NO: 371224 - RNA, 17 nt, Molluscum contagiosum virus
acuagcgcuggcugcag

SEQ ID NO: 371225 - RNA, 20 nt, Molluscum contagiosum virus
acuagcguagcaugcucguc

SEQ ID NO: 371226 - RNA, 16 nt, Molluscum contagiosum virus
acucagcauguugcuc

SEQ ID NO: 371227 - RNA, 20 nt, Molluscum contagiosum virus
acuccaaggucgagcugacu

SEQ ID NO: 371228 - RNA, 14 nt, Molluscum contagiosum virus
acuccagcguggug

SEQ ID NO: 371229 - RNA, 15 nt, Molluscum contagiosum virus
acuccaucugcgcga

SEQ ID NO: 371230 - RNA, 22 nt, Molluscum contagiosum virus
acuccgagcgcgacuuguccuc

SEQ ID NO: 371231 - RNA, 21 nt, Molluscum contagiosum virus
acuccgcgaggagauucgcac

SEQ ID NO: 371232 - RNA, 14 nt, Molluscum contagiosum virus
acuccguacagcuc

SEQ ID NO: 371233 - RNA, 15 nt, Molluscum contagiosum virus
acuccguacagcucc

SEQ ID NO: 371234 - RNA, 24 nt, Molluscum contagiosum virus
acuccguggaggaucgcuacgugc

SEQ ID NO: 371235 - RNA, 23 nt, Molluscum contagiosum virus
acuccguuuuucugugcucgcgc

SEQ ID NO: 371236 - RNA, 14 nt, Molluscum contagiosum virus
acuccuucaauaua

SEQ ID NO: 371237 - RNA, 21 nt, Molluscum contagiosum virus
acuccuuccggagacaccagc

SEQ ID NO: 371238 - RNA, 22 nt, Molluscum contagiosum virus
acuccuuccggagacaccagcu

SEQ ID NO: 371239 - RNA, 23 nt, Molluscum contagiosum virus
acuccuuccggagacaccagcuc

SEQ ID NO: 371240 - RNA, 17 nt, Molluscum contagiosum virus
acuccuugaagggcaca

SEQ ID NO: 371241 - RNA, 21 nt, Molluscum contagiosum virus
acucgaacgcaaggugugcgc

SEQ ID NO: 371242 - RNA, 18 nt, Molluscum contagiosum virus
acucgacuugcuaugcua

SEQ ID NO: 371243 - RNA, 22 nt, Molluscum contagiosum virus
acucgagcacguagugcucguc

SEQ ID NO: 371244 - RNA, 19 nt, Molluscum contagiosum virus
acucgcagaacugcugcgc

SEQ ID NO: 371245 - RNA, 22 nt, Molluscum contagiosum virus
acucgccguuccacuacaagca

SEQ ID NO: 371246 - RNA, 18 nt, Molluscum contagiosum virus
acucgcgcugcagcaccu

SEQ ID NO: 371247 - RNA, 13 nt, Molluscum contagiosum virus
acucgcucucuca

SEQ ID NO: 371248 - RNA, 22 nt, Molluscum contagiosum virus
acucggacacguugcagcagca

SEQ ID NO: 371249 - RNA, 15 nt, Molluscum contagiosum virus
acucggcaugugcgc

SEQ ID NO: 371250 - RNA, 17 nt, Molluscum contagiosum virus
acucggcuucugcugca

SEQ ID NO: 371251 - RNA, 22 nt, Molluscum contagiosum virus
acucguaggacaaccauugugg

SEQ ID NO: 371252 - RNA, 13 nt, Molluscum contagiosum virus
acucgugucacaa

SEQ ID NO: 371253 - RNA, 18 nt, Molluscum contagiosum virus
agagcuggcaccgggcgc

SEQ ID NO: 371254 - RNA, 19 nt, Molluscum contagiosum virus
agaggauacccgugaucuc

SEQ ID NO: 371255 - RNA, 17 nt, Molluscum contagiosum virus
agaggccagcacaagcc

SEQ ID NO: 371256 - RNA, 13 nt, Molluscum contagiosum virus
agaggccgucaca

SEQ ID NO: 371257 - RNA, 13 nt, Molluscum contagiosum virus
agaggcuuugcuu

SEQ ID NO: 371258 - RNA, 17 nt, Molluscum contagiosum virus
agagggccuuucucaga

SEQ ID NO: 371259 - RNA, 19 nt, Molluscum contagiosum virus
agagugacgccucgagaaa

SEQ ID NO: 371260 - RNA, 18 nt, Molluscum contagiosum virus
agagugacgcugcaagac

SEQ ID NO: 371261 - RNA, 18 nt, Molluscum contagiosum virus
agaguuguuccacgaccg

SEQ ID NO: 371262 - RNA, 17 nt, Molluscum contagiosum virus
agauaaaguccucugaa

SEQ ID NO: 371263 - RNA, 18 nt, Molluscum contagiosum virus
agauacaaccgcugcuau

SEQ ID NO: 371264 - RNA, 18 nt, Molluscum contagiosum virus
agauaguuuggacgagcu

SEQ ID NO: 371265 - RNA, 14 nt, Molluscum contagiosum virus
agaucaacgcgcgc

SEQ ID NO: 371266 - RNA, 20 nt, Molluscum contagiosum virus
agaucaacgcgcgcgugcug

SEQ ID NO: 371267 - RNA, 17 nt, Molluscum contagiosum virus
agaucaggcagcugcug

SEQ ID NO: 371268 - RNA, 17 nt, Molluscum contagiosum virus
agaucaugggcgugcuc

SEQ ID NO: 371269 - RNA, 15 nt, Molluscum contagiosum virus
agaucggacucagca

SEQ ID NO: 371270 - RNA, 16 nt, Molluscum contagiosum virus
agaucguuuugcacuu

SEQ ID NO: 371271 - RNA, 14 nt, Molluscum contagiosum virus
agaugaagcucucg

SEQ ID NO: 371272 - RNA, 14 nt, Molluscum contagiosum virus
agaugaggcugcuc

SEQ ID NO: 371273 - RNA, 22 nt, Molluscum contagiosum virus
agaugaguaccgcgggcgcaga

SEQ ID NO: 371274 - RNA, 19 nt, Molluscum contagiosum virus
agaugcucuacgugcugca

SEQ ID NO: 371275 - RNA, 18 nt, Molluscum contagiosum virus
agauggcgcagcacuucg

SEQ ID NO: 371276 - RNA, 15 nt, Molluscum contagiosum virus
agauucguggcgagc

SEQ ID NO: 371277 - RNA, 12 nt, Molluscum contagiosum virus
agcaaacagccu

SEQ ID NO: 371278 - RNA, 23 nt, Molluscum contagiosum virus
agcaaaccauucucaaccaccug

SEQ ID NO: 371279 - RNA, 19 nt, Molluscum contagiosum virus
agcaaacugugcuccugag

SEQ ID NO: 371280 - RNA, 22 nt, Molluscum contagiosum virus
agcaaccucgggaagcccucag

SEQ ID NO: 371281 - RNA, 15 nt, Molluscum contagiosum virus
agcaacgacaaggaa

SEQ ID NO: 371282 - RNA, 16 nt, Molluscum contagiosum virus
agcaacgacaaggaaa

SEQ ID NO: 371283 - RNA, 21 nt, Molluscum contagiosum virus
agcaacggcggcgcaagcgca

SEQ ID NO: 371284 - RNA, 23 nt, Molluscum contagiosum virus
agcaacggcggcgcaagcgcaag

SEQ ID NO: 371285 - RNA, 13 nt, Molluscum contagiosum virus
agcaacuugcucu

SEQ ID NO: 371286 - RNA, 14 nt, Molluscum contagiosum virus
agcaacuugcucua

SEQ ID NO: 371287 - RNA, 10 nt, Molluscum contagiosum virus
agcaagcacg

SEQ ID NO: 371288 - RNA, 20 nt, Molluscum contagiosum virus
agcaagcgcaccuuuuccac

SEQ ID NO: 371289 - RNA, 20 nt, Molluscum contagiosum virus
agcaaggcccacuuccguga

SEQ ID NO: 371290 - RNA, 22 nt, Molluscum contagiosum virus
agcaauugcugggcacaagcuu

SEQ ID NO: 371291 - RNA, 18 nt, Molluscum contagiosum virus
agcacgacggucuuccag

SEQ ID NO: 371292 - RNA, 20 nt, Molluscum contagiosum virus
agcacgagaaacaagacgaa

SEQ ID NO: 371293 - RNA, 15 nt, Molluscum contagiosum virus
agcacgagcugcugc

SEQ ID NO: 371294 - RNA, 18 nt, Molluscum contagiosum virus
agcacgauuccgcuguac

SEQ ID NO: 371295 - RNA, 15 nt, Molluscum contagiosum virus
agcacgcgugugcga

SEQ ID NO: 371296 - RNA, 14 nt, Molluscum contagiosum virus
agcacgcuacugcg

SEQ ID NO: 371297 - RNA, 22 nt, Molluscum contagiosum virus
agcacuacgugcucgaguucaa

SEQ ID NO: 371298 - RNA, 12 nt, Molluscum contagiosum virus
agcacugcgcca

SEQ ID NO: 371299 - RNA, 14 nt, Molluscum contagiosum virus
agcagaccaagaag

SEQ ID NO: 371300 - RNA, 17 nt, Molluscum contagiosum virus
agcagcaaacugugcuc

SEQ ID NO: 371301 - RNA, 18 nt, Molluscum contagiosum virus
agcagcaaacugugcucc

SEQ ID NO: 371302 - RNA, 19 nt, Molluscum contagiosum virus
agcagccccgacgccagcg

SEQ ID NO: 371303 - RNA, 12 nt, Molluscum contagiosum virus
agcagcuccagc

SEQ ID NO: 371304 - RNA, 21 nt, Molluscum contagiosum virus
agcagcuccagcauggcgcca

SEQ ID NO: 371305 - RNA, 13 nt, Molluscum contagiosum virus
agcagcucggggc

SEQ ID NO: 371306 - RNA, 14 nt, Molluscum contagiosum virus
agcagcugcugcgc

SEQ ID NO: 371307 - RNA, 21 nt, Molluscum contagiosum virus
agcagcuggccggcucgcuac

SEQ ID NO: 371308 - RNA, 13 nt, Molluscum contagiosum virus
agcaggcuguguu

SEQ ID NO: 371309 - RNA, 22 nt, Molluscum contagiosum virus
aaacgcacagccccugcugcuc

SEQ ID NO: 371310 - RNA, 12 nt, Molluscum contagiosum virus
aaacgcacuguc

SEQ ID NO: 371311 - RNA, 23 nt, Molluscum contagiosum virus
aaacgcacugucguaacaaugga

SEQ ID NO: 371312 - RNA, 22 nt, Molluscum contagiosum virus
aaacgcgcccccguccgugcca

SEQ ID NO: 371313 - RNA, 14 nt, Molluscum contagiosum virus
aaacgcuguuuuca

SEQ ID NO: 371314 - RNA, 20 nt, Molluscum contagiosum virus
aaacucuccgacgugcugcg

SEQ ID NO: 371315 - RNA, 18 nt, Molluscum contagiosum virus
aaacugcauccuggggaa

SEQ ID NO: 371316 - RNA, 16 nt, Molluscum contagiosum virus
aaacugcuugucgaua

SEQ ID NO: 371317 - RNA, 13 nt, Molluscum contagiosum virus
aaagcacagucca

SEQ ID NO: 371318 - RNA, 17 nt, Molluscum contagiosum virus
aaagcaucgacgugcag

SEQ ID NO: 371319 - RNA, 18 nt, Molluscum contagiosum virus
aaagccacuagcguagca

SEQ ID NO: 371320 - RNA, 15 nt, Molluscum contagiosum virus
aaagcgcacacuugc

SEQ ID NO: 371321 - RNA, 20 nt, Molluscum contagiosum virus
aaaggacaugggcacaaguc

SEQ ID NO: 371322 - RNA, 15 nt, Molluscum contagiosum virus
aaaggaugaacguga

SEQ ID NO: 371323 - RNA, 17 nt, Molluscum contagiosum virus
aaaggcacccaccagga

SEQ ID NO: 371324 - RNA, 20 nt, Molluscum contagiosum virus
aaaggcacccgcaacaagga

SEQ ID NO: 371325 - RNA, 21 nt, Molluscum contagiosum virus
aaaggccccccgcaacaagga

SEQ ID NO: 371326 - RNA, 12 nt, Molluscum contagiosum virus
aaagucaucugc

SEQ ID NO: 371327 - RNA, 16 nt, Molluscum contagiosum virus
aaauaaugaaccugca

SEQ ID NO: 371328 - RNA, 12 nt, Molluscum contagiosum virus
aaauagcauguc

SEQ ID NO: 371329 - RNA, 18 nt, Molluscum contagiosum virus
aaauagcgcgcuagcucc

SEQ ID NO: 371330 - RNA, 15 nt, Molluscum contagiosum virus
aaaugcuugcuuccg

SEQ ID NO: 371331 - RNA, 12 nt, Molluscum contagiosum virus
aaauggccuugc

SEQ ID NO: 371332 - RNA, 23 nt, Molluscum contagiosum virus
aaauggccuugcgagcgcugccu

SEQ ID NO: 371333 - RNA, 17 nt, Molluscum contagiosum virus
aaauggcguuaccagga

SEQ ID NO: 371334 - RNA, 20 nt, Molluscum contagiosum virus
aaauggcugcgaccaagaca

SEQ ID NO: 371335 - RNA, 19 nt, Molluscum contagiosum virus
aaauuaaccaacaguaucc

SEQ ID NO: 371336 - RNA, 15 nt, Molluscum contagiosum virus
aacaaaaaacaacuc

SEQ ID NO: 371337 - RNA, 14 nt, Molluscum contagiosum virus
aacaaaaacugaaa

SEQ ID NO: 371338 - RNA, 16 nt, Molluscum contagiosum virus
aacaaccacucuuuca

SEQ ID NO: 371339 - RNA, 17 nt, Molluscum contagiosum virus
aacaaccacucuuucac

SEQ ID NO: 371340 - RNA, 15 nt, Molluscum contagiosum virus
aacaagagcuuacua

SEQ ID NO: 371341 - RNA, 14 nt, Molluscum contagiosum virus
aacaagcacaugug

SEQ ID NO: 371342 - RNA, 11 nt, Molluscum contagiosum virus
aacaagcugcu

SEQ ID NO: 371343 - RNA, 20 nt, Molluscum contagiosum virus
aacaaugcugcaucuagccu

SEQ ID NO: 371344 - RNA, 14 nt, Molluscum contagiosum virus
aacacagcuagucu

SEQ ID NO: 371345 - RNA, 13 nt, Molluscum contagiosum virus
aacacccagguuc

SEQ ID NO: 371346 - RNA, 19 nt, Molluscum contagiosum virus
aacaccuccugcuuugcac

SEQ ID NO: 371347 - RNA, 16 nt, Molluscum contagiosum virus
aacacgacauguacau

SEQ ID NO: 371348 - RNA, 23 nt, Molluscum contagiosum virus
aacacgagacugagugcugagcc

SEQ ID NO: 371349 - RNA, 16 nt, Molluscum contagiosum virus
aacacgagugcuugcg

SEQ ID NO: 371350 - RNA, 21 nt, Molluscum contagiosum virus
aacagacuuguccaaugcuuu

SEQ ID NO: 371351 - RNA, 20 nt, Molluscum contagiosum virus
aacagagaaaggcacccacc

SEQ ID NO: 371352 - RNA, 22 nt, Molluscum contagiosum virus
aacagcuuggcacagugcugga

SEQ ID NO: 371353 - RNA, 21 nt, Molluscum contagiosum virus
aacaguaacgguaccuggcuu

SEQ ID NO: 371354 - RNA, 14 nt, Molluscum contagiosum virus
aacagugcgugcca

SEQ ID NO: 371355 - RNA, 22 nt, Molluscum contagiosum virus
aacauacgcacucguggcaaca

SEQ ID NO: 371356 - RNA, 19 nt, Molluscum contagiosum virus
aacauccugccacaccagc

SEQ ID NO: 371357 - RNA, 13 nt, Molluscum contagiosum virus
aacauguugugcu

SEQ ID NO: 371358 - RNA, 21 nt, Molluscum contagiosum virus
aacauguugugcucguguugu

SEQ ID NO: 371359 - RNA, 17 nt, Molluscum contagiosum virus
aacauugugacaaagac

SEQ ID NO: 371360 - RNA, 14 nt, Molluscum contagiosum virus
aaccaaucauuuca

SEQ ID NO: 371361 - RNA, 18 nt, Molluscum contagiosum virus
aaccgaggccgcgcucuu

SEQ ID NO: 371362 - RNA, 19 nt, Molluscum contagiosum virus
aaccucacucacaugugcu

SEQ ID NO: 371363 - RNA, 13 nt, Molluscum contagiosum virus
aacgacgggcgcg

SEQ ID NO: 371364 - RNA, 21 nt, Molluscum contagiosum virus
aacgacgggcgcgcuucucau

SEQ ID NO: 371365 - RNA, 16 nt, Molluscum contagiosum virus
aacgagggaugcacac

SEQ ID NO: 371366 - RNA, 22 nt, Molluscum contagiosum virus
aacgcaaggugugcgcgcugca

SEQ ID NO: 371367 - RNA, 13 nt, Molluscum contagiosum virus
aacgcacgcggaa

SEQ ID NO: 371368 - RNA, 21 nt, Molluscum contagiosum virus
aacgcacgcggaaacaagcac

SEQ ID NO: 371369 - RNA, 12 nt, Molluscum contagiosum virus
aacgcacugucg

SEQ ID NO: 371370 - RNA, 15 nt, Molluscum contagiosum virus
aacgcaggacacugu

SEQ ID NO: 371371 - RNA, 15 nt, Molluscum contagiosum virus
aacgccagugcuuug

SEQ ID NO: 371372 - RNA, 19 nt, Molluscum contagiosum virus
aacgcgaggccggccgugc

SEQ ID NO: 371373 - RNA, 14 nt, Molluscum contagiosum virus
aacgcgcgcucguc

SEQ ID NO: 371374 - RNA, 17 nt, Molluscum contagiosum virus
aacgcggcgugugcggg

SEQ ID NO: 371375 - RNA, 13 nt, Molluscum contagiosum virus
aacgcgggccagg

SEQ ID NO: 371376 - RNA, 23 nt, Molluscum contagiosum virus
aacgcugccgcuggcgcuaccua

SEQ ID NO: 371377 - RNA, 20 nt, Molluscum contagiosum virus
aacggcgccaucgagaugcu

SEQ ID NO: 371378 - RNA, 18 nt, Molluscum contagiosum virus
aacguacgaacuggcaau

SEQ ID NO: 371379 - RNA, 14 nt, Molluscum contagiosum virus
aacgucgcacuggc

SEQ ID NO: 371380 - RNA, 20 nt, Molluscum contagiosum virus
aacgucucuccgaguagugu

SEQ ID NO: 371381 - RNA, 15 nt, Molluscum contagiosum virus
aacgucuucuaccgc

SEQ ID NO: 371382 - RNA, 11 nt, Molluscum contagiosum virus
aacgugcugcg

SEQ ID NO: 371383 - RNA, 12 nt, Molluscum contagiosum virus
aacgugcugcuc

SEQ ID NO: 371384 - RNA, 23 nt, Molluscum contagiosum virus
aacguugugcgcaacgucuuccg

SEQ ID NO: 371385 - RNA, 15 nt, Molluscum contagiosum virus
aacucgcugcugcuc

SEQ ID NO: 371386 - RNA, 14 nt, Molluscum contagiosum virus
aacucguaggacaa

SEQ ID NO: 371387 - RNA, 20 nt, Molluscum contagiosum virus
aacucgugccugucucgcaa

SEQ ID NO: 371388 - RNA, 16 nt, Molluscum contagiosum virus
aacucuccgacgugcu

SEQ ID NO: 371389 - RNA, 14 nt, Molluscum contagiosum virus
aacucugcucgugc

SEQ ID NO: 371390 - RNA, 16 nt, Molluscum contagiosum virus
aacugcagcagcuggc

SEQ ID NO: 371391 - RNA, 22 nt, Molluscum contagiosum virus
aacugcaggccccuacacgcaa

SEQ ID NO: 371392 - RNA, 13 nt, Molluscum contagiosum virus
aacuggacugagc

SEQ ID NO: 371393 - RNA, 21 nt, Molluscum contagiosum virus
aagaaaaucgccuuugugaca

SEQ ID NO: 371394 - RNA, 14 nt, Molluscum contagiosum virus
aagaacaccaagag

SEQ ID NO: 371395 - RNA, 21 nt, Molluscum contagiosum virus
aagaacagagaaaggcaccca

SEQ ID NO: 371396 - RNA, 18 nt, Molluscum contagiosum virus
aagaagaggccagcacaa

SEQ ID NO: 371397 - RNA, 22 nt, Molluscum contagiosum virus
aagaagaggccagcacaagccg

SEQ ID NO: 371398 - RNA, 22 nt, Molluscum contagiosum virus
aagaagaggccggcacaagccg

SEQ ID NO: 371399 - RNA, 18 nt, Molluscum contagiosum virus
aagaagcgcuucuuugcg

SEQ ID NO: 371400 - RNA, 17 nt, Molluscum contagiosum virus
aagacaacacucgugcu

SEQ ID NO: 371401 - RNA, 15 nt, Molluscum contagiosum virus
aagacaguccgucuc

SEQ ID NO: 371402 - RNA, 19 nt, Molluscum contagiosum virus
aagacauugccuuuugcac

SEQ ID NO: 371403 - RNA, 13 nt, Molluscum contagiosum virus
aagaccacauccu

SEQ ID NO: 371404 - RNA, 13 nt, Molluscum contagiosum virus
aagaccaccagca

SEQ ID NO: 371405 - RNA, 21 nt, Molluscum contagiosum virus
aagaccaucaucgcgcugcuc

SEQ ID NO: 371406 - RNA, 18 nt, Molluscum contagiosum virus
aagaccuuggacacgugc

SEQ ID NO: 371407 - RNA, 16 nt, Molluscum contagiosum virus
aagacgcgagcggcuu

SEQ ID NO: 371408 - RNA, 22 nt, Molluscum contagiosum virus
aagacguggacgaggccaaccu

SEQ ID NO: 371409 - RNA, 19 nt, Molluscum contagiosum virus
aagagcccgccgggcaccg

SEQ ID NO: 371410 - RNA, 23 nt, Molluscum contagiosum virus
aagagccgccggggcccaugcuc

SEQ ID NO: 371411 - RNA, 17 nt, Molluscum contagiosum virus
aagagcgguuccugcuu

SEQ ID NO: 371412 - RNA, 14 nt, Molluscum contagiosum virus
aagagcuuacuaga

SEQ ID NO: 371413 - RNA, 17 nt, Molluscum contagiosum virus
aagaggacgagcugcua

SEQ ID NO: 371414 - RNA, 18 nt, Molluscum contagiosum virus
aagaggccggcacaagcc

SEQ ID NO: 371415 - RNA, 16 nt, Molluscum contagiosum virus
aagaggcuuacugcaa

SEQ ID NO: 371416 - RNA, 18 nt, Molluscum contagiosum virus
aagaguggcucacagccg

SEQ ID NO: 371417 - RNA, 22 nt, Molluscum contagiosum virus
aagauauacaccaggcgcgugc

SEQ ID NO: 371418 - RNA, 17 nt, Molluscum contagiosum virus
aagaucguuuugcacuu

SEQ ID NO: 371419 - RNA, 18 nt, Molluscum contagiosum virus
aagaucguuuugcacuug

SEQ ID NO: 371420 - RNA, 12 nt, Molluscum contagiosum virus
aagaugaagcuc

SEQ ID NO: 371421 - RNA, 14 nt, Molluscum contagiosum virus
aagaugcugcgcgu

SEQ ID NO: 371422 - RNA, 21 nt, Molluscum contagiosum virus
aagauggcgcagcacuucgac

SEQ ID NO: 371423 - RNA, 23 nt, Molluscum contagiosum virus
aagcacaacgggcucgugcugga

SEQ ID NO: 371424 - RNA, 15 nt, Molluscum contagiosum virus
aagcacgagcugcug

SEQ ID NO: 371425 - RNA, 22 nt, Molluscum contagiosum virus
aagcacgcggccauuuacuucg

SEQ ID NO: 371426 - RNA, 14 nt, Molluscum contagiosum virus
aagcacguagcucg

SEQ ID NO: 371427 - RNA, 19 nt, Molluscum contagiosum virus
aagcacuacauggacgugc

SEQ ID NO: 371428 - RNA, 16 nt, Molluscum contagiosum virus
aagcaguaccugcuaa

SEQ ID NO: 371429 - RNA, 21 nt, Molluscum contagiosum virus
aagcccgagcgcguccaugag

SEQ ID NO: 371430 - RNA, 15 nt, Molluscum contagiosum virus
aagcgcacacuugcg

SEQ ID NO: 371431 - RNA, 17 nt, Molluscum contagiosum virus
aagcgcaccuuuuccac

SEQ ID NO: 371432 - RNA, 16 nt, Molluscum contagiosum virus
aagcgcccgugaugca

SEQ ID NO: 371433 - RNA, 14 nt, Molluscum contagiosum virus
aagcgccgcgcgcg

SEQ ID NO: 371434 - RNA, 14 nt, Molluscum contagiosum virus
aagcgcgcucgggc

SEQ ID NO: 371435 - RNA, 13 nt, Molluscum contagiosum virus
aagcgcggccgcg

SEQ ID NO: 371436 - RNA, 18 nt, Molluscum contagiosum virus
aagcgcuccaacuuccac

SEQ ID NO: 371437 - RNA, 13 nt, Molluscum contagiosum virus
aagcggugcagcg

SEQ ID NO: 371438 - RNA, 15 nt, Molluscum contagiosum virus
aagcguguucgugcc

SEQ ID NO: 371439 - RNA, 11 nt, Molluscum contagiosum virus
aagcucaagaa

SEQ ID NO: 371440 - RNA, 13 nt, Molluscum contagiosum virus
aagcucaugguuu

SEQ ID NO: 371441 - RNA, 21 nt, Molluscum contagiosum virus
aagcuggccgaggucuuccac

SEQ ID NO: 371442 - RNA, 19 nt, Molluscum contagiosum virus
aagcugugcguacaccuaa

SEQ ID NO: 371443 - RNA, 13 nt, Molluscum contagiosum virus
aagcuucucgcca

SEQ ID NO: 371444 - RNA, 14 nt, Molluscum contagiosum virus
aagcuugcucagca

SEQ ID NO: 371445 - RNA, 15 nt, Molluscum contagiosum virus
aaggaaaggcaccca

SEQ ID NO: 371446 - RNA, 17 nt, Molluscum contagiosum virus
aaggaaaggcacccacc

SEQ ID NO: 371447 - RNA, 17 nt, Molluscum contagiosum virus
aaggaaaggcaccugca

SEQ ID NO: 371448 - RNA, 15 nt, Molluscum contagiosum virus
aaggacuaccagcuc

SEQ ID NO: 371449 - RNA, 15 nt, Molluscum contagiosum virus
aaggauggacaaaga

SEQ ID NO: 371450 - RNA, 14 nt, Molluscum contagiosum virus
aaggcacccgcagg

SEQ ID NO: 371451 - RNA, 17 nt, Molluscum contagiosum virus
aaggcccacuuccguga

SEQ ID NO: 371452 - RNA, 13 nt, Molluscum contagiosum virus
aaggcgacggggu

SEQ ID NO: 371453 - RNA, 12 nt, Molluscum contagiosum virus
aaggcgccgcgu

SEQ ID NO: 371454 - RNA, 18 nt, Molluscum contagiosum virus
aaggcgccguccaugugc

SEQ ID NO: 371455 - RNA, 21 nt, Molluscum contagiosum virus
aaggcgugcgccgugcgucuc

SEQ ID NO: 371456 - RNA, 15 nt, Molluscum contagiosum virus
aaggcucgagcugca

SEQ ID NO: 371457 - RNA, 19 nt, Molluscum contagiosum virus
aagggcuccuucuucagca

SEQ ID NO: 371458 - RNA, 14 nt, Molluscum contagiosum virus
aagguacccgcagg

SEQ ID NO: 371459 - RNA, 16 nt, Molluscum contagiosum virus
aagguacccgcaggaa

SEQ ID NO: 371460 - RNA, 17 nt, Molluscum contagiosum virus
aaggucucgagcuccag

SEQ ID NO: 371461 - RNA, 23 nt, Molluscum contagiosum virus
aaggucuucaggaacaaggccaa

SEQ ID NO: 371462 - RNA, 11 nt, Molluscum contagiosum virus
aaggugcuguc

SEQ ID NO: 371463 - RNA, 20 nt, Molluscum contagiosum virus
aaguacaacccaaacauguc

SEQ ID NO: 371464 - RNA, 23 nt, Molluscum contagiosum virus
aaguaccagccgcugcgccgcca

SEQ ID NO: 371465 - RNA, 15 nt, Molluscum contagiosum virus
aagucgaagaggguc

SEQ ID NO: 371466 - RNA, 20 nt, Molluscum contagiosum virus
aagucguggccguagugcuc

SEQ ID NO: 371467 - RNA, 17 nt, Molluscum contagiosum virus
aagucuucaagacuggc

SEQ ID NO: 371468 - RNA, 17 nt, Molluscum contagiosum virus
aagugcgucgacgugga

SEQ ID NO: 371469 - RNA, 18 nt, Molluscum contagiosum virus
aagugcuccgcacgugga

SEQ ID NO: 371470 - RNA, 19 nt, Molluscum contagiosum virus
aagugcuccgcacguggaa

SEQ ID NO: 371471 - RNA, 12 nt, Molluscum contagiosum virus
aauaaagaggcu

SEQ ID NO: 371472 - RNA, 20 nt, Molluscum contagiosum virus
aauaccaggccacgugcuca

SEQ ID NO: 371473 - RNA, 17 nt, Molluscum contagiosum virus
aauaccggagacaccag

SEQ ID NO: 371474 - RNA, 12 nt, Molluscum contagiosum virus
aauaccggagag

SEQ ID NO: 371475 - RNA, 21 nt, Molluscum contagiosum virus
aaucacggcuguaaugugcug

SEQ ID NO: 371476 - RNA, 22 nt, Molluscum contagiosum virus
aaucucgccggcuguaaaugga

SEQ ID NO: 371477 - RNA, 12 nt, Molluscum contagiosum virus
aaugauugucaa

SEQ ID NO: 371478 - RNA, 16 nt, Molluscum contagiosum virus
aaugauugucaagcac

SEQ ID NO: 371479 - RNA, 23 nt, Molluscum contagiosum virus
aaugcaguaugugaacacgacau

SEQ ID NO: 371480 - RNA, 14 nt, Molluscum contagiosum virus
aaugcagugcccgg

SEQ ID NO: 371481 - RNA, 18 nt, Molluscum contagiosum virus
aaugcaugcggagcuggc

SEQ ID NO: 371482 - RNA, 14 nt, Molluscum contagiosum virus
aaugcgcacacuug

SEQ ID NO: 371483 - RNA, 19 nt, Molluscum contagiosum virus
aaugcugcgcacgcuaguc

SEQ ID NO: 371484 - RNA, 18 nt, Molluscum contagiosum virus
aauggcgcgcgagcacag

SEQ ID NO: 371485 - RNA, 18 nt, Molluscum contagiosum virus
aaugugcuggucaagaac

SEQ ID NO: 371486 - RNA, 21 nt, Molluscum contagiosum virus
aauuauguguaguuaaaugac

SEQ ID NO: 371487 - RNA, 23 nt, Molluscum contagiosum virus
aauucaaaggugcucacccuuaa

SEQ ID NO: 371488 - RNA, 21 nt, Molluscum contagiosum virus
aauuccguccagugaaaugac

SEQ ID NO: 371489 - RNA, 20 nt, Molluscum contagiosum virus
aauuccucgagagggagcag

SEQ ID NO: 371490 - RNA, 23 nt, Molluscum contagiosum virus
aauucuggcguacucgugucaca

SEQ ID NO: 371491 - RNA, 20 nt, Molluscum contagiosum virus
aauugcugggcacaagcuuu

SEQ ID NO: 371492 - RNA, 19 nt, Molluscum contagiosum virus
acaaaaaaaacacacgaac

SEQ ID NO: 371493 - RNA, 14 nt, Molluscum contagiosum virus
acaaaaaacaacuc

SEQ ID NO: 371494 - RNA, 22 nt, Molluscum contagiosum virus
acaaaauggcugcgaccaagac

SEQ ID NO: 371495 - RNA, 17 nt, Molluscum contagiosum virus
acaaacauugugacaaa

SEQ ID NO: 371496 - RNA, 13 nt, Molluscum contagiosum virus
acaaacgugcaug

SEQ ID NO: 371497 - RNA, 21 nt, Molluscum contagiosum virus
acaacacgcuguugcugcugc

SEQ ID NO: 371498 - RNA, 17 nt, Molluscum contagiosum virus
acaaccagacgugcuac

SEQ ID NO: 371499 - RNA, 16 nt, Molluscum contagiosum virus
acaacccaaacauguc

SEQ ID NO: 371500 - RNA, 14 nt, Molluscum contagiosum virus
acaacgagcucucc

SEQ ID NO: 371501 - RNA, 12 nt, Molluscum contagiosum virus
acaacgcgcuac

SEQ ID NO: 371502 - RNA, 17 nt, Molluscum contagiosum virus
acaacgugcugcucaag

SEQ ID NO: 371503 - RNA, 19 nt, Molluscum contagiosum virus
acaacucauagcgccacga

SEQ ID NO: 371504 - RNA, 19 nt, Molluscum contagiosum virus
acaagaaaaaacaacaaga

SEQ ID NO: 371505 - RNA, 15 nt, Molluscum contagiosum virus
acaagaagcgcuucu

SEQ ID NO: 371506 - RNA, 23 nt, Molluscum contagiosum virus
acaagaagcgcuucuuugcgcgc

SEQ ID NO: 371507 - RNA, 15 nt, Molluscum contagiosum virus
acaagcggugcagcu

SEQ ID NO: 371508 - RNA, 16 nt, Molluscum contagiosum virus
acaagcguguucgugc

SEQ ID NO: 371509 - RNA, 13 nt, Molluscum contagiosum virus
acaaggaaaggca

SEQ ID NO: 371510 - RNA, 15 nt, Molluscum contagiosum virus
acaaggaggcuuucu

SEQ ID NO: 371511 - RNA, 19 nt, Molluscum contagiosum virus
acaaggaggucaugaccaa

SEQ ID NO: 371512 - RNA, 22 nt, Molluscum contagiosum virus
acaaggaggucaugaccaagga

SEQ ID NO: 371513 - RNA, 15 nt, Molluscum contagiosum virus
acaaggauggacaaa

SEQ ID NO: 371514 - RNA, 21 nt, Molluscum contagiosum virus
acaagucgucgaucgccucga

SEQ ID NO: 371515 - RNA, 14 nt, Molluscum contagiosum virus
ugcgcacgugcgcg

SEQ ID NO: 371516 - RNA, 20 nt, Molluscum contagiosum virus
ugcgcaucccucgucuuugc

SEQ ID NO: 371517 - RNA, 18 nt, Molluscum contagiosum virus
ugcgccacgccaagcgcu

SEQ ID NO: 371518 - RNA, 16 nt, Molluscum contagiosum virus
ugcgcccgcaaaccuu

SEQ ID NO: 371519 - RNA, 13 nt, Molluscum contagiosum virus
ugcgccucggacu

SEQ ID NO: 371520 - RNA, 16 nt, Molluscum contagiosum virus
ugcgccugcacuacug

SEQ ID NO: 371521 - RNA, 14 nt, Molluscum contagiosum virus
ugcgccugcacuuc

SEQ ID NO: 371522 - RNA, 15 nt, Molluscum contagiosum virus
ugcgccugcacuucg

SEQ ID NO: 371523 - RNA, 19 nt, Molluscum contagiosum virus
ugcgccuucugccugcccg

SEQ ID NO: 371524 - RNA, 20 nt, Molluscum contagiosum virus
ugcgcgagcgcgcgcugcgc

SEQ ID NO: 371525 - RNA, 18 nt, Molluscum contagiosum virus
ugcgcgcgcucauggcgc

SEQ ID NO: 371526 - RNA, 22 nt, Molluscum contagiosum virus
ugcgcgcguaugcgaacagccg

SEQ ID NO: 371527 - RNA, 16 nt, Molluscum contagiosum virus
ugcgcggagacuuccu

SEQ ID NO: 371528 - RNA, 15 nt, Molluscum contagiosum virus
ugcgcguccacaaag

SEQ ID NO: 371529 - RNA, 17 nt, Molluscum contagiosum virus
ugcgcguucgcaaagac

SEQ ID NO: 371530 - RNA, 18 nt, Molluscum contagiosum virus
ugcgcguucgcaaagacg

SEQ ID NO: 371531 - RNA, 16 nt, Molluscum contagiosum virus
ugcgcucucagagcau

SEQ ID NO: 371532 - RNA, 22 nt, Molluscum contagiosum virus
ugcgcucucgggcaugcacuuc

SEQ ID NO: 371533 - RNA, 19 nt, Molluscum contagiosum virus
ugcgcuuccucuacaccag

SEQ ID NO: 371534 - RNA, 16 nt, Molluscum contagiosum virus
ugcgcuucgccgcgcg

SEQ ID NO: 371535 - RNA, 15 nt, Molluscum contagiosum virus
ugcgcuucuauugcc

SEQ ID NO: 371536 - RNA, 14 nt, Molluscum contagiosum virus
ugcggacaagacaa

SEQ ID NO: 371537 - RNA, 16 nt, Molluscum contagiosum virus
ugcggacaccagaacc

SEQ ID NO: 371538 - RNA, 19 nt, Molluscum contagiosum virus
ugcggcaacugccugcgcu

SEQ ID NO: 371539 - RNA, 13 nt, Molluscum contagiosum virus
ugcggcaggcgcu

SEQ ID NO: 371540 - RNA, 18 nt, Molluscum contagiosum virus
ugcggcaggcgcugcgcg

SEQ ID NO: 371541 - RNA, 20 nt, Molluscum contagiosum virus
ugcggcgcgugccgcugcgc

SEQ ID NO: 371542 - RNA, 22 nt, Molluscum contagiosum virus
ugcggcgcucgcagcacaugca

SEQ ID NO: 371543 - RNA, 19 nt, Molluscum contagiosum virus
ugcggcggcgcgugcugcg

SEQ ID NO: 371544 - RNA, 23 nt, Molluscum contagiosum virus
ugcggcggcuuucucacgcccgc

SEQ ID NO: 371545 - RNA, 20 nt, Molluscum contagiosum virus
ugcgggcggcacacacuugc

SEQ ID NO: 371546 - RNA, 19 nt, Molluscum contagiosum virus
ugcgggucucggggcuccg

SEQ ID NO: 371547 - RNA, 17 nt, Molluscum contagiosum virus
ugcggucgcgagccacg

SEQ ID NO: 371548 - RNA, 13 nt, Molluscum contagiosum virus
ugcguacaccuaa

SEQ ID NO: 371549 - RNA, 15 nt, Molluscum contagiosum virus
ugcgucacaagcacc

SEQ ID NO: 371550 - RNA, 11 nt, Molluscum contagiosum virus
ugcgucucucu

SEQ ID NO: 371551 - RNA, 14 nt, Molluscum contagiosum virus
ugcgugcacugucu

SEQ ID NO: 371552 - RNA, 13 nt, Molluscum contagiosum virus
ugcgugucucucg

SEQ ID NO: 371553 - RNA, 23 nt, Molluscum contagiosum virus
ugcguuggcaacgcgggggccau

SEQ ID NO: 371554 - RNA, 19 nt, Molluscum contagiosum virus
ugcuagagcauauccugau

SEQ ID NO: 371555 - RNA, 16 nt, Molluscum contagiosum virus
ugcuagcggccuguuc

SEQ ID NO: 371556 - RNA, 16 nt, Molluscum contagiosum virus
ugcuagcgugugccgc

SEQ ID NO: 371557 - RNA, 23 nt, Molluscum contagiosum virus
ugcuauacgcgccagugcgugca

SEQ ID NO: 371558 - RNA, 15 nt, Molluscum contagiosum virus
ugcucaagcaccugc

SEQ ID NO: 371559 - RNA, 14 nt, Molluscum contagiosum virus
ugcucaagcacugc

SEQ ID NO: 371560 - RNA, 19 nt, Molluscum contagiosum virus
ugcucaaggacuaccagcu

SEQ ID NO: 371561 - RNA, 14 nt, Molluscum contagiosum virus
ugcucacccuuaau

SEQ ID NO: 371562 - RNA, 20 nt, Molluscum contagiosum virus
ugcucaggccagcaucuugg

SEQ ID NO: 371563 - RNA, 23 nt, Molluscum contagiosum virus
ugcucaugcgcgggaugcuggac

SEQ ID NO: 371564 - RNA, 22 nt, Molluscum contagiosum virus
ugcucauucuccaaaugccgug

SEQ ID NO: 371565 - RNA, 19 nt, Molluscum contagiosum virus
ugcucccgucgagcacgau

SEQ ID NO: 371566 - RNA, 15 nt, Molluscum contagiosum virus
ugcuccgcacgugga

SEQ ID NO: 371567 - RNA, 22 nt, Molluscum contagiosum virus
ugcucgaagaguuggacagcca

SEQ ID NO: 371568 - RNA, 9 nt, Molluscum contagiosum virus
ugcucgccc

SEQ ID NO: 371569 - RNA, 17 nt, Molluscum contagiosum virus
ugcucgcgcacgcgcac

SEQ ID NO: 371570 - RNA, 16 nt, Molluscum contagiosum virus
ugcucgcgggccuuug

SEQ ID NO: 371571 - RNA, 15 nt, Molluscum contagiosum virus
ugcucggacacacgc

SEQ ID NO: 371572 - RNA, 17 nt, Molluscum contagiosum virus
ugcucgguagcguggag

SEQ ID NO: 371573 - RNA, 21 nt, Molluscum contagiosum virus
ugcucgguagcguggagcugg

SEQ ID NO: 371574 - RNA, 18 nt, Molluscum contagiosum virus
ugcucuaccuggugcugg

SEQ ID NO: 371575 - RNA, 22 nt, Molluscum contagiosum virus
ugcucuacuggcggcgcccgug

SEQ ID NO: 371576 - RNA, 16 nt, Molluscum contagiosum virus
ugcugcacacaccgcg

SEQ ID NO: 371577 - RNA, 19 nt, Molluscum contagiosum virus
ugcugcagcguauggaucu

SEQ ID NO: 371578 - RNA, 22 nt, Molluscum contagiosum virus
ugcugcaguaugaaucuacggc

SEQ ID NO: 371579 - RNA, 16 nt, Molluscum contagiosum virus
ugcugcccgugguggg

SEQ ID NO: 371580 - RNA, 14 nt, Molluscum contagiosum virus
ugcugcgagagcau

SEQ ID NO: 371581 - RNA, 20 nt, Molluscum contagiosum virus
ugcugcgcgacgucgucaag

SEQ ID NO: 371582 - RNA, 17 nt, Molluscum contagiosum virus
ugcugcggcugcuggag

SEQ ID NO: 371583 - RNA, 11 nt, Molluscum contagiosum virus
ugcugcucaag

SEQ ID NO: 371584 - RNA, 21 nt, Molluscum contagiosum virus
ugcugcucaaggacuaccagc

SEQ ID NO: 371585 - RNA, 12 nt, Molluscum contagiosum virus
ugcugcugcaga

SEQ ID NO: 371586 - RNA, 12 nt, Molluscum contagiosum virus
ugcugcugccaa

SEQ ID NO: 371587 - RNA, 19 nt, Molluscum contagiosum virus
ugcuggagggcacgcugca

SEQ ID NO: 371588 - RNA, 23 nt, Molluscum contagiosum virus
ugcuggauggccuugggcacuuc

SEQ ID NO: 371589 - RNA, 16 nt, Molluscum contagiosum virus
ugcuggcgcgcugcgu

SEQ ID NO: 371590 - RNA, 23 nt, Molluscum contagiosum virus
ugcuggcgcucgcgcgcacgcgc

SEQ ID NO: 371591 - RNA, 15 nt, Molluscum contagiosum virus
ugcuggcggagacac

SEQ ID NO: 371592 - RNA, 15 nt, Molluscum contagiosum virus
ugcugggcaucgugc

SEQ ID NO: 371593 - RNA, 12 nt, Molluscum contagiosum virus
ugcugggcgugg

SEQ ID NO: 371594 - RNA, 20 nt, Molluscum contagiosum virus
ugcuggucaagaaggcgcug

SEQ ID NO: 371595 - RNA, 15 nt, Molluscum contagiosum virus
ugcugguggugcugg

SEQ ID NO: 371596 - RNA, 22 nt, Molluscum contagiosum virus
ugcugucaacgugggugaggac

SEQ ID NO: 371597 - RNA, 15 nt, Molluscum contagiosum virus
ugcuguuacuugcac

SEQ ID NO: 371598 - RNA, 20 nt, Molluscum contagiosum virus
ugcuguuucugugucacgac

SEQ ID NO: 371599 - RNA, 16 nt, Molluscum contagiosum virus
ugcuuacggacaggau

SEQ ID NO: 371600 - RNA, 21 nt, Molluscum contagiosum virus
ugcuuacggacaggaugccug

SEQ ID NO: 371601 - RNA, 16 nt, Molluscum contagiosum virus
ugcuuauaccauggag

SEQ ID NO: 371602 - RNA, 14 nt, Molluscum contagiosum virus
ugcuucacgcugcu

SEQ ID NO: 371603 - RNA, 17 nt, Molluscum contagiosum virus
ugcuucacgcugcucgu

SEQ ID NO: 371604 - RNA, 22 nt, Molluscum contagiosum virus
ugcuuccuccuccaaucugcau

SEQ ID NO: 371605 - RNA, 14 nt, Molluscum contagiosum virus
ugcuucugcgcugg

SEQ ID NO: 371606 - RNA, 21 nt, Molluscum contagiosum virus
ugcuugacaaguacaugcacg

SEQ ID NO: 371607 - RNA, 16 nt, Molluscum contagiosum virus
ugcuugugcgccugug

SEQ ID NO: 371608 - RNA, 11 nt, Molluscum contagiosum virus
ugcuuugcacg

SEQ ID NO: 371609 - RNA, 17 nt, Molluscum contagiosum virus
ugcuuugucgcaacccc

SEQ ID NO: 371610 - RNA, 13 nt, Molluscum contagiosum virus
ugcuuugucugca

SEQ ID NO: 371611 - RNA, 21 nt, Molluscum contagiosum virus
ugcuuuuuuuuuuucguugcc

SEQ ID NO: 371612 - RNA, 13 nt, Molluscum contagiosum virus
uggaaaggaggcu

SEQ ID NO: 371613 - RNA, 11 nt, Molluscum contagiosum virus
uggaacaaaga

SEQ ID NO: 371614 - RNA, 16 nt, Molluscum contagiosum virus
uggaacaaagaggcaa

SEQ ID NO: 371615 - RNA, 17 nt, Molluscum contagiosum virus
uggaacggcgacuugua

SEQ ID NO: 371616 - RNA, 15 nt, Molluscum contagiosum virus
uggaagaacaggccg

SEQ ID NO: 371617 - RNA, 22 nt, Molluscum contagiosum virus
uggaagagcccgcacacgccgc

SEQ ID NO: 371618 - RNA, 22 nt, Molluscum contagiosum virus
uggaagcuuccuuuuucacuuu

SEQ ID NO: 371619 - RNA, 18 nt, Molluscum contagiosum virus
uggacacagcaaaagcuu

SEQ ID NO: 371620 - RNA, 17 nt, Molluscum contagiosum virus
uggacagcaagcagcgc

SEQ ID NO: 371621 - RNA, 12 nt, Molluscum contagiosum virus
uggacaucagcg

SEQ ID NO: 371622 - RNA, 21 nt, Molluscum contagiosum virus
uggaccacaagcaguaccugc

SEQ ID NO: 371623 - RNA, 14 nt, Molluscum contagiosum virus
uggacgagcagagc

SEQ ID NO: 371624 - RNA, 20 nt, Molluscum contagiosum virus
uggacgaggccaaccuccug

SEQ ID NO: 371625 - RNA, 19 nt, Molluscum contagiosum virus
uggacgaugguggcgcugc

SEQ ID NO: 371626 - RNA, 19 nt, Molluscum contagiosum virus
uggacgccguugcgcguga

SEQ ID NO: 371627 - RNA, 18 nt, Molluscum contagiosum virus
uggacgcgcaagugugcg

SEQ ID NO: 371628 - RNA, 20 nt, Molluscum contagiosum virus
uggacgcgccgcgcgagugc

SEQ ID NO: 371629 - RNA, 22 nt, Molluscum contagiosum virus
uggacgcgcgagugugugcauc

SEQ ID NO: 371630 - RNA, 16 nt, Molluscum contagiosum virus
uggacguggacgugga

SEQ ID NO: 371631 - RNA, 17 nt, Molluscum contagiosum virus
uggagaaggcauaccag

SEQ ID NO: 371632 - RNA, 22 nt, Molluscum contagiosum virus
uggagaucgacaagaucaaggu

SEQ ID NO: 371633 - RNA, 17 nt, Molluscum contagiosum virus
uggagcacuuccgcgcg

SEQ ID NO: 371634 - RNA, 18 nt, Molluscum contagiosum virus
uggagcgagugcgcgugc

SEQ ID NO: 371635 - RNA, 16 nt, Molluscum contagiosum virus
uggagcuagcgcgcgc

SEQ ID NO: 371636 - RNA, 18 nt, Molluscum contagiosum virus
uggagcugccgcugcgcg

SEQ ID NO: 371637 - RNA, 21 nt, Molluscum contagiosum virus
uggaggcgcuagugcagauga

SEQ ID NO: 371638 - RNA, 18 nt, Molluscum contagiosum virus
uggagggguguuuccuug

SEQ ID NO: 371639 - RNA, 20 nt, Molluscum contagiosum virus
uggagggguguuuccuugcc

SEQ ID NO: 371640 - RNA, 12 nt, Molluscum contagiosum virus
uggagguacugu

SEQ ID NO: 371641 - RNA, 21 nt, Molluscum contagiosum virus
uggaguaccggcucaagaaca

SEQ ID NO: 371642 - RNA, 20 nt, Molluscum contagiosum virus
uggaugcgacugcgcaauaa

SEQ ID NO: 371643 - RNA, 12 nt, Molluscum contagiosum virus
uggaugcugcuc

SEQ ID NO: 371644 - RNA, 13 nt, Molluscum contagiosum virus
uggcaaacaggca

SEQ ID NO: 371645 - RNA, 17 nt, Molluscum contagiosum virus
uggcaacgcaaacgcac

SEQ ID NO: 371646 - RNA, 14 nt, Molluscum contagiosum virus
uggcaagggcuccu

SEQ ID NO: 371647 - RNA, 17 nt, Molluscum contagiosum virus
uggcaagggcuccuucu

SEQ ID NO: 371648 - RNA, 21 nt, Molluscum contagiosum virus
uggcacccuggcugcugcgcg

SEQ ID NO: 371649 - RNA, 19 nt, Molluscum contagiosum virus
uggcacgcgagguuccaga

SEQ ID NO: 371650 - RNA, 20 nt, Molluscum contagiosum virus
uggcacuggcgcgcacgcgc

SEQ ID NO: 371651 - RNA, 18 nt, Molluscum contagiosum virus
uggcagauaguuuggacg

SEQ ID NO: 371652 - RNA, 16 nt, Molluscum contagiosum virus
uggcauugacacucgc

SEQ ID NO: 371653 - RNA, 16 nt, Molluscum contagiosum virus
uggccaaagucuuccu

SEQ ID NO: 371654 - RNA, 21 nt, Molluscum contagiosum virus
uggccaacacuaccacagcca

SEQ ID NO: 371655 - RNA, 22 nt, Molluscum contagiosum virus
uggccaacacuaccacagccau

SEQ ID NO: 371656 - RNA, 16 nt, Molluscum contagiosum virus
uggccacgcagaucag

SEQ ID NO: 371657 - RNA, 21 nt, Molluscum contagiosum virus
uggccagcuucaucaagcacg

SEQ ID NO: 371658 - RNA, 15 nt, Molluscum contagiosum virus
uggccgaacugcucu

SEQ ID NO: 371659 - RNA, 23 nt, Molluscum contagiosum virus
uggccgcgccgggcgccagaaca

SEQ ID NO: 371660 - RNA, 17 nt, Molluscum contagiosum virus
uggccguagugcucauc

SEQ ID NO: 371661 - RNA, 21 nt, Molluscum contagiosum virus
uggccguagugcucaucgugc

SEQ ID NO: 371662 - RNA, 13 nt, Molluscum contagiosum virus
uggcgacacggag

SEQ ID NO: 371663 - RNA, 13 nt, Molluscum contagiosum virus
uggcgagcaagau

SEQ ID NO: 371664 - RNA, 14 nt, Molluscum contagiosum virus
uggcgagcgcugcc

SEQ ID NO: 371665 - RNA, 15 nt, Molluscum contagiosum virus
uggcgagcgcugccg

SEQ ID NO: 371666 - RNA, 22 nt, Molluscum contagiosum virus
uggcgagcuagugcacaccggc

SEQ ID NO: 371667 - RNA, 18 nt, Molluscum contagiosum virus
uggcgauccuguccaucu

SEQ ID NO: 371668 - RNA, 19 nt, Molluscum contagiosum virus
uggcgcacauuaguagcga

SEQ ID NO: 371669 - RNA, 14 nt, Molluscum contagiosum virus
uggcgcagcacuuc

SEQ ID NO: 371670 - RNA, 16 nt, Molluscum contagiosum virus
uggcgccagccuggcg

SEQ ID NO: 371671 - RNA, 15 nt, Molluscum contagiosum virus
uggcgccgaugcagu

SEQ ID NO: 371672 - RNA, 18 nt, Molluscum contagiosum virus
uggcgcgccgaguacugc

SEQ ID NO: 371673 - RNA, 15 nt, Molluscum contagiosum virus
uggcgcgccggcgcg

SEQ ID NO: 371674 - RNA, 16 nt, Molluscum contagiosum virus
uggcgcugcacaguuc

SEQ ID NO: 371675 - RNA, 17 nt, Molluscum contagiosum virus
uggcgcugcacaguuca

SEQ ID NO: 371676 - RNA, 21 nt, Molluscum contagiosum virus
uggcgcugcacaguucacggc

SEQ ID NO: 371677 - RNA, 21 nt, Molluscum contagiosum virus
uggcgcugggcgcgccgcgcg

SEQ ID NO: 371678 - RNA, 14 nt, Molluscum contagiosum virus
uggcggaugucacg

SEQ ID NO: 371679 - RNA, 12 nt, Molluscum contagiosum virus
uggcggcgcugg

SEQ ID NO: 371680 - RNA, 12 nt, Molluscum contagiosum virus
uggcgugacagg

SEQ ID NO: 371681 - RNA, 12 nt, Molluscum contagiosum virus
uggcuacaugca

SEQ ID NO: 371682 - RNA, 14 nt, Molluscum contagiosum virus
uggcucacagccgu

SEQ ID NO: 371683 - RNA, 20 nt, Molluscum contagiosum virus
uggcucuagaguacuaggug

SEQ ID NO: 371684 - RNA, 14 nt, Molluscum contagiosum virus
uggcuggcgcucaa

SEQ ID NO: 371685 - RNA, 15 nt, Molluscum contagiosum virus
ugggagcuuuccuug

SEQ ID NO: 371686 - RNA, 14 nt, Molluscum contagiosum virus
ugggagggggacaa

SEQ ID NO: 371687 - RNA, 16 nt, Molluscum contagiosum virus
ugggcaaggacaucua

SEQ ID NO: 371688 - RNA, 15 nt, Molluscum contagiosum virus
ugggcacaagcuuuc

SEQ ID NO: 371689 - RNA, 15 nt, Molluscum contagiosum virus
ugggcacugcuacga

SEQ ID NO: 371690 - RNA, 17 nt, Molluscum contagiosum virus
ugggccgaaucgucggc

SEQ ID NO: 371691 - RNA, 14 nt, Molluscum contagiosum virus
ugggcgagagcuuu

SEQ ID NO: 371692 - RNA, 11 nt, Molluscum contagiosum virus
ugggcgcgugc

SEQ ID NO: 371693 - RNA, 20 nt, Molluscum contagiosum virus
ugggcucggaguccgcgccc

SEQ ID NO: 371694 - RNA, 13 nt, Molluscum contagiosum virus
uggggaggacaaa

SEQ ID NO: 371695 - RNA, 14 nt, Molluscum contagiosum virus
uggggcucgccggc

SEQ ID NO: 371696 - RNA, 18 nt, Molluscum contagiosum virus
ugguagacgacgaugcaa

SEQ ID NO: 371697 - RNA, 14 nt, Molluscum contagiosum virus
uggucaaccucuac

SEQ ID NO: 371698 - RNA, 18 nt, Molluscum contagiosum virus
uggucaagaaggcgcugg

SEQ ID NO: 371699 - RNA, 15 nt, Molluscum contagiosum virus
uggucgagaugcucu

SEQ ID NO: 371700 - RNA, 15 nt, Molluscum contagiosum virus
uggugcacacacaca

SEQ ID NO: 371701 - RNA, 17 nt, Molluscum contagiosum virus
uggugcgcgacgacggc

SEQ ID NO: 371702 - RNA, 21 nt, Molluscum contagiosum virus
uggugcucacgcuguuuggaa

SEQ ID NO: 371703 - RNA, 11 nt, Molluscum contagiosum virus
uggugcugcgc

SEQ ID NO: 371704 - RNA, 22 nt, Molluscum contagiosum virus
ugguggccaagauccuguacca

SEQ ID NO: 371705 - RNA, 12 nt, Molluscum contagiosum virus
ugguuaccaagg

SEQ ID NO: 371706 - RNA, 19 nt, Molluscum contagiosum virus
ugguugcuugcauguucuc

SEQ ID NO: 371707 - RNA, 17 nt, Molluscum contagiosum virus
ugguugugcuuguucuc

SEQ ID NO: 371708 - RNA, 14 nt, Molluscum contagiosum virus
uguacaugcucaag

SEQ ID NO: 371709 - RNA, 22 nt, Molluscum contagiosum virus
uguaccacccgaaagucccgcu

SEQ ID NO: 371710 - RNA, 13 nt, Molluscum contagiosum virus
uguacgugcugcc

SEQ ID NO: 371711 - RNA, 14 nt, Molluscum contagiosum virus
uguacgugcugccc

SEQ ID NO: 371712 - RNA, 16 nt, Molluscum contagiosum virus
uguagagacgcugccg

SEQ ID NO: 371713 - RNA, 20 nt, Molluscum contagiosum virus
uguagcggcgcuugaugucc

SEQ ID NO: 371714 - RNA, 14 nt, Molluscum contagiosum virus
uguaucucaccucg

SEQ ID NO: 371715 - RNA, 15 nt, Molluscum contagiosum virus
ugucaacguggguga

SEQ ID NO: 371716 - RNA, 22 nt, Molluscum contagiosum virus
ugucacucgcgagacggaaaug

SEQ ID NO: 371717 - RNA, 14 nt, Molluscum contagiosum virus
ugucagaggauucu

SEQ ID NO: 371718 - RNA, 17 nt, Molluscum contagiosum virus
ugucagaggauucuugc

SEQ ID NO: 371719 - RNA, 18 nt, Molluscum contagiosum virus
ugucagaggauucuugca

SEQ ID NO: 371720 - RNA, 17 nt, Molluscum contagiosum virus
uguccacaaaaccaaaa

SEQ ID NO: 371721 - RNA, 19 nt, Molluscum contagiosum virus
uguccacaaaaccaaaacc

SEQ ID NO: 371722 - RNA, 20 nt, Molluscum contagiosum virus
uguccgcggacgcgggccug

SEQ ID NO: 371723 - RNA, 16 nt, Molluscum contagiosum virus
uguccuugaugccgug

SEQ ID NO: 371724 - RNA, 19 nt, Molluscum contagiosum virus
ugucgacagucuagugcgu

SEQ ID NO: 371725 - RNA, 22 nt, Molluscum contagiosum virus
ugucgagcagauucacgagcuc

SEQ ID NO: 371726 - RNA, 19 nt, Molluscum contagiosum virus
ugucgaggccuucgcgccc

SEQ ID NO: 371727 - RNA, 16 nt, Molluscum contagiosum virus
ugucgcgaacgcgucc

SEQ ID NO: 371728 - RNA, 22 nt, Molluscum contagiosum virus
ugucgcgcgagcgcuacaugca

SEQ ID NO: 371729 - RNA, 17 nt, Molluscum contagiosum virus
ugucgcuggaggauucu

SEQ ID NO: 371730 - RNA, 14 nt, Molluscum contagiosum virus
ugucgugcaauggc

SEQ ID NO: 371731 - RNA, 13 nt, Molluscum contagiosum virus
ugucuccuccuga

SEQ ID NO: 371732 - RNA, 17 nt, Molluscum contagiosum virus
ugucucugugugcuuau

SEQ ID NO: 371733 - RNA, 15 nt, Molluscum contagiosum virus
ugucuuacggagcua

SEQ ID NO: 371734 - RNA, 14 nt, Molluscum contagiosum virus
ugugacaacaugug

SEQ ID NO: 371735 - RNA, 17 nt, Molluscum contagiosum virus
ugugaggaaacacccag

SEQ ID NO: 371736 - RNA, 14 nt, Molluscum contagiosum virus
ugugaucaagagca

SEQ ID NO: 371737 - RNA, 21 nt, Molluscum contagiosum virus
ugugccaucucgcacacugca

SEQ ID NO: 371738 - RNA, 16 nt, Molluscum contagiosum virus
ugugcgcacgcugacc

SEQ ID NO: 371739 - RNA, 18 nt, Molluscum contagiosum virus
ugugcgcgguggugcugg

SEQ ID NO: 371740 - RNA, 18 nt, Molluscum contagiosum virus
ugugcguacugggagcuu

SEQ ID NO: 371741 - RNA, 19 nt, Molluscum contagiosum virus
ugugcguacugggagcuuu

SEQ ID NO: 371742 - RNA, 14 nt, Molluscum contagiosum virus
ugugcgugcaccuc

SEQ ID NO: 371743 - RNA, 14 nt, Molluscum contagiosum virus
ugugcuuguucucu

SEQ ID NO: 371744 - RNA, 17 nt, Molluscum contagiosum virus
uguggacgcgcaagugu

SEQ ID NO: 371745 - RNA, 22 nt, Molluscum contagiosum virus
uguggacgcgcaagugugcgca

SEQ ID NO: 371746 - RNA, 19 nt, Molluscum contagiosum virus
uguggacgcgcgagugugu

SEQ ID NO: 371747 - RNA, 22 nt, Molluscum contagiosum virus
ugugucgcgagugugcgcgccc

SEQ ID NO: 371748 - RNA, 18 nt, Molluscum contagiosum virus
ugugugaucacgucuuuc

SEQ ID NO: 371749 - RNA, 13 nt, Molluscum contagiosum virus
uguguguucucaa

SEQ ID NO: 371750 - RNA, 14 nt, Molluscum contagiosum virus
uguguguucucaaa

SEQ ID NO: 371751 - RNA, 14 nt, Molluscum contagiosum virus
uguucacgugcucc

SEQ ID NO: 371752 - RNA, 19 nt, Molluscum contagiosum virus
uguucgcggagcugugccg

SEQ ID NO: 371753 - RNA, 19 nt, Molluscum contagiosum virus
uguucuucgacaacaugcu

SEQ ID NO: 371754 - RNA, 22 nt, Molluscum contagiosum virus
uguuugcggaugcucgcuugcc

SEQ ID NO: 371755 - RNA, 14 nt, Molluscum contagiosum virus
uguuuucacgcaag

SEQ ID NO: 371756 - RNA, 22 nt, Molluscum contagiosum virus
uguuuugugccugcgcuucuag

SEQ ID NO: 371757 - RNA, 19 nt, Molluscum contagiosum virus
uguuuuucgggaagcacag

SEQ ID NO: 371758 - RNA, 20 nt, Molluscum contagiosum virus
uguuuuucgggaagcacagu

SEQ ID NO: 371759 - RNA, 23 nt, Molluscum contagiosum virus
uguuuuucgggaagcacagucca

SEQ ID NO: 371760 - RNA, 21 nt, Molluscum contagiosum virus
uuaaagaguuccagcagcgcc

SEQ ID NO: 371761 - RNA, 21 nt, Molluscum contagiosum virus
uuaacucagcgggcagacagg

SEQ ID NO: 371762 - RNA, 19 nt, Molluscum contagiosum virus
uuacacacgcaccagucuc

SEQ ID NO: 371763 - RNA, 9 nt, Molluscum contagiosum virus
uuaccaagg

SEQ ID NO: 371764 - RNA, 17 nt, Molluscum contagiosum virus
uuacggacgcccuccuc

SEQ ID NO: 371765 - RNA, 16 nt, Molluscum contagiosum virus
uuacgggcgccagcua

SEQ ID NO: 371766 - RNA, 21 nt, Molluscum contagiosum virus
uuacgugcgcgagcucgagaa

SEQ ID NO: 371767 - RNA, 13 nt, Molluscum contagiosum virus
uuacugcugcaau

SEQ ID NO: 371768 - RNA, 22 nt, Molluscum contagiosum virus
uuaucaacucgcucauccacgc

SEQ ID NO: 371769 - RNA, 11 nt, Molluscum contagiosum virus
uuaugcacuuu

SEQ ID NO: 371770 - RNA, 17 nt, Molluscum contagiosum virus
uucaacuacaaggugcu

SEQ ID NO: 371771 - RNA, 13 nt, Molluscum contagiosum virus
uucaacuuccaca

SEQ ID NO: 371772 - RNA, 14 nt, Molluscum contagiosum virus
uucaacuuccacau

SEQ ID NO: 371773 - RNA, 19 nt, Molluscum contagiosum virus
uucaagcacgagcugcugc

SEQ ID NO: 371774 - RNA, 19 nt, Molluscum contagiosum virus
uucaaugcaguaugugaac

SEQ ID NO: 371775 - RNA, 17 nt, Molluscum contagiosum virus
uucacacacggaagcuc

SEQ ID NO: 371776 - RNA, 22 nt, Molluscum contagiosum virus
uucacgaugaaaagcgugaugu

SEQ ID NO: 371777 - RNA, 14 nt, Molluscum contagiosum virus
uucacguacuugag

SEQ ID NO: 371778 - RNA, 21 nt, Molluscum contagiosum virus
uucagagugacgcugcaagac

SEQ ID NO: 371779 - RNA, 21 nt, Molluscum contagiosum virus
uucaggcaagaggggagccag

SEQ ID NO: 371780 - RNA, 17 nt, Molluscum contagiosum virus
uucaucgcguugucgag

SEQ ID NO: 371781 - RNA, 22 nt, Molluscum contagiosum virus
uuccaaauggagaugauguagu

SEQ ID NO: 371782 - RNA, 16 nt, Molluscum contagiosum virus
uucccgcggcgugccc

SEQ ID NO: 371783 - RNA, 21 nt, Molluscum contagiosum virus
uuccgacaacucgcgcuggcc

SEQ ID NO: 371784 - RNA, 17 nt, Molluscum contagiosum virus
uuccgcgagucugccag

SEQ ID NO: 371785 - RNA, 15 nt, Molluscum contagiosum virus
uuccucuacaccagc

SEQ ID NO: 371786 - RNA, 17 nt, Molluscum contagiosum virus
uuccugaacaagcugca

SEQ ID NO: 371787 - RNA, 17 nt, Molluscum contagiosum virus
uuccugcaaacuugacu

SEQ ID NO: 371788 - RNA, 21 nt, Molluscum contagiosum virus
uuccuggcacuggcgcgcacg

SEQ ID NO: 371789 - RNA, 17 nt, Molluscum contagiosum virus
uucgacgugguacuggc

SEQ ID NO: 371790 - RNA, 14 nt, Molluscum contagiosum virus
uucgacuuacggac

SEQ ID NO: 371791 - RNA, 22 nt, Molluscum contagiosum virus
uucgcaagugcacaccagacaa

SEQ ID NO: 371792 - RNA, 21 nt, Molluscum contagiosum virus
uucgccggcaucgcgcugcug

SEQ ID NO: 371793 - RNA, 16 nt, Molluscum contagiosum virus
uucgcgcgugcuggac

SEQ ID NO: 371794 - RNA, 17 nt, Molluscum contagiosum virus
uucgcgcgugcuggacg

SEQ ID NO: 371795 - RNA, 23 nt, Molluscum contagiosum virus
uucgcgggcccgccuuuguggac

SEQ ID NO: 371796 - RNA, 23 nt, Molluscum contagiosum virus
uucgcuacuucacacgucuugca

SEQ ID NO: 371797 - RNA, 14 nt, Molluscum contagiosum virus
uucgggaagcacag

SEQ ID NO: 371798 - RNA, 18 nt, Molluscum contagiosum virus
uucgggaagcacagucca

SEQ ID NO: 371799 - RNA, 17 nt, Molluscum contagiosum virus
uucgucucgagcuuccu

SEQ ID NO: 371800 - RNA, 20 nt, Molluscum contagiosum virus
uucguguucgcggacggcgc

SEQ ID NO: 371801 - RNA, 20 nt, Molluscum contagiosum virus
uucuaaggagcgagaagaca

SEQ ID NO: 371802 - RNA, 17 nt, Molluscum contagiosum virus
uucuagcgcgaggacaa

SEQ ID NO: 371803 - RNA, 18 nt, Molluscum contagiosum virus
uucuccgaccgugcccug

SEQ ID NO: 371804 - RNA, 16 nt, Molluscum contagiosum virus
uucucgccgcaccaca

SEQ ID NO: 371805 - RNA, 20 nt, Molluscum contagiosum virus
uucucguggcguugcugcug

SEQ ID NO: 371806 - RNA, 20 nt, Molluscum contagiosum virus
uucugccaggcggucuucca

SEQ ID NO: 371807 - RNA, 19 nt, Molluscum contagiosum virus
uucuggcaaacgcacugug

SEQ ID NO: 371808 - RNA, 22 nt, Molluscum contagiosum virus
uucuucgggaaggaacaaugcu

SEQ ID NO: 371809 - RNA, 21 nt, Molluscum contagiosum virus
uucuugcgcggcggccacacc

SEQ ID NO: 371810 - RNA, 22 nt, Molluscum contagiosum virus
uucuugcggcacccucagacca

SEQ ID NO: 371811 - RNA, 13 nt, Molluscum contagiosum virus
uucuuguacgggc

SEQ ID NO: 371812 - RNA, 17 nt, Molluscum contagiosum virus
uugaaggacgcguucuc

SEQ ID NO: 371813 - RNA, 13 nt, Molluscum contagiosum virus
uugacacgcucau

SEQ ID NO: 371814 - RNA, 19 nt, Molluscum contagiosum virus
uugacaggcgcgcaagugc

SEQ ID NO: 371815 - RNA, 23 nt, Molluscum contagiosum virus
uugagcgcgccgcgcaugacagc

SEQ ID NO: 371816 - RNA, 13 nt, Molluscum contagiosum virus
uugcacagugugc

SEQ ID NO: 371817 - RNA, 14 nt, Molluscum contagiosum virus
uugcacgcgugugg

SEQ ID NO: 371818 - RNA, 12 nt, Molluscum contagiosum virus
uugcacuuguca

SEQ ID NO: 371819 - RNA, 15 nt, Molluscum contagiosum virus
uugcagacaaggaga

SEQ ID NO: 371820 - RNA, 15 nt, Molluscum contagiosum virus
uugcaggccuccuuc

SEQ ID NO: 371821 - RNA, 16 nt, Molluscum contagiosum virus
uugccaaagcucucuu

SEQ ID NO: 371822 - RNA, 20 nt, Molluscum contagiosum virus
uugccaggcaacgcacaaaa

SEQ ID NO: 371823 - RNA, 20 nt, Molluscum contagiosum virus
uugccaguagcgaaugcagu

SEQ ID NO: 371824 - RNA, 16 nt, Molluscum contagiosum virus
uugccgcgcgcugcuc

SEQ ID NO: 371825 - RNA, 23 nt, Molluscum contagiosum virus
uugccgucgcgcauagugccgua

SEQ ID NO: 371826 - RNA, 17 nt, Molluscum contagiosum virus
uugccugagaagcugua

SEQ ID NO: 371827 - RNA, 17 nt, Molluscum contagiosum virus
uugcgaccccagugcga

SEQ ID NO: 371828 - RNA, 14 nt, Molluscum contagiosum virus
uugcgcaugugauu

SEQ ID NO: 371829 - RNA, 15 nt, Molluscum contagiosum virus
uugcgcgcgcccucg

SEQ ID NO: 371830 - RNA, 17 nt, Molluscum contagiosum virus
uugcgcguucgcaaaga

SEQ ID NO: 371831 - RNA, 14 nt, Molluscum contagiosum virus
uugcgucaagguga

SEQ ID NO: 371832 - RNA, 14 nt, Molluscum contagiosum virus
uugcuccaugacag

SEQ ID NO: 371833 - RNA, 13 nt, Molluscum contagiosum virus
uugcucuacuggc

SEQ ID NO: 371834 - RNA, 14 nt, Molluscum contagiosum virus
uugcugcaguauga

SEQ ID NO: 371835 - RNA, 14 nt, Molluscum contagiosum virus
uugcuucagcgggc

SEQ ID NO: 371836 - RNA, 16 nt, Molluscum contagiosum virus
uuggaauugugcugcu

SEQ ID NO: 371837 - RNA, 20 nt, Molluscum contagiosum virus
uuggcaagcuuccuuuucuc

SEQ ID NO: 371838 - RNA, 22 nt, Molluscum contagiosum virus
uuggcauccggcacgcacaaag

SEQ ID NO: 371839 - RNA, 16 nt, Molluscum contagiosum virus
uuggcccgcaaacacg

SEQ ID NO: 371840 - RNA, 11 nt, Molluscum contagiosum virus
uugggcacugc

SEQ ID NO: 371841 - RNA, 13 nt, Molluscum contagiosum virus
uuguacuugcuuc

SEQ ID NO: 371842 - RNA, 11 nt, Molluscum contagiosum virus
uuguagcucua

SEQ ID NO: 371843 - RNA, 12 nt, Molluscum contagiosum virus
uugucaagcacu

SEQ ID NO: 371844 - RNA, 22 nt, Molluscum contagiosum virus
uugucgaagaacauaugucucc

SEQ ID NO: 371845 - RNA, 18 nt, Molluscum contagiosum virus
uugugaaguccucucucc

SEQ ID NO: 371846 - RNA, 13 nt, Molluscum contagiosum virus
uugugcgccugug

SEQ ID NO: 371847 - RNA, 14 nt, Molluscum contagiosum virus
uugugcggggcucg

SEQ ID NO: 371848 - RNA, 18 nt, Molluscum contagiosum virus
uuguggcgccgaugcagu

SEQ ID NO: 371849 - RNA, 14 nt, Molluscum contagiosum virus
uuguggucaagacu

SEQ ID NO: 371850 - RNA, 19 nt, Molluscum contagiosum virus
uuguguugccgagcucugu

SEQ ID NO: 371851 - RNA, 17 nt, Molluscum contagiosum virus
uuguucucgggggcucg

SEQ ID NO: 371852 - RNA, 16 nt, Molluscum contagiosum virus
uuguugcgcaugcgca

SEQ ID NO: 371853 - RNA, 12 nt, Molluscum contagiosum virus
uuguugugacac

SEQ ID NO: 371854 - RNA, 12 nt, Molluscum contagiosum virus
uuuaucucucac

SEQ ID NO: 371855 - RNA, 17 nt, Molluscum contagiosum virus
uuuaugcacuuucaacu

SEQ ID NO: 371856 - RNA, 15 nt, Molluscum contagiosum virus
uuucaaaaacgcgcc

SEQ ID NO: 371857 - RNA, 21 nt, Molluscum contagiosum virus
uuuccaaauggagaugaugua

SEQ ID NO: 371858 - RNA, 22 nt, Molluscum contagiosum virus
uuuccuggcucgcgagugugca

SEQ ID NO: 371859 - RNA, 16 nt, Molluscum contagiosum virus
uuucgggaagcacagu

SEQ ID NO: 371860 - RNA, 23 nt, Molluscum contagiosum virus
uuucuccgcucucgagcucacag

SEQ ID NO: 371861 - RNA, 18 nt, Molluscum contagiosum virus
uuucucggccgccgucac

SEQ ID NO: 371862 - RNA, 16 nt, Molluscum contagiosum virus
uagcgcccguggcgcc

SEQ ID NO: 371863 - RNA, 12 nt, Molluscum contagiosum virus
uagcgcgcgugu

SEQ ID NO: 371864 - RNA, 22 nt, Molluscum contagiosum virus
uagcggcggcguaggccugcgg

SEQ ID NO: 371865 - RNA, 19 nt, Molluscum contagiosum virus
uagcgguguugcuguuucc

SEQ ID NO: 371866 - RNA, 23 nt, Molluscum contagiosum virus
uagcguggcgcgcgagcugcuag

SEQ ID NO: 371867 - RNA, 12 nt, Molluscum contagiosum virus
uagcuagcucug

SEQ ID NO: 371868 - RNA, 23 nt, Molluscum contagiosum virus
uagcuccagcauagaacacagcu

SEQ ID NO: 371869 - RNA, 15 nt, Molluscum contagiosum virus
uagcuggcgcccgua

SEQ ID NO: 371870 - RNA, 14 nt, Molluscum contagiosum virus
uagcugugcgcuac

SEQ ID NO: 371871 - RNA, 16 nt, Molluscum contagiosum virus
uaggcgggccugcgcc

SEQ ID NO: 371872 - RNA, 16 nt, Molluscum contagiosum virus
uagguccacauuucaa

SEQ ID NO: 371873 - RNA, 23 nt, Molluscum contagiosum virus
uaguccagcgcguccaugcugau

SEQ ID NO: 371874 - RNA, 11 nt, Molluscum contagiosum virus
uagugcagaug

SEQ ID NO: 371875 - RNA, 14 nt, Molluscum contagiosum virus
uagugccauuguga

SEQ ID NO: 371876 - RNA, 18 nt, Molluscum contagiosum virus
uaguuuggacgagcugcu

SEQ ID NO: 371877 - RNA, 20 nt, Molluscum contagiosum virus
uauaaauggcguuaccagga

SEQ ID NO: 371878 - RNA, 16 nt, Molluscum contagiosum virus
uauacaaaguugacca

SEQ ID NO: 371879 - RNA, 22 nt, Molluscum contagiosum virus
uauaguccccggcgccggcacc

SEQ ID NO: 371880 - RNA, 23 nt, Molluscum contagiosum virus
uauauagacguauacuccaaaaa

SEQ ID NO: 371881 - RNA, 11 nt, Molluscum contagiosum virus
uaucccagaaa

SEQ ID NO: 371882 - RNA, 20 nt, Molluscum contagiosum virus
uaucccagaaaacgcacugu

SEQ ID NO: 371883 - RNA, 21 nt, Molluscum contagiosum virus
uaucccagaaaacgcacuguc

SEQ ID NO: 371884 - RNA, 15 nt, Molluscum contagiosum virus
uaucgauucuguccg

SEQ ID NO: 371885 - RNA, 13 nt, Molluscum contagiosum virus
uaucuacacuccg

SEQ ID NO: 371886 - RNA, 16 nt, Molluscum contagiosum virus
uaugcccacugggaac

SEQ ID NO: 371887 - RNA, 14 nt, Molluscum contagiosum virus
uauuaccugagauc

SEQ ID NO: 371888 - RNA, 15 nt, Molluscum contagiosum virus
uauucccuuguacaa

SEQ ID NO: 371889 - RNA, 22 nt, Molluscum contagiosum virus
uauucucguggcguugcugcug

SEQ ID NO: 371890 - RNA, 21 nt, Molluscum contagiosum virus
uauuucaaugcaguaugugaa

SEQ ID NO: 371891 - RNA, 20 nt, Molluscum contagiosum virus
ucaacaacacgaucaaggug

SEQ ID NO: 371892 - RNA, 19 nt, Molluscum contagiosum virus
ucaacaugccuuucuucca

SEQ ID NO: 371893 - RNA, 13 nt, Molluscum contagiosum virus
ucaacauuucaca

SEQ ID NO: 371894 - RNA, 16 nt, Molluscum contagiosum virus
ucaacauuucacaagu

SEQ ID NO: 371895 - RNA, 13 nt, Molluscum contagiosum virus
ucaacgcgcgugc

SEQ ID NO: 371896 - RNA, 13 nt, Molluscum contagiosum virus
ucaacggugcgcu

SEQ ID NO: 371897 - RNA, 17 nt, Molluscum contagiosum virus
ucaacucguaggacaac

SEQ ID NO: 371898 - RNA, 15 nt, Molluscum contagiosum virus
ucaagaacaccaaga

SEQ ID NO: 371899 - RNA, 15 nt, Molluscum contagiosum virus
ucaagaggugcgugc

SEQ ID NO: 371900 - RNA, 19 nt, Molluscum contagiosum virus
ucaagcgcgaguacaagcu

SEQ ID NO: 371901 - RNA, 13 nt, Molluscum contagiosum virus
ucaagcugcucau

SEQ ID NO: 371902 - RNA, 17 nt, Molluscum contagiosum virus
ucaaggacuaccagcuc

SEQ ID NO: 371903 - RNA, 11 nt, Molluscum contagiosum virus
ucaaguaccug

SEQ ID NO: 371904 - RNA, 12 nt, Molluscum contagiosum virus
ucaaguaccugu

SEQ ID NO: 371905 - RNA, 17 nt, Molluscum contagiosum virus
ucaauauacgcaaagga

SEQ ID NO: 371906 - RNA, 17 nt, Molluscum contagiosum virus
ucaaugcaguaugugaa

SEQ ID NO: 371907 - RNA, 19 nt, Molluscum contagiosum virus
ucaaugcaguaugugaaca

SEQ ID NO: 371908 - RNA, 16 nt, Molluscum contagiosum virus
ucacaagcaccgccug

SEQ ID NO: 371909 - RNA, 14 nt, Molluscum contagiosum virus
ucacacgucuugca

SEQ ID NO: 371910 - RNA, 23 nt, Molluscum contagiosum virus
ucacagguagugguccaccagcu

SEQ ID NO: 371911 - RNA, 22 nt, Molluscum contagiosum virus
ucacaugcuucgcgcaaacaag

SEQ ID NO: 371912 - RNA, 18 nt, Molluscum contagiosum virus
ucaccgccuguaccugcu

SEQ ID NO: 371913 - RNA, 20 nt, Molluscum contagiosum virus
ucaccgccuguaccugcucg

SEQ ID NO: 371914 - RNA, 18 nt, Molluscum contagiosum virus
ucaccgcgcagaagccaa

SEQ ID NO: 371915 - RNA, 13 nt, Molluscum contagiosum virus
ucacgacuguguu

SEQ ID NO: 371916 - RNA, 14 nt, Molluscum contagiosum virus
ucacgcaagcuuug

SEQ ID NO: 371917 - RNA, 23 nt, Molluscum contagiosum virus
ucacgcaaggaagcaacaacagc

SEQ ID NO: 371918 - RNA, 22 nt, Molluscum contagiosum virus
ucacgcgugaguagcaacaaag

SEQ ID NO: 371919 - RNA, 22 nt, Molluscum contagiosum virus
ucacgcugcacgagcugcugua

SEQ ID NO: 371920 - RNA, 19 nt, Molluscum contagiosum virus
ucacgcugcucgugcugcu

SEQ ID NO: 371921 - RNA, 21 nt, Molluscum contagiosum virus
ucacggaggccgcgugaacaa

SEQ ID NO: 371922 - RNA, 14 nt, Molluscum contagiosum virus
ucacugcagcagcc

SEQ ID NO: 371923 - RNA, 15 nt, Molluscum contagiosum virus
ucacuuucgcgcgca

SEQ ID NO: 371924 - RNA, 21 nt, Molluscum contagiosum virus
ucagagaaaucccaagagcca

SEQ ID NO: 371925 - RNA, 23 nt, Molluscum contagiosum virus
ucagagaaaucccaagagccaug

SEQ ID NO: 371926 - RNA, 14 nt, Molluscum contagiosum virus
ucagagaagugcuc

SEQ ID NO: 371927 - RNA, 18 nt, Molluscum contagiosum virus
ucagagaagugcuccgca

SEQ ID NO: 371928 - RNA, 18 nt, Molluscum contagiosum virus
ucagagacaggggggaga

SEQ ID NO: 371929 - RNA, 16 nt, Molluscum contagiosum virus
ucagaggauucuugca

SEQ ID NO: 371930 - RNA, 21 nt, Molluscum contagiosum virus
ucagauuuugcgucaagguga

SEQ ID NO: 371931 - RNA, 12 nt, Molluscum contagiosum virus
ucagcaccaagg

SEQ ID NO: 371932 - RNA, 15 nt, Molluscum contagiosum virus
ucagcaggcuguguu

SEQ ID NO: 371933 - RNA, 16 nt, Molluscum contagiosum virus
ucagcaggcuguguuc

SEQ ID NO: 371934 - RNA, 18 nt, Molluscum contagiosum virus
ucagcgccaucaauucaa

SEQ ID NO: 371935 - RNA, 12 nt, Molluscum contagiosum virus
ucagcgcgcgca

SEQ ID NO: 371936 - RNA, 21 nt, Molluscum contagiosum virus
ucagcgcggaggcgcuaccuc

SEQ ID NO: 371937 - RNA, 18 nt, Molluscum contagiosum virus
ucagcgcuucgacuucca

SEQ ID NO: 371938 - RNA, 14 nt, Molluscum contagiosum virus
ucgacgcgcugcuc

SEQ ID NO: 371939 - RNA, 16 nt, Molluscum contagiosum virus
ucgacgcugacggccu

SEQ ID NO: 371940 - RNA, 13 nt, Molluscum contagiosum virus
ucgacgcugccua

SEQ ID NO: 371941 - RNA, 14 nt, Molluscum contagiosum virus
ucgacgcugccuag

SEQ ID NO: 371942 - RNA, 20 nt, Molluscum contagiosum virus
ucgacggcuucauccgcgcg

SEQ ID NO: 371943 - RNA, 12 nt, Molluscum contagiosum virus
ucgacguggacc

SEQ ID NO: 371944 - RNA, 19 nt, Molluscum contagiosum virus
ucgagaccacgcgcgcugc

SEQ ID NO: 371945 - RNA, 20 nt, Molluscum contagiosum virus
ucgagaccuacgucaagcag

SEQ ID NO: 371946 - RNA, 13 nt, Molluscum contagiosum virus
ucgagaccucgcg

SEQ ID NO: 371947 - RNA, 23 nt, Molluscum contagiosum virus
ucgagagacaacaaacauuguga

SEQ ID NO: 371948 - RNA, 16 nt, Molluscum contagiosum virus
ucgagcaccugucgcg

SEQ ID NO: 371949 - RNA, 18 nt, Molluscum contagiosum virus
ucgagcacgccuccaaga

SEQ ID NO: 371950 - RNA, 19 nt, Molluscum contagiosum virus
ucgagcacgccuccaagaa

SEQ ID NO: 371951 - RNA, 15 nt, Molluscum contagiosum virus
ucgagcccuaucgca

SEQ ID NO: 371952 - RNA, 14 nt, Molluscum contagiosum virus
ucgagccgcacaaa

SEQ ID NO: 371953 - RNA, 17 nt, Molluscum contagiosum virus
ucgagcgcccucaguca

SEQ ID NO: 371954 - RNA, 16 nt, Molluscum contagiosum virus
ucgagcgcgccgcgcg

SEQ ID NO: 371955 - RNA, 23 nt, Molluscum contagiosum virus
ucgagggggacgugcccuacgcg

SEQ ID NO: 371956 - RNA, 12 nt, Molluscum contagiosum virus
ucgaugugacaa

SEQ ID NO: 371957 - RNA, 16 nt, Molluscum contagiosum virus
ucgaugugacaacaug

SEQ ID NO: 371958 - RNA, 18 nt, Molluscum contagiosum virus
ucgcaagucucccucgcg

SEQ ID NO: 371959 - RNA, 22 nt, Molluscum contagiosum virus
ucgcaagucucccucgcgcgca

SEQ ID NO: 371960 - RNA, 19 nt, Molluscum contagiosum virus
ucgcaagugcacaccagac

SEQ ID NO: 371961 - RNA, 19 nt, Molluscum contagiosum virus
ucgcacgcuagcgagcgcc

SEQ ID NO: 371962 - RNA, 19 nt, Molluscum contagiosum virus
ucgcagacgcagcgcgagc

SEQ ID NO: 371963 - RNA, 16 nt, Molluscum contagiosum virus
ucgcagaggacagcuc

SEQ ID NO: 371964 - RNA, 19 nt, Molluscum contagiosum virus
ucgcaugcgccugcacuuc

SEQ ID NO: 371965 - RNA, 12 nt, Molluscum contagiosum virus
ucgcccccgugc

SEQ ID NO: 371966 - RNA, 21 nt, Molluscum contagiosum virus
ucgccgcaccacaacugaaaa

SEQ ID NO: 371967 - RNA, 23 nt, Molluscum contagiosum virus
ucgcgaaucacaaacacgcaaac

SEQ ID NO: 371968 - RNA, 13 nt, Molluscum contagiosum virus
ucgcgaccuggcg

SEQ ID NO: 371969 - RNA, 18 nt, Molluscum contagiosum virus
ucgcgagagacacaguuc

SEQ ID NO: 371970 - RNA, 22 nt, Molluscum contagiosum virus
ucgcgagcacuuuggccucgcg

SEQ ID NO: 371971 - RNA, 13 nt, Molluscum contagiosum virus
ucgcgaugugcac

SEQ ID NO: 371972 - RNA, 14 nt, Molluscum contagiosum virus
ucgcgauguuuuga

SEQ ID NO: 371973 - RNA, 21 nt, Molluscum contagiosum virus
ucgcgcaaacaagcagucuca

SEQ ID NO: 371974 - RNA, 21 nt, Molluscum contagiosum virus
ucgcgcacuacucgucuugcg

SEQ ID NO: 371975 - RNA, 14 nt, Molluscum contagiosum virus
ucgcgcccugcgcg

SEQ ID NO: 371976 - RNA, 15 nt, Molluscum contagiosum virus
ucgcgccgcucggaa

SEQ ID NO: 371977 - RNA, 19 nt, Molluscum contagiosum virus
ucgcgccugaaccugggcg

SEQ ID NO: 371978 - RNA, 13 nt, Molluscum contagiosum virus
ucgcgccugcgcu

SEQ ID NO: 371979 - RNA, 22 nt, Molluscum contagiosum virus
ucgcgcgagcgcuacaugcacg

SEQ ID NO: 371980 - RNA, 17 nt, Molluscum contagiosum virus
ucgcgcgcaccugcacg

SEQ ID NO: 371981 - RNA, 13 nt, Molluscum contagiosum virus
ucgcgcgccagca

SEQ ID NO: 371982 - RNA, 19 nt, Molluscum contagiosum virus
ucgcgcgcccccgcaaaag

SEQ ID NO: 371983 - RNA, 15 nt, Molluscum contagiosum virus
ucgcgcgccugcgcg

SEQ ID NO: 371984 - RNA, 23 nt, Molluscum contagiosum virus
ucgcgcgcggccguggcaaacag

SEQ ID NO: 371985 - RNA, 19 nt, Molluscum contagiosum virus
ucgcgcguccgcaaagacg

SEQ ID NO: 371986 - RNA, 15 nt, Molluscum contagiosum virus
ucgcggagcugcgcg

SEQ ID NO: 371987 - RNA, 22 nt, Molluscum contagiosum virus
ucgcggucgacgagugcgccgc

SEQ ID NO: 371988 - RNA, 23 nt, Molluscum contagiosum virus
ucgcucgagggcgccgugcugcg

SEQ ID NO: 371989 - RNA, 17 nt, Molluscum contagiosum virus
ucgcucgcggugcagcu

SEQ ID NO: 371990 - RNA, 22 nt, Molluscum contagiosum virus
ucgcucucucagggugguuuga

SEQ ID NO: 371991 - RNA, 20 nt, Molluscum contagiosum virus
ucgcuuagccaacagcgcaa

SEQ ID NO: 371992 - RNA, 15 nt, Molluscum contagiosum virus
ucggacacacgcacc

SEQ ID NO: 371993 - RNA, 12 nt, Molluscum contagiosum virus
ucggacaccuca

SEQ ID NO: 371994 - RNA, 13 nt, Molluscum contagiosum virus
ucggacaccucac

SEQ ID NO: 371995 - RNA, 19 nt, Molluscum contagiosum virus
ucggacacguugcagcagc

SEQ ID NO: 371996 - RNA, 20 nt, Molluscum contagiosum virus
ucggacacguugcagcagca

SEQ ID NO: 371997 - RNA, 18 nt, Molluscum contagiosum virus
ucggacggaggucugcuu

SEQ ID NO: 371998 - RNA, 21 nt, Molluscum contagiosum virus
ucggauagguccgacaccagc

SEQ ID NO: 371999 - RNA, 16 nt, Molluscum contagiosum virus
ucggcacgcugcagaa

SEQ ID NO: 372000 - RNA, 17 nt, Molluscum contagiosum virus
ucggcgaacaucucggc

SEQ ID NO: 372001 - RNA, 13 nt, Molluscum contagiosum virus
ucgggaacaaagg

SEQ ID NO: 372002 - RNA, 15 nt, Molluscum contagiosum virus
ucgggaagcacaguc

SEQ ID NO: 372003 - RNA, 17 nt, Molluscum contagiosum virus
ucgggaagcacagucca

SEQ ID NO: 372004 - RNA, 23 nt, Molluscum contagiosum virus
ucgggagaacucuacacguggaa

SEQ ID NO: 372005 - RNA, 17 nt, Molluscum contagiosum virus
ucgggcaagaccaucau

SEQ ID NO: 372006 - RNA, 13 nt, Molluscum contagiosum virus
ucgggcaugcacu

SEQ ID NO: 372007 - RNA, 15 nt, Molluscum contagiosum virus
ucgggccccugcgcg

SEQ ID NO: 372008 - RNA, 17 nt, Molluscum contagiosum virus
ucgggcuagcaagcacg

SEQ ID NO: 372009 - RNA, 22 nt, Molluscum contagiosum virus
ucggugccagauugccggcgcg

SEQ ID NO: 372010 - RNA, 21 nt, Molluscum contagiosum virus
ucguaacaauggacacgcacu

SEQ ID NO: 372011 - RNA, 15 nt, Molluscum contagiosum virus
ucguaguccagcgcg

SEQ ID NO: 372012 - RNA, 19 nt, Molluscum contagiosum virus
ucgucaaagagaccuggag

SEQ ID NO: 372013 - RNA, 15 nt, Molluscum contagiosum virus
ucgucaaugcgcacg

SEQ ID NO: 372014 - RNA, 17 nt, Molluscum contagiosum virus
ucgucacggccuucgcg

SEQ ID NO: 372015 - RNA, 13 nt, Molluscum contagiosum virus
ucguccagcugcg

SEQ ID NO: 372016 - RNA, 14 nt, Molluscum contagiosum virus
ucguccccaagagc

SEQ ID NO: 372017 - RNA, 16 nt, Molluscum contagiosum virus
ucgucuucaccugcau

SEQ ID NO: 372018 - RNA, 17 nt, Molluscum contagiosum virus
ucgugcccgcacacgca

SEQ ID NO: 372019 - RNA, 21 nt, Molluscum contagiosum virus
ucgugcucguguguccgcacg

SEQ ID NO: 372020 - RNA, 12 nt, Molluscum contagiosum virus
ucgugcucucug

SEQ ID NO: 372021 - RNA, 15 nt, Molluscum contagiosum virus
ucguggcaacaacau

SEQ ID NO: 372022 - RNA, 16 nt, Molluscum contagiosum virus
ucguggcaacaacaug

SEQ ID NO: 372023 - RNA, 20 nt, Molluscum contagiosum virus
ucgugggauaggcacacacg

SEQ ID NO: 372024 - RNA, 22 nt, Molluscum contagiosum virus
ucgugguggaggacgacaauac

SEQ ID NO: 372025 - RNA, 15 nt, Molluscum contagiosum virus
ucgugguugcgcacg

SEQ ID NO: 372026 - RNA, 17 nt, Molluscum contagiosum virus
ucgugugcguacuggga

SEQ ID NO: 372027 - RNA, 16 nt, Molluscum contagiosum virus
ucguuggcgcgcccgg

SEQ ID NO: 372028 - RNA, 14 nt, Molluscum contagiosum virus
ucguuguccuugcc

SEQ ID NO: 372029 - RNA, 14 nt, Molluscum contagiosum virus
ucguuuugcacuug

SEQ ID NO: 372030 - RNA, 13 nt, Molluscum contagiosum virus
ucuacaccagcug

SEQ ID NO: 372031 - RNA, 19 nt, Molluscum contagiosum virus
ucuacacgcacgaccucac

SEQ ID NO: 372032 - RNA, 20 nt, Molluscum contagiosum virus
ucuacacgcacgaccucaca

SEQ ID NO: 372033 - RNA, 14 nt, Molluscum contagiosum virus
ucuacgacaugcuc

SEQ ID NO: 372034 - RNA, 23 nt, Molluscum contagiosum virus
ucuacuaaaguacgagagcgcau

SEQ ID NO: 372035 - RNA, 19 nt, Molluscum contagiosum virus
ucuagaagcgcaggcacaa

SEQ ID NO: 372036 - RNA, 15 nt, Molluscum contagiosum virus
ucuagacuucuuggu

SEQ ID NO: 372037 - RNA, 17 nt, Molluscum contagiosum virus
ucuagcgcgaggacaac

SEQ ID NO: 372038 - RNA, 14 nt, Molluscum contagiosum virus
ucuaugcccagccu

SEQ ID NO: 372039 - RNA, 21 nt, Molluscum contagiosum virus
ucucaacaugaauuuuugaga

SEQ ID NO: 372040 - RNA, 16 nt, Molluscum contagiosum virus
ucucaagagccgcuuc

SEQ ID NO: 372041 - RNA, 14 nt, Molluscum contagiosum virus
ugcacaccggcgcg

SEQ ID NO: 372042 - RNA, 16 nt, Molluscum contagiosum virus
ugcacacgcaccgccu

SEQ ID NO: 372043 - RNA, 17 nt, Molluscum contagiosum virus
ugcacacgcaccgccug

SEQ ID NO: 372044 - RNA, 13 nt, Molluscum contagiosum virus
ugcacagcugcuc

SEQ ID NO: 372045 - RNA, 12 nt, Molluscum contagiosum virus
ugcacaguucac

SEQ ID NO: 372046 - RNA, 13 nt, Molluscum contagiosum virus
ugcacaguucacg

SEQ ID NO: 372047 - RNA, 16 nt, Molluscum contagiosum virus
ugcacaugugcgugca

SEQ ID NO: 372048 - RNA, 13 nt, Molluscum contagiosum virus
ugcacgagcugcu

SEQ ID NO: 372049 - RNA, 15 nt, Molluscum contagiosum virus
ugcacgcgcacuugc

SEQ ID NO: 372050 - RNA, 16 nt, Molluscum contagiosum virus
ugcacgcgcacuugcc

SEQ ID NO: 372051 - RNA, 14 nt, Molluscum contagiosum virus
ugcacgcgggcgcc

SEQ ID NO: 372052 - RNA, 13 nt, Molluscum contagiosum virus
ugcacggcacggc

SEQ ID NO: 372053 - RNA, 23 nt, Molluscum contagiosum virus
ugcacgucgaagaccaccagcac

SEQ ID NO: 372054 - RNA, 15 nt, Molluscum contagiosum virus
ugcacgucgacaagu

SEQ ID NO: 372055 - RNA, 11 nt, Molluscum contagiosum virus
ugcacgugcag

SEQ ID NO: 372056 - RNA, 17 nt, Molluscum contagiosum virus
ugcacgugcgugcccaa

SEQ ID NO: 372057 - RNA, 14 nt, Molluscum contagiosum virus
ugcacgugcugcag

SEQ ID NO: 372058 - RNA, 14 nt, Molluscum contagiosum virus
ugcacuacugcucc

SEQ ID NO: 372059 - RNA, 18 nt, Molluscum contagiosum virus
ugcacuucggacaccuca

SEQ ID NO: 372060 - RNA, 12 nt, Molluscum contagiosum virus
ugcacuugucag

SEQ ID NO: 372061 - RNA, 17 nt, Molluscum contagiosum virus
ugcagaaacagccgugc

SEQ ID NO: 372062 - RNA, 14 nt, Molluscum contagiosum virus
ugcagaaccugcgg

SEQ ID NO: 372063 - RNA, 14 nt, Molluscum contagiosum virus
ugcagaacugccug

SEQ ID NO: 372064 - RNA, 21 nt, Molluscum contagiosum virus
ugcagagcaaggcgagucaau

SEQ ID NO: 372065 - RNA, 22 nt, Molluscum contagiosum virus
ugcagccgcugcugcugcaaag

SEQ ID NO: 372066 - RNA, 14 nt, Molluscum contagiosum virus
ugcagcgccgcgcg

SEQ ID NO: 372067 - RNA, 19 nt, Molluscum contagiosum virus
ugcagcguauggaucuucu

SEQ ID NO: 372068 - RNA, 18 nt, Molluscum contagiosum virus
ugcaggaaaggcacccgc

SEQ ID NO: 372069 - RNA, 18 nt, Molluscum contagiosum virus
ugcaggcaaaacugaaau

SEQ ID NO: 372070 - RNA, 16 nt, Molluscum contagiosum virus
ugcaggccgugcucac

SEQ ID NO: 372071 - RNA, 17 nt, Molluscum contagiosum virus
ugcagguguguaucuca

SEQ ID NO: 372072 - RNA, 20 nt, Molluscum contagiosum virus
ugcaguaugugaacacgaca

SEQ ID NO: 372073 - RNA, 11 nt, Molluscum contagiosum virus
gugagaacaag

SEQ ID NO: 372074 - RNA, 19 nt, Molluscum contagiosum virus
gugaguagcaacaaagagg

SEQ ID NO: 372075 - RNA, 22 nt, Molluscum contagiosum virus
gugaugauuugauggcugcuca

SEQ ID NO: 372076 - RNA, 23 nt, Molluscum contagiosum virus
gugcaaauugaaaaaacaugugc

SEQ ID NO: 372077 - RNA, 16 nt, Molluscum contagiosum virus
gugcaagcccagcagc

SEQ ID NO: 372078 - RNA, 17 nt, Molluscum contagiosum virus
gugcaagcccagcagcg

SEQ ID NO: 372079 - RNA, 16 nt, Molluscum contagiosum virus
gugcaauggcaggugc

SEQ ID NO: 372080 - RNA, 13 nt, Molluscum contagiosum virus
gugcaauuccguc

SEQ ID NO: 372081 - RNA, 16 nt, Molluscum contagiosum virus
gugcacaugcccgugc

SEQ ID NO: 372082 - RNA, 20 nt, Molluscum contagiosum virus
gugcacucgagaagaggguc

SEQ ID NO: 372083 - RNA, 17 nt, Molluscum contagiosum virus
gugcagacgaccgucac

SEQ ID NO: 372084 - RNA, 14 nt, Molluscum contagiosum virus
gugcagacgcucaa

SEQ ID NO: 372085 - RNA, 21 nt, Molluscum contagiosum virus
gugcagaugaggcugcucucc

SEQ ID NO: 372086 - RNA, 18 nt, Molluscum contagiosum virus
gugcagccgcugcugcug

SEQ ID NO: 372087 - RNA, 21 nt, Molluscum contagiosum virus
gugcagcgcccggaucugguc

SEQ ID NO: 372088 - RNA, 17 nt, Molluscum contagiosum virus
gugcaggaacgcgcgcu

SEQ ID NO: 372089 - RNA, 18 nt, Molluscum contagiosum virus
gugcauggcacgcgagca

SEQ ID NO: 372090 - RNA, 20 nt, Molluscum contagiosum virus
gugcauugcgucuuacugcu

SEQ ID NO: 372091 - RNA, 19 nt, Molluscum contagiosum virus
gugcccaugcucgagccug

SEQ ID NO: 372092 - RNA, 16 nt, Molluscum contagiosum virus
gugcccgcaguuugca

SEQ ID NO: 372093 - RNA, 16 nt, Molluscum contagiosum virus
gugcccuacgcgcgcg

SEQ ID NO: 372094 - RNA, 15 nt, Molluscum contagiosum virus
gugccgacgugugcc

SEQ ID NO: 372095 - RNA, 16 nt, Molluscum contagiosum virus
gugccgccgugggcgc

SEQ ID NO: 372096 - RNA, 20 nt, Molluscum contagiosum virus
gugcgagaacuggcgcagca

SEQ ID NO: 372097 - RNA, 12 nt, Molluscum contagiosum virus
gugcgcaccauc

SEQ ID NO: 372098 - RNA, 23 nt, Molluscum contagiosum virus
gugcgcaccaucuucaacuucca

SEQ ID NO: 372099 - RNA, 14 nt, Molluscum contagiosum virus
gugcgcagggcaau

SEQ ID NO: 372100 - RNA, 11 nt, Molluscum contagiosum virus
gugcgccagcu

SEQ ID NO: 372101 - RNA, 15 nt, Molluscum contagiosum virus
gugcgcgacgggcuc

SEQ ID NO: 372102 - RNA, 19 nt, Molluscum contagiosum virus
gugcgcgcaacacugcaga

SEQ ID NO: 372103 - RNA, 13 nt, Molluscum contagiosum virus
gugcgcgcacggc

SEQ ID NO: 372104 - RNA, 13 nt, Molluscum contagiosum virus
gugcgcgcugcgc

SEQ ID NO: 372105 - RNA, 17 nt, Molluscum contagiosum virus
gugcgcuggcgcgcgcg

SEQ ID NO: 372106 - RNA, 13 nt, Molluscum contagiosum virus
gugcgggcacggc

SEQ ID NO: 372107 - RNA, 13 nt, Molluscum contagiosum virus
gugcguccgcccu

SEQ ID NO: 372108 - RNA, 12 nt, Molluscum contagiosum virus
gugcgucucucu

SEQ ID NO: 372109 - RNA, 14 nt, Molluscum contagiosum virus
gugcgugcacuguc

SEQ ID NO: 372110 - RNA, 15 nt, Molluscum contagiosum virus
gugcgugcacugucu

SEQ ID NO: 372111 - RNA, 15 nt, Molluscum contagiosum virus
gugcgugcgcugcgc

SEQ ID NO: 372112 - RNA, 18 nt, Molluscum contagiosum virus
gugcuacgcgagcacugc

SEQ ID NO: 372113 - RNA, 13 nt, Molluscum contagiosum virus
gugcucacgcugu

SEQ ID NO: 372114 - RNA, 22 nt, Molluscum contagiosum virus
gugcuccgcaccgucaagaaca

SEQ ID NO: 372115 - RNA, 22 nt, Molluscum contagiosum virus
gugcucguguguccgcacgcac

SEQ ID NO: 372116 - RNA, 23 nt, Molluscum contagiosum virus
gugcucguguuguugcaucuucu

SEQ ID NO: 372117 - RNA, 10 nt, Molluscum contagiosum virus
gugcucuuua

SEQ ID NO: 372118 - RNA, 19 nt, Molluscum contagiosum virus
gugcucuuuaguacaacgc

SEQ ID NO: 372119 - RNA, 18 nt, Molluscum contagiosum virus
gugcugaagacgcuggcc

SEQ ID NO: 372120 - RNA, 18 nt, Molluscum contagiosum virus
gugcugagcuagugccga

SEQ ID NO: 372121 - RNA, 17 nt, Molluscum contagiosum virus
gugcugcgcgacaugcu

SEQ ID NO: 372122 - RNA, 16 nt, Molluscum contagiosum virus
gugcugcggcgcgugc

SEQ ID NO: 372123 - RNA, 18 nt, Molluscum contagiosum virus
gugcugcggcgcgugccg

SEQ ID NO: 372124 - RNA, 12 nt, Molluscum contagiosum virus
gugcugcucaag

SEQ ID NO: 372125 - RNA, 23 nt, Molluscum contagiosum virus
gugcuggagcagacguacgagca

SEQ ID NO: 372126 - RNA, 12 nt, Molluscum contagiosum virus
gugcuggucaag

SEQ ID NO: 372127 - RNA, 11 nt, Molluscum contagiosum virus
gugcuggucuc

SEQ ID NO: 372128 - RNA, 14 nt, Molluscum contagiosum virus
gugcugucagugga

SEQ ID NO: 372129 - RNA, 15 nt, Molluscum contagiosum virus
gugcuguccuacuuc

SEQ ID NO: 372130 - RNA, 17 nt, Molluscum contagiosum virus
gugcugugccugcgcaa

SEQ ID NO: 372131 - RNA, 16 nt, Molluscum contagiosum virus
gugcuuauaccaugga

SEQ ID NO: 372132 - RNA, 15 nt, Molluscum contagiosum virus
gugcuuccugcaaac

SEQ ID NO: 372133 - RNA, 16 nt, Molluscum contagiosum virus
guggaccuuggcgcgc

SEQ ID NO: 372134 - RNA, 14 nt, Molluscum contagiosum virus
guggacgcuccgag

SEQ ID NO: 372135 - RNA, 19 nt, Molluscum contagiosum virus
guggaggaucgcuacgugc

SEQ ID NO: 372136 - RNA, 19 nt, Molluscum contagiosum virus
guggaucgcgcgcaccugc

SEQ ID NO: 372137 - RNA, 20 nt, Molluscum contagiosum virus
guggcacugacgguacucau

SEQ ID NO: 372138 - RNA, 23 nt, Molluscum contagiosum virus
guggccaagcgcuccaacuucca

SEQ ID NO: 372139 - RNA, 22 nt, Molluscum contagiosum virus
guggccagacaugucguaccug

SEQ ID NO: 372140 - RNA, 17 nt, Molluscum contagiosum virus
guggccguagugcucau

SEQ ID NO: 372141 - RNA, 18 nt, Molluscum contagiosum virus
guggcgcgcgagcugcua

SEQ ID NO: 372142 - RNA, 13 nt, Molluscum contagiosum virus
guggcggauguca

SEQ ID NO: 372143 - RNA, 17 nt, Molluscum contagiosum virus
gugggauaggcacacac

SEQ ID NO: 372144 - RNA, 20 nt, Molluscum contagiosum virus
gugggcagccgccuggccga

SEQ ID NO: 372145 - RNA, 17 nt, Molluscum contagiosum virus
gugggcagcuucugcuc

SEQ ID NO: 372146 - RNA, 20 nt, Molluscum contagiosum virus
gugggccgcggcgcggcgga

SEQ ID NO: 372147 - RNA, 20 nt, Molluscum contagiosum virus
gugggcgacgugaagacgcu

SEQ ID NO: 372148 - RNA, 14 nt, Molluscum contagiosum virus
gugguccaccagca

SEQ ID NO: 372149 - RNA, 14 nt, Molluscum contagiosum virus
gugguccaccagcu

SEQ ID NO: 372150 - RNA, 13 nt, Molluscum contagiosum virus
guggucuuugucu

SEQ ID NO: 372151 - RNA, 19 nt, Molluscum contagiosum virus
gugguguccacgcgcguga

SEQ ID NO: 372152 - RNA, 22 nt, Molluscum contagiosum virus
gugucgagcuucggacgagcuc

SEQ ID NO: 372153 - RNA, 15 nt, Molluscum contagiosum virus
guguggcuacaugca

SEQ ID NO: 372154 - RNA, 22 nt, Molluscum contagiosum virus
caaccgcaaggaaaacugcauc

SEQ ID NO: 372155 - RNA, 19 nt, Molluscum contagiosum virus
caaccuccugcaccugcug

SEQ ID NO: 372156 - RNA, 21 nt, Molluscum contagiosum virus
caaccuccugcaccugcugga

SEQ ID NO: 372157 - RNA, 19 nt, Molluscum contagiosum virus
caacgaacauguugugcuc

SEQ ID NO: 372158 - RNA, 13 nt, Molluscum contagiosum virus
caacgacaaggaa

SEQ ID NO: 372159 - RNA, 19 nt, Molluscum contagiosum virus
caacgacaaggaaaggcac

SEQ ID NO: 372160 - RNA, 20 nt, Molluscum contagiosum virus
caacgagcacgugugcggag

SEQ ID NO: 372161 - RNA, 21 nt, Molluscum contagiosum virus
caacgagcagcccgugcgccu

SEQ ID NO: 372162 - RNA, 20 nt, Molluscum contagiosum virus
caacgaggcggccguguccu

SEQ ID NO: 372163 - RNA, 14 nt, Molluscum contagiosum virus
caacgccgggcacg

SEQ ID NO: 372164 - RNA, 15 nt, Molluscum contagiosum virus
caacgggcucgugcu

SEQ ID NO: 372165 - RNA, 16 nt, Molluscum contagiosum virus
caacgucgcacuggcc

SEQ ID NO: 372166 - RNA, 23 nt, Molluscum contagiosum virus
caacgugaguaccgugaccaagg

SEQ ID NO: 372167 - RNA, 14 nt, Molluscum contagiosum virus
caacguggcgcuga

SEQ ID NO: 372168 - RNA, 14 nt, Molluscum contagiosum virus
caacuacaaggugc

SEQ ID NO: 372169 - RNA, 20 nt, Molluscum contagiosum virus
caacuaccuggggcugcuuc

SEQ ID NO: 372170 - RNA, 18 nt, Molluscum contagiosum virus
caacuagacaaggggcca

SEQ ID NO: 372171 - RNA, 20 nt, Molluscum contagiosum virus
caacugcgauaacaucugcu

SEQ ID NO: 372172 - RNA, 15 nt, Molluscum contagiosum virus
caacuuccacauccg

SEQ ID NO: 372173 - RNA, 12 nt, Molluscum contagiosum virus
caacuugcucua

SEQ ID NO: 372174 - RNA, 23 nt, Molluscum contagiosum virus
caagaaaaucgccuuugugacaa

SEQ ID NO: 372175 - RNA, 20 nt, Molluscum contagiosum virus
caagaacaaccagacgugcu

SEQ ID NO: 372176 - RNA, 18 nt, Molluscum contagiosum virus
caagaacaauuacuccag

SEQ ID NO: 372177 - RNA, 14 nt, Molluscum contagiosum virus
caagaacaccaaga

SEQ ID NO: 372178 - RNA, 18 nt, Molluscum contagiosum virus
caagaagaggccagcaca

SEQ ID NO: 372179 - RNA, 14 nt, Molluscum contagiosum virus
caagacaagucaca

SEQ ID NO: 372180 - RNA, 19 nt, Molluscum contagiosum virus
caagacucgcccgcgcgcg

SEQ ID NO: 372181 - RNA, 16 nt, Molluscum contagiosum virus
caagagcaucgagcug

SEQ ID NO: 372182 - RNA, 15 nt, Molluscum contagiosum virus
caagaggccgucaca

SEQ ID NO: 372183 - RNA, 19 nt, Molluscum contagiosum virus
caagaggccgucacaugcu

SEQ ID NO: 372184 - RNA, 16 nt, Molluscum contagiosum virus
caagaguugucuucca

SEQ ID NO: 372185 - RNA, 12 nt, Molluscum contagiosum virus
caagaucaaccg

SEQ ID NO: 372186 - RNA, 16 nt, Molluscum contagiosum virus
caagaucguuuugcac

SEQ ID NO: 372187 - RNA, 20 nt, Molluscum contagiosum virus
caagaucguuuugcacuugu

SEQ ID NO: 372188 - RNA, 20 nt, Molluscum contagiosum virus
gagccagucucgcgcuucca

SEQ ID NO: 372189 - RNA, 13 nt, Molluscum contagiosum virus
gagccauguuucc

SEQ ID NO: 372190 - RNA, 17 nt, Molluscum contagiosum virus
gagcccaauccacuggu

SEQ ID NO: 372191 - RNA, 21 nt, Molluscum contagiosum virus
gagccccuaucgauucugucc

SEQ ID NO: 372192 - RNA, 20 nt, Molluscum contagiosum virus
gagcccuaucgcaaucugac

SEQ ID NO: 372193 - RNA, 22 nt, Molluscum contagiosum virus
gagcccuugaucgacauggagc

SEQ ID NO: 372194 - RNA, 19 nt, Molluscum contagiosum virus
gagccgcgcgagcgcgccc

SEQ ID NO: 372195 - RNA, 14 nt, Molluscum contagiosum virus
gagccgcuggccga

SEQ ID NO: 372196 - RNA, 21 nt, Molluscum contagiosum virus
gagccgcuggccgaugccuau

SEQ ID NO: 372197 - RNA, 16 nt, Molluscum contagiosum virus
gagccguggaugaaca

SEQ ID NO: 372198 - RNA, 18 nt, Molluscum contagiosum virus
gagccuggucgagaacaa

SEQ ID NO: 372199 - RNA, 20 nt, Molluscum contagiosum virus
gagcgcccgugcuugcgcac

SEQ ID NO: 372200 - RNA, 17 nt, Molluscum contagiosum virus
gagcgcgcgccugcugg

SEQ ID NO: 372201 - RNA, 12 nt, Molluscum contagiosum virus
gagcgcgcgugc

SEQ ID NO: 372202 - RNA, 21 nt, Molluscum contagiosum virus
gagcgcgcuggacuugcgcga

SEQ ID NO: 372203 - RNA, 21 nt, Molluscum contagiosum virus
gagcgcggcuuacacacgcac

SEQ ID NO: 372204 - RNA, 17 nt, Molluscum contagiosum virus
gagcgcggggcagauag

SEQ ID NO: 372205 - RNA, 21 nt, Molluscum contagiosum virus
gagcgcuaccugaugcgcaug

SEQ ID NO: 372206 - RNA, 16 nt, Molluscum contagiosum virus
gagcgcuaucucugga

SEQ ID NO: 372207 - RNA, 20 nt, Molluscum contagiosum virus
gagcggcacgggaaggcucu

SEQ ID NO: 372208 - RNA, 14 nt, Molluscum contagiosum virus
gagcgugaccagug

SEQ ID NO: 372209 - RNA, 20 nt, Molluscum contagiosum virus
gagcgugaccagugcgugcu

SEQ ID NO: 372210 - RNA, 19 nt, Molluscum contagiosum virus
gagcgugcuggucaacagc

SEQ ID NO: 372211 - RNA, 12 nt, Molluscum contagiosum virus
gagcgugggcga

SEQ ID NO: 372212 - RNA, 14 nt, Molluscum contagiosum virus
gagcguugucuuga

SEQ ID NO: 372213 - RNA, 17 nt, Molluscum contagiosum virus
gagcuagugccgagcuc

SEQ ID NO: 372214 - RNA, 13 nt, Molluscum contagiosum virus
gagcucacaggua

SEQ ID NO: 372215 - RNA, 13 nt, Molluscum contagiosum virus
gagcucacgccgg

SEQ ID NO: 372216 - RNA, 16 nt, Molluscum contagiosum virus
gagcucacgccggacc

SEQ ID NO: 372217 - RNA, 16 nt, Molluscum contagiosum virus
gagcuccccgcgcgca

SEQ ID NO: 372218 - RNA, 22 nt, Molluscum contagiosum virus
gagcucgcgcgccagcacgcgc

SEQ ID NO: 372219 - RNA, 15 nt, Molluscum contagiosum virus
gagcucgcguaccug

SEQ ID NO: 372220 - RNA, 17 nt, Molluscum contagiosum virus
gagcucgcgucaucgcu

SEQ ID NO: 372221 - RNA, 16 nt, Molluscum contagiosum virus
gagcucgucgcgcgcg

SEQ ID NO: 372222 - RNA, 21 nt, Molluscum contagiosum virus
gagcucuucgacagcgugcgc

SEQ ID NO: 372223 - RNA, 18 nt, Molluscum contagiosum virus
gagcucuucucgcagcgg

SEQ ID NO: 372224 - RNA, 20 nt, Molluscum contagiosum virus
gagcugaaccuggucuucgg

SEQ ID NO: 372225 - RNA, 15 nt, Molluscum contagiosum virus
gagcugcugcgcuac

SEQ ID NO: 372226 - RNA, 23 nt, Molluscum contagiosum virus
gagcuggccacucucgcgcguga

SEQ ID NO: 372227 - RNA, 20 nt, Molluscum contagiosum virus
gagcuggccgaagucgcagc

SEQ ID NO: 372228 - RNA, 19 nt, Molluscum contagiosum virus
gagcugugccaucucgcac

SEQ ID NO: 372229 - RNA, 22 nt, Molluscum contagiosum virus
gagcuguucaacaucguggcgc

SEQ ID NO: 372230 - RNA, 15 nt, Molluscum contagiosum virus
gagcuucgucuucac

SEQ ID NO: 372231 - RNA, 22 nt, Molluscum contagiosum virus
gagcuuggccggaacgccgugc

SEQ ID NO: 372232 - RNA, 17 nt, Molluscum contagiosum virus
gagcuuuccuugcgcuu

SEQ ID NO: 372233 - RNA, 20 nt, Molluscum contagiosum virus
gaggaaagcgcacacuugcg

SEQ ID NO: 372234 - RNA, 21 nt, Molluscum contagiosum virus
gaggaaagcgcacacuugcgc

SEQ ID NO: 372235 - RNA, 14 nt, Molluscum contagiosum virus
gaggaccacgccga

SEQ ID NO: 372236 - RNA, 15 nt, Molluscum contagiosum virus
gaggaccgcgagcgc

SEQ ID NO: 372237 - RNA, 18 nt, Molluscum contagiosum virus
gaggaccucgcgcgccgc

SEQ ID NO: 372238 - RNA, 21 nt, Molluscum contagiosum virus
gaggacgaaaucgcaaagcac

SEQ ID NO: 372239 - RNA, 15 nt, Molluscum contagiosum virus
gaggacgagcugcua

SEQ ID NO: 372240 - RNA, 15 nt, Molluscum contagiosum virus
gaggacggcgcgggc

SEQ ID NO: 372241 - RNA, 15 nt, Molluscum contagiosum virus
gaggacggcgugcgc

SEQ ID NO: 372242 - RNA, 18 nt, Molluscum contagiosum virus
gaggacuucacaacacug

SEQ ID NO: 372243 - RNA, 16 nt, Molluscum contagiosum virus
gaggacuuccgcgcgc

SEQ ID NO: 372244 - RNA, 21 nt, Molluscum contagiosum virus
gaggagauggaacugcagcag

SEQ ID NO: 372245 - RNA, 14 nt, Molluscum contagiosum virus
gaggaggugcucug

SEQ ID NO: 372246 - RNA, 21 nt, Molluscum contagiosum virus
gaggaguagcgugcgccugca

SEQ ID NO: 372247 - RNA, 20 nt, Molluscum contagiosum virus
gaggauucuugcacgggcau

SEQ ID NO: 372248 - RNA, 16 nt, Molluscum contagiosum virus
gaggcaaucuguccag

SEQ ID NO: 372249 - RNA, 16 nt, Molluscum contagiosum virus
gaggcacucgucgcgc

SEQ ID NO: 372250 - RNA, 16 nt, Molluscum contagiosum virus
gaggcagccgcggcgc

SEQ ID NO: 372251 - RNA, 17 nt, Molluscum contagiosum virus
gaggcaugucgcggugc

SEQ ID NO: 372252 - RNA, 21 nt, Molluscum contagiosum virus
gaggccaaggucuucaggaac

SEQ ID NO: 372253 - RNA, 13 nt, Molluscum contagiosum virus
gaggccagcacaa

SEQ ID NO: 372254 - RNA, 14 nt, Molluscum contagiosum virus
gaggccagcacaag

SEQ ID NO: 372255 - RNA, 15 nt, Molluscum contagiosum virus
gaggcccaggccaug

SEQ ID NO: 372256 - RNA, 23 nt, Molluscum contagiosum virus
gaggcccugcuugcccgcgccgc

SEQ ID NO: 372257 - RNA, 17 nt, Molluscum contagiosum virus
gaggccuacgugcugcg

SEQ ID NO: 372258 - RNA, 16 nt, Molluscum contagiosum virus
gaggccuucaacaaga

SEQ ID NO: 372259 - RNA, 17 nt, Molluscum contagiosum virus
gaggcgcguccgcggcc

SEQ ID NO: 372260 - RNA, 19 nt, Molluscum contagiosum virus
gaggcgcuaccucgcggga

SEQ ID NO: 372261 - RNA, 16 nt, Molluscum contagiosum virus
gaggcgcuagugcaga

SEQ ID NO: 372262 - RNA, 20 nt, Molluscum contagiosum virus
gaggcgcugccgcgggacga

SEQ ID NO: 372263 - RNA, 14 nt, Molluscum contagiosum virus
gaggcggcacugcu

SEQ ID NO: 372264 - RNA, 21 nt, Molluscum contagiosum virus
gaggcuagugccauugugaca

SEQ ID NO: 372265 - RNA, 13 nt, Molluscum contagiosum virus
gagggcacgcugc

SEQ ID NO: 372266 - RNA, 16 nt, Molluscum contagiosum virus
gagggcacgcugcaca

SEQ ID NO: 372267 - RNA, 20 nt, Molluscum contagiosum virus
gagggccuuggcggcgcggc

SEQ ID NO: 372268 - RNA, 21 nt, Molluscum contagiosum virus
gagggcgauacaaaacaugcu

SEQ ID NO: 372269 - RNA, 20 nt, Molluscum contagiosum virus
gagggguguggcuacaugca

SEQ ID NO: 372270 - RNA, 15 nt, Molluscum contagiosum virus
gagggucacgcgcac

SEQ ID NO: 372271 - RNA, 22 nt, Molluscum contagiosum virus
gagguacugccgccaggaaaac

SEQ ID NO: 372272 - RNA, 18 nt, Molluscum contagiosum virus
gaggucaagggugugggc

SEQ ID NO: 372273 - RNA, 17 nt, Molluscum contagiosum virus
gaggucgagcgcgccgc

SEQ ID NO: 372274 - RNA, 18 nt, Molluscum contagiosum virus
gaggugcgcgcaacacug

SEQ ID NO: 372275 - RNA, 21 nt, Molluscum contagiosum virus
gaggugcgcuaucgcuugcua

SEQ ID NO: 372276 - RNA, 14 nt, Molluscum contagiosum virus
gagguggcggagga

SEQ ID NO: 372277 - RNA, 22 nt, Molluscum contagiosum virus
gaguaccgcgcgcacgcggcgc

SEQ ID NO: 372278 - RNA, 17 nt, Molluscum contagiosum virus
gaguacuacuacacugu

SEQ ID NO: 372279 - RNA, 17 nt, Molluscum contagiosum virus
gagucacgaccgaccca

SEQ ID NO: 372280 - RNA, 14 nt, Molluscum contagiosum virus
gaguccacugccaa

SEQ ID NO: 372281 - RNA, 15 nt, Molluscum contagiosum virus
gaguccgaucuugau

SEQ ID NO: 372282 - RNA, 16 nt, Molluscum contagiosum virus
gagugaaggguguggc

SEQ ID NO: 372283 - RNA, 22 nt, Molluscum contagiosum virus
gagugcgggagcaagucugcgc

SEQ ID NO: 372284 - RNA, 19 nt, Molluscum contagiosum virus
ggugcgcgucuucuucgac

SEQ ID NO: 372285 - RNA, 20 nt, Molluscum contagiosum virus
ggugcugcgccacgugcgca

SEQ ID NO: 372286 - RNA, 14 nt, Molluscum contagiosum virus
gguggccaagcgcu

SEQ ID NO: 372287 - RNA, 14 nt, Molluscum contagiosum virus
gguggccgcgcgcg

SEQ ID NO: 372288 - RNA, 17 nt, Molluscum contagiosum virus
gguguccacgacacugg

SEQ ID NO: 372289 - RNA, 17 nt, Molluscum contagiosum virus
gguguccacgcgcguga

SEQ ID NO: 372290 - RNA, 16 nt, Molluscum contagiosum virus
ggugucgguaccugca

SEQ ID NO: 372291 - RNA, 11 nt, Molluscum contagiosum virus
gguuaccaagg

SEQ ID NO: 372292 - RNA, 22 nt, Molluscum contagiosum virus
gguugcccgccugccgcgagca

SEQ ID NO: 372293 - RNA, 17 nt, Molluscum contagiosum virus
gguugcgcgugugcagc

SEQ ID NO: 372294 - RNA, 20 nt, Molluscum contagiosum virus
guaaagagcguccagccgca

SEQ ID NO: 372295 - RNA, 23 nt, Molluscum contagiosum virus
guaacaauggacacgcacuggcg

SEQ ID NO: 372296 - RNA, 20 nt, Molluscum contagiosum virus
guaacagcgcgcgacugucu

SEQ ID NO: 372297 - RNA, 23 nt, Molluscum contagiosum virus
guaacagcgcgcgacugucuuga

SEQ ID NO: 372298 - RNA, 17 nt, Molluscum contagiosum virus
guaagcccgcuaugaac

SEQ ID NO: 372299 - RNA, 14 nt, Molluscum contagiosum virus
guaagucgaagagg

SEQ ID NO: 372300 - RNA, 17 nt, Molluscum contagiosum virus
guaagucgaagaggguc

SEQ ID NO: 372301 - RNA, 20 nt, Molluscum contagiosum virus
guaaugauugucaagcacua

SEQ ID NO: 372302 - RNA, 19 nt, Molluscum contagiosum virus
guacaacccaaacaugucc

SEQ ID NO: 372303 - RNA, 14 nt, Molluscum contagiosum virus
guacagugcgcgca

SEQ ID NO: 372304 - RNA, 21 nt, Molluscum contagiosum virus
guacaucccgcacgugggcua

SEQ ID NO: 372305 - RNA, 14 nt, Molluscum contagiosum virus
guacaugcgugcua

SEQ ID NO: 372306 - RNA, 18 nt, Molluscum contagiosum virus
guacaugcgugcuagccc

SEQ ID NO: 372307 - RNA, 14 nt, Molluscum contagiosum virus
guaccccgcaggaa

SEQ ID NO: 372308 - RNA, 12 nt, Molluscum contagiosum virus
guaccgcgcgca

SEQ ID NO: 372309 - RNA, 17 nt, Molluscum contagiosum virus
guaccggccaaggcaaa

SEQ ID NO: 372310 - RNA, 17 nt, Molluscum contagiosum virus
guaccggcucaagaaca

SEQ ID NO: 372311 - RNA, 22 nt, Molluscum contagiosum virus
guaccugggcaggccgcccacg

SEQ ID NO: 372312 - RNA, 21 nt, Molluscum contagiosum virus
guacgcgccggggcgcgcgcu

SEQ ID NO: 372313 - RNA, 14 nt, Molluscum contagiosum virus
guacguaauccaug

SEQ ID NO: 372314 - RNA, 19 nt, Molluscum contagiosum virus
guacguguccaugcacgac

SEQ ID NO: 372315 - RNA, 17 nt, Molluscum contagiosum virus
guacuacuacacugucg

SEQ ID NO: 372316 - RNA, 20 nt, Molluscum contagiosum virus
guagcagcgccugcacgcac

SEQ ID NO: 372317 - RNA, 14 nt, Molluscum contagiosum virus
guagccgcgacgca

SEQ ID NO: 372318 - RNA, 13 nt, Molluscum contagiosum virus
guagccuagccau

SEQ ID NO: 372319 - RNA, 21 nt, Molluscum contagiosum virus
guagcuagcguucccaagcaa

SEQ ID NO: 372320 - RNA, 22 nt, Molluscum contagiosum virus
guaguccgacggaacgagccug

SEQ ID NO: 372321 - RNA, 18 nt, Molluscum contagiosum virus
guagucgcccccgugccg

SEQ ID NO: 372322 - RNA, 16 nt, Molluscum contagiosum virus
guagucuucgugcgug

SEQ ID NO: 372323 - RNA, 18 nt, Molluscum contagiosum virus
guauacucgacgcgcgcg

SEQ ID NO: 372324 - RNA, 13 nt, Molluscum contagiosum virus
guaugaucugcag

SEQ ID NO: 372325 - RNA, 23 nt, Molluscum contagiosum virus
guauucgcaagauacacauugcg

SEQ ID NO: 372326 - RNA, 22 nt, Molluscum contagiosum virus
guauuucaaugcaguaugugaa

SEQ ID NO: 372327 - RNA, 20 nt, Molluscum contagiosum virus
gucaacaugccuuucuucca

SEQ ID NO: 372328 - RNA, 21 nt, Molluscum contagiosum virus
gucaagacucgcccgcgcgcg

SEQ ID NO: 372329 - RNA, 11 nt, Molluscum contagiosum virus
gucaagacugg

SEQ ID NO: 372330 - RNA, 12 nt, Molluscum contagiosum virus
gucaagacuggc

SEQ ID NO: 372331 - RNA, 18 nt, Molluscum contagiosum virus
gucaagcacuacauggac

SEQ ID NO: 372332 - RNA, 18 nt, Molluscum contagiosum virus
gucaagcagcgcgccacc

SEQ ID NO: 372333 - RNA, 23 nt, Molluscum contagiosum virus
gucaauacucuguagcaucugcg

SEQ ID NO: 372334 - RNA, 16 nt, Molluscum contagiosum virus
gucaaugcgcacgugc

SEQ ID NO: 372335 - RNA, 17 nt, Molluscum contagiosum virus
gucacaagcaccgccug

SEQ ID NO: 372336 - RNA, 20 nt, Molluscum contagiosum virus
gucacagacacgcuggucag

SEQ ID NO: 372337 - RNA, 23 nt, Molluscum contagiosum virus
gucacgaccgacccaucggagaa

SEQ ID NO: 372338 - RNA, 21 nt, Molluscum contagiosum virus
gucacgcgcuucguggacgag

SEQ ID NO: 372339 - RNA, 14 nt, Molluscum contagiosum virus
gucagccgcacggc

SEQ ID NO: 372340 - RNA, 19 nt, Molluscum contagiosum virus
gucaucgacgagcacgagc

SEQ ID NO: 372341 - RNA, 16 nt, Molluscum contagiosum virus
guccaacccgcggcgc

SEQ ID NO: 372342 - RNA, 20 nt, Molluscum contagiosum virus
guccacaaagcccuccugag

SEQ ID NO: 372343 - RNA, 14 nt, Molluscum contagiosum virus
guccacgacacugg

SEQ ID NO: 372344 - RNA, 23 nt, Molluscum contagiosum virus
guccacggguaccgugcgcguga

SEQ ID NO: 372345 - RNA, 14 nt, Molluscum contagiosum virus
guccacuccuggaa

SEQ ID NO: 372346 - RNA, 20 nt, Molluscum contagiosum virus
guccagccgcaccgggacga

SEQ ID NO: 372347 - RNA, 19 nt, Molluscum contagiosum virus
guccaugucgcgcaucacc

SEQ ID NO: 372348 - RNA, 19 nt, Molluscum contagiosum virus
gucccagcaccgcgccgcg

SEQ ID NO: 372349 - RNA, 13 nt, Molluscum contagiosum virus
gucccuugucaaa

SEQ ID NO: 372350 - RNA, 21 nt, Molluscum contagiosum virus
guccgacaccggacgaaaggu

SEQ ID NO: 372351 - RNA, 22 nt, Molluscum contagiosum virus
guccgcacgcacggagcacaac

SEQ ID NO: 372352 - RNA, 19 nt, Molluscum contagiosum virus
guccgcauccucaaccgcu

SEQ ID NO: 372353 - RNA, 22 nt, Molluscum contagiosum virus
guccgcggacgcgggccugucc

SEQ ID NO: 372354 - RNA, 19 nt, Molluscum contagiosum virus
guccgcggcucugacaaca

SEQ ID NO: 372355 - RNA, 15 nt, Molluscum contagiosum virus
guccgcgggcgcacg

SEQ ID NO: 372356 - RNA, 19 nt, Molluscum contagiosum virus
guccgcgggcgcgcgccag

SEQ ID NO: 372357 - RNA, 15 nt, Molluscum contagiosum virus
guccggcgcucgccc

SEQ ID NO: 372358 - RNA, 15 nt, Molluscum contagiosum virus
guccggcgcuugccc

SEQ ID NO: 372359 - RNA, 20 nt, Molluscum contagiosum virus
guccguaagucgaagagggu

SEQ ID NO: 372360 - RNA, 13 nt, Molluscum contagiosum virus
guccgucuuugcg

SEQ ID NO: 372361 - RNA, 15 nt, Molluscum contagiosum virus
guccuacuucgucaa

SEQ ID NO: 372362 - RNA, 22 nt, Molluscum contagiosum virus
guccucgacaaugagcacuugc

SEQ ID NO: 372363 - RNA, 22 nt, Molluscum contagiosum virus
guccucggucaccacuccgucg

SEQ ID NO: 372364 - RNA, 21 nt, Molluscum contagiosum virus
guccucgugggauaggcacac

SEQ ID NO: 372365 - RNA, 23 nt, Molluscum contagiosum virus
guccucgugggauaggcacacac

SEQ ID NO: 372366 - RNA, 16 nt, Molluscum contagiosum virus
guccuggagggguguu

SEQ ID NO: 372367 - RNA, 19 nt, Molluscum contagiosum virus
guccuggagggguguuucc

SEQ ID NO: 372368 - RNA, 18 nt, Molluscum contagiosum virus
guccuuucacacacggaa

SEQ ID NO: 372369 - RNA, 15 nt, Molluscum contagiosum virus
gucgaaacacugcgg

SEQ ID NO: 372370 - RNA, 18 nt, Molluscum contagiosum virus
gucgaagagggucgugca

SEQ ID NO: 372371 - RNA, 15 nt, Molluscum contagiosum virus
gucgaagcgcgcagc

SEQ ID NO: 372372 - RNA, 14 nt, Molluscum contagiosum virus
gucgagaugcucua

SEQ ID NO: 372373 - RNA, 14 nt, Molluscum contagiosum virus
gucgagcagauuca

SEQ ID NO: 372374 - RNA, 19 nt, Molluscum contagiosum virus
gucgagcagauucacgagc

SEQ ID NO: 372375 - RNA, 20 nt, Molluscum contagiosum virus
gucgagcucgcgcgccagca

SEQ ID NO: 372376 - RNA, 19 nt, Molluscum contagiosum virus
gucgaggagggcguccgua

SEQ ID NO: 372377 - RNA, 20 nt, Molluscum contagiosum virus
gucgcaaccccgcgcugcgc

SEQ ID NO: 372378 - RNA, 13 nt, Molluscum contagiosum virus
gucgcacaguuca

SEQ ID NO: 372379 - RNA, 21 nt, Molluscum contagiosum virus
gucgcccgugacacuaccguc

SEQ ID NO: 372380 - RNA, 16 nt, Molluscum contagiosum virus
gucgcgccgaggacgc

SEQ ID NO: 372381 - RNA, 13 nt, Molluscum contagiosum virus
gucgcgcgccgca

SEQ ID NO: 372382 - RNA, 16 nt, Molluscum contagiosum virus
gucgcgggcgcgcgcg

SEQ ID NO: 372383 - RNA, 16 nt, Molluscum contagiosum virus
gucgcguugcuacucu

SEQ ID NO: 372384 - RNA, 15 nt, Molluscum contagiosum virus
gucggaguccgugca

SEQ ID NO: 372385 - RNA, 14 nt, Molluscum contagiosum virus
gucguacacgcaga

SEQ ID NO: 372386 - RNA, 15 nt, Molluscum contagiosum virus
cgagcucuugcggaa

SEQ ID NO: 372387 - RNA, 22 nt, Molluscum contagiosum virus
cgagcugcccccgccaugccaa

SEQ ID NO: 372388 - RNA, 15 nt, Molluscum contagiosum virus
cgagcugcgggcgcg

SEQ ID NO: 372389 - RNA, 13 nt, Molluscum contagiosum virus
cgaggaaaggcac

SEQ ID NO: 372390 - RNA, 17 nt, Molluscum contagiosum virus
cgaggacgacgccgagc

SEQ ID NO: 372391 - RNA, 17 nt, Molluscum contagiosum virus
cgaggacuuccgcgcgc

SEQ ID NO: 372392 - RNA, 19 nt, Molluscum contagiosum virus
cgaggaggcgcccucgcgc

SEQ ID NO: 372393 - RNA, 18 nt, Molluscum contagiosum virus
cgaggccggcaagcucaa

SEQ ID NO: 372394 - RNA, 13 nt, Molluscum contagiosum virus
cgaggcgcugccg

SEQ ID NO: 372395 - RNA, 19 nt, Molluscum contagiosum virus
cgagggaugcacacacucg

SEQ ID NO: 372396 - RNA, 16 nt, Molluscum contagiosum virus
cgagggaugcgcacac

SEQ ID NO: 372397 - RNA, 21 nt, Molluscum contagiosum virus
cgagggaugcgcacacuugcg

SEQ ID NO: 372398 - RNA, 14 nt, Molluscum contagiosum virus
cgagggcacagggu

SEQ ID NO: 372399 - RNA, 19 nt, Molluscum contagiosum virus
cgagggccguuggacauca

SEQ ID NO: 372400 - RNA, 18 nt, Molluscum contagiosum virus
cgagggcgccgugcugcg

SEQ ID NO: 372401 - RNA, 21 nt, Molluscum contagiosum virus
cgagggcgggcacgugcugcu

SEQ ID NO: 372402 - RNA, 15 nt, Molluscum contagiosum virus
cgaggucuuccacau

SEQ ID NO: 372403 - RNA, 13 nt, Molluscum contagiosum virus
cgaguacaagcuc

SEQ ID NO: 372404 - RNA, 14 nt, Molluscum contagiosum virus
cgaguaccgcgcgc

SEQ ID NO: 372405 - RNA, 20 nt, Molluscum contagiosum virus
cgaguauacucgacgcgcgc

SEQ ID NO: 372406 - RNA, 19 nt, Molluscum contagiosum virus
cgagucaaugacacgagcc

SEQ ID NO: 372407 - RNA, 17 nt, Molluscum contagiosum virus
cgaguccccagacuucu

SEQ ID NO: 372408 - RNA, 22 nt, Molluscum contagiosum virus
cgagucgcgccucgaacugcuc

SEQ ID NO: 372409 - RNA, 15 nt, Molluscum contagiosum virus
cgagucucuguaaca

SEQ ID NO: 372410 - RNA, 14 nt, Molluscum contagiosum virus
cgagugugugcauc

SEQ ID NO: 372411 - RNA, 16 nt, Molluscum contagiosum virus
cgauacaaaacaugcu

SEQ ID NO: 372412 - RNA, 19 nt, Molluscum contagiosum virus
cgauacaaaacaugcugua

SEQ ID NO: 372413 - RNA, 15 nt, Molluscum contagiosum virus
cgaucgcagcagugc

SEQ ID NO: 372414 - RNA, 17 nt, Molluscum contagiosum virus
cgaucgcggccaugcgc

SEQ ID NO: 372415 - RNA, 19 nt, Molluscum contagiosum virus
cgaucucgcuagaguuaaa

SEQ ID NO: 372416 - RNA, 15 nt, Molluscum contagiosum virus
cgaucuuacaggcca

SEQ ID NO: 372417 - RNA, 19 nt, Molluscum contagiosum virus
cgauguacgcgugcaggaa

SEQ ID NO: 372418 - RNA, 17 nt, Molluscum contagiosum virus
cgauucacaucuugcua

SEQ ID NO: 372419 - RNA, 14 nt, Molluscum contagiosum virus
cgauuuaacucuag

SEQ ID NO: 372420 - RNA, 13 nt, Molluscum contagiosum virus
cgcaaacaagcag

SEQ ID NO: 372421 - RNA, 14 nt, Molluscum contagiosum virus
cgcaaccccgcgcg

SEQ ID NO: 372422 - RNA, 20 nt, Molluscum contagiosum virus
cgcaaccccgcgcugcgcgg

SEQ ID NO: 372423 - RNA, 16 nt, Molluscum contagiosum virus
cgcaaccgcgugcgug

SEQ ID NO: 372424 - RNA, 14 nt, Molluscum contagiosum virus
cgcaagagccgccg

SEQ ID NO: 372425 - RNA, 10 nt, Molluscum contagiosum virus
cgcaagcacc

SEQ ID NO: 372426 - RNA, 18 nt, Molluscum contagiosum virus
cgcaagcucagccucuac

SEQ ID NO: 372427 - RNA, 23 nt, Molluscum contagiosum virus
cgcaagcuuugugcucgcuuagc

SEQ ID NO: 372428 - RNA, 23 nt, Molluscum contagiosum virus
cgcaaguacaacccaaacauguc

SEQ ID NO: 372429 - RNA, 21 nt, Molluscum contagiosum virus
cgcaaguccagcgcgcucgag

SEQ ID NO: 372430 - RNA, 12 nt, Molluscum contagiosum virus
cgcaagugcgug

SEQ ID NO: 372431 - RNA, 14 nt, Molluscum contagiosum virus
cgcacacgccgcgu

SEQ ID NO: 372432 - RNA, 14 nt, Molluscum contagiosum virus
cgcacacuugcgcg

SEQ ID NO: 372433 - RNA, 21 nt, Molluscum contagiosum virus
cgcacagacauggcccgcgcg

SEQ ID NO: 372434 - RNA, 20 nt, Molluscum contagiosum virus
cgcacaguucacggcgcuug

SEQ ID NO: 372435 - RNA, 12 nt, Molluscum contagiosum virus
cgcacccgccac

SEQ ID NO: 372436 - RNA, 15 nt, Molluscum contagiosum virus
cgcaccuccuucgcg

SEQ ID NO: 372437 - RNA, 15 nt, Molluscum contagiosum virus
cgcaccuuuuccacg

SEQ ID NO: 372438 - RNA, 21 nt, Molluscum contagiosum virus
cgcacgcggaaacaagcacau

SEQ ID NO: 372439 - RNA, 14 nt, Molluscum contagiosum virus
cgcacgcuugccuu

SEQ ID NO: 372440 - RNA, 15 nt, Molluscum contagiosum virus
cgcacggcagcggcg

SEQ ID NO: 372441 - RNA, 17 nt, Molluscum contagiosum virus
cgcacggcgacucuggc

SEQ ID NO: 372442 - RNA, 14 nt, Molluscum contagiosum virus
cgcacguggaguca

SEQ ID NO: 372443 - RNA, 16 nt, Molluscum contagiosum virus
cgcacguggagucacg

SEQ ID NO: 372444 - RNA, 16 nt, Molluscum contagiosum virus
cgcacuggccugcaaa

SEQ ID NO: 372445 - RNA, 16 nt, Molluscum contagiosum virus
cgcacuggcgcugcua

SEQ ID NO: 372446 - RNA, 20 nt, Molluscum contagiosum virus
cgcagaacacgggggcugcc

SEQ ID NO: 372447 - RNA, 17 nt, Molluscum contagiosum virus
cgcagaaguggcgcugu

SEQ ID NO: 372448 - RNA, 18 nt, Molluscum contagiosum virus
cgcagcauucccggcgcg

SEQ ID NO: 372449 - RNA, 17 nt, Molluscum contagiosum virus
cgcagcccacgugccag

SEQ ID NO: 372450 - RNA, 19 nt, Molluscum contagiosum virus
cgcagcccacgugccagcu

SEQ ID NO: 372451 - RNA, 15 nt, Molluscum contagiosum virus
cgcagcccgagcgcg

SEQ ID NO: 372452 - RNA, 20 nt, Molluscum contagiosum virus
cgcaggacuggcaccugcgg

SEQ ID NO: 372453 - RNA, 13 nt, Molluscum contagiosum virus
cgcaggaugcugg

SEQ ID NO: 372454 - RNA, 14 nt, Molluscum contagiosum virus
cgcagggagcugcg

SEQ ID NO: 372455 - RNA, 21 nt, Molluscum contagiosum virus
cgcagggcgcgaaccuagaca

SEQ ID NO: 372456 - RNA, 21 nt, Molluscum contagiosum virus
cgcagucgucgccgaucucca

SEQ ID NO: 372457 - RNA, 16 nt, Molluscum contagiosum virus
cgcaguucgagcugcu

SEQ ID NO: 372458 - RNA, 17 nt, Molluscum contagiosum virus
cgcauagugccguagac

SEQ ID NO: 372459 - RNA, 11 nt, Molluscum contagiosum virus
cgcaucccucg

SEQ ID NO: 372460 - RNA, 16 nt, Molluscum contagiosum virus
cgcaugcaccuacgcg

SEQ ID NO: 372461 - RNA, 20 nt, Molluscum contagiosum virus
cgcaugccggggaugaacgc

SEQ ID NO: 372462 - RNA, 14 nt, Molluscum contagiosum virus
cgccaacacgagcg

SEQ ID NO: 372463 - RNA, 20 nt, Molluscum contagiosum virus
cgccaacgcuuggcaagcuu

SEQ ID NO: 372464 - RNA, 22 nt, Molluscum contagiosum virus
cgccaagaggacgagcugcuaa

SEQ ID NO: 372465 - RNA, 21 nt, Molluscum contagiosum virus
cgccacgagcgccgcgacgcc

SEQ ID NO: 372466 - RNA, 19 nt, Molluscum contagiosum virus
cgccacugggucuguucac

SEQ ID NO: 372467 - RNA, 16 nt, Molluscum contagiosum virus
cgccagaacauugcca

SEQ ID NO: 372468 - RNA, 15 nt, Molluscum contagiosum virus
cgccagaagugaaau

SEQ ID NO: 372469 - RNA, 15 nt, Molluscum contagiosum virus
cgccagcgacgcgac

SEQ ID NO: 372470 - RNA, 14 nt, Molluscum contagiosum virus
cgccagcgagauca

SEQ ID NO: 372471 - RNA, 16 nt, Molluscum contagiosum virus
cgccagcuugagcaca

SEQ ID NO: 372472 - RNA, 23 nt, Molluscum contagiosum virus
cgccaggaacgaggaaaggcaca

SEQ ID NO: 372473 - RNA, 16 nt, Molluscum contagiosum virus
cgccaguccgcggcgc

SEQ ID NO: 372474 - RNA, 18 nt, Molluscum contagiosum virus
cgccagugcgugcacugu

SEQ ID NO: 372475 - RNA, 14 nt, Molluscum contagiosum virus
cgccauccgcgagc

SEQ ID NO: 372476 - RNA, 16 nt, Molluscum contagiosum virus
cgccccaaaagugaag

SEQ ID NO: 372477 - RNA, 15 nt, Molluscum contagiosum virus
cgcccgcgcugcgca

SEQ ID NO: 372478 - RNA, 12 nt, Molluscum contagiosum virus
cgcccgcggcac

SEQ ID NO: 372479 - RNA, 14 nt, Molluscum contagiosum virus
cgcccgcggcgcac

SEQ ID NO: 372480 - RNA, 18 nt, Molluscum contagiosum virus
cgcccgcugcucuacuuc

SEQ ID NO: 372481 - RNA, 17 nt, Molluscum contagiosum virus
cgcccggcaggcucccg

SEQ ID NO: 372482 - RNA, 22 nt, Molluscum contagiosum virus
cgcccgugcucgcgggccuuug

SEQ ID NO: 372483 - RNA, 18 nt, Molluscum contagiosum virus
cgcccuccucgaccugca

SEQ ID NO: 372484 - RNA, 15 nt, Molluscum contagiosum virus
cgcccucgcgcgcag

SEQ ID NO: 372485 - RNA, 19 nt, Molluscum contagiosum virus
cgccgacaacgcacccgcg

SEQ ID NO: 372486 - RNA, 22 nt, Molluscum contagiosum virus
cgccgacugccgccgccgcgag

SEQ ID NO: 372487 - RNA, 16 nt, Molluscum contagiosum virus
cgccgaguacugcugc

SEQ ID NO: 372488 - RNA, 18 nt, Molluscum contagiosum virus
cgccgaucuccacgucga

SEQ ID NO: 372489 - RNA, 16 nt, Molluscum contagiosum virus
cgccgcaaauuccguc

SEQ ID NO: 372490 - RNA, 15 nt, Molluscum contagiosum virus
aacgucgcacuggcc

SEQ ID NO: 372491 - RNA, 12 nt, Molluscum contagiosum virus
aacgugcaugca

SEQ ID NO: 372492 - RNA, 17 nt, Molluscum contagiosum virus
aacgugcgaacacggau

SEQ ID NO: 372493 - RNA, 15 nt, Molluscum contagiosum virus
aacgugcugcucaag

SEQ ID NO: 372494 - RNA, 16 nt, Molluscum contagiosum virus
aacgugggcaccugca

SEQ ID NO: 372495 - RNA, 24 nt, Molluscum contagiosum virus
aacuaccgugugaaaguccacgug

SEQ ID NO: 372496 - RNA, 18 nt, Molluscum contagiosum virus
aacuaccuggggcugcuu

SEQ ID NO: 372497 - RNA, 15 nt, Molluscum contagiosum virus
aacuacuuccugcag

SEQ ID NO: 372498 - RNA, 18 nt, Molluscum contagiosum virus
aacuacuuccugcagcug

SEQ ID NO: 372499 - RNA, 15 nt, Molluscum contagiosum virus
aacuagggagcggca

SEQ ID NO: 372500 - RNA, 16 nt, Molluscum contagiosum virus
aacucgaggcucuguu

SEQ ID NO: 372501 - RNA, 15 nt, Molluscum contagiosum virus
aacucgcgugccuug

SEQ ID NO: 372502 - RNA, 16 nt, Molluscum contagiosum virus
aacucuacacguggaa

SEQ ID NO: 372503 - RNA, 17 nt, Molluscum contagiosum virus
aacucuacgacaugcuc

SEQ ID NO: 372504 - RNA, 17 nt, Molluscum contagiosum virus
aacucuccgacgugcug

SEQ ID NO: 372505 - RNA, 13 nt, Molluscum contagiosum virus
aacugacugcugc

SEQ ID NO: 372506 - RNA, 14 nt, Molluscum contagiosum virus
aacugcaacgugag

SEQ ID NO: 372507 - RNA, 16 nt, Molluscum contagiosum virus
aacugcccgaguuccu

SEQ ID NO: 372508 - RNA, 16 nt, Molluscum contagiosum virus
aacuggacugagccgc

SEQ ID NO: 372509 - RNA, 23 nt, Molluscum contagiosum virus
aacuggacugagccgcaagcaca

SEQ ID NO: 372510 - RNA, 16 nt, Molluscum contagiosum virus
aacuuccacgucucca

SEQ ID NO: 372511 - RNA, 15 nt, Molluscum contagiosum virus
aagaaacagccaugu

SEQ ID NO: 372512 - RNA, 11 nt, Molluscum contagiosum virus
aagaacaacca

SEQ ID NO: 372513 - RNA, 17 nt, Molluscum contagiosum virus
aagaacaauuacuccag

SEQ ID NO: 372514 - RNA, 13 nt, Molluscum contagiosum virus
aagaacagcacga

SEQ ID NO: 372515 - RNA, 17 nt, Molluscum contagiosum virus
aagaacauaugucuccc

SEQ ID NO: 372516 - RNA, 14 nt, Molluscum contagiosum virus
aagaacgucuucua

SEQ ID NO: 372517 - RNA, 21 nt, Molluscum contagiosum virus
aagaagaggccagcacaagcc

SEQ ID NO: 372518 - RNA, 21 nt, Molluscum contagiosum virus
aagaagaggccggcacaagcc

SEQ ID NO: 372519 - RNA, 15 nt, Molluscum contagiosum virus
aagaagcccaaggag

SEQ ID NO: 372520 - RNA, 13 nt, Molluscum contagiosum virus
aagaaggagccca

SEQ ID NO: 372521 - RNA, 17 nt, Molluscum contagiosum virus
aagaaggagcccaagca

SEQ ID NO: 372522 - RNA, 16 nt, Molluscum contagiosum virus
aagacauuucuccucc

SEQ ID NO: 372523 - RNA, 19 nt, Molluscum contagiosum virus
aagacgcauagucaucaaa

SEQ ID NO: 372524 - RNA, 15 nt, Molluscum contagiosum virus
aagacgggcccgcga

SEQ ID NO: 372525 - RNA, 15 nt, Molluscum contagiosum virus
aagacggggccgcga

SEQ ID NO: 372526 - RNA, 14 nt, Molluscum contagiosum virus
aagagccggacucu

SEQ ID NO: 372527 - RNA, 18 nt, Molluscum contagiosum virus
aagaggccagcacaagcc

SEQ ID NO: 372528 - RNA, 20 nt, Molluscum contagiosum virus
aagaggccagcacaagccgu

SEQ ID NO: 372529 - RNA, 20 nt, Molluscum contagiosum virus
aagaggccggcacaagccgu

SEQ ID NO: 372530 - RNA, 14 nt, Molluscum contagiosum virus
aagaggccgucaca

SEQ ID NO: 372531 - RNA, 22 nt, Molluscum contagiosum virus
aagagggccuuucucagagaaa

SEQ ID NO: 372532 - RNA, 15 nt, Molluscum contagiosum virus
aagaggggagccagc

SEQ ID NO: 372533 - RNA, 17 nt, Molluscum contagiosum virus
aagaucaccccgcagcu

SEQ ID NO: 372534 - RNA, 19 nt, Molluscum contagiosum virus
aagaucaccccgcagcuca

SEQ ID NO: 372535 - RNA, 15 nt, Molluscum contagiosum virus
aagauccaagcgcaa

SEQ ID NO: 372536 - RNA, 23 nt, Molluscum contagiosum virus
aagaucggacucagcauguugcu

SEQ ID NO: 372537 - RNA, 11 nt, Molluscum contagiosum virus
aagcaaagccu

SEQ ID NO: 372538 - RNA, 17 nt, Molluscum contagiosum virus
aagcacaacaagaagac

SEQ ID NO: 372539 - RNA, 12 nt, Molluscum contagiosum virus
aagcacagucca

SEQ ID NO: 372540 - RNA, 17 nt, Molluscum contagiosum virus
aagcaccgccugcugca

SEQ ID NO: 372541 - RNA, 17 nt, Molluscum contagiosum virus
aagcaccugcgcuuccu

SEQ ID NO: 372542 - RNA, 22 nt, Molluscum contagiosum virus
aagcacgcaacgucgcacuggc

SEQ ID NO: 372543 - RNA, 18 nt, Molluscum contagiosum virus
aagcaggaguccgugaca

SEQ ID NO: 372544 - RNA, 18 nt, Molluscum contagiosum virus
aagcagguggccgcgcgc

SEQ ID NO: 372545 - RNA, 12 nt, Molluscum contagiosum virus
aagcagucucau

SEQ ID NO: 372546 - RNA, 17 nt, Molluscum contagiosum virus
aagcauggucuucgcgc

SEQ ID NO: 372547 - RNA, 15 nt, Molluscum contagiosum virus
aagccacacaacucc

SEQ ID NO: 372548 - RNA, 17 nt, Molluscum contagiosum virus
aagccaccgcgcaggac

SEQ ID NO: 372549 - RNA, 11 nt, Molluscum contagiosum virus
aagccgugacg

SEQ ID NO: 372550 - RNA, 14 nt, Molluscum contagiosum virus
aagcgcacacuugc

SEQ ID NO: 372551 - RNA, 13 nt, Molluscum contagiosum virus
aagcgcgucugca

SEQ ID NO: 372552 - RNA, 13 nt, Molluscum contagiosum virus
aagcgcuugcucu

SEQ ID NO: 372553 - RNA, 14 nt, Molluscum contagiosum virus
aagcgcuugcucuu

SEQ ID NO: 372554 - RNA, 12 nt, Molluscum contagiosum virus
aagcucaagaag

SEQ ID NO: 372555 - RNA, 12 nt, Molluscum contagiosum virus
aagcucaagccc

SEQ ID NO: 372556 - RNA, 15 nt, Molluscum contagiosum virus
aagcucucuuagcag

SEQ ID NO: 372557 - RNA, 19 nt, Molluscum contagiosum virus
aagcuuccuuuuucacuuu

SEQ ID NO: 372558 - RNA, 13 nt, Molluscum contagiosum virus
aagcuuuagucca

SEQ ID NO: 372559 - RNA, 20 nt, Molluscum contagiosum virus
aagcuuugcuucaggcaaga

SEQ ID NO: 372560 - RNA, 22 nt, Molluscum contagiosum virus
aaggaggcuagugccauuguga

SEQ ID NO: 372561 - RNA, 19 nt, Molluscum contagiosum virus
aaggaggucuagccgugaa

SEQ ID NO: 372562 - RNA, 15 nt, Molluscum contagiosum virus
aaggcaccccgcagg

SEQ ID NO: 372563 - RNA, 16 nt, Molluscum contagiosum virus
aaggcacccgcaggaa

SEQ ID NO: 372564 - RNA, 22 nt, Molluscum contagiosum virus
aaggcaggggccgccgcugacu

SEQ ID NO: 372565 - RNA, 20 nt, Molluscum contagiosum virus
aaggccccccgcaacaagga

SEQ ID NO: 372566 - RNA, 15 nt, Molluscum contagiosum virus
aaggcgggcccgcga

SEQ ID NO: 372567 - RNA, 19 nt, Molluscum contagiosum virus
aaggcgguggcggcucugc

SEQ ID NO: 372568 - RNA, 16 nt, Molluscum contagiosum virus
aaggcgugcgccgugc

SEQ ID NO: 372569 - RNA, 19 nt, Molluscum contagiosum virus
aagggcagcucaagcugcu

SEQ ID NO: 372570 - RNA, 16 nt, Molluscum contagiosum virus
aagggcggucccgcga

SEQ ID NO: 372571 - RNA, 14 nt, Molluscum contagiosum virus
aagggcucugccac

SEQ ID NO: 372572 - RNA, 20 nt, Molluscum contagiosum virus
aaggguguggccuacguggc

SEQ ID NO: 372573 - RNA, 17 nt, Molluscum contagiosum virus
aagguaccccgcaggaa

SEQ ID NO: 372574 - RNA, 12 nt, Molluscum contagiosum virus
aagguacugaac

SEQ ID NO: 372575 - RNA, 15 nt, Molluscum contagiosum virus
aaguacaacccaaac

SEQ ID NO: 372576 - RNA, 15 nt, Molluscum contagiosum virus
aaguacgagagcgca

SEQ ID NO: 372577 - RNA, 16 nt, Molluscum contagiosum virus
aaguagccuccguagc

SEQ ID NO: 372578 - RNA, 15 nt, Molluscum contagiosum virus
aaguauauucuuuac

SEQ ID NO: 372579 - RNA, 21 nt, Molluscum contagiosum virus
aagugaaaauaaagaccgugu

SEQ ID NO: 372580 - RNA, 10 nt, Molluscum contagiosum virus
aagugcacac

SEQ ID NO: 372581 - RNA, 12 nt, Molluscum contagiosum virus
aagugcgcgugu

SEQ ID NO: 372582 - RNA, 12 nt, Molluscum contagiosum virus
aauaccggagac

SEQ ID NO: 372583 - RNA, 18 nt, Molluscum contagiosum virus
aauaccggagacaccagc

SEQ ID NO: 372584 - RNA, 19 nt, Molluscum contagiosum virus
aauaccggagacaccagcu

SEQ ID NO: 372585 - RNA, 15 nt, Molluscum contagiosum virus
aauacgcgcuccuau

SEQ ID NO: 372586 - RNA, 13 nt, Molluscum contagiosum virus
aaucccaagauac

SEQ ID NO: 372587 - RNA, 23 nt, Molluscum contagiosum virus
aaucgcgugcuugcugcgcugca

SEQ ID NO: 372588 - RNA, 19 nt, Molluscum contagiosum virus
aaucgucggcacgcugcag

SEQ ID NO: 372589 - RNA, 15 nt, Molluscum contagiosum virus
aaugcccgcaaugca

SEQ ID NO: 372590 - RNA, 21 nt, Molluscum contagiosum virus
aaugccguguauccaagaggc

SEQ ID NO: 372591 - RNA, 15 nt, Molluscum contagiosum virus
aaugcgcaaggccgu

SEQ ID NO: 372592 - RNA, 16 nt, Molluscum contagiosum virus
aaugcgcacacuugcg

SEQ ID NO: 372593 - RNA, 22 nt, Molluscum contagiosum virus
aaugcgguucacuagcgcaggc

SEQ ID NO: 372594 - RNA, 21 nt, Molluscum contagiosum virus
acauccuugauaaaagcacag

SEQ ID NO: 372595 - RNA, 19 nt, Molluscum contagiosum virus
acaugaccaagcacauucu

SEQ ID NO: 372596 - RNA, 17 nt, Molluscum contagiosum virus
acaugaucgacgaggac

SEQ ID NO: 372597 - RNA, 15 nt, Molluscum contagiosum virus
acaugcccgugcacc

SEQ ID NO: 372598 - RNA, 16 nt, Molluscum contagiosum virus
acaugccuuucuucca

SEQ ID NO: 372599 - RNA, 17 nt, Molluscum contagiosum virus
acaugcuguaugucuac

SEQ ID NO: 372600 - RNA, 17 nt, Molluscum contagiosum virus
acauggucaaccucuac

SEQ ID NO: 372601 - RNA, 22 nt, Molluscum contagiosum virus
acaugugcgugcaccucaagaa

SEQ ID NO: 372602 - RNA, 20 nt, Molluscum contagiosum virus
acaugugcugccggcucaag

SEQ ID NO: 372603 - RNA, 15 nt, Molluscum contagiosum virus
acauguugugcucgu

SEQ ID NO: 372604 - RNA, 17 nt, Molluscum contagiosum virus
acauguugugcucgugu

SEQ ID NO: 372605 - RNA, 20 nt, Molluscum contagiosum virus
acauuaacugagaggaccuc

SEQ ID NO: 372606 - RNA, 20 nt, Molluscum contagiosum virus
acauuccucggcgcacacuc

SEQ ID NO: 372607 - RNA, 19 nt, Molluscum contagiosum virus
acauugccguugccaguag

SEQ ID NO: 372608 - RNA, 20 nt, Molluscum contagiosum virus
acauuuacuucgggcgcaau

SEQ ID NO: 372609 - RNA, 19 nt, Molluscum contagiosum virus
accaacgugaguaccguga

SEQ ID NO: 372610 - RNA, 15 nt, Molluscum contagiosum virus
accaagaagcccgag

SEQ ID NO: 372611 - RNA, 17 nt, Molluscum contagiosum virus
accaagcacauucucaa

SEQ ID NO: 372612 - RNA, 16 nt, Molluscum contagiosum virus
accacagucggugcca

SEQ ID NO: 372613 - RNA, 13 nt, Molluscum contagiosum virus
accaccagcacca

SEQ ID NO: 372614 - RNA, 18 nt, Molluscum contagiosum virus
accacucuuucacgcugc

SEQ ID NO: 372615 - RNA, 20 nt, Molluscum contagiosum virus
accacucuuucacgcugcac

SEQ ID NO: 372616 - RNA, 15 nt, Molluscum contagiosum virus
accagacgugcuacu

SEQ ID NO: 372617 - RNA, 21 nt, Molluscum contagiosum virus
accagacgugcuacuacugua

SEQ ID NO: 372618 - RNA, 22 nt, Molluscum contagiosum virus
accagaggguggcuugcugcag

SEQ ID NO: 372619 - RNA, 14 nt, Molluscum contagiosum virus
accagcagccaggc

SEQ ID NO: 372620 - RNA, 15 nt, Molluscum contagiosum virus
accagccgcugcgcc

SEQ ID NO: 372621 - RNA, 16 nt, Molluscum contagiosum virus
accagcggcaggcggc

SEQ ID NO: 372622 - RNA, 14 nt, Molluscum contagiosum virus
accagcgugcccuu

SEQ ID NO: 372623 - RNA, 20 nt, Molluscum contagiosum virus
accagcuccgccgggaauac

SEQ ID NO: 372624 - RNA, 13 nt, Molluscum contagiosum virus
accagcugccgcu

SEQ ID NO: 372625 - RNA, 17 nt, Molluscum contagiosum virus
accaggcgcgugcccug

SEQ ID NO: 372626 - RNA, 14 nt, Molluscum contagiosum virus
accagugcgugcuc

SEQ ID NO: 372627 - RNA, 17 nt, Molluscum contagiosum virus
accaguugcauauccac

SEQ ID NO: 372628 - RNA, 17 nt, Molluscum contagiosum virus
accauggacacgcugcg

SEQ ID NO: 372629 - RNA, 22 nt, Molluscum contagiosum virus
acccaaacauguccguggcuug

SEQ ID NO: 372630 - RNA, 19 nt, Molluscum contagiosum virus
acccaucggagaagugcuc

SEQ ID NO: 372631 - RNA, 22 nt, Molluscum contagiosum virus
accccagugcgagaucgacugc

SEQ ID NO: 372632 - RNA, 14 nt, Molluscum contagiosum virus
accccgcaggaaag

SEQ ID NO: 372633 - RNA, 19 nt, Molluscum contagiosum virus
accccgcaggaaaggcacc

SEQ ID NO: 372634 - RNA, 24 nt, Molluscum contagiosum virus
accccguacggcgcauccuccacg

SEQ ID NO: 372635 - RNA, 17 nt, Molluscum contagiosum virus
accccuguaacaaggaa

SEQ ID NO: 372636 - RNA, 15 nt, Molluscum contagiosum virus
accccuugcuacagg

SEQ ID NO: 372637 - RNA, 13 nt, Molluscum contagiosum virus
accccuugcuuca

SEQ ID NO: 372638 - RNA, 15 nt, Molluscum contagiosum virus
acccgagcugugcca

SEQ ID NO: 372639 - RNA, 16 nt, Molluscum contagiosum virus
acccgcaacaaggaaa

SEQ ID NO: 372640 - RNA, 13 nt, Molluscum contagiosum virus
acccgcaggaaag

SEQ ID NO: 372641 - RNA, 18 nt, Molluscum contagiosum virus
acccgcaggaaaggcacc

SEQ ID NO: 372642 - RNA, 12 nt, Molluscum contagiosum virus
acccgccagcuu

SEQ ID NO: 372643 - RNA, 23 nt, Molluscum contagiosum virus
acccgcgaacgagggaugcacac

SEQ ID NO: 372644 - RNA, 22 nt, Molluscum contagiosum virus
acccggcgcccgccaccaugcu

SEQ ID NO: 372645 - RNA, 17 nt, Molluscum contagiosum virus
acccgugcccgcuccgc

SEQ ID NO: 372646 - RNA, 17 nt, Molluscum contagiosum virus
acccucuucgacuuacg

SEQ ID NO: 372647 - RNA, 13 nt, Molluscum contagiosum virus
accgcauguccac

SEQ ID NO: 372648 - RNA, 13 nt, Molluscum contagiosum virus
accgccugcucuc

SEQ ID NO: 372649 - RNA, 15 nt, Molluscum contagiosum virus
accgccugcugcagc

SEQ ID NO: 372650 - RNA, 21 nt, Molluscum contagiosum virus
accgccuguaccugcucgggc

SEQ ID NO: 372651 - RNA, 17 nt, Molluscum contagiosum virus
accgcgcagaagccaac

SEQ ID NO: 372652 - RNA, 16 nt, Molluscum contagiosum virus
accgcgugcgugcaca

SEQ ID NO: 372653 - RNA, 22 nt, Molluscum contagiosum virus
accgcguggacaacagcacgac

SEQ ID NO: 372654 - RNA, 22 nt, Molluscum contagiosum virus
accgcugcuauuaccugagauc

SEQ ID NO: 372655 - RNA, 20 nt, Molluscum contagiosum virus
accggaagcaacgacaagga

SEQ ID NO: 372656 - RNA, 16 nt, Molluscum contagiosum virus
accggagacaccagcu

SEQ ID NO: 372657 - RNA, 13 nt, Molluscum contagiosum virus
accggccaaggca

SEQ ID NO: 372658 - RNA, 22 nt, Molluscum contagiosum virus
accggccaaggcaaaguucucg

SEQ ID NO: 372659 - RNA, 19 nt, Molluscum contagiosum virus
accggcgcuugcgcuacgu

SEQ ID NO: 372660 - RNA, 14 nt, Molluscum contagiosum virus
accgucaaccugcu

SEQ ID NO: 372661 - RNA, 15 nt, Molluscum contagiosum virus
accgucaaccugcug

SEQ ID NO: 372662 - RNA, 17 nt, Molluscum contagiosum virus
accgucgcguggugcuu

SEQ ID NO: 372663 - RNA, 14 nt, Molluscum contagiosum virus
accuacgaggugcu

SEQ ID NO: 372664 - RNA, 14 nt, Molluscum contagiosum virus
accuagagcacgaa

SEQ ID NO: 372665 - RNA, 16 nt, Molluscum contagiosum virus
accucaacuguugccu

SEQ ID NO: 372666 - RNA, 18 nt, Molluscum contagiosum virus
accucaccgcgcacaucu

SEQ ID NO: 372667 - RNA, 22 nt, Molluscum contagiosum virus
accucaccuuucucuuucucaa

SEQ ID NO: 372668 - RNA, 15 nt, Molluscum contagiosum virus
accuccugcaccugc

SEQ ID NO: 372669 - RNA, 13 nt, Molluscum contagiosum virus
accucgacauuuc

SEQ ID NO: 372670 - RNA, 13 nt, Molluscum contagiosum virus
accucgcgcuucc

SEQ ID NO: 372671 - RNA, 13 nt, Molluscum contagiosum virus
accucgcugcuga

SEQ ID NO: 372672 - RNA, 14 nt, Molluscum contagiosum virus
accucgcugcugag

SEQ ID NO: 372673 - RNA, 13 nt, Molluscum contagiosum virus
accucugcuucac

SEQ ID NO: 372674 - RNA, 22 nt, Molluscum contagiosum virus
accugcacgacguacgagugcu

SEQ ID NO: 372675 - RNA, 22 nt, Molluscum contagiosum virus
accugcacgcggcguacaucga

SEQ ID NO: 372676 - RNA, 17 nt, Molluscum contagiosum virus
accugcaggaaaggcac

SEQ ID NO: 372677 - RNA, 22 nt, Molluscum contagiosum virus
accugcaggcucuaagcgcacg

SEQ ID NO: 372678 - RNA, 13 nt, Molluscum contagiosum virus
accugcaguucca

SEQ ID NO: 372679 - RNA, 19 nt, Molluscum contagiosum virus
accugcauugagcucgcgc

SEQ ID NO: 372680 - RNA, 16 nt, Molluscum contagiosum virus
accuggucgagcaccu

SEQ ID NO: 372681 - RNA, 18 nt, Molluscum contagiosum virus
accuggugcuggggcuag

SEQ ID NO: 372682 - RNA, 18 nt, Molluscum contagiosum virus
accugugcccuguccaca

SEQ ID NO: 372683 - RNA, 20 nt, Molluscum contagiosum virus
accugugcccuguccacaaa

SEQ ID NO: 372684 - RNA, 14 nt, Molluscum contagiosum virus
accuguucuuucag

SEQ ID NO: 372685 - RNA, 15 nt, Molluscum contagiosum virus
accuuccuccagggc

SEQ ID NO: 372686 - RNA, 16 nt, Molluscum contagiosum virus
accuucgcggagcgca

SEQ ID NO: 372687 - RNA, 18 nt, Molluscum contagiosum virus
accuugucgagacaggcc

SEQ ID NO: 372688 - RNA, 19 nt, Molluscum contagiosum virus
acgaaagucgcuaccaaga

SEQ ID NO: 372689 - RNA, 13 nt, Molluscum contagiosum virus
acgaacauguugu

SEQ ID NO: 372690 - RNA, 16 nt, Molluscum contagiosum virus
acgaacggaacacagu

SEQ ID NO: 372691 - RNA, 20 nt, Molluscum contagiosum virus
acgaacggaacacagugcgu

SEQ ID NO: 372692 - RNA, 20 nt, Molluscum contagiosum virus
acgaaucgccgucuuuacgu

SEQ ID NO: 372693 - RNA, 14 nt, Molluscum contagiosum virus
acgacagaccccug

SEQ ID NO: 372694 - RNA, 13 nt, Molluscum contagiosum virus
acgacaugcacac

SEQ ID NO: 372695 - RNA, 15 nt, Molluscum contagiosum virus
acgacaugcucgcgc

SEQ ID NO: 372696 - RNA, 14 nt, Molluscum contagiosum virus
acgacgacaugcac

SEQ ID NO: 372697 - RNA, 20 nt, Molluscum contagiosum virus
acggcgcggaucugcgcaca

SEQ ID NO: 372698 - RNA, 14 nt, Molluscum contagiosum virus
acggcgcugcgcgu

SEQ ID NO: 372699 - RNA, 15 nt, Molluscum contagiosum virus
acggcggcgcucaac

SEQ ID NO: 372700 - RNA, 22 nt, Molluscum contagiosum virus
acggcgugacggugcugcgcac

SEQ ID NO: 372701 - RNA, 18 nt, Molluscum contagiosum virus
acgggaagcugcacgugc

SEQ ID NO: 372702 - RNA, 19 nt, Molluscum contagiosum virus
acgggcacgccgugggcag

SEQ ID NO: 372703 - RNA, 14 nt, Molluscum contagiosum virus
acgggcacgcgcgc

SEQ ID NO: 372704 - RNA, 19 nt, Molluscum contagiosum virus
acgggcaugcacagcugcu

SEQ ID NO: 372705 - RNA, 14 nt, Molluscum contagiosum virus
acgggcgggacaga

SEQ ID NO: 372706 - RNA, 18 nt, Molluscum contagiosum virus
acgggcucgaucugcgcc

SEQ ID NO: 372707 - RNA, 22 nt, Molluscum contagiosum virus
acgggcucugugcggacaugcc

SEQ ID NO: 372708 - RNA, 17 nt, Molluscum contagiosum virus
acgguaaacucuugcac

SEQ ID NO: 372709 - RNA, 19 nt, Molluscum contagiosum virus
acgguaagcucgacguguu

SEQ ID NO: 372710 - RNA, 18 nt, Molluscum contagiosum virus
acgguaccuggcuugcuc

SEQ ID NO: 372711 - RNA, 15 nt, Molluscum contagiosum virus
acggucacgcaagcu

SEQ ID NO: 372712 - RNA, 15 nt, Molluscum contagiosum virus
acggugcugcgcacg

SEQ ID NO: 372713 - RNA, 23 nt, Molluscum contagiosum virus
acguaaacaacguaguacugcag

SEQ ID NO: 372714 - RNA, 11 nt, Molluscum contagiosum virus
acguacuugag

SEQ ID NO: 372715 - RNA, 18 nt, Molluscum contagiosum virus
acgucaagcaggcaugca

SEQ ID NO: 372716 - RNA, 16 nt, Molluscum contagiosum virus
acgucagccgcacggc

SEQ ID NO: 372717 - RNA, 14 nt, Molluscum contagiosum virus
acgucgcacuggcc

SEQ ID NO: 372718 - RNA, 16 nt, Molluscum contagiosum virus
acgucuuccagacgca

SEQ ID NO: 372719 - RNA, 14 nt, Molluscum contagiosum virus
acgucuucuaccgc

SEQ ID NO: 372720 - RNA, 16 nt, Molluscum contagiosum virus
acgugacgcgccucga

SEQ ID NO: 372721 - RNA, 19 nt, Molluscum contagiosum virus
acgugcacguggcgcacac

SEQ ID NO: 372722 - RNA, 21 nt, Molluscum contagiosum virus
acgugccccgcgcgugcaguu

SEQ ID NO: 372723 - RNA, 15 nt, Molluscum contagiosum virus
acgugcccuacgcgc

SEQ ID NO: 372724 - RNA, 16 nt, Molluscum contagiosum virus
acgugcucgaguucaa

SEQ ID NO: 372725 - RNA, 22 nt, Molluscum contagiosum virus
acgugcugcgccgccugcucuc

SEQ ID NO: 372726 - RNA, 22 nt, Molluscum contagiosum virus
acgugcugcugcagaacugccu

SEQ ID NO: 372727 - RNA, 14 nt, Molluscum contagiosum virus
acgugcugcugcgg

SEQ ID NO: 372728 - RNA, 15 nt, Molluscum contagiosum virus
acgugcugcugcggc

SEQ ID NO: 372729 - RNA, 21 nt, Molluscum contagiosum virus
acgugcugcuggcccugcuag

SEQ ID NO: 372730 - RNA, 14 nt, Molluscum contagiosum virus
acgugcuugcgcgc

SEQ ID NO: 372731 - RNA, 15 nt, Molluscum contagiosum virus
acguggacagcaucc

SEQ ID NO: 372732 - RNA, 23 nt, Molluscum contagiosum virus
acgugggcgaacugcccggcggc

SEQ ID NO: 372733 - RNA, 22 nt, Molluscum contagiosum virus
acguggucgcgcgcgcucugcc

SEQ ID NO: 372734 - RNA, 10 nt, Molluscum contagiosum virus
acguggugcg

SEQ ID NO: 372735 - RNA, 13 nt, Molluscum contagiosum virus
acguggugcucgu

SEQ ID NO: 372736 - RNA, 13 nt, Molluscum contagiosum virus
acgugugcucugu

SEQ ID NO: 372737 - RNA, 17 nt, Molluscum contagiosum virus
acguuccagagcacugc

SEQ ID NO: 372738 - RNA, 20 nt, Molluscum contagiosum virus
acguugccgcgcgcugcucu

SEQ ID NO: 372739 - RNA, 21 nt, Molluscum contagiosum virus
acguugcgcguucagcgcacg

SEQ ID NO: 372740 - RNA, 15 nt, Molluscum contagiosum virus
acguuuucuuucaug

SEQ ID NO: 372741 - RNA, 11 nt, Molluscum contagiosum virus
acuaccacagc

SEQ ID NO: 372742 - RNA, 17 nt, Molluscum contagiosum virus
acuaccacagccauuaa

SEQ ID NO: 372743 - RNA, 17 nt, Molluscum contagiosum virus
acuaccuggggcugcuu

SEQ ID NO: 372744 - RNA, 15 nt, Molluscum contagiosum virus
acuacgcacuggcga

SEQ ID NO: 372745 - RNA, 14 nt, Molluscum contagiosum virus
acuacgcgcugcua

SEQ ID NO: 372746 - RNA, 16 nt, Molluscum contagiosum virus
acuacucgucuugcgc

SEQ ID NO: 372747 - RNA, 22 nt, Molluscum contagiosum virus
acuacugcuccauggagcgccu

SEQ ID NO: 372748 - RNA, 12 nt, Molluscum contagiosum virus
acuagaugcaua

SEQ ID NO: 372749 - RNA, 22 nt, Molluscum contagiosum virus
acuagaugcguccuaugcaucu

SEQ ID NO: 372750 - RNA, 14 nt, Molluscum contagiosum virus
acuagcacgggcgg

SEQ ID NO: 372751 - RNA, 12 nt, Molluscum contagiosum virus
acucaacaagcu

SEQ ID NO: 372752 - RNA, 13 nt, Molluscum contagiosum virus
acucaacaagcug

SEQ ID NO: 372753 - RNA, 17 nt, Molluscum contagiosum virus
acucacgcguccacaaa

SEQ ID NO: 372754 - RNA, 18 nt, Molluscum contagiosum virus
acucacgcguccacaaag

SEQ ID NO: 372755 - RNA, 20 nt, Molluscum contagiosum virus
acucacgcguccacaaagac

SEQ ID NO: 372756 - RNA, 19 nt, Molluscum contagiosum virus
acucagcauguugcucuac

SEQ ID NO: 372757 - RNA, 21 nt, Molluscum contagiosum virus
acucagcauguugcucuaccu

SEQ ID NO: 372758 - RNA, 16 nt, Molluscum contagiosum virus
acucaugcugcucaug

SEQ ID NO: 372759 - RNA, 13 nt, Molluscum contagiosum virus
acuccacgcccgg

SEQ ID NO: 372760 - RNA, 17 nt, Molluscum contagiosum virus
acuccagcgugguguuc

SEQ ID NO: 372761 - RNA, 14 nt, Molluscum contagiosum virus
acuccgagcgcgac

SEQ ID NO: 372762 - RNA, 19 nt, Molluscum contagiosum virus
acuccuuucgacgcugccu

SEQ ID NO: 372763 - RNA, 20 nt, Molluscum contagiosum virus
acuccuuugcgagcacugua

SEQ ID NO: 372764 - RNA, 16 nt, Molluscum contagiosum virus
acucgagaagaggguc

SEQ ID NO: 372765 - RNA, 21 nt, Molluscum contagiosum virus
acucgagaagagggucgugca

SEQ ID NO: 372766 - RNA, 23 nt, Molluscum contagiosum virus
acucgagccccagaaggucgugc

SEQ ID NO: 372767 - RNA, 18 nt, Molluscum contagiosum virus
acucgauggacgccagcu

SEQ ID NO: 372768 - RNA, 15 nt, Molluscum contagiosum virus
acucgccguuccacu

SEQ ID NO: 372769 - RNA, 22 nt, Molluscum contagiosum virus
acucgcuacugcaacguggcgc

SEQ ID NO: 372770 - RNA, 14 nt, Molluscum contagiosum virus
acucgcugcugcuc

SEQ ID NO: 372771 - RNA, 13 nt, Molluscum contagiosum virus
acucggacacugg

SEQ ID NO: 372772 - RNA, 12 nt, Molluscum contagiosum virus
acucggugcuca

SEQ ID NO: 372773 - RNA, 15 nt, Molluscum contagiosum virus
acucggugcucaugc

SEQ ID NO: 372774 - RNA, 14 nt, Molluscum contagiosum virus
acucgugucacaau

SEQ ID NO: 372775 - RNA, 17 nt, Molluscum contagiosum virus
acucuacacguggaauu

SEQ ID NO: 372776 - RNA, 18 nt, Molluscum contagiosum virus
acucuccgacgugcugcg

SEQ ID NO: 372777 - RNA, 23 nt, Molluscum contagiosum virus
acugacgguacucaugcugcuca

SEQ ID NO: 372778 - RNA, 23 nt, Molluscum contagiosum virus
acugacugcugcccccgccgcgg

SEQ ID NO: 372779 - RNA, 18 nt, Molluscum contagiosum virus
acugagccgcaagcacac

SEQ ID NO: 372780 - RNA, 12 nt, Molluscum contagiosum virus
acugcacugcag

SEQ ID NO: 372781 - RNA, 22 nt, Molluscum contagiosum virus
acugcagcagccccgacgccag

SEQ ID NO: 372782 - RNA, 12 nt, Molluscum contagiosum virus
acugcagcagcu

SEQ ID NO: 372783 - RNA, 21 nt, Molluscum contagiosum virus
acugcagcagcuccagcaugg

SEQ ID NO: 372784 - RNA, 19 nt, Molluscum contagiosum virus
acugcagcagcuccuccac

SEQ ID NO: 372785 - RNA, 20 nt, Molluscum contagiosum virus
acugccaaagcuaugcgcag

SEQ ID NO: 372786 - RNA, 21 nt, Molluscum contagiosum virus
acugccacgcggagcucgcca

SEQ ID NO: 372787 - RNA, 17 nt, Molluscum contagiosum virus
acugccacggcugcaag

SEQ ID NO: 372788 - RNA, 21 nt, Molluscum contagiosum virus
acugcccgcgcccugcacgac

SEQ ID NO: 372789 - RNA, 16 nt, Molluscum contagiosum virus
acugcgacauccacau

SEQ ID NO: 372790 - RNA, 20 nt, Molluscum contagiosum virus
acugcgcgcacugcucgcgc

SEQ ID NO: 372791 - RNA, 21 nt, Molluscum contagiosum virus
acugcuacgucgcggcgcacg

SEQ ID NO: 372792 - RNA, 18 nt, Molluscum contagiosum virus
acugcuagcgacgcggac

SEQ ID NO: 372793 - RNA, 14 nt, Molluscum contagiosum virus
acugcucgcgcacg

SEQ ID NO: 372794 - RNA, 13 nt, Molluscum contagiosum virus
acuggacugagcc

SEQ ID NO: 372795 - RNA, 17 nt, Molluscum contagiosum virus
acuggacugagccgcaa

SEQ ID NO: 372796 - RNA, 13 nt, Molluscum contagiosum virus
acuggcaccugcg

SEQ ID NO: 372797 - RNA, 17 nt, Molluscum contagiosum virus
acuguugcuuccggggc

SEQ ID NO: 372798 - RNA, 19 nt, Molluscum contagiosum virus
acuuacggacgcccuccuc

SEQ ID NO: 372799 - RNA, 23 nt, Molluscum contagiosum virus
acuucaagcacgagcugcugcgc

SEQ ID NO: 372800 - RNA, 22 nt, Molluscum contagiosum virus
agcaaacugugcuccugaggaa

SEQ ID NO: 372801 - RNA, 22 nt, Molluscum contagiosum virus
agcaacgacaaggaaaggcacc

SEQ ID NO: 372802 - RNA, 22 nt, Molluscum contagiosum virus
agcaacgcaacguugugcgcaa

SEQ ID NO: 372803 - RNA, 14 nt, Molluscum contagiosum virus
agcaacugcacagg

SEQ ID NO: 372804 - RNA, 15 nt, Molluscum contagiosum virus
agcaacuugcucuac

SEQ ID NO: 372805 - RNA, 14 nt, Molluscum contagiosum virus
agcaagcgcccgcg

SEQ ID NO: 372806 - RNA, 16 nt, Molluscum contagiosum virus
agcaagcugcaagcca

SEQ ID NO: 372807 - RNA, 17 nt, Molluscum contagiosum virus
agcaagcugcaagccag

SEQ ID NO: 372808 - RNA, 21 nt, Molluscum contagiosum virus
agcaaggcccacuuccgugag

SEQ ID NO: 372809 - RNA, 16 nt, Molluscum contagiosum virus
agcaaggcgagucaau

SEQ ID NO: 372810 - RNA, 19 nt, Molluscum contagiosum virus
agcaauacguggcgcuugg

SEQ ID NO: 372811 - RNA, 18 nt, Molluscum contagiosum virus
agcaaugcgcaaggccgu

SEQ ID NO: 372812 - RNA, 20 nt, Molluscum contagiosum virus
agcacaacgggcucgugcug

SEQ ID NO: 372813 - RNA, 19 nt, Molluscum contagiosum virus
agcacaccgucgcguggug

SEQ ID NO: 372814 - RNA, 11 nt, Molluscum contagiosum virus
agcacagucca

SEQ ID NO: 372815 - RNA, 12 nt, Molluscum contagiosum virus
agcacaguccag

SEQ ID NO: 372816 - RNA, 15 nt, Molluscum contagiosum virus
agcacauguguuugu

SEQ ID NO: 372817 - RNA, 16 nt, Molluscum contagiosum virus
agcaccugcaguucca

SEQ ID NO: 372818 - RNA, 15 nt, Molluscum contagiosum virus
agcaccugcgcuucc

SEQ ID NO: 372819 - RNA, 16 nt, Molluscum contagiosum virus
agcacgacggucuucc

SEQ ID NO: 372820 - RNA, 13 nt, Molluscum contagiosum virus
agcacgagcugcu

SEQ ID NO: 372821 - RNA, 19 nt, Molluscum contagiosum virus
agcacgcaacgucgcacug

SEQ ID NO: 372822 - RNA, 21 nt, Molluscum contagiosum virus
agcacgcaacgucgcacuggc

SEQ ID NO: 372823 - RNA, 15 nt, Molluscum contagiosum virus
agcacgcaacugccc

SEQ ID NO: 372824 - RNA, 13 nt, Molluscum contagiosum virus
agcacgccuccaa

SEQ ID NO: 372825 - RNA, 16 nt, Molluscum contagiosum virus
agcacgccuccaagaa

SEQ ID NO: 372826 - RNA, 14 nt, Molluscum contagiosum virus
agcacggacagcac

SEQ ID NO: 372827 - RNA, 11 nt, Molluscum contagiosum virus
agcacguagcu

SEQ ID NO: 372828 - RNA, 15 nt, Molluscum contagiosum virus
agcacguccguugca

SEQ ID NO: 372829 - RNA, 22 nt, Molluscum contagiosum virus
agcacguccucggucaccacuc

SEQ ID NO: 372830 - RNA, 17 nt, Molluscum contagiosum virus
agcacguggacagcauc

SEQ ID NO: 372831 - RNA, 22 nt, Molluscum contagiosum virus
agcacuuccuuuccgugcuuga

SEQ ID NO: 372832 - RNA, 15 nt, Molluscum contagiosum virus
agcagcaaacugugc

SEQ ID NO: 372833 - RNA, 21 nt, Molluscum contagiosum virus
agcagccgcagcccacgugcc

SEQ ID NO: 372834 - RNA, 13 nt, Molluscum contagiosum virus
agcagcgcgccac

SEQ ID NO: 372835 - RNA, 17 nt, Molluscum contagiosum virus
agcagcggcgcgugcuc

SEQ ID NO: 372836 - RNA, 20 nt, Molluscum contagiosum virus
agcagcgugcauagugggcu

SEQ ID NO: 372837 - RNA, 14 nt, Molluscum contagiosum virus
agcagcgugcgcac

SEQ ID NO: 372838 - RNA, 15 nt, Molluscum contagiosum virus
agcagcgugcgcacc

SEQ ID NO: 372839 - RNA, 19 nt, Molluscum contagiosum virus
agcagcuccagcauggcgc

SEQ ID NO: 372840 - RNA, 14 nt, Molluscum contagiosum virus
agcagcuccuccac

SEQ ID NO: 372841 - RNA, 18 nt, Molluscum contagiosum virus
agcagcugcugcgcuucg

SEQ ID NO: 372842 - RNA, 20 nt, Molluscum contagiosum virus
agcagcuucuuggagcccuu

SEQ ID NO: 372843 - RNA, 16 nt, Molluscum contagiosum virus
agcaggagaacuacaa

SEQ ID NO: 372844 - RNA, 23 nt, Molluscum contagiosum virus
agcaggaugcuggugucgagcuc

SEQ ID NO: 372845 - RNA, 14 nt, Molluscum contagiosum virus
agcaggcacuccag

SEQ ID NO: 372846 - RNA, 17 nt, Molluscum contagiosum virus
agcaggcgucgcgcaca

SEQ ID NO: 372847 - RNA, 14 nt, Molluscum contagiosum virus
agcaggcuguguuc

SEQ ID NO: 372848 - RNA, 19 nt, Molluscum contagiosum virus
agcaggugcacgugcugca

SEQ ID NO: 372849 - RNA, 19 nt, Molluscum contagiosum virus
agcauccccaacauccugc

SEQ ID NO: 372850 - RNA, 15 nt, Molluscum contagiosum virus
agcaucccugccaca

SEQ ID NO: 372851 - RNA, 17 nt, Molluscum contagiosum virus
agcauccucgaugagaa

SEQ ID NO: 372852 - RNA, 19 nt, Molluscum contagiosum virus
agcaucugcgacacgcugg

SEQ ID NO: 372853 - RNA, 22 nt, Molluscum contagiosum virus
agcaugaacucgcugcugcucu

SEQ ID NO: 372854 - RNA, 19 nt, Molluscum contagiosum virus
agcauguuaaaaaugagaa

SEQ ID NO: 372855 - RNA, 14 nt, Molluscum contagiosum virus
agcauguugcucua

SEQ ID NO: 372856 - RNA, 15 nt, Molluscum contagiosum virus
agcauguugcucuac

SEQ ID NO: 372857 - RNA, 17 nt, Molluscum contagiosum virus
agccaauggacgccggg

SEQ ID NO: 372858 - RNA, 17 nt, Molluscum contagiosum virus
agccagacgcagagcca

SEQ ID NO: 372859 - RNA, 20 nt, Molluscum contagiosum virus
agccaugaggacagcuugcu

SEQ ID NO: 372860 - RNA, 14 nt, Molluscum contagiosum virus
agcccacguugccg

SEQ ID NO: 372861 - RNA, 15 nt, Molluscum contagiosum virus
agcccagaacauguc

SEQ ID NO: 372862 - RNA, 17 nt, Molluscum contagiosum virus
agcccaggaacaucugc

SEQ ID NO: 372863 - RNA, 14 nt, Molluscum contagiosum virus
agccccauggucuu

SEQ ID NO: 372864 - RNA, 14 nt, Molluscum contagiosum virus
agccccugcugcuc

SEQ ID NO: 372865 - RNA, 14 nt, Molluscum contagiosum virus
agcccgacuucucg

SEQ ID NO: 372866 - RNA, 14 nt, Molluscum contagiosum virus
agcccgcggugcgc

SEQ ID NO: 372867 - RNA, 14 nt, Molluscum contagiosum virus
agcccgcuaugaac

SEQ ID NO: 372868 - RNA, 17 nt, Molluscum contagiosum virus
agcccgggcccgugccc

SEQ ID NO: 372869 - RNA, 12 nt, Molluscum contagiosum virus
agcccuccugag

SEQ ID NO: 372870 - RNA, 15 nt, Molluscum contagiosum virus
agcccugauguuccg

SEQ ID NO: 372871 - RNA, 14 nt, Molluscum contagiosum virus
agcccuuccacgac

SEQ ID NO: 372872 - RNA, 13 nt, Molluscum contagiosum virus
agccgcaagcaca

SEQ ID NO: 372873 - RNA, 14 nt, Molluscum contagiosum virus
agccgccgcugccg

SEQ ID NO: 372874 - RNA, 19 nt, Molluscum contagiosum virus
agccgccggggcccaugcu

SEQ ID NO: 372875 - RNA, 22 nt, Molluscum contagiosum virus
agccgccggggcccaugcucac

SEQ ID NO: 372876 - RNA, 22 nt, Molluscum contagiosum virus
agccgccggucuccacguggcc

SEQ ID NO: 372877 - RNA, 15 nt, Molluscum contagiosum virus
agccgcugcugcugc

SEQ ID NO: 372878 - RNA, 18 nt, Molluscum contagiosum virus
agccgcuucgggcucagc

SEQ ID NO: 372879 - RNA, 18 nt, Molluscum contagiosum virus
agccggccuagagcuggc

SEQ ID NO: 372880 - RNA, 21 nt, Molluscum contagiosum virus
agccguccgccucgagcacgc

SEQ ID NO: 372881 - RNA, 18 nt, Molluscum contagiosum virus
agccguggaguccaugcc

SEQ ID NO: 372882 - RNA, 15 nt, Molluscum contagiosum virus
agccguggaugaaca

SEQ ID NO: 372883 - RNA, 13 nt, Molluscum contagiosum virus
agccuagccauac

SEQ ID NO: 372884 - RNA, 24 nt, Molluscum contagiosum virus
agccucaucgugagccuggucgag

SEQ ID NO: 372885 - RNA, 21 nt, Molluscum contagiosum virus
agccucccccgcgcacugcca

SEQ ID NO: 372886 - RNA, 15 nt, Molluscum contagiosum virus
agccucgcuggugug

SEQ ID NO: 372887 - RNA, 20 nt, Molluscum contagiosum virus
agccucuggaaggagcuggg

SEQ ID NO: 372888 - RNA, 21 nt, Molluscum contagiosum virus
agccugacggcagcaagcgca

SEQ ID NO: 372889 - RNA, 15 nt, Molluscum contagiosum virus
agccugcaccgagug

SEQ ID NO: 372890 - RNA, 18 nt, Molluscum contagiosum virus
agccuggcuccugugucg

SEQ ID NO: 372891 - RNA, 21 nt, Molluscum contagiosum virus
agccugugcgccaacaaccac

SEQ ID NO: 372892 - RNA, 23 nt, Molluscum contagiosum virus
agccuucuucgugcugugccuag

SEQ ID NO: 372893 - RNA, 23 nt, Molluscum contagiosum virus
agcgagaucgaacuuaacggcca

SEQ ID NO: 372894 - RNA, 21 nt, Molluscum contagiosum virus
agcgagugauccuugccaagc

SEQ ID NO: 372895 - RNA, 19 nt, Molluscum contagiosum virus
agcgcaccguugacgagcu

SEQ ID NO: 372896 - RNA, 22 nt, Molluscum contagiosum virus
agcgcacgaagcggcggacagc

SEQ ID NO: 372897 - RNA, 14 nt, Molluscum contagiosum virus
agcgcaggcacaaa

SEQ ID NO: 372898 - RNA, 16 nt, Molluscum contagiosum virus
agcgcaggcacaaaac

SEQ ID NO: 372899 - RNA, 23 nt, Molluscum contagiosum virus
agcgcaugcgcgccgcgcugcug

SEQ ID NO: 372900 - RNA, 14 nt, Molluscum contagiosum virus
agcgcccgcugcuc

SEQ ID NO: 372901 - RNA, 16 nt, Molluscum contagiosum virus
agcgcccgcugcucua

SEQ ID NO: 372902 - RNA, 18 nt, Molluscum contagiosum virus
agcgccgccaugcugcgc

SEQ ID NO: 372903 - RNA, 23 nt, Molluscum contagiosum virus
aggacuuccgcgcgcucuugcau

SEQ ID NO: 372904 - RNA, 13 nt, Molluscum contagiosum virus
aggagagcggcgc

SEQ ID NO: 372905 - RNA, 15 nt, Molluscum contagiosum virus
aggagcccuugccac

SEQ ID NO: 372906 - RNA, 19 nt, Molluscum contagiosum virus
aggagggcguccguaaguc

SEQ ID NO: 372907 - RNA, 16 nt, Molluscum contagiosum virus
aggaugccugucuugu

SEQ ID NO: 372908 - RNA, 14 nt, Molluscum contagiosum virus
aggauucuugcacg

SEQ ID NO: 372909 - RNA, 18 nt, Molluscum contagiosum virus
aggauuuaaauggcgcgc

SEQ ID NO: 372910 - RNA, 14 nt, Molluscum contagiosum virus
aggcaacgcacaaa

SEQ ID NO: 372911 - RNA, 15 nt, Molluscum contagiosum virus
aggcaacgcacaaaa

SEQ ID NO: 372912 - RNA, 14 nt, Molluscum contagiosum virus
aggcacccgcagga

SEQ ID NO: 372913 - RNA, 15 nt, Molluscum contagiosum virus
aggcacccgcaggaa

SEQ ID NO: 372914 - RNA, 23 nt, Molluscum contagiosum virus
aggcacccgcaggaaagguaccc

SEQ ID NO: 372915 - RNA, 16 nt, Molluscum contagiosum virus
aggcacuccagcgcgc

SEQ ID NO: 372916 - RNA, 13 nt, Molluscum contagiosum virus
aggcacuccgcgc

SEQ ID NO: 372917 - RNA, 15 nt, Molluscum contagiosum virus
aggcagcugcugcgc

SEQ ID NO: 372918 - RNA, 14 nt, Molluscum contagiosum virus
aggcaggagccucu

SEQ ID NO: 372919 - RNA, 18 nt, Molluscum contagiosum virus
aggcauaccugugccagc

SEQ ID NO: 372920 - RNA, 18 nt, Molluscum contagiosum virus
aggcaucucgugcaugac

SEQ ID NO: 372921 - RNA, 15 nt, Molluscum contagiosum virus
aggccacgugcucaa

SEQ ID NO: 372922 - RNA, 22 nt, Molluscum contagiosum virus
aggccaugaucauggcgccgcu

SEQ ID NO: 372923 - RNA, 18 nt, Molluscum contagiosum virus
aggccgcccacgcucaac

SEQ ID NO: 372924 - RNA, 15 nt, Molluscum contagiosum virus
aggccggcacaagcc

SEQ ID NO: 372925 - RNA, 20 nt, Molluscum contagiosum virus
aggccggccguggcgugcuu

SEQ ID NO: 372926 - RNA, 16 nt, Molluscum contagiosum virus
aggccuacgugcugcg

SEQ ID NO: 372927 - RNA, 16 nt, Molluscum contagiosum virus
aggccuucaacaagaa

SEQ ID NO: 372928 - RNA, 17 nt, Molluscum contagiosum virus
aggcgcaaccgcgugcg

SEQ ID NO: 372929 - RNA, 18 nt, Molluscum contagiosum virus
aggcgcuagugcagauga

SEQ ID NO: 372930 - RNA, 21 nt, Molluscum contagiosum virus
aggcgcugccgcgggacgaga

SEQ ID NO: 372931 - RNA, 20 nt, Molluscum contagiosum virus
aggcgcuugggcacugcuac

SEQ ID NO: 372932 - RNA, 12 nt, Molluscum contagiosum virus
aggcggagcugc

SEQ ID NO: 372933 - RNA, 14 nt, Molluscum contagiosum virus
aggcggcacugcua

SEQ ID NO: 372934 - RNA, 13 nt, Molluscum contagiosum virus
aggcggucuucca

SEQ ID NO: 372935 - RNA, 16 nt, Molluscum contagiosum virus
aggcguaugaguaccu

SEQ ID NO: 372936 - RNA, 18 nt, Molluscum contagiosum virus
aggcguccagcggcugcc

SEQ ID NO: 372937 - RNA, 13 nt, Molluscum contagiosum virus
aggcucagcgcuu

SEQ ID NO: 372938 - RNA, 22 nt, Molluscum contagiosum virus
aggcucagcgcuucgacuucca

SEQ ID NO: 372939 - RNA, 22 nt, Molluscum contagiosum virus
aggcucgagcgcgcgccugcug

SEQ ID NO: 372940 - RNA, 14 nt, Molluscum contagiosum virus
aggcucgagcugca

SEQ ID NO: 372941 - RNA, 23 nt, Molluscum contagiosum virus
aggcugcguuagcguugguaaca

SEQ ID NO: 372942 - RNA, 17 nt, Molluscum contagiosum virus
aggcugcucuccgaaga

SEQ ID NO: 372943 - RNA, 13 nt, Molluscum contagiosum virus
aggcuguguucca

SEQ ID NO: 372944 - RNA, 13 nt, Molluscum contagiosum virus
agggaugcgcaca

SEQ ID NO: 372945 - RNA, 17 nt, Molluscum contagiosum virus
agggaugcgcacacuug

SEQ ID NO: 372946 - RNA, 17 nt, Molluscum contagiosum virus
agggcaaucgcgugcuu

SEQ ID NO: 372947 - RNA, 15 nt, Molluscum contagiosum virus
agggcacgcugcaca

SEQ ID NO: 372948 - RNA, 19 nt, Molluscum contagiosum virus
agggccguuggacaucagc

SEQ ID NO: 372949 - RNA, 22 nt, Molluscum contagiosum virus
agggcgaggccaaggucuucag

SEQ ID NO: 372950 - RNA, 20 nt, Molluscum contagiosum virus
agggcgcgaccggcgugccu

SEQ ID NO: 372951 - RNA, 23 nt, Molluscum contagiosum virus
agggcgcggacgccuucuuccug

SEQ ID NO: 372952 - RNA, 15 nt, Molluscum contagiosum virus
agggcucaagaucuc

SEQ ID NO: 372953 - RNA, 16 nt, Molluscum contagiosum virus
agggcucgccaugcug

SEQ ID NO: 372954 - RNA, 16 nt, Molluscum contagiosum virus
aggggccacaagcacg

SEQ ID NO: 372955 - RNA, 18 nt, Molluscum contagiosum virus
agggguguuuccuugccu

SEQ ID NO: 372956 - RNA, 14 nt, Molluscum contagiosum virus
agggucgugcaggu

SEQ ID NO: 372957 - RNA, 13 nt, Molluscum contagiosum virus
agguacgugucca

SEQ ID NO: 372958 - RNA, 19 nt, Molluscum contagiosum virus
agguagagcaacaugcuga

SEQ ID NO: 372959 - RNA, 14 nt, Molluscum contagiosum virus
agguccacauuuca

SEQ ID NO: 372960 - RNA, 23 nt, Molluscum contagiosum virus
agguccaguauuucaaugcagua

SEQ ID NO: 372961 - RNA, 16 nt, Molluscum contagiosum virus
aggucuucaggaacaa

SEQ ID NO: 372962 - RNA, 16 nt, Molluscum contagiosum virus
aggugcacgugcugca

SEQ ID NO: 372963 - RNA, 17 nt, Molluscum contagiosum virus
aggugcgcgacuccauc

SEQ ID NO: 372964 - RNA, 23 nt, Molluscum contagiosum virus
agguggcacccuggcugcugcgc

SEQ ID NO: 372965 - RNA, 18 nt, Molluscum contagiosum virus
aggugggaaugcccgcaa

SEQ ID NO: 372966 - RNA, 20 nt, Molluscum contagiosum virus
agguucuccagaaucgcuuu

SEQ ID NO: 372967 - RNA, 15 nt, Molluscum contagiosum virus
aguaccgugaccaag

SEQ ID NO: 372968 - RNA, 14 nt, Molluscum contagiosum virus
aguacgcucuccau

SEQ ID NO: 372969 - RNA, 22 nt, Molluscum contagiosum virus
aguacugcagcagcuccuccac

SEQ ID NO: 372970 - RNA, 15 nt, Molluscum contagiosum virus
aguacuucuacggga

SEQ ID NO: 372971 - RNA, 18 nt, Molluscum contagiosum virus
aguagcgcucgcccagcu

SEQ ID NO: 372972 - RNA, 19 nt, Molluscum contagiosum virus
aguagcgcucgcccagcuc

SEQ ID NO: 372973 - RNA, 15 nt, Molluscum contagiosum virus
aguagcgguguugcu

SEQ ID NO: 372974 - RNA, 22 nt, Molluscum contagiosum virus
aguauauucuuuacuacguguu

SEQ ID NO: 372975 - RNA, 16 nt, Molluscum contagiosum virus
aguaucggcaacauuu

SEQ ID NO: 372976 - RNA, 18 nt, Molluscum contagiosum virus
aguaugaaucuacggcug

SEQ ID NO: 372977 - RNA, 14 nt, Molluscum contagiosum virus
agucacuucucgga

SEQ ID NO: 372978 - RNA, 22 nt, Molluscum contagiosum virus
aguccucgacaaugagcacuug

SEQ ID NO: 372979 - RNA, 22 nt, Molluscum contagiosum virus
agucgcaguacccgagcugugc

SEQ ID NO: 372980 - RNA, 14 nt, Molluscum contagiosum virus
agucguuggcgcgc

SEQ ID NO: 372981 - RNA, 21 nt, Molluscum contagiosum virus
agucuagaagcgcaggcacaa

SEQ ID NO: 372982 - RNA, 22 nt, Molluscum contagiosum virus
agucucgaugugacaacaugug

SEQ ID NO: 372983 - RNA, 12 nt, Molluscum contagiosum virus
agugaucuccac

SEQ ID NO: 372984 - RNA, 17 nt, Molluscum contagiosum virus
agugcacaccagacaaa

SEQ ID NO: 372985 - RNA, 19 nt, Molluscum contagiosum virus
agugcacaccggcgcgcug

SEQ ID NO: 372986 - RNA, 18 nt, Molluscum contagiosum virus
agugcacgcggcgcgugu

SEQ ID NO: 372987 - RNA, 15 nt, Molluscum contagiosum virus
agugcgggucacaag

SEQ ID NO: 372988 - RNA, 20 nt, Molluscum contagiosum virus
agugcgugcacugucuuuuc

SEQ ID NO: 372989 - RNA, 16 nt, Molluscum contagiosum virus
agugcuccgcacgugg

SEQ ID NO: 372990 - RNA, 17 nt, Molluscum contagiosum virus
agugcucgcacacgugc

SEQ ID NO: 372991 - RNA, 18 nt, Molluscum contagiosum virus
agugcucuuuaguacaac

SEQ ID NO: 372992 - RNA, 19 nt, Molluscum contagiosum virus
agugcugagccacaaacac

SEQ ID NO: 372993 - RNA, 15 nt, Molluscum contagiosum virus
agugguccaccagcu

SEQ ID NO: 372994 - RNA, 21 nt, Molluscum contagiosum virus
agugucgagcuucggacgagc

SEQ ID NO: 372995 - RNA, 17 nt, Molluscum contagiosum virus
agugugcgugucucucg

SEQ ID NO: 372996 - RNA, 21 nt, Molluscum contagiosum virus
aguguugugaaguccucucuc

SEQ ID NO: 372997 - RNA, 17 nt, Molluscum contagiosum virus
aguuccacuccugugag

SEQ ID NO: 372998 - RNA, 13 nt, Molluscum contagiosum virus
aguucgagcugcu

SEQ ID NO: 372999 - RNA, 19 nt, Molluscum contagiosum virus
aguugcagcccaccagcag

SEQ ID NO: 373000 - RNA, 21 nt, Molluscum contagiosum virus
aguugcgcgagaacucgugcc

SEQ ID NO: 373001 - RNA, 14 nt, Molluscum contagiosum virus
aguugcucuagcac

SEQ ID NO: 373002 - RNA, 21 nt, Molluscum contagiosum virus
aguuggacagccaugaggaca

SEQ ID NO: 373003 - RNA, 14 nt, Molluscum contagiosum virus
aguuguuccacgac

SEQ ID NO: 373004 - RNA, 17 nt, Molluscum contagiosum virus
aguuuggacgagcugcu

SEQ ID NO: 373005 - RNA, 14 nt, Molluscum contagiosum virus
aguuuguagcucua

SEQ ID NO: 373006 - RNA, 13 nt, Molluscum contagiosum virus
auuggcagcgcuu

SEQ ID NO: 373007 - RNA, 22 nt, Molluscum contagiosum virus
auuggcauccggcacgcacaaa

SEQ ID NO: 373008 - RNA, 15 nt, Molluscum contagiosum virus
auuucgccuuguuca

SEQ ID NO: 373009 - RNA, 17 nt, Molluscum contagiosum virus
auuucgccuuguucaca

SEQ ID NO: 373010 - RNA, 19 nt, Molluscum contagiosum virus
auuucgcgcagcaggcacu

SEQ ID NO: 373011 - RNA, 13 nt, Molluscum contagiosum virus
auuuucucuggag

SEQ ID NO: 373012 - RNA, 17 nt, Molluscum contagiosum virus
auuuuuuacuccuucaa

SEQ ID NO: 373013 - RNA, 18 nt, Molluscum contagiosum virus
auuuuuuacuccuucaau

SEQ ID NO: 373014 - RNA, 14 nt, Molluscum contagiosum virus
caaaacaugcugua

SEQ ID NO: 373015 - RNA, 13 nt, Molluscum contagiosum virus
caaaacccugaua

SEQ ID NO: 373016 - RNA, 16 nt, Molluscum contagiosum virus
caaaacugaaaagcua

SEQ ID NO: 373017 - RNA, 22 nt, Molluscum contagiosum virus
caaaauggcugcgaccaagaca

SEQ ID NO: 373018 - RNA, 18 nt, Molluscum contagiosum virus
caaacaagcagucucaug

SEQ ID NO: 373019 - RNA, 22 nt, Molluscum contagiosum virus
caaaccucugagcgagcgcagu

SEQ ID NO: 373020 - RNA, 20 nt, Molluscum contagiosum virus
caaacugugcuccugaggaa

SEQ ID NO: 373021 - RNA, 23 nt, Molluscum contagiosum virus
caaagaucgcgguggcaggcgcg

SEQ ID NO: 373022 - RNA, 19 nt, Molluscum contagiosum virus
caaagcaucgacgugcaga

SEQ ID NO: 373023 - RNA, 17 nt, Molluscum contagiosum virus
caaagcccuccugagaa

SEQ ID NO: 373024 - RNA, 18 nt, Molluscum contagiosum virus
caaaggcgccguccaugu

SEQ ID NO: 373025 - RNA, 14 nt, Molluscum contagiosum virus
caaaggcgggcccg

SEQ ID NO: 373026 - RNA, 17 nt, Molluscum contagiosum virus
caaaggugcucacccuu

SEQ ID NO: 373027 - RNA, 14 nt, Molluscum contagiosum virus
caaagucgcgcgcg

SEQ ID NO: 373028 - RNA, 21 nt, Molluscum contagiosum virus
caaaugccguguauccaagag

SEQ ID NO: 373029 - RNA, 23 nt, Molluscum contagiosum virus
caaaugcgcugcucgccgucgca

SEQ ID NO: 373030 - RNA, 18 nt, Molluscum contagiosum virus
caacaaagaggaaaagaa

SEQ ID NO: 373031 - RNA, 12 nt, Molluscum contagiosum virus
caacaaccacuc

SEQ ID NO: 373032 - RNA, 23 nt, Molluscum contagiosum virus
caacaagaaaaucgccuuuguga

SEQ ID NO: 373033 - RNA, 21 nt, Molluscum contagiosum virus
caacaagcggacuacaucgcu

SEQ ID NO: 373034 - RNA, 16 nt, Molluscum contagiosum virus
caacaaggaaaggcac

SEQ ID NO: 373035 - RNA, 12 nt, Molluscum contagiosum virus
caacacccggcg

SEQ ID NO: 373036 - RNA, 17 nt, Molluscum contagiosum virus
caacacuaccacagcca

SEQ ID NO: 373037 - RNA, 19 nt, Molluscum contagiosum virus
caacacuaccacagccauu

SEQ ID NO: 373038 - RNA, 20 nt, Molluscum contagiosum virus
caacacugacgcucgggccg

SEQ ID NO: 373039 - RNA, 14 nt, Molluscum contagiosum virus
caacagcgcaagcu

SEQ ID NO: 373040 - RNA, 13 nt, Molluscum contagiosum virus
caacaggagcauu

SEQ ID NO: 373041 - RNA, 14 nt, Molluscum contagiosum virus
caacauccugccac

SEQ ID NO: 373042 - RNA, 18 nt, Molluscum contagiosum virus
caacaugccuuucuucca

SEQ ID NO: 373043 - RNA, 17 nt, Molluscum contagiosum virus
caacaugcggagacugu

SEQ ID NO: 373044 - RNA, 19 nt, Molluscum contagiosum virus
caacaugcggagacuguua

SEQ ID NO: 373045 - RNA, 21 nt, Molluscum contagiosum virus
caaccacucuuucacgcugca

SEQ ID NO: 373046 - RNA, 16 nt, Molluscum contagiosum virus
caaccgaucccggccg

SEQ ID NO: 373047 - RNA, 20 nt, Molluscum contagiosum virus
caaccgcaaggaaaacugca

SEQ ID NO: 373048 - RNA, 18 nt, Molluscum contagiosum virus
caaccgcgugcgugcaca

SEQ ID NO: 373049 - RNA, 22 nt, Molluscum contagiosum virus
caaccucgggaagcccucaggg

SEQ ID NO: 373050 - RNA, 22 nt, Molluscum contagiosum virus
caaccuguuaaauggacgugcu

SEQ ID NO: 373051 - RNA, 17 nt, Molluscum contagiosum virus
caacgacaggaacgcac

SEQ ID NO: 373052 - RNA, 19 nt, Molluscum contagiosum virus
caacgacuagcgugcgcag

SEQ ID NO: 373053 - RNA, 15 nt, Molluscum contagiosum virus
caacgagcgcaucag

SEQ ID NO: 373054 - RNA, 18 nt, Molluscum contagiosum virus
caacgcacaaaacacaaa

SEQ ID NO: 373055 - RNA, 13 nt, Molluscum contagiosum virus
caacgcgcgcgcg

SEQ ID NO: 373056 - RNA, 13 nt, Molluscum contagiosum virus
caacgcggacgcg

SEQ ID NO: 373057 - RNA, 10 nt, Molluscum contagiosum virus
caacgcugcc

SEQ ID NO: 373058 - RNA, 19 nt, Molluscum contagiosum virus
caacgggcucgugcuggag

SEQ ID NO: 373059 - RNA, 22 nt, Molluscum contagiosum virus
caacguaguacugcagcagcuc

SEQ ID NO: 373060 - RNA, 14 nt, Molluscum contagiosum virus
caacgucgcacugg

SEQ ID NO: 373061 - RNA, 20 nt, Molluscum contagiosum virus
caacgucgcacuggccugca

SEQ ID NO: 373062 - RNA, 12 nt, Molluscum contagiosum virus
caacgucuuccg

SEQ ID NO: 373063 - RNA, 22 nt, Molluscum contagiosum virus
caacgugaguaucggcaacauu

SEQ ID NO: 373064 - RNA, 13 nt, Molluscum contagiosum virus
caacgugcugcuc

SEQ ID NO: 373065 - RNA, 16 nt, Molluscum contagiosum virus
caacgugcugcucaag

SEQ ID NO: 373066 - RNA, 17 nt, Molluscum contagiosum virus
caacgugggcaccugca

SEQ ID NO: 373067 - RNA, 20 nt, Molluscum contagiosum virus
caacgugggugaggacguga

SEQ ID NO: 373068 - RNA, 17 nt, Molluscum contagiosum virus
caacucgcgagagacac

SEQ ID NO: 373069 - RNA, 17 nt, Molluscum contagiosum virus
caacugcgucucaagac

SEQ ID NO: 373070 - RNA, 16 nt, Molluscum contagiosum virus
caacuucuguguggaa

SEQ ID NO: 373071 - RNA, 22 nt, Molluscum contagiosum virus
caagaaaaucgccuuugugaca

SEQ ID NO: 373072 - RNA, 16 nt, Molluscum contagiosum virus
caagaacaccaagagc

SEQ ID NO: 373073 - RNA, 15 nt, Molluscum contagiosum virus
caagaacaugugcuc

SEQ ID NO: 373074 - RNA, 21 nt, Molluscum contagiosum virus
caagaagacgcuccauucucu

SEQ ID NO: 373075 - RNA, 15 nt, Molluscum contagiosum virus
caagaagacggcgcg

SEQ ID NO: 373076 - RNA, 23 nt, Molluscum contagiosum virus
caagaagaggccggcacaagccg

SEQ ID NO: 373077 - RNA, 15 nt, Molluscum contagiosum virus
caagaagcccaagga

SEQ ID NO: 373078 - RNA, 19 nt, Molluscum contagiosum virus
caagaagcccaaggagcug

SEQ ID NO: 373079 - RNA, 21 nt, Molluscum contagiosum virus
caagacaacacucgugcucgu

SEQ ID NO: 373080 - RNA, 18 nt, Molluscum contagiosum virus
caagacaagucacacucu

SEQ ID NO: 373081 - RNA, 24 nt, Molluscum contagiosum virus
caagacaucaucgcccccggucug

SEQ ID NO: 373082 - RNA, 15 nt, Molluscum contagiosum virus
caagacgcugcuggc

SEQ ID NO: 373083 - RNA, 18 nt, Molluscum contagiosum virus
caagacggaagacaaggc

SEQ ID NO: 373084 - RNA, 13 nt, Molluscum contagiosum virus
caagacgggcacg

SEQ ID NO: 373085 - RNA, 19 nt, Molluscum contagiosum virus
caagagccgccggggccca

SEQ ID NO: 373086 - RNA, 22 nt, Molluscum contagiosum virus
caagagccgccggggcccaugc

SEQ ID NO: 373087 - RNA, 15 nt, Molluscum contagiosum virus
caagaggacgagcug

SEQ ID NO: 373088 - RNA, 15 nt, Molluscum contagiosum virus
caagaggggagccag

SEQ ID NO: 373089 - RNA, 17 nt, Molluscum contagiosum virus
caagaucguuuugcacu

SEQ ID NO: 373090 - RNA, 19 nt, Molluscum contagiosum virus
caagauggcgcagcacuuc

SEQ ID NO: 373091 - RNA, 20 nt, Molluscum contagiosum virus
caagauggcgcagcacuucg

SEQ ID NO: 373092 - RNA, 14 nt, Molluscum contagiosum virus
caagauucugcgga

SEQ ID NO: 373093 - RNA, 17 nt, Molluscum contagiosum virus
caagcacaacgggcucg

SEQ ID NO: 373094 - RNA, 16 nt, Molluscum contagiosum virus
caagcacuacauggac

SEQ ID NO: 373095 - RNA, 21 nt, Molluscum contagiosum virus
caagcagcgcgccaccaccaa

SEQ ID NO: 373096 - RNA, 18 nt, Molluscum contagiosum virus
caagcaggaguccgugac

SEQ ID NO: 373097 - RNA, 15 nt, Molluscum contagiosum virus
caagcaggcaugcaa

SEQ ID NO: 373098 - RNA, 17 nt, Molluscum contagiosum virus
caagcaggcaugcaagg

SEQ ID NO: 373099 - RNA, 16 nt, Molluscum contagiosum virus
caagccacacaacucc

SEQ ID NO: 373100 - RNA, 15 nt, Molluscum contagiosum virus
caagccagcccgcug

SEQ ID NO: 373101 - RNA, 15 nt, Molluscum contagiosum virus
caagccgcaggcgcg

SEQ ID NO: 373102 - RNA, 14 nt, Molluscum contagiosum virus
caagcgcccgcgag

SEQ ID NO: 373103 - RNA, 21 nt, Molluscum contagiosum virus
caagcgcuacuugcuggcgcg

SEQ ID NO: 373104 - RNA, 14 nt, Molluscum contagiosum virus
caagcgcuugcucu

SEQ ID NO: 373105 - RNA, 21 nt, Molluscum contagiosum virus
caagcucaagaagcccaagga

SEQ ID NO: 373106 - RNA, 12 nt, Molluscum contagiosum virus
caagcucaucca

SEQ ID NO: 373107 - RNA, 17 nt, Molluscum contagiosum virus
caagcugcaccggcgcg

SEQ ID NO: 373108 - RNA, 15 nt, Molluscum contagiosum virus
caagcugcuggcaca

SEQ ID NO: 373109 - RNA, 11 nt, Molluscum contagiosum virus
cacgagcaguc

SEQ ID NO: 373110 - RNA, 19 nt, Molluscum contagiosum virus
cacgagcgccagccugugc

SEQ ID NO: 373111 - RNA, 20 nt, Molluscum contagiosum virus
cacgaggacugggaacccgu

SEQ ID NO: 373112 - RNA, 14 nt, Molluscum contagiosum virus
cacgaucaaggugc

SEQ ID NO: 373113 - RNA, 20 nt, Molluscum contagiosum virus
cacgaugaacggcuccuuga

SEQ ID NO: 373114 - RNA, 20 nt, Molluscum contagiosum virus
cacgauggccggcaacuggc

SEQ ID NO: 373115 - RNA, 21 nt, Molluscum contagiosum virus
cacgauggccggcaacuggcu

SEQ ID NO: 373116 - RNA, 20 nt, Molluscum contagiosum virus
cacgcaaggcaugcgcgcag

SEQ ID NO: 373117 - RNA, 22 nt, Molluscum contagiosum virus
cacgcaaggcaugcgcgcagug

SEQ ID NO: 373118 - RNA, 16 nt, Molluscum contagiosum virus
cacgcaaucgcgcgcg

SEQ ID NO: 373119 - RNA, 15 nt, Molluscum contagiosum virus
cacgcacacgacgac

SEQ ID NO: 373120 - RNA, 15 nt, Molluscum contagiosum virus
cacgcacgaccucac

SEQ ID NO: 373121 - RNA, 15 nt, Molluscum contagiosum virus
cacgcacgcgcgggc

SEQ ID NO: 373122 - RNA, 19 nt, Molluscum contagiosum virus
cacgcacggcccgggugcg

SEQ ID NO: 373123 - RNA, 19 nt, Molluscum contagiosum virus
cacgcagcuggcgggcgug

SEQ ID NO: 373124 - RNA, 18 nt, Molluscum contagiosum virus
cacgccaagcgcuugcuc

SEQ ID NO: 373125 - RNA, 20 nt, Molluscum contagiosum virus
cacgccagcccgacuucucg

SEQ ID NO: 373126 - RNA, 16 nt, Molluscum contagiosum virus
cacgccuccaagaaga

SEQ ID NO: 373127 - RNA, 16 nt, Molluscum contagiosum virus
cacgccuucguggagc

SEQ ID NO: 373128 - RNA, 17 nt, Molluscum contagiosum virus
cacgcgcacgcgcacac

SEQ ID NO: 373129 - RNA, 24 nt, Molluscum contagiosum virus
cacgcgccgcgcggcuccuacacg

SEQ ID NO: 373130 - RNA, 17 nt, Molluscum contagiosum virus
cacgcgcgcuuagcaca

SEQ ID NO: 373131 - RNA, 22 nt, Molluscum contagiosum virus
cacgcgcgugagcacgggcgag

SEQ ID NO: 373132 - RNA, 13 nt, Molluscum contagiosum virus
cacgcgcucgcgc

SEQ ID NO: 373133 - RNA, 17 nt, Molluscum contagiosum virus
cacgcggaaacaagcac

SEQ ID NO: 373134 - RNA, 23 nt, Molluscum contagiosum virus
cacgcggaaacaagcacaugugu

SEQ ID NO: 373135 - RNA, 12 nt, Molluscum contagiosum virus
cacgcgggcgcc

SEQ ID NO: 373136 - RNA, 17 nt, Molluscum contagiosum virus
cacgcguccacaaagac

SEQ ID NO: 373137 - RNA, 17 nt, Molluscum contagiosum virus
cacgcuacgcagcgcgc

SEQ ID NO: 373138 - RNA, 21 nt, Molluscum contagiosum virus
cacgcuagcgagcgcccgugc

SEQ ID NO: 373139 - RNA, 22 nt, Molluscum contagiosum virus
cacgcuagucguuggcgcgccc

SEQ ID NO: 373140 - RNA, 19 nt, Molluscum contagiosum virus
cacgcucauacuccugcug

SEQ ID NO: 373141 - RNA, 23 nt, Molluscum contagiosum virus
cacgcugagcaagcucaagaagc

SEQ ID NO: 373142 - RNA, 16 nt, Molluscum contagiosum virus
cacgcugcacgagcug

SEQ ID NO: 373143 - RNA, 19 nt, Molluscum contagiosum virus
cacgcugcgcacgggcgcg

SEQ ID NO: 373144 - RNA, 18 nt, Molluscum contagiosum virus
cacgcugcgcucggcgcg

SEQ ID NO: 373145 - RNA, 20 nt, Molluscum contagiosum virus
cacgcugcguucgagcugau

SEQ ID NO: 373146 - RNA, 21 nt, Molluscum contagiosum virus
cacgcugcucgugcugcucug

SEQ ID NO: 373147 - RNA, 18 nt, Molluscum contagiosum virus
cacgcugcugcgugcgcg

SEQ ID NO: 373148 - RNA, 16 nt, Molluscum contagiosum virus
cacgcuggcgcucggc

SEQ ID NO: 373149 - RNA, 16 nt, Molluscum contagiosum virus
cacgcuugcgcaugug

SEQ ID NO: 373150 - RNA, 16 nt, Molluscum contagiosum virus
cacggacccgggcgcg

SEQ ID NO: 373151 - RNA, 15 nt, Molluscum contagiosum virus
cacggaccucaagga

SEQ ID NO: 373152 - RNA, 17 nt, Molluscum contagiosum virus
cacggauacgcgcacac

SEQ ID NO: 373153 - RNA, 17 nt, Molluscum contagiosum virus
cacggcgcuugcuucca

SEQ ID NO: 373154 - RNA, 17 nt, Molluscum contagiosum virus
cacgggcaugcacagcu

SEQ ID NO: 373155 - RNA, 17 nt, Molluscum contagiosum virus
cacgggcccgcgcguga

SEQ ID NO: 373156 - RNA, 15 nt, Molluscum contagiosum virus
cacggggaagcacgc

SEQ ID NO: 373157 - RNA, 17 nt, Molluscum contagiosum virus
cacggggucguaguccg

SEQ ID NO: 373158 - RNA, 19 nt, Molluscum contagiosum virus
cacggguguacaaagagcu

SEQ ID NO: 373159 - RNA, 23 nt, Molluscum contagiosum virus
cacggugugcuacugcacugcag

SEQ ID NO: 373160 - RNA, 24 nt, Molluscum contagiosum virus
cacguacgagcagcugcugcgcac

SEQ ID NO: 373161 - RNA, 17 nt, Molluscum contagiosum virus
cacgugcagcggcgcca

SEQ ID NO: 373162 - RNA, 18 nt, Molluscum contagiosum virus
cacgugccagcucauagc

SEQ ID NO: 373163 - RNA, 16 nt, Molluscum contagiosum virus
cacgugccgugcuguc

SEQ ID NO: 373164 - RNA, 11 nt, Molluscum contagiosum virus
cacgugcugcg

SEQ ID NO: 373165 - RNA, 16 nt, Molluscum contagiosum virus
cacguggacagcaucc

SEQ ID NO: 373166 - RNA, 16 nt, Molluscum contagiosum virus
cacguggcuaugagcg

SEQ ID NO: 373167 - RNA, 15 nt, Molluscum contagiosum virus
cacguuccaaaagac

SEQ ID NO: 373168 - RNA, 19 nt, Molluscum contagiosum virus
cacguuccagagcacugcg

SEQ ID NO: 373169 - RNA, 15 nt, Molluscum contagiosum virus
cacuacucgucuugc

SEQ ID NO: 373170 - RNA, 16 nt, Molluscum contagiosum virus
cacuacucgucuugcg

SEQ ID NO: 373171 - RNA, 14 nt, Molluscum contagiosum virus
cacuagcacgggcg

SEQ ID NO: 373172 - RNA, 18 nt, Molluscum contagiosum virus
cacuagcguagcaugcuc

SEQ ID NO: 373173 - RNA, 21 nt, Molluscum contagiosum virus
cacuauggacgcuugcuagca

SEQ ID NO: 373174 - RNA, 15 nt, Molluscum contagiosum virus
cacucacgcguccac

SEQ ID NO: 373175 - RNA, 20 nt, Molluscum contagiosum virus
cacucgauggacgccagcuu

SEQ ID NO: 373176 - RNA, 15 nt, Molluscum contagiosum virus
cacucgcgcguccac

SEQ ID NO: 373177 - RNA, 21 nt, Molluscum contagiosum virus
cacucgcgcguccgcaaagac

SEQ ID NO: 373178 - RNA, 15 nt, Molluscum contagiosum virus
cacucgcuacugcaa

SEQ ID NO: 373179 - RNA, 15 nt, Molluscum contagiosum virus
cacucuucgcaggcg

SEQ ID NO: 373180 - RNA, 11 nt, Molluscum contagiosum virus
cacucuuucac

SEQ ID NO: 373181 - RNA, 22 nt, Molluscum contagiosum virus
cacugcgcgcgcggcgcagugc

SEQ ID NO: 373182 - RNA, 14 nt, Molluscum contagiosum virus
cacuggccugcaaa

SEQ ID NO: 373183 - RNA, 18 nt, Molluscum contagiosum virus
cacugucguaacaaugga

SEQ ID NO: 373184 - RNA, 20 nt, Molluscum contagiosum virus
cacugucuuuuccucacguc

SEQ ID NO: 373185 - RNA, 14 nt, Molluscum contagiosum virus
cacuuccaguauga

SEQ ID NO: 373186 - RNA, 22 nt, Molluscum contagiosum virus
cacuucucgccgcaccacaacu

SEQ ID NO: 373187 - RNA, 15 nt, Molluscum contagiosum virus
cacuugcgcguccac

SEQ ID NO: 373188 - RNA, 21 nt, Molluscum contagiosum virus
cacuugcgcguccgcaaagcc

SEQ ID NO: 373189 - RNA, 21 nt, Molluscum contagiosum virus
cacuugcgcguucgcaaagac

SEQ ID NO: 373190 - RNA, 19 nt, Molluscum contagiosum virus
cagaaaacaggcacuucgc

SEQ ID NO: 373191 - RNA, 23 nt, Molluscum contagiosum virus
cagaaacucuccgacgugcugcg

SEQ ID NO: 373192 - RNA, 22 nt, Molluscum contagiosum virus
cagaaggcguaugcgccaagcc

SEQ ID NO: 373193 - RNA, 14 nt, Molluscum contagiosum virus
cagaagguacugaa

SEQ ID NO: 373194 - RNA, 16 nt, Molluscum contagiosum virus
cagaaucgcuuugcca

SEQ ID NO: 373195 - RNA, 17 nt, Molluscum contagiosum virus
cagacaacugcgucuca

SEQ ID NO: 373196 - RNA, 23 nt, Molluscum contagiosum virus
cagacacgcuggucagcuucaug

SEQ ID NO: 373197 - RNA, 21 nt, Molluscum contagiosum virus
cagacaggcuccgacccgcuc

SEQ ID NO: 373198 - RNA, 15 nt, Molluscum contagiosum virus
cagaccaagaagccc

SEQ ID NO: 373199 - RNA, 22 nt, Molluscum contagiosum virus
cagacgaccgucacgacucuca

SEQ ID NO: 373200 - RNA, 17 nt, Molluscum contagiosum virus
cagacgacucgcugcca

SEQ ID NO: 373201 - RNA, 14 nt, Molluscum contagiosum virus
cagacguggugcuc

SEQ ID NO: 373202 - RNA, 13 nt, Molluscum contagiosum virus
cagacuaggcaau

SEQ ID NO: 373203 - RNA, 13 nt, Molluscum contagiosum virus
cagagaaaggcac

SEQ ID NO: 373204 - RNA, 23 nt, Molluscum contagiosum virus
cagagaagugcuccgcacgugga

SEQ ID NO: 373205 - RNA, 19 nt, Molluscum contagiosum virus
cagagcaaggcgagucaau

SEQ ID NO: 373206 - RNA, 21 nt, Molluscum contagiosum virus
cagagcaaggcgagucaauga

SEQ ID NO: 373207 - RNA, 20 nt, Molluscum contagiosum virus
cagagccaugcccgggcgug

SEQ ID NO: 373208 - RNA, 20 nt, Molluscum contagiosum virus
cagagcccaaggggagacau

SEQ ID NO: 373209 - RNA, 14 nt, Molluscum contagiosum virus
cagagccccguuca

SEQ ID NO: 373210 - RNA, 22 nt, Molluscum contagiosum virus
cagagcuccgcgcaugccagac

SEQ ID NO: 373211 - RNA, 15 nt, Molluscum contagiosum virus
caguagcgaaugcag

SEQ ID NO: 373212 - RNA, 18 nt, Molluscum contagiosum virus
caguagcgaaugcagugc

SEQ ID NO: 373213 - RNA, 15 nt, Molluscum contagiosum virus
caguauccgugacgc

SEQ ID NO: 373214 - RNA, 16 nt, Molluscum contagiosum virus
caguaugugaacacga

SEQ ID NO: 373215 - RNA, 21 nt, Molluscum contagiosum virus
caguaugugaacacgacaugu

SEQ ID NO: 373216 - RNA, 22 nt, Molluscum contagiosum virus
caguauuucaaugcaguaugug

SEQ ID NO: 373217 - RNA, 17 nt, Molluscum contagiosum virus
cagucacgacuguguuc

SEQ ID NO: 373218 - RNA, 16 nt, Molluscum contagiosum virus
cagucccuugucaaac

SEQ ID NO: 373219 - RNA, 20 nt, Molluscum contagiosum virus
cagucucgaugugacaacau

SEQ ID NO: 373220 - RNA, 23 nt, Molluscum contagiosum virus
cagucucgaugugacaacaugug

SEQ ID NO: 373221 - RNA, 13 nt, Molluscum contagiosum virus
cagugcaccagca

SEQ ID NO: 373222 - RNA, 14 nt, Molluscum contagiosum virus
cagugccgccgcgc

SEQ ID NO: 373223 - RNA, 22 nt, Molluscum contagiosum virus
cagugccgccgcgcaaaagcac

SEQ ID NO: 373224 - RNA, 23 nt, Molluscum contagiosum virus
cagugccgggcgccggcucugcc

SEQ ID NO: 373225 - RNA, 16 nt, Molluscum contagiosum virus
cagugcggaugugcua

SEQ ID NO: 373226 - RNA, 15 nt, Molluscum contagiosum virus
cagugcgugcacugu

SEQ ID NO: 373227 - RNA, 17 nt, Molluscum contagiosum virus
cagugcgugcacugucu

SEQ ID NO: 373228 - RNA, 16 nt, Molluscum contagiosum virus
cagugcgugccaggcg

SEQ ID NO: 373229 - RNA, 14 nt, Molluscum contagiosum virus
cagugucuugucac

SEQ ID NO: 373230 - RNA, 17 nt, Molluscum contagiosum virus
caguucggccgcacgug

SEQ ID NO: 373231 - RNA, 14 nt, Molluscum contagiosum virus
cauaaaauggacca

SEQ ID NO: 373232 - RNA, 14 nt, Molluscum contagiosum virus
cauaccugugccag

SEQ ID NO: 373233 - RNA, 15 nt, Molluscum contagiosum virus
cauacuccugcuggc

SEQ ID NO: 373234 - RNA, 19 nt, Molluscum contagiosum virus
cauaguacgauggaugcug

SEQ ID NO: 373235 - RNA, 20 nt, Molluscum contagiosum virus
cauaguacgauggaugcugg

SEQ ID NO: 373236 - RNA, 21 nt, Molluscum contagiosum virus
cauauucccuuguacaauaca

SEQ ID NO: 373237 - RNA, 17 nt, Molluscum contagiosum virus
caucaaagcacaacaag

SEQ ID NO: 373238 - RNA, 14 nt, Molluscum contagiosum virus
caucaagaaguuca

SEQ ID NO: 373239 - RNA, 20 nt, Molluscum contagiosum virus
caucaauucaaaggugcuca

SEQ ID NO: 373240 - RNA, 16 nt, Molluscum contagiosum virus
caucagagaagugcuc

SEQ ID NO: 373241 - RNA, 17 nt, Molluscum contagiosum virus
caucagagaagugcucc

SEQ ID NO: 373242 - RNA, 16 nt, Molluscum contagiosum virus
caucaucgccagcauc

SEQ ID NO: 373243 - RNA, 22 nt, Molluscum contagiosum virus
cauccacauuacgcucguggaa

SEQ ID NO: 373244 - RNA, 21 nt, Molluscum contagiosum virus
caucccugccacaugcaguac

SEQ ID NO: 373245 - RNA, 14 nt, Molluscum contagiosum virus
cauccgcuaccugg

SEQ ID NO: 373246 - RNA, 14 nt, Molluscum contagiosum virus
cauccggcacgcac

SEQ ID NO: 373247 - RNA, 17 nt, Molluscum contagiosum virus
cauccggcacgcacaaa

SEQ ID NO: 373248 - RNA, 11 nt, Molluscum contagiosum virus
cauccugauga

SEQ ID NO: 373249 - RNA, 14 nt, Molluscum contagiosum virus
cauccugcugagua

SEQ ID NO: 373250 - RNA, 21 nt, Molluscum contagiosum virus
cauccuggaguuuaaugacgc

SEQ ID NO: 373251 - RNA, 12 nt, Molluscum contagiosum virus
caucgaguccau

SEQ ID NO: 373252 - RNA, 15 nt, Molluscum contagiosum virus
caucgcgcugcuggu

SEQ ID NO: 373253 - RNA, 14 nt, Molluscum contagiosum virus
caucggaacuagcc

SEQ ID NO: 373254 - RNA, 21 nt, Molluscum contagiosum virus
caucggagaagugcuccgcac

SEQ ID NO: 373255 - RNA, 22 nt, Molluscum contagiosum virus
caucgucgcguugcuacucuac

SEQ ID NO: 373256 - RNA, 17 nt, Molluscum contagiosum virus
caucuccuugucugcaa

SEQ ID NO: 373257 - RNA, 14 nt, Molluscum contagiosum virus
caucucgauucaca

SEQ ID NO: 373258 - RNA, 14 nt, Molluscum contagiosum virus
caucucucagggca

SEQ ID NO: 373259 - RNA, 19 nt, Molluscum contagiosum virus
caucugccucguggaacaa

SEQ ID NO: 373260 - RNA, 17 nt, Molluscum contagiosum virus
caucuucagcaccauca

SEQ ID NO: 373261 - RNA, 16 nt, Molluscum contagiosum virus
caucuucugccaggcg

SEQ ID NO: 373262 - RNA, 18 nt, Molluscum contagiosum virus
caucuuuuuuaugcacuu

SEQ ID NO: 373263 - RNA, 22 nt, Molluscum contagiosum virus
caucuuuuuuaugcacuuucaa

SEQ ID NO: 373264 - RNA, 21 nt, Molluscum contagiosum virus
caugaacaacauggugcuggc

SEQ ID NO: 373265 - RNA, 15 nt, Molluscum contagiosum virus
caugaacucgcugcu

SEQ ID NO: 373266 - RNA, 15 nt, Molluscum contagiosum virus
caugaccaagcacau

SEQ ID NO: 373267 - RNA, 17 nt, Molluscum contagiosum virus
caugaccaagcacauuc

SEQ ID NO: 373268 - RNA, 15 nt, Molluscum contagiosum virus
caugacgacgccgga

SEQ ID NO: 373269 - RNA, 20 nt, Molluscum contagiosum virus
caugcaacgcaggacacugu

SEQ ID NO: 373270 - RNA, 21 nt, Molluscum contagiosum virus
caugcagcugcaggaccugcu

SEQ ID NO: 373271 - RNA, 15 nt, Molluscum contagiosum virus
caugccuucaggaac

SEQ ID NO: 373272 - RNA, 14 nt, Molluscum contagiosum virus
caugcgcacagcac

SEQ ID NO: 373273 - RNA, 15 nt, Molluscum contagiosum virus
caugcgcgggaugcu

SEQ ID NO: 373274 - RNA, 14 nt, Molluscum contagiosum virus
caugcggagacugu

SEQ ID NO: 373275 - RNA, 13 nt, Molluscum contagiosum virus
caugcgugcaaca

SEQ ID NO: 373276 - RNA, 14 nt, Molluscum contagiosum virus
caugcucaagcacc

SEQ ID NO: 373277 - RNA, 23 nt, Molluscum contagiosum virus
caugcugaguccgaucuugauga

SEQ ID NO: 373278 - RNA, 19 nt, Molluscum contagiosum virus
caugcuggaguccgcgguu

SEQ ID NO: 373279 - RNA, 16 nt, Molluscum contagiosum virus
caugcuggcgggcgcg

SEQ ID NO: 373280 - RNA, 23 nt, Molluscum contagiosum virus
caugcuggcgggcgcgguacggu

SEQ ID NO: 373281 - RNA, 12 nt, Molluscum contagiosum virus
caugcugucaac

SEQ ID NO: 373282 - RNA, 13 nt, Molluscum contagiosum virus
caugcugucaacg

SEQ ID NO: 373283 - RNA, 22 nt, Molluscum contagiosum virus
caugcugucucugucccugcau

SEQ ID NO: 373284 - RNA, 19 nt, Molluscum contagiosum virus
caugcuucgcgcaaacaag

SEQ ID NO: 373285 - RNA, 20 nt, Molluscum contagiosum virus
cauggaccgcgucaagauca

SEQ ID NO: 373286 - RNA, 19 nt, Molluscum contagiosum virus
cauggaggccaacuaccug

SEQ ID NO: 373287 - RNA, 20 nt, Molluscum contagiosum virus
cauggaggcgcuagugcaga

SEQ ID NO: 373288 - RNA, 20 nt, Molluscum contagiosum virus
cauggaugcgacugcgcaau

SEQ ID NO: 373289 - RNA, 17 nt, Molluscum contagiosum virus
cauggcgagcuagugca

SEQ ID NO: 373290 - RNA, 20 nt, Molluscum contagiosum virus
cauggcgagcuagugcacac

SEQ ID NO: 373291 - RNA, 21 nt, Molluscum contagiosum virus
cauggcgagcuagugcacacc

SEQ ID NO: 373292 - RNA, 12 nt, Molluscum contagiosum virus
caugggcacaag

SEQ ID NO: 373293 - RNA, 14 nt, Molluscum contagiosum virus
caugggcacaaguc

SEQ ID NO: 373294 - RNA, 18 nt, Molluscum contagiosum virus
caugucaggccggucgcg

SEQ ID NO: 373295 - RNA, 16 nt, Molluscum contagiosum virus
cauguccgcaagcacg

SEQ ID NO: 373296 - RNA, 22 nt, Molluscum contagiosum virus
caugucgucaaaggcaaagccu

SEQ ID NO: 373297 - RNA, 18 nt, Molluscum contagiosum virus
caugugcgugcaccucaa

SEQ ID NO: 373298 - RNA, 23 nt, Molluscum contagiosum virus
caugugcgugcaccucaagaaga

SEQ ID NO: 373299 - RNA, 11 nt, Molluscum contagiosum virus
caugugcugcc

SEQ ID NO: 373300 - RNA, 18 nt, Molluscum contagiosum virus
caugugcugccggcucaa

SEQ ID NO: 373301 - RNA, 11 nt, Molluscum contagiosum virus
cauguucucuu

SEQ ID NO: 373302 - RNA, 12 nt, Molluscum contagiosum virus
cauuccucggcg

SEQ ID NO: 373303 - RNA, 17 nt, Molluscum contagiosum virus
cauuccuucacacagac

SEQ ID NO: 373304 - RNA, 16 nt, Molluscum contagiosum virus
cauucuuaauccagua

SEQ ID NO: 373305 - RNA, 17 nt, Molluscum contagiosum virus
cauucuucuccgaugug

SEQ ID NO: 373306 - RNA, 20 nt, Molluscum contagiosum virus
cauugcgucuuacugcugca

SEQ ID NO: 373307 - RNA, 15 nt, Molluscum contagiosum virus
cauuggcagcgcuuu

SEQ ID NO: 373308 - RNA, 15 nt, Molluscum contagiosum virus
cauuggcauccggca

SEQ ID NO: 373309 - RNA, 22 nt, Molluscum contagiosum virus
cauuggcauccggcacgcacaa

SEQ ID NO: 373310 - RNA, 15 nt, Molluscum contagiosum virus
cauuuauagucuggg

SEQ ID NO: 373311 - RNA, 15 nt, Molluscum contagiosum virus
cauuuuuuacuccuu

SEQ ID NO: 373312 - RNA, 14 nt, Molluscum contagiosum virus
ccaaagguccagua

SEQ ID NO: 373313 - RNA, 13 nt, Molluscum contagiosum virus
ccaaagucuuccu

SEQ ID NO: 373314 - RNA, 20 nt, Molluscum contagiosum virus
cccgcggagcugugccaucu

SEQ ID NO: 373315 - RNA, 16 nt, Molluscum contagiosum virus
cccgcggcgcgaaaag

SEQ ID NO: 373316 - RNA, 18 nt, Molluscum contagiosum virus
cccgcggcgugcccgucu

SEQ ID NO: 373317 - RNA, 17 nt, Molluscum contagiosum virus
cccggaaagcagcaaac

SEQ ID NO: 373318 - RNA, 14 nt, Molluscum contagiosum virus
cccggaauuccgug

SEQ ID NO: 373319 - RNA, 17 nt, Molluscum contagiosum virus
cccggaucagccccgcg

SEQ ID NO: 373320 - RNA, 18 nt, Molluscum contagiosum virus
cccggcacgugccccgcg

SEQ ID NO: 373321 - RNA, 17 nt, Molluscum contagiosum virus
cccggcaggcucccgcu

SEQ ID NO: 373322 - RNA, 22 nt, Molluscum contagiosum virus
cccggcaugggcaaggacaucu

SEQ ID NO: 373323 - RNA, 23 nt, Molluscum contagiosum virus
cccggcgugaucuugguggugac

SEQ ID NO: 373324 - RNA, 15 nt, Molluscum contagiosum virus
cccgggggcgcuucc

SEQ ID NO: 373325 - RNA, 15 nt, Molluscum contagiosum virus
cccggguuugugccc

SEQ ID NO: 373326 - RNA, 23 nt, Molluscum contagiosum virus
cccguccgugccauuucguugau

SEQ ID NO: 373327 - RNA, 16 nt, Molluscum contagiosum virus
cccgucuccacaaaga

SEQ ID NO: 373328 - RNA, 16 nt, Molluscum contagiosum virus
cccgugcuugcgcacg

SEQ ID NO: 373329 - RNA, 16 nt, Molluscum contagiosum virus
cccuaucgcaaucuga

SEQ ID NO: 373330 - RNA, 14 nt, Molluscum contagiosum virus
cccuccuaucucaa

SEQ ID NO: 373331 - RNA, 17 nt, Molluscum contagiosum virus
cccucguccggcgcucg

SEQ ID NO: 373332 - RNA, 14 nt, Molluscum contagiosum virus
cccugccacaugca

SEQ ID NO: 373333 - RNA, 17 nt, Molluscum contagiosum virus
cccugccacaugcagua

SEQ ID NO: 373334 - RNA, 14 nt, Molluscum contagiosum virus
cccugcccgcguga

SEQ ID NO: 373335 - RNA, 19 nt, Molluscum contagiosum virus
cccugcgcaccugcacgac

SEQ ID NO: 373336 - RNA, 20 nt, Molluscum contagiosum virus
cccugcuaguccgcguacag

SEQ ID NO: 373337 - RNA, 18 nt, Molluscum contagiosum virus
cccugguuugcgcucuca

SEQ ID NO: 373338 - RNA, 19 nt, Molluscum contagiosum virus
cccugguuugcgcucucag

SEQ ID NO: 373339 - RNA, 23 nt, Molluscum contagiosum virus
cccuguaacaaggaaaaggcaca

SEQ ID NO: 373340 - RNA, 16 nt, Molluscum contagiosum virus
cccuugcucgcuugcc

SEQ ID NO: 373341 - RNA, 22 nt, Molluscum contagiosum virus
ccgaacggcagaccccuugcua

SEQ ID NO: 373342 - RNA, 15 nt, Molluscum contagiosum virus
ccgaagucgcagcag

SEQ ID NO: 373343 - RNA, 17 nt, Molluscum contagiosum virus
ccgacaacgugcugcuc

SEQ ID NO: 373344 - RNA, 15 nt, Molluscum contagiosum virus
ccgaccccaagaaga

SEQ ID NO: 373345 - RNA, 15 nt, Molluscum contagiosum virus
ccgacccgugcugcu

SEQ ID NO: 373346 - RNA, 16 nt, Molluscum contagiosum virus
ccgacgccuuccugcu

SEQ ID NO: 373347 - RNA, 15 nt, Molluscum contagiosum virus
ccgagacugcuacgu

SEQ ID NO: 373348 - RNA, 10 nt, Molluscum contagiosum virus
ccgagcaauu

SEQ ID NO: 373349 - RNA, 20 nt, Molluscum contagiosum virus
ccgagcagaaggaagggccc

SEQ ID NO: 373350 - RNA, 19 nt, Molluscum contagiosum virus
ccgagccgggggaacacgc

SEQ ID NO: 373351 - RNA, 18 nt, Molluscum contagiosum virus
ccgagcgcgcgcgcugcu

SEQ ID NO: 373352 - RNA, 16 nt, Molluscum contagiosum virus
ccgagcgggcaauggg

SEQ ID NO: 373353 - RNA, 22 nt, Molluscum contagiosum virus
ccgagcugcggcgcgugcugag

SEQ ID NO: 373354 - RNA, 15 nt, Molluscum contagiosum virus
ccgaggcgcugccgc

SEQ ID NO: 373355 - RNA, 16 nt, Molluscum contagiosum virus
ccgaugcagugcggau

SEQ ID NO: 373356 - RNA, 14 nt, Molluscum contagiosum virus
ccgcaacaaggaaa

SEQ ID NO: 373357 - RNA, 18 nt, Molluscum contagiosum virus
ccgcaacguggcgcugac

SEQ ID NO: 373358 - RNA, 19 nt, Molluscum contagiosum virus
ccgcaagugcacgcggcgc

SEQ ID NO: 373359 - RNA, 22 nt, Molluscum contagiosum virus
ccgcaaugcagugcaccagcac

SEQ ID NO: 373360 - RNA, 23 nt, Molluscum contagiosum virus
ccgcacaagggcagcucaagcug

SEQ ID NO: 373361 - RNA, 12 nt, Molluscum contagiosum virus
ccgcaccugguc

SEQ ID NO: 373362 - RNA, 14 nt, Molluscum contagiosum virus
ccgcacguggaauc

SEQ ID NO: 373363 - RNA, 17 nt, Molluscum contagiosum virus
ccgcagcgcgcaaaagg

SEQ ID NO: 373364 - RNA, 22 nt, Molluscum contagiosum virus
ccgcaggaaaggcaccccgcag

SEQ ID NO: 373365 - RNA, 21 nt, Molluscum contagiosum virus
ccgcaggaaagguacccgcag

SEQ ID NO: 373366 - RNA, 16 nt, Molluscum contagiosum virus
ccgcauugggccuuga

SEQ ID NO: 373367 - RNA, 15 nt, Molluscum contagiosum virus
ccgccagccacgaag

SEQ ID NO: 373368 - RNA, 20 nt, Molluscum contagiosum virus
ccgcccacgcucaaccagua

SEQ ID NO: 373369 - RNA, 22 nt, Molluscum contagiosum virus
ccgcccgggcguagccuagcca

SEQ ID NO: 373370 - RNA, 14 nt, Molluscum contagiosum virus
ccgccgaguaccgc

SEQ ID NO: 373371 - RNA, 17 nt, Molluscum contagiosum virus
ccgccgcaacauaguca

SEQ ID NO: 373372 - RNA, 12 nt, Molluscum contagiosum virus
ccgccuccgggc

SEQ ID NO: 373373 - RNA, 14 nt, Molluscum contagiosum virus
ccgccugcaggcaa

SEQ ID NO: 373374 - RNA, 21 nt, Molluscum contagiosum virus
ccgcgaacgagggaugcacac

SEQ ID NO: 373375 - RNA, 16 nt, Molluscum contagiosum virus
ccgcgaacugcaacgu

SEQ ID NO: 373376 - RNA, 22 nt, Molluscum contagiosum virus
ccgcgacaggggccacaagcac

SEQ ID NO: 373377 - RNA, 14 nt, Molluscum contagiosum virus
ccgcgacgagcaga

SEQ ID NO: 373378 - RNA, 17 nt, Molluscum contagiosum virus
ccgcgcaaaagcacagc

SEQ ID NO: 373379 - RNA, 23 nt, Molluscum contagiosum virus
ccgcgcaauacgguggaggcgac

SEQ ID NO: 373380 - RNA, 14 nt, Molluscum contagiosum virus
ccgcgccagcaguc

SEQ ID NO: 373381 - RNA, 17 nt, Molluscum contagiosum virus
ccgcgcccgcgccgcaa

SEQ ID NO: 373382 - RNA, 14 nt, Molluscum contagiosum virus
ccgcgccgaaacac

SEQ ID NO: 373383 - RNA, 17 nt, Molluscum contagiosum virus
ccgcgccgaaacacggc

SEQ ID NO: 373384 - RNA, 15 nt, Molluscum contagiosum virus
ccgcgcgagugccag

SEQ ID NO: 373385 - RNA, 11 nt, Molluscum contagiosum virus
ccgcgcgucug

SEQ ID NO: 373386 - RNA, 22 nt, Molluscum contagiosum virus
ccgcgcguuuucccgaggcguc

SEQ ID NO: 373387 - RNA, 22 nt, Molluscum contagiosum virus
ccgcgcuaagaaccgucuuccc

SEQ ID NO: 373388 - RNA, 12 nt, Molluscum contagiosum virus
ccgcgcucgaca

SEQ ID NO: 373389 - RNA, 22 nt, Molluscum contagiosum virus
ccgcgcucgacgcgugcauggc

SEQ ID NO: 373390 - RNA, 14 nt, Molluscum contagiosum virus
ccgcggacucgugc

SEQ ID NO: 373391 - RNA, 20 nt, Molluscum contagiosum virus
ccgcggagggaggcucgagc

SEQ ID NO: 373392 - RNA, 17 nt, Molluscum contagiosum virus
ccgcggcugccucgugc

SEQ ID NO: 373393 - RNA, 12 nt, Molluscum contagiosum virus
ccgcgggcacau

SEQ ID NO: 373394 - RNA, 13 nt, Molluscum contagiosum virus
ccgcgggcgcacg

SEQ ID NO: 373395 - RNA, 14 nt, Molluscum contagiosum virus
ccgcgggcugcaag

SEQ ID NO: 373396 - RNA, 16 nt, Molluscum contagiosum virus
ccgcgucaagaucaac

SEQ ID NO: 373397 - RNA, 13 nt, Molluscum contagiosum virus
ccgcgucgcgcac

SEQ ID NO: 373398 - RNA, 12 nt, Molluscum contagiosum virus
ccgcgugcaccc

SEQ ID NO: 373399 - RNA, 13 nt, Molluscum contagiosum virus
ccgcgugcgccgc

SEQ ID NO: 373400 - RNA, 18 nt, Molluscum contagiosum virus
ccgcgugcucugcuccgc

SEQ ID NO: 373401 - RNA, 21 nt, Molluscum contagiosum virus
ccgcguucuucguggcgcugg

SEQ ID NO: 373402 - RNA, 19 nt, Molluscum contagiosum virus
ccgcuagagugcgcggaag

SEQ ID NO: 373403 - RNA, 13 nt, Molluscum contagiosum virus
ccgcucggcacaa

SEQ ID NO: 373404 - RNA, 14 nt, Molluscum contagiosum virus
ccgcucggcacaaa

SEQ ID NO: 373405 - RNA, 18 nt, Molluscum contagiosum virus
ccgcucggcacaaaaccu

SEQ ID NO: 373406 - RNA, 16 nt, Molluscum contagiosum virus
ccgcucggcacugcug

SEQ ID NO: 373407 - RNA, 17 nt, Molluscum contagiosum virus
ccgcuucgugcgcggag

SEQ ID NO: 373408 - RNA, 19 nt, Molluscum contagiosum virus
ccgcuuucgcaaacaagca

SEQ ID NO: 373409 - RNA, 20 nt, Molluscum contagiosum virus
ccggaaagauauacaccagg

SEQ ID NO: 373410 - RNA, 14 nt, Molluscum contagiosum virus
ccggagacaccagc

SEQ ID NO: 373411 - RNA, 15 nt, Molluscum contagiosum virus
ccggagacaccagcu

SEQ ID NO: 373412 - RNA, 18 nt, Molluscum contagiosum virus
ccggagccaagcaacggc

SEQ ID NO: 373413 - RNA, 16 nt, Molluscum contagiosum virus
ccggaugacggcaacg

SEQ ID NO: 373414 - RNA, 22 nt, Molluscum contagiosum virus
ccggcaacagcgcgacgccauc

SEQ ID NO: 373415 - RNA, 16 nt, Molluscum contagiosum virus
ccggcaacgcugccgc

SEQ ID NO: 373416 - RNA, 15 nt, Molluscum contagiosum virus
ccggcacgagcaguc

SEQ ID NO: 373417 - RNA, 21 nt, Molluscum contagiosum virus
ccuggaguaccggcucaagaa

SEQ ID NO: 373418 - RNA, 16 nt, Molluscum contagiosum virus
ccuggcuggcgcucaa

SEQ ID NO: 373419 - RNA, 22 nt, Molluscum contagiosum virus
ccugggcgagcagugugaugcc

SEQ ID NO: 373420 - RNA, 21 nt, Molluscum contagiosum virus
ccugggcgcgcacuaccgcaa

SEQ ID NO: 373421 - RNA, 15 nt, Molluscum contagiosum virus
ccuggggaaccgcug

SEQ ID NO: 373422 - RNA, 12 nt, Molluscum contagiosum virus
ccuggucuucgu

SEQ ID NO: 373423 - RNA, 14 nt, Molluscum contagiosum virus
ccuggugcacacac

SEQ ID NO: 373424 - RNA, 23 nt, Molluscum contagiosum virus
ccuggugcuggggcuagcgcugc

SEQ ID NO: 373425 - RNA, 22 nt, Molluscum contagiosum virus
ccuguaaauggaccacaagcag

SEQ ID NO: 373426 - RNA, 16 nt, Molluscum contagiosum virus
ccuguaguagcagcuu

SEQ ID NO: 373427 - RNA, 20 nt, Molluscum contagiosum virus
ccuguaugaucugcaguucc

SEQ ID NO: 373428 - RNA, 19 nt, Molluscum contagiosum virus
ccuguccgcgggcgcgggc

SEQ ID NO: 373429 - RNA, 13 nt, Molluscum contagiosum virus
ccugugccugcaa

SEQ ID NO: 373430 - RNA, 11 nt, Molluscum contagiosum virus
ccugugcugug

SEQ ID NO: 373431 - RNA, 17 nt, Molluscum contagiosum virus
ccuuaaauggauuucau

SEQ ID NO: 373432 - RNA, 21 nt, Molluscum contagiosum virus
ccuucaggaacuaccccgaga

SEQ ID NO: 373433 - RNA, 12 nt, Molluscum contagiosum virus
ccuuccacgaca

SEQ ID NO: 373434 - RNA, 14 nt, Molluscum contagiosum virus
ccuuccgcgcgggc

SEQ ID NO: 373435 - RNA, 23 nt, Molluscum contagiosum virus
ccuucgcuugucgugcuuccugc

SEQ ID NO: 373436 - RNA, 18 nt, Molluscum contagiosum virus
ccuucuccucgcucugcu

SEQ ID NO: 373437 - RNA, 15 nt, Molluscum contagiosum virus
ccuugaagggcacaa

SEQ ID NO: 373438 - RNA, 18 nt, Molluscum contagiosum virus
ccuugaugccgugguaca

SEQ ID NO: 373439 - RNA, 22 nt, Molluscum contagiosum virus
ccuugaugccgugguacacgua

SEQ ID NO: 373440 - RNA, 18 nt, Molluscum contagiosum virus
ccuugauuucgcgcagca

SEQ ID NO: 373441 - RNA, 18 nt, Molluscum contagiosum virus
ccuugccaagucggggcc

SEQ ID NO: 373442 - RNA, 22 nt, Molluscum contagiosum virus
ccuugcccgaggagagcggcgc

SEQ ID NO: 373443 - RNA, 20 nt, Molluscum contagiosum virus
ccuugccgaggaggugcucu

SEQ ID NO: 373444 - RNA, 16 nt, Molluscum contagiosum virus
ccuugccucuucacga

SEQ ID NO: 373445 - RNA, 17 nt, Molluscum contagiosum virus
ccuugcguacuuggaag

SEQ ID NO: 373446 - RNA, 16 nt, Molluscum contagiosum virus
ccuuggcgcugcacag

SEQ ID NO: 373447 - RNA, 17 nt, Molluscum contagiosum virus
ccuuggcggugcgcaaa

SEQ ID NO: 373448 - RNA, 18 nt, Molluscum contagiosum virus
ccuuggcggugcgcaaag

SEQ ID NO: 373449 - RNA, 15 nt, Molluscum contagiosum virus
ccuuuacugcaagau

SEQ ID NO: 373450 - RNA, 21 nt, Molluscum contagiosum virus
ccuuuagaggggcaacaugcg

SEQ ID NO: 373451 - RNA, 23 nt, Molluscum contagiosum virus
ccuuuuccacgcgggaugacugu

SEQ ID NO: 373452 - RNA, 15 nt, Molluscum contagiosum virus
cgaaaacuguuccca

SEQ ID NO: 373453 - RNA, 21 nt, Molluscum contagiosum virus
cgaaacuggacugagccgcaa

SEQ ID NO: 373454 - RNA, 17 nt, Molluscum contagiosum virus
cgaacacggcgcggauc

SEQ ID NO: 373455 - RNA, 18 nt, Molluscum contagiosum virus
cgaacauguccaaggagc

SEQ ID NO: 373456 - RNA, 23 nt, Molluscum contagiosum virus
cgaacgagagacacgcacacucg

SEQ ID NO: 373457 - RNA, 23 nt, Molluscum contagiosum virus
cgaacgagggacacgcacuugcg

SEQ ID NO: 373458 - RNA, 23 nt, Molluscum contagiosum virus
cgaacgagggaugcacacacucg

SEQ ID NO: 373459 - RNA, 19 nt, Molluscum contagiosum virus
cgaacggaacacagugcgu

SEQ ID NO: 373460 - RNA, 18 nt, Molluscum contagiosum virus
cgaacugcaacgugagua

SEQ ID NO: 373461 - RNA, 15 nt, Molluscum contagiosum virus
cgaagaccaccagca

SEQ ID NO: 373462 - RNA, 18 nt, Molluscum contagiosum virus
cgaagacgagcgcgugcc

SEQ ID NO: 373463 - RNA, 18 nt, Molluscum contagiosum virus
cgaagagcgagaacacgg

SEQ ID NO: 373464 - RNA, 18 nt, Molluscum contagiosum virus
cgaagagggucgugcagg

SEQ ID NO: 373465 - RNA, 22 nt, Molluscum contagiosum virus
cgaagaguggcucacagccgug

SEQ ID NO: 373466 - RNA, 16 nt, Molluscum contagiosum virus
cgaagcccagcuucag

SEQ ID NO: 373467 - RNA, 17 nt, Molluscum contagiosum virus
cgaagccguagucuuuc

SEQ ID NO: 373468 - RNA, 18 nt, Molluscum contagiosum virus
cgaagcugcgcuugcgcg

SEQ ID NO: 373469 - RNA, 17 nt, Molluscum contagiosum virus
cgaaggucaucaccagc

SEQ ID NO: 373470 - RNA, 13 nt, Molluscum contagiosum virus
cgacaacucgcgc

SEQ ID NO: 373471 - RNA, 18 nt, Molluscum contagiosum virus
cgacaaggaggcuuucuu

SEQ ID NO: 373472 - RNA, 18 nt, Molluscum contagiosum virus
cgacaauacggugcagcc

SEQ ID NO: 373473 - RNA, 14 nt, Molluscum contagiosum virus
cgacagcgugcgcg

SEQ ID NO: 373474 - RNA, 23 nt, Molluscum contagiosum virus
cgacauccacaugaccaagcaca

SEQ ID NO: 373475 - RNA, 16 nt, Molluscum contagiosum virus
cgacauguacauagcc

SEQ ID NO: 373476 - RNA, 15 nt, Molluscum contagiosum virus
cgaccacgcuggcac

SEQ ID NO: 373477 - RNA, 15 nt, Molluscum contagiosum virus
cgaccagcugguccu

SEQ ID NO: 373478 - RNA, 18 nt, Molluscum contagiosum virus
cgacgacguugugcuccu

SEQ ID NO: 373479 - RNA, 18 nt, Molluscum contagiosum virus
cgacgagcacgagcauuc

SEQ ID NO: 373480 - RNA, 22 nt, Molluscum contagiosum virus
cgacgccgccaaugcugccgug

SEQ ID NO: 373481 - RNA, 22 nt, Molluscum contagiosum virus
cgacgcgcgcggcaagcagcgu

SEQ ID NO: 373482 - RNA, 14 nt, Molluscum contagiosum virus
cgacgcugccuagg

SEQ ID NO: 373483 - RNA, 22 nt, Molluscum contagiosum virus
cgacguaaugauugucaagcac

SEQ ID NO: 373484 - RNA, 13 nt, Molluscum contagiosum virus
cgacuaucaggcg

SEQ ID NO: 373485 - RNA, 14 nt, Molluscum contagiosum virus
cgacucgcugccag

SEQ ID NO: 373486 - RNA, 19 nt, Molluscum contagiosum virus
cgacucggaugcgcugccg

SEQ ID NO: 373487 - RNA, 19 nt, Molluscum contagiosum virus
cgacucggugcucaugcgc

SEQ ID NO: 373488 - RNA, 15 nt, Molluscum contagiosum virus
cgacucuggcuucuc

SEQ ID NO: 373489 - RNA, 18 nt, Molluscum contagiosum virus
cgacuguauccuuggcaa

SEQ ID NO: 373490 - RNA, 14 nt, Molluscum contagiosum virus
cgacuuggggcucg

SEQ ID NO: 373491 - RNA, 18 nt, Molluscum contagiosum virus
cgacuuuucgcgccgcgg

SEQ ID NO: 373492 - RNA, 19 nt, Molluscum contagiosum virus
cgagaaaaagcugucgcgc

SEQ ID NO: 373493 - RNA, 14 nt, Molluscum contagiosum virus
cgagacacgcgagc

SEQ ID NO: 373494 - RNA, 19 nt, Molluscum contagiosum virus
cgagacggaaauguuguuu

SEQ ID NO: 373495 - RNA, 22 nt, Molluscum contagiosum virus
cgagacugacgccgauguccug

SEQ ID NO: 373496 - RNA, 15 nt, Molluscum contagiosum virus
cgagacugagugcug

SEQ ID NO: 373497 - RNA, 22 nt, Molluscum contagiosum virus
cgagacugcuacgucgcggcgc

SEQ ID NO: 373498 - RNA, 13 nt, Molluscum contagiosum virus
cgagagacaacaa

SEQ ID NO: 373499 - RNA, 21 nt, Molluscum contagiosum virus
cgagaugcgagcgcgucugcu

SEQ ID NO: 373500 - RNA, 20 nt, Molluscum contagiosum virus
cgagcacagcgcgcggaagc

SEQ ID NO: 373501 - RNA, 20 nt, Molluscum contagiosum virus
cgagcacccccgcugcacgc

SEQ ID NO: 373502 - RNA, 16 nt, Molluscum contagiosum virus
cgagcaccugucgcgc

SEQ ID NO: 373503 - RNA, 17 nt, Molluscum contagiosum virus
cgagcacgccuccaaga

SEQ ID NO: 373504 - RNA, 18 nt, Molluscum contagiosum virus
cgagcacgccuccaagaa

SEQ ID NO: 373505 - RNA, 19 nt, Molluscum contagiosum virus
cgagcacgccuccaagaag

SEQ ID NO: 373506 - RNA, 16 nt, Molluscum contagiosum virus
cgagcacgccugcacg

SEQ ID NO: 373507 - RNA, 14 nt, Molluscum contagiosum virus
cgagcacugcgcgc

SEQ ID NO: 373508 - RNA, 17 nt, Molluscum contagiosum virus
cgagcacugcgcgcgcg

SEQ ID NO: 373509 - RNA, 19 nt, Molluscum contagiosum virus
cgagcagagccgggacgcg

SEQ ID NO: 373510 - RNA, 24 nt, Molluscum contagiosum virus
cgagcagagccgggacgcggaugc

SEQ ID NO: 373511 - RNA, 18 nt, Molluscum contagiosum virus
cgagcagaggcaugcuuu

SEQ ID NO: 373512 - RNA, 19 nt, Molluscum contagiosum virus
cgagcagauucacgagcuc

SEQ ID NO: 373513 - RNA, 15 nt, Molluscum contagiosum virus
cgagcaucugcgcgu

SEQ ID NO: 373514 - RNA, 13 nt, Molluscum contagiosum virus
cgagcccaccgau

SEQ ID NO: 373515 - RNA, 23 nt, Molluscum contagiosum virus
cgagcccgcccccgagcgcuucu

SEQ ID NO: 373516 - RNA, 16 nt, Molluscum contagiosum virus
cgagcccgcggcgcgc

SEQ ID NO: 373517 - RNA, 15 nt, Molluscum contagiosum virus
cgagccgcacaaaga

SEQ ID NO: 373518 - RNA, 22 nt, Molluscum contagiosum virus
cgagcgccacuagcaaggcgcc

SEQ ID NO: 373519 - RNA, 17 nt, Molluscum contagiosum virus
cgcagucccagcaccgc

SEQ ID NO: 373520 - RNA, 18 nt, Molluscum contagiosum virus
cgcagugcucgcacacgu

SEQ ID NO: 373521 - RNA, 12 nt, Molluscum contagiosum virus
cgcagugcucuu

SEQ ID NO: 373522 - RNA, 14 nt, Molluscum contagiosum virus
cgcaucugccgcga

SEQ ID NO: 373523 - RNA, 20 nt, Molluscum contagiosum virus
cgcaugcacagccgcuuucu

SEQ ID NO: 373524 - RNA, 22 nt, Molluscum contagiosum virus
cgcaugguugugcuuguucucu

SEQ ID NO: 373525 - RNA, 21 nt, Molluscum contagiosum virus
cgcauucccguggaccucauc

SEQ ID NO: 373526 - RNA, 17 nt, Molluscum contagiosum virus
cgccaacacguuuucuu

SEQ ID NO: 373527 - RNA, 14 nt, Molluscum contagiosum virus
cgccaaccgcgagc

SEQ ID NO: 373528 - RNA, 17 nt, Molluscum contagiosum virus
cgccaagcgcuugcucu

SEQ ID NO: 373529 - RNA, 18 nt, Molluscum contagiosum virus
cgccaccucggcguuggc

SEQ ID NO: 373530 - RNA, 21 nt, Molluscum contagiosum virus
cgccagaaaacaggcacuucg

SEQ ID NO: 373531 - RNA, 17 nt, Molluscum contagiosum virus
cgccagaacauugccac

SEQ ID NO: 373532 - RNA, 18 nt, Molluscum contagiosum virus
cgccagcuaagccggagc

SEQ ID NO: 373533 - RNA, 19 nt, Molluscum contagiosum virus
cgccagcuccgcgcggcgc

SEQ ID NO: 373534 - RNA, 22 nt, Molluscum contagiosum virus
cgccaggaaaacggaaacagca

SEQ ID NO: 373535 - RNA, 20 nt, Molluscum contagiosum virus
cgccagggcggagccccgag

SEQ ID NO: 373536 - RNA, 19 nt, Molluscum contagiosum virus
cgccagugcgugcacuguc

SEQ ID NO: 373537 - RNA, 23 nt, Molluscum contagiosum virus
cgccaguggccagcgcgcggcgc

SEQ ID NO: 373538 - RNA, 19 nt, Molluscum contagiosum virus
cgccaucgcgcgugacuac

SEQ ID NO: 373539 - RNA, 16 nt, Molluscum contagiosum virus
cgccaugccaacgcac

SEQ ID NO: 373540 - RNA, 15 nt, Molluscum contagiosum virus
cgccaugcugcgcga

SEQ ID NO: 373541 - RNA, 23 nt, Molluscum contagiosum virus
cgccauuuccgagcgcgcacgag

SEQ ID NO: 373542 - RNA, 13 nt, Molluscum contagiosum virus
cgcccaccagcag

SEQ ID NO: 373543 - RNA, 17 nt, Molluscum contagiosum virus
cgcccagcaccuggaac

SEQ ID NO: 373544 - RNA, 13 nt, Molluscum contagiosum virus
cgcccccgcaaaa

SEQ ID NO: 373545 - RNA, 17 nt, Molluscum contagiosum virus
cgcccccguccgugcca

SEQ ID NO: 373546 - RNA, 18 nt, Molluscum contagiosum virus
cgcccgcagcgcgcaaaa

SEQ ID NO: 373547 - RNA, 22 nt, Molluscum contagiosum virus
cgcccgcgaaaaacgugacuga

SEQ ID NO: 373548 - RNA, 17 nt, Molluscum contagiosum virus
cgcccgugcucgcgggc

SEQ ID NO: 373549 - RNA, 18 nt, Molluscum contagiosum virus
cgcccgugucgggcugca

SEQ ID NO: 373550 - RNA, 18 nt, Molluscum contagiosum virus
cgcccguguucgcggagc

SEQ ID NO: 373551 - RNA, 22 nt, Molluscum contagiosum virus
cgcccuuauacaaaguugacca

SEQ ID NO: 373552 - RNA, 13 nt, Molluscum contagiosum virus
cgcccuuguggac

SEQ ID NO: 373553 - RNA, 16 nt, Molluscum contagiosum virus
cgccgacaacagugaa

SEQ ID NO: 373554 - RNA, 19 nt, Molluscum contagiosum virus
cgccgagcgcaaaugcauu

SEQ ID NO: 373555 - RNA, 16 nt, Molluscum contagiosum virus
cgccgagcgggcaaug

SEQ ID NO: 373556 - RNA, 23 nt, Molluscum contagiosum virus
cgccgaucuccacgucgaucagc

SEQ ID NO: 373557 - RNA, 12 nt, Molluscum contagiosum virus
cgccgaugcagu

SEQ ID NO: 373558 - RNA, 14 nt, Molluscum contagiosum virus
cgccgaugcagugc

SEQ ID NO: 373559 - RNA, 15 nt, Molluscum contagiosum virus
cgccgcugccgcgcg

SEQ ID NO: 373560 - RNA, 15 nt, Molluscum contagiosum virus
cgccgcuucuugacg

SEQ ID NO: 373561 - RNA, 15 nt, Molluscum contagiosum virus
cgccgggcaccggcg

SEQ ID NO: 373562 - RNA, 21 nt, Molluscum contagiosum virus
cgccgguagcgucugggugcc

SEQ ID NO: 373563 - RNA, 19 nt, Molluscum contagiosum virus
cgccgugggcagcuucugc

SEQ ID NO: 373564 - RNA, 18 nt, Molluscum contagiosum virus
cgccgugugcgugacacg

SEQ ID NO: 373565 - RNA, 12 nt, Molluscum contagiosum virus
cgccuccaagaa

SEQ ID NO: 373566 - RNA, 13 nt, Molluscum contagiosum virus
cgccuccaagaag

SEQ ID NO: 373567 - RNA, 14 nt, Molluscum contagiosum virus
cgccuccgggcgca

SEQ ID NO: 373568 - RNA, 22 nt, Molluscum contagiosum virus
cgccuccgguacguacagugcg

SEQ ID NO: 373569 - RNA, 19 nt, Molluscum contagiosum virus
cgccucgagcgcgcuggac

SEQ ID NO: 373570 - RNA, 23 nt, Molluscum contagiosum virus
cgccucgggaaaacgcgcggcag

SEQ ID NO: 373571 - RNA, 14 nt, Molluscum contagiosum virus
cgccugcacuacug

SEQ ID NO: 373572 - RNA, 13 nt, Molluscum contagiosum virus
cgccuuccugcug

SEQ ID NO: 373573 - RNA, 15 nt, Molluscum contagiosum virus
cgccuuccugcuggc

SEQ ID NO: 373574 - RNA, 15 nt, Molluscum contagiosum virus
cgccuucguggagcc

SEQ ID NO: 373575 - RNA, 20 nt, Molluscum contagiosum virus
cgccuuuccggccuguaaau

SEQ ID NO: 373576 - RNA, 13 nt, Molluscum contagiosum virus
cgccuuuguggac

SEQ ID NO: 373577 - RNA, 18 nt, Molluscum contagiosum virus
cgcgaaaaacgugacuga

SEQ ID NO: 373578 - RNA, 15 nt, Molluscum contagiosum virus
cgcgaaagaacacgg

SEQ ID NO: 373579 - RNA, 20 nt, Molluscum contagiosum virus
cgcgaacgagggaugcacac

SEQ ID NO: 373580 - RNA, 16 nt, Molluscum contagiosum virus
cgcgacaggggccaca

SEQ ID NO: 373581 - RNA, 20 nt, Molluscum contagiosum virus
cgcgacaggggccacaagca

SEQ ID NO: 373582 - RNA, 23 nt, Molluscum contagiosum virus
cgcgacaggggccacaagcacgc

SEQ ID NO: 373583 - RNA, 22 nt, Molluscum contagiosum virus
cgcgacggcgugcuggccagcc

SEQ ID NO: 373584 - RNA, 15 nt, Molluscum contagiosum virus
cgcgacgggaaccgu

SEQ ID NO: 373585 - RNA, 16 nt, Molluscum contagiosum virus
cgcgagacuugugccc

SEQ ID NO: 373586 - RNA, 18 nt, Molluscum contagiosum virus
cgcgagcacgccugcacg

SEQ ID NO: 373587 - RNA, 13 nt, Molluscum contagiosum virus
cgcgagcgcgggc

SEQ ID NO: 373588 - RNA, 14 nt, Molluscum contagiosum virus
cgcgagugugcaug

SEQ ID NO: 373589 - RNA, 14 nt, Molluscum contagiosum virus
cgcgagugugcgug

SEQ ID NO: 373590 - RNA, 16 nt, Molluscum contagiosum virus
cgcgagugugugcauc

SEQ ID NO: 373591 - RNA, 20 nt, Molluscum contagiosum virus
cgcgaguugcgucucccgcg

SEQ ID NO: 373592 - RNA, 15 nt, Molluscum contagiosum virus
cgcgcaacacugcag

SEQ ID NO: 373593 - RNA, 18 nt, Molluscum contagiosum virus
cgcgcaaccagcuggcgc

SEQ ID NO: 373594 - RNA, 23 nt, Molluscum contagiosum virus
cgcgcaaggccgcgcccaagaag

SEQ ID NO: 373595 - RNA, 15 nt, Molluscum contagiosum virus
cgcgcaauagcgccc

SEQ ID NO: 373596 - RNA, 17 nt, Molluscum contagiosum virus
cgcgcacagaaagccaa

SEQ ID NO: 373597 - RNA, 20 nt, Molluscum contagiosum virus
cgcgcacaucggcacugcuc

SEQ ID NO: 373598 - RNA, 14 nt, Molluscum contagiosum virus
cgcgcaccuacaug

SEQ ID NO: 373599 - RNA, 15 nt, Molluscum contagiosum virus
cgcgcacgcgcgagc

SEQ ID NO: 373600 - RNA, 13 nt, Molluscum contagiosum virus
cgcgcacgcgcgc

SEQ ID NO: 373601 - RNA, 13 nt, Molluscum contagiosum virus
cgcgcacgcggcg

SEQ ID NO: 373602 - RNA, 16 nt, Molluscum contagiosum virus
cgcgcacgcugcgcac

SEQ ID NO: 373603 - RNA, 14 nt, Molluscum contagiosum virus
cgcgcagcaccgcg

SEQ ID NO: 373604 - RNA, 13 nt, Molluscum contagiosum virus
cgcgcagcgugcc

SEQ ID NO: 373605 - RNA, 19 nt, Molluscum contagiosum virus
cgcgcauacgcgccgcgcg

SEQ ID NO: 373606 - RNA, 20 nt, Molluscum contagiosum virus
cgcgcauacgcgccgcgcgc

SEQ ID NO: 373607 - RNA, 16 nt, Molluscum contagiosum virus
cgcgcaugaggcggcg

SEQ ID NO: 373608 - RNA, 14 nt, Molluscum contagiosum virus
cgcgcaugccuugc

SEQ ID NO: 373609 - RNA, 15 nt, Molluscum contagiosum virus
cgcgcaugcucgcgc

SEQ ID NO: 373610 - RNA, 14 nt, Molluscum contagiosum virus
cgcgccagcagcgc

SEQ ID NO: 373611 - RNA, 23 nt, Molluscum contagiosum virus
cgcgccagggcggagccccgaga

SEQ ID NO: 373612 - RNA, 14 nt, Molluscum contagiosum virus
cgcgccagugcgug

SEQ ID NO: 373613 - RNA, 19 nt, Molluscum contagiosum virus
cgcgcccaaggccgcgggc

SEQ ID NO: 373614 - RNA, 14 nt, Molluscum contagiosum virus
cgcgcccaccagca

SEQ ID NO: 373615 - RNA, 15 nt, Molluscum contagiosum virus
cgcgcccgccgccca

SEQ ID NO: 373616 - RNA, 15 nt, Molluscum contagiosum virus
cgcgcccgcugcgcg

SEQ ID NO: 373617 - RNA, 22 nt, Molluscum contagiosum virus
cgcgcccugcacgaccgcggac

SEQ ID NO: 373618 - RNA, 20 nt, Molluscum contagiosum virus
cgcgcccugcgcgcgagagc

SEQ ID NO: 373619 - RNA, 21 nt, Molluscum contagiosum virus
cgcgccgaggacuaccuggcg

SEQ ID NO: 373620 - RNA, 12 nt, Molluscum contagiosum virus
cgcgccgcggcg

SEQ ID NO: 373621 - RNA, 18 nt, Molluscum contagiosum virus
cgcgccgucucgcggggc

SEQ ID NO: 373622 - RNA, 15 nt, Molluscum contagiosum virus
cgcuucgauaccgac

SEQ ID NO: 373623 - RNA, 22 nt, Molluscum contagiosum virus
cgcuucgccgcgcgcgccagcu

SEQ ID NO: 373624 - RNA, 20 nt, Molluscum contagiosum virus
cgcuucgugcgcggagacuu

SEQ ID NO: 373625 - RNA, 22 nt, Molluscum contagiosum virus
cgcuucuuuacgggcgccagcu

SEQ ID NO: 373626 - RNA, 17 nt, Molluscum contagiosum virus
cgcuugcgcaugugauu

SEQ ID NO: 373627 - RNA, 16 nt, Molluscum contagiosum virus
cgcuugcuuccaggcg

SEQ ID NO: 373628 - RNA, 16 nt, Molluscum contagiosum virus
cgcuugggcacugcua

SEQ ID NO: 373629 - RNA, 16 nt, Molluscum contagiosum virus
cgcuuguccucuuggc

SEQ ID NO: 373630 - RNA, 14 nt, Molluscum contagiosum virus
cggaaacaagcaca

SEQ ID NO: 373631 - RNA, 14 nt, Molluscum contagiosum virus
cggaaagagcgcgc

SEQ ID NO: 373632 - RNA, 19 nt, Molluscum contagiosum virus
cggaaagauauacaccagg

SEQ ID NO: 373633 - RNA, 13 nt, Molluscum contagiosum virus
cggaacuuagccc

SEQ ID NO: 373634 - RNA, 21 nt, Molluscum contagiosum virus
cggaagcgcccgugaugcacc

SEQ ID NO: 373635 - RNA, 17 nt, Molluscum contagiosum virus
cggaagcucacaucugu

SEQ ID NO: 373636 - RNA, 19 nt, Molluscum contagiosum virus
cggaagcuccugcugguuc

SEQ ID NO: 373637 - RNA, 16 nt, Molluscum contagiosum virus
cggaauguagccuuug

SEQ ID NO: 373638 - RNA, 22 nt, Molluscum contagiosum virus
cggacacguuccagagcacugc

SEQ ID NO: 373639 - RNA, 21 nt, Molluscum contagiosum virus
cggacagcaccccgaagacgu

SEQ ID NO: 373640 - RNA, 20 nt, Molluscum contagiosum virus
cggacagugccuccgcggac

SEQ ID NO: 373641 - RNA, 20 nt, Molluscum contagiosum virus
cggagaaaaggaagcuugcc

SEQ ID NO: 373642 - RNA, 18 nt, Molluscum contagiosum virus
cggagaaagacaaagacc

SEQ ID NO: 373643 - RNA, 14 nt, Molluscum contagiosum virus
cggagaagugcgca

SEQ ID NO: 373644 - RNA, 15 nt, Molluscum contagiosum virus
cggagaagugcuccg

SEQ ID NO: 373645 - RNA, 14 nt, Molluscum contagiosum virus
cggagacaccagcu

SEQ ID NO: 373646 - RNA, 21 nt, Molluscum contagiosum virus
cggagagaacaacgaaaacug

SEQ ID NO: 373647 - RNA, 22 nt, Molluscum contagiosum virus
cggagagcccggacacguagcc

SEQ ID NO: 373648 - RNA, 14 nt, Molluscum contagiosum virus
cggagccgcggcag

SEQ ID NO: 373649 - RNA, 15 nt, Molluscum contagiosum virus
cggagcgacauagcg

SEQ ID NO: 373650 - RNA, 17 nt, Molluscum contagiosum virus
cggagcgcuucuagcuc

SEQ ID NO: 373651 - RNA, 18 nt, Molluscum contagiosum virus
cggagcgcuucuagcucg

SEQ ID NO: 373652 - RNA, 13 nt, Molluscum contagiosum virus
cggaggcacgggc

SEQ ID NO: 373653 - RNA, 18 nt, Molluscum contagiosum virus
cggaggccgcucccgcga

SEQ ID NO: 373654 - RNA, 22 nt, Molluscum contagiosum virus
cggaggcgcagacguaugcgua

SEQ ID NO: 373655 - RNA, 16 nt, Molluscum contagiosum virus
cggaggcguaugagua

SEQ ID NO: 373656 - RNA, 16 nt, Molluscum contagiosum virus
cggaggugguggccaa

SEQ ID NO: 373657 - RNA, 17 nt, Molluscum contagiosum virus
cggaguuuguagcucua

SEQ ID NO: 373658 - RNA, 17 nt, Molluscum contagiosum virus
cggaugaacagcuucac

SEQ ID NO: 373659 - RNA, 14 nt, Molluscum contagiosum virus
cggcaaaggcccgc

SEQ ID NO: 373660 - RNA, 18 nt, Molluscum contagiosum virus
cggcaaaggcccgcgagc

SEQ ID NO: 373661 - RNA, 15 nt, Molluscum contagiosum virus
cggcaacgcugccgc

SEQ ID NO: 373662 - RNA, 14 nt, Molluscum contagiosum virus
cggcaagccgagcc

SEQ ID NO: 373663 - RNA, 14 nt, Molluscum contagiosum virus
cggcacaaaaccuu

SEQ ID NO: 373664 - RNA, 11 nt, Molluscum contagiosum virus
cggcacaagcc

SEQ ID NO: 373665 - RNA, 16 nt, Molluscum contagiosum virus
cggcacacaugcuagc

SEQ ID NO: 373666 - RNA, 15 nt, Molluscum contagiosum virus
cggcaccacgugcgc

SEQ ID NO: 373667 - RNA, 14 nt, Molluscum contagiosum virus
cggcacccgugcgc

SEQ ID NO: 373668 - RNA, 22 nt, Molluscum contagiosum virus
cggcacgggcucgagcucuucu

SEQ ID NO: 373669 - RNA, 21 nt, Molluscum contagiosum virus
cggcacgugcguacgcggcgc

SEQ ID NO: 373670 - RNA, 15 nt, Molluscum contagiosum virus
cggcacugcuggcgc

SEQ ID NO: 373671 - RNA, 22 nt, Molluscum contagiosum virus
cggcagacaacaccagcgugcc

SEQ ID NO: 373672 - RNA, 14 nt, Molluscum contagiosum virus
cggcagacgccagc

SEQ ID NO: 373673 - RNA, 16 nt, Molluscum contagiosum virus
cggcagacgccagcga

SEQ ID NO: 373674 - RNA, 17 nt, Molluscum contagiosum virus
cggcagcgacuacgcgc

SEQ ID NO: 373675 - RNA, 13 nt, Molluscum contagiosum virus
cggcagcgccagc

SEQ ID NO: 373676 - RNA, 17 nt, Molluscum contagiosum virus
cggcagcucugcagcgc

SEQ ID NO: 373677 - RNA, 17 nt, Molluscum contagiosum virus
cggcaggcgcugcgcgg

SEQ ID NO: 373678 - RNA, 22 nt, Molluscum contagiosum virus
cggcaggcucccgcugucgcgc

SEQ ID NO: 373679 - RNA, 22 nt, Molluscum contagiosum virus
cggcagguuugcacccgcgcag

SEQ ID NO: 373680 - RNA, 20 nt, Molluscum contagiosum virus
cggccaugcuccugaucugc

SEQ ID NO: 373681 - RNA, 12 nt, Molluscum contagiosum virus
cggcccgcggac

SEQ ID NO: 373682 - RNA, 13 nt, Molluscum contagiosum virus
cggcccgcggcgc

SEQ ID NO: 373683 - RNA, 12 nt, Molluscum contagiosum virus
cggcccgcgggc

SEQ ID NO: 373684 - RNA, 19 nt, Molluscum contagiosum virus
cggcccgcgggcugcaaga

SEQ ID NO: 373685 - RNA, 18 nt, Molluscum contagiosum virus
cggccgccgugugcacau

SEQ ID NO: 373686 - RNA, 17 nt, Molluscum contagiosum virus
cggccuagagcuggcac

SEQ ID NO: 373687 - RNA, 19 nt, Molluscum contagiosum virus
cggcgauguacgcgugcag

SEQ ID NO: 373688 - RNA, 13 nt, Molluscum contagiosum virus
cggcgcaagcacc

SEQ ID NO: 373689 - RNA, 18 nt, Molluscum contagiosum virus
cggcgcaagcaccggcag

SEQ ID NO: 373690 - RNA, 15 nt, Molluscum contagiosum virus
cggcgcaaucucgcg

SEQ ID NO: 373691 - RNA, 15 nt, Molluscum contagiosum virus
cggcgccaccggcag

SEQ ID NO: 373692 - RNA, 14 nt, Molluscum contagiosum virus
cggcgccacgagcg

SEQ ID NO: 373693 - RNA, 19 nt, Molluscum contagiosum virus
cggcgccccuccuaucuca

SEQ ID NO: 373694 - RNA, 17 nt, Molluscum contagiosum virus
cggcgccgcagcuuuuu

SEQ ID NO: 373695 - RNA, 16 nt, Molluscum contagiosum virus
cggcgcgagaugcucg

SEQ ID NO: 373696 - RNA, 16 nt, Molluscum contagiosum virus
cggcgcgcgcgcgcag

SEQ ID NO: 373697 - RNA, 14 nt, Molluscum contagiosum virus
cggcgcggcuagca

SEQ ID NO: 373698 - RNA, 15 nt, Molluscum contagiosum virus
cggcgcgggcaagca

SEQ ID NO: 373699 - RNA, 19 nt, Molluscum contagiosum virus
cggcgcguuucggccugca

SEQ ID NO: 373700 - RNA, 22 nt, Molluscum contagiosum virus
cggcgcucgccuuuccccggcg

SEQ ID NO: 373701 - RNA, 15 nt, Molluscum contagiosum virus
cggcgcucugccacc

SEQ ID NO: 373702 - RNA, 14 nt, Molluscum contagiosum virus
cggcggggcugcug

SEQ ID NO: 373703 - RNA, 19 nt, Molluscum contagiosum virus
cggcggugcccgccaagag

SEQ ID NO: 373704 - RNA, 19 nt, Molluscum contagiosum virus
cggcguccgcggcacgcga

SEQ ID NO: 373705 - RNA, 12 nt, Molluscum contagiosum virus
cggcguggugcu

SEQ ID NO: 373706 - RNA, 14 nt, Molluscum contagiosum virus
cggcguucgcggag

SEQ ID NO: 373707 - RNA, 15 nt, Molluscum contagiosum virus
cggcguuggcuuucu

SEQ ID NO: 373708 - RNA, 17 nt, Molluscum contagiosum virus
cggcguuucucagguac

SEQ ID NO: 373709 - RNA, 15 nt, Molluscum contagiosum virus
cggcuacgaugaacu

SEQ ID NO: 373710 - RNA, 15 nt, Molluscum contagiosum virus
cggcuaggcgcggcg

SEQ ID NO: 373711 - RNA, 16 nt, Molluscum contagiosum virus
cggcucagcguggagc

SEQ ID NO: 373712 - RNA, 15 nt, Molluscum contagiosum virus
cggcucugcguugcg

SEQ ID NO: 373713 - RNA, 22 nt, Molluscum contagiosum virus
cggcuguaaugugcuggucaag

SEQ ID NO: 373714 - RNA, 21 nt, Molluscum contagiosum virus
cggcuugccgcucggcacaaa

SEQ ID NO: 373715 - RNA, 15 nt, Molluscum contagiosum virus
cgggaagcacagucc

SEQ ID NO: 373716 - RNA, 17 nt, Molluscum contagiosum virus
cgggaagcacguagcuc

SEQ ID NO: 373717 - RNA, 20 nt, Molluscum contagiosum virus
cgggaauaccggagacacca

SEQ ID NO: 373718 - RNA, 21 nt, Molluscum contagiosum virus
cgggaauaccggagacaccag

SEQ ID NO: 373719 - RNA, 17 nt, Molluscum contagiosum virus
cgggacgcggaugccac

SEQ ID NO: 373720 - RNA, 13 nt, Molluscum contagiosum virus
cgggacgcgugcc

SEQ ID NO: 373721 - RNA, 21 nt, Molluscum contagiosum virus
cgggagaacucuacacgugga

SEQ ID NO: 373722 - RNA, 17 nt, Molluscum contagiosum virus
cgggagcaacgaaccgu

SEQ ID NO: 373723 - RNA, 21 nt, Molluscum contagiosum virus
cgggauggucucgcugcuggg

SEQ ID NO: 373724 - RNA, 23 nt, Molluscum contagiosum virus
cgggcacgccgcagcgcuggagc

SEQ ID NO: 373725 - RNA, 18 nt, Molluscum contagiosum virus
cguguccacuccuggaac

SEQ ID NO: 373726 - RNA, 18 nt, Molluscum contagiosum virus
cguguccuacacgccgcu

SEQ ID NO: 373727 - RNA, 21 nt, Molluscum contagiosum virus
cgugugccgccgcacuaugga

SEQ ID NO: 373728 - RNA, 16 nt, Molluscum contagiosum virus
cgugugcguacuggga

SEQ ID NO: 373729 - RNA, 21 nt, Molluscum contagiosum virus
cgugugcguacugggagcuuu

SEQ ID NO: 373730 - RNA, 20 nt, Molluscum contagiosum virus
cguucacuugcgcgcgugcc

SEQ ID NO: 373731 - RNA, 14 nt, Molluscum contagiosum virus
cguuccaaaagaca

SEQ ID NO: 373732 - RNA, 17 nt, Molluscum contagiosum virus
cguugccggagcugaac

SEQ ID NO: 373733 - RNA, 14 nt, Molluscum contagiosum virus
cguuggacaucagc

SEQ ID NO: 373734 - RNA, 19 nt, Molluscum contagiosum virus
cguugucuugaugcuguua

SEQ ID NO: 373735 - RNA, 13 nt, Molluscum contagiosum virus
cguugugcuccuu

SEQ ID NO: 373736 - RNA, 22 nt, Molluscum contagiosum virus
cguuucucagguacguguccac

SEQ ID NO: 373737 - RNA, 13 nt, Molluscum contagiosum virus
cguuuugcacuug

SEQ ID NO: 373738 - RNA, 15 nt, Molluscum contagiosum virus
cuaaauagcauguca

SEQ ID NO: 373739 - RNA, 17 nt, Molluscum contagiosum virus
cuaaauaugaaccacuu

SEQ ID NO: 373740 - RNA, 15 nt, Molluscum contagiosum virus
cuaagcuaaaagagc

SEQ ID NO: 373741 - RNA, 14 nt, Molluscum contagiosum virus
cuaaucagcgccau

SEQ ID NO: 373742 - RNA, 23 nt, Molluscum contagiosum virus
cuaaucagcgccaucaauucaaa

SEQ ID NO: 373743 - RNA, 19 nt, Molluscum contagiosum virus
cuacaagcggugcagcuac

SEQ ID NO: 373744 - RNA, 23 nt, Molluscum contagiosum virus
cuacaagcggugcagcuacugcg

SEQ ID NO: 373745 - RNA, 16 nt, Molluscum contagiosum virus
cuacaaggaggucaug

SEQ ID NO: 373746 - RNA, 13 nt, Molluscum contagiosum virus
cuacaagugcauc

SEQ ID NO: 373747 - RNA, 15 nt, Molluscum contagiosum virus
cuacaccagcuggac

SEQ ID NO: 373748 - RNA, 17 nt, Molluscum contagiosum virus
cuacacgacggacuucu

SEQ ID NO: 373749 - RNA, 18 nt, Molluscum contagiosum virus
cuacacgcacgaccucac

SEQ ID NO: 373750 - RNA, 14 nt, Molluscum contagiosum virus
cuacacguggaauu

SEQ ID NO: 373751 - RNA, 21 nt, Molluscum contagiosum virus
cuaccaacucugugaccugcg

SEQ ID NO: 373752 - RNA, 14 nt, Molluscum contagiosum virus
cuaccacagguuuc

SEQ ID NO: 373753 - RNA, 21 nt, Molluscum contagiosum virus
cuaccagcucuucguggccaa

SEQ ID NO: 373754 - RNA, 22 nt, Molluscum contagiosum virus
cuaccagcucuucguggccaaa

SEQ ID NO: 373755 - RNA, 21 nt, Molluscum contagiosum virus
cuaccgcgaccgggaguguca

SEQ ID NO: 373756 - RNA, 16 nt, Molluscum contagiosum virus
cuacgacgacaugcac

SEQ ID NO: 373757 - RNA, 23 nt, Molluscum contagiosum virus
cuacgacgcgcuggugaccuuca

SEQ ID NO: 373758 - RNA, 17 nt, Molluscum contagiosum virus
cuacgaggagcacggca

SEQ ID NO: 373759 - RNA, 12 nt, Molluscum contagiosum virus
cuacgcacuuca

SEQ ID NO: 373760 - RNA, 20 nt, Molluscum contagiosum virus
cuacgcgcgcguaacagcgc

SEQ ID NO: 373761 - RNA, 18 nt, Molluscum contagiosum virus
cuacgcgcgcgugcugcu

SEQ ID NO: 373762 - RNA, 14 nt, Molluscum contagiosum virus
cuacgcgcugcuag

SEQ ID NO: 373763 - RNA, 21 nt, Molluscum contagiosum virus
cuacggcgugcugugccugcg

SEQ ID NO: 373764 - RNA, 15 nt, Molluscum contagiosum virus
cuacgucaagcaggc

SEQ ID NO: 373765 - RNA, 14 nt, Molluscum contagiosum virus
cuacguggcgcgaa

SEQ ID NO: 373766 - RNA, 15 nt, Molluscum contagiosum virus
cuacuacguggugcg

SEQ ID NO: 373767 - RNA, 16 nt, Molluscum contagiosum virus
cuacugcgacauccac

SEQ ID NO: 373768 - RNA, 19 nt, Molluscum contagiosum virus
cuacuucacacgucuugca

SEQ ID NO: 373769 - RNA, 17 nt, Molluscum contagiosum virus
cuacuuccacgagcuga

SEQ ID NO: 373770 - RNA, 15 nt, Molluscum contagiosum virus
cuagcaacuugcucu

SEQ ID NO: 373771 - RNA, 16 nt, Molluscum contagiosum virus
cuagcacgcauguacg

SEQ ID NO: 373772 - RNA, 13 nt, Molluscum contagiosum virus
cuagcacgggcgg

SEQ ID NO: 373773 - RNA, 21 nt, Molluscum contagiosum virus
cuagcagcgugcgcaccagcu

SEQ ID NO: 373774 - RNA, 22 nt, Molluscum contagiosum virus
cuagcagcgugcgcaccagcug

SEQ ID NO: 373775 - RNA, 18 nt, Molluscum contagiosum virus
cuagccccagcaccaggu

SEQ ID NO: 373776 - RNA, 14 nt, Molluscum contagiosum virus
cuagcgcaggcagu

SEQ ID NO: 373777 - RNA, 23 nt, Molluscum contagiosum virus
cuagcguucccaagcaaagccuc

SEQ ID NO: 373778 - RNA, 14 nt, Molluscum contagiosum virus
cuagcuccacgugc

SEQ ID NO: 373779 - RNA, 22 nt, Molluscum contagiosum virus
cuagguccacauuucaaaaacg

SEQ ID NO: 373780 - RNA, 16 nt, Molluscum contagiosum virus
cuagugccauugugac

SEQ ID NO: 373781 - RNA, 17 nt, Molluscum contagiosum virus
cuaguucccauggaugc

SEQ ID NO: 373782 - RNA, 23 nt, Molluscum contagiosum virus
cuaguucgagaagacggggcgca

SEQ ID NO: 373783 - RNA, 14 nt, Molluscum contagiosum virus
cuaucgcaaucuga

SEQ ID NO: 373784 - RNA, 19 nt, Molluscum contagiosum virus
cuaucgcuugcuaauugaa

SEQ ID NO: 373785 - RNA, 22 nt, Molluscum contagiosum virus
cucaacauccaaaccaacguga

SEQ ID NO: 373786 - RNA, 23 nt, Molluscum contagiosum virus
cucaacaugaauuuuugagacga

SEQ ID NO: 373787 - RNA, 16 nt, Molluscum contagiosum virus
cucaacucguaggaca

SEQ ID NO: 373788 - RNA, 14 nt, Molluscum contagiosum virus
cucaagaacaccaa

SEQ ID NO: 373789 - RNA, 16 nt, Molluscum contagiosum virus
cucaagaacaccaaga

SEQ ID NO: 373790 - RNA, 17 nt, Molluscum contagiosum virus
cucaagaacaccaagag

SEQ ID NO: 373791 - RNA, 18 nt, Molluscum contagiosum virus
cucaagaacaccaagagc

SEQ ID NO: 373792 - RNA, 16 nt, Molluscum contagiosum virus
cucaagaagcccaagg

SEQ ID NO: 373793 - RNA, 21 nt, Molluscum contagiosum virus
cucaagaucguuuugcacuug

SEQ ID NO: 373794 - RNA, 20 nt, Molluscum contagiosum virus
cucaagcaccugcgcuuccu

SEQ ID NO: 373795 - RNA, 17 nt, Molluscum contagiosum virus
cucaaggacuaccagcu

SEQ ID NO: 373796 - RNA, 21 nt, Molluscum contagiosum virus
cucaagucguuugcucggggc

SEQ ID NO: 373797 - RNA, 17 nt, Molluscum contagiosum virus
cucaaucucgcccagca

SEQ ID NO: 373798 - RNA, 19 nt, Molluscum contagiosum virus
cucaauucaaguuugacaa

SEQ ID NO: 373799 - RNA, 15 nt, Molluscum contagiosum virus
cucacagccguggag

SEQ ID NO: 373800 - RNA, 17 nt, Molluscum contagiosum virus
cucacagccguggaguc

SEQ ID NO: 373801 - RNA, 23 nt, Molluscum contagiosum virus
cucacagccguggaguccaugcc

SEQ ID NO: 373802 - RNA, 22 nt, Molluscum contagiosum virus
cucacaugugcugccggcucaa

SEQ ID NO: 373803 - RNA, 18 nt, Molluscum contagiosum virus
cucaccucgcaugaugaa

SEQ ID NO: 373804 - RNA, 21 nt, Molluscum contagiosum virus
cucaccuuucucuuucucaag

SEQ ID NO: 373805 - RNA, 16 nt, Molluscum contagiosum virus
cucacgcgcuaccgca

SEQ ID NO: 373806 - RNA, 16 nt, Molluscum contagiosum virus
cucacgcguccacaaa

SEQ ID NO: 373807 - RNA, 19 nt, Molluscum contagiosum virus
cucacgcguccacaaagac

SEQ ID NO: 373808 - RNA, 12 nt, Molluscum contagiosum virus
cucacgcugccc

SEQ ID NO: 373809 - RNA, 12 nt, Molluscum contagiosum virus
cucacgugcuga

SEQ ID NO: 373810 - RNA, 16 nt, Molluscum contagiosum virus
cucagaacguggucaa

SEQ ID NO: 373811 - RNA, 13 nt, Molluscum contagiosum virus
cucagaccagagu

SEQ ID NO: 373812 - RNA, 16 nt, Molluscum contagiosum virus
cucagccucuacucca

SEQ ID NO: 373813 - RNA, 18 nt, Molluscum contagiosum virus
cucagccucuacuccacu

SEQ ID NO: 373814 - RNA, 19 nt, Molluscum contagiosum virus
cucaugcgcgggaugcugg

SEQ ID NO: 373815 - RNA, 20 nt, Molluscum contagiosum virus
cucauggcgcgcaaccagcu

SEQ ID NO: 373816 - RNA, 14 nt, Molluscum contagiosum virus
cuccacgcgcagcu

SEQ ID NO: 373817 - RNA, 22 nt, Molluscum contagiosum virus
cuccagggcacgaucgcgagac

SEQ ID NO: 373818 - RNA, 19 nt, Molluscum contagiosum virus
cuccagggcucaagaucuc

SEQ ID NO: 373819 - RNA, 12 nt, Molluscum contagiosum virus
cuccaugucguc

SEQ ID NO: 373820 - RNA, 17 nt, Molluscum contagiosum virus
cucccgcacgcaccgcg

SEQ ID NO: 373821 - RNA, 12 nt, Molluscum contagiosum virus
cucccgucgagc

SEQ ID NO: 373822 - RNA, 18 nt, Molluscum contagiosum virus
cucccgucgagcacgauu

SEQ ID NO: 373823 - RNA, 18 nt, Molluscum contagiosum virus
cuccgacgugaccucgcu

SEQ ID NO: 373824 - RNA, 15 nt, Molluscum contagiosum virus
cuccgacgugcugcg

SEQ ID NO: 373825 - RNA, 14 nt, Molluscum contagiosum virus
cuccgaguccagcu

SEQ ID NO: 373826 - RNA, 16 nt, Molluscum contagiosum virus
cuccgccgggaauacc

SEQ ID NO: 373827 - RNA, 22 nt, Molluscum contagiosum virus
cuccgccgggaauaccggagag

SEQ ID NO: 373828 - RNA, 14 nt, Molluscum contagiosum virus
cugcacacaccgcg

SEQ ID NO: 373829 - RNA, 11 nt, Molluscum contagiosum virus
cugcacaguuc

SEQ ID NO: 373830 - RNA, 13 nt, Molluscum contagiosum virus
cugcacaguucac

SEQ ID NO: 373831 - RNA, 23 nt, Molluscum contagiosum virus
cugcaccggcgcgagaugcucgc

SEQ ID NO: 373832 - RNA, 24 nt, Molluscum contagiosum virus
cugcaccggcgcgagaugcucgcc

SEQ ID NO: 373833 - RNA, 14 nt, Molluscum contagiosum virus
cugcaccugcugga

SEQ ID NO: 373834 - RNA, 13 nt, Molluscum contagiosum virus
cugcacgacccuc

SEQ ID NO: 373835 - RNA, 18 nt, Molluscum contagiosum virus
cugcacgugcagcggcgc

SEQ ID NO: 373836 - RNA, 14 nt, Molluscum contagiosum virus
cugcagcaccugca

SEQ ID NO: 373837 - RNA, 17 nt, Molluscum contagiosum virus
cugcagcagccccgacg

SEQ ID NO: 373838 - RNA, 23 nt, Molluscum contagiosum virus
cugcagcagccccgacgccagcg

SEQ ID NO: 373839 - RNA, 12 nt, Molluscum contagiosum virus
cugcagcagcug

SEQ ID NO: 373840 - RNA, 19 nt, Molluscum contagiosum virus
cugcagcccuuccacgaca

SEQ ID NO: 373841 - RNA, 15 nt, Molluscum contagiosum virus
cugcaggaaaggcac

SEQ ID NO: 373842 - RNA, 14 nt, Molluscum contagiosum virus
cugcaggaccugcu

SEQ ID NO: 373843 - RNA, 19 nt, Molluscum contagiosum virus
cugcaggcagaagcucauu

SEQ ID NO: 373844 - RNA, 17 nt, Molluscum contagiosum virus
cugcaguaugaaucuac

SEQ ID NO: 373845 - RNA, 17 nt, Molluscum contagiosum virus
cugcauacacuuccugc

SEQ ID NO: 373846 - RNA, 21 nt, Molluscum contagiosum virus
cugcauccuggggaaccgcug

SEQ ID NO: 373847 - RNA, 16 nt, Molluscum contagiosum virus
cugccacggcugcaag

SEQ ID NO: 373848 - RNA, 18 nt, Molluscum contagiosum virus
cugccaggcggucuucca

SEQ ID NO: 373849 - RNA, 21 nt, Molluscum contagiosum virus
cugcccgcgcgcgacuacgca

SEQ ID NO: 373850 - RNA, 20 nt, Molluscum contagiosum virus
cugccgcgcaauacggugga

SEQ ID NO: 373851 - RNA, 21 nt, Molluscum contagiosum virus
cugccgcgccuccgagcgcgc

SEQ ID NO: 373852 - RNA, 20 nt, Molluscum contagiosum virus
cugccggcucaagcuggcaa

SEQ ID NO: 373853 - RNA, 21 nt, Molluscum contagiosum virus
cugccggggccggacguccau

SEQ ID NO: 373854 - RNA, 15 nt, Molluscum contagiosum virus
cugccucccaagcag

SEQ ID NO: 373855 - RNA, 14 nt, Molluscum contagiosum virus
cugccucguggaac

SEQ ID NO: 373856 - RNA, 19 nt, Molluscum contagiosum virus
cugccucguggaacaaaga

SEQ ID NO: 373857 - RNA, 19 nt, Molluscum contagiosum virus
cugccugugcccaguuauu

SEQ ID NO: 373858 - RNA, 14 nt, Molluscum contagiosum virus
cugccuuugccaag

SEQ ID NO: 373859 - RNA, 15 nt, Molluscum contagiosum virus
cugcgaucgcagcag

SEQ ID NO: 373860 - RNA, 21 nt, Molluscum contagiosum virus
cugcgaucgcgggcacgagca

SEQ ID NO: 373861 - RNA, 17 nt, Molluscum contagiosum virus
cugcgcaccugcacgac

SEQ ID NO: 373862 - RNA, 13 nt, Molluscum contagiosum virus
cugcgcagcaucc

SEQ ID NO: 373863 - RNA, 15 nt, Molluscum contagiosum virus
cugcgcagcauccuc

SEQ ID NO: 373864 - RNA, 14 nt, Molluscum contagiosum virus
cugcgccacugcca

SEQ ID NO: 373865 - RNA, 14 nt, Molluscum contagiosum virus
cugcgcccgcggag

SEQ ID NO: 373866 - RNA, 15 nt, Molluscum contagiosum virus
cugcgcccgcggaga

SEQ ID NO: 373867 - RNA, 19 nt, Molluscum contagiosum virus
cugcgccgccucaugcgcg

SEQ ID NO: 373868 - RNA, 20 nt, Molluscum contagiosum virus
cugcgcgacaugcugcccgc

SEQ ID NO: 373869 - RNA, 18 nt, Molluscum contagiosum virus
cugcgcgagacgcugcug

SEQ ID NO: 373870 - RNA, 20 nt, Molluscum contagiosum virus
cugcgcguggaggacaccgc

SEQ ID NO: 373871 - RNA, 23 nt, Molluscum contagiosum virus
cugcgcuuccucuacaccagcug

SEQ ID NO: 373872 - RNA, 20 nt, Molluscum contagiosum virus
cugcggcaaccgcgcccgcg

SEQ ID NO: 373873 - RNA, 16 nt, Molluscum contagiosum virus
cugcggcgcugcuaca

SEQ ID NO: 373874 - RNA, 13 nt, Molluscum contagiosum virus
cugcggcucgcac

SEQ ID NO: 373875 - RNA, 14 nt, Molluscum contagiosum virus
cugcggcugcugga

SEQ ID NO: 373876 - RNA, 22 nt, Molluscum contagiosum virus
cugcggcugcuggagcuagcgc

SEQ ID NO: 373877 - RNA, 14 nt, Molluscum contagiosum virus
cugcgguucacgcc

SEQ ID NO: 373878 - RNA, 20 nt, Molluscum contagiosum virus
cugcuacaagcggugcagcu

SEQ ID NO: 373879 - RNA, 13 nt, Molluscum contagiosum virus
cugcuacaugcac

SEQ ID NO: 373880 - RNA, 15 nt, Molluscum contagiosum virus
cugcuacaugcacag

SEQ ID NO: 373881 - RNA, 16 nt, Molluscum contagiosum virus
cugcuagcggccuguu

SEQ ID NO: 373882 - RNA, 21 nt, Molluscum contagiosum virus
cugcucaaggacuaccagcuc

SEQ ID NO: 373883 - RNA, 19 nt, Molluscum contagiosum virus
cugcucaucggcgagcucu

SEQ ID NO: 373884 - RNA, 16 nt, Molluscum contagiosum virus
cugcuccccgccagca

SEQ ID NO: 373885 - RNA, 23 nt, Molluscum contagiosum virus
cugcuccccgccagcaccaugcg

SEQ ID NO: 373886 - RNA, 18 nt, Molluscum contagiosum virus
cugcuccgcggaggccaa

SEQ ID NO: 373887 - RNA, 15 nt, Molluscum contagiosum virus
cugcuccgugcccac

SEQ ID NO: 373888 - RNA, 20 nt, Molluscum contagiosum virus
cugcuccgugcccacgagcg

SEQ ID NO: 373889 - RNA, 15 nt, Molluscum contagiosum virus
cugcucgcacccgcg

SEQ ID NO: 373890 - RNA, 17 nt, Molluscum contagiosum virus
cugcucgugcccgcaca

SEQ ID NO: 373891 - RNA, 22 nt, Molluscum contagiosum virus
cugcucgugcccgcacacgcaa

SEQ ID NO: 373892 - RNA, 17 nt, Molluscum contagiosum virus
cugcucucgcgcgccag

SEQ ID NO: 373893 - RNA, 14 nt, Molluscum contagiosum virus
cugcucugcgugua

SEQ ID NO: 373894 - RNA, 22 nt, Molluscum contagiosum virus
cugcugcgguaucuacacuccg

SEQ ID NO: 373895 - RNA, 16 nt, Molluscum contagiosum virus
cugcuggagcuagcgc

SEQ ID NO: 373896 - RNA, 18 nt, Molluscum contagiosum virus
cugcugggagcuugcacg

SEQ ID NO: 373897 - RNA, 12 nt, Molluscum contagiosum virus
cugcuggugcuc

SEQ ID NO: 373898 - RNA, 17 nt, Molluscum contagiosum virus
cugcugguggugcugga

SEQ ID NO: 373899 - RNA, 12 nt, Molluscum contagiosum virus
cugcuuugcacg

SEQ ID NO: 373900 - RNA, 14 nt, Molluscum contagiosum virus
cuggaaacacgugg

SEQ ID NO: 373901 - RNA, 18 nt, Molluscum contagiosum virus
cuggaaacacguggccaa

SEQ ID NO: 373902 - RNA, 18 nt, Molluscum contagiosum virus
cuggaccuccaucuugcc

SEQ ID NO: 373903 - RNA, 19 nt, Molluscum contagiosum virus
cuggacgggcacgagcacg

SEQ ID NO: 373904 - RNA, 21 nt, Molluscum contagiosum virus
cuggacgugggcgaacugccc

SEQ ID NO: 373905 - RNA, 21 nt, Molluscum contagiosum virus
cuggacugagccgcaagcaca

SEQ ID NO: 373906 - RNA, 13 nt, Molluscum contagiosum virus
cuggacugugcuu

SEQ ID NO: 373907 - RNA, 19 nt, Molluscum contagiosum virus
cuggagggcagugccaagg

SEQ ID NO: 373908 - RNA, 14 nt, Molluscum contagiosum virus
cuggcagacacaga

SEQ ID NO: 373909 - RNA, 18 nt, Molluscum contagiosum virus
cuggcagugccgggcgcc

SEQ ID NO: 373910 - RNA, 14 nt, Molluscum contagiosum virus
cuggccaacacuac

SEQ ID NO: 373911 - RNA, 21 nt, Molluscum contagiosum virus
cuggccaaggacgacaacacu

SEQ ID NO: 373912 - RNA, 14 nt, Molluscum contagiosum virus
cuggccagccucau

SEQ ID NO: 373913 - RNA, 13 nt, Molluscum contagiosum virus
cuggcccugcuag

SEQ ID NO: 373914 - RNA, 16 nt, Molluscum contagiosum virus
cuggcccugcuugacg

SEQ ID NO: 373915 - RNA, 23 nt, Molluscum contagiosum virus
cuggccgaacugcucugcgugua

SEQ ID NO: 373916 - RNA, 21 nt, Molluscum contagiosum virus
cuggccgaagucgcagcagcg

SEQ ID NO: 373917 - RNA, 12 nt, Molluscum contagiosum virus
cuggccugcaaa

SEQ ID NO: 373918 - RNA, 16 nt, Molluscum contagiosum virus
cuggcgacacauugcc

SEQ ID NO: 373919 - RNA, 17 nt, Molluscum contagiosum virus
cuggcgacacauugccg

SEQ ID NO: 373920 - RNA, 20 nt, Molluscum contagiosum virus
cuggcgauguccaugucgcg

SEQ ID NO: 373921 - RNA, 17 nt, Molluscum contagiosum virus
cuggcgcgcgccgagcc

SEQ ID NO: 373922 - RNA, 16 nt, Molluscum contagiosum virus
cuggcgcguccguuca

SEQ ID NO: 373923 - RNA, 14 nt, Molluscum contagiosum virus
cuggcgggcgcggu

SEQ ID NO: 373924 - RNA, 16 nt, Molluscum contagiosum virus
cuggcucguacugcug

SEQ ID NO: 373925 - RNA, 18 nt, Molluscum contagiosum virus
cuggcucguacugcugca

SEQ ID NO: 373926 - RNA, 13 nt, Molluscum contagiosum virus
cuggcugcugcgc

SEQ ID NO: 373927 - RNA, 22 nt, Molluscum contagiosum virus
cuggcuucuccaccuucaggac

SEQ ID NO: 373928 - RNA, 13 nt, Molluscum contagiosum virus
cugggcacaagcu

SEQ ID NO: 373929 - RNA, 21 nt, Molluscum contagiosum virus
cugggcgccgcgcugaugcua

SEQ ID NO: 373930 - RNA, 21 nt, Molluscum contagiosum virus
cugggcgcgugcgagcggcgc

SEQ ID NO: 373931 - RNA, 23 nt, Molluscum contagiosum virus
cuuggcggcgcggcuagcaccgc

SEQ ID NO: 373932 - RNA, 15 nt, Molluscum contagiosum virus
cuugggcacugcuac

SEQ ID NO: 373933 - RNA, 20 nt, Molluscum contagiosum virus
cuugguguucugcgcgccgc

SEQ ID NO: 373934 - RNA, 13 nt, Molluscum contagiosum virus
cuuguccgcggac

SEQ ID NO: 373935 - RNA, 19 nt, Molluscum contagiosum virus
cuugugcgcgcaucagcac

SEQ ID NO: 373936 - RNA, 21 nt, Molluscum contagiosum virus
cuugugcgcgcaucagcacac

SEQ ID NO: 373937 - RNA, 16 nt, Molluscum contagiosum virus
cuuguuguugugacac

SEQ ID NO: 373938 - RNA, 17 nt, Molluscum contagiosum virus
cuuguuuguugucccac

SEQ ID NO: 373939 - RNA, 22 nt, Molluscum contagiosum virus
cuuuaacgcgugcggugacuug

SEQ ID NO: 373940 - RNA, 18 nt, Molluscum contagiosum virus
cuuuacgggcgccagcua

SEQ ID NO: 373941 - RNA, 12 nt, Molluscum contagiosum virus
cuuuacugcaag

SEQ ID NO: 373942 - RNA, 21 nt, Molluscum contagiosum virus
cuuuacugcaagaucuaucac

SEQ ID NO: 373943 - RNA, 13 nt, Molluscum contagiosum virus
cuuucagagugac

SEQ ID NO: 373944 - RNA, 20 nt, Molluscum contagiosum virus
cuuucagagugacgcugcaa

SEQ ID NO: 373945 - RNA, 23 nt, Molluscum contagiosum virus
cuuucagagugacgcugcaagac

SEQ ID NO: 373946 - RNA, 24 nt, Molluscum contagiosum virus
cuuucucacgcccgcgcugcgcaa

SEQ ID NO: 373947 - RNA, 19 nt, Molluscum contagiosum virus
cuuucucuuucucaagauc

SEQ ID NO: 373948 - RNA, 21 nt, Molluscum contagiosum virus
cuuugacuacuacguggugcg

SEQ ID NO: 373949 - RNA, 18 nt, Molluscum contagiosum virus
cuuugccaaagcucucuu

SEQ ID NO: 373950 - RNA, 22 nt, Molluscum contagiosum virus
cuuugcccccgagguggccaag

SEQ ID NO: 373951 - RNA, 22 nt, Molluscum contagiosum virus
cuuugcgaacgcgcaagugugc

SEQ ID NO: 373952 - RNA, 21 nt, Molluscum contagiosum virus
cuuuggcgugaccauggacac

SEQ ID NO: 373953 - RNA, 16 nt, Molluscum contagiosum virus
cuuugugcgaccugcu

SEQ ID NO: 373954 - RNA, 22 nt, Molluscum contagiosum virus
cuuuguggacgcgcaagugugc

SEQ ID NO: 373955 - RNA, 19 nt, Molluscum contagiosum virus
cuuuguguuuuuguguaag

SEQ ID NO: 373956 - RNA, 23 nt, Molluscum contagiosum virus
cuuuguucuuagcagcgccgcca

SEQ ID NO: 373957 - RNA, 16 nt, Molluscum contagiosum virus
cuuuuugcggcgccgc

SEQ ID NO: 373958 - RNA, 16 nt, Molluscum contagiosum virus
gaaaaaagagccggcu

SEQ ID NO: 373959 - RNA, 15 nt, Molluscum contagiosum virus
gaaaaaucccccgcc

SEQ ID NO: 373960 - RNA, 21 nt, Molluscum contagiosum virus
gaaaaaucccccgccaggaac

SEQ ID NO: 373961 - RNA, 10 nt, Molluscum contagiosum virus
gaaacaagca

SEQ ID NO: 373962 - RNA, 21 nt, Molluscum contagiosum virus
gaaacacguggccaaggucuc

SEQ ID NO: 373963 - RNA, 22 nt, Molluscum contagiosum virus
gaaacacguggccaaggucucg

SEQ ID NO: 373964 - RNA, 22 nt, Molluscum contagiosum virus
gaaacagcaccguugccgcggc

SEQ ID NO: 373965 - RNA, 12 nt, Molluscum contagiosum virus
gaaacagccaug

SEQ ID NO: 373966 - RNA, 15 nt, Molluscum contagiosum virus
gaaacagccaugugu

SEQ ID NO: 373967 - RNA, 22 nt, Molluscum contagiosum virus
gaaacaguaggacauguccggc

SEQ ID NO: 373968 - RNA, 19 nt, Molluscum contagiosum virus
gaaacgcuggcgagcaaga

SEQ ID NO: 373969 - RNA, 21 nt, Molluscum contagiosum virus
gaaacgcuggcgagcaagaug

SEQ ID NO: 373970 - RNA, 21 nt, Molluscum contagiosum virus
gaaacucuccgacgugcugcg

SEQ ID NO: 373971 - RNA, 16 nt, Molluscum contagiosum virus
gaaagacaaagaccac

SEQ ID NO: 373972 - RNA, 21 nt, Molluscum contagiosum virus
gaaagaggaaagcgcacacuu

SEQ ID NO: 373973 - RNA, 16 nt, Molluscum contagiosum virus
gaaagauauacaccag

SEQ ID NO: 373974 - RNA, 13 nt, Molluscum contagiosum virus
gaaagaugaagcu

SEQ ID NO: 373975 - RNA, 19 nt, Molluscum contagiosum virus
gaaagcagcaaacugugcu

SEQ ID NO: 373976 - RNA, 16 nt, Molluscum contagiosum virus
gaaagcgcacacuugc

SEQ ID NO: 373977 - RNA, 14 nt, Molluscum contagiosum virus
gaaaggcacacccc

SEQ ID NO: 373978 - RNA, 17 nt, Molluscum contagiosum virus
gaaagucgcuaccaaga

SEQ ID NO: 373979 - RNA, 15 nt, Molluscum contagiosum virus
gaaaucccaagagcc

SEQ ID NO: 373980 - RNA, 15 nt, Molluscum contagiosum virus
gaaauguaguucucg

SEQ ID NO: 373981 - RNA, 20 nt, Molluscum contagiosum virus
gaacaaaaagugaacuucua

SEQ ID NO: 373982 - RNA, 14 nt, Molluscum contagiosum virus
gaacaauacaugcu

SEQ ID NO: 373983 - RNA, 19 nt, Molluscum contagiosum virus
gaacaccuccugcuuugca

SEQ ID NO: 373984 - RNA, 21 nt, Molluscum contagiosum virus
gaacaccuccugcuuugcacg

SEQ ID NO: 373985 - RNA, 16 nt, Molluscum contagiosum virus
gaacagagaaaggcac

SEQ ID NO: 373986 - RNA, 21 nt, Molluscum contagiosum virus
gaacagcacguuguucuugcg

SEQ ID NO: 373987 - RNA, 16 nt, Molluscum contagiosum virus
gaacccagaaagaaga

SEQ ID NO: 373988 - RNA, 15 nt, Molluscum contagiosum virus
gaacccgcauugggc

SEQ ID NO: 373989 - RNA, 13 nt, Molluscum contagiosum virus
gaaccgcugcuuc

SEQ ID NO: 373990 - RNA, 17 nt, Molluscum contagiosum virus
gaaccugcacgcggcgu

SEQ ID NO: 373991 - RNA, 12 nt, Molluscum contagiosum virus
gaacgaccucaa

SEQ ID NO: 373992 - RNA, 21 nt, Molluscum contagiosum virus
gaacgagaaaugcgcacacuu

SEQ ID NO: 373993 - RNA, 17 nt, Molluscum contagiosum virus
gaacgagagacacgcac

SEQ ID NO: 373994 - RNA, 17 nt, Molluscum contagiosum virus
gaacgagccugccgcga

SEQ ID NO: 373995 - RNA, 17 nt, Molluscum contagiosum virus
gaacgagggacacgcac

SEQ ID NO: 373996 - RNA, 19 nt, Molluscum contagiosum virus
gaacgagggaugcacacac

SEQ ID NO: 373997 - RNA, 13 nt, Molluscum contagiosum virus
gaacgcaaggugu

SEQ ID NO: 373998 - RNA, 20 nt, Molluscum contagiosum virus
gaacgccgugcgcgugcggc

SEQ ID NO: 373999 - RNA, 11 nt, Molluscum contagiosum virus
gaacgcgcgcu

SEQ ID NO: 374000 - RNA, 15 nt, Molluscum contagiosum virus
gaacgcugcagcuag

SEQ ID NO: 374001 - RNA, 13 nt, Molluscum contagiosum virus
gaacggacacggg

SEQ ID NO: 374002 - RNA, 16 nt, Molluscum contagiosum virus
gaacuacuuccugcag

SEQ ID NO: 374003 - RNA, 15 nt, Molluscum contagiosum virus
gaacucgcugcugcu

SEQ ID NO: 374004 - RNA, 16 nt, Molluscum contagiosum virus
gaacucgcugcugcuc

SEQ ID NO: 374005 - RNA, 19 nt, Molluscum contagiosum virus
gaacucuacacguggaauu

SEQ ID NO: 374006 - RNA, 21 nt, Molluscum contagiosum virus
gaacucucaucgagcaccuca

SEQ ID NO: 374007 - RNA, 14 nt, Molluscum contagiosum virus
gaacugacugcugc

SEQ ID NO: 374008 - RNA, 17 nt, Molluscum contagiosum virus
gaacugcccgaguuccu

SEQ ID NO: 374009 - RNA, 23 nt, Molluscum contagiosum virus
gaacugcugcgcgcuagggucca

SEQ ID NO: 374010 - RNA, 14 nt, Molluscum contagiosum virus
gaacuucuacgcca

SEQ ID NO: 374011 - RNA, 14 nt, Molluscum contagiosum virus
gaagaaacagccau

SEQ ID NO: 374012 - RNA, 12 nt, Molluscum contagiosum virus
gaagaacagcac

SEQ ID NO: 374013 - RNA, 14 nt, Molluscum contagiosum virus
gaagaacgcggcgu

SEQ ID NO: 374014 - RNA, 13 nt, Molluscum contagiosum virus
gaagaccuuggac

SEQ ID NO: 374015 - RNA, 22 nt, Molluscum contagiosum virus
gaagacgcguaccagcgccugc

SEQ ID NO: 374016 - RNA, 15 nt, Molluscum contagiosum virus
gaagacggcgcgcgc

SEQ ID NO: 374017 - RNA, 16 nt, Molluscum contagiosum virus
gaagacggcgcgcgcg

SEQ ID NO: 374018 - RNA, 16 nt, Molluscum contagiosum virus
gaagacgucggggcgc

SEQ ID NO: 374019 - RNA, 23 nt, Molluscum contagiosum virus
gaagagacgccaagcgucgcgac

SEQ ID NO: 374020 - RNA, 19 nt, Molluscum contagiosum virus
gaagaggccagcacaagcc

SEQ ID NO: 374021 - RNA, 12 nt, Molluscum contagiosum virus
gaagaggucucu

SEQ ID NO: 374022 - RNA, 17 nt, Molluscum contagiosum virus
gaagcagcagaccaaga

SEQ ID NO: 374023 - RNA, 23 nt, Molluscum contagiosum virus
gaagcaggcgccaucgcgcguga

SEQ ID NO: 374024 - RNA, 15 nt, Molluscum contagiosum virus
gaagcccaaggagcu

SEQ ID NO: 374025 - RNA, 16 nt, Molluscum contagiosum virus
gaagcgcuucuuugcg

SEQ ID NO: 374026 - RNA, 22 nt, Molluscum contagiosum virus
gaagcggcggacagcaaacagc

SEQ ID NO: 374027 - RNA, 16 nt, Molluscum contagiosum virus
gaagcucacaucuguc

SEQ ID NO: 374028 - RNA, 18 nt, Molluscum contagiosum virus
gaagcucacaucuguccc

SEQ ID NO: 374029 - RNA, 16 nt, Molluscum contagiosum virus
gaagcucucgcgcgca

SEQ ID NO: 374030 - RNA, 17 nt, Molluscum contagiosum virus
gaagcuggcgcggucca

SEQ ID NO: 374031 - RNA, 20 nt, Molluscum contagiosum virus
gaagcuuccuuuuucacuuu

SEQ ID NO: 374032 - RNA, 21 nt, Molluscum contagiosum virus
gaaggagagagagacaugcac

SEQ ID NO: 374033 - RNA, 17 nt, Molluscum contagiosum virus
gacgugcagacgcucaa

SEQ ID NO: 374034 - RNA, 18 nt, Molluscum contagiosum virus
gacgugcccuacgcgcgc

SEQ ID NO: 374035 - RNA, 14 nt, Molluscum contagiosum virus
gacgugcggcacgc

SEQ ID NO: 374036 - RNA, 15 nt, Molluscum contagiosum virus
gacgugcuacuacug

SEQ ID NO: 374037 - RNA, 12 nt, Molluscum contagiosum virus
gacgugcugcgc

SEQ ID NO: 374038 - RNA, 17 nt, Molluscum contagiosum virus
gacguggugcucgugga

SEQ ID NO: 374039 - RNA, 14 nt, Molluscum contagiosum virus
gacguuuucuuugc

SEQ ID NO: 374040 - RNA, 18 nt, Molluscum contagiosum virus
gacuacgcgcugcggcgc

SEQ ID NO: 374041 - RNA, 20 nt, Molluscum contagiosum virus
gacuacgcgcugcuagagaa

SEQ ID NO: 374042 - RNA, 17 nt, Molluscum contagiosum virus
gacuagccugugcccug

SEQ ID NO: 374043 - RNA, 20 nt, Molluscum contagiosum virus
gacucagcauguugcucuac

SEQ ID NO: 374044 - RNA, 22 nt, Molluscum contagiosum virus
gacucgcgggaccgcagacaaa

SEQ ID NO: 374045 - RNA, 17 nt, Molluscum contagiosum virus
gacugagccgcaagcac

SEQ ID NO: 374046 - RNA, 13 nt, Molluscum contagiosum virus
gacugagggcgcu

SEQ ID NO: 374047 - RNA, 13 nt, Molluscum contagiosum virus
gacugcgcccgug

SEQ ID NO: 374048 - RNA, 22 nt, Molluscum contagiosum virus
gacugugucgacuucaccuucg

SEQ ID NO: 374049 - RNA, 12 nt, Molluscum contagiosum virus
gacuguguuccc

SEQ ID NO: 374050 - RNA, 23 nt, Molluscum contagiosum virus
gacuucgacgcgcggcagacgcc

SEQ ID NO: 374051 - RNA, 20 nt, Molluscum contagiosum virus
gacuugcugcggagcgccuu

SEQ ID NO: 374052 - RNA, 13 nt, Molluscum contagiosum virus
gacuuguccucaa

SEQ ID NO: 374053 - RNA, 22 nt, Molluscum contagiosum virus
gacuuucugcagucagauugua

SEQ ID NO: 374054 - RNA, 23 nt, Molluscum contagiosum virus
gacuuugacuacuacguggugcg

SEQ ID NO: 374055 - RNA, 23 nt, Molluscum contagiosum virus
gacuuugcgaaggaacccgcgga

SEQ ID NO: 374056 - RNA, 14 nt, Molluscum contagiosum virus
gagaaagaacaaaa

SEQ ID NO: 374057 - RNA, 16 nt, Molluscum contagiosum virus
gagaaaggcacccacc

SEQ ID NO: 374058 - RNA, 20 nt, Molluscum contagiosum virus
gagaaaucccaagagccaug

SEQ ID NO: 374059 - RNA, 22 nt, Molluscum contagiosum virus
gagaaaucccaagagccauguu

SEQ ID NO: 374060 - RNA, 18 nt, Molluscum contagiosum virus
gagaacaacuacuucgag

SEQ ID NO: 374061 - RNA, 21 nt, Molluscum contagiosum virus
gagaaccgccgucaacauuuc

SEQ ID NO: 374062 - RNA, 18 nt, Molluscum contagiosum virus
gagaacgaguacuacuuc

SEQ ID NO: 374063 - RNA, 21 nt, Molluscum contagiosum virus
gagaacucgugccugucucgc

SEQ ID NO: 374064 - RNA, 18 nt, Molluscum contagiosum virus
gagaacucuacacgugga

SEQ ID NO: 374065 - RNA, 18 nt, Molluscum contagiosum virus
gagaagcaaugcgcaagg

SEQ ID NO: 374066 - RNA, 20 nt, Molluscum contagiosum virus
gagaagugcuccgcacgugg

SEQ ID NO: 374067 - RNA, 20 nt, Molluscum contagiosum virus
gagaauaccgucgaggaaua

SEQ ID NO: 374068 - RNA, 15 nt, Molluscum contagiosum virus
gagaauggacauugg

SEQ ID NO: 374069 - RNA, 18 nt, Molluscum contagiosum virus
gagaaugggagggggaca

SEQ ID NO: 374070 - RNA, 20 nt, Molluscum contagiosum virus
gagaaugggagggggacaag

SEQ ID NO: 374071 - RNA, 22 nt, Molluscum contagiosum virus
gagaaugggagggggacaagga

SEQ ID NO: 374072 - RNA, 18 nt, Molluscum contagiosum virus
gagacaccagcuccgccg

SEQ ID NO: 374073 - RNA, 17 nt, Molluscum contagiosum virus
gagacacgcacacucgc

SEQ ID NO: 374074 - RNA, 18 nt, Molluscum contagiosum virus
gagaccagccgcgagcgc

SEQ ID NO: 374075 - RNA, 18 nt, Molluscum contagiosum virus
gagaccgacgaaggcaag

SEQ ID NO: 374076 - RNA, 21 nt, Molluscum contagiosum virus
gagaccuacgucaagcaggca

SEQ ID NO: 374077 - RNA, 17 nt, Molluscum contagiosum virus
gagaccuuccuccaggg

SEQ ID NO: 374078 - RNA, 16 nt, Molluscum contagiosum virus
gagacgcugcugcaca

SEQ ID NO: 374079 - RNA, 18 nt, Molluscum contagiosum virus
gagacgucuggcucguac

SEQ ID NO: 374080 - RNA, 14 nt, Molluscum contagiosum virus
gagacuucuugcac

SEQ ID NO: 374081 - RNA, 21 nt, Molluscum contagiosum virus
gagagacaacaaacauuguga

SEQ ID NO: 374082 - RNA, 15 nt, Molluscum contagiosum virus
gagagacaugcacac

SEQ ID NO: 374083 - RNA, 14 nt, Molluscum contagiosum virus
gagagcaugcuguc

SEQ ID NO: 374084 - RNA, 19 nt, Molluscum contagiosum virus
gagagcguacucgggccgc

SEQ ID NO: 374085 - RNA, 23 nt, Molluscum contagiosum virus
gagagcuccggcugcuccucgag

SEQ ID NO: 374086 - RNA, 21 nt, Molluscum contagiosum virus
gagagcuuuucuuugugguca

SEQ ID NO: 374087 - RNA, 14 nt, Molluscum contagiosum virus
gagagugcgggagc

SEQ ID NO: 374088 - RNA, 13 nt, Molluscum contagiosum virus
gagaucaggcagc

SEQ ID NO: 374089 - RNA, 20 nt, Molluscum contagiosum virus
gagauccacgcgugcugcgc

SEQ ID NO: 374090 - RNA, 21 nt, Molluscum contagiosum virus
gagaugcgguccgacucggug

SEQ ID NO: 374091 - RNA, 18 nt, Molluscum contagiosum virus
gagaugcucaagcacugc

SEQ ID NO: 374092 - RNA, 21 nt, Molluscum contagiosum virus
gagaugcucaagcacugccuc

SEQ ID NO: 374093 - RNA, 17 nt, Molluscum contagiosum virus
gagcaaagacguguguu

SEQ ID NO: 374094 - RNA, 14 nt, Molluscum contagiosum virus
gagcaagcucaaga

SEQ ID NO: 374095 - RNA, 16 nt, Molluscum contagiosum virus
gagcaaggccuggccu

SEQ ID NO: 374096 - RNA, 23 nt, Molluscum contagiosum virus
gagcaauugcugggcacaagcuu

SEQ ID NO: 374097 - RNA, 16 nt, Molluscum contagiosum virus
gagcacauacacgcgc

SEQ ID NO: 374098 - RNA, 17 nt, Molluscum contagiosum virus
gagcaccugucgcgcga

SEQ ID NO: 374099 - RNA, 14 nt, Molluscum contagiosum virus
gagcacgccuccaa

SEQ ID NO: 374100 - RNA, 19 nt, Molluscum contagiosum virus
gagcacgccuccaagaaga

SEQ ID NO: 374101 - RNA, 17 nt, Molluscum contagiosum virus
gagcacgcgcucgcgca

SEQ ID NO: 374102 - RNA, 18 nt, Molluscum contagiosum virus
gagcacguggacagcauc

SEQ ID NO: 374103 - RNA, 21 nt, Molluscum contagiosum virus
gagcacugcgcgucugugcgc

SEQ ID NO: 374104 - RNA, 15 nt, Molluscum contagiosum virus
gagcagaaggugcgc

SEQ ID NO: 374105 - RNA, 18 nt, Molluscum contagiosum virus
gagcagacguacgagcag

SEQ ID NO: 374106 - RNA, 21 nt, Molluscum contagiosum virus
gagcagccccguaggcgggcc

SEQ ID NO: 374107 - RNA, 12 nt, Molluscum contagiosum virus
gagcaggacgac

SEQ ID NO: 374108 - RNA, 20 nt, Molluscum contagiosum virus
gagcaggacgugcacguggu

SEQ ID NO: 374109 - RNA, 14 nt, Molluscum contagiosum virus
gagcaggagaacua

SEQ ID NO: 374110 - RNA, 18 nt, Molluscum contagiosum virus
gagcaggcgcagcgcggc

SEQ ID NO: 374111 - RNA, 16 nt, Molluscum contagiosum virus
gagcaguucgcgcgcc

SEQ ID NO: 374112 - RNA, 15 nt, Molluscum contagiosum virus
gagcauagcaagaug

SEQ ID NO: 374113 - RNA, 16 nt, Molluscum contagiosum virus
gagcaucugcgcgugc

SEQ ID NO: 374114 - RNA, 17 nt, Molluscum contagiosum virus
gagccacaaacacucgc

SEQ ID NO: 374115 - RNA, 17 nt, Molluscum contagiosum virus
gagccauucuuaaucca

SEQ ID NO: 374116 - RNA, 13 nt, Molluscum contagiosum virus
gagcccgcggcgc

SEQ ID NO: 374117 - RNA, 12 nt, Molluscum contagiosum virus
gagccgcugcac

SEQ ID NO: 374118 - RNA, 16 nt, Molluscum contagiosum virus
gagccgcugcuccugc

SEQ ID NO: 374119 - RNA, 11 nt, Molluscum contagiosum virus
gagccggcugc

SEQ ID NO: 374120 - RNA, 14 nt, Molluscum contagiosum virus
gagcgagcacgcca

SEQ ID NO: 374121 - RNA, 19 nt, Molluscum contagiosum virus
gagcgagcacgccaaccac

SEQ ID NO: 374122 - RNA, 13 nt, Molluscum contagiosum virus
gagcgcaucagca

SEQ ID NO: 374123 - RNA, 14 nt, Molluscum contagiosum virus
gagcgccgccagcu

SEQ ID NO: 374124 - RNA, 15 nt, Molluscum contagiosum virus
gagcgccgccagcuc

SEQ ID NO: 374125 - RNA, 15 nt, Molluscum contagiosum virus
gagcgccgcgugcgc

SEQ ID NO: 374126 - RNA, 15 nt, Molluscum contagiosum virus
gagcgcgagauucug

SEQ ID NO: 374127 - RNA, 12 nt, Molluscum contagiosum virus
gagcgcgcgcac

SEQ ID NO: 374128 - RNA, 15 nt, Molluscum contagiosum virus
gagcgcggcaacagc

SEQ ID NO: 374129 - RNA, 14 nt, Molluscum contagiosum virus
gagcgcgugcucuu

SEQ ID NO: 374130 - RNA, 16 nt, Molluscum contagiosum virus
gagcgcgugcucuuuc

SEQ ID NO: 374131 - RNA, 13 nt, Molluscum contagiosum virus
gagcgcuaccuga

SEQ ID NO: 374132 - RNA, 19 nt, Molluscum contagiosum virus
gagcggcaagccgugcuuu

SEQ ID NO: 374133 - RNA, 21 nt, Molluscum contagiosum virus
gagcggcauucgaaccuggaa

SEQ ID NO: 374134 - RNA, 14 nt, Molluscum contagiosum virus
gagcggcgcgcgcu

SEQ ID NO: 374135 - RNA, 23 nt, Molluscum contagiosum virus
gagcgugucgaagcgcgcagcgc

SEQ ID NO: 374136 - RNA, 20 nt, Molluscum contagiosum virus
gauggacaaagaugcagcca

SEQ ID NO: 374137 - RNA, 14 nt, Molluscum contagiosum virus
gauggacgccagcu

SEQ ID NO: 374138 - RNA, 18 nt, Molluscum contagiosum virus
gauggcgcagcacuucga

SEQ ID NO: 374139 - RNA, 13 nt, Molluscum contagiosum virus
gauggcguggcgg

SEQ ID NO: 374140 - RNA, 14 nt, Molluscum contagiosum virus
gauggcucgcgggc

SEQ ID NO: 374141 - RNA, 20 nt, Molluscum contagiosum virus
gauggcuguuccggcgugga

SEQ ID NO: 374142 - RNA, 18 nt, Molluscum contagiosum virus
gauguccuugaugccgug

SEQ ID NO: 374143 - RNA, 13 nt, Molluscum contagiosum virus
gaugugcuagcug

SEQ ID NO: 374144 - RNA, 21 nt, Molluscum contagiosum virus
gauguuccgcgugagagccau

SEQ ID NO: 374145 - RNA, 17 nt, Molluscum contagiosum virus
gauucacaucuugcuau

SEQ ID NO: 374146 - RNA, 21 nt, Molluscum contagiosum virus
gauuccgcuguacgugcugcc

SEQ ID NO: 374147 - RNA, 16 nt, Molluscum contagiosum virus
gauucggccaaugugu

SEQ ID NO: 374148 - RNA, 18 nt, Molluscum contagiosum virus
gauugagccggacuugua

SEQ ID NO: 374149 - RNA, 15 nt, Molluscum contagiosum virus
gauugcccgcgcgcg

SEQ ID NO: 374150 - RNA, 14 nt, Molluscum contagiosum virus
gauugucaagcacu

SEQ ID NO: 374151 - RNA, 17 nt, Molluscum contagiosum virus
gauuuucaccggaacaa

SEQ ID NO: 374152 - RNA, 14 nt, Molluscum contagiosum virus
gcaaaagcaaguac

SEQ ID NO: 374153 - RNA, 16 nt, Molluscum contagiosum virus
gcaaaagcacagcagg

SEQ ID NO: 374154 - RNA, 13 nt, Molluscum contagiosum virus
gcaaaagcuuuuu

SEQ ID NO: 374155 - RNA, 18 nt, Molluscum contagiosum virus
gcaaacacgagacugagu

SEQ ID NO: 374156 - RNA, 23 nt, Molluscum contagiosum virus
gcaaaccucugagcgagcgcagu

SEQ ID NO: 374157 - RNA, 18 nt, Molluscum contagiosum virus
gcaaacgcacuguguucc

SEQ ID NO: 374158 - RNA, 17 nt, Molluscum contagiosum virus
gcaaagccucucucgug

SEQ ID NO: 374159 - RNA, 12 nt, Molluscum contagiosum virus
gcaaaguucucg

SEQ ID NO: 374160 - RNA, 12 nt, Molluscum contagiosum virus
gcaacaaggaaa

SEQ ID NO: 374161 - RNA, 18 nt, Molluscum contagiosum virus
gcaacaugcggagacugu

SEQ ID NO: 374162 - RNA, 20 nt, Molluscum contagiosum virus
gcaacgaaccgugcgagcuu

SEQ ID NO: 374163 - RNA, 22 nt, Molluscum contagiosum virus
gcaacgcaaacgcacgcgcgcg

SEQ ID NO: 374164 - RNA, 17 nt, Molluscum contagiosum virus
gcaacgcaggacacugu

SEQ ID NO: 374165 - RNA, 19 nt, Molluscum contagiosum virus
gcaacgcaggacacuguaa

SEQ ID NO: 374166 - RNA, 12 nt, Molluscum contagiosum virus
gcaacguggcgc

SEQ ID NO: 374167 - RNA, 16 nt, Molluscum contagiosum virus
gcaacugccugcgcua

SEQ ID NO: 374168 - RNA, 18 nt, Molluscum contagiosum virus
gcaagaaacgggagucac

SEQ ID NO: 374169 - RNA, 23 nt, Molluscum contagiosum virus
gcaagaacgacugcuacaugcac

SEQ ID NO: 374170 - RNA, 21 nt, Molluscum contagiosum virus
gcaagaccaucaucgcgcugc

SEQ ID NO: 374171 - RNA, 17 nt, Molluscum contagiosum virus
gcaagagcucguggaca

SEQ ID NO: 374172 - RNA, 15 nt, Molluscum contagiosum virus
gcaagaggggagcca

SEQ ID NO: 374173 - RNA, 17 nt, Molluscum contagiosum virus
gcaagaggggagccagc

SEQ ID NO: 374174 - RNA, 16 nt, Molluscum contagiosum virus
gcaagauacacauugc

SEQ ID NO: 374175 - RNA, 13 nt, Molluscum contagiosum virus
gcaagaugacgac

SEQ ID NO: 374176 - RNA, 14 nt, Molluscum contagiosum virus
gcaagcgcaccuuu

SEQ ID NO: 374177 - RNA, 22 nt, Molluscum contagiosum virus
gcaagcgggcuucgccgccgga

SEQ ID NO: 374178 - RNA, 21 nt, Molluscum contagiosum virus
gcaagcucgaugccguuuucu

SEQ ID NO: 374179 - RNA, 16 nt, Molluscum contagiosum virus
gcaagcuucgggccgc

SEQ ID NO: 374180 - RNA, 17 nt, Molluscum contagiosum virus
gcaaggaaaacugcauc

SEQ ID NO: 374181 - RNA, 15 nt, Molluscum contagiosum virus
gcaaggaagcaacaa

SEQ ID NO: 374182 - RNA, 20 nt, Molluscum contagiosum virus
gcaaggccgcgcccaagaag

SEQ ID NO: 374183 - RNA, 22 nt, Molluscum contagiosum virus
gcaagggccugcgggcggcaca

SEQ ID NO: 374184 - RNA, 17 nt, Molluscum contagiosum virus
gcaaguacaacccaaac

SEQ ID NO: 374185 - RNA, 18 nt, Molluscum contagiosum virus
gcaaguacaacccaaaca

SEQ ID NO: 374186 - RNA, 20 nt, Molluscum contagiosum virus
gcaagugcacaccagacaaa

SEQ ID NO: 374187 - RNA, 15 nt, Molluscum contagiosum virus
gcaauagcgcccgua

SEQ ID NO: 374188 - RNA, 20 nt, Molluscum contagiosum virus
gcaaucacggcuguaaugug

SEQ ID NO: 374189 - RNA, 23 nt, Molluscum contagiosum virus
gcaaucacggcuguaaugugcug

SEQ ID NO: 374190 - RNA, 14 nt, Molluscum contagiosum virus
gcaaugcagugcac

SEQ ID NO: 374191 - RNA, 17 nt, Molluscum contagiosum virus
gcaauggcaggugcgca

SEQ ID NO: 374192 - RNA, 20 nt, Molluscum contagiosum virus
gcaauuccguccagugaaau

SEQ ID NO: 374193 - RNA, 18 nt, Molluscum contagiosum virus
gcacaaaacacaaaaaga

SEQ ID NO: 374194 - RNA, 12 nt, Molluscum contagiosum virus
gcacaaaaccuu

SEQ ID NO: 374195 - RNA, 13 nt, Molluscum contagiosum virus
gcacacacuugca

SEQ ID NO: 374196 - RNA, 11 nt, Molluscum contagiosum virus
gcacaccagac

SEQ ID NO: 374197 - RNA, 15 nt, Molluscum contagiosum virus
gcacaccccgggaac

SEQ ID NO: 374198 - RNA, 16 nt, Molluscum contagiosum virus
gcacacgcaaacaaaa

SEQ ID NO: 374199 - RNA, 13 nt, Molluscum contagiosum virus
gcacacgcgcgcg

SEQ ID NO: 374200 - RNA, 23 nt, Molluscum contagiosum virus
gcacacugcagcacgucuugcgc

SEQ ID NO: 374201 - RNA, 23 nt, Molluscum contagiosum virus
gcacacuugcgcguucgcaaaga

SEQ ID NO: 374202 - RNA, 15 nt, Molluscum contagiosum virus
gcacagaaagccaac

SEQ ID NO: 374203 - RNA, 18 nt, Molluscum contagiosum virus
gcacagccccugcugcuc

SEQ ID NO: 374204 - RNA, 20 nt, Molluscum contagiosum virus
gcacagccccugcugcucgc

SEQ ID NO: 374205 - RNA, 11 nt, Molluscum contagiosum virus
gcacaguccaa

SEQ ID NO: 374206 - RNA, 17 nt, Molluscum contagiosum virus
gcacaguccagcccgcg

SEQ ID NO: 374207 - RNA, 17 nt, Molluscum contagiosum virus
gcacauccgcuaccugg

SEQ ID NO: 374208 - RNA, 20 nt, Molluscum contagiosum virus
gcacauccgcuaccuggugg

SEQ ID NO: 374209 - RNA, 19 nt, Molluscum contagiosum virus
gcacaucggcacugcucac

SEQ ID NO: 374210 - RNA, 20 nt, Molluscum contagiosum virus
gcacaugcgcuucggcuccc

SEQ ID NO: 374211 - RNA, 23 nt, Molluscum contagiosum virus
gcacaugugcgugcaccucaaga

SEQ ID NO: 374212 - RNA, 13 nt, Molluscum contagiosum virus
gcaccaccagugc

SEQ ID NO: 374213 - RNA, 14 nt, Molluscum contagiosum virus
gcaccagcugcaaa

SEQ ID NO: 374214 - RNA, 21 nt, Molluscum contagiosum virus
gcaccagucucgaugugacaa

SEQ ID NO: 374215 - RNA, 22 nt, Molluscum contagiosum virus
gcaccagucucgaugugacaac

SEQ ID NO: 374216 - RNA, 23 nt, Molluscum contagiosum virus
gcaccagucucgaugugacaaca

SEQ ID NO: 374217 - RNA, 14 nt, Molluscum contagiosum virus
gcacccaccaggaa

SEQ ID NO: 374218 - RNA, 16 nt, Molluscum contagiosum virus
gcaccccgcaggaaag

SEQ ID NO: 374219 - RNA, 14 nt, Molluscum contagiosum virus
gcacccgcaacaag

SEQ ID NO: 374220 - RNA, 15 nt, Molluscum contagiosum virus
gcacccgcaggaaag

SEQ ID NO: 374221 - RNA, 18 nt, Molluscum contagiosum virus
gcacccgcaggaaaggca

SEQ ID NO: 374222 - RNA, 18 nt, Molluscum contagiosum virus
gcaccgagugcuggccga

SEQ ID NO: 374223 - RNA, 16 nt, Molluscum contagiosum virus
gcaccgccgacaacgc

SEQ ID NO: 374224 - RNA, 20 nt, Molluscum contagiosum virus
gcaccggaagcaacgacaag

SEQ ID NO: 374225 - RNA, 13 nt, Molluscum contagiosum virus
gcaccggcgcgag

SEQ ID NO: 374226 - RNA, 16 nt, Molluscum contagiosum virus
gcaccucccugugaac

SEQ ID NO: 374227 - RNA, 14 nt, Molluscum contagiosum virus
gcaccugcuggaac

SEQ ID NO: 374228 - RNA, 22 nt, Molluscum contagiosum virus
gcaccuuuggugcagaucucgc

SEQ ID NO: 374229 - RNA, 21 nt, Molluscum contagiosum virus
gcacgaccucacagcgccgga

SEQ ID NO: 374230 - RNA, 15 nt, Molluscum contagiosum virus
gcacgcacguggcgc

SEQ ID NO: 374231 - RNA, 16 nt, Molluscum contagiosum virus
gcacgccagguguucc

SEQ ID NO: 374232 - RNA, 21 nt, Molluscum contagiosum virus
gcacgccgcagcgcuggagcu

SEQ ID NO: 374233 - RNA, 20 nt, Molluscum contagiosum virus
gcacgccgcucucgugcaaa

SEQ ID NO: 374234 - RNA, 15 nt, Molluscum contagiosum virus
gcacgcgcacuugcc

SEQ ID NO: 374235 - RNA, 16 nt, Molluscum contagiosum virus
gcacgcgcacuugccu

SEQ ID NO: 374236 - RNA, 14 nt, Molluscum contagiosum virus
gcacgcgcgcagac

SEQ ID NO: 374237 - RNA, 18 nt, Molluscum contagiosum virus
gcacgcgcuggugcgcga

SEQ ID NO: 374238 - RNA, 15 nt, Molluscum contagiosum virus
gcacgcggaaacaag

SEQ ID NO: 374239 - RNA, 18 nt, Molluscum contagiosum virus
gcauuccuucacacagac

SEQ ID NO: 374240 - RNA, 23 nt, Molluscum contagiosum virus
gcauuggcauccggcacgcacaa

SEQ ID NO: 374241 - RNA, 14 nt, Molluscum contagiosum virus
gccaaagucuuccu

SEQ ID NO: 374242 - RNA, 12 nt, Molluscum contagiosum virus
gccaacaaccac

SEQ ID NO: 374243 - RNA, 16 nt, Molluscum contagiosum virus
gccaacaaccacucuu

SEQ ID NO: 374244 - RNA, 20 nt, Molluscum contagiosum virus
gccaacacuaccacagccau

SEQ ID NO: 374245 - RNA, 21 nt, Molluscum contagiosum virus
gccaacuaccuggggcugcuu

SEQ ID NO: 374246 - RNA, 20 nt, Molluscum contagiosum virus
gccaagcguuggcgcccgag

SEQ ID NO: 374247 - RNA, 12 nt, Molluscum contagiosum virus
gccaaggucucg

SEQ ID NO: 374248 - RNA, 20 nt, Molluscum contagiosum virus
gccaaggucuucaggaacaa

SEQ ID NO: 374249 - RNA, 16 nt, Molluscum contagiosum virus
gccaauaucacgccgg

SEQ ID NO: 374250 - RNA, 13 nt, Molluscum contagiosum virus
gccacaaacacuc

SEQ ID NO: 374251 - RNA, 23 nt, Molluscum contagiosum virus
gccacaccugugcccuguccaca

SEQ ID NO: 374252 - RNA, 22 nt, Molluscum contagiosum virus
gccacgaagagucgcgccugga

SEQ ID NO: 374253 - RNA, 22 nt, Molluscum contagiosum virus
gccacgcgcaugaggcggcgca

SEQ ID NO: 374254 - RNA, 17 nt, Molluscum contagiosum virus
gccagaagcccugagaa

SEQ ID NO: 374255 - RNA, 17 nt, Molluscum contagiosum virus
gccagaagugaaauuuc

SEQ ID NO: 374256 - RNA, 18 nt, Molluscum contagiosum virus
gccagaagugaaauuuca

SEQ ID NO: 374257 - RNA, 23 nt, Molluscum contagiosum virus
gccagagauccgcccgcgcuucu

SEQ ID NO: 374258 - RNA, 14 nt, Molluscum contagiosum virus
gccagcaccaugcg

SEQ ID NO: 374259 - RNA, 10 nt, Molluscum contagiosum virus
gccagcagcg

SEQ ID NO: 374260 - RNA, 15 nt, Molluscum contagiosum virus
gccagcgagaucaac

SEQ ID NO: 374261 - RNA, 23 nt, Molluscum contagiosum virus
gccagcgagucucgcgcgccacc

SEQ ID NO: 374262 - RNA, 22 nt, Molluscum contagiosum virus
gccagcgagugauccuugccaa

SEQ ID NO: 374263 - RNA, 20 nt, Molluscum contagiosum virus
gccagcgcgcccaccagcag

SEQ ID NO: 374264 - RNA, 18 nt, Molluscum contagiosum virus
gccagcuccgcgcggcgc

SEQ ID NO: 374265 - RNA, 16 nt, Molluscum contagiosum virus
gccaggcaacgcacaa

SEQ ID NO: 374266 - RNA, 18 nt, Molluscum contagiosum virus
gccaggcaacgcacaaaa

SEQ ID NO: 374267 - RNA, 22 nt, Molluscum contagiosum virus
gccaggcacacgcagugccacg

SEQ ID NO: 374268 - RNA, 15 nt, Molluscum contagiosum virus
gccaggcacuggccc

SEQ ID NO: 374269 - RNA, 16 nt, Molluscum contagiosum virus
gccagguguuccugcc

SEQ ID NO: 374270 - RNA, 15 nt, Molluscum contagiosum virus
gccaguccgcggcgc

SEQ ID NO: 374271 - RNA, 17 nt, Molluscum contagiosum virus
gccagugcgugcacugu

SEQ ID NO: 374272 - RNA, 19 nt, Molluscum contagiosum virus
gccagugcgugcacugucu

SEQ ID NO: 374273 - RNA, 16 nt, Molluscum contagiosum virus
gccaucuccaagcacg

SEQ ID NO: 374274 - RNA, 21 nt, Molluscum contagiosum virus
gccaugaacaacauggugcug

SEQ ID NO: 374275 - RNA, 17 nt, Molluscum contagiosum virus
gccaugaucauggcgcc

SEQ ID NO: 374276 - RNA, 18 nt, Molluscum contagiosum virus
gccaugcuccugaucugc

SEQ ID NO: 374277 - RNA, 20 nt, Molluscum contagiosum virus
gccauggaggcgcuagugca

SEQ ID NO: 374278 - RNA, 22 nt, Molluscum contagiosum virus
gccauggaggcgcuagugcaga

SEQ ID NO: 374279 - RNA, 16 nt, Molluscum contagiosum virus
gccaugguuuccgugu

SEQ ID NO: 374280 - RNA, 23 nt, Molluscum contagiosum virus
gccauuucguugauuugcgcacc

SEQ ID NO: 374281 - RNA, 20 nt, Molluscum contagiosum virus
gcccaagggcguagagcaau

SEQ ID NO: 374282 - RNA, 12 nt, Molluscum contagiosum virus
gcccaccagcag

SEQ ID NO: 374283 - RNA, 14 nt, Molluscum contagiosum virus
gcccaccagcagcc

SEQ ID NO: 374284 - RNA, 17 nt, Molluscum contagiosum virus
gcccaccuucuugucgc

SEQ ID NO: 374285 - RNA, 14 nt, Molluscum contagiosum virus
gcccacgcgcaagg

SEQ ID NO: 374286 - RNA, 16 nt, Molluscum contagiosum virus
gcccacggcggcaccc

SEQ ID NO: 374287 - RNA, 15 nt, Molluscum contagiosum virus
gcccacuuccgugag

SEQ ID NO: 374288 - RNA, 16 nt, Molluscum contagiosum virus
gcccaggaacaucugc

SEQ ID NO: 374289 - RNA, 21 nt, Molluscum contagiosum virus
gcccaggccauggagcgcccg

SEQ ID NO: 374290 - RNA, 15 nt, Molluscum contagiosum virus
gcccaugcgcagugc

SEQ ID NO: 374291 - RNA, 15 nt, Molluscum contagiosum virus
gccccccgcaacaag

SEQ ID NO: 374292 - RNA, 18 nt, Molluscum contagiosum virus
gccccccgcaacaaggaa

SEQ ID NO: 374293 - RNA, 15 nt, Molluscum contagiosum virus
gccccgacgccagcg

SEQ ID NO: 374294 - RNA, 21 nt, Molluscum contagiosum virus
gccccggcgcgaaacaagcgu

SEQ ID NO: 374295 - RNA, 14 nt, Molluscum contagiosum virus
gcccgaagccguag

SEQ ID NO: 374296 - RNA, 16 nt, Molluscum contagiosum virus
gcccgaccccaagaag

SEQ ID NO: 374297 - RNA, 19 nt, Molluscum contagiosum virus
gcccgacuuuucgcgccgc

SEQ ID NO: 374298 - RNA, 17 nt, Molluscum contagiosum virus
gcccgcaaugcaagccc

SEQ ID NO: 374299 - RNA, 15 nt, Molluscum contagiosum virus
gcccgcaaugcagug

SEQ ID NO: 374300 - RNA, 17 nt, Molluscum contagiosum virus
gcccgcaguuugcaugg

SEQ ID NO: 374301 - RNA, 19 nt, Molluscum contagiosum virus
gcccgccaccaugcuuguu

SEQ ID NO: 374302 - RNA, 15 nt, Molluscum contagiosum virus
gcccgccgagcucuu

SEQ ID NO: 374303 - RNA, 23 nt, Molluscum contagiosum virus
gcccgccgggcaccggcgcucac

SEQ ID NO: 374304 - RNA, 20 nt, Molluscum contagiosum virus
gcccgccucgucguccacag

SEQ ID NO: 374305 - RNA, 13 nt, Molluscum contagiosum virus
gcccgcgcggaga

SEQ ID NO: 374306 - RNA, 16 nt, Molluscum contagiosum virus
gcccgcgggcugcaag

SEQ ID NO: 374307 - RNA, 20 nt, Molluscum contagiosum virus
gcccgcugcgcgcucuggag

SEQ ID NO: 374308 - RNA, 12 nt, Molluscum contagiosum virus
gcccgcugcucu

SEQ ID NO: 374309 - RNA, 17 nt, Molluscum contagiosum virus
gcccgggugcacgguga

SEQ ID NO: 374310 - RNA, 21 nt, Molluscum contagiosum virus
gcccgugcaccucccugugaa

SEQ ID NO: 374311 - RNA, 22 nt, Molluscum contagiosum virus
gcccgugcaccucccugugaac

SEQ ID NO: 374312 - RNA, 20 nt, Molluscum contagiosum virus
gcccgugcccgaguuugccc

SEQ ID NO: 374313 - RNA, 19 nt, Molluscum contagiosum virus
gcccuaaauaaugaaccug

SEQ ID NO: 374314 - RNA, 18 nt, Molluscum contagiosum virus
gcccuccucgaccugcac

SEQ ID NO: 374315 - RNA, 17 nt, Molluscum contagiosum virus
gcccucgagcaaugcga

SEQ ID NO: 374316 - RNA, 13 nt, Molluscum contagiosum virus
gcccucucgaggc

SEQ ID NO: 374317 - RNA, 18 nt, Molluscum contagiosum virus
gcccuggagcgcaguccc

SEQ ID NO: 374318 - RNA, 21 nt, Molluscum contagiosum virus
gcccuguccacaaaaccaaaa

SEQ ID NO: 374319 - RNA, 13 nt, Molluscum contagiosum virus
gcccuuauacaaa

SEQ ID NO: 374320 - RNA, 22 nt, Molluscum contagiosum virus
gccgaagagugcgcaacauguc

SEQ ID NO: 374321 - RNA, 18 nt, Molluscum contagiosum virus
gccgacaacgugcugcuc

SEQ ID NO: 374322 - RNA, 20 nt, Molluscum contagiosum virus
gccgacuuccgacgggccgc

SEQ ID NO: 374323 - RNA, 17 nt, Molluscum contagiosum virus
gccgagauggagcucac

SEQ ID NO: 374324 - RNA, 17 nt, Molluscum contagiosum virus
gccgagcgccgccagcu

SEQ ID NO: 374325 - RNA, 16 nt, Molluscum contagiosum virus
gccgaggacuaccugg

SEQ ID NO: 374326 - RNA, 14 nt, Molluscum contagiosum virus
gccgaggucuucca

SEQ ID NO: 374327 - RNA, 15 nt, Molluscum contagiosum virus
gccgaguacugcugc

SEQ ID NO: 374328 - RNA, 14 nt, Molluscum contagiosum virus
gccgcacggcgccc

SEQ ID NO: 374329 - RNA, 16 nt, Molluscum contagiosum virus
gccgcagcccacgugc

SEQ ID NO: 374330 - RNA, 17 nt, Molluscum contagiosum virus
gccgcagcgcuggagcu

SEQ ID NO: 374331 - RNA, 21 nt, Molluscum contagiosum virus
gccgcaguacgugacagucag

SEQ ID NO: 374332 - RNA, 15 nt, Molluscum contagiosum virus
gccgccaugcugcgc

SEQ ID NO: 374333 - RNA, 15 nt, Molluscum contagiosum virus
gccgccucgcgcgca

SEQ ID NO: 374334 - RNA, 20 nt, Molluscum contagiosum virus
gccgccuggccgaacugcuc

SEQ ID NO: 374335 - RNA, 21 nt, Molluscum contagiosum virus
gccgcgaaagcgucgugcucc

SEQ ID NO: 374336 - RNA, 19 nt, Molluscum contagiosum virus
gccgcgagacgcagacgac

SEQ ID NO: 374337 - RNA, 18 nt, Molluscum contagiosum virus
gccgcgcaauacggugga

SEQ ID NO: 374338 - RNA, 15 nt, Molluscum contagiosum virus
gccgcgcaccuggag

SEQ ID NO: 374339 - RNA, 18 nt, Molluscum contagiosum virus
gccgcgcccgcggcgcac

SEQ ID NO: 374340 - RNA, 16 nt, Molluscum contagiosum virus
gccgcgccgcacgugc

SEQ ID NO: 374341 - RNA, 22 nt, Molluscum contagiosum virus
gcgagcacugcgcgcgcggcgc

SEQ ID NO: 374342 - RNA, 11 nt, Molluscum contagiosum virus
gcgagcacugg

SEQ ID NO: 374343 - RNA, 19 nt, Molluscum contagiosum virus
gcgagcccggaucagcccc

SEQ ID NO: 374344 - RNA, 20 nt, Molluscum contagiosum virus
gcgagcggcuuuucgccgga

SEQ ID NO: 374345 - RNA, 16 nt, Molluscum contagiosum virus
gcgagcuagugcacac

SEQ ID NO: 374346 - RNA, 15 nt, Molluscum contagiosum virus
gcgagcugcgggcgc

SEQ ID NO: 374347 - RNA, 12 nt, Molluscum contagiosum virus
gcgagcugcuag

SEQ ID NO: 374348 - RNA, 12 nt, Molluscum contagiosum virus
gcgaggccaagg

SEQ ID NO: 374349 - RNA, 13 nt, Molluscum contagiosum virus
gcgaggcgcgcac

SEQ ID NO: 374350 - RNA, 15 nt, Molluscum contagiosum virus
gcgagucucccgugg

SEQ ID NO: 374351 - RNA, 18 nt, Molluscum contagiosum virus
gcgagucucccguggcgc

SEQ ID NO: 374352 - RNA, 13 nt, Molluscum contagiosum virus
gcgaguggcgcgc

SEQ ID NO: 374353 - RNA, 12 nt, Molluscum contagiosum virus
gcgagugucucg

SEQ ID NO: 374354 - RNA, 16 nt, Molluscum contagiosum virus
gcgauagcgauggcug

SEQ ID NO: 374355 - RNA, 17 nt, Molluscum contagiosum virus
gcgauaggacaugacug

SEQ ID NO: 374356 - RNA, 17 nt, Molluscum contagiosum virus
gcgauccuguccaucuu

SEQ ID NO: 374357 - RNA, 20 nt, Molluscum contagiosum virus
gcgcaaacaagcagucucau

SEQ ID NO: 374358 - RNA, 21 nt, Molluscum contagiosum virus
gcgcaacacggccuucuccuc

SEQ ID NO: 374359 - RNA, 13 nt, Molluscum contagiosum virus
gcgcaacaugucc

SEQ ID NO: 374360 - RNA, 15 nt, Molluscum contagiosum virus
gcgcaaccagcuggc

SEQ ID NO: 374361 - RNA, 15 nt, Molluscum contagiosum virus
gcgcaagaacaacca

SEQ ID NO: 374362 - RNA, 19 nt, Molluscum contagiosum virus
gcgcaagcauggucuucgc

SEQ ID NO: 374363 - RNA, 19 nt, Molluscum contagiosum virus
gcgcaaggacaccgcgggc

SEQ ID NO: 374364 - RNA, 13 nt, Molluscum contagiosum virus
gcgcaagugcgug

SEQ ID NO: 374365 - RNA, 23 nt, Molluscum contagiosum virus
gcgcaagugggcgucgaccugga

SEQ ID NO: 374366 - RNA, 12 nt, Molluscum contagiosum virus
gcgcaagugugc

SEQ ID NO: 374367 - RNA, 16 nt, Molluscum contagiosum virus
gcgcacaaacgcgcgc

SEQ ID NO: 374368 - RNA, 13 nt, Molluscum contagiosum virus
gcgcacacgcuga

SEQ ID NO: 374369 - RNA, 14 nt, Molluscum contagiosum virus
gcgcacacuugcgc

SEQ ID NO: 374370 - RNA, 12 nt, Molluscum contagiosum virus
gcgcacaugccg

SEQ ID NO: 374371 - RNA, 13 nt, Molluscum contagiosum virus
gcgcaccgcgggc

SEQ ID NO: 374372 - RNA, 22 nt, Molluscum contagiosum virus
gcgcaccugcacgagccggcgc

SEQ ID NO: 374373 - RNA, 12 nt, Molluscum contagiosum virus
gcgcacgagcug

SEQ ID NO: 374374 - RNA, 20 nt, Molluscum contagiosum virus
gcgcacgcaagcccgcgcgc

SEQ ID NO: 374375 - RNA, 24 nt, Molluscum contagiosum virus
gcgcacgcaagcccgcgcgcgagc

SEQ ID NO: 374376 - RNA, 21 nt, Molluscum contagiosum virus
gcgcacgcuagucguuggcgc

SEQ ID NO: 374377 - RNA, 17 nt, Molluscum contagiosum virus
gcgcacgcugcgcacgg

SEQ ID NO: 374378 - RNA, 20 nt, Molluscum contagiosum virus
gcgcacgcuuguccgcggac

SEQ ID NO: 374379 - RNA, 23 nt, Molluscum contagiosum virus
gcgcacggacuuuucgcgcgugc

SEQ ID NO: 374380 - RNA, 20 nt, Molluscum contagiosum virus
gcgcacuacucgucuugcgc

SEQ ID NO: 374381 - RNA, 13 nt, Molluscum contagiosum virus
gcgcacugcucgc

SEQ ID NO: 374382 - RNA, 14 nt, Molluscum contagiosum virus
gcgcagaagccaac

SEQ ID NO: 374383 - RNA, 23 nt, Molluscum contagiosum virus
gcgcagagcuccccgcgcgcagc

SEQ ID NO: 374384 - RNA, 13 nt, Molluscum contagiosum virus
gcgcagcugcgcc

SEQ ID NO: 374385 - RNA, 14 nt, Molluscum contagiosum virus
gcgcagggagcugc

SEQ ID NO: 374386 - RNA, 23 nt, Molluscum contagiosum virus
gcgcagggagcugcggacgcggg

SEQ ID NO: 374387 - RNA, 14 nt, Molluscum contagiosum virus
gcgcagucccagca

SEQ ID NO: 374388 - RNA, 16 nt, Molluscum contagiosum virus
gcgcagugcugcgcga

SEQ ID NO: 374389 - RNA, 17 nt, Molluscum contagiosum virus
gcgcaguucgagcugcu

SEQ ID NO: 374390 - RNA, 19 nt, Molluscum contagiosum virus
gcgcaguucgagcugcugc

SEQ ID NO: 374391 - RNA, 20 nt, Molluscum contagiosum virus
gcgcauacgcgccgcgcgcu

SEQ ID NO: 374392 - RNA, 17 nt, Molluscum contagiosum virus
gcgcauccucuccauca

SEQ ID NO: 374393 - RNA, 16 nt, Molluscum contagiosum virus
gcgcauggccacgccc

SEQ ID NO: 374394 - RNA, 14 nt, Molluscum contagiosum virus
gcgccaucaauuca

SEQ ID NO: 374395 - RNA, 22 nt, Molluscum contagiosum virus
gcgccaucaauucaaaggugcu

SEQ ID NO: 374396 - RNA, 14 nt, Molluscum contagiosum virus
gcgcccaccagcag

SEQ ID NO: 374397 - RNA, 20 nt, Molluscum contagiosum virus
gcgcccagcgccacgaagaa

SEQ ID NO: 374398 - RNA, 23 nt, Molluscum contagiosum virus
gcgcccccgcuugcgaguuugca

SEQ ID NO: 374399 - RNA, 15 nt, Molluscum contagiosum virus
gcgcccgacgagcuu

SEQ ID NO: 374400 - RNA, 15 nt, Molluscum contagiosum virus
gcgcccgcagcgcgc

SEQ ID NO: 374401 - RNA, 17 nt, Molluscum contagiosum virus
gcgcccgccaccaugcu

SEQ ID NO: 374402 - RNA, 12 nt, Molluscum contagiosum virus
gcgcccgcggac

SEQ ID NO: 374403 - RNA, 13 nt, Molluscum contagiosum virus
gcgcccgcggaga

SEQ ID NO: 374404 - RNA, 14 nt, Molluscum contagiosum virus
gcgcccuugcacuc

SEQ ID NO: 374405 - RNA, 16 nt, Molluscum contagiosum virus
gcgccgacaugcgcac

SEQ ID NO: 374406 - RNA, 15 nt, Molluscum contagiosum virus
gcgccgcaaaaugaa

SEQ ID NO: 374407 - RNA, 16 nt, Molluscum contagiosum virus
gcgccgccgacgccuu

SEQ ID NO: 374408 - RNA, 20 nt, Molluscum contagiosum virus
gcgccgccgcgccgcugcgc

SEQ ID NO: 374409 - RNA, 17 nt, Molluscum contagiosum virus
gcgccgcgcaugacagc

SEQ ID NO: 374410 - RNA, 18 nt, Molluscum contagiosum virus
gcgccgcgcgagugccag

SEQ ID NO: 374411 - RNA, 12 nt, Molluscum contagiosum virus
gcgccgcggcgg

SEQ ID NO: 374412 - RNA, 14 nt, Molluscum contagiosum virus
gcgccgcggcugcc

SEQ ID NO: 374413 - RNA, 13 nt, Molluscum contagiosum virus
gcgccgcuaccag

SEQ ID NO: 374414 - RNA, 13 nt, Molluscum contagiosum virus
gcgccgcuccaac

SEQ ID NO: 374415 - RNA, 13 nt, Molluscum contagiosum virus
gcgccgcugcgcc

SEQ ID NO: 374416 - RNA, 17 nt, Molluscum contagiosum virus
gcgccgugcugcgucac

SEQ ID NO: 374417 - RNA, 23 nt, Molluscum contagiosum virus
gcgccgugcugcgucacaagcac

SEQ ID NO: 374418 - RNA, 22 nt, Molluscum contagiosum virus
gcgccuccgacuaccuaggcac

SEQ ID NO: 374419 - RNA, 22 nt, Molluscum contagiosum virus
gcgccugcacuucggacaccuc

SEQ ID NO: 374420 - RNA, 12 nt, Molluscum contagiosum virus
gcgccugcgcga

SEQ ID NO: 374421 - RNA, 14 nt, Molluscum contagiosum virus
gcgccugcuugcgc

SEQ ID NO: 374422 - RNA, 14 nt, Molluscum contagiosum virus
gcgcgacuacgcac

SEQ ID NO: 374423 - RNA, 13 nt, Molluscum contagiosum virus
gcgcgacuccauc

SEQ ID NO: 374424 - RNA, 16 nt, Molluscum contagiosum virus
gcgcgacuccaucugc

SEQ ID NO: 374425 - RNA, 22 nt, Molluscum contagiosum virus
gcgcgagacgcugcugcacagc

SEQ ID NO: 374426 - RNA, 13 nt, Molluscum contagiosum virus
gcgcgagagcuac

SEQ ID NO: 374427 - RNA, 15 nt, Molluscum contagiosum virus
gcgcgagcaugccgc

SEQ ID NO: 374428 - RNA, 15 nt, Molluscum contagiosum virus
gcgcgagcgacggca

SEQ ID NO: 374429 - RNA, 15 nt, Molluscum contagiosum virus
gcgcgagugugcgug

SEQ ID NO: 374430 - RNA, 22 nt, Molluscum contagiosum virus
gcgcgcaagaacaaccagacgu

SEQ ID NO: 374431 - RNA, 23 nt, Molluscum contagiosum virus
gcgcgcacaucggcacugcucac

SEQ ID NO: 374432 - RNA, 17 nt, Molluscum contagiosum virus
gcgcgcagacguggugc

SEQ ID NO: 374433 - RNA, 13 nt, Molluscum contagiosum virus
gcgcgcagcacac

SEQ ID NO: 374434 - RNA, 14 nt, Molluscum contagiosum virus
gcgcgcaugcucgc

SEQ ID NO: 374435 - RNA, 18 nt, Molluscum contagiosum virus
gcgcgcccccgugcugug

SEQ ID NO: 374436 - RNA, 16 nt, Molluscum contagiosum virus
gcgcgccgacgugcgc

SEQ ID NO: 374437 - RNA, 13 nt, Molluscum contagiosum virus
gcgcgccgccgca

SEQ ID NO: 374438 - RNA, 15 nt, Molluscum contagiosum virus
gcgcgccgcgccgca

SEQ ID NO: 374439 - RNA, 17 nt, Molluscum contagiosum virus
gcgcgccgcgcuggcgc

SEQ ID NO: 374440 - RNA, 14 nt, Molluscum contagiosum virus
gcgcgccgggccgc

SEQ ID NO: 374441 - RNA, 18 nt, Molluscum contagiosum virus
gcgcgccugccgccugca

SEQ ID NO: 374442 - RNA, 14 nt, Molluscum contagiosum virus
gcgcgcgagcacag

SEQ ID NO: 374443 - RNA, 19 nt, Molluscum contagiosum virus
gcgcgcgagcacagcgcgc

SEQ ID NO: 374444 - RNA, 13 nt, Molluscum contagiosum virus
gcgcgcgccagcu

SEQ ID NO: 374445 - RNA, 15 nt, Molluscum contagiosum virus
gcggcgcgccggccc

SEQ ID NO: 374446 - RNA, 23 nt, Molluscum contagiosum virus
gcggcgcgcgcugagcgcggagc

SEQ ID NO: 374447 - RNA, 14 nt, Molluscum contagiosum virus
gcggcgcgugccgc

SEQ ID NO: 374448 - RNA, 19 nt, Molluscum contagiosum virus
gcggcgcgugccgcugcgc

SEQ ID NO: 374449 - RNA, 17 nt, Molluscum contagiosum virus
gcggcgcgugucgcgga

SEQ ID NO: 374450 - RNA, 19 nt, Molluscum contagiosum virus
gcggcgcguuuucgcggcc

SEQ ID NO: 374451 - RNA, 23 nt, Molluscum contagiosum virus
gcggcgcucugccaccgcggcgc

SEQ ID NO: 374452 - RNA, 22 nt, Molluscum contagiosum virus
gcggcgcuuucgcccgccgcgc

SEQ ID NO: 374453 - RNA, 14 nt, Molluscum contagiosum virus
gcggcuaagcucug

SEQ ID NO: 374454 - RNA, 21 nt, Molluscum contagiosum virus
gcggcuuuaacguuagcacua

SEQ ID NO: 374455 - RNA, 20 nt, Molluscum contagiosum virus
gcgggaagaggacgccggca

SEQ ID NO: 374456 - RNA, 14 nt, Molluscum contagiosum virus
gcgggagagcacuu

SEQ ID NO: 374457 - RNA, 16 nt, Molluscum contagiosum virus
gcgggauacgggcgcu

SEQ ID NO: 374458 - RNA, 20 nt, Molluscum contagiosum virus
gcgggcacauccgcuaccug

SEQ ID NO: 374459 - RNA, 14 nt, Molluscum contagiosum virus
gcgggcacgggcac

SEQ ID NO: 374460 - RNA, 16 nt, Molluscum contagiosum virus
gcgggccgcgcgcaca

SEQ ID NO: 374461 - RNA, 20 nt, Molluscum contagiosum virus
gcgggccuguccgcgggcgc

SEQ ID NO: 374462 - RNA, 19 nt, Molluscum contagiosum virus
gcgggcgaaagcgccgcgc

SEQ ID NO: 374463 - RNA, 16 nt, Molluscum contagiosum virus
gcgggcggcgucgcgc

SEQ ID NO: 374464 - RNA, 18 nt, Molluscum contagiosum virus
gcggggcaggcagugccg

SEQ ID NO: 374465 - RNA, 21 nt, Molluscum contagiosum virus
gcggggcucguccucgggcgc

SEQ ID NO: 374466 - RNA, 17 nt, Molluscum contagiosum virus
gcggucaggccgggcgc

SEQ ID NO: 374467 - RNA, 19 nt, Molluscum contagiosum virus
gcggucaggccgggcgcgg

SEQ ID NO: 374468 - RNA, 20 nt, Molluscum contagiosum virus
gcgguccuguccgcggacgc

SEQ ID NO: 374469 - RNA, 21 nt, Molluscum contagiosum virus
gcggucucggcagcagcgugc

SEQ ID NO: 374470 - RNA, 12 nt, Molluscum contagiosum virus
gcggucuuccag

SEQ ID NO: 374471 - RNA, 24 nt, Molluscum contagiosum virus
gcggucuuggcaugcgugcuucac

SEQ ID NO: 374472 - RNA, 23 nt, Molluscum contagiosum virus
gcggugagccguuccacacagaa

SEQ ID NO: 374473 - RNA, 13 nt, Molluscum contagiosum virus
gcggugcgcacau

SEQ ID NO: 374474 - RNA, 20 nt, Molluscum contagiosum virus
gcgguggccgcgccgggcgc

SEQ ID NO: 374475 - RNA, 22 nt, Molluscum contagiosum virus
gcgguguaugcucgucgccggg

SEQ ID NO: 374476 - RNA, 20 nt, Molluscum contagiosum virus
gcguacacauggccgcgcgc

SEQ ID NO: 374477 - RNA, 20 nt, Molluscum contagiosum virus
gcguacgcgugcgcuggcgc

SEQ ID NO: 374478 - RNA, 19 nt, Molluscum contagiosum virus
gcguacgugcacguggcgc

SEQ ID NO: 374479 - RNA, 21 nt, Molluscum contagiosum virus
gcguacucaacgcgauggcgc

SEQ ID NO: 374480 - RNA, 16 nt, Molluscum contagiosum virus
gcguacuccguggugc

SEQ ID NO: 374481 - RNA, 14 nt, Molluscum contagiosum virus
gcguacugggagcu

SEQ ID NO: 374482 - RNA, 15 nt, Molluscum contagiosum virus
gcguagcaugcucgu

SEQ ID NO: 374483 - RNA, 18 nt, Molluscum contagiosum virus
gcguagcuagcucugcgc

SEQ ID NO: 374484 - RNA, 13 nt, Molluscum contagiosum virus
gcguccacaaaga

SEQ ID NO: 374485 - RNA, 17 nt, Molluscum contagiosum virus
gcguccgcaaagacgga

SEQ ID NO: 374486 - RNA, 14 nt, Molluscum contagiosum virus
gcguccggcgcuug

SEQ ID NO: 374487 - RNA, 23 nt, Molluscum contagiosum virus
gcguccguaagucgaagaggguc

SEQ ID NO: 374488 - RNA, 22 nt, Molluscum contagiosum virus
gcgucgaaggagcccgucuaca

SEQ ID NO: 374489 - RNA, 15 nt, Molluscum contagiosum virus
gcgucgcgcacagaa

SEQ ID NO: 374490 - RNA, 12 nt, Molluscum contagiosum virus
gcgucgcgcagg

SEQ ID NO: 374491 - RNA, 17 nt, Molluscum contagiosum virus
gcgucgcgcaggcgccc

SEQ ID NO: 374492 - RNA, 14 nt, Molluscum contagiosum virus
gcgucggcaagacc

SEQ ID NO: 374493 - RNA, 13 nt, Molluscum contagiosum virus
gcgucgugugcgc

SEQ ID NO: 374494 - RNA, 21 nt, Molluscum contagiosum virus
gcgucucaagacaagucacac

SEQ ID NO: 374495 - RNA, 19 nt, Molluscum contagiosum virus
gcgucugugcgcgcuacag

SEQ ID NO: 374496 - RNA, 14 nt, Molluscum contagiosum virus
gcgucuuacugcug

SEQ ID NO: 374497 - RNA, 23 nt, Molluscum contagiosum virus
gcgugacaaucucugcgccgcgc

SEQ ID NO: 374498 - RNA, 18 nt, Molluscum contagiosum virus
gcgugacagguccggugu

SEQ ID NO: 374499 - RNA, 17 nt, Molluscum contagiosum virus
gcgugagcguucgcuac

SEQ ID NO: 374500 - RNA, 23 nt, Molluscum contagiosum virus
gcgugagcguucgcuacuucaca

SEQ ID NO: 374501 - RNA, 23 nt, Molluscum contagiosum virus
gcgugaggaggcggcacugcuag

SEQ ID NO: 374502 - RNA, 15 nt, Molluscum contagiosum virus
gcgugccgcggacgc

SEQ ID NO: 374503 - RNA, 16 nt, Molluscum contagiosum virus
gcgugccuuguucuga

SEQ ID NO: 374504 - RNA, 16 nt, Molluscum contagiosum virus
gcgugcgaguguuccc

SEQ ID NO: 374505 - RNA, 22 nt, Molluscum contagiosum virus
gcgugcgcgccaggugcgaagg

SEQ ID NO: 374506 - RNA, 21 nt, Molluscum contagiosum virus
gcgugcucgguagcguggagc

SEQ ID NO: 374507 - RNA, 16 nt, Molluscum contagiosum virus
gcgugcugucagugga

SEQ ID NO: 374508 - RNA, 23 nt, Molluscum contagiosum virus
gcgugcuuguagcgcaaggcgac

SEQ ID NO: 374509 - RNA, 11 nt, Molluscum contagiosum virus
gcguggcgcgc

SEQ ID NO: 374510 - RNA, 19 nt, Molluscum contagiosum virus
gcguguuccggcagcgccg

SEQ ID NO: 374511 - RNA, 20 nt, Molluscum contagiosum virus
gcguuacagcaccuugccuc

SEQ ID NO: 374512 - RNA, 20 nt, Molluscum contagiosum virus
gcguucaccuuggcgcugca

SEQ ID NO: 374513 - RNA, 12 nt, Molluscum contagiosum virus
gcguuccaggaa

SEQ ID NO: 374514 - RNA, 14 nt, Molluscum contagiosum virus
gcguucgagcugau

SEQ ID NO: 374515 - RNA, 17 nt, Molluscum contagiosum virus
gcguucgcuacuucaca

SEQ ID NO: 374516 - RNA, 23 nt, Molluscum contagiosum virus
gcguuugauacaguacgacaaag

SEQ ID NO: 374517 - RNA, 19 nt, Molluscum contagiosum virus
gcuaacuauguucuucgca

SEQ ID NO: 374518 - RNA, 19 nt, Molluscum contagiosum virus
gcuaaguuccgaacaguac

SEQ ID NO: 374519 - RNA, 20 nt, Molluscum contagiosum virus
gcuaccacgagcacugccug

SEQ ID NO: 374520 - RNA, 23 nt, Molluscum contagiosum virus
gcuaccuaccggcagcaugcuca

SEQ ID NO: 374521 - RNA, 18 nt, Molluscum contagiosum virus
gcuacgacgacaugcaca

SEQ ID NO: 374522 - RNA, 19 nt, Molluscum contagiosum virus
gcuacgaggccuacgugcu

SEQ ID NO: 374523 - RNA, 16 nt, Molluscum contagiosum virus
gcuacgcgagcacugc

SEQ ID NO: 374524 - RNA, 13 nt, Molluscum contagiosum virus
gcuacguggcgcg

SEQ ID NO: 374525 - RNA, 11 nt, Molluscum contagiosum virus
gcuacuuuucg

SEQ ID NO: 374526 - RNA, 13 nt, Molluscum contagiosum virus
gcuagcaagcacg

SEQ ID NO: 374527 - RNA, 15 nt, Molluscum contagiosum virus
gcuagcgcugcucua

SEQ ID NO: 374528 - RNA, 18 nt, Molluscum contagiosum virus
gcuagcgugagagcaaag

SEQ ID NO: 374529 - RNA, 17 nt, Molluscum contagiosum virus
gcuagcucuggcagccc

SEQ ID NO: 374530 - RNA, 19 nt, Molluscum contagiosum virus
gcuaggauccugcucaaga

SEQ ID NO: 374531 - RNA, 19 nt, Molluscum contagiosum virus
gcuaggguccaccugcgac

SEQ ID NO: 374532 - RNA, 20 nt, Molluscum contagiosum virus
gcucaaccaguacuucaucu

SEQ ID NO: 374533 - RNA, 17 nt, Molluscum contagiosum virus
gcucaagaacaccaaga

SEQ ID NO: 374534 - RNA, 18 nt, Molluscum contagiosum virus
gcucaagcaccugcgcuu

SEQ ID NO: 374535 - RNA, 16 nt, Molluscum contagiosum virus
gcucaagcuggcaacg

SEQ ID NO: 374536 - RNA, 16 nt, Molluscum contagiosum virus
gcucaaggacaucuac

SEQ ID NO: 374537 - RNA, 21 nt, Molluscum contagiosum virus
gcucaaggacaucuacagccg

SEQ ID NO: 374538 - RNA, 12 nt, Molluscum contagiosum virus
gcucacaucugu

SEQ ID NO: 374539 - RNA, 21 nt, Molluscum contagiosum virus
gcucaccgccgagauggagcu

SEQ ID NO: 374540 - RNA, 20 nt, Molluscum contagiosum virus
gcucagcaggcuguguucca

SEQ ID NO: 374541 - RNA, 19 nt, Molluscum contagiosum virus
gcucagcguggagcaccug

SEQ ID NO: 374542 - RNA, 18 nt, Molluscum contagiosum virus
gcucaggccagcaucuug

SEQ ID NO: 374543 - RNA, 19 nt, Molluscum contagiosum virus
gcucaucggcgagcucuuu

SEQ ID NO: 374544 - RNA, 21 nt, Molluscum contagiosum virus
gcucauggcgcgcaaccagcu

SEQ ID NO: 374545 - RNA, 16 nt, Molluscum contagiosum virus
gcuccacgcgcagcuu

SEQ ID NO: 374546 - RNA, 11 nt, Molluscum contagiosum virus
gcucccgcugc

SEQ ID NO: 374547 - RNA, 21 nt, Molluscum contagiosum virus
gcugugcgcuacguggcgcga

SEQ ID NO: 374548 - RNA, 20 nt, Molluscum contagiosum virus
gcuguucaacaucguggcgc

SEQ ID NO: 374549 - RNA, 16 nt, Molluscum contagiosum virus
gcuuaauuuugcacau

SEQ ID NO: 374550 - RNA, 22 nt, Molluscum contagiosum virus
gcuucacggagaucaggcagcu

SEQ ID NO: 374551 - RNA, 17 nt, Molluscum contagiosum virus
gcuucaucaagcacggc

SEQ ID NO: 374552 - RNA, 22 nt, Molluscum contagiosum virus
gcuucauggaggccaacuaccu

SEQ ID NO: 374553 - RNA, 23 nt, Molluscum contagiosum virus
gcuucauggaggccaacuaccug

SEQ ID NO: 374554 - RNA, 17 nt, Molluscum contagiosum virus
gcuuccgcaccuggucg

SEQ ID NO: 374555 - RNA, 23 nt, Molluscum contagiosum virus
gcuuccggcaccacgugcgcugg

SEQ ID NO: 374556 - RNA, 17 nt, Molluscum contagiosum virus
gcuuccuggcacuggcg

SEQ ID NO: 374557 - RNA, 22 nt, Molluscum contagiosum virus
gcuucgacuucuccgcgcugca

SEQ ID NO: 374558 - RNA, 17 nt, Molluscum contagiosum virus
gcuucgggccgcugccg

SEQ ID NO: 374559 - RNA, 12 nt, Molluscum contagiosum virus
gcuucuagcucg

SEQ ID NO: 374560 - RNA, 15 nt, Molluscum contagiosum virus
gcuugcucacgcugc

SEQ ID NO: 374561 - RNA, 18 nt, Molluscum contagiosum virus
gcuuggcacagugcugga

SEQ ID NO: 374562 - RNA, 16 nt, Molluscum contagiosum virus
gcuuggccauggugga

SEQ ID NO: 374563 - RNA, 15 nt, Molluscum contagiosum virus
gcuugggcacugcua

SEQ ID NO: 374564 - RNA, 16 nt, Molluscum contagiosum virus
gcuugggcacugcuac

SEQ ID NO: 374565 - RNA, 15 nt, Molluscum contagiosum virus
gcuuggugcagcgga

SEQ ID NO: 374566 - RNA, 12 nt, Molluscum contagiosum virus
gcuuguucucuu

SEQ ID NO: 374567 - RNA, 23 nt, Molluscum contagiosum virus
gcuuucagagugacgcugcaaga

SEQ ID NO: 374568 - RNA, 23 nt, Molluscum contagiosum virus
gcuuucucgcacuuaaaugggaa

SEQ ID NO: 374569 - RNA, 19 nt, Molluscum contagiosum virus
gcuuugccaaagcucucuu

SEQ ID NO: 374570 - RNA, 16 nt, Molluscum contagiosum virus
gcuuugucgcgaacgc

SEQ ID NO: 374571 - RNA, 11 nt, Molluscum contagiosum virus
gcuuuuugccg

SEQ ID NO: 374572 - RNA, 19 nt, Molluscum contagiosum virus
gcuuuuuucuucgcuacgg

SEQ ID NO: 374573 - RNA, 21 nt, Molluscum contagiosum virus
ggaaaacgcccgagcgcgugu

SEQ ID NO: 374574 - RNA, 15 nt, Molluscum contagiosum virus
ggaaaagaaaccccu

SEQ ID NO: 374575 - RNA, 22 nt, Molluscum contagiosum virus
ggaaaauccgcgcccgcgcggc

SEQ ID NO: 374576 - RNA, 15 nt, Molluscum contagiosum virus
ggaaaccucaccucu

SEQ ID NO: 374577 - RNA, 21 nt, Molluscum contagiosum virus
ggaaacgcuggcgagcaagau

SEQ ID NO: 374578 - RNA, 14 nt, Molluscum contagiosum virus
ggaaacggaccugg

SEQ ID NO: 374579 - RNA, 15 nt, Molluscum contagiosum virus
ggaaagagcacgcgc

SEQ ID NO: 374580 - RNA, 23 nt, Molluscum contagiosum virus
ggaaagagcgcgcgaagcauguc

SEQ ID NO: 374581 - RNA, 20 nt, Molluscum contagiosum virus
ggaaaggcacccgcaggaaa

SEQ ID NO: 374582 - RNA, 20 nt, Molluscum contagiosum virus
ggaaaggcaccugcaggaaa

SEQ ID NO: 374583 - RNA, 23 nt, Molluscum contagiosum virus
ggaaaggccccccgcaacaagga

SEQ ID NO: 374584 - RNA, 21 nt, Molluscum contagiosum virus
ggaaagguaccccgcaggaaa

SEQ ID NO: 374585 - RNA, 20 nt, Molluscum contagiosum virus
ggaaagguacccgcaggaaa

SEQ ID NO: 374586 - RNA, 23 nt, Molluscum contagiosum virus
ggaaauagcgcgcuagcuccacg

SEQ ID NO: 374587 - RNA, 18 nt, Molluscum contagiosum virus
ggaacaacuugggagcaa

SEQ ID NO: 374588 - RNA, 24 nt, Molluscum contagiosum virus
ggaacaucugcaacucgcgcugca

SEQ ID NO: 374589 - RNA, 20 nt, Molluscum contagiosum virus
ggaacccgcggaagugcgag

SEQ ID NO: 374590 - RNA, 16 nt, Molluscum contagiosum virus
ggaacgcaaguacaac

SEQ ID NO: 374591 - RNA, 16 nt, Molluscum contagiosum virus
ggaagaaacagccaug

SEQ ID NO: 374592 - RNA, 21 nt, Molluscum contagiosum virus
ggaagaaacagccaugugucu

SEQ ID NO: 374593 - RNA, 13 nt, Molluscum contagiosum virus
ggaagaauuccuu

SEQ ID NO: 374594 - RNA, 19 nt, Molluscum contagiosum virus
ggaagagcguccgcggugc

SEQ ID NO: 374595 - RNA, 15 nt, Molluscum contagiosum virus
ggaagcacguagcuc

SEQ ID NO: 374596 - RNA, 16 nt, Molluscum contagiosum virus
ggaagcucacaucugu

SEQ ID NO: 374597 - RNA, 17 nt, Molluscum contagiosum virus
ggaaggcguuaaagagu

SEQ ID NO: 374598 - RNA, 18 nt, Molluscum contagiosum virus
ggaagugcgagccgugac

SEQ ID NO: 374599 - RNA, 17 nt, Molluscum contagiosum virus
ggaauaccggagacacc

SEQ ID NO: 374600 - RNA, 22 nt, Molluscum contagiosum virus
ggaaugcccgcaaugcaagccc

SEQ ID NO: 374601 - RNA, 20 nt, Molluscum contagiosum virus
ggaauuauguguaguuaaau

SEQ ID NO: 374602 - RNA, 17 nt, Molluscum contagiosum virus
ggacaaagucgcgcgcg

SEQ ID NO: 374603 - RNA, 17 nt, Molluscum contagiosum virus
ggacacagcaaaagcuu

SEQ ID NO: 374604 - RNA, 11 nt, Molluscum contagiosum virus
ggacaccucac

SEQ ID NO: 374605 - RNA, 18 nt, Molluscum contagiosum virus
ggacaccucaccuuucuc

SEQ ID NO: 374606 - RNA, 15 nt, Molluscum contagiosum virus
ggacacguagcccag

SEQ ID NO: 374607 - RNA, 14 nt, Molluscum contagiosum virus
ggacacucgcggca

SEQ ID NO: 374608 - RNA, 17 nt, Molluscum contagiosum virus
ggacacuggcaccggaa

SEQ ID NO: 374609 - RNA, 11 nt, Molluscum contagiosum virus
ggacagcaccc

SEQ ID NO: 374610 - RNA, 18 nt, Molluscum contagiosum virus
ggaccucaucaagcccga

SEQ ID NO: 374611 - RNA, 20 nt, Molluscum contagiosum virus
ggaccucaucaagcccgagu

SEQ ID NO: 374612 - RNA, 21 nt, Molluscum contagiosum virus
ggaccugcugguggugcugga

SEQ ID NO: 374613 - RNA, 19 nt, Molluscum contagiosum virus
ggacgagcucgccaugugc

SEQ ID NO: 374614 - RNA, 14 nt, Molluscum contagiosum virus
ggacgagcugcuaa

SEQ ID NO: 374615 - RNA, 15 nt, Molluscum contagiosum virus
ggacgcaaaucuguu

SEQ ID NO: 374616 - RNA, 16 nt, Molluscum contagiosum virus
ggacgcaggaugcugg

SEQ ID NO: 374617 - RNA, 16 nt, Molluscum contagiosum virus
ggacgccacucuccuu

SEQ ID NO: 374618 - RNA, 21 nt, Molluscum contagiosum virus
ggacgcccuccucgaccugca

SEQ ID NO: 374619 - RNA, 18 nt, Molluscum contagiosum virus
ggacgccguugcgcguga

SEQ ID NO: 374620 - RNA, 15 nt, Molluscum contagiosum virus
ggacgcgcaagugug

SEQ ID NO: 374621 - RNA, 13 nt, Molluscum contagiosum virus
ggacgcgcggagc

SEQ ID NO: 374622 - RNA, 21 nt, Molluscum contagiosum virus
ggacgcggaauuggcgucagg

SEQ ID NO: 374623 - RNA, 17 nt, Molluscum contagiosum virus
ggacgcguucuccagga

SEQ ID NO: 374624 - RNA, 20 nt, Molluscum contagiosum virus
ggacggcgcgcagcgcguga

SEQ ID NO: 374625 - RNA, 16 nt, Molluscum contagiosum virus
ggacguccauccucuc

SEQ ID NO: 374626 - RNA, 15 nt, Molluscum contagiosum virus
ggacgugcacguggu

SEQ ID NO: 374627 - RNA, 13 nt, Molluscum contagiosum virus
ggacuaccagcuc

SEQ ID NO: 374628 - RNA, 20 nt, Molluscum contagiosum virus
ggacucagcauguugcucua

SEQ ID NO: 374629 - RNA, 16 nt, Molluscum contagiosum virus
ggacucgccgcgcgcc

SEQ ID NO: 374630 - RNA, 15 nt, Molluscum contagiosum virus
ggacuuccgcgcgcu

SEQ ID NO: 374631 - RNA, 13 nt, Molluscum contagiosum virus
ggacuucuugcgc

SEQ ID NO: 374632 - RNA, 20 nt, Molluscum contagiosum virus
ggagaacaugcucgccagca

SEQ ID NO: 374633 - RNA, 21 nt, Molluscum contagiosum virus
ggagaacggacaaaauggcug

SEQ ID NO: 374634 - RNA, 15 nt, Molluscum contagiosum virus
ggagaacuccaagug

SEQ ID NO: 374635 - RNA, 19 nt, Molluscum contagiosum virus
ggagaacucuacacgugga

SEQ ID NO: 374636 - RNA, 15 nt, Molluscum contagiosum virus
ggagaagaacagcac

SEQ ID NO: 374637 - RNA, 22 nt, Molluscum contagiosum virus
ggagaagugcuccgcacgugga

SEQ ID NO: 374638 - RNA, 12 nt, Molluscum contagiosum virus
ggagacaccagc

SEQ ID NO: 374639 - RNA, 20 nt, Molluscum contagiosum virus
ggagaccuggucacacuggu

SEQ ID NO: 374640 - RNA, 20 nt, Molluscum contagiosum virus
ggagagcccggacacguagc

SEQ ID NO: 374641 - RNA, 22 nt, Molluscum contagiosum virus
ggagagccgcuccuggucuucc

SEQ ID NO: 374642 - RNA, 15 nt, Molluscum contagiosum virus
ggagaggacgcgugc

SEQ ID NO: 374643 - RNA, 14 nt, Molluscum contagiosum virus
ggagaucaggcagc

SEQ ID NO: 374644 - RNA, 15 nt, Molluscum contagiosum virus
ggagaucgccgcgca

SEQ ID NO: 374645 - RNA, 16 nt, Molluscum contagiosum virus
ggagauggaacugcag

SEQ ID NO: 374646 - RNA, 16 nt, Molluscum contagiosum virus
ggagauggacacagca

SEQ ID NO: 374647 - RNA, 21 nt, Molluscum contagiosum virus
ggagcaccgcguggcgcgcga

SEQ ID NO: 374648 - RNA, 18 nt, Molluscum contagiosum virus
ggagcacuuccgcgcgcu

SEQ ID NO: 374649 - RNA, 20 nt, Molluscum contagiosum virus
ggcggccucccucgucgcgc

SEQ ID NO: 374650 - RNA, 13 nt, Molluscum contagiosum virus
ggcggcgucgcgc

SEQ ID NO: 374651 - RNA, 18 nt, Molluscum contagiosum virus
ggcggugggcgccgcggc

SEQ ID NO: 374652 - RNA, 23 nt, Molluscum contagiosum virus
ggcguagagcaauacguggcgcu

SEQ ID NO: 374653 - RNA, 19 nt, Molluscum contagiosum virus
ggcgugcauuuuuccgcuu

SEQ ID NO: 374654 - RNA, 20 nt, Molluscum contagiosum virus
ggcgugcccaaccuacgcua

SEQ ID NO: 374655 - RNA, 13 nt, Molluscum contagiosum virus
ggcgugcgcagca

SEQ ID NO: 374656 - RNA, 22 nt, Molluscum contagiosum virus
ggcgugcgccgugcgucucucu

SEQ ID NO: 374657 - RNA, 20 nt, Molluscum contagiosum virus
ggcguuaaagaguuccagca

SEQ ID NO: 374658 - RNA, 13 nt, Molluscum contagiosum virus
ggcguugcugcug

SEQ ID NO: 374659 - RNA, 17 nt, Molluscum contagiosum virus
ggcuaccacgagcacug

SEQ ID NO: 374660 - RNA, 14 nt, Molluscum contagiosum virus
ggcuagcaagcacg

SEQ ID NO: 374661 - RNA, 18 nt, Molluscum contagiosum virus
ggcuagugccauugugac

SEQ ID NO: 374662 - RNA, 13 nt, Molluscum contagiosum virus
ggcucaagcuggc

SEQ ID NO: 374663 - RNA, 17 nt, Molluscum contagiosum virus
ggcuccgcacgugaugg

SEQ ID NO: 374664 - RNA, 14 nt, Molluscum contagiosum virus
ggcuccugugucgc

SEQ ID NO: 374665 - RNA, 17 nt, Molluscum contagiosum virus
ggcucgaggugugccug

SEQ ID NO: 374666 - RNA, 16 nt, Molluscum contagiosum virus
ggcucgcgagugugca

SEQ ID NO: 374667 - RNA, 14 nt, Molluscum contagiosum virus
ggcucgcgcaauac

SEQ ID NO: 374668 - RNA, 14 nt, Molluscum contagiosum virus
ggcucguacugcug

SEQ ID NO: 374669 - RNA, 17 nt, Molluscum contagiosum virus
ggcugcagcccuuccac

SEQ ID NO: 374670 - RNA, 18 nt, Molluscum contagiosum virus
ggcugcagguguguaucu

SEQ ID NO: 374671 - RNA, 16 nt, Molluscum contagiosum virus
ggcugcuuccgcaccu

SEQ ID NO: 374672 - RNA, 17 nt, Molluscum contagiosum virus
ggcugguguuaccgggu

SEQ ID NO: 374673 - RNA, 21 nt, Molluscum contagiosum virus
ggcuguuguacuggagaccug

SEQ ID NO: 374674 - RNA, 19 nt, Molluscum contagiosum virus
ggcuuacacacgcaccagu

SEQ ID NO: 374675 - RNA, 22 nt, Molluscum contagiosum virus
ggcuucgcgacgacgagcacua

SEQ ID NO: 374676 - RNA, 18 nt, Molluscum contagiosum virus
ggcuucggggacacaagg

SEQ ID NO: 374677 - RNA, 13 nt, Molluscum contagiosum virus
ggcuucugcgcgg

SEQ ID NO: 374678 - RNA, 18 nt, Molluscum contagiosum virus
ggcuugccgcucggcaca

SEQ ID NO: 374679 - RNA, 15 nt, Molluscum contagiosum virus
ggcuuugacaugcac

SEQ ID NO: 374680 - RNA, 22 nt, Molluscum contagiosum virus
gggaaaaaucccccgccaggaa

SEQ ID NO: 374681 - RNA, 14 nt, Molluscum contagiosum virus
gggaacccguggcc

SEQ ID NO: 374682 - RNA, 21 nt, Molluscum contagiosum virus
gggaacucggcuucugcugca

SEQ ID NO: 374683 - RNA, 12 nt, Molluscum contagiosum virus
gggaagcacagu

SEQ ID NO: 374684 - RNA, 14 nt, Molluscum contagiosum virus
gggaagcacguagc

SEQ ID NO: 374685 - RNA, 16 nt, Molluscum contagiosum virus
gggaagcccucagggg

SEQ ID NO: 374686 - RNA, 21 nt, Molluscum contagiosum virus
gggaauaccggagacaccagc

SEQ ID NO: 374687 - RNA, 18 nt, Molluscum contagiosum virus
gggaauggggauguggac

SEQ ID NO: 374688 - RNA, 14 nt, Molluscum contagiosum virus
gggacagacaucac

SEQ ID NO: 374689 - RNA, 16 nt, Molluscum contagiosum virus
gggagcggcauggaaa

SEQ ID NO: 374690 - RNA, 16 nt, Molluscum contagiosum virus
gggagcuuuccuugcg

SEQ ID NO: 374691 - RNA, 17 nt, Molluscum contagiosum virus
gggaugccagugcagug

SEQ ID NO: 374692 - RNA, 14 nt, Molluscum contagiosum virus
gggcaacgcgcgcg

SEQ ID NO: 374693 - RNA, 18 nt, Molluscum contagiosum virus
gggcacgcagcucuucca

SEQ ID NO: 374694 - RNA, 15 nt, Molluscum contagiosum virus
gggcacgccgugggc

SEQ ID NO: 374695 - RNA, 22 nt, Molluscum contagiosum virus
gggcacgccgugggcagcuucu

SEQ ID NO: 374696 - RNA, 13 nt, Molluscum contagiosum virus
gggcacgcgcgcg

SEQ ID NO: 374697 - RNA, 18 nt, Molluscum contagiosum virus
gggcagccgccuggccga

SEQ ID NO: 374698 - RNA, 19 nt, Molluscum contagiosum virus
gggcagccgccuggccgaa

SEQ ID NO: 374699 - RNA, 15 nt, Molluscum contagiosum virus
gggcagcuucugcuc

SEQ ID NO: 374700 - RNA, 16 nt, Molluscum contagiosum virus
gggcagcuucugcucg

SEQ ID NO: 374701 - RNA, 21 nt, Molluscum contagiosum virus
gggcagggaaagagcacgcgc

SEQ ID NO: 374702 - RNA, 14 nt, Molluscum contagiosum virus
gggcagugccaagg

SEQ ID NO: 374703 - RNA, 13 nt, Molluscum contagiosum virus
gggcccgcgcgcg

SEQ ID NO: 374704 - RNA, 12 nt, Molluscum contagiosum virus
gggccgcgcgca

SEQ ID NO: 374705 - RNA, 12 nt, Molluscum contagiosum virus
gggccgcggcgc

SEQ ID NO: 374706 - RNA, 15 nt, Molluscum contagiosum virus
gggccggacguccau

SEQ ID NO: 374707 - RNA, 13 nt, Molluscum contagiosum virus
gggccugugcugu

SEQ ID NO: 374708 - RNA, 14 nt, Molluscum contagiosum virus
gggccuuucucaga

SEQ ID NO: 374709 - RNA, 22 nt, Molluscum contagiosum virus
gggcgagucucccguggcgcgc

SEQ ID NO: 374710 - RNA, 18 nt, Molluscum contagiosum virus
gggcgccagcuaagccgg

SEQ ID NO: 374711 - RNA, 20 nt, Molluscum contagiosum virus
gggcgccagcuaagccggag

SEQ ID NO: 374712 - RNA, 23 nt, Molluscum contagiosum virus
gggcgcgaaccuagacacgagcg

SEQ ID NO: 374713 - RNA, 15 nt, Molluscum contagiosum virus
gggcgcgcgccagca

SEQ ID NO: 374714 - RNA, 20 nt, Molluscum contagiosum virus
gggcgcggcgucgucgugaa

SEQ ID NO: 374715 - RNA, 12 nt, Molluscum contagiosum virus
gggcguccguaa

SEQ ID NO: 374716 - RNA, 21 nt, Molluscum contagiosum virus
gggcguccguaagucgaagag

SEQ ID NO: 374717 - RNA, 15 nt, Molluscum contagiosum virus
gggcgucgcacaguu

SEQ ID NO: 374718 - RNA, 21 nt, Molluscum contagiosum virus
gggcuacgacgcgcuggugac

SEQ ID NO: 374719 - RNA, 15 nt, Molluscum contagiosum virus
gggcuagcaagcacg

SEQ ID NO: 374720 - RNA, 22 nt, Molluscum contagiosum virus
gggcuagcaagcacgccaggug

SEQ ID NO: 374721 - RNA, 14 nt, Molluscum contagiosum virus
gggcucgccaugcu

SEQ ID NO: 374722 - RNA, 17 nt, Molluscum contagiosum virus
gggcugccggcgcguga

SEQ ID NO: 374723 - RNA, 23 nt, Molluscum contagiosum virus
gggcugccguuuuacacagggcu

SEQ ID NO: 374724 - RNA, 14 nt, Molluscum contagiosum virus
gggcugcgcggcgg

SEQ ID NO: 374725 - RNA, 15 nt, Molluscum contagiosum virus
gggcuggacugugcu

SEQ ID NO: 374726 - RNA, 12 nt, Molluscum contagiosum virus
gggcuggcagaa

SEQ ID NO: 374727 - RNA, 22 nt, Molluscum contagiosum virus
ggggaacucggcuucugcugca

SEQ ID NO: 374728 - RNA, 22 nt, Molluscum contagiosum virus
ggggacgcgacgcgcguggagc

SEQ ID NO: 374729 - RNA, 21 nt, Molluscum contagiosum virus
ggggcacggcacccgccagcu

SEQ ID NO: 374730 - RNA, 15 nt, Molluscum contagiosum virus
ggggccacaagcacg

SEQ ID NO: 374731 - RNA, 21 nt, Molluscum contagiosum virus
ggggccggacguccauccucu

SEQ ID NO: 374732 - RNA, 18 nt, Molluscum contagiosum virus
ggggcuagcgcugcucua

SEQ ID NO: 374733 - RNA, 22 nt, Molluscum contagiosum virus
ggggcucgccggcgagaugcga

SEQ ID NO: 374734 - RNA, 13 nt, Molluscum contagiosum virus
ggggcuggcagaa

SEQ ID NO: 374735 - RNA, 13 nt, Molluscum contagiosum virus
ggggggcgccaag

SEQ ID NO: 374736 - RNA, 17 nt, Molluscum contagiosum virus
gggugcacggugaucau

SEQ ID NO: 374737 - RNA, 12 nt, Molluscum contagiosum virus
gggugucugggc

SEQ ID NO: 374738 - RNA, 15 nt, Molluscum contagiosum virus
ggguguuuccuugcc

SEQ ID NO: 374739 - RNA, 17 nt, Molluscum contagiosum virus
ggguuucggaacgcuau

SEQ ID NO: 374740 - RNA, 16 nt, Molluscum contagiosum virus
gguaccgugcgcguga

SEQ ID NO: 374741 - RNA, 18 nt, Molluscum contagiosum virus
gguacucaugcugcucau

SEQ ID NO: 374742 - RNA, 17 nt, Molluscum contagiosum virus
gguacugccgccaggaa

SEQ ID NO: 374743 - RNA, 19 nt, Molluscum contagiosum virus
gguaguccugcuagcguga

SEQ ID NO: 374744 - RNA, 21 nt, Molluscum contagiosum virus
gguaguugcgagccagccagg

SEQ ID NO: 374745 - RNA, 15 nt, Molluscum contagiosum virus
ggucaagaacaugug

SEQ ID NO: 374746 - RNA, 20 nt, Molluscum contagiosum virus
ggucaaucccacguacgagc

SEQ ID NO: 374747 - RNA, 13 nt, Molluscum contagiosum virus
ggucacgcgcaca

SEQ ID NO: 374748 - RNA, 23 nt, Molluscum contagiosum virus
ggucacgcgcuucguggacgagc

SEQ ID NO: 374749 - RNA, 18 nt, Molluscum contagiosum virus
ggucacgucaauggcgcg

SEQ ID NO: 374750 - RNA, 15 nt, Molluscum contagiosum virus
ggucaucgggcugca

SEQ ID NO: 374751 - RNA, 13 nt, Molluscum contagiosum virus
gguccuugcuccu

SEQ ID NO: 374752 - RNA, 21 nt, Molluscum contagiosum virus
guggcgcgcgagcugcugcgc

SEQ ID NO: 374753 - RNA, 17 nt, Molluscum contagiosum virus
guggcgcgggagcucac

SEQ ID NO: 374754 - RNA, 15 nt, Molluscum contagiosum virus
guggcggcucugccg

SEQ ID NO: 374755 - RNA, 13 nt, Molluscum contagiosum virus
guggcgugacagg

SEQ ID NO: 374756 - RNA, 15 nt, Molluscum contagiosum virus
guggcguugcugcug

SEQ ID NO: 374757 - RNA, 21 nt, Molluscum contagiosum virus
gugggcagccgccuggccgaa

SEQ ID NO: 374758 - RNA, 14 nt, Molluscum contagiosum virus
gugggccgcggcgc

SEQ ID NO: 374759 - RNA, 13 nt, Molluscum contagiosum virus
gugggcgacguga

SEQ ID NO: 374760 - RNA, 17 nt, Molluscum contagiosum virus
guggguacauguccaag

SEQ ID NO: 374761 - RNA, 23 nt, Molluscum contagiosum virus
gugggucucgagccgcacaaaga

SEQ ID NO: 374762 - RNA, 13 nt, Molluscum contagiosum virus
gugguacugccga

SEQ ID NO: 374763 - RNA, 14 nt, Molluscum contagiosum virus
guggucaagacugg

SEQ ID NO: 374764 - RNA, 14 nt, Molluscum contagiosum virus
guggugcgccugca

SEQ ID NO: 374765 - RNA, 16 nt, Molluscum contagiosum virus
gugguguucgccggca

SEQ ID NO: 374766 - RNA, 21 nt, Molluscum contagiosum virus
gugguugcuugcauguucucu

SEQ ID NO: 374767 - RNA, 15 nt, Molluscum contagiosum virus
guguacaugcucaag

SEQ ID NO: 374768 - RNA, 14 nt, Molluscum contagiosum virus
guguacgucuuucc

SEQ ID NO: 374769 - RNA, 17 nt, Molluscum contagiosum virus
guguaucaugcacaugc

SEQ ID NO: 374770 - RNA, 16 nt, Molluscum contagiosum virus
guguauccaggaucac

SEQ ID NO: 374771 - RNA, 12 nt, Molluscum contagiosum virus
gugucgacuuca

SEQ ID NO: 374772 - RNA, 15 nt, Molluscum contagiosum virus
gugugcguacuggga

SEQ ID NO: 374773 - RNA, 21 nt, Molluscum contagiosum virus
guguggcucuucucgcagcgu

SEQ ID NO: 374774 - RNA, 22 nt, Molluscum contagiosum virus
guguggcuugcgggacagagcu

SEQ ID NO: 374775 - RNA, 22 nt, Molluscum contagiosum virus
gugugguugcuugcauguucuc

SEQ ID NO: 374776 - RNA, 13 nt, Molluscum contagiosum virus
guguguaucucac

SEQ ID NO: 374777 - RNA, 19 nt, Molluscum contagiosum virus
guguucgcaggccagugua

SEQ ID NO: 374778 - RNA, 15 nt, Molluscum contagiosum virus
guguugaccaaaggu

SEQ ID NO: 374779 - RNA, 14 nt, Molluscum contagiosum virus
guguuuccuugccu

SEQ ID NO: 374780 - RNA, 15 nt, Molluscum contagiosum virus
guuccaaaagacaga

SEQ ID NO: 374781 - RNA, 16 nt, Molluscum contagiosum virus
guuccacuccugugag

SEQ ID NO: 374782 - RNA, 15 nt, Molluscum contagiosum virus
guuccagcagcgcca

SEQ ID NO: 374783 - RNA, 11 nt, Molluscum contagiosum virus
guuccaggaac

SEQ ID NO: 374784 - RNA, 12 nt, Molluscum contagiosum virus
guuccaguacca

SEQ ID NO: 374785 - RNA, 19 nt, Molluscum contagiosum virus
guuccggacgugcacgcac

SEQ ID NO: 374786 - RNA, 17 nt, Molluscum contagiosum virus
guuccggcggcauugug

SEQ ID NO: 374787 - RNA, 16 nt, Molluscum contagiosum virus
guuccuggugugccag

SEQ ID NO: 374788 - RNA, 23 nt, Molluscum contagiosum virus
guuccuguugcgcgagcgcgugc

SEQ ID NO: 374789 - RNA, 13 nt, Molluscum contagiosum virus
guucgacagcucu

SEQ ID NO: 374790 - RNA, 22 nt, Molluscum contagiosum virus
guucgagaagacggggcgcacg

SEQ ID NO: 374791 - RNA, 14 nt, Molluscum contagiosum virus
guucgagcugcugc

SEQ ID NO: 374792 - RNA, 14 nt, Molluscum contagiosum virus
guucgcagugcccg

SEQ ID NO: 374793 - RNA, 13 nt, Molluscum contagiosum virus
guucgcgcgccag

SEQ ID NO: 374794 - RNA, 14 nt, Molluscum contagiosum virus
guucgcgcgugcug

SEQ ID NO: 374795 - RNA, 19 nt, Molluscum contagiosum virus
guucuucgacaacaugcuc

SEQ ID NO: 374796 - RNA, 20 nt, Molluscum contagiosum virus
guugaccaaagguccaguau

SEQ ID NO: 374797 - RNA, 15 nt, Molluscum contagiosum virus
guugcccgccugccg

SEQ ID NO: 374798 - RNA, 12 nt, Molluscum contagiosum virus
guugccugcacu

SEQ ID NO: 374799 - RNA, 12 nt, Molluscum contagiosum virus
guugcgcgcgcc

SEQ ID NO: 374800 - RNA, 18 nt, Molluscum contagiosum virus
guugcguuggcgccagcc

SEQ ID NO: 374801 - RNA, 13 nt, Molluscum contagiosum virus
guuggcgccagcc

SEQ ID NO: 374802 - RNA, 22 nt, Molluscum contagiosum virus
guuguucguacucaacaagcug

SEQ ID NO: 374803 - RNA, 19 nt, Molluscum contagiosum virus
guuucccgcggcgugcccg

SEQ ID NO: 374804 - RNA, 15 nt, Molluscum contagiosum virus
guuucggaacgcuau

SEQ ID NO: 374805 - RNA, 19 nt, Molluscum contagiosum virus
guuucucgcgaaucacaaa

SEQ ID NO: 374806 - RNA, 20 nt, Molluscum contagiosum virus
guuugccacggccgcgcgcg

SEQ ID NO: 374807 - RNA, 14 nt, Molluscum contagiosum virus
guuugccaggcaac

SEQ ID NO: 374808 - RNA, 21 nt, Molluscum contagiosum virus
guuugccaggcaacgcacaaa

SEQ ID NO: 374809 - RNA, 17 nt, Molluscum contagiosum virus
guuugcgcucucagagc

SEQ ID NO: 374810 - RNA, 23 nt, Molluscum contagiosum virus
guuuucaagcgcgaguacaagcu

SEQ ID NO: 374811 - RNA, 17 nt, Molluscum contagiosum virus
guuuucggauagccccu

SEQ ID NO: 374812 - RNA, 17 nt, Molluscum contagiosum virus
guuuugaugagggcgau

SEQ ID NO: 374813 - RNA, 18 nt, Molluscum contagiosum virus
guuuuucgggaagcacag

SEQ ID NO: 374814 - RNA, 15 nt, Molluscum contagiosum virus
uaaaagcacagucca

SEQ ID NO: 374815 - RNA, 18 nt, Molluscum contagiosum virus
uaaacaaacgugcaugca

SEQ ID NO: 374816 - RNA, 16 nt, Molluscum contagiosum virus
uaaagagcguccagcc

SEQ ID NO: 374817 - RNA, 16 nt, Molluscum contagiosum virus
uaaagucuucaagacu

SEQ ID NO: 374818 - RNA, 18 nt, Molluscum contagiosum virus
uaaagucuucaagacugg

SEQ ID NO: 374819 - RNA, 21 nt, Molluscum contagiosum virus
uaacaauggacacgcacuggc

SEQ ID NO: 374820 - RNA, 18 nt, Molluscum contagiosum virus
uaacugagaggaccuccc

SEQ ID NO: 374821 - RNA, 17 nt, Molluscum contagiosum virus
uaagagcgugaacauac

SEQ ID NO: 374822 - RNA, 19 nt, Molluscum contagiosum virus
uaaugauugucaagcacua

SEQ ID NO: 374823 - RNA, 14 nt, Molluscum contagiosum virus
uacaaaguugacca

SEQ ID NO: 374824 - RNA, 14 nt, Molluscum contagiosum virus
uacaacccaaacau

SEQ ID NO: 374825 - RNA, 17 nt, Molluscum contagiosum virus
uacaagcggugcagcua

SEQ ID NO: 374826 - RNA, 20 nt, Molluscum contagiosum virus
uacaaggaggucaugaccaa

SEQ ID NO: 374827 - RNA, 22 nt, Molluscum contagiosum virus
uacaccagcuggacggugcugg

SEQ ID NO: 374828 - RNA, 16 nt, Molluscum contagiosum virus
uacacgcacgaccuca

SEQ ID NO: 374829 - RNA, 20 nt, Molluscum contagiosum virus
uacaugcccggccucgccuc

SEQ ID NO: 374830 - RNA, 21 nt, Molluscum contagiosum virus
uacaugccgcaguacgugaca

SEQ ID NO: 374831 - RNA, 23 nt, Molluscum contagiosum virus
uaccacagguuucucaacaugaa

SEQ ID NO: 374832 - RNA, 13 nt, Molluscum contagiosum virus
uaccagcucguca

SEQ ID NO: 374833 - RNA, 12 nt, Molluscum contagiosum virus
uaccaugcucuc

SEQ ID NO: 374834 - RNA, 15 nt, Molluscum contagiosum virus
uacccguugcugcgc

SEQ ID NO: 374835 - RNA, 21 nt, Molluscum contagiosum virus
uacccuuggcagcaacugcac

SEQ ID NO: 374836 - RNA, 19 nt, Molluscum contagiosum virus
uaccgacguuuucuuugcg

SEQ ID NO: 374837 - RNA, 15 nt, Molluscum contagiosum virus
uaccggagacaccag

SEQ ID NO: 374838 - RNA, 16 nt, Molluscum contagiosum virus
uaccggagacaccagc

SEQ ID NO: 374839 - RNA, 17 nt, Molluscum contagiosum virus
uaccggagacaccagcu

SEQ ID NO: 374840 - RNA, 18 nt, Molluscum contagiosum virus
uaccggagacaccagcuc

SEQ ID NO: 374841 - RNA, 18 nt, Molluscum contagiosum virus
uaccggcagcaugcucac

SEQ ID NO: 374842 - RNA, 16 nt, Molluscum contagiosum virus
uaccugaagcuggacg

SEQ ID NO: 374843 - RNA, 12 nt, Molluscum contagiosum virus
uaccuguaugau

SEQ ID NO: 374844 - RNA, 21 nt, Molluscum contagiosum virus
uaccuguaugaucugcaguuc

SEQ ID NO: 374845 - RNA, 20 nt, Molluscum contagiosum virus
uacgacaaaggcauuuuccu

SEQ ID NO: 374846 - RNA, 14 nt, Molluscum contagiosum virus
uacgacgacaugca

SEQ ID NO: 374847 - RNA, 16 nt, Molluscum contagiosum virus
uacgacgacaugcaca

SEQ ID NO: 374848 - RNA, 16 nt, Molluscum contagiosum virus
uacgagaauuucgaca

SEQ ID NO: 374849 - RNA, 14 nt, Molluscum contagiosum virus
uacgaggugcugcg

SEQ ID NO: 374850 - RNA, 16 nt, Molluscum contagiosum virus
uacgauggaugcugga

SEQ ID NO: 374851 - RNA, 21 nt, Molluscum contagiosum virus
uacgauuuguuugcaccggca

SEQ ID NO: 374852 - RNA, 21 nt, Molluscum contagiosum virus
uacgcacgcacguggcgcugc

SEQ ID NO: 374853 - RNA, 13 nt, Molluscum contagiosum virus
uacgcgagcacug

SEQ ID NO: 374854 - RNA, 19 nt, Molluscum contagiosum virus
uacgcuggacuuccugcug

SEQ ID NO: 374855 - RNA, 13 nt, Molluscum contagiosum virus
ucaggaacaaggc

SEQ ID NO: 374856 - RNA, 14 nt, Molluscum contagiosum virus
ucaggccagcaucu

SEQ ID NO: 374857 - RNA, 15 nt, Molluscum contagiosum virus
ucaggggcucuccua

SEQ ID NO: 374858 - RNA, 20 nt, Molluscum contagiosum virus
ucaguguuuuaauuuuccaa

SEQ ID NO: 374859 - RNA, 13 nt, Molluscum contagiosum virus
ucaucaaagcaca

SEQ ID NO: 374860 - RNA, 12 nt, Molluscum contagiosum virus
ucaucaagcccg

SEQ ID NO: 374861 - RNA, 13 nt, Molluscum contagiosum virus
ucauccucccugc

SEQ ID NO: 374862 - RNA, 19 nt, Molluscum contagiosum virus
ucaucuacugcgacaucca

SEQ ID NO: 374863 - RNA, 22 nt, Molluscum contagiosum virus
ucaucuacugcgacauccacau

SEQ ID NO: 374864 - RNA, 13 nt, Molluscum contagiosum virus
ucaugcugcucau

SEQ ID NO: 374865 - RNA, 14 nt, Molluscum contagiosum virus
ucaugcugcucaug

SEQ ID NO: 374866 - RNA, 15 nt, Molluscum contagiosum virus
ucauggacaugcucg

SEQ ID NO: 374867 - RNA, 19 nt, Molluscum contagiosum virus
ucauggcgcgcaaccagcu

SEQ ID NO: 374868 - RNA, 18 nt, Molluscum contagiosum virus
uccaaaccaacgugagua

SEQ ID NO: 374869 - RNA, 14 nt, Molluscum contagiosum virus
uccaacaagcucau

SEQ ID NO: 374870 - RNA, 22 nt, Molluscum contagiosum virus
uccaagaagaggccagcacaag

SEQ ID NO: 374871 - RNA, 19 nt, Molluscum contagiosum virus
uccaaggugaacgaccuca

SEQ ID NO: 374872 - RNA, 20 nt, Molluscum contagiosum virus
uccaaggugaacgaccucaa

SEQ ID NO: 374873 - RNA, 17 nt, Molluscum contagiosum virus
uccacagccgugagcuc

SEQ ID NO: 374874 - RNA, 12 nt, Molluscum contagiosum virus
uccaccugcgca

SEQ ID NO: 374875 - RNA, 21 nt, Molluscum contagiosum virus
uccaccugcgcaacgugcugc

SEQ ID NO: 374876 - RNA, 13 nt, Molluscum contagiosum virus
uccacgcgcagcu

SEQ ID NO: 374877 - RNA, 14 nt, Molluscum contagiosum virus
uccacgcgugcgcg

SEQ ID NO: 374878 - RNA, 19 nt, Molluscum contagiosum virus
uccacggguaccgugcgcg

SEQ ID NO: 374879 - RNA, 12 nt, Molluscum contagiosum virus
uccacgucucca

SEQ ID NO: 374880 - RNA, 19 nt, Molluscum contagiosum virus
uccacgucuccaacaagcu

SEQ ID NO: 374881 - RNA, 17 nt, Molluscum contagiosum virus
uccacguggccagacau

SEQ ID NO: 374882 - RNA, 13 nt, Molluscum contagiosum virus
uccagcacugcgc

SEQ ID NO: 374883 - RNA, 18 nt, Molluscum contagiosum virus
uccaggcgcaccuugacg

SEQ ID NO: 374884 - RNA, 20 nt, Molluscum contagiosum virus
uccaguauuucaaugcagua

SEQ ID NO: 374885 - RNA, 17 nt, Molluscum contagiosum virus
uccaucaucgagcugca

SEQ ID NO: 374886 - RNA, 23 nt, Molluscum contagiosum virus
uccaugagagaauggacauuggg

SEQ ID NO: 374887 - RNA, 13 nt, Molluscum contagiosum virus
uccaugcccacgc

SEQ ID NO: 374888 - RNA, 12 nt, Molluscum contagiosum virus
uccccaacaucc

SEQ ID NO: 374889 - RNA, 13 nt, Molluscum contagiosum virus
uccccguccuugc

SEQ ID NO: 374890 - RNA, 16 nt, Molluscum contagiosum virus
uccccuagaagaccac

SEQ ID NO: 374891 - RNA, 13 nt, Molluscum contagiosum virus
ucccggugcugcu

SEQ ID NO: 374892 - RNA, 14 nt, Molluscum contagiosum virus
ucccucgucuuugc

SEQ ID NO: 374893 - RNA, 15 nt, Molluscum contagiosum virus
ucccucgucuuugcg

SEQ ID NO: 374894 - RNA, 15 nt, Molluscum contagiosum virus
ucccugcauacacuu

SEQ ID NO: 374895 - RNA, 18 nt, Molluscum contagiosum virus
uccgaagagcagaaggcg

SEQ ID NO: 374896 - RNA, 21 nt, Molluscum contagiosum virus
uccgaggacgacgccgagccc

SEQ ID NO: 374897 - RNA, 13 nt, Molluscum contagiosum virus
uccgagguagcuc

SEQ ID NO: 374898 - RNA, 13 nt, Molluscum contagiosum virus
uccgaguccagcu

SEQ ID NO: 374899 - RNA, 18 nt, Molluscum contagiosum virus
uccgcaauuacgugcgcg

SEQ ID NO: 374900 - RNA, 23 nt, Molluscum contagiosum virus
uccgcacacgcgcgcgugcugcu

SEQ ID NO: 374901 - RNA, 12 nt, Molluscum contagiosum virus
uccgcacgcacg

SEQ ID NO: 374902 - RNA, 15 nt, Molluscum contagiosum virus
uccgcacguggaauc

SEQ ID NO: 374903 - RNA, 14 nt, Molluscum contagiosum virus
uccgcggaggccaa

SEQ ID NO: 374904 - RNA, 12 nt, Molluscum contagiosum virus
uccgcuaccugg

SEQ ID NO: 374905 - RNA, 18 nt, Molluscum contagiosum virus
uccgcuguacgugcugcc

SEQ ID NO: 374906 - RNA, 13 nt, Molluscum contagiosum virus
uccggcacgcaca

SEQ ID NO: 374907 - RNA, 19 nt, Molluscum contagiosum virus
uccggcggcuggaccugcg

SEQ ID NO: 374908 - RNA, 12 nt, Molluscum contagiosum virus
uccgggcgcugc

SEQ ID NO: 374909 - RNA, 17 nt, Molluscum contagiosum virus
uccgguguccacgacac

SEQ ID NO: 374910 - RNA, 18 nt, Molluscum contagiosum virus
uccgucacggacagcagc

SEQ ID NO: 374911 - RNA, 23 nt, Molluscum contagiosum virus
uccgucagggaugccagugcagu

SEQ ID NO: 374912 - RNA, 11 nt, Molluscum contagiosum virus
uccgugccauu

SEQ ID NO: 374913 - RNA, 17 nt, Molluscum contagiosum virus
uccgugcgcagggcaau

SEQ ID NO: 374914 - RNA, 15 nt, Molluscum contagiosum virus
uccuacacauuccuc

SEQ ID NO: 374915 - RNA, 13 nt, Molluscum contagiosum virus
uccucgaccugca

SEQ ID NO: 374916 - RNA, 14 nt, Molluscum contagiosum virus
uccucgaccugcac

SEQ ID NO: 374917 - RNA, 16 nt, Molluscum contagiosum virus
uccucgaccugcacga

SEQ ID NO: 374918 - RNA, 16 nt, Molluscum contagiosum virus
uccucgacgcguucua

SEQ ID NO: 374919 - RNA, 19 nt, Molluscum contagiosum virus
uccucgucgaucaugucca

SEQ ID NO: 374920 - RNA, 20 nt, Molluscum contagiosum virus
uccucgugggauaggcacac

SEQ ID NO: 374921 - RNA, 22 nt, Molluscum contagiosum virus
uccucgugggauaggcacacac

SEQ ID NO: 374922 - RNA, 15 nt, Molluscum contagiosum virus
uccucuacaccagcu

SEQ ID NO: 374923 - RNA, 12 nt, Molluscum contagiosum virus
uccugagaagca

SEQ ID NO: 374924 - RNA, 13 nt, Molluscum contagiosum virus
uccugaggaagca

SEQ ID NO: 374925 - RNA, 14 nt, Molluscum contagiosum virus
uccugaggaagcaa

SEQ ID NO: 374926 - RNA, 17 nt, Molluscum contagiosum virus
uccugcaccugcuggaa

SEQ ID NO: 374927 - RNA, 17 nt, Molluscum contagiosum virus
uccugcggcgcugcuac

SEQ ID NO: 374928 - RNA, 19 nt, Molluscum contagiosum virus
uccugcgggagcaacgaac

SEQ ID NO: 374929 - RNA, 18 nt, Molluscum contagiosum virus
uccugcugcgcagcaucc

SEQ ID NO: 374930 - RNA, 21 nt, Molluscum contagiosum virus
uccuggaguaccggcucaaga

SEQ ID NO: 374931 - RNA, 16 nt, Molluscum contagiosum virus
uccugugagcauguuc

SEQ ID NO: 374932 - RNA, 21 nt, Molluscum contagiosum virus
uccuuagacaaaagccacuag

SEQ ID NO: 374933 - RNA, 21 nt, Molluscum contagiosum virus
uccuucccggaauuccguguc

SEQ ID NO: 374934 - RNA, 21 nt, Molluscum contagiosum virus
uccuuccggagacaccagcuc

SEQ ID NO: 374935 - RNA, 13 nt, Molluscum contagiosum virus
uccuucuucagca

SEQ ID NO: 374936 - RNA, 22 nt, Molluscum contagiosum virus
uccuugauaaaagcacagucca

SEQ ID NO: 374937 - RNA, 23 nt, Molluscum contagiosum virus
uccuugauaaaagcacaguccaa

SEQ ID NO: 374938 - RNA, 16 nt, Molluscum contagiosum virus
uccuugccuucucgaa

SEQ ID NO: 374939 - RNA, 18 nt, Molluscum contagiosum virus
uccuugcgccgccaaaag

SEQ ID NO: 374940 - RNA, 17 nt, Molluscum contagiosum virus
uccuuugcgagcacugu

SEQ ID NO: 374941 - RNA, 14 nt, Molluscum contagiosum virus
uccuuuuucacuuu

SEQ ID NO: 374942 - RNA, 23 nt, Molluscum contagiosum virus
ucgaaacgcgggcaucgcaguuc

SEQ ID NO: 374943 - RNA, 12 nt, Molluscum contagiosum virus
ucgaaccuggaa

SEQ ID NO: 374944 - RNA, 17 nt, Molluscum contagiosum virus
ucgaacgcgcgugcgcg

SEQ ID NO: 374945 - RNA, 16 nt, Molluscum contagiosum virus
ucgaagaccaccagca

SEQ ID NO: 374946 - RNA, 17 nt, Molluscum contagiosum virus
ucgaagaccaccagcac

SEQ ID NO: 374947 - RNA, 22 nt, Molluscum contagiosum virus
ucgaagacgucggggcgcgugc

SEQ ID NO: 374948 - RNA, 17 nt, Molluscum contagiosum virus
ucgaagcgcgcagcgcc

SEQ ID NO: 374949 - RNA, 19 nt, Molluscum contagiosum virus
ucgaaggcgugcgccgugc

SEQ ID NO: 374950 - RNA, 23 nt, Molluscum contagiosum virus
ucgaaguacuucgcgaugugcac

SEQ ID NO: 374951 - RNA, 19 nt, Molluscum contagiosum virus
ucgagaccucgcgcuuccg

SEQ ID NO: 374952 - RNA, 13 nt, Molluscum contagiosum virus
ucgagacgcugcg

SEQ ID NO: 374953 - RNA, 15 nt, Molluscum contagiosum virus
ucgagacgcugcgcg

SEQ ID NO: 374954 - RNA, 16 nt, Molluscum contagiosum virus
ucgagcacgccuccaa

SEQ ID NO: 374955 - RNA, 18 nt, Molluscum contagiosum virus
ucgagcacguagugcucg

SEQ ID NO: 374956 - RNA, 14 nt, Molluscum contagiosum virus
ucgagcccgagccc

SEQ ID NO: 374957 - RNA, 20 nt, Molluscum contagiosum virus
ucgagccgcgcuucgagcac

SEQ ID NO: 374958 - RNA, 22 nt, Molluscum contagiosum virus
ucgagcgcgcuggacuugcgcg

SEQ ID NO: 374959 - RNA, 17 nt, Molluscum contagiosum virus
ucuccucgcgcacagac

SEQ ID NO: 374960 - RNA, 17 nt, Molluscum contagiosum virus
ucucgcgcgacacgagc

SEQ ID NO: 374961 - RNA, 19 nt, Molluscum contagiosum virus
ucucguggcguugcugcug

SEQ ID NO: 374962 - RNA, 16 nt, Molluscum contagiosum virus
ucucugucgacagucu

SEQ ID NO: 374963 - RNA, 13 nt, Molluscum contagiosum virus
ucugaaaggacau

SEQ ID NO: 374964 - RNA, 20 nt, Molluscum contagiosum virus
ucugacacuugcggcgcuag

SEQ ID NO: 374965 - RNA, 22 nt, Molluscum contagiosum virus
ucugacggucguccuggagccu

SEQ ID NO: 374966 - RNA, 18 nt, Molluscum contagiosum virus
ucugccaccgcggcgcgg

SEQ ID NO: 374967 - RNA, 16 nt, Molluscum contagiosum virus
ucugccgcccgcgccc

SEQ ID NO: 374968 - RNA, 20 nt, Molluscum contagiosum virus
ucugccucguggaacaaaga

SEQ ID NO: 374969 - RNA, 22 nt, Molluscum contagiosum virus
ucugcguguacgacgugcugcu

SEQ ID NO: 374970 - RNA, 18 nt, Molluscum contagiosum virus
ucugcuugcggcacacau

SEQ ID NO: 374971 - RNA, 19 nt, Molluscum contagiosum virus
ucuggaggcaaucugucca

SEQ ID NO: 374972 - RNA, 14 nt, Molluscum contagiosum virus
ucuggcaaacgcac

SEQ ID NO: 374973 - RNA, 20 nt, Molluscum contagiosum virus
ucuggcguacucgugucaca

SEQ ID NO: 374974 - RNA, 21 nt, Molluscum contagiosum virus
ucuggcguacucgugucacaa

SEQ ID NO: 374975 - RNA, 22 nt, Molluscum contagiosum virus
ucuggcguacucgugucacaau

SEQ ID NO: 374976 - RNA, 20 nt, Molluscum contagiosum virus
ucugggcgucgcacaguuca

SEQ ID NO: 374977 - RNA, 15 nt, Molluscum contagiosum virus
ucugucccgcccgug

SEQ ID NO: 374978 - RNA, 19 nt, Molluscum contagiosum virus
ucuguccgucuugcgcaca

SEQ ID NO: 374979 - RNA, 21 nt, Molluscum contagiosum virus
ucugugaccugcgccauccac

SEQ ID NO: 374980 - RNA, 13 nt, Molluscum contagiosum virus
ucuucaacuucca

SEQ ID NO: 374981 - RNA, 16 nt, Molluscum contagiosum virus
ucuucaccugcauuga

SEQ ID NO: 374982 - RNA, 22 nt, Molluscum contagiosum virus
ucuucaggaacaaggccaaagc

SEQ ID NO: 374983 - RNA, 21 nt, Molluscum contagiosum virus
ucuuccgcgagcacguggaca

SEQ ID NO: 374984 - RNA, 15 nt, Molluscum contagiosum virus
ucuuccuggggcugg

SEQ ID NO: 374985 - RNA, 18 nt, Molluscum contagiosum virus
ucuuccuggggcuggaca

SEQ ID NO: 374986 - RNA, 20 nt, Molluscum contagiosum virus
ucuucgacuuugcgaaggaa

SEQ ID NO: 374987 - RNA, 15 nt, Molluscum contagiosum virus
ucuucgcaagugcac

SEQ ID NO: 374988 - RNA, 16 nt, Molluscum contagiosum virus
ucuucggcacgauguc

SEQ ID NO: 374989 - RNA, 20 nt, Molluscum contagiosum virus
ucuucgggaaggaacaaugc

SEQ ID NO: 374990 - RNA, 15 nt, Molluscum contagiosum virus
ucuucguggugcuca

SEQ ID NO: 374991 - RNA, 13 nt, Molluscum contagiosum virus
ucuugaugcuguu

SEQ ID NO: 374992 - RNA, 22 nt, Molluscum contagiosum virus
ucuugcgugccuucgccaauga

SEQ ID NO: 374993 - RNA, 23 nt, Molluscum contagiosum virus
ucuugcuggcgcucgcgcgcacg

SEQ ID NO: 374994 - RNA, 14 nt, Molluscum contagiosum virus
ucuuguugcgcaug

SEQ ID NO: 374995 - RNA, 17 nt, Molluscum contagiosum virus
ucuuucacgcugcacga

SEQ ID NO: 374996 - RNA, 21 nt, Molluscum contagiosum virus
ucuuucacgcugcacgagcug

SEQ ID NO: 374997 - RNA, 19 nt, Molluscum contagiosum virus
ucuuucguccccaagagcc

SEQ ID NO: 374998 - RNA, 23 nt, Molluscum contagiosum virus
ucuuucucaagaucguuuugcac

SEQ ID NO: 374999 - RNA, 20 nt, Molluscum contagiosum virus
ucuuugcgcucaucaagaag

SEQ ID NO: 375000 - RNA, 22 nt, Molluscum contagiosum virus
ucuuuguggucaagacuggccu

SEQ ID NO: 375001 - RNA, 17 nt, Molluscum contagiosum virus
ucuuuuuuaugcacuuu

SEQ ID NO: 375002 - RNA, 17 nt, Molluscum contagiosum virus
ugaaaggcauccucgcc

SEQ ID NO: 375003 - RNA, 18 nt, Molluscum contagiosum virus
ugaacaccauccugcgcu

SEQ ID NO: 375004 - RNA, 20 nt, Molluscum contagiosum virus
ugaacaccauccugcgcuuu

SEQ ID NO: 375005 - RNA, 14 nt, Molluscum contagiosum virus
ugaacacgacaugu

SEQ ID NO: 375006 - RNA, 16 nt, Molluscum contagiosum virus
ugaacacgacauguac

SEQ ID NO: 375007 - RNA, 15 nt, Molluscum contagiosum virus
ugaacaucuaugcac

SEQ ID NO: 375008 - RNA, 16 nt, Molluscum contagiosum virus
ugaacaucuaugcacg

SEQ ID NO: 375009 - RNA, 19 nt, Molluscum contagiosum virus
ugaacaucuaugcacggca

SEQ ID NO: 375010 - RNA, 16 nt, Molluscum contagiosum virus
ugaacggcuccuugag

SEQ ID NO: 375011 - RNA, 18 nt, Molluscum contagiosum virus
ugaacggcuccuugagaa

SEQ ID NO: 375012 - RNA, 18 nt, Molluscum contagiosum virus
ugaacucgcugcugcucu

SEQ ID NO: 375013 - RNA, 17 nt, Molluscum contagiosum virus
ugaagcugucaacagug

SEQ ID NO: 375014 - RNA, 23 nt, Molluscum contagiosum virus
ugaaggacgcguucuccaggaac

SEQ ID NO: 375015 - RNA, 12 nt, Molluscum contagiosum virus
ugaaggcgcggc

SEQ ID NO: 375016 - RNA, 16 nt, Molluscum contagiosum virus
ugacaaggauggacaa

SEQ ID NO: 375017 - RNA, 20 nt, Molluscum contagiosum virus
ugacagaaaaaacacaacaa

SEQ ID NO: 375018 - RNA, 18 nt, Molluscum contagiosum virus
ugaccaagcacauucuca

SEQ ID NO: 375019 - RNA, 22 nt, Molluscum contagiosum virus
ugacgaacggaacacagugcgu

SEQ ID NO: 375020 - RNA, 14 nt, Molluscum contagiosum virus
ugacgaagcugcgc

SEQ ID NO: 375021 - RNA, 14 nt, Molluscum contagiosum virus
ugacgagcgcgugc

SEQ ID NO: 375022 - RNA, 19 nt, Molluscum contagiosum virus
ugacgcaaagucaucugcc

SEQ ID NO: 375023 - RNA, 19 nt, Molluscum contagiosum virus
ugacggcgucucucgaaca

SEQ ID NO: 375024 - RNA, 14 nt, Molluscum contagiosum virus
ugacgucgcagggg

SEQ ID NO: 375025 - RNA, 15 nt, Molluscum contagiosum virus
ugacuagaugcauag

SEQ ID NO: 375026 - RNA, 21 nt, Molluscum contagiosum virus
ugacucgccgugugaucaaga

SEQ ID NO: 375027 - RNA, 15 nt, Molluscum contagiosum virus
ugacucggacacugg

SEQ ID NO: 375028 - RNA, 23 nt, Molluscum contagiosum virus
ugacuucgcacguuggcgcucac

SEQ ID NO: 375029 - RNA, 11 nt, Molluscum contagiosum virus
ugagaagcaau

SEQ ID NO: 375030 - RNA, 13 nt, Molluscum contagiosum virus
ugagagcaaagaa

SEQ ID NO: 375031 - RNA, 20 nt, Molluscum contagiosum virus
ugagauacaaccgcugcuau

SEQ ID NO: 375032 - RNA, 17 nt, Molluscum contagiosum virus
ugagccacaaacacucg

SEQ ID NO: 375033 - RNA, 16 nt, Molluscum contagiosum virus
ugagccagucucgcgc

SEQ ID NO: 375034 - RNA, 14 nt, Molluscum contagiosum virus
ugagcgcgcugcgc

SEQ ID NO: 375035 - RNA, 22 nt, Molluscum contagiosum virus
ugagcucgcgcgcaagaacaac

SEQ ID NO: 375036 - RNA, 20 nt, Molluscum contagiosum virus
ugagcucuuuguacacccgu

SEQ ID NO: 375037 - RNA, 21 nt, Molluscum contagiosum virus
ugagcucuuuguacacccgug

SEQ ID NO: 375038 - RNA, 22 nt, Molluscum contagiosum virus
ugaggaagaccuuggacacgug

SEQ ID NO: 375039 - RNA, 12 nt, Molluscum contagiosum virus
ugaggaagcaag

SEQ ID NO: 375040 - RNA, 21 nt, Molluscum contagiosum virus
ugaggaagcaagacccagcaa

SEQ ID NO: 375041 - RNA, 17 nt, Molluscum contagiosum virus
ugaggaggcggcacugc

SEQ ID NO: 375042 - RNA, 18 nt, Molluscum contagiosum virus
ugaggaggcggcacugcu

SEQ ID NO: 375043 - RNA, 14 nt, Molluscum contagiosum virus
ugaguaccuguaug

SEQ ID NO: 375044 - RNA, 16 nt, Molluscum contagiosum virus
ugaguagcaacaaaga

SEQ ID NO: 375045 - RNA, 14 nt, Molluscum contagiosum virus
ugauaaaagcacag

SEQ ID NO: 375046 - RNA, 19 nt, Molluscum contagiosum virus
ugauaaaagcacaguccaa

SEQ ID NO: 375047 - RNA, 20 nt, Molluscum contagiosum virus
ugauccaggcccguggcuua

SEQ ID NO: 375048 - RNA, 13 nt, Molluscum contagiosum virus
ugauccuugccaa

SEQ ID NO: 375049 - RNA, 15 nt, Molluscum contagiosum virus
ugauccuugccaagc

SEQ ID NO: 375050 - RNA, 22 nt, Molluscum contagiosum virus
ugaugauuugauggcugcucau

SEQ ID NO: 375051 - RNA, 21 nt, Molluscum contagiosum virus
ugaugcuguuacuugcacuac

SEQ ID NO: 375052 - RNA, 23 nt, Molluscum contagiosum virus
ugauugucaagcacuacauggac

SEQ ID NO: 375053 - RNA, 18 nt, Molluscum contagiosum virus
ugcaacgcaggacacugu

SEQ ID NO: 375054 - RNA, 21 nt, Molluscum contagiosum virus
ugcaagacggaagacaaggcu

SEQ ID NO: 375055 - RNA, 15 nt, Molluscum contagiosum virus
ugcaagaucuaucac

SEQ ID NO: 375056 - RNA, 22 nt, Molluscum contagiosum virus
ugcaagcacaacgggcucgugc

SEQ ID NO: 375057 - RNA, 14 nt, Molluscum contagiosum virus
ugcaaggcgcgcgc

SEQ ID NO: 375058 - RNA, 21 nt, Molluscum contagiosum virus
ugcaauaacaacgaccagcuu

SEQ ID NO: 375059 - RNA, 13 nt, Molluscum contagiosum virus
ugcacaaagccaa

SEQ ID NO: 375060 - RNA, 23 nt, Molluscum contagiosum virus
ugcacacacucgcgcguccacaa

SEQ ID NO: 375061 - RNA, 22 nt, Molluscum contagiosum virus
ugcgcggggcaggcagugccgc

SEQ ID NO: 375062 - RNA, 18 nt, Molluscum contagiosum virus
ugcgcgugacacaccgcg

SEQ ID NO: 375063 - RNA, 14 nt, Molluscum contagiosum virus
ugcgcgugagccaa

SEQ ID NO: 375064 - RNA, 17 nt, Molluscum contagiosum virus
ugcgcgugcgccugccg

SEQ ID NO: 375065 - RNA, 20 nt, Molluscum contagiosum virus
ugcgcguguagcggcgcuug

SEQ ID NO: 375066 - RNA, 15 nt, Molluscum contagiosum virus
ugcgcgugugcagca

SEQ ID NO: 375067 - RNA, 16 nt, Molluscum contagiosum virus
ugcgcgugugcagcag

SEQ ID NO: 375068 - RNA, 18 nt, Molluscum contagiosum virus
ugcgcuacguuccgcgcg

SEQ ID NO: 375069 - RNA, 23 nt, Molluscum contagiosum virus
ugcgcucggaggggcuccgggcc

SEQ ID NO: 375070 - RNA, 21 nt, Molluscum contagiosum virus
ugcgcucucgggcaugcacuu

SEQ ID NO: 375071 - RNA, 16 nt, Molluscum contagiosum virus
ugcgcuggaugcugcu

SEQ ID NO: 375072 - RNA, 13 nt, Molluscum contagiosum virus
ugcggacgggaag

SEQ ID NO: 375073 - RNA, 14 nt, Molluscum contagiosum virus
ugcggacucgcgag

SEQ ID NO: 375074 - RNA, 13 nt, Molluscum contagiosum virus
ugcggagacuguu

SEQ ID NO: 375075 - RNA, 23 nt, Molluscum contagiosum virus
ugcggagagccgccuuugcgcug

SEQ ID NO: 375076 - RNA, 21 nt, Molluscum contagiosum virus
ugcggcaaccgcgcccgcgcg

SEQ ID NO: 375077 - RNA, 19 nt, Molluscum contagiosum virus
ugcggcaggaagcuggcgc

SEQ ID NO: 375078 - RNA, 21 nt, Molluscum contagiosum virus
ugcggcaggaagcuggcgcgg

SEQ ID NO: 375079 - RNA, 14 nt, Molluscum contagiosum virus
ugcggcaggcgcug

SEQ ID NO: 375080 - RNA, 16 nt, Molluscum contagiosum virus
ugcggccaccagcgcg

SEQ ID NO: 375081 - RNA, 12 nt, Molluscum contagiosum virus
ugcggcgcgugc

SEQ ID NO: 375082 - RNA, 21 nt, Molluscum contagiosum virus
ugcggcgcgugccgcugcgcg

SEQ ID NO: 375083 - RNA, 16 nt, Molluscum contagiosum virus
ugcggcucgcacuugc

SEQ ID NO: 375084 - RNA, 21 nt, Molluscum contagiosum virus
ugcgguccgacucggugcuca

SEQ ID NO: 375085 - RNA, 15 nt, Molluscum contagiosum virus
ugcggugacuugccg

SEQ ID NO: 375086 - RNA, 23 nt, Molluscum contagiosum virus
ugcggugacuugccguguucuaa

SEQ ID NO: 375087 - RNA, 17 nt, Molluscum contagiosum virus
ugcgucuuacugcugca

SEQ ID NO: 375088 - RNA, 22 nt, Molluscum contagiosum virus
ugcgugaggaagaccuuggaca

SEQ ID NO: 375089 - RNA, 22 nt, Molluscum contagiosum virus
ugcgugcaacaggagcauuccu

SEQ ID NO: 375090 - RNA, 16 nt, Molluscum contagiosum virus
ugcgugcaccucaaga

SEQ ID NO: 375091 - RNA, 13 nt, Molluscum contagiosum virus
ugcgugcacuguc

SEQ ID NO: 375092 - RNA, 21 nt, Molluscum contagiosum virus
ugcgugguguccacgcgcgug

SEQ ID NO: 375093 - RNA, 20 nt, Molluscum contagiosum virus
ugcguguacgacgugcugcu

SEQ ID NO: 375094 - RNA, 20 nt, Molluscum contagiosum virus
ugcgugugccggugcugcgg

SEQ ID NO: 375095 - RNA, 16 nt, Molluscum contagiosum virus
ugcguucgcuccgucc

SEQ ID NO: 375096 - RNA, 22 nt, Molluscum contagiosum virus
ugcguuggcaacgcgggggcca

SEQ ID NO: 375097 - RNA, 13 nt, Molluscum contagiosum virus
ugcuacugcacug

SEQ ID NO: 375098 - RNA, 17 nt, Molluscum contagiosum virus
ugcuagcgacgcggaca

SEQ ID NO: 375099 - RNA, 18 nt, Molluscum contagiosum virus
ugcuagcgggcaagcgcu

SEQ ID NO: 375100 - RNA, 17 nt, Molluscum contagiosum virus
ugcuagcugcgugcgua

SEQ ID NO: 375101 - RNA, 17 nt, Molluscum contagiosum virus
ugcuauuaccugagauc

SEQ ID NO: 375102 - RNA, 22 nt, Molluscum contagiosum virus
ugcucaagcaccugcgcuuccu

SEQ ID NO: 375103 - RNA, 17 nt, Molluscum contagiosum virus
ugcucaaggacuaccag

SEQ ID NO: 375104 - RNA, 20 nt, Molluscum contagiosum virus
ugcucaaggacuaccagcuc

SEQ ID NO: 375105 - RNA, 22 nt, Molluscum contagiosum virus
ugcucaaggacuaccagcucuu

SEQ ID NO: 375106 - RNA, 15 nt, Molluscum contagiosum virus
ugcucacgcccuuca

SEQ ID NO: 375107 - RNA, 16 nt, Molluscum contagiosum virus
ugcucagcaccaagga

SEQ ID NO: 375108 - RNA, 18 nt, Molluscum contagiosum virus
ugcucaggccagcaucuu

SEQ ID NO: 375109 - RNA, 13 nt, Molluscum contagiosum virus
ugcuccaugacag

SEQ ID NO: 375110 - RNA, 16 nt, Molluscum contagiosum virus
ugcuccgcacguggaa

SEQ ID NO: 375111 - RNA, 16 nt, Molluscum contagiosum virus
ugcuccgcacguggag

SEQ ID NO: 375112 - RNA, 20 nt, Molluscum contagiosum virus
ugcuccgcacguggagucac

SEQ ID NO: 375113 - RNA, 14 nt, Molluscum contagiosum virus
ugcuccgugcccac

SEQ ID NO: 375114 - RNA, 14 nt, Molluscum contagiosum virus
ugcucgcacacgug

SEQ ID NO: 375115 - RNA, 16 nt, Molluscum contagiosum virus
ugcucgcaggcggugg

SEQ ID NO: 375116 - RNA, 19 nt, Molluscum contagiosum virus
ugcucgccugcaucuuugc

SEQ ID NO: 375117 - RNA, 20 nt, Molluscum contagiosum virus
ugcucgcgggccuuugccgc

SEQ ID NO: 375118 - RNA, 22 nt, Molluscum contagiosum virus
ugcucgcuuagccaacagcgca

SEQ ID NO: 375119 - RNA, 17 nt, Molluscum contagiosum virus
ugcucggacacacgcac

SEQ ID NO: 375120 - RNA, 18 nt, Molluscum contagiosum virus
ugcucggcgugaucuucu

SEQ ID NO: 375121 - RNA, 22 nt, Molluscum contagiosum virus
ugcucguguguccgcacgcaca

SEQ ID NO: 375122 - RNA, 16 nt, Molluscum contagiosum virus
ugcucuacgugcugca

SEQ ID NO: 375123 - RNA, 16 nt, Molluscum contagiosum virus
ugcucucggccaugga

SEQ ID NO: 375124 - RNA, 15 nt, Molluscum contagiosum virus
ugcugaagacgcugg

SEQ ID NO: 375125 - RNA, 16 nt, Molluscum contagiosum virus
ugcugaagacgcuggc

SEQ ID NO: 375126 - RNA, 11 nt, Molluscum contagiosum virus
ugcugagccac

SEQ ID NO: 375127 - RNA, 16 nt, Molluscum contagiosum virus
ugcugcagaacugccu

SEQ ID NO: 375128 - RNA, 17 nt, Molluscum contagiosum virus
ugcugcagaacugccug

SEQ ID NO: 375129 - RNA, 22 nt, Molluscum contagiosum virus
ugcugcagcguauggaucuucu

SEQ ID NO: 375130 - RNA, 15 nt, Molluscum contagiosum virus
ugcugcagcugcgcg

SEQ ID NO: 375131 - RNA, 20 nt, Molluscum contagiosum virus
ugcugcccgccuucgacggc

SEQ ID NO: 375132 - RNA, 14 nt, Molluscum contagiosum virus
ugcugcgcacgugc

SEQ ID NO: 375133 - RNA, 14 nt, Molluscum contagiosum virus
ugcugcgcagcauc

SEQ ID NO: 375134 - RNA, 17 nt, Molluscum contagiosum virus
ugcugcgcgaguaccug

SEQ ID NO: 375135 - RNA, 19 nt, Molluscum contagiosum virus
ugcugcggcaaccgcgccc

SEQ ID NO: 375136 - RNA, 15 nt, Molluscum contagiosum virus
ugcugcggcugcugg

SEQ ID NO: 375137 - RNA, 22 nt, Molluscum contagiosum virus
ugcugcgucacaagcaccgccu

SEQ ID NO: 375138 - RNA, 14 nt, Molluscum contagiosum virus
ugcugcucgacggg

SEQ ID NO: 375139 - RNA, 18 nt, Molluscum contagiosum virus
ugcuggacgggcacgagc

SEQ ID NO: 375140 - RNA, 17 nt, Molluscum contagiosum virus
ugcuggagaucgacaag

SEQ ID NO: 375141 - RNA, 22 nt, Molluscum contagiosum virus
ugcuggcacgcgagguuccaga

SEQ ID NO: 375142 - RNA, 13 nt, Molluscum contagiosum virus
ugcuggcagacac

SEQ ID NO: 375143 - RNA, 16 nt, Molluscum contagiosum virus
ugcuggcgagcacguc

SEQ ID NO: 375144 - RNA, 15 nt, Molluscum contagiosum virus
ugcuggcggggcugg

SEQ ID NO: 375145 - RNA, 19 nt, Molluscum contagiosum virus
ugcuggcggggcuggcaga

SEQ ID NO: 375146 - RNA, 19 nt, Molluscum contagiosum virus
ugcugggagcuugcacgaa

SEQ ID NO: 375147 - RNA, 15 nt, Molluscum contagiosum virus
ugcugggcacaagcu

SEQ ID NO: 375148 - RNA, 15 nt, Molluscum contagiosum virus
ugcugguucugcucg

SEQ ID NO: 375149 - RNA, 15 nt, Molluscum contagiosum virus
ugcugugccugcgca

SEQ ID NO: 375150 - RNA, 14 nt, Molluscum contagiosum virus
ugcuguuacuugca

SEQ ID NO: 375151 - RNA, 19 nt, Molluscum contagiosum virus
ugcuguugccgcgcucgug

SEQ ID NO: 375152 - RNA, 13 nt, Molluscum contagiosum virus
ugcuucccgcuga

SEQ ID NO: 375153 - RNA, 18 nt, Molluscum contagiosum virus
ugcuucgcgcaaacaagc

SEQ ID NO: 375154 - RNA, 19 nt, Molluscum contagiosum virus
ugcuucggcggcugugccc

SEQ ID NO: 375155 - RNA, 23 nt, Molluscum contagiosum virus
ugcuugcgcacgauguacuccac

SEQ ID NO: 375156 - RNA, 23 nt, Molluscum contagiosum virus
ugcuugcgcacggaccucaagga

SEQ ID NO: 375157 - RNA, 16 nt, Molluscum contagiosum virus
ugcuugcugcgcugca

SEQ ID NO: 375158 - RNA, 17 nt, Molluscum contagiosum virus
ugcuugcuuccggugcc

SEQ ID NO: 375159 - RNA, 12 nt, Molluscum contagiosum virus
ugcuuguucucu

SEQ ID NO: 375160 - RNA, 22 nt, Molluscum contagiosum virus
ugcuuucguggucaucaagauc

SEQ ID NO: 375161 - RNA, 22 nt, Molluscum contagiosum virus
uggaaacgcuggcgagcaagau

SEQ ID NO: 375162 - RNA, 16 nt, Molluscum contagiosum virus
uggaacaggugcgcaa

SEQ ID NO: 375163 - RNA, 21 nt, Molluscum contagiosum virus
uggaagacaacucuuguugcu

SEQ ID NO: 375164 - RNA, 14 nt, Molluscum contagiosum virus
uggaagcacgcaac

SEQ ID NO: 375165 - RNA, 18 nt, Molluscum contagiosum virus
uggaagcacgcaacugcc

SEQ ID NO: 375166 - RNA, 20 nt, Molluscum contagiosum virus
uggacacgcacuggcgcugc

SEQ ID NO: 375167 - RNA, 21 nt, Molluscum contagiosum virus
uggacagcaagcagcgcgcgc

SEQ ID NO: 375168 - RNA, 12 nt, Molluscum contagiosum virus
uggacagcaucc

SEQ ID NO: 375169 - RNA, 20 nt, Molluscum contagiosum virus
uggacagcaugaacucgcug

SEQ ID NO: 375170 - RNA, 20 nt, Molluscum contagiosum virus
uggaccacaagcaguaccug

SEQ ID NO: 375171 - RNA, 19 nt, Molluscum contagiosum virus
uggaccgcgucaagaucaa

SEQ ID NO: 375172 - RNA, 14 nt, Molluscum contagiosum virus
uggaccugauuuuc

SEQ ID NO: 375173 - RNA, 18 nt, Molluscum contagiosum virus
uggacgagcgcuaccuga

SEQ ID NO: 375174 - RNA, 20 nt, Molluscum contagiosum virus
uggacgcgcucaagauccga

SEQ ID NO: 375175 - RNA, 20 nt, Molluscum contagiosum virus
uggacugagccgcaagcaca

SEQ ID NO: 375176 - RNA, 15 nt, Molluscum contagiosum virus
uggagaacggcgugc

SEQ ID NO: 375177 - RNA, 21 nt, Molluscum contagiosum virus
uggagcccacguugccgcgcg

SEQ ID NO: 375178 - RNA, 14 nt, Molluscum contagiosum virus
uggagcgagugcgc

SEQ ID NO: 375179 - RNA, 18 nt, Molluscum contagiosum virus
uggagcgcagucccagca

SEQ ID NO: 375180 - RNA, 13 nt, Molluscum contagiosum virus
uggaggacaccgc

SEQ ID NO: 375181 - RNA, 14 nt, Molluscum contagiosum virus
uggaggauucuugu

SEQ ID NO: 375182 - RNA, 15 nt, Molluscum contagiosum virus
uggaggauucuugua

SEQ ID NO: 375183 - RNA, 17 nt, Molluscum contagiosum virus
uggaggcaaucugucca

SEQ ID NO: 375184 - RNA, 17 nt, Molluscum contagiosum virus
uggaggccaacuaccug

SEQ ID NO: 375185 - RNA, 18 nt, Molluscum contagiosum virus
uggaggcgcuagugcaga

SEQ ID NO: 375186 - RNA, 16 nt, Molluscum contagiosum virus
uggagggcacgcugca

SEQ ID NO: 375187 - RNA, 13 nt, Molluscum contagiosum virus
uggaguccaugcc

SEQ ID NO: 375188 - RNA, 19 nt, Molluscum contagiosum virus
uggauuucggcgcgcgugc

SEQ ID NO: 375189 - RNA, 18 nt, Molluscum contagiosum virus
uggcaacgcgggggccau

SEQ ID NO: 375190 - RNA, 12 nt, Molluscum contagiosum virus
uggcaagcuugc

SEQ ID NO: 375191 - RNA, 19 nt, Molluscum contagiosum virus
uggcaaggauuacgcugcc

SEQ ID NO: 375192 - RNA, 15 nt, Molluscum contagiosum virus
uggcaagggccugcg

SEQ ID NO: 375193 - RNA, 16 nt, Molluscum contagiosum virus
uggcacgcgccgcgcg

SEQ ID NO: 375194 - RNA, 18 nt, Molluscum contagiosum virus
uggcacuugcgcagccau

SEQ ID NO: 375195 - RNA, 14 nt, Molluscum contagiosum virus
uggcagcaacugca

SEQ ID NO: 375196 - RNA, 22 nt, Molluscum contagiosum virus
uggccaagcgcuccaacuucca

SEQ ID NO: 375197 - RNA, 23 nt, Molluscum contagiosum virus
uggccaagcgcuccaacuuccac

SEQ ID NO: 375198 - RNA, 19 nt, Molluscum contagiosum virus
uggccacucucgcgcguga

SEQ ID NO: 375199 - RNA, 19 nt, Molluscum contagiosum virus
uggccagcuucaucaagca

SEQ ID NO: 375200 - RNA, 16 nt, Molluscum contagiosum virus
uggccgagaaaaagcu

SEQ ID NO: 375201 - RNA, 17 nt, Molluscum contagiosum virus
uggccgagccgcuggcc

SEQ ID NO: 375202 - RNA, 23 nt, Molluscum contagiosum virus
uggccgcgcccucgcucgagggc

SEQ ID NO: 375203 - RNA, 22 nt, Molluscum contagiosum virus
uggccugcaaacgcgaaacugg

SEQ ID NO: 375204 - RNA, 23 nt, Molluscum contagiosum virus
uggccuguaguagcagcuucuug

SEQ ID NO: 375205 - RNA, 22 nt, Molluscum contagiosum virus
uggcgaauuucggcuucgagaa

SEQ ID NO: 375206 - RNA, 17 nt, Molluscum contagiosum virus
uggcgagcgcucugcau

SEQ ID NO: 375207 - RNA, 18 nt, Molluscum contagiosum virus
uggcgauagcgauggcug

SEQ ID NO: 375208 - RNA, 16 nt, Molluscum contagiosum virus
uggcgcaccugcuaga

SEQ ID NO: 375209 - RNA, 16 nt, Molluscum contagiosum virus
uggcgccacaccagug

SEQ ID NO: 375210 - RNA, 17 nt, Molluscum contagiosum virus
uggcgccgaugcagugc

SEQ ID NO: 375211 - RNA, 15 nt, Molluscum contagiosum virus
uggcgcgccgcugcc

SEQ ID NO: 375212 - RNA, 17 nt, Molluscum contagiosum virus
uggcgcgcgcgcugcgc

SEQ ID NO: 375213 - RNA, 20 nt, Molluscum contagiosum virus
uggcgcgcgcggucgacggg

SEQ ID NO: 375214 - RNA, 22 nt, Molluscum contagiosum virus
uggcgcucgcgcgcacgcgcac

SEQ ID NO: 375215 - RNA, 15 nt, Molluscum contagiosum virus
uggcgcugcacaguu

SEQ ID NO: 375216 - RNA, 15 nt, Molluscum contagiosum virus
uggcggcgcacgcga

SEQ ID NO: 375217 - RNA, 14 nt, Molluscum contagiosum virus
uggcgggcgugccc

SEQ ID NO: 375218 - RNA, 13 nt, Molluscum contagiosum virus
uggcgugacaggu

SEQ ID NO: 375219 - RNA, 13 nt, Molluscum contagiosum virus
uggcucacagccg

SEQ ID NO: 375220 - RNA, 20 nt, Molluscum contagiosum virus
uggcugcugcgcgaccgcac

SEQ ID NO: 375221 - RNA, 21 nt, Molluscum contagiosum virus
uggcuugcucggacacacgca

SEQ ID NO: 375222 - RNA, 17 nt, Molluscum contagiosum virus
ugggagcuuuccuugcg

SEQ ID NO: 375223 - RNA, 17 nt, Molluscum contagiosum virus
ugggauaacaggcgugc

SEQ ID NO: 375224 - RNA, 18 nt, Molluscum contagiosum virus
ugggcacaagcuuucuca

SEQ ID NO: 375225 - RNA, 17 nt, Molluscum contagiosum virus
ugggcacgcucuacggc

SEQ ID NO: 375226 - RNA, 12 nt, Molluscum contagiosum virus
ugggcacguggc

SEQ ID NO: 375227 - RNA, 12 nt, Molluscum contagiosum virus
ugggcacugcua

SEQ ID NO: 375228 - RNA, 18 nt, Molluscum contagiosum virus
ugggcacugcuacgagcc

SEQ ID NO: 375229 - RNA, 21 nt, Molluscum contagiosum virus
ugggcaggccgcccacgcuca

SEQ ID NO: 375230 - RNA, 21 nt, Molluscum contagiosum virus
ugggccgcuucgcguacaucc

SEQ ID NO: 375231 - RNA, 16 nt, Molluscum contagiosum virus
ugggcgucgcacaguu

SEQ ID NO: 375232 - RNA, 18 nt, Molluscum contagiosum virus
ugggcgucgcacaguuca

SEQ ID NO: 375233 - RNA, 22 nt, Molluscum contagiosum virus
ugggcgucgcacaguucacggc

SEQ ID NO: 375234 - RNA, 13 nt, Molluscum contagiosum virus
ugggcgugcucac

SEQ ID NO: 375235 - RNA, 22 nt, Molluscum contagiosum virus
ugggcuacaagugcauccgcaa

SEQ ID NO: 375236 - RNA, 20 nt, Molluscum contagiosum virus
ugggcuuggccaugguggac

SEQ ID NO: 375237 - RNA, 14 nt, Molluscum contagiosum virus
ugguaacaagagcu

SEQ ID NO: 375238 - RNA, 14 nt, Molluscum contagiosum virus
uggucaacagcuac

SEQ ID NO: 375239 - RNA, 19 nt, Molluscum contagiosum virus
uggucaagaacaugugcuc

SEQ ID NO: 375240 - RNA, 12 nt, Molluscum contagiosum virus
uggucacagaca

SEQ ID NO: 375241 - RNA, 13 nt, Molluscum contagiosum virus
ugguccaccagcu

SEQ ID NO: 375242 - RNA, 19 nt, Molluscum contagiosum virus
uggucgccggcgcuucuac

SEQ ID NO: 375243 - RNA, 13 nt, Molluscum contagiosum virus
uggugcacacaca

SEQ ID NO: 375244 - RNA, 21 nt, Molluscum contagiosum virus
uggugcagcggaugcagaaca

SEQ ID NO: 375245 - RNA, 19 nt, Molluscum contagiosum virus
uggugcgccugcacuacug

SEQ ID NO: 375246 - RNA, 16 nt, Molluscum contagiosum virus
uggugcgcgugacaca

SEQ ID NO: 375247 - RNA, 20 nt, Molluscum contagiosum virus
uggugcgcgugacacaccgc

SEQ ID NO: 375248 - RNA, 16 nt, Molluscum contagiosum virus
uggugcucgccugcau

SEQ ID NO: 375249 - RNA, 18 nt, Molluscum contagiosum virus
ugguguccacgcgcguga

SEQ ID NO: 375250 - RNA, 16 nt, Molluscum contagiosum virus
uggugugcacugaugu

SEQ ID NO: 375251 - RNA, 11 nt, Molluscum contagiosum virus
ugguucugcuc

SEQ ID NO: 375252 - RNA, 13 nt, Molluscum contagiosum virus
ugguugcuugcau

SEQ ID NO: 375253 - RNA, 14 nt, Molluscum contagiosum virus
ugguugugcuuguu

SEQ ID NO: 375254 - RNA, 14 nt, Molluscum contagiosum virus
uguacguaauccau

SEQ ID NO: 375255 - RNA, 20 nt, Molluscum contagiosum virus
uguacucgccguuccacuac

SEQ ID NO: 375256 - RNA, 19 nt, Molluscum contagiosum virus
uguagguacccgcaacccc

SEQ ID NO: 375257 - RNA, 16 nt, Molluscum contagiosum virus
uguagucgcccccgug

SEQ ID NO: 375258 - RNA, 15 nt, Molluscum contagiosum virus
ugucacaauggcacu

SEQ ID NO: 375259 - RNA, 17 nt, Molluscum contagiosum virus
ugucacggcaaacgcca

SEQ ID NO: 375260 - RNA, 23 nt, Molluscum contagiosum virus
uguccaaggugaacgaccucaac

SEQ ID NO: 375261 - RNA, 15 nt, Molluscum contagiosum virus
uguccacgacacugg

SEQ ID NO: 375262 - RNA, 19 nt, Molluscum contagiosum virus
ugucccugcauacacuucc

SEQ ID NO: 375263 - RNA, 14 nt, Molluscum contagiosum virus
uguccgcacgcaca

SEQ ID NO: 375264 - RNA, 19 nt, Molluscum contagiosum virus
uguccgcgggcgcacgcuu

SEQ ID NO: 375265 - RNA, 23 nt, Molluscum contagiosum virus
uguccgcgggcgcacgcuugucc

SEQ ID NO: 375266 - RNA, 23 nt, Molluscum contagiosum virus
uugagagcagcggcuacuuggac

SEQ ID NO: 375267 - RNA, 17 nt, Molluscum contagiosum virus
uugagugcgggucacaa

SEQ ID NO: 375268 - RNA, 21 nt, Molluscum contagiosum virus
uugaugacuaugcgucuuccu

SEQ ID NO: 375269 - RNA, 18 nt, Molluscum contagiosum virus
uugcacgcgcacgcgccc

SEQ ID NO: 375270 - RNA, 16 nt, Molluscum contagiosum virus
uugcacgugcgugccc

SEQ ID NO: 375271 - RNA, 15 nt, Molluscum contagiosum virus
uugcagcccaccagc

SEQ ID NO: 375272 - RNA, 14 nt, Molluscum contagiosum virus
uugcauggacaucc

SEQ ID NO: 375273 - RNA, 23 nt, Molluscum contagiosum virus
uugcauguucucuuuguuccugc

SEQ ID NO: 375274 - RNA, 14 nt, Molluscum contagiosum virus
uugccagaagcccu

SEQ ID NO: 375275 - RNA, 23 nt, Molluscum contagiosum virus
uugccgugcccaucuccuugucu

SEQ ID NO: 375276 - RNA, 14 nt, Molluscum contagiosum virus
uugccuuuugcaca

SEQ ID NO: 375277 - RNA, 18 nt, Molluscum contagiosum virus
uugcgaacgcgcaagugu

SEQ ID NO: 375278 - RNA, 22 nt, Molluscum contagiosum virus
uugcgcacacacuugcucucuu

SEQ ID NO: 375279 - RNA, 20 nt, Molluscum contagiosum virus
uugcgcacggaccucaagga

SEQ ID NO: 375280 - RNA, 12 nt, Molluscum contagiosum virus
uugcgcauguga

SEQ ID NO: 375281 - RNA, 17 nt, Molluscum contagiosum virus
uugcgcauuggcagcgc

SEQ ID NO: 375282 - RNA, 12 nt, Molluscum contagiosum virus
uugcgcgcgccc

SEQ ID NO: 375283 - RNA, 22 nt, Molluscum contagiosum virus
uugcgcggccauggucacgcgc

SEQ ID NO: 375284 - RNA, 17 nt, Molluscum contagiosum virus
uugcggaugcucgcuug

SEQ ID NO: 375285 - RNA, 18 nt, Molluscum contagiosum virus
uugcggcgagucaguaca

SEQ ID NO: 375286 - RNA, 14 nt, Molluscum contagiosum virus
uugcguacuuggaa

SEQ ID NO: 375287 - RNA, 18 nt, Molluscum contagiosum virus
uugcgucuuacugcugca

SEQ ID NO: 375288 - RNA, 19 nt, Molluscum contagiosum virus
uugcuagcaacuugcucua

SEQ ID NO: 375289 - RNA, 22 nt, Molluscum contagiosum virus
uugcucgcuugccgcuugagca

SEQ ID NO: 375290 - RNA, 17 nt, Molluscum contagiosum virus
uugcucuucgaccucug

SEQ ID NO: 375291 - RNA, 20 nt, Molluscum contagiosum virus
uugcugcugccgcgcggcac

SEQ ID NO: 375292 - RNA, 16 nt, Molluscum contagiosum virus
uugcuguuccacauca

SEQ ID NO: 375293 - RNA, 14 nt, Molluscum contagiosum virus
uuggcagcggcaaa

SEQ ID NO: 375294 - RNA, 13 nt, Molluscum contagiosum virus
uuggcgucucuuc

SEQ ID NO: 375295 - RNA, 14 nt, Molluscum contagiosum virus
uuggugcagaucuc

SEQ ID NO: 375296 - RNA, 19 nt, Molluscum contagiosum virus
uuguagccgcgcgaacaaa

SEQ ID NO: 375297 - RNA, 20 nt, Molluscum contagiosum virus
uugucaagcacuacauggac

SEQ ID NO: 375298 - RNA, 13 nt, Molluscum contagiosum virus
uugugcucgcuua

SEQ ID NO: 375299 - RNA, 16 nt, Molluscum contagiosum virus
uugugcuuguucucuu

SEQ ID NO: 375300 - RNA, 16 nt, Molluscum contagiosum virus
uuuacuacguguucuc

SEQ ID NO: 375301 - RNA, 13 nt, Molluscum contagiosum virus
uuuacugcaagau

SEQ ID NO: 375302 - RNA, 20 nt, Molluscum contagiosum virus
uuucaaugcaguaugugaac

SEQ ID NO: 375303 - RNA, 18 nt, Molluscum contagiosum virus
uuuccugcggcgcugcua

SEQ ID NO: 375304 - RNA, 21 nt, Molluscum contagiosum virus
uuuccuggcucgcgagugugc

SEQ ID NO: 375305 - RNA, 13 nt, Molluscum contagiosum virus
uuucgacgcugcc

SEQ ID NO: 375306 - RNA, 20 nt, Molluscum contagiosum virus
uuucgccccgagaauaccgu

SEQ ID NO: 375307 - RNA, 22 nt, Molluscum contagiosum virus
uuucgcgggcgccgcgcaauag

SEQ ID NO: 375308 - RNA, 15 nt, Molluscum contagiosum virus
uuucgggaagcacag

SEQ ID NO: 375309 - RNA, 22 nt, Molluscum contagiosum virus
uuucucaagaucguuuugcacu

SEQ ID NO: 375310 - RNA, 19 nt, Molluscum contagiosum virus
uuucugugcucgcgccuga

SEQ ID NO: 375311 - RNA, 20 nt, Molluscum contagiosum virus
uuugacuacuacguggugcg

SEQ ID NO: 375312 - RNA, 22 nt, Molluscum contagiosum virus
uuugccaagagggggcuguuau

SEQ ID NO: 375313 - RNA, 19 nt, Molluscum contagiosum virus
uuugccaggcaacgcacaa

SEQ ID NO: 375314 - RNA, 22 nt, Molluscum contagiosum virus
uuugcgaacgcgcaagugugcg

SEQ ID NO: 375315 - RNA, 14 nt, Molluscum contagiosum virus
uuugcgagcacugu

SEQ ID NO: 375316 - RNA, 24 nt, Molluscum contagiosum virus
uuugcgugaggaagaccuuggaca

SEQ ID NO: 375317 - RNA, 12 nt, Molluscum contagiosum virus
uuugcucggggc

SEQ ID NO: 375318 - RNA, 15 nt, Molluscum contagiosum virus
uuuggcgugaccaug

SEQ ID NO: 375319 - RNA, 21 nt, Molluscum contagiosum virus
uuuuaccccgagguucuccag

SEQ ID NO: 375320 - RNA, 14 nt, Molluscum contagiosum virus
uuuucgucauggag

SEQ ID NO: 375321 - RNA, 22 nt, Molluscum contagiosum virus
uuuuucggagacagggugccua

SEQ ID NO: 375322 - RNA, 20 nt, Molluscum contagiosum virus
uuuuuguauuuaaagcuagc

SEQ ID NO: 375323 - RNA, 15 nt, Molluscum contagiosum virus
aaaaaaaagugccua

SEQ ID NO: 375324 - RNA, 14 nt, Molluscum contagiosum virus
aaaacaacucugcu

SEQ ID NO: 375325 - RNA, 13 nt, Molluscum contagiosum virus
aaaacaugcugua

SEQ ID NO: 375326 - RNA, 15 nt, Molluscum contagiosum virus
aaaacaugugccugc

SEQ ID NO: 375327 - RNA, 19 nt, Molluscum contagiosum virus
aaaacccugauaugcauau

SEQ ID NO: 375328 - RNA, 12 nt, Molluscum contagiosum virus
aaaacgaaaagc

SEQ ID NO: 375329 - RNA, 15 nt, Molluscum contagiosum virus
aaaagaauccuucuc

SEQ ID NO: 375330 - RNA, 22 nt, Molluscum contagiosum virus
aaaagagggccuuucucagaga

SEQ ID NO: 375331 - RNA, 11 nt, Molluscum contagiosum virus
aaaagcacagu

SEQ ID NO: 375332 - RNA, 15 nt, Molluscum contagiosum virus
aaaagcacaguccaa

SEQ ID NO: 375333 - RNA, 16 nt, Molluscum contagiosum virus
aaacaaaaaaaacaca

SEQ ID NO: 375334 - RNA, 15 nt, Molluscum contagiosum virus
aaacaagcagucuca

SEQ ID NO: 375335 - RNA, 13 nt, Molluscum contagiosum virus
aaaccaacgugag

SEQ ID NO: 375336 - RNA, 22 nt, Molluscum contagiosum virus
aaaccucugagcgagcgcaguu

SEQ ID NO: 375337 - RNA, 12 nt, Molluscum contagiosum virus
acaaucucugcg

SEQ ID NO: 375338 - RNA, 18 nt, Molluscum contagiosum virus
acaaucucugcgccgcgc

SEQ ID NO: 375339 - RNA, 19 nt, Molluscum contagiosum virus
acaauggacacgcacuggc

SEQ ID NO: 375340 - RNA, 13 nt, Molluscum contagiosum virus
acaauuacuccag

SEQ ID NO: 375341 - RNA, 11 nt, Molluscum contagiosum virus
acacacacucg

SEQ ID NO: 375342 - RNA, 20 nt, Molluscum contagiosum virus
acacaccgcguggacaacag

SEQ ID NO: 375343 - RNA, 15 nt, Molluscum contagiosum virus
acacacgcacccaaa

SEQ ID NO: 375344 - RNA, 12 nt, Molluscum contagiosum virus
acacacucgcgc

SEQ ID NO: 375345 - RNA, 22 nt, Molluscum contagiosum virus
acacacucgcgcguccacaagg

SEQ ID NO: 375346 - RNA, 15 nt, Molluscum contagiosum virus
acacacucgcucucu

SEQ ID NO: 375347 - RNA, 17 nt, Molluscum contagiosum virus
acacagaaguugccgca

SEQ ID NO: 375348 - RNA, 16 nt, Molluscum contagiosum virus
acacauggccgcgcgc

SEQ ID NO: 375349 - RNA, 10 nt, Molluscum contagiosum virus
acaccagcug

SEQ ID NO: 375350 - RNA, 13 nt, Molluscum contagiosum virus
acacccagguuca

SEQ ID NO: 375351 - RNA, 18 nt, Molluscum contagiosum virus
acaccccuguaacaagga

SEQ ID NO: 375352 - RNA, 18 nt, Molluscum contagiosum virus
acaccgcguggacaacag

SEQ ID NO: 375353 - RNA, 19 nt, Molluscum contagiosum virus
acaccggcgcgcugaucac

SEQ ID NO: 375354 - RNA, 14 nt, Molluscum contagiosum virus
acaccugugcccug

SEQ ID NO: 375355 - RNA, 20 nt, Molluscum contagiosum virus
acaccugugcccuguccaca

SEQ ID NO: 375356 - RNA, 17 nt, Molluscum contagiosum virus
acacgaggggcaagcuc

SEQ ID NO: 375357 - RNA, 15 nt, Molluscum contagiosum virus
acacgcaaacaaaac

SEQ ID NO: 375358 - RNA, 13 nt, Molluscum contagiosum virus
acacgcacacucg

SEQ ID NO: 375359 - RNA, 13 nt, Molluscum contagiosum virus
acacgcacuugcg

SEQ ID NO: 375360 - RNA, 14 nt, Molluscum contagiosum virus
acacgcgcgcgugc

SEQ ID NO: 375361 - RNA, 19 nt, Molluscum contagiosum virus
acacgcgcgcgugcugcug

SEQ ID NO: 375362 - RNA, 17 nt, Molluscum contagiosum virus
acacgcgugcaugcgag

SEQ ID NO: 375363 - RNA, 22 nt, Molluscum contagiosum virus
acacggaagcucacaucugucc

SEQ ID NO: 375364 - RNA, 14 nt, Molluscum contagiosum virus
acacgggggcugcc

SEQ ID NO: 375365 - RNA, 22 nt, Molluscum contagiosum virus
acacgugccuucuucgaucucg

SEQ ID NO: 375366 - RNA, 12 nt, Molluscum contagiosum virus
acacguggaauu

SEQ ID NO: 375367 - RNA, 16 nt, Molluscum contagiosum virus
acacuaccacagccau

SEQ ID NO: 375368 - RNA, 18 nt, Molluscum contagiosum virus
acacucacgcguccacaa

SEQ ID NO: 375369 - RNA, 22 nt, Molluscum contagiosum virus
acacucacgcguccacaaagac

SEQ ID NO: 375370 - RNA, 20 nt, Molluscum contagiosum virus
acacucgacuugcuaugcua

SEQ ID NO: 375371 - RNA, 18 nt, Molluscum contagiosum virus
acacucgcgcguccacaa

SEQ ID NO: 375372 - RNA, 19 nt, Molluscum contagiosum virus
acacucgcgcguccacaag

SEQ ID NO: 375373 - RNA, 22 nt, Molluscum contagiosum virus
acacucgcgcguccgcaaagac

SEQ ID NO: 375374 - RNA, 19 nt, Molluscum contagiosum virus
acacucgugcucguguguc

SEQ ID NO: 375375 - RNA, 15 nt, Molluscum contagiosum virus
acacucuucgcaggc

SEQ ID NO: 375376 - RNA, 21 nt, Molluscum contagiosum virus
acacugcagaaacagccgugc

SEQ ID NO: 375377 - RNA, 18 nt, Molluscum contagiosum virus
acacugcgaaggucauca

SEQ ID NO: 375378 - RNA, 17 nt, Molluscum contagiosum virus
acacugucucugcgcga

SEQ ID NO: 375379 - RNA, 13 nt, Molluscum contagiosum virus
acacuuccugcua

SEQ ID NO: 375380 - RNA, 19 nt, Molluscum contagiosum virus
acacuugcgcguccgcaaa

SEQ ID NO: 375381 - RNA, 22 nt, Molluscum contagiosum virus
acacuugcgcguucgcaaagac

SEQ ID NO: 375382 - RNA, 13 nt, Molluscum contagiosum virus
acagaaagccaac

SEQ ID NO: 375383 - RNA, 13 nt, Molluscum contagiosum virus
acagacggcgcgc

SEQ ID NO: 375384 - RNA, 14 nt, Molluscum contagiosum virus
acagagaaaggcac

SEQ ID NO: 375385 - RNA, 13 nt, Molluscum contagiosum virus
agcucgguagcca

SEQ ID NO: 375386 - RNA, 22 nt, Molluscum contagiosum virus
agcucguuuucggauagccccu

SEQ ID NO: 375387 - RNA, 15 nt, Molluscum contagiosum virus
agcucucgcgcgcag

SEQ ID NO: 375388 - RNA, 17 nt, Molluscum contagiosum virus
agcucugcgcaaccugg

SEQ ID NO: 375389 - RNA, 14 nt, Molluscum contagiosum virus
agcucuucgacagc

SEQ ID NO: 375390 - RNA, 19 nt, Molluscum contagiosum virus
agcucuucgacagcgugcg

SEQ ID NO: 375391 - RNA, 16 nt, Molluscum contagiosum virus
agcucuucguggccaa

SEQ ID NO: 375392 - RNA, 19 nt, Molluscum contagiosum virus
agcugacucggacacugga

SEQ ID NO: 375393 - RNA, 15 nt, Molluscum contagiosum virus
agcugcagagcgugc

SEQ ID NO: 375394 - RNA, 17 nt, Molluscum contagiosum virus
agcugcagagcgugcug

SEQ ID NO: 375395 - RNA, 21 nt, Molluscum contagiosum virus
agcugcccuuuagcguggcgc

SEQ ID NO: 375396 - RNA, 20 nt, Molluscum contagiosum virus
agcugcgcgcgcucauggcg

SEQ ID NO: 375397 - RNA, 17 nt, Molluscum contagiosum virus
agcugcggcgcgugcug

SEQ ID NO: 375398 - RNA, 13 nt, Molluscum contagiosum virus
agcugcuggcaca

SEQ ID NO: 375399 - RNA, 13 nt, Molluscum contagiosum virus
agcuggagcugcc

SEQ ID NO: 375400 - RNA, 20 nt, Molluscum contagiosum virus
agcuggccgaggucuuccac

SEQ ID NO: 375401 - RNA, 17 nt, Molluscum contagiosum virus
agcugguagagaacgac

SEQ ID NO: 375402 - RNA, 20 nt, Molluscum contagiosum virus
agcuggucgccggcgcuucu

SEQ ID NO: 375403 - RNA, 17 nt, Molluscum contagiosum virus
agcuguaccuggugcgc

SEQ ID NO: 375404 - RNA, 13 nt, Molluscum contagiosum virus
agcugucaacagu

SEQ ID NO: 375405 - RNA, 16 nt, Molluscum contagiosum virus
agcugucaacagugcg

SEQ ID NO: 375406 - RNA, 23 nt, Molluscum contagiosum virus
agcugucaacagugcgugccagg

SEQ ID NO: 375407 - RNA, 15 nt, Molluscum contagiosum virus
agcugugcgcuacgu

SEQ ID NO: 375408 - RNA, 23 nt, Molluscum contagiosum virus
agcuguucaacaucguggcgcgc

SEQ ID NO: 375409 - RNA, 16 nt, Molluscum contagiosum virus
agcuucaucaagcacg

SEQ ID NO: 375410 - RNA, 18 nt, Molluscum contagiosum virus
agcuucaucaagcacggc

SEQ ID NO: 375411 - RNA, 15 nt, Molluscum contagiosum virus
agcuucaucuuuccc

SEQ ID NO: 375412 - RNA, 15 nt, Molluscum contagiosum virus
agcuuccucaaggcg

SEQ ID NO: 375413 - RNA, 19 nt, Molluscum contagiosum virus
agcuuccucaaggcgcacg

SEQ ID NO: 375414 - RNA, 15 nt, Molluscum contagiosum virus
agcuucggacgagcu

SEQ ID NO: 375415 - RNA, 19 nt, Molluscum contagiosum virus
agcuucggacgagcucgcc

SEQ ID NO: 375416 - RNA, 13 nt, Molluscum contagiosum virus
agcuugagcacac

SEQ ID NO: 375417 - RNA, 12 nt, Molluscum contagiosum virus
agcuuucucacg

SEQ ID NO: 375418 - RNA, 18 nt, Molluscum contagiosum virus
aggaaacgcagcacuucg

SEQ ID NO: 375419 - RNA, 11 nt, Molluscum contagiosum virus
aggaaaggcac

SEQ ID NO: 375420 - RNA, 21 nt, Molluscum contagiosum virus
aggaaaggcacccgcaggaaa

SEQ ID NO: 375421 - RNA, 13 nt, Molluscum contagiosum virus
aggaaagguaccc

SEQ ID NO: 375422 - RNA, 21 nt, Molluscum contagiosum virus
aggaaagguacccgcaggaaa

SEQ ID NO: 375423 - RNA, 14 nt, Molluscum contagiosum virus
aggaacaaggccaa

SEQ ID NO: 375424 - RNA, 18 nt, Molluscum contagiosum virus
aggaacgcgcgcucguca

SEQ ID NO: 375425 - RNA, 19 nt, Molluscum contagiosum virus
aggaacucuacgacaugcu

SEQ ID NO: 375426 - RNA, 20 nt, Molluscum contagiosum virus
aggaacucuacgacaugcuc

SEQ ID NO: 375427 - RNA, 21 nt, Molluscum contagiosum virus
aguauucgcaagauacacauu

SEQ ID NO: 375428 - RNA, 14 nt, Molluscum contagiosum virus
agucacacuacgcu

SEQ ID NO: 375429 - RNA, 15 nt, Molluscum contagiosum virus
agucacgacuguguu

SEQ ID NO: 375430 - RNA, 16 nt, Molluscum contagiosum virus
agucacgacuguguuc

SEQ ID NO: 375431 - RNA, 16 nt, Molluscum contagiosum virus
agucacugcuagugcu

SEQ ID NO: 375432 - RNA, 16 nt, Molluscum contagiosum virus
agucagcggcgugcug

SEQ ID NO: 375433 - RNA, 12 nt, Molluscum contagiosum virus
aguccccagacu

SEQ ID NO: 375434 - RNA, 14 nt, Molluscum contagiosum virus
agucccuugucaaa

SEQ ID NO: 375435 - RNA, 18 nt, Molluscum contagiosum virus
aguccgacccgugcugcu

SEQ ID NO: 375436 - RNA, 19 nt, Molluscum contagiosum virus
aguccgacccgugcugcuu

SEQ ID NO: 375437 - RNA, 22 nt, Molluscum contagiosum virus
aguccgcccccagguggagcug

SEQ ID NO: 375438 - RNA, 18 nt, Molluscum contagiosum virus
aguccgccucgagcacgc

SEQ ID NO: 375439 - RNA, 19 nt, Molluscum contagiosum virus
aguccgugacagagugccu

SEQ ID NO: 375440 - RNA, 19 nt, Molluscum contagiosum virus
agucgaagagggucgugca

SEQ ID NO: 375441 - RNA, 22 nt, Molluscum contagiosum virus
agucguggccguagugcucauc

SEQ ID NO: 375442 - RNA, 16 nt, Molluscum contagiosum virus
agucuccacgcgugcg

SEQ ID NO: 375443 - RNA, 18 nt, Molluscum contagiosum virus
agucucgaugugacaaca

SEQ ID NO: 375444 - RNA, 14 nt, Molluscum contagiosum virus
agugaaucuugccu

SEQ ID NO: 375445 - RNA, 16 nt, Molluscum contagiosum virus
agugacagacuaggca

SEQ ID NO: 375446 - RNA, 15 nt, Molluscum contagiosum virus
agugauccuugccaa

SEQ ID NO: 375447 - RNA, 18 nt, Molluscum contagiosum virus
agugcacaccagacaaag

SEQ ID NO: 375448 - RNA, 17 nt, Molluscum contagiosum virus
agugcacaccggcgcgc

SEQ ID NO: 375449 - RNA, 15 nt, Molluscum contagiosum virus
agugcagaugaggcu

SEQ ID NO: 375450 - RNA, 12 nt, Molluscum contagiosum virus
agugcccggggg

SEQ ID NO: 375451 - RNA, 22 nt, Molluscum contagiosum virus
agugccgagcucgccuccuugc

SEQ ID NO: 375452 - RNA, 17 nt, Molluscum contagiosum virus
agugccuuguacgggug

SEQ ID NO: 375453 - RNA, 16 nt, Molluscum contagiosum virus
agugcgcaacaugucc

SEQ ID NO: 375454 - RNA, 15 nt, Molluscum contagiosum virus
agugcggaugugcua

SEQ ID NO: 375455 - RNA, 16 nt, Molluscum contagiosum virus
agugcggaugugcuag

SEQ ID NO: 375456 - RNA, 17 nt, Molluscum contagiosum virus
agugcggaugugcuagc

SEQ ID NO: 375457 - RNA, 16 nt, Molluscum contagiosum virus
agugcgugcacugucu

SEQ ID NO: 375458 - RNA, 21 nt, Molluscum contagiosum virus
agugcgugcacugucuuuucc

SEQ ID NO: 375459 - RNA, 20 nt, Molluscum contagiosum virus
agugcuccgcacguggaauc

SEQ ID NO: 375460 - RNA, 20 nt, Molluscum contagiosum virus
agugcuccgcacguggaguc

SEQ ID NO: 375461 - RNA, 22 nt, Molluscum contagiosum virus
agugcugagccacaaacacucg

SEQ ID NO: 375462 - RNA, 19 nt, Molluscum contagiosum virus
agugggcgucgaccuggaa

SEQ ID NO: 375463 - RNA, 18 nt, Molluscum contagiosum virus
agugugcaugcugucaac

SEQ ID NO: 375464 - RNA, 12 nt, Molluscum contagiosum virus
agugugugcauc

SEQ ID NO: 375465 - RNA, 14 nt, Molluscum contagiosum virus
aguuaaggguuuau

SEQ ID NO: 375466 - RNA, 14 nt, Molluscum contagiosum virus
aguucgagcugcug

SEQ ID NO: 375467 - RNA, 17 nt, Molluscum contagiosum virus
aguucgagcugcugcgc

SEQ ID NO: 375468 - RNA, 19 nt, Molluscum contagiosum virus
aguucugcacagcacaggc

SEQ ID NO: 375469 - RNA, 22 nt, Molluscum contagiosum virus
aguugagcaggucggccagcag

SEQ ID NO: 375470 - RNA, 19 nt, Molluscum contagiosum virus
aguugcgagccagccaggc

SEQ ID NO: 375471 - RNA, 22 nt, Molluscum contagiosum virus
aguuggcgcgcaagcgcugcuc

SEQ ID NO: 375472 - RNA, 13 nt, Molluscum contagiosum virus
aguuggucaccac

SEQ ID NO: 375473 - RNA, 22 nt, Molluscum contagiosum virus
aguuguguggcuugcgggacag

SEQ ID NO: 375474 - RNA, 17 nt, Molluscum contagiosum virus
aguuugcggagcagauu

SEQ ID NO: 375475 - RNA, 15 nt, Molluscum contagiosum virus
auaaagacaacgaaa

SEQ ID NO: 375476 - RNA, 15 nt, Molluscum contagiosum virus
auaaaguccucugaa

SEQ ID NO: 375477 - RNA, 18 nt, Molluscum contagiosum virus
auaaauggcguuaccagg

SEQ ID NO: 375478 - RNA, 23 nt, Molluscum contagiosum virus
auaccagauguucucgccagugg

SEQ ID NO: 375479 - RNA, 20 nt, Molluscum contagiosum virus
auaccaggccacgugcucaa

SEQ ID NO: 375480 - RNA, 22 nt, Molluscum contagiosum virus
auaccaugcucucgcugcugcc

SEQ ID NO: 375481 - RNA, 13 nt, Molluscum contagiosum virus
auaccggagacac

SEQ ID NO: 375482 - RNA, 17 nt, Molluscum contagiosum virus
auaccggagacaccagc

SEQ ID NO: 375483 - RNA, 19 nt, Molluscum contagiosum virus
auaccggagacaccagcuc

SEQ ID NO: 375484 - RNA, 13 nt, Molluscum contagiosum virus
auaccugugccag

SEQ ID NO: 375485 - RNA, 16 nt, Molluscum contagiosum virus
auacucuguagcaucu

SEQ ID NO: 375486 - RNA, 19 nt, Molluscum contagiosum virus
auacugcgggcuguuccaa

SEQ ID NO: 375487 - RNA, 16 nt, Molluscum contagiosum virus
auagcgcgcuagcucc

SEQ ID NO: 375488 - RNA, 22 nt, Molluscum contagiosum virus
auagcgcgcuagcuccacgugc

SEQ ID NO: 375489 - RNA, 14 nt, Molluscum contagiosum virus
auaguaccaugacg

SEQ ID NO: 375490 - RNA, 14 nt, Molluscum contagiosum virus
auauacgcaaagga

SEQ ID NO: 375491 - RNA, 21 nt, Molluscum contagiosum virus
auauagacguauacuccaaaa

SEQ ID NO: 375492 - RNA, 21 nt, Molluscum contagiosum virus
auauggcgcgccgaguacugc

SEQ ID NO: 375493 - RNA, 13 nt, Molluscum contagiosum virus
auauucccuugua

SEQ ID NO: 375494 - RNA, 16 nt, Molluscum contagiosum virus
auauucuuuacuacgu

SEQ ID NO: 375495 - RNA, 19 nt, Molluscum contagiosum virus
aucaacgcgcgcgugcugu

SEQ ID NO: 375496 - RNA, 19 nt, Molluscum contagiosum virus
aucaagaucggacucagca

SEQ ID NO: 375497 - RNA, 22 nt, Molluscum contagiosum virus
aucaagaucggacucagcaugu

SEQ ID NO: 375498 - RNA, 16 nt, Molluscum contagiosum virus
aucaagggcaagggcu

SEQ ID NO: 375499 - RNA, 17 nt, Molluscum contagiosum virus
aucaccagccugcucac

SEQ ID NO: 375500 - RNA, 17 nt, Molluscum contagiosum virus
aucaccgacacgcgccc

SEQ ID NO: 375501 - RNA, 13 nt, Molluscum contagiosum virus
aucacgccgugac

SEQ ID NO: 375502 - RNA, 20 nt, Molluscum contagiosum virus
aucacgcucgcgacgugcgc

SEQ ID NO: 375503 - RNA, 20 nt, Molluscum contagiosum virus
aucacggcuguaaugugcug

SEQ ID NO: 375504 - RNA, 16 nt, Molluscum contagiosum virus
aucagagaagugcucc

SEQ ID NO: 375505 - RNA, 17 nt, Molluscum contagiosum virus
aucagagaagugcuccg

SEQ ID NO: 375506 - RNA, 15 nt, Molluscum contagiosum virus
aucagcaacaagcuc

SEQ ID NO: 375507 - RNA, 23 nt, Molluscum contagiosum virus
aucagcgcggaggcgcuaccucg

SEQ ID NO: 375508 - RNA, 16 nt, Molluscum contagiosum virus
aucaugggcgugcuca

SEQ ID NO: 375509 - RNA, 21 nt, Molluscum contagiosum virus
auccaccugcgcaacgugcug

SEQ ID NO: 375510 - RNA, 21 nt, Molluscum contagiosum virus
auccagcgcaucaugcgcuuc

SEQ ID NO: 375511 - RNA, 20 nt, Molluscum contagiosum virus
auccaugagagaauggacau

SEQ ID NO: 375512 - RNA, 22 nt, Molluscum contagiosum virus
aucccgccgcugcgcuugcuca

SEQ ID NO: 375513 - RNA, 23 nt, Molluscum contagiosum virus
aucccgccgcugcgcuugcucac

SEQ ID NO: 375514 - RNA, 20 nt, Molluscum contagiosum virus
aucccggaacgcaaguacaa

SEQ ID NO: 375515 - RNA, 20 nt, Molluscum contagiosum virus
aucccgggacacgaggucac

SEQ ID NO: 375516 - RNA, 16 nt, Molluscum contagiosum virus
auccgaccucuuuccg

SEQ ID NO: 375517 - RNA, 13 nt, Molluscum contagiosum virus
auccgcuaccugg

SEQ ID NO: 375518 - RNA, 15 nt, Molluscum contagiosum virus
auccggcacgcacaa

SEQ ID NO: 375519 - RNA, 14 nt, Molluscum contagiosum virus
auccgggcgcugca

SEQ ID NO: 375520 - RNA, 17 nt, Molluscum contagiosum virus
auccuacgcaaacuuca

SEQ ID NO: 375521 - RNA, 19 nt, Molluscum contagiosum virus
auccuccggaugaacagcu

SEQ ID NO: 375522 - RNA, 22 nt, Molluscum contagiosum virus
auccucgaugagaacaacagcg

SEQ ID NO: 375523 - RNA, 18 nt, Molluscum contagiosum virus
auccugcucaagaucucg

SEQ ID NO: 375524 - RNA, 19 nt, Molluscum contagiosum virus
auccuugauaaaagcacag

SEQ ID NO: 375525 - RNA, 23 nt, Molluscum contagiosum virus
auccuugauaaaagcacagucca

SEQ ID NO: 375526 - RNA, 19 nt, Molluscum contagiosum virus
aucgaaauucgaacggaca

SEQ ID NO: 375527 - RNA, 15 nt, Molluscum contagiosum virus
aucgacgagcacgag

SEQ ID NO: 375528 - RNA, 17 nt, Molluscum contagiosum virus
aucgagaugcucaagca

SEQ ID NO: 375529 - RNA, 17 nt, Molluscum contagiosum virus
augugaacacgacaugu

SEQ ID NO: 375530 - RNA, 15 nt, Molluscum contagiosum virus
augugacaacaugug

SEQ ID NO: 375531 - RNA, 19 nt, Molluscum contagiosum virus
augugacaacaugugaucc

SEQ ID NO: 375532 - RNA, 14 nt, Molluscum contagiosum virus
augugcuagcugcg

SEQ ID NO: 375533 - RNA, 22 nt, Molluscum contagiosum virus
auguuuccugcggcgcugcuac

SEQ ID NO: 375534 - RNA, 19 nt, Molluscum contagiosum virus
auuaagaguccacugccaa

SEQ ID NO: 375535 - RNA, 18 nt, Molluscum contagiosum virus
auucaaguuugacaaggg

SEQ ID NO: 375536 - RNA, 22 nt, Molluscum contagiosum virus
auucacaucuugcuaugcuccc

SEQ ID NO: 375537 - RNA, 15 nt, Molluscum contagiosum virus
auuccacgcuugcac

SEQ ID NO: 375538 - RNA, 13 nt, Molluscum contagiosum virus
auucccguggacc

SEQ ID NO: 375539 - RNA, 19 nt, Molluscum contagiosum virus
auuccgugucguuccacga

SEQ ID NO: 375540 - RNA, 22 nt, Molluscum contagiosum virus
auuccuucccggaauuccgugu

SEQ ID NO: 375541 - RNA, 20 nt, Molluscum contagiosum virus
auucucguggcguugcugcu

SEQ ID NO: 375542 - RNA, 21 nt, Molluscum contagiosum virus
auucucguggcguugcugcug

SEQ ID NO: 375543 - RNA, 15 nt, Molluscum contagiosum virus
auucucucgagagac

SEQ ID NO: 375544 - RNA, 19 nt, Molluscum contagiosum virus
auugagugcgggucacaag

SEQ ID NO: 375545 - RNA, 15 nt, Molluscum contagiosum virus
auugcauggacaucc

SEQ ID NO: 375546 - RNA, 22 nt, Molluscum contagiosum virus
auugccggcgcgcgcuauucaa

SEQ ID NO: 375547 - RNA, 21 nt, Molluscum contagiosum virus
auugccuuuugcacagugugc

SEQ ID NO: 375548 - RNA, 17 nt, Molluscum contagiosum virus
auugcucgcggugccgg

SEQ ID NO: 375549 - RNA, 20 nt, Molluscum contagiosum virus
auuggacguccacaaagccc

SEQ ID NO: 375550 - RNA, 21 nt, Molluscum contagiosum virus
auuggcauccggcacgcacaa

SEQ ID NO: 375551 - RNA, 23 nt, Molluscum contagiosum virus
auuggcauccggcacgcacaaag

SEQ ID NO: 375552 - RNA, 23 nt, Molluscum contagiosum virus
auuguacacgguaaagguacacu

SEQ ID NO: 375553 - RNA, 21 nt, Molluscum contagiosum virus
auuguuuuucgggaagcacag

SEQ ID NO: 375554 - RNA, 22 nt, Molluscum contagiosum virus
auuguuuuucgggaagcacagu

SEQ ID NO: 375555 - RNA, 20 nt, Molluscum contagiosum virus
auuuaccggcgcuugcgcua

SEQ ID NO: 375556 - RNA, 20 nt, Molluscum contagiosum virus
auuucguugauuugcgcacc

SEQ ID NO: 375557 - RNA, 20 nt, Molluscum contagiosum virus
auuuucgugcgcgucuucgg

SEQ ID NO: 375558 - RNA, 13 nt, Molluscum contagiosum virus
caaaaaacaacuc

SEQ ID NO: 375559 - RNA, 14 nt, Molluscum contagiosum virus
caaaacgcgacgcc

SEQ ID NO: 375560 - RNA, 15 nt, Molluscum contagiosum virus
caaaagcgaucacaa

SEQ ID NO: 375561 - RNA, 15 nt, Molluscum contagiosum virus
caaaagggcucugcc

SEQ ID NO: 375562 - RNA, 14 nt, Molluscum contagiosum virus
caaacaagcagucu

SEQ ID NO: 375563 - RNA, 16 nt, Molluscum contagiosum virus
caaacaagcagucuca

SEQ ID NO: 375564 - RNA, 17 nt, Molluscum contagiosum virus
caaacaagcagucucau

SEQ ID NO: 375565 - RNA, 22 nt, Molluscum contagiosum virus
caaacacgagacugagugcuga

SEQ ID NO: 375566 - RNA, 16 nt, Molluscum contagiosum virus
caaaccaacgugagua

SEQ ID NO: 375567 - RNA, 17 nt, Molluscum contagiosum virus
caaacgcgaaacuggac

SEQ ID NO: 375568 - RNA, 15 nt, Molluscum contagiosum virus
caaagaaugcaugcg

SEQ ID NO: 375569 - RNA, 20 nt, Molluscum contagiosum virus
caaagacgagggaugcgcac

SEQ ID NO: 375570 - RNA, 14 nt, Molluscum contagiosum virus
caaagacgggcccg

SEQ ID NO: 375571 - RNA, 19 nt, Molluscum contagiosum virus
caaagagcucaaucucgcc

SEQ ID NO: 375572 - RNA, 13 nt, Molluscum contagiosum virus
caaagcacaacaa

SEQ ID NO: 375573 - RNA, 22 nt, Molluscum contagiosum virus
caaagcccuccugagaagcaau

SEQ ID NO: 375574 - RNA, 12 nt, Molluscum contagiosum virus
caaagcggggcg

SEQ ID NO: 375575 - RNA, 18 nt, Molluscum contagiosum virus
caaaggcccgcgagcacg

SEQ ID NO: 375576 - RNA, 18 nt, Molluscum contagiosum virus
caaagguccaguauuuca

SEQ ID NO: 375577 - RNA, 12 nt, Molluscum contagiosum virus
caaagucuuccu

SEQ ID NO: 375578 - RNA, 16 nt, Molluscum contagiosum virus
caacaacacgaucaag

SEQ ID NO: 375579 - RNA, 17 nt, Molluscum contagiosum virus
caacaaccacucuuuca

SEQ ID NO: 375580 - RNA, 23 nt, Molluscum contagiosum virus
caacacgcuguugcugcugccgc

SEQ ID NO: 375581 - RNA, 13 nt, Molluscum contagiosum virus
caacacguuuucu

SEQ ID NO: 375582 - RNA, 12 nt, Molluscum contagiosum virus
caacacuaccac

SEQ ID NO: 375583 - RNA, 13 nt, Molluscum contagiosum virus
caacacucgugcu

SEQ ID NO: 375584 - RNA, 13 nt, Molluscum contagiosum virus
caacagcacgacg

SEQ ID NO: 375585 - RNA, 16 nt, Molluscum contagiosum virus
caacagcgcaagcuga

SEQ ID NO: 375586 - RNA, 20 nt, Molluscum contagiosum virus
caacagcuacaccgagauca

SEQ ID NO: 375587 - RNA, 17 nt, Molluscum contagiosum virus
caacaggagcauuccuu

SEQ ID NO: 375588 - RNA, 12 nt, Molluscum contagiosum virus
caacagugaaga

SEQ ID NO: 375589 - RNA, 13 nt, Molluscum contagiosum virus
caacauccaaacc

SEQ ID NO: 375590 - RNA, 13 nt, Molluscum contagiosum virus
caacauccugcca

SEQ ID NO: 375591 - RNA, 18 nt, Molluscum contagiosum virus
caacaugcggagacuguu

SEQ ID NO: 375592 - RNA, 12 nt, Molluscum contagiosum virus
caacaugcugag

SEQ ID NO: 375593 - RNA, 14 nt, Molluscum contagiosum virus
caacauggugcugg

SEQ ID NO: 375594 - RNA, 19 nt, Molluscum contagiosum virus
caacauggugcuggccauc

SEQ ID NO: 375595 - RNA, 20 nt, Molluscum contagiosum virus
caacauuuacuucgggcgca

SEQ ID NO: 375596 - RNA, 18 nt, Molluscum contagiosum virus
accacagucggugccaga

SEQ ID NO: 375597 - RNA, 15 nt, Molluscum contagiosum virus
accaccguggaggag

SEQ ID NO: 375598 - RNA, 14 nt, Molluscum contagiosum virus
accaccuccagguc

SEQ ID NO: 375599 - RNA, 15 nt, Molluscum contagiosum virus
accacguggaccuga

SEQ ID NO: 375600 - RNA, 15 nt, Molluscum contagiosum virus
accagaaacugggcu

SEQ ID NO: 375601 - RNA, 20 nt, Molluscum contagiosum virus
accagaaacugggcuucaag

SEQ ID NO: 375602 - RNA, 22 nt, Molluscum contagiosum virus
accagcuacgagccgcugcucc

SEQ ID NO: 375603 - RNA, 17 nt, Molluscum contagiosum virus
accagcuccgccgggaa

SEQ ID NO: 375604 - RNA, 18 nt, Molluscum contagiosum virus
accagcugcaaacauugc

SEQ ID NO: 375605 - RNA, 15 nt, Molluscum contagiosum virus
accaggcgcgugccc

SEQ ID NO: 375606 - RNA, 16 nt, Molluscum contagiosum virus
accaguacaucaccgc

SEQ ID NO: 375607 - RNA, 21 nt, Molluscum contagiosum virus
accagucucgaugugacaaca

SEQ ID NO: 375608 - RNA, 18 nt, Molluscum contagiosum virus
accaucuucaacuuccac

SEQ ID NO: 375609 - RNA, 13 nt, Molluscum contagiosum virus
acccaaacauguc

SEQ ID NO: 375610 - RNA, 13 nt, Molluscum contagiosum virus
acccaccaggaac

SEQ ID NO: 375611 - RNA, 19 nt, Molluscum contagiosum virus
acccaccaggaacagggaa

SEQ ID NO: 375612 - RNA, 17 nt, Molluscum contagiosum virus
acccagguucagcgcuc

SEQ ID NO: 375613 - RNA, 21 nt, Molluscum contagiosum virus
acccaucggagaagugcuccg

SEQ ID NO: 375614 - RNA, 15 nt, Molluscum contagiosum virus
accccgaaaggcacc

SEQ ID NO: 375615 - RNA, 21 nt, Molluscum contagiosum virus
accccgagcugcggcgcgugc

SEQ ID NO: 375616 - RNA, 22 nt, Molluscum contagiosum virus
accccgcugggccgcaugcacc

SEQ ID NO: 375617 - RNA, 15 nt, Molluscum contagiosum virus
accccuagcagacaa

SEQ ID NO: 375618 - RNA, 18 nt, Molluscum contagiosum virus
accccuguaacaaggaaa

SEQ ID NO: 375619 - RNA, 23 nt, Molluscum contagiosum virus
accccuguaacaaggaaaaggca

SEQ ID NO: 375620 - RNA, 14 nt, Molluscum contagiosum virus
acccgaaagcugcc

SEQ ID NO: 375621 - RNA, 20 nt, Molluscum contagiosum virus
acccgcucgugaagcuguca

SEQ ID NO: 375622 - RNA, 13 nt, Molluscum contagiosum virus
acccggcacgugc

SEQ ID NO: 375623 - RNA, 16 nt, Molluscum contagiosum virus
acccggcucgcucauc

SEQ ID NO: 375624 - RNA, 13 nt, Molluscum contagiosum virus
acccgugaucucg

SEQ ID NO: 375625 - RNA, 21 nt, Molluscum contagiosum virus
acccgugcgcgcgcugagaua

SEQ ID NO: 375626 - RNA, 22 nt, Molluscum contagiosum virus
acccuggcugcugcgcgaccgc

SEQ ID NO: 375627 - RNA, 22 nt, Molluscum contagiosum virus
acccuucugaggggcaguguuc

SEQ ID NO: 375628 - RNA, 23 nt, Molluscum contagiosum virus
acccuucugaggggcaguguucc

SEQ ID NO: 375629 - RNA, 22 nt, Molluscum contagiosum virus
accgaccgcuuucgcaaacaag

SEQ ID NO: 375630 - RNA, 23 nt, Molluscum contagiosum virus
accgagaucaugggcgugcucac

SEQ ID NO: 375631 - RNA, 15 nt, Molluscum contagiosum virus
accgagcgcuacgac

SEQ ID NO: 375632 - RNA, 14 nt, Molluscum contagiosum virus
accgcaagcucaug

SEQ ID NO: 375633 - RNA, 19 nt, Molluscum contagiosum virus
accgcgcccgccagcaugg

SEQ ID NO: 375634 - RNA, 20 nt, Molluscum contagiosum virus
accgcgucaagaucaaccgc

SEQ ID NO: 375635 - RNA, 15 nt, Molluscum contagiosum virus
accgcguggacaaca

SEQ ID NO: 375636 - RNA, 23 nt, Molluscum contagiosum virus
accgcguuuguggcgacacggag

SEQ ID NO: 375637 - RNA, 23 nt, Molluscum contagiosum virus
accgcugcuauuaccugagaucc

SEQ ID NO: 375638 - RNA, 19 nt, Molluscum contagiosum virus
accgcugcuucguaaagcu

SEQ ID NO: 375639 - RNA, 22 nt, Molluscum contagiosum virus
accgcuggggcgugacucggcc

SEQ ID NO: 375640 - RNA, 22 nt, Molluscum contagiosum virus
accgcuucgugucuguguuucu

SEQ ID NO: 375641 - RNA, 17 nt, Molluscum contagiosum virus
accggagacaccagcuc

SEQ ID NO: 375642 - RNA, 15 nt, Molluscum contagiosum virus
accggcagugcuugc

SEQ ID NO: 375643 - RNA, 13 nt, Molluscum contagiosum virus
accggcucaagaa

SEQ ID NO: 375644 - RNA, 18 nt, Molluscum contagiosum virus
accgggagcauagcaaga

SEQ ID NO: 375645 - RNA, 13 nt, Molluscum contagiosum virus
accgggaguguca

SEQ ID NO: 375646 - RNA, 20 nt, Molluscum contagiosum virus
accgggcacuucucgcgcga

SEQ ID NO: 375647 - RNA, 16 nt, Molluscum contagiosum virus
accgucacgacucuca

SEQ ID NO: 375648 - RNA, 17 nt, Molluscum contagiosum virus
accuaaauagcauguca

SEQ ID NO: 375649 - RNA, 14 nt, Molluscum contagiosum virus
accuacgcuaccug

SEQ ID NO: 375650 - RNA, 16 nt, Molluscum contagiosum virus
accuacuugcucgugu

SEQ ID NO: 375651 - RNA, 11 nt, Molluscum contagiosum virus
accucaagaag

SEQ ID NO: 375652 - RNA, 17 nt, Molluscum contagiosum virus
accucaccucugcgcgg

SEQ ID NO: 375653 - RNA, 14 nt, Molluscum contagiosum virus
accucaucaagccc

SEQ ID NO: 375654 - RNA, 17 nt, Molluscum contagiosum virus
accuccugcuuugcacg

SEQ ID NO: 375655 - RNA, 18 nt, Molluscum contagiosum virus
accucgcaugaugaacuu

SEQ ID NO: 375656 - RNA, 24 nt, Molluscum contagiosum virus
accucgcgcgccgccgcaacauag

SEQ ID NO: 375657 - RNA, 22 nt, Molluscum contagiosum virus
accucggucaacggcacagucu

SEQ ID NO: 375658 - RNA, 18 nt, Molluscum contagiosum virus
accucgugguacugccga

SEQ ID NO: 375659 - RNA, 21 nt, Molluscum contagiosum virus
accucugcgcggcccgcgggc

SEQ ID NO: 375660 - RNA, 13 nt, Molluscum contagiosum virus
accugcaggaaag

SEQ ID NO: 375661 - RNA, 16 nt, Molluscum contagiosum virus
accugcaggaaaggca

SEQ ID NO: 375662 - RNA, 18 nt, Molluscum contagiosum virus
accugcaggaaaggcacc

SEQ ID NO: 375663 - RNA, 21 nt, Molluscum contagiosum virus
accugcgcuuccucuacacca

SEQ ID NO: 375664 - RNA, 15 nt, Molluscum contagiosum virus
accugcggcucgcac

SEQ ID NO: 375665 - RNA, 17 nt, Molluscum contagiosum virus
accugcggcucgcacuu

SEQ ID NO: 375666 - RNA, 19 nt, Molluscum contagiosum virus
accugcucgggcugcgcgg

SEQ ID NO: 375667 - RNA, 13 nt, Molluscum contagiosum virus
accuggaacucua

SEQ ID NO: 375668 - RNA, 22 nt, Molluscum contagiosum virus
accugggcgccgcgcugaugcu

SEQ ID NO: 375669 - RNA, 16 nt, Molluscum contagiosum virus
accugguggagcacuu

SEQ ID NO: 375670 - RNA, 14 nt, Molluscum contagiosum virus
accuguaugaucug

SEQ ID NO: 375671 - RNA, 17 nt, Molluscum contagiosum virus
accugucggagcaggac

SEQ ID NO: 375672 - RNA, 19 nt, Molluscum contagiosum virus
accugugcccuguccacaa

SEQ ID NO: 375673 - RNA, 19 nt, Molluscum contagiosum virus
accuuggcgcugcacaguu

SEQ ID NO: 375674 - RNA, 22 nt, Molluscum contagiosum virus
accuugugcgcgcaucagcaca

SEQ ID NO: 375675 - RNA, 17 nt, Molluscum contagiosum virus
accuuuugcuccaugac

SEQ ID NO: 375676 - RNA, 16 nt, Molluscum contagiosum virus
acgaaaucgcaaagca

SEQ ID NO: 375677 - RNA, 23 nt, Molluscum contagiosum virus
acgaacaugggguuucggaacgc

SEQ ID NO: 375678 - RNA, 16 nt, Molluscum contagiosum virus
acgaacauguugugcu

SEQ ID NO: 375679 - RNA, 17 nt, Molluscum contagiosum virus
acgaacauguugugcuc

SEQ ID NO: 375680 - RNA, 21 nt, Molluscum contagiosum virus
acgaacauguugugcucgugu

SEQ ID NO: 375681 - RNA, 17 nt, Molluscum contagiosum virus
acgaagcugugcaagag

SEQ ID NO: 375682 - RNA, 22 nt, Molluscum contagiosum virus
acgaagucguuccggacgugca

SEQ ID NO: 375683 - RNA, 15 nt, Molluscum contagiosum virus
acgacaaaggcauuu

SEQ ID NO: 375684 - RNA, 18 nt, Molluscum contagiosum virus
acgacaaggaaaggcacc

SEQ ID NO: 375685 - RNA, 13 nt, Molluscum contagiosum virus
acgacacuggcgc

SEQ ID NO: 375686 - RNA, 14 nt, Molluscum contagiosum virus
acgacgaugcaaac

SEQ ID NO: 375687 - RNA, 19 nt, Molluscum contagiosum virus
acgacgaugcaaacaugua

SEQ ID NO: 375688 - RNA, 15 nt, Molluscum contagiosum virus
acgacgcgaucuucc

SEQ ID NO: 375689 - RNA, 18 nt, Molluscum contagiosum virus
acgacgguaaacucuugc

SEQ ID NO: 375690 - RNA, 23 nt, Molluscum contagiosum virus
acgacugcuuugacacgcucauc

SEQ ID NO: 375691 - RNA, 16 nt, Molluscum contagiosum virus
acgacuuccgcggcgu

SEQ ID NO: 375692 - RNA, 20 nt, Molluscum contagiosum virus
acgagagacacgcacacucg

SEQ ID NO: 375693 - RNA, 13 nt, Molluscum contagiosum virus
acgagagcgcaug

SEQ ID NO: 375694 - RNA, 12 nt, Molluscum contagiosum virus
acgagagggcgc

SEQ ID NO: 375695 - RNA, 19 nt, Molluscum contagiosum virus
acgagaugggcccgcgcgc

SEQ ID NO: 375696 - RNA, 16 nt, Molluscum contagiosum virus
acgagcaccgaacaaa

SEQ ID NO: 375697 - RNA, 18 nt, Molluscum contagiosum virus
acgagcacugccugccgc

SEQ ID NO: 375698 - RNA, 18 nt, Molluscum contagiosum virus
acucuacgccgcgcaccu

SEQ ID NO: 375699 - RNA, 11 nt, Molluscum contagiosum virus
acucuccuuca

SEQ ID NO: 375700 - RNA, 23 nt, Molluscum contagiosum virus
acucuuucacgcugcacgagcug

SEQ ID NO: 375701 - RNA, 15 nt, Molluscum contagiosum virus
acugaauaaguauuc

SEQ ID NO: 375702 - RNA, 19 nt, Molluscum contagiosum virus
acugacgguacucaugcug

SEQ ID NO: 375703 - RNA, 17 nt, Molluscum contagiosum virus
acugagccgcaagcaca

SEQ ID NO: 375704 - RNA, 15 nt, Molluscum contagiosum virus
acugagugcugagcc

SEQ ID NO: 375705 - RNA, 18 nt, Molluscum contagiosum virus
acugagugcugagccaca

SEQ ID NO: 375706 - RNA, 13 nt, Molluscum contagiosum virus
acugcagcacguc

SEQ ID NO: 375707 - RNA, 16 nt, Molluscum contagiosum virus
acugcagcagcuccag

SEQ ID NO: 375708 - RNA, 22 nt, Molluscum contagiosum virus
acugccacggcugcaagcacaa

SEQ ID NO: 375709 - RNA, 14 nt, Molluscum contagiosum virus
acugccgccaggaa

SEQ ID NO: 375710 - RNA, 16 nt, Molluscum contagiosum virus
acugccgccgccgcga

SEQ ID NO: 375711 - RNA, 21 nt, Molluscum contagiosum virus
acugcggacgggaagcuuuca

SEQ ID NO: 375712 - RNA, 13 nt, Molluscum contagiosum virus
acugcguacacau

SEQ ID NO: 375713 - RNA, 13 nt, Molluscum contagiosum virus
acugcguugucuc

SEQ ID NO: 375714 - RNA, 14 nt, Molluscum contagiosum virus
acuggagcacggac

SEQ ID NO: 375715 - RNA, 15 nt, Molluscum contagiosum virus
acuggaggugaguca

SEQ ID NO: 375716 - RNA, 15 nt, Molluscum contagiosum virus
acuggcaccugcggc

SEQ ID NO: 375717 - RNA, 17 nt, Molluscum contagiosum virus
acuggcacgcgccgcgc

SEQ ID NO: 375718 - RNA, 15 nt, Molluscum contagiosum virus
acuggcgcagcagga

SEQ ID NO: 375719 - RNA, 18 nt, Molluscum contagiosum virus
acugggagcuuuccuugc

SEQ ID NO: 375720 - RNA, 15 nt, Molluscum contagiosum virus
acugggucuguucac

SEQ ID NO: 375721 - RNA, 22 nt, Molluscum contagiosum virus
acuguagcguccgcauccucaa

SEQ ID NO: 375722 - RNA, 20 nt, Molluscum contagiosum virus
acugucguaacaauggacac

SEQ ID NO: 375723 - RNA, 17 nt, Molluscum contagiosum virus
acugugcuccugaggaa

SEQ ID NO: 375724 - RNA, 12 nt, Molluscum contagiosum virus
acugugcugacc

SEQ ID NO: 375725 - RNA, 21 nt, Molluscum contagiosum virus
acuguucggaacuuagcccca

SEQ ID NO: 375726 - RNA, 19 nt, Molluscum contagiosum virus
acuucaagcacgagcugcu

SEQ ID NO: 375727 - RNA, 19 nt, Molluscum contagiosum virus
acuuccgcgcgcucuugca

SEQ ID NO: 375728 - RNA, 15 nt, Molluscum contagiosum virus
acuucggacaccuca

SEQ ID NO: 375729 - RNA, 20 nt, Molluscum contagiosum virus
acuucuccgcgcugcacuac

SEQ ID NO: 375730 - RNA, 13 nt, Molluscum contagiosum virus
acuugcaaacgcu

SEQ ID NO: 375731 - RNA, 15 nt, Molluscum contagiosum virus
acuugccguguucua

SEQ ID NO: 375732 - RNA, 17 nt, Molluscum contagiosum virus
acuugcgcguccacaaa

SEQ ID NO: 375733 - RNA, 14 nt, Molluscum contagiosum virus
acuuuaucucucac

SEQ ID NO: 375734 - RNA, 17 nt, Molluscum contagiosum virus
agaaacagccauguguc

SEQ ID NO: 375735 - RNA, 15 nt, Molluscum contagiosum virus
agaaacgacgggcgc

SEQ ID NO: 375736 - RNA, 19 nt, Molluscum contagiosum virus
agaaacucuccgacgugcu

SEQ ID NO: 375737 - RNA, 13 nt, Molluscum contagiosum virus
agaaaucccaaga

SEQ ID NO: 375738 - RNA, 18 nt, Molluscum contagiosum virus
agaaaucccaagagccau

SEQ ID NO: 375739 - RNA, 13 nt, Molluscum contagiosum virus
agaaaugcgcaca

SEQ ID NO: 375740 - RNA, 18 nt, Molluscum contagiosum virus
agaaaugcgcacacuugc

SEQ ID NO: 375741 - RNA, 11 nt, Molluscum contagiosum virus
agaacaaccag

SEQ ID NO: 375742 - RNA, 20 nt, Molluscum contagiosum virus
agaacgccaggaacaucagc

SEQ ID NO: 375743 - RNA, 21 nt, Molluscum contagiosum virus
agaacgccaggaacaucagca

SEQ ID NO: 375744 - RNA, 18 nt, Molluscum contagiosum virus
agaacucuacacguggaa

SEQ ID NO: 375745 - RNA, 15 nt, Molluscum contagiosum virus
agaacuggcgcagca

SEQ ID NO: 375746 - RNA, 22 nt, Molluscum contagiosum virus
agaagaacaagaagcgcuucuu

SEQ ID NO: 375747 - RNA, 15 nt, Molluscum contagiosum virus
agaagaacagcacga

SEQ ID NO: 375748 - RNA, 22 nt, Molluscum contagiosum virus
agaagacauugccuuuugcaca

SEQ ID NO: 375749 - RNA, 15 nt, Molluscum contagiosum virus
agaagaccacauccu

SEQ ID NO: 375750 - RNA, 20 nt, Molluscum contagiosum virus
agaagaggccagcacaagcc

SEQ ID NO: 375751 - RNA, 14 nt, Molluscum contagiosum virus
agaagcccugagaa

SEQ ID NO: 375752 - RNA, 19 nt, Molluscum contagiosum virus
agaagcucauuuuuuacuc

SEQ ID NO: 375753 - RNA, 14 nt, Molluscum contagiosum virus
agaaggucuacgag

SEQ ID NO: 375754 - RNA, 11 nt, Molluscum contagiosum virus
agaagugcucc

SEQ ID NO: 375755 - RNA, 19 nt, Molluscum contagiosum virus
agaagugcuccgcacgugg

SEQ ID NO: 375756 - RNA, 23 nt, Molluscum contagiosum virus
agaagugcuccgcacguggaauc

SEQ ID NO: 375757 - RNA, 21 nt, Molluscum contagiosum virus
agaagugcuccgcacguggag

SEQ ID NO: 375758 - RNA, 13 nt, Molluscum contagiosum virus
agaauaaaauagc

SEQ ID NO: 375759 - RNA, 22 nt, Molluscum contagiosum virus
agaaucgcuuugccaaagcucu

SEQ ID NO: 375760 - RNA, 23 nt, Molluscum contagiosum virus
agaaugggagggggacaaggacc

SEQ ID NO: 375761 - RNA, 18 nt, Molluscum contagiosum virus
agacaacaaacauuguga

SEQ ID NO: 375762 - RNA, 16 nt, Molluscum contagiosum virus
agacaacugcgucuca

SEQ ID NO: 375763 - RNA, 13 nt, Molluscum contagiosum virus
agacaagucacac

SEQ ID NO: 375764 - RNA, 22 nt, Molluscum contagiosum virus
agacagaggcccgucuccacaa

SEQ ID NO: 375765 - RNA, 23 nt, Molluscum contagiosum virus
agacagaggcccgucuccacaaa

SEQ ID NO: 375766 - RNA, 15 nt, Molluscum contagiosum virus
agacauauguucuuc

SEQ ID NO: 375767 - RNA, 22 nt, Molluscum contagiosum virus
agacaucaucgcggagcugcgc

SEQ ID NO: 375768 - RNA, 12 nt, Molluscum contagiosum virus
agacaugcacac

SEQ ID NO: 375769 - RNA, 17 nt, Molluscum contagiosum virus
agacauugccuuuugca

SEQ ID NO: 375770 - RNA, 20 nt, Molluscum contagiosum virus
agacauugccuuuugcacag

SEQ ID NO: 375771 - RNA, 13 nt, Molluscum contagiosum virus
agaccaccagcac

SEQ ID NO: 375772 - RNA, 13 nt, Molluscum contagiosum virus
agaccacgcgcgc

SEQ ID NO: 375773 - RNA, 12 nt, Molluscum contagiosum virus
agaccagccgcg

SEQ ID NO: 375774 - RNA, 12 nt, Molluscum contagiosum virus
agaccaucaucg

SEQ ID NO: 375775 - RNA, 23 nt, Molluscum contagiosum virus
agaccgugacggccguguacaug

SEQ ID NO: 375776 - RNA, 22 nt, Molluscum contagiosum virus
agacgaccgucacgacucucaa

SEQ ID NO: 375777 - RNA, 17 nt, Molluscum contagiosum virus
agacgagcugugcgagc

SEQ ID NO: 375778 - RNA, 15 nt, Molluscum contagiosum virus
agacgcccggcaccg

SEQ ID NO: 375779 - RNA, 14 nt, Molluscum contagiosum virus
agacgcgcucgcgc

SEQ ID NO: 375780 - RNA, 14 nt, Molluscum contagiosum virus
agacggcagugucc

SEQ ID NO: 375781 - RNA, 15 nt, Molluscum contagiosum virus
agacguggugcucgu

SEQ ID NO: 375782 - RNA, 17 nt, Molluscum contagiosum virus
agacguggugcucgugg

SEQ ID NO: 375783 - RNA, 17 nt, Molluscum contagiosum virus
agacugagugcugagcc

SEQ ID NO: 375784 - RNA, 21 nt, Molluscum contagiosum virus
agacuguuaggcaucucgugc

SEQ ID NO: 375785 - RNA, 18 nt, Molluscum contagiosum virus
agacuucuugguggacag

SEQ ID NO: 375786 - RNA, 21 nt, Molluscum contagiosum virus
agagaaaggcacccaccagga

SEQ ID NO: 375787 - RNA, 14 nt, Molluscum contagiosum virus
agagaaaucccaag

SEQ ID NO: 375788 - RNA, 15 nt, Molluscum contagiosum virus
agagaaccugugcgc

SEQ ID NO: 375789 - RNA, 19 nt, Molluscum contagiosum virus
agagaauggagcgucuucu

SEQ ID NO: 375790 - RNA, 23 nt, Molluscum contagiosum virus
agagacaacaaacauugugacaa

SEQ ID NO: 375791 - RNA, 19 nt, Molluscum contagiosum virus
agagagacaugcacacuca

SEQ ID NO: 375792 - RNA, 17 nt, Molluscum contagiosum virus
agagcacgcgcucgcgc

SEQ ID NO: 375793 - RNA, 14 nt, Molluscum contagiosum virus
agagcacugcgcgu

SEQ ID NO: 375794 - RNA, 20 nt, Molluscum contagiosum virus
agagcacugcgcgucugugc

SEQ ID NO: 375795 - RNA, 15 nt, Molluscum contagiosum virus
agagcagcgcuagcc

SEQ ID NO: 375796 - RNA, 18 nt, Molluscum contagiosum virus
agagccccguucacuugc

SEQ ID NO: 375797 - RNA, 21 nt, Molluscum contagiosum virus
agagccgcuccuggucuuccc

SEQ ID NO: 375798 - RNA, 22 nt, Molluscum contagiosum virus
agagcggcgccccuccuaucuc

SEQ ID NO: 375799 - RNA, 16 nt, Molluscum contagiosum virus
agagcguccagccgca

SEQ ID NO: 375800 - RNA, 16 nt, Molluscum contagiosum virus
agagcuccccgcgcgc

SEQ ID NO: 375801 - RNA, 17 nt, Molluscum contagiosum virus
agcaggucaucgggcug

SEQ ID NO: 375802 - RNA, 15 nt, Molluscum contagiosum virus
agcagugccgcucgc

SEQ ID NO: 375803 - RNA, 22 nt, Molluscum contagiosum virus
agcagugccgcucgcuguccuu

SEQ ID NO: 375804 - RNA, 22 nt, Molluscum contagiosum virus
agcaguucgcgcgccugcgcga

SEQ ID NO: 375805 - RNA, 22 nt, Molluscum contagiosum virus
agcaucgacgugcagacgcuca

SEQ ID NO: 375806 - RNA, 22 nt, Molluscum contagiosum virus
agcaucugcgcgugcugucagu

SEQ ID NO: 375807 - RNA, 12 nt, Molluscum contagiosum virus
agcaugcucacg

SEQ ID NO: 375808 - RNA, 16 nt, Molluscum contagiosum virus
agcauuccuuguccug

SEQ ID NO: 375809 - RNA, 23 nt, Molluscum contagiosum virus
agccaugaggacagcuugcugcu

SEQ ID NO: 375810 - RNA, 14 nt, Molluscum contagiosum virus
agccauucuuaauc

SEQ ID NO: 375811 - RNA, 12 nt, Molluscum contagiosum virus
agcccaagcacc

SEQ ID NO: 375812 - RNA, 21 nt, Molluscum contagiosum virus
agcccacguugccgcgcgcug

SEQ ID NO: 375813 - RNA, 23 nt, Molluscum contagiosum virus
agcccccgguucccggugcugcu

SEQ ID NO: 375814 - RNA, 18 nt, Molluscum contagiosum virus
agccccgcggacggacga

SEQ ID NO: 375815 - RNA, 19 nt, Molluscum contagiosum virus
agcccgccucgucguccac

SEQ ID NO: 375816 - RNA, 17 nt, Molluscum contagiosum virus
agcccgcggcgcgcagc

SEQ ID NO: 375817 - RNA, 22 nt, Molluscum contagiosum virus
agcccgcggugcgcacaugccg

SEQ ID NO: 375818 - RNA, 20 nt, Molluscum contagiosum virus
agcccggaagcuugcucagc

SEQ ID NO: 375819 - RNA, 18 nt, Molluscum contagiosum virus
agcccuccugagaagcaa

SEQ ID NO: 375820 - RNA, 11 nt, Molluscum contagiosum virus
agcccuuccac

SEQ ID NO: 375821 - RNA, 18 nt, Molluscum contagiosum virus
agccgcaggcgcgcgcca

SEQ ID NO: 375822 - RNA, 22 nt, Molluscum contagiosum virus
agccgccgcuacuacggagcga

SEQ ID NO: 375823 - RNA, 20 nt, Molluscum contagiosum virus
agccgccggggcccaugcuc

SEQ ID NO: 375824 - RNA, 21 nt, Molluscum contagiosum virus
agccgcgaaagcgucgugcuc

SEQ ID NO: 375825 - RNA, 13 nt, Molluscum contagiosum virus
agccgcguaccac

SEQ ID NO: 375826 - RNA, 23 nt, Molluscum contagiosum virus
agccgcgugaaaaacuccgcaca

SEQ ID NO: 375827 - RNA, 18 nt, Molluscum contagiosum virus
agccgcugcgccgccagc

SEQ ID NO: 375828 - RNA, 11 nt, Molluscum contagiosum virus
agccgcugcuc

SEQ ID NO: 375829 - RNA, 18 nt, Molluscum contagiosum virus
agccggcugcccuguuac

SEQ ID NO: 375830 - RNA, 19 nt, Molluscum contagiosum virus
agccguggaguccaugccc

SEQ ID NO: 375831 - RNA, 21 nt, Molluscum contagiosum virus
agccguggaugaacaccaucc

SEQ ID NO: 375832 - RNA, 19 nt, Molluscum contagiosum virus
agccguucucguggcaagc

SEQ ID NO: 375833 - RNA, 12 nt, Molluscum contagiosum virus
agccuacguggc

SEQ ID NO: 375834 - RNA, 19 nt, Molluscum contagiosum virus
agccucgcuggugugcacu

SEQ ID NO: 375835 - RNA, 20 nt, Molluscum contagiosum virus
agccucuguccugcgugcuu

SEQ ID NO: 375836 - RNA, 17 nt, Molluscum contagiosum virus
agccugaggccgcggag

SEQ ID NO: 375837 - RNA, 18 nt, Molluscum contagiosum virus
agccugcaccgagugcug

SEQ ID NO: 375838 - RNA, 20 nt, Molluscum contagiosum virus
agccugugcgccaacaacca

SEQ ID NO: 375839 - RNA, 20 nt, Molluscum contagiosum virus
agccuucgcagagaccguca

SEQ ID NO: 375840 - RNA, 20 nt, Molluscum contagiosum virus
agccuucgucauccucggca

SEQ ID NO: 375841 - RNA, 20 nt, Molluscum contagiosum virus
agcgaaacacgcuacgcagc

SEQ ID NO: 375842 - RNA, 22 nt, Molluscum contagiosum virus
agcgaaacacgcuacgcagcgc

SEQ ID NO: 375843 - RNA, 19 nt, Molluscum contagiosum virus
agcgacuacgcgcugcuag

SEQ ID NO: 375844 - RNA, 12 nt, Molluscum contagiosum virus
agcgcaggcagu

SEQ ID NO: 375845 - RNA, 16 nt, Molluscum contagiosum virus
agcgccaucaauucaa

SEQ ID NO: 375846 - RNA, 13 nt, Molluscum contagiosum virus
guguucugcgcgc

SEQ ID NO: 375847 - RNA, 17 nt, Molluscum contagiosum virus
guguugugaaguccucu

SEQ ID NO: 375848 - RNA, 19 nt, Molluscum contagiosum virus
guuaaagaguuccagcagc

SEQ ID NO: 375849 - RNA, 12 nt, Molluscum contagiosum virus
guuacucucaga

SEQ ID NO: 375850 - RNA, 17 nt, Molluscum contagiosum virus
guuagaaaugcuugcuu

SEQ ID NO: 375851 - RNA, 20 nt, Molluscum contagiosum virus
guuagcaucauuuauuggcc

SEQ ID NO: 375852 - RNA, 22 nt, Molluscum contagiosum virus
guucaacaucguggcgcgcgcg

SEQ ID NO: 375853 - RNA, 21 nt, Molluscum contagiosum virus
guucaucuacugcgacaucca

SEQ ID NO: 375854 - RNA, 16 nt, Molluscum contagiosum virus
guuccagcagcgccag

SEQ ID NO: 375855 - RNA, 20 nt, Molluscum contagiosum virus
guuccaggaacgccgccacg

SEQ ID NO: 375856 - RNA, 13 nt, Molluscum contagiosum virus
guuccccgugagc

SEQ ID NO: 375857 - RNA, 15 nt, Molluscum contagiosum virus
guucccggugcugcu

SEQ ID NO: 375858 - RNA, 17 nt, Molluscum contagiosum virus
guuccgacaucgugccg

SEQ ID NO: 375859 - RNA, 17 nt, Molluscum contagiosum virus
guuccggcagcgccgcg

SEQ ID NO: 375860 - RNA, 21 nt, Molluscum contagiosum virus
guucgcggguccgucuuugcg

SEQ ID NO: 375861 - RNA, 18 nt, Molluscum contagiosum virus
guucguccgcucgugcca

SEQ ID NO: 375862 - RNA, 17 nt, Molluscum contagiosum virus
guucguuguccuugcca

SEQ ID NO: 375863 - RNA, 15 nt, Molluscum contagiosum virus
guucugcacagcaca

SEQ ID NO: 375864 - RNA, 18 nt, Molluscum contagiosum virus
guugaccaccaccuccuu

SEQ ID NO: 375865 - RNA, 17 nt, Molluscum contagiosum virus
guugcagcccaccagca

SEQ ID NO: 375866 - RNA, 13 nt, Molluscum contagiosum virus
guugcaucuucuu

SEQ ID NO: 375867 - RNA, 12 nt, Molluscum contagiosum virus
guugccugagaa

SEQ ID NO: 375868 - RNA, 19 nt, Molluscum contagiosum virus
guugcgcacguuggccacg

SEQ ID NO: 375869 - RNA, 22 nt, Molluscum contagiosum virus
guugcugcugccgcgcggcacg

SEQ ID NO: 375870 - RNA, 21 nt, Molluscum contagiosum virus
guugcuggggccugugcugug

SEQ ID NO: 375871 - RNA, 13 nt, Molluscum contagiosum virus
guuggacaucagc

SEQ ID NO: 375872 - RNA, 19 nt, Molluscum contagiosum virus
guuggcuucugcgcgguga

SEQ ID NO: 375873 - RNA, 12 nt, Molluscum contagiosum virus
guuguccuugcc

SEQ ID NO: 375874 - RNA, 14 nt, Molluscum contagiosum virus
guuguugugacacg

SEQ ID NO: 375875 - RNA, 20 nt, Molluscum contagiosum virus
guuugacgcccggugccugg

SEQ ID NO: 375876 - RNA, 15 nt, Molluscum contagiosum virus
guuugcacccgcgca

SEQ ID NO: 375877 - RNA, 22 nt, Molluscum contagiosum virus
guuugccagaagcccugagaag

SEQ ID NO: 375878 - RNA, 15 nt, Molluscum contagiosum virus
guuugcuaacaggaa

SEQ ID NO: 375879 - RNA, 16 nt, Molluscum contagiosum virus
uaaaagacuggcucag

SEQ ID NO: 375880 - RNA, 15 nt, Molluscum contagiosum virus
uaaaauagcagagca

SEQ ID NO: 375881 - RNA, 19 nt, Molluscum contagiosum virus
uaaagaguuccagcagcgc

SEQ ID NO: 375882 - RNA, 18 nt, Molluscum contagiosum virus
uaaauggaccacaagcag

SEQ ID NO: 375883 - RNA, 15 nt, Molluscum contagiosum virus
uaaauggcgcgcgcg

SEQ ID NO: 375884 - RNA, 15 nt, Molluscum contagiosum virus
uaacaacgaccagcu

SEQ ID NO: 375885 - RNA, 22 nt, Molluscum contagiosum virus
uaacaauggacacgcacuggcg

SEQ ID NO: 375886 - RNA, 15 nt, Molluscum contagiosum virus
uaagagcgugaacau

SEQ ID NO: 375887 - RNA, 23 nt, Molluscum contagiosum virus
uaaggagcgagaagacauugccu

SEQ ID NO: 375888 - RNA, 18 nt, Molluscum contagiosum virus
uaagggcggacgcacuag

SEQ ID NO: 375889 - RNA, 19 nt, Molluscum contagiosum virus
uaaucacgaugaugaugaa

SEQ ID NO: 375890 - RNA, 22 nt, Molluscum contagiosum virus
uaaugcuggcgcguccguucac

SEQ ID NO: 375891 - RNA, 16 nt, Molluscum contagiosum virus
uacaaaacaugcugua

SEQ ID NO: 375892 - RNA, 17 nt, Molluscum contagiosum virus
uacaacccaaacauguc

SEQ ID NO: 375893 - RNA, 16 nt, Molluscum contagiosum virus
uacaaccgcugcuauu

SEQ ID NO: 375894 - RNA, 23 nt, Molluscum contagiosum virus
uacacauuccucggcgcacacuc

SEQ ID NO: 375895 - RNA, 14 nt, Molluscum contagiosum virus
uacaccgagaucau

SEQ ID NO: 375896 - RNA, 17 nt, Molluscum contagiosum virus
uacacgcacgaccucac

SEQ ID NO: 375897 - RNA, 18 nt, Molluscum contagiosum virus
uacacgcacgaccucaca

SEQ ID NO: 375898 - RNA, 14 nt, Molluscum contagiosum virus
uacacgccgggaaa

SEQ ID NO: 375899 - RNA, 13 nt, Molluscum contagiosum virus
uacacguggaauu

SEQ ID NO: 375900 - RNA, 14 nt, Molluscum contagiosum virus
uacacuuccugcua

SEQ ID NO: 375901 - RNA, 17 nt, Molluscum contagiosum virus
uacacuuccugcuagaa

SEQ ID NO: 375902 - RNA, 18 nt, Molluscum contagiosum virus
uacagcaugcgugcaaca

SEQ ID NO: 375903 - RNA, 15 nt, Molluscum contagiosum virus
uacagccgccugccg

SEQ ID NO: 375904 - RNA, 20 nt, Molluscum contagiosum virus
uacauaaaauggaccagaaa

SEQ ID NO: 375905 - RNA, 15 nt, Molluscum contagiosum virus
uacaucgaaaccauc

SEQ ID NO: 375906 - RNA, 22 nt, Molluscum contagiosum virus
uacaugcaacgcaggacacugu

SEQ ID NO: 375907 - RNA, 22 nt, Molluscum contagiosum virus
uacaugcacagacagcacgggc

SEQ ID NO: 375908 - RNA, 12 nt, Molluscum contagiosum virus
uacaugcucaag

SEQ ID NO: 375909 - RNA, 16 nt, Molluscum contagiosum virus
uaccacagccauuaac

SEQ ID NO: 375910 - RNA, 16 nt, Molluscum contagiosum virus
uaccacagguuucuca

SEQ ID NO: 375911 - RNA, 19 nt, Molluscum contagiosum virus
uaccaggccacgugcucaa

SEQ ID NO: 375912 - RNA, 16 nt, Molluscum contagiosum virus
uacccgagcugugcca

SEQ ID NO: 375913 - RNA, 13 nt, Molluscum contagiosum virus
uaccgcaagcuca

SEQ ID NO: 375914 - RNA, 15 nt, Molluscum contagiosum virus
uaccuaggcacuccg

SEQ ID NO: 375915 - RNA, 11 nt, Molluscum contagiosum virus
uaccugagauc

SEQ ID NO: 375916 - RNA, 13 nt, Molluscum contagiosum virus
uaccugaugcgca

SEQ ID NO: 375917 - RNA, 16 nt, Molluscum contagiosum virus
uaccugcgcaagcuca

SEQ ID NO: 375918 - RNA, 17 nt, Molluscum contagiosum virus
uaccuguaugaucugca

SEQ ID NO: 375919 - RNA, 22 nt, Molluscum contagiosum virus
uaccuguguuucguacgcggag

SEQ ID NO: 375920 - RNA, 13 nt, Molluscum contagiosum virus
uacgagcaggcgc

SEQ ID NO: 375921 - RNA, 19 nt, Molluscum contagiosum virus
uacgagcccaucaaggcgc

SEQ ID NO: 375922 - RNA, 19 nt, Molluscum contagiosum virus
uacgaggugcugcgccacg

SEQ ID NO: 375923 - RNA, 18 nt, Molluscum contagiosum virus
uacgauggaugcuggaug

SEQ ID NO: 375924 - RNA, 11 nt, Molluscum contagiosum virus
uacgcacgggg

SEQ ID NO: 375925 - RNA, 22 nt, Molluscum contagiosum virus
uacgccaagaggacgagcugcu

SEQ ID NO: 375926 - RNA, 14 nt, Molluscum contagiosum virus
uacgcgcagggagc

SEQ ID NO: 375927 - RNA, 23 nt, Molluscum contagiosum virus
uacgcgccagugcgugcacuguc

SEQ ID NO: 375928 - RNA, 15 nt, Molluscum contagiosum virus
uacgcgccggggcgc

SEQ ID NO: 375929 - RNA, 17 nt, Molluscum contagiosum virus
uacgcgcgcgugcugcu

SEQ ID NO: 375930 - RNA, 15 nt, Molluscum contagiosum virus
uacgcuacagcagcc

SEQ ID NO: 375931 - RNA, 17 nt, Molluscum contagiosum virus
uacgucuuucccagaag

SEQ ID NO: 375932 - RNA, 13 nt, Molluscum contagiosum virus
uacgugcacgugg

SEQ ID NO: 375933 - RNA, 11 nt, Molluscum contagiosum virus
uacgugcugcg

SEQ ID NO: 375934 - RNA, 14 nt, Molluscum contagiosum virus
uacguguccaugca

SEQ ID NO: 375935 - RNA, 17 nt, Molluscum contagiosum virus
uacguguccaugcacga

SEQ ID NO: 375936 - RNA, 21 nt, Molluscum contagiosum virus
uacuaaaguacgagagcgcau

SEQ ID NO: 375937 - RNA, 14 nt, Molluscum contagiosum virus
uacuacuacacugu

SEQ ID NO: 375938 - RNA, 22 nt, Molluscum contagiosum virus
uacuagguggcaugcgcccuca

SEQ ID NO: 375939 - RNA, 16 nt, Molluscum contagiosum virus
uacucaacaagcugcu

SEQ ID NO: 375940 - RNA, 17 nt, Molluscum contagiosum virus
uacucaugcugcucaug

SEQ ID NO: 375941 - RNA, 20 nt, Molluscum contagiosum virus
uacucgagcacggccgccac

SEQ ID NO: 375942 - RNA, 15 nt, Molluscum contagiosum virus
uacucgccguuccac

SEQ ID NO: 375943 - RNA, 13 nt, Molluscum contagiosum virus
uacucgugucaca

SEQ ID NO: 375944 - RNA, 14 nt, Molluscum contagiosum virus
uacucgugucacaa

SEQ ID NO: 375945 - RNA, 11 nt, Molluscum contagiosum virus
uacugcaagau

SEQ ID NO: 375946 - RNA, 12 nt, Molluscum contagiosum virus
uacugcacugca

SEQ ID NO: 375947 - RNA, 14 nt, Molluscum contagiosum virus
uacugcgacaucca

SEQ ID NO: 375948 - RNA, 17 nt, Molluscum contagiosum virus
uacugcgcacccgccac

SEQ ID NO: 375949 - RNA, 20 nt, Molluscum contagiosum virus
uacugcggacaccagaaccu

SEQ ID NO: 375950 - RNA, 13 nt, Molluscum contagiosum virus
uacugggagcuuu

SEQ ID NO: 375951 - RNA, 13 nt, Molluscum contagiosum virus
uacuggugcccac

SEQ ID NO: 375952 - RNA, 21 nt, Molluscum contagiosum virus
uacuucaagcacgagcugcug

SEQ ID NO: 375953 - RNA, 15 nt, Molluscum contagiosum virus
uacuuccacgagcug

SEQ ID NO: 375954 - RNA, 14 nt, Molluscum contagiosum virus
uacuuccugcagcu

SEQ ID NO: 375955 - RNA, 15 nt, Molluscum contagiosum virus
uagaaaugcuugcuu

SEQ ID NO: 375956 - RNA, 12 nt, Molluscum contagiosum virus
uagaagaccaca

SEQ ID NO: 375957 - RNA, 19 nt, Molluscum contagiosum virus
uagaagagcgguuccugcu

SEQ ID NO: 375958 - RNA, 15 nt, Molluscum contagiosum virus
uagaaugcguguggu

SEQ ID NO: 375959 - RNA, 22 nt, Molluscum contagiosum virus
uagacacgagcgcggcaacagc

SEQ ID NO: 375960 - RNA, 23 nt, Molluscum contagiosum virus
uagacacgagcgcggcaacagca

SEQ ID NO: 375961 - RNA, 21 nt, Molluscum contagiosum virus
uagaccuuuacgucgcgcgcu

SEQ ID NO: 375962 - RNA, 14 nt, Molluscum contagiosum virus
uagagaaccugugc

SEQ ID NO: 375963 - RNA, 14 nt, Molluscum contagiosum virus
uagaugcgucauau

SEQ ID NO: 375964 - RNA, 14 nt, Molluscum contagiosum virus
uagcaaaugcgcug

SEQ ID NO: 375965 - RNA, 22 nt, Molluscum contagiosum virus
uagcaacgugaaaaaagaaucc

SEQ ID NO: 375966 - RNA, 20 nt, Molluscum contagiosum virus
uagcacguuaaucacgauga

SEQ ID NO: 375967 - RNA, 23 nt, Molluscum contagiosum virus
uagcagacaacugcgucucaaga

SEQ ID NO: 375968 - RNA, 16 nt, Molluscum contagiosum virus
uagcagcgccugcacg

SEQ ID NO: 375969 - RNA, 23 nt, Molluscum contagiosum virus
uagcagcgugcgcaccagcugca

SEQ ID NO: 375970 - RNA, 21 nt, Molluscum contagiosum virus
uagcagggcggcgccugcgcc

SEQ ID NO: 375971 - RNA, 23 nt, Molluscum contagiosum virus
uagcaugucacgcgucgcgcgcc

SEQ ID NO: 375972 - RNA, 20 nt, Molluscum contagiosum virus
uagccguccaguaagcgaca

SEQ ID NO: 375973 - RNA, 12 nt, Molluscum contagiosum virus
uagccugugccc

SEQ ID NO: 375974 - RNA, 19 nt, Molluscum contagiosum virus
ucagggaugccagugcagu

SEQ ID NO: 375975 - RNA, 13 nt, Molluscum contagiosum virus
ucaguacaugccc

SEQ ID NO: 375976 - RNA, 16 nt, Molluscum contagiosum virus
ucagugugccguucac

SEQ ID NO: 375977 - RNA, 16 nt, Molluscum contagiosum virus
ucaucaccagccugcu

SEQ ID NO: 375978 - RNA, 15 nt, Molluscum contagiosum virus
ucaucgacgagcacg

SEQ ID NO: 375979 - RNA, 21 nt, Molluscum contagiosum virus
ucaucgagcaugucacgcuca

SEQ ID NO: 375980 - RNA, 19 nt, Molluscum contagiosum virus
ucaucgccagcaucaaggg

SEQ ID NO: 375981 - RNA, 13 nt, Molluscum contagiosum virus
ucaucgggcugca

SEQ ID NO: 375982 - RNA, 23 nt, Molluscum contagiosum virus
ucaucgggcugcagcccuuccac

SEQ ID NO: 375983 - RNA, 14 nt, Molluscum contagiosum virus
ucauucgaugacag

SEQ ID NO: 375984 - RNA, 15 nt, Molluscum contagiosum virus
uccaaaccaacguga

SEQ ID NO: 375985 - RNA, 13 nt, Molluscum contagiosum virus
uccaacagcagcu

SEQ ID NO: 375986 - RNA, 21 nt, Molluscum contagiosum virus
uccaagaggccgucacaugcu

SEQ ID NO: 375987 - RNA, 17 nt, Molluscum contagiosum virus
uccaaggaggucccuag

SEQ ID NO: 375988 - RNA, 12 nt, Molluscum contagiosum virus
uccacaaagacg

SEQ ID NO: 375989 - RNA, 19 nt, Molluscum contagiosum virus
uccacacagaaguugccgc

SEQ ID NO: 375990 - RNA, 18 nt, Molluscum contagiosum virus
uccacaugccgcgcugcu

SEQ ID NO: 375991 - RNA, 18 nt, Molluscum contagiosum virus
uccacgacgagccugcgg

SEQ ID NO: 375992 - RNA, 20 nt, Molluscum contagiosum virus
uccacgcaggacuggcaccu

SEQ ID NO: 375993 - RNA, 22 nt, Molluscum contagiosum virus
uccacgcaggacuggcaccugc

SEQ ID NO: 375994 - RNA, 17 nt, Molluscum contagiosum virus
uccacgcgugcugcgcg

SEQ ID NO: 375995 - RNA, 13 nt, Molluscum contagiosum virus
uccacggacaugg

SEQ ID NO: 375996 - RNA, 17 nt, Molluscum contagiosum virus
uccacuuucucuauuca

SEQ ID NO: 375997 - RNA, 20 nt, Molluscum contagiosum virus
uccagccgucgccgcgcccg

SEQ ID NO: 375998 - RNA, 17 nt, Molluscum contagiosum virus
uccagcgcaucaugcgc

SEQ ID NO: 375999 - RNA, 19 nt, Molluscum contagiosum virus
uccagcgcgcucgaggcgc

SEQ ID NO: 376000 - RNA, 14 nt, Molluscum contagiosum virus
uccaggccuucggg

SEQ ID NO: 376001 - RNA, 20 nt, Molluscum contagiosum virus
uccagggcucaagaucuccu

SEQ ID NO: 376002 - RNA, 24 nt, Molluscum contagiosum virus
uccagguggccaacggcgccaucg

SEQ ID NO: 376003 - RNA, 18 nt, Molluscum contagiosum virus
uccaucggaacuagcccu

SEQ ID NO: 376004 - RNA, 23 nt, Molluscum contagiosum virus
uccaucuucgucuuaugcauccu

SEQ ID NO: 376005 - RNA, 21 nt, Molluscum contagiosum virus
uccaugacagaaaaaacacaa

SEQ ID NO: 376006 - RNA, 22 nt, Molluscum contagiosum virus
uccaugacagaaaaaacacaac

SEQ ID NO: 376007 - RNA, 15 nt, Molluscum contagiosum virus
uccauucucucgaga

SEQ ID NO: 376008 - RNA, 15 nt, Molluscum contagiosum virus
ucccaagagccaugu

SEQ ID NO: 376009 - RNA, 18 nt, Molluscum contagiosum virus
ucccagaaaacgcacugu

SEQ ID NO: 376010 - RNA, 19 nt, Molluscum contagiosum virus
ucccagaaaacgcacuguc

SEQ ID NO: 376011 - RNA, 19 nt, Molluscum contagiosum virus
ucccgaauccuuuacugca

SEQ ID NO: 376012 - RNA, 21 nt, Molluscum contagiosum virus
ucccgaauccuuuacugcaag

SEQ ID NO: 376013 - RNA, 13 nt, Molluscum contagiosum virus
ucccgcaagccac

SEQ ID NO: 376014 - RNA, 15 nt, Molluscum contagiosum virus
ucccgcgccacgagc

SEQ ID NO: 376015 - RNA, 18 nt, Molluscum contagiosum virus
ucccgcgccacgagcgcc

SEQ ID NO: 376016 - RNA, 18 nt, Molluscum contagiosum virus
ucccgcggccgccacugu

SEQ ID NO: 376017 - RNA, 14 nt, Molluscum contagiosum virus
ucccgucgagcacg

SEQ ID NO: 376018 - RNA, 15 nt, Molluscum contagiosum virus
ucccuucgcguccac

SEQ ID NO: 376019 - RNA, 15 nt, Molluscum contagiosum virus
uccgacauguaccau

SEQ ID NO: 376020 - RNA, 17 nt, Molluscum contagiosum virus
uccgacccgugcugcuu

SEQ ID NO: 376021 - RNA, 21 nt, Molluscum contagiosum virus
uccgacgcguguaucaugcac

SEQ ID NO: 376022 - RNA, 21 nt, Molluscum contagiosum virus
uccgacuccuuccggagacac

SEQ ID NO: 376023 - RNA, 15 nt, Molluscum contagiosum virus
uccgagcuguucaac

SEQ ID NO: 376024 - RNA, 14 nt, Molluscum contagiosum virus
uccgcacagcuuca

SEQ ID NO: 376025 - RNA, 18 nt, Molluscum contagiosum virus
uccgcaggcgucaugcgc

SEQ ID NO: 376026 - RNA, 15 nt, Molluscum contagiosum virus
uccgcccccaggugg

SEQ ID NO: 376027 - RNA, 17 nt, Molluscum contagiosum virus
uccgccgggaauaccgg

SEQ ID NO: 376028 - RNA, 19 nt, Molluscum contagiosum virus
uccgccuaccccuugcuuc

SEQ ID NO: 376029 - RNA, 18 nt, Molluscum contagiosum virus
uccgcgaaguccugggcg

SEQ ID NO: 376030 - RNA, 18 nt, Molluscum contagiosum virus
uccgcgacgaacucgaca

SEQ ID NO: 376031 - RNA, 15 nt, Molluscum contagiosum virus
uccgcgcgcucucac

SEQ ID NO: 376032 - RNA, 14 nt, Molluscum contagiosum virus
uccgcggggcuccu

SEQ ID NO: 376033 - RNA, 20 nt, Molluscum contagiosum virus
uccgcguuggcagcggcaaa

SEQ ID NO: 376034 - RNA, 19 nt, Molluscum contagiosum virus
uccgcucguguuugucaag

SEQ ID NO: 376035 - RNA, 16 nt, Molluscum contagiosum virus
uccggagacaccagcu

SEQ ID NO: 376036 - RNA, 18 nt, Molluscum contagiosum virus
uccggcacgcacaaaguu

SEQ ID NO: 376037 - RNA, 12 nt, Molluscum contagiosum virus
uccggcacgugc

SEQ ID NO: 376038 - RNA, 17 nt, Molluscum contagiosum virus
uccggccuguaaaugga

SEQ ID NO: 376039 - RNA, 14 nt, Molluscum contagiosum virus
uccggcgcucgccc

SEQ ID NO: 376040 - RNA, 20 nt, Molluscum contagiosum virus
uccgucuugcgcacacacuu

SEQ ID NO: 376041 - RNA, 14 nt, Molluscum contagiosum virus
uccgugccauuucg

SEQ ID NO: 376042 - RNA, 22 nt, Molluscum contagiosum virus
uccgugggcggcauccugauga

SEQ ID NO: 376043 - RNA, 14 nt, Molluscum contagiosum virus
uccuacacauuccu

SEQ ID NO: 376044 - RNA, 18 nt, Molluscum contagiosum virus
uccuacuucgucaagcag

SEQ ID NO: 376045 - RNA, 14 nt, Molluscum contagiosum virus
uccucccuccggcc

SEQ ID NO: 376046 - RNA, 17 nt, Molluscum contagiosum virus
uccucgaccugcacgac

SEQ ID NO: 376047 - RNA, 18 nt, Molluscum contagiosum virus
uccucgacgcgcugcucu

SEQ ID NO: 376048 - RNA, 19 nt, Molluscum contagiosum virus
uccucggcgcacacuccuc

SEQ ID NO: 376049 - RNA, 22 nt, Molluscum contagiosum virus
uccucuccaucaucgagcugca

SEQ ID NO: 376050 - RNA, 16 nt, Molluscum contagiosum virus
uccugaacaagcugca

SEQ ID NO: 376051 - RNA, 15 nt, Molluscum contagiosum virus
uccugcagcugucca

SEQ ID NO: 376052 - RNA, 18 nt, Molluscum contagiosum virus
uccugcauuucaugcgcg

SEQ ID NO: 376053 - RNA, 14 nt, Molluscum contagiosum virus
uccugcgcuccgac

SEQ ID NO: 376054 - RNA, 13 nt, Molluscum contagiosum virus
uccugcggcgcug

SEQ ID NO: 376055 - RNA, 22 nt, Molluscum contagiosum virus
uccuggagggguguuuccuugc

SEQ ID NO: 376056 - RNA, 22 nt, Molluscum contagiosum virus
uccuggcucgcgagugugcaug

SEQ ID NO: 376057 - RNA, 17 nt, Molluscum contagiosum virus
uccugguaguugcagcc

SEQ ID NO: 376058 - RNA, 16 nt, Molluscum contagiosum virus
uccuuccggagacacc

SEQ ID NO: 376059 - RNA, 18 nt, Molluscum contagiosum virus
uccuuccggagacaccag

SEQ ID NO: 376060 - RNA, 20 nt, Molluscum contagiosum virus
uccuuccggagacaccagcu

SEQ ID NO: 376061 - RNA, 19 nt, Molluscum contagiosum virus
uccuugauaaaagcacagu

SEQ ID NO: 376062 - RNA, 20 nt, Molluscum contagiosum virus
uccuugauaaaagcacaguc

SEQ ID NO: 376063 - RNA, 17 nt, Molluscum contagiosum virus
uccuuggcaacgcaaac

SEQ ID NO: 376064 - RNA, 21 nt, Molluscum contagiosum virus
uccuuggccaggaacgaucac

SEQ ID NO: 376065 - RNA, 11 nt, Molluscum contagiosum virus
uccuuguccug

SEQ ID NO: 376066 - RNA, 19 nt, Molluscum contagiosum virus
uccuugugcaauuccgucc

SEQ ID NO: 376067 - RNA, 15 nt, Molluscum contagiosum virus
uccuuuacugcaaga

SEQ ID NO: 376068 - RNA, 22 nt, Molluscum contagiosum virus
ucgaaaaggcugauccugcgcg

SEQ ID NO: 376069 - RNA, 18 nt, Molluscum contagiosum virus
ucgaacaccgacaaggag

SEQ ID NO: 376070 - RNA, 17 nt, Molluscum contagiosum virus
ucgaacaccuccugcuu

SEQ ID NO: 376071 - RNA, 15 nt, Molluscum contagiosum virus
ucgaacgcaaggugu

SEQ ID NO: 376072 - RNA, 17 nt, Molluscum contagiosum virus
ucgacagucuagugcgu

SEQ ID NO: 376073 - RNA, 18 nt, Molluscum contagiosum virus
ucgacauggagcgcauca

SEQ ID NO: 376074 - RNA, 18 nt, Molluscum contagiosum virus
ucgaccaaaugcgcgugc

SEQ ID NO: 376075 - RNA, 20 nt, Molluscum contagiosum virus
ucgacgacgaugacaucugg

SEQ ID NO: 376076 - RNA, 18 nt, Molluscum contagiosum virus
ucucagcggcacugcgcg

SEQ ID NO: 376077 - RNA, 17 nt, Molluscum contagiosum virus
ucuccccuugggcucug

SEQ ID NO: 376078 - RNA, 19 nt, Molluscum contagiosum virus
ucucccucgcgcgcaugua

SEQ ID NO: 376079 - RNA, 15 nt, Molluscum contagiosum virus
ucuccgacgugcugc

SEQ ID NO: 376080 - RNA, 16 nt, Molluscum contagiosum virus
ucuccgacgugcugcg

SEQ ID NO: 376081 - RNA, 22 nt, Molluscum contagiosum virus
ucuccgaggaaacgcagcacuu

SEQ ID NO: 376082 - RNA, 17 nt, Molluscum contagiosum virus
ucuccuacacauuccuc

SEQ ID NO: 376083 - RNA, 15 nt, Molluscum contagiosum virus
ucuccuucagugugu

SEQ ID NO: 376084 - RNA, 17 nt, Molluscum contagiosum virus
ucucgaugugacaacau

SEQ ID NO: 376085 - RNA, 18 nt, Molluscum contagiosum virus
ucucgauucacaucuugc

SEQ ID NO: 376086 - RNA, 18 nt, Molluscum contagiosum virus
ucucgcguucgcguucga

SEQ ID NO: 376087 - RNA, 18 nt, Molluscum contagiosum virus
ucucgcucgugcucucug

SEQ ID NO: 376088 - RNA, 18 nt, Molluscum contagiosum virus
ucucgguggacgcacagg

SEQ ID NO: 376089 - RNA, 18 nt, Molluscum contagiosum virus
ucucuaggagcuccgugc

SEQ ID NO: 376090 - RNA, 16 nt, Molluscum contagiosum virus
ucugagcgagcgcagu

SEQ ID NO: 376091 - RNA, 21 nt, Molluscum contagiosum virus
ucugauccgacauguaccauu

SEQ ID NO: 376092 - RNA, 13 nt, Molluscum contagiosum virus
ucugcaagcugcc

SEQ ID NO: 376093 - RNA, 22 nt, Molluscum contagiosum virus
ucugccagccgcucguccagcu

SEQ ID NO: 376094 - RNA, 13 nt, Molluscum contagiosum virus
ucugcccgaccac

SEQ ID NO: 376095 - RNA, 16 nt, Molluscum contagiosum virus
ucugcgcaaccuggau

SEQ ID NO: 376096 - RNA, 14 nt, Molluscum contagiosum virus
ucugcgcgagcagc

SEQ ID NO: 376097 - RNA, 17 nt, Molluscum contagiosum virus
ucugcucuugaugcuga

SEQ ID NO: 376098 - RNA, 17 nt, Molluscum contagiosum virus
ucuggcaaacgcacugu

SEQ ID NO: 376099 - RNA, 16 nt, Molluscum contagiosum virus
ucugggcgagagcuuu

SEQ ID NO: 376100 - RNA, 19 nt, Molluscum contagiosum virus
ucugguuccugcgcuccga

SEQ ID NO: 376101 - RNA, 12 nt, Molluscum contagiosum virus
ucuguaacaagc

SEQ ID NO: 376102 - RNA, 22 nt, Molluscum contagiosum virus
ucugucccugcauacacuuccu

SEQ ID NO: 376103 - RNA, 22 nt, Molluscum contagiosum virus
ucugucgccgcgggcugggaaa

SEQ ID NO: 376104 - RNA, 21 nt, Molluscum contagiosum virus
ucugugugcuuauaccaugga

SEQ ID NO: 376105 - RNA, 16 nt, Molluscum contagiosum virus
ucuucaacuuccacau

SEQ ID NO: 376106 - RNA, 15 nt, Molluscum contagiosum virus
ucuucaagacuggca

SEQ ID NO: 376107 - RNA, 21 nt, Molluscum contagiosum virus
ucuucaagacuggcacuugcg

SEQ ID NO: 376108 - RNA, 17 nt, Molluscum contagiosum virus
ucuucggaaagaaccau

SEQ ID NO: 376109 - RNA, 13 nt, Molluscum contagiosum virus
ucuucgugcccac

SEQ ID NO: 376110 - RNA, 18 nt, Molluscum contagiosum virus
ucuucucgcagcguucca

SEQ ID NO: 376111 - RNA, 20 nt, Molluscum contagiosum virus
ucuucuucgggaaggaacaa

SEQ ID NO: 376112 - RNA, 20 nt, Molluscum contagiosum virus
ucuucuuguuguugugacac

SEQ ID NO: 376113 - RNA, 17 nt, Molluscum contagiosum virus
ucuugacgcgagacugu

SEQ ID NO: 376114 - RNA, 18 nt, Molluscum contagiosum virus
ucuugcgcacacacuugc

SEQ ID NO: 376115 - RNA, 20 nt, Molluscum contagiosum virus
ucuugcgugccuucgccaau

SEQ ID NO: 376116 - RNA, 20 nt, Molluscum contagiosum virus
ucuuguggcgccgaugcagu

SEQ ID NO: 376117 - RNA, 18 nt, Molluscum contagiosum virus
ucuuguugucugcggacg

SEQ ID NO: 376118 - RNA, 14 nt, Molluscum contagiosum virus
ucuuuccggcgcgg

SEQ ID NO: 376119 - RNA, 14 nt, Molluscum contagiosum virus
ucuuuuuuaugcac

SEQ ID NO: 376120 - RNA, 18 nt, Molluscum contagiosum virus
ugaacagcuucacgauga

SEQ ID NO: 376121 - RNA, 19 nt, Molluscum contagiosum virus
ugaacagcuucacgaugaa

SEQ ID NO: 376122 - RNA, 22 nt, Molluscum contagiosum virus
ugaacgcgcugcgccacugcca

SEQ ID NO: 376123 - RNA, 17 nt, Molluscum contagiosum virus
ugaacucgcugcugcuc

SEQ ID NO: 376124 - RNA, 13 nt, Molluscum contagiosum virus
ugaagcucucgcg

SEQ ID NO: 376125 - RNA, 15 nt, Molluscum contagiosum virus
ugaaucccacaaauc

SEQ ID NO: 376126 - RNA, 20 nt, Molluscum contagiosum virus
ugaauugagugcgggucaca

SEQ ID NO: 376127 - RNA, 12 nt, Molluscum contagiosum virus
ugacaacaugug

SEQ ID NO: 376128 - RNA, 19 nt, Molluscum contagiosum virus
ugacacgagccgugugcuc

SEQ ID NO: 376129 - RNA, 16 nt, Molluscum contagiosum virus
ugacagacuaggcaau

SEQ ID NO: 376130 - RNA, 20 nt, Molluscum contagiosum virus
ugacagacuaggcaaugacu

SEQ ID NO: 376131 - RNA, 18 nt, Molluscum contagiosum virus
ugacagguccggugucca

SEQ ID NO: 376132 - RNA, 14 nt, Molluscum contagiosum virus
ugaccaaaggucca

SEQ ID NO: 376133 - RNA, 14 nt, Molluscum contagiosum virus
ugaccaagcacauu

SEQ ID NO: 376134 - RNA, 16 nt, Molluscum contagiosum virus
ugaccaagcacauucu

SEQ ID NO: 376135 - RNA, 19 nt, Molluscum contagiosum virus
ugaccgcgggcacgggcac

SEQ ID NO: 376136 - RNA, 19 nt, Molluscum contagiosum virus
ugaccucggucaacggcac

SEQ ID NO: 376137 - RNA, 18 nt, Molluscum contagiosum virus
ugaccuucaccaucaaca

SEQ ID NO: 376138 - RNA, 18 nt, Molluscum contagiosum virus
ugacgaagcugcgcuugc

SEQ ID NO: 376139 - RNA, 15 nt, Molluscum contagiosum virus
ugacgcgagacugug

SEQ ID NO: 376140 - RNA, 21 nt, Molluscum contagiosum virus
ugacggccggcgggcgcgugc

SEQ ID NO: 376141 - RNA, 18 nt, Molluscum contagiosum virus
ugacggcgcugcgcgugg

SEQ ID NO: 376142 - RNA, 13 nt, Molluscum contagiosum virus
ugacgguccugcg

SEQ ID NO: 376143 - RNA, 15 nt, Molluscum contagiosum virus
ugacgguccugcgcg

SEQ ID NO: 376144 - RNA, 14 nt, Molluscum contagiosum virus
ugacucgccgugug

SEQ ID NO: 376145 - RNA, 14 nt, Molluscum contagiosum virus
ugagaacaacagcg

SEQ ID NO: 376146 - RNA, 22 nt, Molluscum contagiosum virus
ugagaagcuguaccuggugcgc

SEQ ID NO: 376147 - RNA, 21 nt, Molluscum contagiosum virus
ugagcaggucggccagcagcu

SEQ ID NO: 376148 - RNA, 15 nt, Molluscum contagiosum virus
ugagccgcaagcaca

SEQ ID NO: 376149 - RNA, 14 nt, Molluscum contagiosum virus
ugagcgagcgcagu

SEQ ID NO: 376150 - RNA, 16 nt, Molluscum contagiosum virus
ugagcgcagcacacuu

SEQ ID NO: 376151 - RNA, 14 nt, Molluscum contagiosum virus
ugagcgccgucucg

SEQ ID NO: 376152 - RNA, 16 nt, Molluscum contagiosum virus
ugagcgccuaccgcaa

SEQ ID NO: 376153 - RNA, 20 nt, Molluscum contagiosum virus
ugagcguucgcuacuucaca

SEQ ID NO: 376154 - RNA, 23 nt, Molluscum contagiosum virus
ugagcuagugccgagcucgccuc

SEQ ID NO: 376155 - RNA, 14 nt, Molluscum contagiosum virus
ugaggaagcaagac

SEQ ID NO: 376156 - RNA, 15 nt, Molluscum contagiosum virus
ugaggacagcuugcu

SEQ ID NO: 376157 - RNA, 17 nt, Molluscum contagiosum virus
ugaggaggccaacgcca

SEQ ID NO: 376158 - RNA, 23 nt, Molluscum contagiosum virus
ugaggccgcggagaagugcgcag

SEQ ID NO: 376159 - RNA, 19 nt, Molluscum contagiosum virus
ugagguacuccacgcccgg

SEQ ID NO: 376160 - RNA, 17 nt, Molluscum contagiosum virus
ugauaaaagcacagucc

SEQ ID NO: 376161 - RNA, 12 nt, Molluscum contagiosum virus
ugauaugcauau

SEQ ID NO: 376162 - RNA, 21 nt, Molluscum contagiosum virus
ugauaugcauauauagacgua

SEQ ID NO: 376163 - RNA, 22 nt, Molluscum contagiosum virus
ugaucccggaacgcaaguacaa

SEQ ID NO: 376164 - RNA, 15 nt, Molluscum contagiosum virus
ugaucgacgaggacc

SEQ ID NO: 376165 - RNA, 21 nt, Molluscum contagiosum virus
ugaucggaugcaaagacggua

SEQ ID NO: 376166 - RNA, 15 nt, Molluscum contagiosum virus
ugaucguuccuggcc

SEQ ID NO: 376167 - RNA, 17 nt, Molluscum contagiosum virus
ugaucugcccgaccacc

SEQ ID NO: 376168 - RNA, 23 nt, Molluscum contagiosum virus
ugaugauuugauggcugcucauu

SEQ ID NO: 376169 - RNA, 21 nt, Molluscum contagiosum virus
ugcaaagacgguacauauucc

SEQ ID NO: 376170 - RNA, 13 nt, Molluscum contagiosum virus
ugcaaagcgcggc

SEQ ID NO: 376171 - RNA, 16 nt, Molluscum contagiosum virus
ugcaacucgcgcugca

SEQ ID NO: 376172 - RNA, 19 nt, Molluscum contagiosum virus
ugcaacucgcgcugcagca

SEQ ID NO: 376173 - RNA, 15 nt, Molluscum contagiosum virus
ugcaagaagucucuc

SEQ ID NO: 376174 - RNA, 23 nt, Molluscum contagiosum virus
ugcaagauuguagagacgcugcc

SEQ ID NO: 376175 - RNA, 16 nt, Molluscum contagiosum virus
ugcaagcccagcagcg

SEQ ID NO: 376176 - RNA, 14 nt, Molluscum contagiosum virus
ugcaagcgugacuc

SEQ ID NO: 376177 - RNA, 18 nt, Molluscum contagiosum virus
ugcaauggcaggugcgca

SEQ ID NO: 376178 - RNA, 12 nt, Molluscum contagiosum virus
ugcacacacucg

SEQ ID NO: 376179 - RNA, 16 nt, Molluscum contagiosum virus
cuccugagaagcaaug

SEQ ID NO: 376180 - RNA, 18 nt, Molluscum contagiosum virus
cuccugaggaagcaagac

SEQ ID NO: 376181 - RNA, 19 nt, Molluscum contagiosum virus
cuccugccgucgcccguga

SEQ ID NO: 376182 - RNA, 16 nt, Molluscum contagiosum virus
cuccuuagacaaaagc

SEQ ID NO: 376183 - RNA, 14 nt, Molluscum contagiosum virus
cuccuuccggagac

SEQ ID NO: 376184 - RNA, 21 nt, Molluscum contagiosum virus
cuccuuuccaucggaacuagc

SEQ ID NO: 376185 - RNA, 16 nt, Molluscum contagiosum virus
cucgaacgcaaggugu

SEQ ID NO: 376186 - RNA, 14 nt, Molluscum contagiosum virus
cucgaaggugcuca

SEQ ID NO: 376187 - RNA, 17 nt, Molluscum contagiosum virus
cucgacaacgacaggaa

SEQ ID NO: 376188 - RNA, 18 nt, Molluscum contagiosum virus
cucgacauuucgcgccug

SEQ ID NO: 376189 - RNA, 19 nt, Molluscum contagiosum virus
cucgacgaggccuacagcg

SEQ ID NO: 376190 - RNA, 21 nt, Molluscum contagiosum virus
cucgacgaggccuacagcgcg

SEQ ID NO: 376191 - RNA, 11 nt, Molluscum contagiosum virus
cucgagcacgu

SEQ ID NO: 376192 - RNA, 17 nt, Molluscum contagiosum virus
cucgagcacguagugcu

SEQ ID NO: 376193 - RNA, 15 nt, Molluscum contagiosum virus
cucgagcaggucauc

SEQ ID NO: 376194 - RNA, 18 nt, Molluscum contagiosum virus
cucgagccgcacaaagaa

SEQ ID NO: 376195 - RNA, 18 nt, Molluscum contagiosum virus
cucgagcuccagggcuca

SEQ ID NO: 376196 - RNA, 14 nt, Molluscum contagiosum virus
cucgagcugcaucu

SEQ ID NO: 376197 - RNA, 15 nt, Molluscum contagiosum virus
cucgagcugcaucuu

SEQ ID NO: 376198 - RNA, 20 nt, Molluscum contagiosum virus
cucgagggcgccgugcugcg

SEQ ID NO: 376199 - RNA, 16 nt, Molluscum contagiosum virus
cucgcaaacacaaccu

SEQ ID NO: 376200 - RNA, 12 nt, Molluscum contagiosum virus
cucgccaugcug

SEQ ID NO: 376201 - RNA, 23 nt, Molluscum contagiosum virus
cucgccgaagacgcguaccagcg

SEQ ID NO: 376202 - RNA, 17 nt, Molluscum contagiosum virus
cucgccgcaccacaacu

SEQ ID NO: 376203 - RNA, 20 nt, Molluscum contagiosum virus
cucgccgugugaucaagagc

SEQ ID NO: 376204 - RNA, 23 nt, Molluscum contagiosum virus
cucgccguuccacuacaagcagc

SEQ ID NO: 376205 - RNA, 22 nt, Molluscum contagiosum virus
cucgcgagaaguucugcacagc

SEQ ID NO: 376206 - RNA, 16 nt, Molluscum contagiosum virus
cucgcgagggcucguc

SEQ ID NO: 376207 - RNA, 16 nt, Molluscum contagiosum virus
cucgcgagugugcaug

SEQ ID NO: 376208 - RNA, 17 nt, Molluscum contagiosum virus
cucgcgcaucugccgcg

SEQ ID NO: 376209 - RNA, 17 nt, Molluscum contagiosum virus
cucgcgggagagcacuu

SEQ ID NO: 376210 - RNA, 21 nt, Molluscum contagiosum virus
cucgcgggcguggggagcugg

SEQ ID NO: 376211 - RNA, 16 nt, Molluscum contagiosum virus
cucgcgugccccggga

SEQ ID NO: 376212 - RNA, 23 nt, Molluscum contagiosum virus
cucgcguuagcgcuggcccgugc

SEQ ID NO: 376213 - RNA, 24 nt, Molluscum contagiosum virus
cucgcucaucaccgacacgcgccc

SEQ ID NO: 376214 - RNA, 19 nt, Molluscum contagiosum virus
cucgcucauccacgcggag

SEQ ID NO: 376215 - RNA, 19 nt, Molluscum contagiosum virus
cucgcugccuggugcacac

SEQ ID NO: 376216 - RNA, 21 nt, Molluscum contagiosum virus
cucgcugcugcccauacucga

SEQ ID NO: 376217 - RNA, 21 nt, Molluscum contagiosum virus
cucgcugcugggcaucgugcu

SEQ ID NO: 376218 - RNA, 17 nt, Molluscum contagiosum virus
cucgcuggugugcacug

SEQ ID NO: 376219 - RNA, 19 nt, Molluscum contagiosum virus
cucggacagugccuccgcg

SEQ ID NO: 376220 - RNA, 18 nt, Molluscum contagiosum virus
cucggaggaaaagcacgc

SEQ ID NO: 376221 - RNA, 14 nt, Molluscum contagiosum virus
cucggaggggcucc

SEQ ID NO: 376222 - RNA, 15 nt, Molluscum contagiosum virus
cucggcaacacaaau

SEQ ID NO: 376223 - RNA, 15 nt, Molluscum contagiosum virus
cucggcgcacacucc

SEQ ID NO: 376224 - RNA, 21 nt, Molluscum contagiosum virus
cucggcggccggauugccgca

SEQ ID NO: 376225 - RNA, 23 nt, Molluscum contagiosum virus
cucggcguuggccacgaacacgg

SEQ ID NO: 376226 - RNA, 19 nt, Molluscum contagiosum virus
cucgggaagcccucagggg

SEQ ID NO: 376227 - RNA, 16 nt, Molluscum contagiosum virus
cucgggagacaucauc

SEQ ID NO: 376228 - RNA, 22 nt, Molluscum contagiosum virus
cucgggcaugguggugagaaag

SEQ ID NO: 376229 - RNA, 18 nt, Molluscum contagiosum virus
cucgggcuagcaagcacg

SEQ ID NO: 376230 - RNA, 14 nt, Molluscum contagiosum virus
cucguacugcugca

SEQ ID NO: 376231 - RNA, 17 nt, Molluscum contagiosum virus
cucgucgaucaugucca

SEQ ID NO: 376232 - RNA, 12 nt, Molluscum contagiosum virus
cucgugaagcug

SEQ ID NO: 376233 - RNA, 15 nt, Molluscum contagiosum virus
cucgugccgccugcg

SEQ ID NO: 376234 - RNA, 20 nt, Molluscum contagiosum virus
cucgugcucggcgugaucuu

SEQ ID NO: 376235 - RNA, 11 nt, Molluscum contagiosum virus
cucgugcucuu

SEQ ID NO: 376236 - RNA, 21 nt, Molluscum contagiosum virus
cucguggacagccugcaccga

SEQ ID NO: 376237 - RNA, 19 nt, Molluscum contagiosum virus
cucguggcaacaacaugaa

SEQ ID NO: 376238 - RNA, 18 nt, Molluscum contagiosum virus
cucgugggauaggcacac

SEQ ID NO: 376239 - RNA, 20 nt, Molluscum contagiosum virus
cucguggggaggacaaaacu

SEQ ID NO: 376240 - RNA, 21 nt, Molluscum contagiosum virus
cucguucgcgggcccgccuuu

SEQ ID NO: 376241 - RNA, 13 nt, Molluscum contagiosum virus
cucuacaccagcu

SEQ ID NO: 376242 - RNA, 14 nt, Molluscum contagiosum virus
cucuacaccagcug

SEQ ID NO: 376243 - RNA, 20 nt, Molluscum contagiosum virus
cucuacacgcacgaccucac

SEQ ID NO: 376244 - RNA, 14 nt, Molluscum contagiosum virus
cucuacgugcugca

SEQ ID NO: 376245 - RNA, 20 nt, Molluscum contagiosum virus
cucuaguucccauggaugcg

SEQ ID NO: 376246 - RNA, 18 nt, Molluscum contagiosum virus
cucuccgacgugcugcgc

SEQ ID NO: 376247 - RNA, 18 nt, Molluscum contagiosum virus
cucucgagagacaacaaa

SEQ ID NO: 376248 - RNA, 21 nt, Molluscum contagiosum virus
cucucgcaugcgccugcacuu

SEQ ID NO: 376249 - RNA, 13 nt, Molluscum contagiosum virus
cucucggcagcgu

SEQ ID NO: 376250 - RNA, 15 nt, Molluscum contagiosum virus
cucucguggggagga

SEQ ID NO: 376251 - RNA, 20 nt, Molluscum contagiosum virus
cucugcgcgcaagucaccgc

SEQ ID NO: 376252 - RNA, 24 nt, Molluscum contagiosum virus
cucugcguaagcgccugcacacgc

SEQ ID NO: 376253 - RNA, 23 nt, Molluscum contagiosum virus
cucuggcaaggauuacgcugccg

SEQ ID NO: 376254 - RNA, 19 nt, Molluscum contagiosum virus
cucuggcuugcgcuuagac

SEQ ID NO: 376255 - RNA, 21 nt, Molluscum contagiosum virus
cucugggcgucgcacaguuca

SEQ ID NO: 376256 - RNA, 22 nt, Molluscum contagiosum virus
cucugggcgucgcacaguucac

SEQ ID NO: 376257 - RNA, 19 nt, Molluscum contagiosum virus
cucuggucgagaugcucua

SEQ ID NO: 376258 - RNA, 22 nt, Molluscum contagiosum virus
cucugucguugucgccgugaac

SEQ ID NO: 376259 - RNA, 14 nt, Molluscum contagiosum virus
cucugucucccgcc

SEQ ID NO: 376260 - RNA, 14 nt, Molluscum contagiosum virus
cucuucaugaaaua

SEQ ID NO: 376261 - RNA, 14 nt, Molluscum contagiosum virus
cucuuccaccggca

SEQ ID NO: 376262 - RNA, 19 nt, Molluscum contagiosum virus
cucuucgcaggcgugcuca

SEQ ID NO: 376263 - RNA, 21 nt, Molluscum contagiosum virus
cugaaaggacaugggcacaag

SEQ ID NO: 376264 - RNA, 19 nt, Molluscum contagiosum virus
cugacgaacggaacacagu

SEQ ID NO: 376265 - RNA, 11 nt, Molluscum contagiosum virus
cugacugcugc

SEQ ID NO: 376266 - RNA, 12 nt, Molluscum contagiosum virus
cugacugcugcc

SEQ ID NO: 376267 - RNA, 23 nt, Molluscum contagiosum virus
cugagaagcuguaccuggugcgc

SEQ ID NO: 376268 - RNA, 21 nt, Molluscum contagiosum virus
cugagauauacaaagaagcgc

SEQ ID NO: 376269 - RNA, 17 nt, Molluscum contagiosum virus
cugagcaagcucaagaa

SEQ ID NO: 376270 - RNA, 18 nt, Molluscum contagiosum virus
cugagcaagcucaagaag

SEQ ID NO: 376271 - RNA, 16 nt, Molluscum contagiosum virus
cugagccacaaacacu

SEQ ID NO: 376272 - RNA, 16 nt, Molluscum contagiosum virus
cugagccgcaagcaca

SEQ ID NO: 376273 - RNA, 18 nt, Molluscum contagiosum virus
cugagcgcagcacacuug

SEQ ID NO: 376274 - RNA, 20 nt, Molluscum contagiosum virus
cugagcgugucgaagcgcgc

SEQ ID NO: 376275 - RNA, 17 nt, Molluscum contagiosum virus
cugagugcugagccaca

SEQ ID NO: 376276 - RNA, 22 nt, Molluscum contagiosum virus
cugagugcugagccacaaacac

SEQ ID NO: 376277 - RNA, 13 nt, Molluscum contagiosum virus
cugauaugcauau

SEQ ID NO: 376278 - RNA, 21 nt, Molluscum contagiosum virus
cugaucaccgaggagccgcgc

SEQ ID NO: 376279 - RNA, 15 nt, Molluscum contagiosum virus
cugcaacguggcgcc

SEQ ID NO: 376280 - RNA, 20 nt, Molluscum contagiosum virus
cugcaagaggcgcugucgcg

SEQ ID NO: 376281 - RNA, 15 nt, Molluscum contagiosum virus
cugggcgagagcuuu

SEQ ID NO: 376282 - RNA, 15 nt, Molluscum contagiosum virus
cugggcgcgccgcgc

SEQ ID NO: 376283 - RNA, 17 nt, Molluscum contagiosum virus
cugggcgucgcacaguu

SEQ ID NO: 376284 - RNA, 18 nt, Molluscum contagiosum virus
cuggggauggccacggga

SEQ ID NO: 376285 - RNA, 16 nt, Molluscum contagiosum virus
cuggggcuagcgcugc

SEQ ID NO: 376286 - RNA, 17 nt, Molluscum contagiosum virus
cuggggcuggacagcau

SEQ ID NO: 376287 - RNA, 23 nt, Molluscum contagiosum virus
cuggggcuggacagcaugaacuc

SEQ ID NO: 376288 - RNA, 12 nt, Molluscum contagiosum virus
cuggucaacagc

SEQ ID NO: 376289 - RNA, 21 nt, Molluscum contagiosum virus
cuggucaacagcuacaccgag

SEQ ID NO: 376290 - RNA, 13 nt, Molluscum contagiosum virus
cuggucacacugg

SEQ ID NO: 376291 - RNA, 11 nt, Molluscum contagiosum virus
cuggugcugcg

SEQ ID NO: 376292 - RNA, 17 nt, Molluscum contagiosum virus
cuggugcuggucaagaa

SEQ ID NO: 376293 - RNA, 14 nt, Molluscum contagiosum virus
cugguuaccaaggg

SEQ ID NO: 376294 - RNA, 21 nt, Molluscum contagiosum virus
cuguaaauggaccacaagcag

SEQ ID NO: 376295 - RNA, 14 nt, Molluscum contagiosum virus
cugucaacagugcg

SEQ ID NO: 376296 - RNA, 22 nt, Molluscum contagiosum virus
cuguccaaggugaacgaccuca

SEQ ID NO: 376297 - RNA, 12 nt, Molluscum contagiosum virus
cuguccgcggac

SEQ ID NO: 376298 - RNA, 15 nt, Molluscum contagiosum virus
cuguccuucaagaac

SEQ ID NO: 376299 - RNA, 17 nt, Molluscum contagiosum virus
cugucgcgcagcugcgc

SEQ ID NO: 376300 - RNA, 12 nt, Molluscum contagiosum virus
cugucuugaaac

SEQ ID NO: 376301 - RNA, 12 nt, Molluscum contagiosum virus
cugugagcgcgc

SEQ ID NO: 376302 - RNA, 18 nt, Molluscum contagiosum virus
cugugcccuguccacaaa

SEQ ID NO: 376303 - RNA, 14 nt, Molluscum contagiosum virus
cugugccugcgcaa

SEQ ID NO: 376304 - RNA, 14 nt, Molluscum contagiosum virus
cugugcgagccagu

SEQ ID NO: 376305 - RNA, 17 nt, Molluscum contagiosum virus
cugugcgccaacaacca

SEQ ID NO: 376306 - RNA, 16 nt, Molluscum contagiosum virus
cugugcgcgacgccug

SEQ ID NO: 376307 - RNA, 19 nt, Molluscum contagiosum virus
cugugcggagggugcacgc

SEQ ID NO: 376308 - RNA, 18 nt, Molluscum contagiosum virus
cugugcuacgcgagcacu

SEQ ID NO: 376309 - RNA, 21 nt, Molluscum contagiosum virus
cugugcuacgcgagcacugcg

SEQ ID NO: 376310 - RNA, 23 nt, Molluscum contagiosum virus
cugugcugacccccuccccagcg

SEQ ID NO: 376311 - RNA, 15 nt, Molluscum contagiosum virus
cugugcuucccgaaa

SEQ ID NO: 376312 - RNA, 21 nt, Molluscum contagiosum virus
cuguguggaacggcucaccgc

SEQ ID NO: 376313 - RNA, 23 nt, Molluscum contagiosum virus
cuguguuucucgcgaaucacaaa

SEQ ID NO: 376314 - RNA, 21 nt, Molluscum contagiosum virus
cuguuaaauggacgugcuccg

SEQ ID NO: 376315 - RNA, 15 nt, Molluscum contagiosum virus
cuguuccacaucaug

SEQ ID NO: 376316 - RNA, 23 nt, Molluscum contagiosum virus
cuguugcgcgagcgcgugcucuu

SEQ ID NO: 376317 - RNA, 17 nt, Molluscum contagiosum virus
cuuaauaaaaaaucaaa

SEQ ID NO: 376318 - RNA, 14 nt, Molluscum contagiosum virus
cuuacacacgcacc

SEQ ID NO: 376319 - RNA, 17 nt, Molluscum contagiosum virus
cuuacacacgcaccagu

SEQ ID NO: 376320 - RNA, 20 nt, Molluscum contagiosum virus
cuuacggacgcccuccucga

SEQ ID NO: 376321 - RNA, 22 nt, Molluscum contagiosum virus
cuuacggacgcccuccucgacc

SEQ ID NO: 376322 - RNA, 12 nt, Molluscum contagiosum virus
cuuacugcugca

SEQ ID NO: 376323 - RNA, 15 nt, Molluscum contagiosum virus
cuuacugcugcaauc

SEQ ID NO: 376324 - RNA, 22 nt, Molluscum contagiosum virus
cuuaucccagaaaacgcacugu

SEQ ID NO: 376325 - RNA, 12 nt, Molluscum contagiosum virus
cuucaagacugg

SEQ ID NO: 376326 - RNA, 18 nt, Molluscum contagiosum virus
cuucaagcacgagcugcu

SEQ ID NO: 376327 - RNA, 13 nt, Molluscum contagiosum virus
cuucaaguuccug

SEQ ID NO: 376328 - RNA, 16 nt, Molluscum contagiosum virus
cuucagugugugauca

SEQ ID NO: 376329 - RNA, 12 nt, Molluscum contagiosum virus
cuuccacauccg

SEQ ID NO: 376330 - RNA, 19 nt, Molluscum contagiosum virus
cuuccacgccuucguggag

SEQ ID NO: 376331 - RNA, 20 nt, Molluscum contagiosum virus
cuuccauugcauggacaucc

SEQ ID NO: 376332 - RNA, 21 nt, Molluscum contagiosum virus
cuuccauugcauggacauccu

SEQ ID NO: 376333 - RNA, 22 nt, Molluscum contagiosum virus
cuuccgauagguccgauucacu

SEQ ID NO: 376334 - RNA, 21 nt, Molluscum contagiosum virus
cuuccgcaacgaggucuucca

SEQ ID NO: 376335 - RNA, 17 nt, Molluscum contagiosum virus
cuuccgcgacgagcuca

SEQ ID NO: 376336 - RNA, 18 nt, Molluscum contagiosum virus
cuuccuggaguaccggcu

SEQ ID NO: 376337 - RNA, 20 nt, Molluscum contagiosum virus
cuuccuuuccgugcuugaca

SEQ ID NO: 376338 - RNA, 16 nt, Molluscum contagiosum virus
cuucgaagaggucucu

SEQ ID NO: 376339 - RNA, 19 nt, Molluscum contagiosum virus
cuucgaggaacuugcacgc

SEQ ID NO: 376340 - RNA, 20 nt, Molluscum contagiosum virus
cuucgcagacgacucgcugc

SEQ ID NO: 376341 - RNA, 18 nt, Molluscum contagiosum virus
cuucgcagagaccgucaa

SEQ ID NO: 376342 - RNA, 18 nt, Molluscum contagiosum virus
cuucgccgugugcgugac

SEQ ID NO: 376343 - RNA, 15 nt, Molluscum contagiosum virus
cuucgcgaugugcac

SEQ ID NO: 376344 - RNA, 23 nt, Molluscum contagiosum virus
cuucgcgcaaacaagcagucuca

SEQ ID NO: 376345 - RNA, 21 nt, Molluscum contagiosum virus
cuucgcguaccaagccgugac

SEQ ID NO: 376346 - RNA, 20 nt, Molluscum contagiosum virus
cuucgcuugucgugcuuccu

SEQ ID NO: 376347 - RNA, 17 nt, Molluscum contagiosum virus
cuucggcucgggaacaa

SEQ ID NO: 376348 - RNA, 22 nt, Molluscum contagiosum virus
cuucguggacgagcgcuaccug

SEQ ID NO: 376349 - RNA, 21 nt, Molluscum contagiosum virus
cuucguggagcccgugcugga

SEQ ID NO: 376350 - RNA, 23 nt, Molluscum contagiosum virus
cuucguggcgcugggcgcgccgc

SEQ ID NO: 376351 - RNA, 12 nt, Molluscum contagiosum virus
cuucguggugcu

SEQ ID NO: 376352 - RNA, 13 nt, Molluscum contagiosum virus
cuucucauagcau

SEQ ID NO: 376353 - RNA, 21 nt, Molluscum contagiosum virus
cuucucgaaaacuguucccau

SEQ ID NO: 376354 - RNA, 17 nt, Molluscum contagiosum virus
cuucucgaaaaugaaaa

SEQ ID NO: 376355 - RNA, 19 nt, Molluscum contagiosum virus
cuucugaggggcaguguuc

SEQ ID NO: 376356 - RNA, 14 nt, Molluscum contagiosum virus
cuucugcugcacac

SEQ ID NO: 376357 - RNA, 17 nt, Molluscum contagiosum virus
cuucuugguguucugcg

SEQ ID NO: 376358 - RNA, 13 nt, Molluscum contagiosum virus
cuugaagggcaca

SEQ ID NO: 376359 - RNA, 17 nt, Molluscum contagiosum virus
cuugacaaguacaugca

SEQ ID NO: 376360 - RNA, 17 nt, Molluscum contagiosum virus
cuugacgcgagacugug

SEQ ID NO: 376361 - RNA, 18 nt, Molluscum contagiosum virus
cuugacgcgagacugugc

SEQ ID NO: 376362 - RNA, 16 nt, Molluscum contagiosum virus
cuugauaaaagcacag

SEQ ID NO: 376363 - RNA, 20 nt, Molluscum contagiosum virus
cuugauaaaagcacagucca

SEQ ID NO: 376364 - RNA, 13 nt, Molluscum contagiosum virus
cuugaugcuguua

SEQ ID NO: 376365 - RNA, 20 nt, Molluscum contagiosum virus
cuugaugcuguuacuugcac

SEQ ID NO: 376366 - RNA, 18 nt, Molluscum contagiosum virus
cuugcacgggcaugcaca

SEQ ID NO: 376367 - RNA, 20 nt, Molluscum contagiosum virus
cuugcacucgaccgucuuca

SEQ ID NO: 376368 - RNA, 14 nt, Molluscum contagiosum virus
cuugcauguucucu

SEQ ID NO: 376369 - RNA, 23 nt, Molluscum contagiosum virus
cuugccacgcgggcccgugcuca

SEQ ID NO: 376370 - RNA, 17 nt, Molluscum contagiosum virus
cuugccgaggaggugcu

SEQ ID NO: 376371 - RNA, 14 nt, Molluscum contagiosum virus
cuugccguguucua

SEQ ID NO: 376372 - RNA, 19 nt, Molluscum contagiosum virus
cuugcgcacacacuugcuc

SEQ ID NO: 376373 - RNA, 17 nt, Molluscum contagiosum virus
cuugcgcacgauguacu

SEQ ID NO: 376374 - RNA, 22 nt, Molluscum contagiosum virus
cuugcgcacggaccucaaggag

SEQ ID NO: 376375 - RNA, 15 nt, Molluscum contagiosum virus
cuugcgcaugugauu

SEQ ID NO: 376376 - RNA, 19 nt, Molluscum contagiosum virus
cuugcgcggaagaagcugc

SEQ ID NO: 376377 - RNA, 18 nt, Molluscum contagiosum virus
cuugcgcguccacaaagg

SEQ ID NO: 376378 - RNA, 20 nt, Molluscum contagiosum virus
cuugcgcguucgcaaagacg

SEQ ID NO: 376379 - RNA, 21 nt, Molluscum contagiosum virus
cuugcgcguucgcaaagacga

SEQ ID NO: 376380 - RNA, 14 nt, Molluscum contagiosum virus
cuugcguacuugga

SEQ ID NO: 376381 - RNA, 16 nt, Molluscum contagiosum virus
cuugcguguugaacuc

SEQ ID NO: 376382 - RNA, 12 nt, Molluscum contagiosum virus
cuugcuggcacg

SEQ ID NO: 376383 - RNA, 23 nt, Molluscum contagiosum virus
gaagucucucagcggcacugcgc

SEQ ID NO: 376384 - RNA, 13 nt, Molluscum contagiosum virus
gaagugcuccgca

SEQ ID NO: 376385 - RNA, 19 nt, Molluscum contagiosum virus
gaagugcuccgcacgugga

SEQ ID NO: 376386 - RNA, 22 nt, Molluscum contagiosum virus
gaagugcuccgcacguggaauc

SEQ ID NO: 376387 - RNA, 18 nt, Molluscum contagiosum virus
gaaguucaucuacugcga

SEQ ID NO: 376388 - RNA, 18 nt, Molluscum contagiosum virus
gaauacccccuucuuacc

SEQ ID NO: 376389 - RNA, 15 nt, Molluscum contagiosum virus
gaauaccggagacac

SEQ ID NO: 376390 - RNA, 20 nt, Molluscum contagiosum virus
gaauaccggagacaccagcu

SEQ ID NO: 376391 - RNA, 21 nt, Molluscum contagiosum virus
gaauaccggagacaccagcuc

SEQ ID NO: 376392 - RNA, 18 nt, Molluscum contagiosum virus
gaaugacuuagccacugu

SEQ ID NO: 376393 - RNA, 19 nt, Molluscum contagiosum virus
gaaugcguguggugacucg

SEQ ID NO: 376394 - RNA, 15 nt, Molluscum contagiosum virus
gaauggacauugggu

SEQ ID NO: 376395 - RNA, 20 nt, Molluscum contagiosum virus
gaauguccggcgcuggagaa

SEQ ID NO: 376396 - RNA, 13 nt, Molluscum contagiosum virus
gaauugugcugcu

SEQ ID NO: 376397 - RNA, 13 nt, Molluscum contagiosum virus
gacaaaauggcug

SEQ ID NO: 376398 - RNA, 16 nt, Molluscum contagiosum virus
gacaacaaacauugug

SEQ ID NO: 376399 - RNA, 17 nt, Molluscum contagiosum virus
gacaacaaacauuguga

SEQ ID NO: 376400 - RNA, 14 nt, Molluscum contagiosum virus
gacaacgugcugcu

SEQ ID NO: 376401 - RNA, 18 nt, Molluscum contagiosum virus
gacaacgugcugcucaag

SEQ ID NO: 376402 - RNA, 15 nt, Molluscum contagiosum virus
gacaaggaaaggcac

SEQ ID NO: 376403 - RNA, 21 nt, Molluscum contagiosum virus
gacacacgcuugcgcauguga

SEQ ID NO: 376404 - RNA, 17 nt, Molluscum contagiosum virus
gacacgcgugucugcgc

SEQ ID NO: 376405 - RNA, 15 nt, Molluscum contagiosum virus
gacacgcucaucucg

SEQ ID NO: 376406 - RNA, 22 nt, Molluscum contagiosum virus
gacacgcugcgcgugcugggcc

SEQ ID NO: 376407 - RNA, 12 nt, Molluscum contagiosum virus
gacacggagcgg

SEQ ID NO: 376408 - RNA, 23 nt, Molluscum contagiosum virus
gacacguagcccaggaacaucug

SEQ ID NO: 376409 - RNA, 17 nt, Molluscum contagiosum virus
gacacugcgaaggucau

SEQ ID NO: 376410 - RNA, 14 nt, Molluscum contagiosum virus
gacagacuaggcaa

SEQ ID NO: 376411 - RNA, 15 nt, Molluscum contagiosum virus
gacagcaaacagccu

SEQ ID NO: 376412 - RNA, 20 nt, Molluscum contagiosum virus
gacagcacaaacacgcgcgc

SEQ ID NO: 376413 - RNA, 15 nt, Molluscum contagiosum virus
gacagcgacgagauc

SEQ ID NO: 376414 - RNA, 22 nt, Molluscum contagiosum virus
gacagcucagcaggcuguguuc

SEQ ID NO: 376415 - RNA, 20 nt, Molluscum contagiosum virus
gacaggcgcgcaagugcgug

SEQ ID NO: 376416 - RNA, 16 nt, Molluscum contagiosum virus
gacaggggccacaagc

SEQ ID NO: 376417 - RNA, 23 nt, Molluscum contagiosum virus
gacagggugccuacucgcgacgc

SEQ ID NO: 376418 - RNA, 15 nt, Molluscum contagiosum virus
gacagucuagugcgu

SEQ ID NO: 376419 - RNA, 15 nt, Molluscum contagiosum virus
gacagugacagacua

SEQ ID NO: 376420 - RNA, 17 nt, Molluscum contagiosum virus
gacauaguaccaugacg

SEQ ID NO: 376421 - RNA, 16 nt, Molluscum contagiosum virus
gacaucuacagccgcc

SEQ ID NO: 376422 - RNA, 18 nt, Molluscum contagiosum virus
gacaugcccuucuacgag

SEQ ID NO: 376423 - RNA, 15 nt, Molluscum contagiosum virus
gacaugcgcacgcgc

SEQ ID NO: 376424 - RNA, 16 nt, Molluscum contagiosum virus
gacauggucaaccucu

SEQ ID NO: 376425 - RNA, 18 nt, Molluscum contagiosum virus
gaccacaagcaguaccug

SEQ ID NO: 376426 - RNA, 14 nt, Molluscum contagiosum virus
gaccaccagcacca

SEQ ID NO: 376427 - RNA, 13 nt, Molluscum contagiosum virus
gaccacgcgcgcu

SEQ ID NO: 376428 - RNA, 12 nt, Molluscum contagiosum virus
gaccacgugcag

SEQ ID NO: 376429 - RNA, 23 nt, Molluscum contagiosum virus
gaccauggacacgcugcgcgugc

SEQ ID NO: 376430 - RNA, 13 nt, Molluscum contagiosum virus
gaccccaagaaga

SEQ ID NO: 376431 - RNA, 14 nt, Molluscum contagiosum virus
gaccgcaagugcac

SEQ ID NO: 376432 - RNA, 23 nt, Molluscum contagiosum virus
gaccgcgaacugcaacgugagua

SEQ ID NO: 376433 - RNA, 15 nt, Molluscum contagiosum virus
gaccggcgugccuuu

SEQ ID NO: 376434 - RNA, 23 nt, Molluscum contagiosum virus
gaccgucagccucugugcggcgc

SEQ ID NO: 376435 - RNA, 15 nt, Molluscum contagiosum virus
gaccucacagcgccg

SEQ ID NO: 376436 - RNA, 13 nt, Molluscum contagiosum virus
gaccuccuugcac

SEQ ID NO: 376437 - RNA, 19 nt, Molluscum contagiosum virus
gaccucggucaacggcaca

SEQ ID NO: 376438 - RNA, 18 nt, Molluscum contagiosum virus
gaccugcacgacccucuu

SEQ ID NO: 376439 - RNA, 22 nt, Molluscum contagiosum virus
gaccugcacgacccucuucgac

SEQ ID NO: 376440 - RNA, 21 nt, Molluscum contagiosum virus
gaccuggaagccgccagccac

SEQ ID NO: 376441 - RNA, 16 nt, Molluscum contagiosum virus
gaccuggucacacugg

SEQ ID NO: 376442 - RNA, 17 nt, Molluscum contagiosum virus
gaccuggucacacuggu

SEQ ID NO: 376443 - RNA, 16 nt, Molluscum contagiosum virus
gaccuuggacacgugc

SEQ ID NO: 376444 - RNA, 15 nt, Molluscum contagiosum virus
gaccuuggugcucau

SEQ ID NO: 376445 - RNA, 21 nt, Molluscum contagiosum virus
gacgaacggaacacagugcgu

SEQ ID NO: 376446 - RNA, 18 nt, Molluscum contagiosum virus
gacgacaugcacacgcac

SEQ ID NO: 376447 - RNA, 22 nt, Molluscum contagiosum virus
gacgacaugcugugcggcacgc

SEQ ID NO: 376448 - RNA, 20 nt, Molluscum contagiosum virus
gacgaccgucacgacucuca

SEQ ID NO: 376449 - RNA, 13 nt, Molluscum contagiosum virus
gacgacgagcacu

SEQ ID NO: 376450 - RNA, 14 nt, Molluscum contagiosum virus
gacgacgagcacua

SEQ ID NO: 376451 - RNA, 15 nt, Molluscum contagiosum virus
gacgagcgcuaccug

SEQ ID NO: 376452 - RNA, 16 nt, Molluscum contagiosum virus
gacgagcgcuaccuga

SEQ ID NO: 376453 - RNA, 18 nt, Molluscum contagiosum virus
gacgagcgcuaccugaug

SEQ ID NO: 376454 - RNA, 15 nt, Molluscum contagiosum virus
gacgagcugcuaaca

SEQ ID NO: 376455 - RNA, 21 nt, Molluscum contagiosum virus
gacgauuacaucgaaaccauc

SEQ ID NO: 376456 - RNA, 24 nt, Molluscum contagiosum virus
gacgcacagucuccacgcgugcgc

SEQ ID NO: 376457 - RNA, 20 nt, Molluscum contagiosum virus
gacgccaagcgucgcgacgc

SEQ ID NO: 376458 - RNA, 22 nt, Molluscum contagiosum virus
gacgccagcgcgcccaccagca

SEQ ID NO: 376459 - RNA, 23 nt, Molluscum contagiosum virus
gacgccccggcgcgaaacaagcg

SEQ ID NO: 376460 - RNA, 20 nt, Molluscum contagiosum virus
gacgcccggcaccgcggcgg

SEQ ID NO: 376461 - RNA, 19 nt, Molluscum contagiosum virus
gacgccgucgucaacaaca

SEQ ID NO: 376462 - RNA, 15 nt, Molluscum contagiosum virus
gacgcgagacugugc

SEQ ID NO: 376463 - RNA, 17 nt, Molluscum contagiosum virus
gacgcgccucgagcagg

SEQ ID NO: 376464 - RNA, 17 nt, Molluscum contagiosum virus
gacgcgcggcggcgcga

SEQ ID NO: 376465 - RNA, 18 nt, Molluscum contagiosum virus
gacgcgcguucuuugugc

SEQ ID NO: 376466 - RNA, 13 nt, Molluscum contagiosum virus
gacgcggucgcgc

SEQ ID NO: 376467 - RNA, 16 nt, Molluscum contagiosum virus
gacgcuagcugugcgc

SEQ ID NO: 376468 - RNA, 16 nt, Molluscum contagiosum virus
gacgcuccauucucuc

SEQ ID NO: 376469 - RNA, 16 nt, Molluscum contagiosum virus
gacgcugcggcggcgc

SEQ ID NO: 376470 - RNA, 14 nt, Molluscum contagiosum virus
gacgcuggcggcgc

SEQ ID NO: 376471 - RNA, 15 nt, Molluscum contagiosum virus
gacgcuggugaucac

SEQ ID NO: 376472 - RNA, 23 nt, Molluscum contagiosum virus
gacgcuggugaucacgcacgaag

SEQ ID NO: 376473 - RNA, 18 nt, Molluscum contagiosum virus
gacggagacagugacaga

SEQ ID NO: 376474 - RNA, 19 nt, Molluscum contagiosum virus
gacggagagcgcgcggcgc

SEQ ID NO: 376475 - RNA, 19 nt, Molluscum contagiosum virus
gacggagauggacacagca

SEQ ID NO: 376476 - RNA, 21 nt, Molluscum contagiosum virus
gacggaggucuacaacgagcu

SEQ ID NO: 376477 - RNA, 13 nt, Molluscum contagiosum virus
gacggcacgcuga

SEQ ID NO: 376478 - RNA, 20 nt, Molluscum contagiosum virus
gacggcacgggcacgcgcgc

SEQ ID NO: 376479 - RNA, 16 nt, Molluscum contagiosum virus
gacggccggcgggcgc

SEQ ID NO: 376480 - RNA, 23 nt, Molluscum contagiosum virus
gacggcgccucgagcgcgcugga

SEQ ID NO: 376481 - RNA, 15 nt, Molluscum contagiosum virus
gacggcgcgcagcgc

SEQ ID NO: 376482 - RNA, 12 nt, Molluscum contagiosum virus
gacggcgcgcgc

SEQ ID NO: 376483 - RNA, 15 nt, Molluscum contagiosum virus
gacggucacgcaagc

SEQ ID NO: 376484 - RNA, 22 nt, Molluscum contagiosum virus
gacguacgagcaggcgcagcgc

SEQ ID NO: 376485 - RNA, 16 nt, Molluscum contagiosum virus
gagcaguuccggucuc

SEQ ID NO: 376486 - RNA, 24 nt, Molluscum contagiosum virus
gagcaucuucuuguuguugugaca

SEQ ID NO: 376487 - RNA, 21 nt, Molluscum contagiosum virus
gagcauguccgacuccaagga

SEQ ID NO: 376488 - RNA, 16 nt, Molluscum contagiosum virus
gagcauuagcagcgag

SEQ ID NO: 376489 - RNA, 14 nt, Molluscum contagiosum virus
cgccuccaagaaga

SEQ ID NO: 376490 - RNA, 23 nt, Molluscum contagiosum virus
cgccuccguguccgacgccgcca

SEQ ID NO: 376491 - RNA, 20 nt, Molluscum contagiosum virus
cgccucggacuucgacgcgc

SEQ ID NO: 376492 - RNA, 24 nt, Molluscum contagiosum virus
cgccucgggaaaacgcgcggcagc

SEQ ID NO: 376493 - RNA, 14 nt, Molluscum contagiosum virus
cgccucugcgagau

SEQ ID NO: 376494 - RNA, 14 nt, Molluscum contagiosum virus
cgccugaaccuggg

SEQ ID NO: 376495 - RNA, 18 nt, Molluscum contagiosum virus
cgccugacucccgucagc

SEQ ID NO: 376496 - RNA, 13 nt, Molluscum contagiosum virus
cgccugcacuucg

SEQ ID NO: 376497 - RNA, 22 nt, Molluscum contagiosum virus
cgccugccgcgagcacuggcug

SEQ ID NO: 376498 - RNA, 14 nt, Molluscum contagiosum virus
cgccugcgggagau

SEQ ID NO: 376499 - RNA, 15 nt, Molluscum contagiosum virus
cgccugcucucgcgc

SEQ ID NO: 376500 - RNA, 21 nt, Molluscum contagiosum virus
cgccugcucucgcgcgccagc

SEQ ID NO: 376501 - RNA, 15 nt, Molluscum contagiosum virus
cgccuggugcugcgc

SEQ ID NO: 376502 - RNA, 11 nt, Molluscum contagiosum virus
cgccugugcug

SEQ ID NO: 376503 - RNA, 18 nt, Molluscum contagiosum virus
cgccuugcagcgcagcag

SEQ ID NO: 376504 - RNA, 15 nt, Molluscum contagiosum virus
cgccuuguucacaag

SEQ ID NO: 376505 - RNA, 18 nt, Molluscum contagiosum virus
cgccuuuccggccuguaa

SEQ ID NO: 376506 - RNA, 20 nt, Molluscum contagiosum virus
cgcgaaagaggaaagcgcac

SEQ ID NO: 376507 - RNA, 20 nt, Molluscum contagiosum virus
cgcgaaagcgucgugcucca

SEQ ID NO: 376508 - RNA, 22 nt, Molluscum contagiosum virus
cgcgaacgagagacacgcacac

SEQ ID NO: 376509 - RNA, 19 nt, Molluscum contagiosum virus
cgcgaacgugcgaacacgg

SEQ ID NO: 376510 - RNA, 16 nt, Molluscum contagiosum virus
cgcgaccaguacauca

SEQ ID NO: 376511 - RNA, 15 nt, Molluscum contagiosum virus
cgcgaccggcgugcc

SEQ ID NO: 376512 - RNA, 21 nt, Molluscum contagiosum virus
cgcgacgacggcacgcugagc

SEQ ID NO: 376513 - RNA, 17 nt, Molluscum contagiosum virus
cgcgacgcgcguggagc

SEQ ID NO: 376514 - RNA, 13 nt, Molluscum contagiosum virus
cgcgagaugcgcg

SEQ ID NO: 376515 - RNA, 22 nt, Molluscum contagiosum virus
cgcgagcaaagacguguguugu

SEQ ID NO: 376516 - RNA, 11 nt, Molluscum contagiosum virus
cgcgagcugcu

SEQ ID NO: 376517 - RNA, 20 nt, Molluscum contagiosum virus
cgcgaggcaugucgcggugc

SEQ ID NO: 376518 - RNA, 13 nt, Molluscum contagiosum virus
cgcgagugccagc

SEQ ID NO: 376519 - RNA, 18 nt, Molluscum contagiosum virus
cgcgauguuuugaacaga

SEQ ID NO: 376520 - RNA, 23 nt, Molluscum contagiosum virus
cgcgauuuacuucgacgcggugc

SEQ ID NO: 376521 - RNA, 20 nt, Molluscum contagiosum virus
cgcgcaaacaagcagucuca

SEQ ID NO: 376522 - RNA, 17 nt, Molluscum contagiosum virus
cgcgcaaggccgcgccc

SEQ ID NO: 376523 - RNA, 18 nt, Molluscum contagiosum virus
cgcgcaaguccagcgcgc

SEQ ID NO: 376524 - RNA, 16 nt, Molluscum contagiosum virus
cgcgcaagucgcgcgc

SEQ ID NO: 376525 - RNA, 18 nt, Molluscum contagiosum virus
cgcgcaagugugcgcauc

SEQ ID NO: 376526 - RNA, 13 nt, Molluscum contagiosum virus
cgcgcacacgcug

SEQ ID NO: 376527 - RNA, 17 nt, Molluscum contagiosum virus
cgcgcacgagcgcgggc

SEQ ID NO: 376528 - RNA, 14 nt, Molluscum contagiosum virus
cgcgcacgcggcgc

SEQ ID NO: 376529 - RNA, 22 nt, Molluscum contagiosum virus
cgcgcacguaccuucgcggagc

SEQ ID NO: 376530 - RNA, 20 nt, Molluscum contagiosum virus
cgcgcacugccacgcggagc

SEQ ID NO: 376531 - RNA, 14 nt, Molluscum contagiosum virus
cgcgcacugcucgc

SEQ ID NO: 376532 - RNA, 14 nt, Molluscum contagiosum virus
cgcgcagaagccaa

SEQ ID NO: 376533 - RNA, 15 nt, Molluscum contagiosum virus
cgcgcagcgcgucuu

SEQ ID NO: 376534 - RNA, 24 nt, Molluscum contagiosum virus
cgcgcagguugagcgcgcggaugc

SEQ ID NO: 376535 - RNA, 22 nt, Molluscum contagiosum virus
cgcgcaguucgagcugcugcgc

SEQ ID NO: 376536 - RNA, 14 nt, Molluscum contagiosum virus
cgcgcaucgcgggc

SEQ ID NO: 376537 - RNA, 14 nt, Molluscum contagiosum virus
cgcgcaucugccgc

SEQ ID NO: 376538 - RNA, 22 nt, Molluscum contagiosum virus
cgcgccaacacguuuucuuuca

SEQ ID NO: 376539 - RNA, 17 nt, Molluscum contagiosum virus
cgcgccaagaacaagcu

SEQ ID NO: 376540 - RNA, 13 nt, Molluscum contagiosum virus
cgcgccagcagcg

SEQ ID NO: 376541 - RNA, 15 nt, Molluscum contagiosum virus
cgcgcccaccagcag

SEQ ID NO: 376542 - RNA, 19 nt, Molluscum contagiosum virus
cgcgcccccguccgugcca

SEQ ID NO: 376543 - RNA, 12 nt, Molluscum contagiosum virus
cgcgcccucgcg

SEQ ID NO: 376544 - RNA, 13 nt, Molluscum contagiosum virus
cgcgcccugcacg

SEQ ID NO: 376545 - RNA, 14 nt, Molluscum contagiosum virus
cgcgcccugcgcgc

SEQ ID NO: 376546 - RNA, 16 nt, Molluscum contagiosum virus
cgcgccgcacgugcug

SEQ ID NO: 376547 - RNA, 15 nt, Molluscum contagiosum virus
cgcgccgcgcugcug

SEQ ID NO: 376548 - RNA, 12 nt, Molluscum contagiosum virus
cgcgccgcgggc

SEQ ID NO: 376549 - RNA, 13 nt, Molluscum contagiosum virus
cgcgccgcugccc

SEQ ID NO: 376550 - RNA, 20 nt, Molluscum contagiosum virus
cgcgccgcugucacgcgagc

SEQ ID NO: 376551 - RNA, 15 nt, Molluscum contagiosum virus
cgcgccggcgcggcg

SEQ ID NO: 376552 - RNA, 20 nt, Molluscum contagiosum virus
cgcgccggcguucgcggagc

SEQ ID NO: 376553 - RNA, 13 nt, Molluscum contagiosum virus
cgcgccgggcgcc

SEQ ID NO: 376554 - RNA, 15 nt, Molluscum contagiosum virus
cgcgccuaccgcgcg

SEQ ID NO: 376555 - RNA, 15 nt, Molluscum contagiosum virus
cgcgccuuccgcgcg

SEQ ID NO: 376556 - RNA, 18 nt, Molluscum contagiosum virus
cgcgccuuccgcgcgggc

SEQ ID NO: 376557 - RNA, 20 nt, Molluscum contagiosum virus
cgcgcgagaugcgcggacag

SEQ ID NO: 376558 - RNA, 13 nt, Molluscum contagiosum virus
cgcgcgagcugcu

SEQ ID NO: 376559 - RNA, 15 nt, Molluscum contagiosum virus
cgcgcgcagcaccgc

SEQ ID NO: 376560 - RNA, 19 nt, Molluscum contagiosum virus
cgcgcgccgcagaacacgg

SEQ ID NO: 376561 - RNA, 13 nt, Molluscum contagiosum virus
cgcgcgccgcgcg

SEQ ID NO: 376562 - RNA, 12 nt, Molluscum contagiosum virus
cgcgcgccgcgg

SEQ ID NO: 376563 - RNA, 19 nt, Molluscum contagiosum virus
cgcgcgccucgccaaagag

SEQ ID NO: 376564 - RNA, 13 nt, Molluscum contagiosum virus
cgcgcgccugcug

SEQ ID NO: 376565 - RNA, 17 nt, Molluscum contagiosum virus
cgcgcgcucgcucgcgc

SEQ ID NO: 376566 - RNA, 13 nt, Molluscum contagiosum virus
cgcgcgcugcgcg

SEQ ID NO: 376567 - RNA, 18 nt, Molluscum contagiosum virus
cgcgcgcugcgcgcggac

SEQ ID NO: 376568 - RNA, 19 nt, Molluscum contagiosum virus
cgcgcggcagacgccagcg

SEQ ID NO: 376569 - RNA, 17 nt, Molluscum contagiosum virus
cgcgcggcggagaugac

SEQ ID NO: 376570 - RNA, 21 nt, Molluscum contagiosum virus
cgcgcggcuuggcgcccuucc

SEQ ID NO: 376571 - RNA, 13 nt, Molluscum contagiosum virus
cgcgcgugcaguu

SEQ ID NO: 376572 - RNA, 13 nt, Molluscum contagiosum virus
cgcgcgugcugcu

SEQ ID NO: 376573 - RNA, 22 nt, Molluscum contagiosum virus
cgcgcuacugcgcgcacugcuc

SEQ ID NO: 376574 - RNA, 17 nt, Molluscum contagiosum virus
cgcgcucacccugcacg

SEQ ID NO: 376575 - RNA, 12 nt, Molluscum contagiosum virus
cgcgcucaggac

SEQ ID NO: 376576 - RNA, 13 nt, Molluscum contagiosum virus
cgcgcucgcgcag

SEQ ID NO: 376577 - RNA, 17 nt, Molluscum contagiosum virus
cgcgcucgcgcucggga

SEQ ID NO: 376578 - RNA, 20 nt, Molluscum contagiosum virus
cgcgcucgcgugccgcggac

SEQ ID NO: 376579 - RNA, 16 nt, Molluscum contagiosum virus
cgcgcugagcgcggag

SEQ ID NO: 376580 - RNA, 15 nt, Molluscum contagiosum virus
cgcgcugaugcuagc

SEQ ID NO: 376581 - RNA, 18 nt, Molluscum contagiosum virus
cgcgcugcacaccgagcg

SEQ ID NO: 376582 - RNA, 21 nt, Molluscum contagiosum virus
cgcgcugcacgccgccagcga

SEQ ID NO: 376583 - RNA, 24 nt, Molluscum contagiosum virus
cgcgcuuagcacacgcgcgcgcag

SEQ ID NO: 376584 - RNA, 16 nt, Molluscum contagiosum virus
cgcgcuuugcgcggcg

SEQ ID NO: 376585 - RNA, 21 nt, Molluscum contagiosum virus
cgcggacagagcccgcggcgc

SEQ ID NO: 376586 - RNA, 17 nt, Molluscum contagiosum virus
cgcggacggcgcgcagc

SEQ ID NO: 376587 - RNA, 15 nt, Molluscum contagiosum virus
cgcggagcugcgcgc

SEQ ID NO: 376588 - RNA, 17 nt, Molluscum contagiosum virus
cgcggaucugcgcacac

SEQ ID NO: 376589 - RNA, 16 nt, Molluscum contagiosum virus
cgcggcacugggugcc

SEQ ID NO: 376590 - RNA, 23 nt, Molluscum contagiosum virus
cgcggccaugcuccugaucugcg

SEQ ID NO: 376591 - RNA, 17 nt, Molluscum contagiosum virus
cgcggccguggcacuga

SEQ ID NO: 376592 - RNA, 16 nt, Molluscum contagiosum virus
cggagcuggcguugcc

SEQ ID NO: 376593 - RNA, 22 nt, Molluscum contagiosum virus
cggagcuuaauuuugcacauua

SEQ ID NO: 376594 - RNA, 14 nt, Molluscum contagiosum virus
cggaggcgcuaccu

SEQ ID NO: 376595 - RNA, 15 nt, Molluscum contagiosum virus
cggaggcugcgccua

SEQ ID NO: 376596 - RNA, 20 nt, Molluscum contagiosum virus
cggagucggagaaagacaaa

SEQ ID NO: 376597 - RNA, 17 nt, Molluscum contagiosum virus
cggaucugcgcacacgu

SEQ ID NO: 376598 - RNA, 23 nt, Molluscum contagiosum virus
cggcaacgcugccgcuggcgcua

SEQ ID NO: 376599 - RNA, 22 nt, Molluscum contagiosum virus
cggcaagcccggaagcuugcuc

SEQ ID NO: 376600 - RNA, 17 nt, Molluscum contagiosum virus
cggcaagcuuugcuuca

SEQ ID NO: 376601 - RNA, 13 nt, Molluscum contagiosum virus
cggcacccgccag

SEQ ID NO: 376602 - RNA, 18 nt, Molluscum contagiosum virus
cggcacccgccgcggugc

SEQ ID NO: 376603 - RNA, 16 nt, Molluscum contagiosum virus
cggcacccgugcgcgc

SEQ ID NO: 376604 - RNA, 12 nt, Molluscum contagiosum virus
cggcacgcgagc

SEQ ID NO: 376605 - RNA, 17 nt, Molluscum contagiosum virus
cggcacgcugcguuucc

SEQ ID NO: 376606 - RNA, 13 nt, Molluscum contagiosum virus
cggcacugcgcgc

SEQ ID NO: 376607 - RNA, 12 nt, Molluscum contagiosum virus
cggcacugcuag

SEQ ID NO: 376608 - RNA, 13 nt, Molluscum contagiosum virus
cggcacugcuagc

SEQ ID NO: 376609 - RNA, 17 nt, Molluscum contagiosum virus
cggcagaccccuugcua

SEQ ID NO: 376610 - RNA, 13 nt, Molluscum contagiosum virus
cggcagcaugcuc

SEQ ID NO: 376611 - RNA, 15 nt, Molluscum contagiosum virus
cggcagcaugcucac

SEQ ID NO: 376612 - RNA, 16 nt, Molluscum contagiosum virus
cggcagcgccgcgcgc

SEQ ID NO: 376613 - RNA, 17 nt, Molluscum contagiosum virus
cggcagcgucgcggagc

SEQ ID NO: 376614 - RNA, 17 nt, Molluscum contagiosum virus
cggcagcuaccgcgcgc

SEQ ID NO: 376615 - RNA, 19 nt, Molluscum contagiosum virus
cggcagcuggagcugccgc

SEQ ID NO: 376616 - RNA, 20 nt, Molluscum contagiosum virus
cggcaggcgcugcgcggcgc

SEQ ID NO: 376617 - RNA, 23 nt, Molluscum contagiosum virus
cggcagguuugcacccgcgcagc

SEQ ID NO: 376618 - RNA, 15 nt, Molluscum contagiosum virus
cggcaucgaguccau

SEQ ID NO: 376619 - RNA, 14 nt, Molluscum contagiosum virus
cggcaugcgcgcgc

SEQ ID NO: 376620 - RNA, 17 nt, Molluscum contagiosum virus
cggcaugcgcgcgcagc

SEQ ID NO: 376621 - RNA, 16 nt, Molluscum contagiosum virus
cggccagcgugcagac

SEQ ID NO: 376622 - RNA, 16 nt, Molluscum contagiosum virus
cggccaugcuccugau

SEQ ID NO: 376623 - RNA, 16 nt, Molluscum contagiosum virus
cggcccgcgggcugca

SEQ ID NO: 376624 - RNA, 18 nt, Molluscum contagiosum virus
cggccgcgcgcgacuuug

SEQ ID NO: 376625 - RNA, 16 nt, Molluscum contagiosum virus
cggccuguaaauggac

SEQ ID NO: 376626 - RNA, 14 nt, Molluscum contagiosum virus
cggccuguucuucc

SEQ ID NO: 376627 - RNA, 15 nt, Molluscum contagiosum virus
cggccuguucuucca

SEQ ID NO: 376628 - RNA, 12 nt, Molluscum contagiosum virus
cggcgagcucuu

SEQ ID NO: 376629 - RNA, 18 nt, Molluscum contagiosum virus
cggcgcaaggacaccgcg

SEQ ID NO: 376630 - RNA, 12 nt, Molluscum contagiosum virus
cggcgcacaauc

SEQ ID NO: 376631 - RNA, 17 nt, Molluscum contagiosum virus
cggcgcccaggaacagu

SEQ ID NO: 376632 - RNA, 19 nt, Molluscum contagiosum virus
cggcgcgacggcgacgcga

SEQ ID NO: 376633 - RNA, 14 nt, Molluscum contagiosum virus
cggcgcgcgcggcg

SEQ ID NO: 376634 - RNA, 14 nt, Molluscum contagiosum virus
cggcgcgugcugag

SEQ ID NO: 376635 - RNA, 15 nt, Molluscum contagiosum virus
cggcgcuaugccgcg

SEQ ID NO: 376636 - RNA, 16 nt, Molluscum contagiosum virus
cggcgcucaacaucca

SEQ ID NO: 376637 - RNA, 14 nt, Molluscum contagiosum virus
cggcgcucacugcg

SEQ ID NO: 376638 - RNA, 22 nt, Molluscum contagiosum virus
cggcgcucgccccuucccggcg

SEQ ID NO: 376639 - RNA, 15 nt, Molluscum contagiosum virus
cggcggaaguggugc

SEQ ID NO: 376640 - RNA, 14 nt, Molluscum contagiosum virus
cggcggcaugcgcg

SEQ ID NO: 376641 - RNA, 16 nt, Molluscum contagiosum virus
cggcggugcccgccaa

SEQ ID NO: 376642 - RNA, 15 nt, Molluscum contagiosum virus
cggcguccgcggcac

SEQ ID NO: 376643 - RNA, 22 nt, Molluscum contagiosum virus
cggcgugagcucgucgcggaag

SEQ ID NO: 376644 - RNA, 16 nt, Molluscum contagiosum virus
cggcguguuccggcag

SEQ ID NO: 376645 - RNA, 19 nt, Molluscum contagiosum virus
cggcguguuuugugucgcg

SEQ ID NO: 376646 - RNA, 15 nt, Molluscum contagiosum virus
cggcguucccgcuca

SEQ ID NO: 376647 - RNA, 17 nt, Molluscum contagiosum virus
cggcucgcgcacuacuc

SEQ ID NO: 376648 - RNA, 16 nt, Molluscum contagiosum virus
cggcugugcccgcggc

SEQ ID NO: 376649 - RNA, 17 nt, Molluscum contagiosum virus
cggcugugcccgcggcg

SEQ ID NO: 376650 - RNA, 15 nt, Molluscum contagiosum virus
cggcuuacacacgca

SEQ ID NO: 376651 - RNA, 16 nt, Molluscum contagiosum virus
cggcuucgagaaugac

SEQ ID NO: 376652 - RNA, 22 nt, Molluscum contagiosum virus
cggcuugccgcucggcacaaaa

SEQ ID NO: 376653 - RNA, 17 nt, Molluscum contagiosum virus
cgggaaaacgcgcggca

SEQ ID NO: 376654 - RNA, 12 nt, Molluscum contagiosum virus
cgggaagcacag

SEQ ID NO: 376655 - RNA, 17 nt, Molluscum contagiosum virus
cgggaagcacaguccag

SEQ ID NO: 376656 - RNA, 17 nt, Molluscum contagiosum virus
cgggaaggaacaaugcu

SEQ ID NO: 376657 - RNA, 17 nt, Molluscum contagiosum virus
cgggacgacgaagaccu

SEQ ID NO: 376658 - RNA, 20 nt, Molluscum contagiosum virus
cgggagcggccuccggagaa

SEQ ID NO: 376659 - RNA, 19 nt, Molluscum contagiosum virus
cgggaggcucucgagcacu

SEQ ID NO: 376660 - RNA, 21 nt, Molluscum contagiosum virus
cgggaggcucucgagcacuuc

SEQ ID NO: 376661 - RNA, 15 nt, Molluscum contagiosum virus
cgggcacgagcacgu

SEQ ID NO: 376662 - RNA, 16 nt, Molluscum contagiosum virus
cgggcacuucucgcgc

SEQ ID NO: 376663 - RNA, 15 nt, Molluscum contagiosum virus
cgggcaugcacagcu

SEQ ID NO: 376664 - RNA, 17 nt, Molluscum contagiosum virus
cgggccgccgcccgcga

SEQ ID NO: 376665 - RNA, 13 nt, Molluscum contagiosum virus
cgggccuuugccg

SEQ ID NO: 376666 - RNA, 12 nt, Molluscum contagiosum virus
cgggcgccagcu

SEQ ID NO: 376667 - RNA, 18 nt, Molluscum contagiosum virus
cgggcgccgcgcaauagc

SEQ ID NO: 376668 - RNA, 14 nt, Molluscum contagiosum virus
cgggcgcuauugcg

SEQ ID NO: 376669 - RNA, 20 nt, Molluscum contagiosum virus
cgggcguguccgcgggcgcg

SEQ ID NO: 376670 - RNA, 21 nt, Molluscum contagiosum virus
cgggcucgaggugugccuguu

SEQ ID NO: 376671 - RNA, 16 nt, Molluscum contagiosum virus
cgggcucgugcuggag

SEQ ID NO: 376672 - RNA, 17 nt, Molluscum contagiosum virus
cgggcucgugcuggagc

SEQ ID NO: 376673 - RNA, 19 nt, Molluscum contagiosum virus
cgggcucuuccaccggcag

SEQ ID NO: 376674 - RNA, 14 nt, Molluscum contagiosum virus
cgggcugcgcggcg

SEQ ID NO: 376675 - RNA, 18 nt, Molluscum contagiosum virus
cgggcugucgcccggcag

SEQ ID NO: 376676 - RNA, 14 nt, Molluscum contagiosum virus
cggggcccaugcuc

SEQ ID NO: 376677 - RNA, 16 nt, Molluscum contagiosum virus
cggggcccaugcucac

SEQ ID NO: 376678 - RNA, 21 nt, Molluscum contagiosum virus
cgggucgaucccgacacugcg

SEQ ID NO: 376679 - RNA, 16 nt, Molluscum contagiosum virus
cgggucucggggcucc

SEQ ID NO: 376680 - RNA, 15 nt, Molluscum contagiosum virus
cgggugccgccgugg

SEQ ID NO: 376681 - RNA, 19 nt, Molluscum contagiosum virus
cgggugcgagucucuguaa

SEQ ID NO: 376682 - RNA, 17 nt, Molluscum contagiosum virus
cggguguugaccaaagg

SEQ ID NO: 376683 - RNA, 15 nt, Molluscum contagiosum virus
cgguaaacucuugca

SEQ ID NO: 376684 - RNA, 13 nt, Molluscum contagiosum virus
cgguccuugcucc

SEQ ID NO: 376685 - RNA, 17 nt, Molluscum contagiosum virus
cggugagccguuccaca

SEQ ID NO: 376686 - RNA, 13 nt, Molluscum contagiosum virus
cggugagcgccgu

SEQ ID NO: 376687 - RNA, 16 nt, Molluscum contagiosum virus
cggugccguccccgcg

SEQ ID NO: 376688 - RNA, 22 nt, Molluscum contagiosum virus
cggugcucgccccuccccggcg

SEQ ID NO: 376689 - RNA, 15 nt, Molluscum contagiosum virus
cggugcugcugccaa

SEQ ID NO: 376690 - RNA, 19 nt, Molluscum contagiosum virus
cgguguguguucucaaaua

SEQ ID NO: 376691 - RNA, 23 nt, Molluscum contagiosum virus
cgguucacgcccgcaaugcagug

SEQ ID NO: 376692 - RNA, 18 nt, Molluscum contagiosum virus
cguaagaccauggggcua

SEQ ID NO: 376693 - RNA, 13 nt, Molluscum contagiosum virus
cguaauccauguc

SEQ ID NO: 376694 - RNA, 21 nt, Molluscum contagiosum virus
cguaauccaugucgagcccug

SEQ ID NO: 376695 - RNA, 16 nt, Molluscum contagiosum virus
cguaccaagccgugac

SEQ ID NO: 376696 - RNA, 15 nt, Molluscum contagiosum virus
cuacaucgacauggu

SEQ ID NO: 376697 - RNA, 15 nt, Molluscum contagiosum virus
cuacauggacgugcu

SEQ ID NO: 376698 - RNA, 23 nt, Molluscum contagiosum virus
cuaccaagaacagagaaaggcac

SEQ ID NO: 376699 - RNA, 22 nt, Molluscum contagiosum virus
cuaccgccugcgggagauccug

SEQ ID NO: 376700 - RNA, 14 nt, Molluscum contagiosum virus
cuaccgucgccggu

SEQ ID NO: 376701 - RNA, 19 nt, Molluscum contagiosum virus
cuaccugcgcaagcucagc

SEQ ID NO: 376702 - RNA, 18 nt, Molluscum contagiosum virus
cuaccuggcggcgcugga

SEQ ID NO: 376703 - RNA, 16 nt, Molluscum contagiosum virus
cuaccuggggcugcuu

SEQ ID NO: 376704 - RNA, 21 nt, Molluscum contagiosum virus
cuacgaggccuacgugcugcg

SEQ ID NO: 376705 - RNA, 13 nt, Molluscum contagiosum virus
cuacgcagcgcgc

SEQ ID NO: 376706 - RNA, 21 nt, Molluscum contagiosum virus
cuacgccgcgcaccuggagua

SEQ ID NO: 376707 - RNA, 15 nt, Molluscum contagiosum virus
cuacgcgcugcuaga

SEQ ID NO: 376708 - RNA, 23 nt, Molluscum contagiosum virus
cuacgucaagcaggcaugcaagg

SEQ ID NO: 376709 - RNA, 12 nt, Molluscum contagiosum virus
cuacgugcugcg

SEQ ID NO: 376710 - RNA, 12 nt, Molluscum contagiosum virus
cuacguggugcg

SEQ ID NO: 376711 - RNA, 14 nt, Molluscum contagiosum virus
cuacucgucuugcg

SEQ ID NO: 376712 - RNA, 15 nt, Molluscum contagiosum virus
cuacugcgacaucca

SEQ ID NO: 376713 - RNA, 20 nt, Molluscum contagiosum virus
cuacugcgacggggagcaug

SEQ ID NO: 376714 - RNA, 18 nt, Molluscum contagiosum virus
cuacuggaggagugucgc

SEQ ID NO: 376715 - RNA, 11 nt, Molluscum contagiosum virus
cuagacacgag

SEQ ID NO: 376716 - RNA, 13 nt, Molluscum contagiosum virus
cuagacacgagcg

SEQ ID NO: 376717 - RNA, 20 nt, Molluscum contagiosum virus
cuagacuucuugguggacag

SEQ ID NO: 376718 - RNA, 18 nt, Molluscum contagiosum virus
cuagagcgcggcgcacaa

SEQ ID NO: 376719 - RNA, 21 nt, Molluscum contagiosum virus
cuagagcuggcaccgggcgcc

SEQ ID NO: 376720 - RNA, 21 nt, Molluscum contagiosum virus
cuagcagacaacugcgucuca

SEQ ID NO: 376721 - RNA, 14 nt, Molluscum contagiosum virus
cuagcucugcgcgc

SEQ ID NO: 376722 - RNA, 15 nt, Molluscum contagiosum virus
cuagcugcgugcgua

SEQ ID NO: 376723 - RNA, 23 nt, Molluscum contagiosum virus
cuagcugugcgcuacguggcgcg

SEQ ID NO: 376724 - RNA, 13 nt, Molluscum contagiosum virus
cuaggauccugcu

SEQ ID NO: 376725 - RNA, 17 nt, Molluscum contagiosum virus
cuaguagcgguguugcu

SEQ ID NO: 376726 - RNA, 16 nt, Molluscum contagiosum virus
cuagugcacaccggcg

SEQ ID NO: 376727 - RNA, 20 nt, Molluscum contagiosum virus
cuaucacgcgucgacuauca

SEQ ID NO: 376728 - RNA, 22 nt, Molluscum contagiosum virus
cuaucaggcgauaggacaugac

SEQ ID NO: 376729 - RNA, 15 nt, Molluscum contagiosum virus
cuaucgcaaucugac

SEQ ID NO: 376730 - RNA, 14 nt, Molluscum contagiosum virus
cuauucaguguuuu

SEQ ID NO: 376731 - RNA, 23 nt, Molluscum contagiosum virus
cuauucucguggcguugcugcug

SEQ ID NO: 376732 - RNA, 19 nt, Molluscum contagiosum virus
cucaaaaugaaagaauauc

SEQ ID NO: 376733 - RNA, 12 nt, Molluscum contagiosum virus
cucaacauccaa

SEQ ID NO: 376734 - RNA, 20 nt, Molluscum contagiosum virus
cucaacgagcgcaucagcaa

SEQ ID NO: 376735 - RNA, 20 nt, Molluscum contagiosum virus
cucaagaacaccaagagcau

SEQ ID NO: 376736 - RNA, 17 nt, Molluscum contagiosum virus
cucaagaagcccaagga

SEQ ID NO: 376737 - RNA, 15 nt, Molluscum contagiosum virus
cucaagacaagucac

SEQ ID NO: 376738 - RNA, 20 nt, Molluscum contagiosum virus
cucaagaucguuuugcacuu

SEQ ID NO: 376739 - RNA, 13 nt, Molluscum contagiosum virus
cucaagcuggcaa

SEQ ID NO: 376740 - RNA, 17 nt, Molluscum contagiosum virus
cucaagcuggcaacgca

SEQ ID NO: 376741 - RNA, 16 nt, Molluscum contagiosum virus
cucaaggacuaccagc

SEQ ID NO: 376742 - RNA, 12 nt, Molluscum contagiosum virus
cucacagguagu

SEQ ID NO: 376743 - RNA, 15 nt, Molluscum contagiosum virus
cucacaugugcugcc

SEQ ID NO: 376744 - RNA, 16 nt, Molluscum contagiosum virus
cucacccugcacgcua

SEQ ID NO: 376745 - RNA, 16 nt, Molluscum contagiosum virus
cucaccgcgcacaucu

SEQ ID NO: 376746 - RNA, 14 nt, Molluscum contagiosum virus
cucaccgcgcagaa

SEQ ID NO: 376747 - RNA, 14 nt, Molluscum contagiosum virus
cucacgcgcuaccg

SEQ ID NO: 376748 - RNA, 22 nt, Molluscum contagiosum virus
cucacgcgcuaccgcaagcuca

SEQ ID NO: 376749 - RNA, 18 nt, Molluscum contagiosum virus
cucacgcguccacaaaga

SEQ ID NO: 376750 - RNA, 17 nt, Molluscum contagiosum virus
cucacgcuucguggcca

SEQ ID NO: 376751 - RNA, 19 nt, Molluscum contagiosum virus
cucacggccuucgcguucc

SEQ ID NO: 376752 - RNA, 16 nt, Molluscum contagiosum virus
cucacggcgagcgcgc

SEQ ID NO: 376753 - RNA, 23 nt, Molluscum contagiosum virus
cucacugcgaucgcagcagugcc

SEQ ID NO: 376754 - RNA, 16 nt, Molluscum contagiosum virus
cucagcaggcuguguu

SEQ ID NO: 376755 - RNA, 22 nt, Molluscum contagiosum virus
cucagccgagcgccgccagcuc

SEQ ID NO: 376756 - RNA, 16 nt, Molluscum contagiosum virus
cucagcggcacugcgc

SEQ ID NO: 376757 - RNA, 14 nt, Molluscum contagiosum virus
cucagcguggagca

SEQ ID NO: 376758 - RNA, 23 nt, Molluscum contagiosum virus
cucagugugccguucacgcacac

SEQ ID NO: 376759 - RNA, 13 nt, Molluscum contagiosum virus
cucaucaagaaga

SEQ ID NO: 376760 - RNA, 17 nt, Molluscum contagiosum virus
cucauccaccugcgcaa

SEQ ID NO: 376761 - RNA, 13 nt, Molluscum contagiosum virus
cucaucgagcaug

SEQ ID NO: 376762 - RNA, 17 nt, Molluscum contagiosum virus
cucaucggcgagcucuu

SEQ ID NO: 376763 - RNA, 17 nt, Molluscum contagiosum virus
cucauggacaugcucga

SEQ ID NO: 376764 - RNA, 14 nt, Molluscum contagiosum virus
cuccaacaagcuca

SEQ ID NO: 376765 - RNA, 15 nt, Molluscum contagiosum virus
cuccaacaagcucau

SEQ ID NO: 376766 - RNA, 14 nt, Molluscum contagiosum virus
cuccaacuagacaa

SEQ ID NO: 376767 - RNA, 22 nt, Molluscum contagiosum virus
cuccaagaagaggccagcacaa

SEQ ID NO: 376768 - RNA, 23 nt, Molluscum contagiosum virus
cuccaagaagaggccagcacaag

SEQ ID NO: 376769 - RNA, 22 nt, Molluscum contagiosum virus
cuccaagaagaggccggcacaa

SEQ ID NO: 376770 - RNA, 23 nt, Molluscum contagiosum virus
cuccaagaagaggccggcacaag

SEQ ID NO: 376771 - RNA, 13 nt, Molluscum contagiosum virus
cuccacaaagacg

SEQ ID NO: 376772 - RNA, 15 nt, Molluscum contagiosum virus
cuccacgcgcagcuu

SEQ ID NO: 376773 - RNA, 18 nt, Molluscum contagiosum virus
cuccacgcgugcgcgcca

SEQ ID NO: 376774 - RNA, 13 nt, Molluscum contagiosum virus
cuccagcgccagc

SEQ ID NO: 376775 - RNA, 23 nt, Molluscum contagiosum virus
cuccagcgccagcgggaccuggu

SEQ ID NO: 376776 - RNA, 20 nt, Molluscum contagiosum virus
cuccagcgcgcccucgcgcg

SEQ ID NO: 376777 - RNA, 15 nt, Molluscum contagiosum virus
cuccagcgugguguu

SEQ ID NO: 376778 - RNA, 15 nt, Molluscum contagiosum virus
cuccagggcucaaga

SEQ ID NO: 376779 - RNA, 18 nt, Molluscum contagiosum virus
cuccaucaucgagcugca

SEQ ID NO: 376780 - RNA, 14 nt, Molluscum contagiosum virus
cucccgucgagcac

SEQ ID NO: 376781 - RNA, 16 nt, Molluscum contagiosum virus
cuccgaccgugcccug

SEQ ID NO: 376782 - RNA, 23 nt, Molluscum contagiosum virus
cuccgacgugaccucgcugcuga

SEQ ID NO: 376783 - RNA, 23 nt, Molluscum contagiosum virus
cuccgacgugcugcgcaaccuca

SEQ ID NO: 376784 - RNA, 20 nt, Molluscum contagiosum virus
cuccgcaagaagcgaaacac

SEQ ID NO: 376785 - RNA, 22 nt, Molluscum contagiosum virus
cuccgcaagaagcgaaacacgc

SEQ ID NO: 376786 - RNA, 22 nt, Molluscum contagiosum virus
cuccgcacacgcgcgcgugcug

SEQ ID NO: 376787 - RNA, 20 nt, Molluscum contagiosum virus
cuccgcacagcuucacguac

SEQ ID NO: 376788 - RNA, 14 nt, Molluscum contagiosum virus
cuccgcagcaggac

SEQ ID NO: 376789 - RNA, 21 nt, Molluscum contagiosum virus
cuccgccgggaauaccggaga

SEQ ID NO: 376790 - RNA, 22 nt, Molluscum contagiosum virus
cuccgccgggaauaccggagac

SEQ ID NO: 376791 - RNA, 24 nt, Molluscum contagiosum virus
cuccgcgcggcgcucugccaccgc

SEQ ID NO: 376792 - RNA, 16 nt, Molluscum contagiosum virus
gagugcgggucacaag

SEQ ID NO: 376793 - RNA, 20 nt, Molluscum contagiosum virus
gagugcugagccacaaacac

SEQ ID NO: 376794 - RNA, 23 nt, Molluscum contagiosum virus
gagugucgagcuucggacgagcu

SEQ ID NO: 376795 - RNA, 22 nt, Molluscum contagiosum virus
gauaacaggcgugcgcucggag

SEQ ID NO: 376796 - RNA, 15 nt, Molluscum contagiosum virus
gauaacaucugcuau

SEQ ID NO: 376797 - RNA, 19 nt, Molluscum contagiosum virus
gauacaguacgacaaaggc

SEQ ID NO: 376798 - RNA, 17 nt, Molluscum contagiosum virus
gauaguuuggacgagcu

SEQ ID NO: 376799 - RNA, 14 nt, Molluscum contagiosum virus
gaucaacgcgcgcg

SEQ ID NO: 376800 - RNA, 15 nt, Molluscum contagiosum virus
gaucacgaugugcgc

SEQ ID NO: 376801 - RNA, 17 nt, Molluscum contagiosum virus
gaucagccccgcgccag

SEQ ID NO: 376802 - RNA, 17 nt, Molluscum contagiosum virus
gaucagcuccgacguga

SEQ ID NO: 376803 - RNA, 21 nt, Molluscum contagiosum virus
gauccgacuccuuccggagac

SEQ ID NO: 376804 - RNA, 16 nt, Molluscum contagiosum virus
gaucgcgcgcaccugc

SEQ ID NO: 376805 - RNA, 12 nt, Molluscum contagiosum virus
gaucgcgguggc

SEQ ID NO: 376806 - RNA, 20 nt, Molluscum contagiosum virus
gaucgcuacgugcgcaccau

SEQ ID NO: 376807 - RNA, 17 nt, Molluscum contagiosum virus
gaucggacucagcaugu

SEQ ID NO: 376808 - RNA, 18 nt, Molluscum contagiosum virus
gaucugcgugacccucuu

SEQ ID NO: 376809 - RNA, 19 nt, Molluscum contagiosum virus
gaugccgucguacuuucac

SEQ ID NO: 376810 - RNA, 13 nt, Molluscum contagiosum virus
gaugcgcacacuu

SEQ ID NO: 376811 - RNA, 15 nt, Molluscum contagiosum virus
gaugcucuacgugcu

SEQ ID NO: 376812 - RNA, 22 nt, Molluscum contagiosum virus
gaugcugcgcguggaguacagc

SEQ ID NO: 376813 - RNA, 22 nt, Molluscum contagiosum virus
gauggaaggcgaccagcugguc

SEQ ID NO: 376814 - RNA, 18 nt, Molluscum contagiosum virus
gauggacaaagaugcagc

SEQ ID NO: 376815 - RNA, 13 nt, Molluscum contagiosum virus
gauggacacagca

SEQ ID NO: 376816 - RNA, 20 nt, Molluscum contagiosum virus
gauggaccgguuccgugcgc

SEQ ID NO: 376817 - RNA, 15 nt, Molluscum contagiosum virus
gauggacgccagcuu

SEQ ID NO: 376818 - RNA, 23 nt, Molluscum contagiosum virus
gauggagcucacgcucauggaca

SEQ ID NO: 376819 - RNA, 16 nt, Molluscum contagiosum virus
gauggcgcagcuccua

SEQ ID NO: 376820 - RNA, 16 nt, Molluscum contagiosum virus
gauguacuccaccaug

SEQ ID NO: 376821 - RNA, 23 nt, Molluscum contagiosum virus
gauguagaacgccaggaacauca

SEQ ID NO: 376822 - RNA, 14 nt, Molluscum contagiosum virus
gauguucucgccag

SEQ ID NO: 376823 - RNA, 20 nt, Molluscum contagiosum virus
gauuccgcuguacgugcugc

SEQ ID NO: 376824 - RNA, 18 nt, Molluscum contagiosum virus
gauucgcacgaccacgcu

SEQ ID NO: 376825 - RNA, 15 nt, Molluscum contagiosum virus
gauugucaagcacua

SEQ ID NO: 376826 - RNA, 19 nt, Molluscum contagiosum virus
gauuucggcgcgcgugcuu

SEQ ID NO: 376827 - RNA, 14 nt, Molluscum contagiosum virus
gcaaacacaaccuu

SEQ ID NO: 376828 - RNA, 17 nt, Molluscum contagiosum virus
gcaaacacgagacugag

SEQ ID NO: 376829 - RNA, 14 nt, Molluscum contagiosum virus
gcaaacgcuccaug

SEQ ID NO: 376830 - RNA, 23 nt, Molluscum contagiosum virus
gcaaacgcuguuuucacgcaagg

SEQ ID NO: 376831 - RNA, 22 nt, Molluscum contagiosum virus
gcaaacuucauccucuaccgcc

SEQ ID NO: 376832 - RNA, 15 nt, Molluscum contagiosum virus
gcaaaggaugaacgu

SEQ ID NO: 376833 - RNA, 17 nt, Molluscum contagiosum virus
gcaaagucaucugccuc

SEQ ID NO: 376834 - RNA, 20 nt, Molluscum contagiosum virus
gcaacaagaguugucuucca

SEQ ID NO: 376835 - RNA, 21 nt, Molluscum contagiosum virus
gcaacaagaguugucuuccaa

SEQ ID NO: 376836 - RNA, 22 nt, Molluscum contagiosum virus
gcaacagcacgacgaagaaggu

SEQ ID NO: 376837 - RNA, 19 nt, Molluscum contagiosum virus
gcaacaugcggagacuguu

SEQ ID NO: 376838 - RNA, 15 nt, Molluscum contagiosum virus
gcaacgacaaggaaa

SEQ ID NO: 376839 - RNA, 20 nt, Molluscum contagiosum virus
gcaacgagcagcccgugcgc

SEQ ID NO: 376840 - RNA, 15 nt, Molluscum contagiosum virus
gcaacgcacaaaaca

SEQ ID NO: 376841 - RNA, 16 nt, Molluscum contagiosum virus
gcaacggcggcgcaag

SEQ ID NO: 376842 - RNA, 13 nt, Molluscum contagiosum virus
gcaacgucuuccg

SEQ ID NO: 376843 - RNA, 13 nt, Molluscum contagiosum virus
gcaacgugcugcg

SEQ ID NO: 376844 - RNA, 18 nt, Molluscum contagiosum virus
gcaacguugugcgcaacg

SEQ ID NO: 376845 - RNA, 15 nt, Molluscum contagiosum virus
gcaacuugugcgccc

SEQ ID NO: 376846 - RNA, 13 nt, Molluscum contagiosum virus
gcaagaacaacca

SEQ ID NO: 376847 - RNA, 14 nt, Molluscum contagiosum virus
gcaagaacaaccag

SEQ ID NO: 376848 - RNA, 23 nt, Molluscum contagiosum virus
gcaagauucuucgcgaaggcaac

SEQ ID NO: 376849 - RNA, 16 nt, Molluscum contagiosum virus
gcaagcagcgcgcgca

SEQ ID NO: 376850 - RNA, 21 nt, Molluscum contagiosum virus
gcaagcccggaagcuugcuca

SEQ ID NO: 376851 - RNA, 20 nt, Molluscum contagiosum virus
gcaagcgcguucgcgcgugc

SEQ ID NO: 376852 - RNA, 17 nt, Molluscum contagiosum virus
gcaagcucagccucuac

SEQ ID NO: 376853 - RNA, 17 nt, Molluscum contagiosum virus
gcaagcuuugugcucgc

SEQ ID NO: 376854 - RNA, 21 nt, Molluscum contagiosum virus
gcaagcuuugugcucgcuuag

SEQ ID NO: 376855 - RNA, 23 nt, Molluscum contagiosum virus
gcaaggaccgggagcauagcaag

SEQ ID NO: 376856 - RNA, 15 nt, Molluscum contagiosum virus
gcaaggcgagucaau

SEQ ID NO: 376857 - RNA, 22 nt, Molluscum contagiosum virus
gcaaggcguaagagcgugaaca

SEQ ID NO: 376858 - RNA, 15 nt, Molluscum contagiosum virus
gcaagggcuccuucu

SEQ ID NO: 376859 - RNA, 19 nt, Molluscum contagiosum virus
gcaauugcugggcacaagc

SEQ ID NO: 376860 - RNA, 21 nt, Molluscum contagiosum virus
gcacaagauggcgcagcacuu

SEQ ID NO: 376861 - RNA, 17 nt, Molluscum contagiosum virus
gcacaccagacaaaguc

SEQ ID NO: 376862 - RNA, 22 nt, Molluscum contagiosum virus
gcacaccccuguaacaaggaaa

SEQ ID NO: 376863 - RNA, 18 nt, Molluscum contagiosum virus
gcacacgcaccgccuggu

SEQ ID NO: 376864 - RNA, 18 nt, Molluscum contagiosum virus
gcacacgcgcgcgugcug

SEQ ID NO: 376865 - RNA, 20 nt, Molluscum contagiosum virus
gcacacgcgcgcgugcugcu

SEQ ID NO: 376866 - RNA, 20 nt, Molluscum contagiosum virus
gcacacggacgagcccuucg

SEQ ID NO: 376867 - RNA, 21 nt, Molluscum contagiosum virus
gcacacucacgcguccacaaa

SEQ ID NO: 376868 - RNA, 23 nt, Molluscum contagiosum virus
gcacacucacgcguccacaaaga

SEQ ID NO: 376869 - RNA, 23 nt, Molluscum contagiosum virus
gcacacucgcgcguccgcaaaga

SEQ ID NO: 376870 - RNA, 21 nt, Molluscum contagiosum virus
gcacacuugcgcguccacaaa

SEQ ID NO: 376871 - RNA, 12 nt, Molluscum contagiosum virus
gcacaguucacg

SEQ ID NO: 376872 - RNA, 23 nt, Molluscum contagiosum virus
gcacaguucacggcgcucgccuc

SEQ ID NO: 376873 - RNA, 17 nt, Molluscum contagiosum virus
gcacaucggcacugcuc

SEQ ID NO: 376874 - RNA, 15 nt, Molluscum contagiosum virus
gcacaucucucaggg

SEQ ID NO: 376875 - RNA, 16 nt, Molluscum contagiosum virus
gcacauucucaaccau

SEQ ID NO: 376876 - RNA, 16 nt, Molluscum contagiosum virus
gcaccacgugcgcugg

SEQ ID NO: 376877 - RNA, 13 nt, Molluscum contagiosum virus
gcaccaucuucaa

SEQ ID NO: 376878 - RNA, 14 nt, Molluscum contagiosum virus
gcaccccgcaggaa

SEQ ID NO: 376879 - RNA, 22 nt, Molluscum contagiosum virus
gcacccgcaacaaggaaaggca

SEQ ID NO: 376880 - RNA, 13 nt, Molluscum contagiosum virus
gcacccgcaggaa

SEQ ID NO: 376881 - RNA, 14 nt, Molluscum contagiosum virus
gcaccgcaugggcc

SEQ ID NO: 376882 - RNA, 18 nt, Molluscum contagiosum virus
gcaccgccuggugcugcg

SEQ ID NO: 376883 - RNA, 22 nt, Molluscum contagiosum virus
gcaccgccuggugcugcgcgac

SEQ ID NO: 376884 - RNA, 12 nt, Molluscum contagiosum virus
gcaccgcggcga

SEQ ID NO: 376885 - RNA, 23 nt, Molluscum contagiosum virus
gcaccgcgggcuggacugugcuu

SEQ ID NO: 376886 - RNA, 14 nt, Molluscum contagiosum virus
gcaccgcguggcgc

SEQ ID NO: 376887 - RNA, 20 nt, Molluscum contagiosum virus
gcaccggcgcgagaugcucg

SEQ ID NO: 376888 - RNA, 13 nt, Molluscum contagiosum virus
gcaccugcaggaa

SEQ ID NO: 376889 - RNA, 15 nt, Molluscum contagiosum virus
gcaccugcaggaaag

SEQ ID NO: 376890 - RNA, 15 nt, Molluscum contagiosum virus
gcaccuggaguacuu

SEQ ID NO: 376891 - RNA, 22 nt, Molluscum contagiosum virus
gcaccugucgcgcgagcgcuac

SEQ ID NO: 376892 - RNA, 18 nt, Molluscum contagiosum virus
gcacgaccacgcuggcac

SEQ ID NO: 376893 - RNA, 22 nt, Molluscum contagiosum virus
gcacgagcgcgggcgcccggug

SEQ ID NO: 376894 - RNA, 16 nt, Molluscum contagiosum virus
gcacgagcugcugcgc

SEQ ID NO: 376895 - RNA, 23 nt, Molluscum contagiosum virus
gcacgauguacuccaccaugggc

SEQ ID NO: 376896 - RNA, 21 nt, Molluscum contagiosum virus
gcacgcaacgucgcacuggcc

SEQ ID NO: 376897 - RNA, 21 nt, Molluscum contagiosum virus
gcacgcacgcgucggucacca

SEQ ID NO: 376898 - RNA, 17 nt, Molluscum contagiosum virus
gcacgcacggagcacaa

SEQ ID NO: 376899 - RNA, 17 nt, Molluscum contagiosum virus
gcacgccuccaagaaga

SEQ ID NO: 376900 - RNA, 16 nt, Molluscum contagiosum virus
gcacgcgcacgcgcac

SEQ ID NO: 376901 - RNA, 17 nt, Molluscum contagiosum virus
gcacgcgcgucaugugc

SEQ ID NO: 376902 - RNA, 19 nt, Molluscum contagiosum virus
gcacgcggaaacaagcaca

SEQ ID NO: 376903 - RNA, 15 nt, Molluscum contagiosum virus
gcacgcgucggucac

SEQ ID NO: 376904 - RNA, 14 nt, Molluscum contagiosum virus
gcacgcgugugcga

SEQ ID NO: 376905 - RNA, 18 nt, Molluscum contagiosum virus
gcacgcuagcgagcgccc

SEQ ID NO: 376906 - RNA, 22 nt, Molluscum contagiosum virus
gcacggcacgugcguacgcggc

SEQ ID NO: 376907 - RNA, 23 nt, Molluscum contagiosum virus
gcacggcuuccggcaccacgugc

SEQ ID NO: 376908 - RNA, 20 nt, Molluscum contagiosum virus
gcacgggcgggacagacauc

SEQ ID NO: 376909 - RNA, 18 nt, Molluscum contagiosum virus
gcacgguagcuagcucug

SEQ ID NO: 376910 - RNA, 14 nt, Molluscum contagiosum virus
gcacggugugcuac

SEQ ID NO: 376911 - RNA, 16 nt, Molluscum contagiosum virus
gcacguccucggucac

SEQ ID NO: 376912 - RNA, 21 nt, Molluscum contagiosum virus
gcacgucgaagaccaccagca

SEQ ID NO: 376913 - RNA, 22 nt, Molluscum contagiosum virus
gcacgucgaagaccaccagcac

SEQ ID NO: 376914 - RNA, 12 nt, Molluscum contagiosum virus
gcacgugcugca

SEQ ID NO: 376915 - RNA, 12 nt, Molluscum contagiosum virus
gcacgugcugcg

SEQ ID NO: 376916 - RNA, 19 nt, Molluscum contagiosum virus
gcacguggaaucacggcca

SEQ ID NO: 376917 - RNA, 21 nt, Molluscum contagiosum virus
gcacguuaaucacgaugauga

SEQ ID NO: 376918 - RNA, 21 nt, Molluscum contagiosum virus
gcacuacgugcucgaguucaa

SEQ ID NO: 376919 - RNA, 23 nt, Molluscum contagiosum virus
gcacuagcacgggcgggacagac

SEQ ID NO: 376920 - RNA, 18 nt, Molluscum contagiosum virus
gcacucgagaagaggguc

SEQ ID NO: 376921 - RNA, 22 nt, Molluscum contagiosum virus
gcacucgccgcggaacugacug

SEQ ID NO: 376922 - RNA, 14 nt, Molluscum contagiosum virus
gcacucguggcaac

SEQ ID NO: 376923 - RNA, 14 nt, Molluscum contagiosum virus
gcacuggcgcgcac

SEQ ID NO: 376924 - RNA, 21 nt, Molluscum contagiosum virus
gcacugggugcccgagcuacu

SEQ ID NO: 376925 - RNA, 18 nt, Molluscum contagiosum virus
gcacugucguaacaaugg

SEQ ID NO: 376926 - RNA, 22 nt, Molluscum contagiosum virus
gcacuucgcagacgacucgcug

SEQ ID NO: 376927 - RNA, 22 nt, Molluscum contagiosum virus
gcacuugcgcgccugucaagac

SEQ ID NO: 376928 - RNA, 22 nt, Molluscum contagiosum virus
gcagaaacagccgugcuccgag

SEQ ID NO: 376929 - RNA, 12 nt, Molluscum contagiosum virus
gcagacaaagac

SEQ ID NO: 376930 - RNA, 22 nt, Molluscum contagiosum virus
gcagacaaagacaguccgucuc

SEQ ID NO: 376931 - RNA, 13 nt, Molluscum contagiosum virus
gcagaccaagaag

SEQ ID NO: 376932 - RNA, 13 nt, Molluscum contagiosum virus
gcagacgcucaac

SEQ ID NO: 376933 - RNA, 13 nt, Molluscum contagiosum virus
gcagagcacgaga

SEQ ID NO: 376934 - RNA, 16 nt, Molluscum contagiosum virus
gcagagcgagggcgac

SEQ ID NO: 376935 - RNA, 15 nt, Molluscum contagiosum virus
gcagagcgugcuggu

SEQ ID NO: 376936 - RNA, 21 nt, Molluscum contagiosum virus
gcagcaaacugugcuccugag

SEQ ID NO: 376937 - RNA, 16 nt, Molluscum contagiosum virus
gcagcacuucgcagac

SEQ ID NO: 376938 - RNA, 21 nt, Molluscum contagiosum virus
gcagcagaccaagaagcccga

SEQ ID NO: 376939 - RNA, 16 nt, Molluscum contagiosum virus
gcagcagcgugcauag

SEQ ID NO: 376940 - RNA, 23 nt, Molluscum contagiosum virus
gcagcaggugcacgugcugcagc

SEQ ID NO: 376941 - RNA, 21 nt, Molluscum contagiosum virus
gcagcauucccggcgcgcgcg

SEQ ID NO: 376942 - RNA, 20 nt, Molluscum contagiosum virus
gcagccccgacgccagcgcg

SEQ ID NO: 376943 - RNA, 18 nt, Molluscum contagiosum virus
gcagcccgacgcgggcgc

SEQ ID NO: 376944 - RNA, 19 nt, Molluscum contagiosum virus
gcagcccgugcgccugccg

SEQ ID NO: 376945 - RNA, 23 nt, Molluscum contagiosum virus
gcagccgcacaaccacagcucuc

SEQ ID NO: 376946 - RNA, 20 nt, Molluscum contagiosum virus
gcagccgcugcugcugcaaa

SEQ ID NO: 376947 - RNA, 22 nt, Molluscum contagiosum virus
gcagccuccgguuuucgcggga

SEQ ID NO: 376948 - RNA, 21 nt, Molluscum contagiosum virus
gcagcgacuacgcgcugcuag

SEQ ID NO: 376949 - RNA, 13 nt, Molluscum contagiosum virus
gcagcgccgcgcg

SEQ ID NO: 376950 - RNA, 16 nt, Molluscum contagiosum virus
gcagcgcgaagcucau

SEQ ID NO: 376951 - RNA, 19 nt, Molluscum contagiosum virus
gcagcgcgacuagccugug

SEQ ID NO: 376952 - RNA, 21 nt, Molluscum contagiosum virus
gcagcgcgcaaaaggcacgag

SEQ ID NO: 376953 - RNA, 14 nt, Molluscum contagiosum virus
gcagcggcgcgugc

SEQ ID NO: 376954 - RNA, 14 nt, Molluscum contagiosum virus
gcagcguuccagga

SEQ ID NO: 376955 - RNA, 12 nt, Molluscum contagiosum virus
gcagcuacugcg

SEQ ID NO: 376956 - RNA, 19 nt, Molluscum contagiosum virus
gcagcuacugcgugcgauu

SEQ ID NO: 376957 - RNA, 18 nt, Molluscum contagiosum virus
gcagcucggcgagagcgc

SEQ ID NO: 376958 - RNA, 17 nt, Molluscum contagiosum virus
gcagcucugcagcgccg

SEQ ID NO: 376959 - RNA, 12 nt, Molluscum contagiosum virus
gcagcucuucca

SEQ ID NO: 376960 - RNA, 22 nt, Molluscum contagiosum virus
gcagcugcgcgagccgcugcac

SEQ ID NO: 376961 - RNA, 15 nt, Molluscum contagiosum virus
gcagcugcugcgcac

SEQ ID NO: 376962 - RNA, 18 nt, Molluscum contagiosum virus
gcagcugcugcgcacgug

SEQ ID NO: 376963 - RNA, 15 nt, Molluscum contagiosum virus
gcagcugcugcgcuc

SEQ ID NO: 376964 - RNA, 14 nt, Molluscum contagiosum virus
gcagcuucugcucg

SEQ ID NO: 376965 - RNA, 16 nt, Molluscum contagiosum virus
gcagcuuuuuauucuc

SEQ ID NO: 376966 - RNA, 17 nt, Molluscum contagiosum virus
gcaggaaaggcacccgc

SEQ ID NO: 376967 - RNA, 22 nt, Molluscum contagiosum virus
gcaggaaagguaccccgcagga

SEQ ID NO: 376968 - RNA, 17 nt, Molluscum contagiosum virus
gcaggaagcuggcgcgg

SEQ ID NO: 376969 - RNA, 12 nt, Molluscum contagiosum virus
gcaggacacugu

SEQ ID NO: 376970 - RNA, 13 nt, Molluscum contagiosum virus
gcaggacacugua

SEQ ID NO: 376971 - RNA, 14 nt, Molluscum contagiosum virus
gcaggacacuguaa

SEQ ID NO: 376972 - RNA, 16 nt, Molluscum contagiosum virus
gcaggacacuguaauc

SEQ ID NO: 376973 - RNA, 18 nt, Molluscum contagiosum virus
gcaggaccuggcuggcgc

SEQ ID NO: 376974 - RNA, 17 nt, Molluscum contagiosum virus
gcaggacuggcaccugc

SEQ ID NO: 376975 - RNA, 14 nt, Molluscum contagiosum virus
gcaggagcagucuc

SEQ ID NO: 376976 - RNA, 18 nt, Molluscum contagiosum virus
gcaggaguccgugacaga

SEQ ID NO: 376977 - RNA, 18 nt, Molluscum contagiosum virus
gcaggcaaagcggggcgc

SEQ ID NO: 376978 - RNA, 14 nt, Molluscum contagiosum virus
gcaggcgcgcgcga

SEQ ID NO: 376979 - RNA, 15 nt, Molluscum contagiosum virus
gcaggcgucgcgcac

SEQ ID NO: 376980 - RNA, 16 nt, Molluscum contagiosum virus
gcagggagcugcggac

SEQ ID NO: 376981 - RNA, 19 nt, Molluscum contagiosum virus
gcagggcgugcuugccugg

SEQ ID NO: 376982 - RNA, 16 nt, Molluscum contagiosum virus
gcaguaccaguaccug

SEQ ID NO: 376983 - RNA, 14 nt, Molluscum contagiosum virus
gcaguacggcgcga

SEQ ID NO: 376984 - RNA, 13 nt, Molluscum contagiosum virus
gcaguacgugaca

SEQ ID NO: 376985 - RNA, 18 nt, Molluscum contagiosum virus
gcagucacgacuguguuc

SEQ ID NO: 376986 - RNA, 19 nt, Molluscum contagiosum virus
gcaguccgccgucgcccgg

SEQ ID NO: 376987 - RNA, 14 nt, Molluscum contagiosum virus
gcagugcaccagca

SEQ ID NO: 376988 - RNA, 20 nt, Molluscum contagiosum virus
gcagugccgcugagagacuu

SEQ ID NO: 376989 - RNA, 13 nt, Molluscum contagiosum virus
gcagugcucgcac

SEQ ID NO: 376990 - RNA, 22 nt, Molluscum contagiosum virus
gcagugcucgcacacgugcacg

SEQ ID NO: 376991 - RNA, 13 nt, Molluscum contagiosum virus
gcauagucaucaa

SEQ ID NO: 376992 - RNA, 22 nt, Molluscum contagiosum virus
gcauagucaucaaagcacaaca

SEQ ID NO: 376993 - RNA, 16 nt, Molluscum contagiosum virus
gcaucagcaacaagcu

SEQ ID NO: 376994 - RNA, 18 nt, Molluscum contagiosum virus
gcaucccugccacaugca

SEQ ID NO: 376995 - RNA, 20 nt, Molluscum contagiosum virus
gcauccggcacgcacaaagu

SEQ ID NO: 376996 - RNA, 20 nt, Molluscum contagiosum virus
gcauccucaaccgcugcaau

SEQ ID NO: 376997 - RNA, 21 nt, Molluscum contagiosum virus
gcaugcgcccucacgugcuga

SEQ ID NO: 376998 - RNA, 15 nt, Molluscum contagiosum virus
gcaugcgcgcagugc

SEQ ID NO: 376999 - RNA, 18 nt, Molluscum contagiosum virus
gcaugcgguguguguucu

SEQ ID NO: 377000 - RNA, 14 nt, Molluscum contagiosum virus
gcaugcgugcaaca

SEQ ID NO: 377001 - RNA, 15 nt, Molluscum contagiosum virus
gcauggacauccuca

SEQ ID NO: 377002 - RNA, 20 nt, Molluscum contagiosum virus
gcauggggaacagcuuggca

SEQ ID NO: 377003 - RNA, 22 nt, Molluscum contagiosum virus
gcaugguggcgauccuguccau

SEQ ID NO: 377004 - RNA, 12 nt, Molluscum contagiosum virus
gcauguucucuu

SEQ ID NO: 377005 - RNA, 12 nt, Molluscum contagiosum virus
gccaaagccgcg

SEQ ID NO: 377006 - RNA, 18 nt, Molluscum contagiosum virus
gccaaagcucucuuagca

SEQ ID NO: 377007 - RNA, 21 nt, Molluscum contagiosum virus
gccaacacgcaaucgcgcgcg

SEQ ID NO: 377008 - RNA, 14 nt, Molluscum contagiosum virus
gccaagaacaagcu

SEQ ID NO: 377009 - RNA, 15 nt, Molluscum contagiosum virus
gccaagaacaagcuc

SEQ ID NO: 377010 - RNA, 17 nt, Molluscum contagiosum virus
gccaagaggacgagcug

SEQ ID NO: 377011 - RNA, 13 nt, Molluscum contagiosum virus
gccaccgcggcgc

SEQ ID NO: 377012 - RNA, 16 nt, Molluscum contagiosum virus
gccaccucgcacgugu

SEQ ID NO: 377013 - RNA, 20 nt, Molluscum contagiosum virus
gccacgaccgcgcacgcagc

SEQ ID NO: 377014 - RNA, 15 nt, Molluscum contagiosum virus
gccacugccacggcu

SEQ ID NO: 377015 - RNA, 14 nt, Molluscum contagiosum virus
gccagaagugaaau

SEQ ID NO: 377016 - RNA, 16 nt, Molluscum contagiosum virus
gccagcgacgcgacgc

SEQ ID NO: 377017 - RNA, 20 nt, Molluscum contagiosum virus
gccagcgagucucgcgcgcc

SEQ ID NO: 377018 - RNA, 15 nt, Molluscum contagiosum virus
gccagcguacggccc

SEQ ID NO: 377019 - RNA, 16 nt, Molluscum contagiosum virus
gccagcgucgcgcgcc

SEQ ID NO: 377020 - RNA, 22 nt, Molluscum contagiosum virus
gccagcuugagcacacgguaga

SEQ ID NO: 377021 - RNA, 14 nt, Molluscum contagiosum virus
gccaggaacaucag

SEQ ID NO: 377022 - RNA, 20 nt, Molluscum contagiosum virus
gccaggaacgaggaaaggca

SEQ ID NO: 377023 - RNA, 17 nt, Molluscum contagiosum virus
gccaggcacacgcagug

SEQ ID NO: 377024 - RNA, 22 nt, Molluscum contagiosum virus
gccaguagcgaaugcagugccc

SEQ ID NO: 377025 - RNA, 17 nt, Molluscum contagiosum virus
gccaucgagaugcucaa

SEQ ID NO: 377026 - RNA, 17 nt, Molluscum contagiosum virus
gccaucucgcacacugc

SEQ ID NO: 377027 - RNA, 20 nt, Molluscum contagiosum virus
gccaugaacaacauggugcu

SEQ ID NO: 377028 - RNA, 16 nt, Molluscum contagiosum virus
gccauggaggcgcuag

SEQ ID NO: 377029 - RNA, 24 nt, Molluscum contagiosum virus
gccauggaggcgcuagugcagaug

SEQ ID NO: 377030 - RNA, 16 nt, Molluscum contagiosum virus
gccauucuuaauccag

SEQ ID NO: 377031 - RNA, 18 nt, Molluscum contagiosum virus
gcccaaggagcugcgcga

SEQ ID NO: 377032 - RNA, 17 nt, Molluscum contagiosum virus
gcccaccagcagccagg

SEQ ID NO: 377033 - RNA, 20 nt, Molluscum contagiosum virus
gcccacgagcgccagccugu

SEQ ID NO: 377034 - RNA, 13 nt, Molluscum contagiosum virus
gcccacgcucaac

SEQ ID NO: 377035 - RNA, 19 nt, Molluscum contagiosum virus
gcccagaacaugucgagac

SEQ ID NO: 377036 - RNA, 13 nt, Molluscum contagiosum virus
gcccagcacgcgc

SEQ ID NO: 377037 - RNA, 12 nt, Molluscum contagiosum virus
gcccaugcucga

SEQ ID NO: 377038 - RNA, 13 nt, Molluscum contagiosum virus
gcccccggucuga

SEQ ID NO: 377039 - RNA, 14 nt, Molluscum contagiosum virus
gccccgcgccagca

SEQ ID NO: 377040 - RNA, 18 nt, Molluscum contagiosum virus
gccccggcgcgaaacaag

SEQ ID NO: 377041 - RNA, 12 nt, Molluscum contagiosum virus
gccccugcgcga

SEQ ID NO: 377042 - RNA, 15 nt, Molluscum contagiosum virus
gcccgacgcgggcgc

SEQ ID NO: 377043 - RNA, 18 nt, Molluscum contagiosum virus
gcccgagcccggccagac

SEQ ID NO: 377044 - RNA, 20 nt, Molluscum contagiosum virus
gcccgagggcgggcacgugc

SEQ ID NO: 377045 - RNA, 15 nt, Molluscum contagiosum virus
gcccgaggugcgcau

SEQ ID NO: 377046 - RNA, 17 nt, Molluscum contagiosum virus
gcccgaguucgcggcgc

SEQ ID NO: 377047 - RNA, 20 nt, Molluscum contagiosum virus
gcccgcaaugcagugcacca

SEQ ID NO: 377048 - RNA, 18 nt, Molluscum contagiosum virus
gcccgcggacucgugcac

SEQ ID NO: 377049 - RNA, 16 nt, Molluscum contagiosum virus
gcccgcgucgcgcgcc

SEQ ID NO: 377050 - RNA, 13 nt, Molluscum contagiosum virus
gcccgcugcgcau

SEQ ID NO: 377051 - RNA, 14 nt, Molluscum contagiosum virus
gcccggcaugggca

SEQ ID NO: 377052 - RNA, 17 nt, Molluscum contagiosum virus
gcccgucuacauuuugc

SEQ ID NO: 377053 - RNA, 23 nt, Molluscum contagiosum virus
gcccuguccacaaaaccaaaacc

SEQ ID NO: 377054 - RNA, 13 nt, Molluscum contagiosum virus
gcccuuccuggag

SEQ ID NO: 377055 - RNA, 14 nt, Molluscum contagiosum virus
gcccuucuugacgc

SEQ ID NO: 377056 - RNA, 14 nt, Molluscum contagiosum virus
gcccuuugaugucg

SEQ ID NO: 377057 - RNA, 23 nt, Molluscum contagiosum virus
gccgaagagugcgcaacaugucc

SEQ ID NO: 377058 - RNA, 15 nt, Molluscum contagiosum virus
gccgaaucgucggca

SEQ ID NO: 377059 - RNA, 21 nt, Molluscum contagiosum virus
gccgacaacgugcugcucaag

SEQ ID NO: 377060 - RNA, 15 nt, Molluscum contagiosum virus
gccgacagcgcgcgc

SEQ ID NO: 377061 - RNA, 22 nt, Molluscum contagiosum virus
gccgacgccuuccugcuggcgc

SEQ ID NO: 377062 - RNA, 17 nt, Molluscum contagiosum virus
gccgagccgcuggccga

SEQ ID NO: 377063 - RNA, 21 nt, Molluscum contagiosum virus
gccgagcgugaccagugcgug

SEQ ID NO: 377064 - RNA, 17 nt, Molluscum contagiosum virus
gccgagcuucgucuuca

SEQ ID NO: 377065 - RNA, 18 nt, Molluscum contagiosum virus
gccgagguggcacccugg

SEQ ID NO: 377066 - RNA, 21 nt, Molluscum contagiosum virus
gccgagugcgacgcgcgucac

SEQ ID NO: 377067 - RNA, 18 nt, Molluscum contagiosum virus
gccgaugcagugcggaug

SEQ ID NO: 377068 - RNA, 15 nt, Molluscum contagiosum virus
gccgcaacauaguca

SEQ ID NO: 377069 - RNA, 12 nt, Molluscum contagiosum virus
gccgcaagcaca

SEQ ID NO: 377070 - RNA, 12 nt, Molluscum contagiosum virus
gccgcaccucac

SEQ ID NO: 377071 - RNA, 21 nt, Molluscum contagiosum virus
gccgcacgcugcugcgugcgc

SEQ ID NO: 377072 - RNA, 16 nt, Molluscum contagiosum virus
gccgcacgugcugcgc

SEQ ID NO: 377073 - RNA, 18 nt, Molluscum contagiosum virus
gccgcacgugcugcgcua

SEQ ID NO: 377074 - RNA, 16 nt, Molluscum contagiosum virus
gccgcaggcgcgcgcc

SEQ ID NO: 377075 - RNA, 17 nt, Molluscum contagiosum virus
gccgcagugcucgcaca

SEQ ID NO: 377076 - RNA, 22 nt, Molluscum contagiosum virus
gccgcagugcucgcacacgugc

SEQ ID NO: 377077 - RNA, 17 nt, Molluscum contagiosum virus
gccgccaugcugcgcga

SEQ ID NO: 377078 - RNA, 13 nt, Molluscum contagiosum virus
gccgccgcaggcc

SEQ ID NO: 377079 - RNA, 14 nt, Molluscum contagiosum virus
gccgccgcaggccc

SEQ ID NO: 377080 - RNA, 21 nt, Molluscum contagiosum virus
gccgccggggcccaugcucac

SEQ ID NO: 377081 - RNA, 18 nt, Molluscum contagiosum virus
gccgccgugugcacauug

SEQ ID NO: 377082 - RNA, 14 nt, Molluscum contagiosum virus
gccgcgagcacugg

SEQ ID NO: 377083 - RNA, 15 nt, Molluscum contagiosum virus
gccgcgcgaacaaaa

SEQ ID NO: 377084 - RNA, 13 nt, Molluscum contagiosum virus
gccgcgcgcgcac

SEQ ID NO: 377085 - RNA, 13 nt, Molluscum contagiosum virus
gccgcggcagugg

SEQ ID NO: 377086 - RNA, 12 nt, Molluscum contagiosum virus
gccgcucgcugu

SEQ ID NO: 377087 - RNA, 19 nt, Molluscum contagiosum virus
gccgcugacuagaugcaua

SEQ ID NO: 377088 - RNA, 18 nt, Molluscum contagiosum virus
gccgcugcgcuugcucac

SEQ ID NO: 377089 - RNA, 15 nt, Molluscum contagiosum virus
gccgcugcugcugca

SEQ ID NO: 377090 - RNA, 20 nt, Molluscum contagiosum virus
gccgcuuccuggcacuggcg

SEQ ID NO: 377091 - RNA, 13 nt, Molluscum contagiosum virus
gccgcuucuugac

SEQ ID NO: 377092 - RNA, 15 nt, Molluscum contagiosum virus
gccgcuucuugacgc

SEQ ID NO: 377093 - RNA, 23 nt, Molluscum contagiosum virus
gccgcuugaaggacgcguucucc

SEQ ID NO: 377094 - RNA, 16 nt, Molluscum contagiosum virus
gccggaacucgcgcgc

SEQ ID NO: 377095 - RNA, 20 nt, Molluscum contagiosum virus
gccggaccagauccgggcgc

SEQ ID NO: 377096 - RNA, 19 nt, Molluscum contagiosum virus
gccggagcugaaccugguc

SEQ ID NO: 377097 - RNA, 15 nt, Molluscum contagiosum virus
gccggcaaggggcca

SEQ ID NO: 377098 - RNA, 16 nt, Molluscum contagiosum virus
gccggcaccacggugg

SEQ ID NO: 377099 - RNA, 20 nt, Molluscum contagiosum virus
gccggcacccgugcgcgcgc

SEQ ID NO: 377100 - RNA, 17 nt, Molluscum contagiosum virus
gccggcacgagcagucc

SEQ ID NO: 377101 - RNA, 22 nt, Molluscum contagiosum virus
gccggcaucuucggcguguuca

SEQ ID NO: 377102 - RNA, 14 nt, Molluscum contagiosum virus
gccggccgccggcg

SEQ ID NO: 377103 - RNA, 15 nt, Molluscum contagiosum virus
gccggccgccggcgc

SEQ ID NO: 377104 - RNA, 22 nt, Molluscum contagiosum virus
gccggcgcgcgcgcgcaggcuc

SEQ ID NO: 377105 - RNA, 16 nt, Molluscum contagiosum virus
gccggcgcgugagcgc

SEQ ID NO: 377106 - RNA, 18 nt, Molluscum contagiosum virus
gccggcggcgcaagcacc

SEQ ID NO: 377107 - RNA, 13 nt, Molluscum contagiosum virus
gccggcucugccu

SEQ ID NO: 377108 - RNA, 22 nt, Molluscum contagiosum virus
gccgggaauaccggagacacca

SEQ ID NO: 377109 - RNA, 16 nt, Molluscum contagiosum virus
gccgggaaugcugcgc

SEQ ID NO: 377110 - RNA, 15 nt, Molluscum contagiosum virus
gccgggcaccggcgc

SEQ ID NO: 377111 - RNA, 19 nt, Molluscum contagiosum virus
gccgggcaccggcgcucac

SEQ ID NO: 377112 - RNA, 17 nt, Molluscum contagiosum virus
gccggggccggacgucc

SEQ ID NO: 377113 - RNA, 19 nt, Molluscum contagiosum virus
gccgguacucgugcgucac

SEQ ID NO: 377114 - RNA, 15 nt, Molluscum contagiosum virus
gccgguacugcggac

SEQ ID NO: 377115 - RNA, 16 nt, Molluscum contagiosum virus
gccgguacugcggaca

SEQ ID NO: 377116 - RNA, 18 nt, Molluscum contagiosum virus
gccggucuccacguggcc

SEQ ID NO: 377117 - RNA, 21 nt, Molluscum contagiosum virus
gccgguugcgcgugugcagca

SEQ ID NO: 377118 - RNA, 20 nt, Molluscum contagiosum virus
gccguccccggaaagcagca

SEQ ID NO: 377119 - RNA, 19 nt, Molluscum contagiosum virus
gccgucgcccggcaggcuc

SEQ ID NO: 377120 - RNA, 14 nt, Molluscum contagiosum virus
gccgugagcacgag

SEQ ID NO: 377121 - RNA, 15 nt, Molluscum contagiosum virus
gccgugcccgccgac

SEQ ID NO: 377122 - RNA, 11 nt, Molluscum contagiosum virus
gccgugcugcg

SEQ ID NO: 377123 - RNA, 12 nt, Molluscum contagiosum virus
gccgugcugcgu

SEQ ID NO: 377124 - RNA, 22 nt, Molluscum contagiosum virus
gccgugcugucucucgcccgac

SEQ ID NO: 377125 - RNA, 13 nt, Molluscum contagiosum virus
gccguggaugaac

SEQ ID NO: 377126 - RNA, 16 nt, Molluscum contagiosum virus
gccgugguacacguag

SEQ ID NO: 377127 - RNA, 18 nt, Molluscum contagiosum virus
gccguguacaugcucaag

SEQ ID NO: 377128 - RNA, 19 nt, Molluscum contagiosum virus
gccguucguuguccuugcc

SEQ ID NO: 377129 - RNA, 14 nt, Molluscum contagiosum virus
gccguuggacauca

SEQ ID NO: 377130 - RNA, 18 nt, Molluscum contagiosum virus
gccuacagcgcgcugcac

SEQ ID NO: 377131 - RNA, 17 nt, Molluscum contagiosum virus
gccuacgaggugcgcga

SEQ ID NO: 377132 - RNA, 13 nt, Molluscum contagiosum virus
gccuacguggcgg

SEQ ID NO: 377133 - RNA, 13 nt, Molluscum contagiosum virus
gccuagccugcag

SEQ ID NO: 377134 - RNA, 19 nt, Molluscum contagiosum virus
gccucaaccugaacaucuu

SEQ ID NO: 377135 - RNA, 18 nt, Molluscum contagiosum virus
gccuccgagcgcgcgugc

SEQ ID NO: 377136 - RNA, 16 nt, Molluscum contagiosum virus
gccucgagcacgccuc

SEQ ID NO: 377137 - RNA, 24 nt, Molluscum contagiosum virus
gccucgagcacgccuccaagaaga

SEQ ID NO: 377138 - RNA, 16 nt, Molluscum contagiosum virus
gccucgagcgccgugc

SEQ ID NO: 377139 - RNA, 20 nt, Molluscum contagiosum virus
gccucgagcgccgugcaguu

SEQ ID NO: 377140 - RNA, 19 nt, Molluscum contagiosum virus
gccucgaugccaacagacu

SEQ ID NO: 377141 - RNA, 14 nt, Molluscum contagiosum virus
gccucgccaaagag

SEQ ID NO: 377142 - RNA, 16 nt, Molluscum contagiosum virus
gccucgcgcgcacugc

SEQ ID NO: 377143 - RNA, 14 nt, Molluscum contagiosum virus
gccucgucguccac

SEQ ID NO: 377144 - RNA, 22 nt, Molluscum contagiosum virus
gccucgugcucggcgugaucuu

SEQ ID NO: 377145 - RNA, 17 nt, Molluscum contagiosum virus
gccucguggaacaaaga

SEQ ID NO: 377146 - RNA, 16 nt, Molluscum contagiosum virus
gccucguucacggcua

SEQ ID NO: 377147 - RNA, 22 nt, Molluscum contagiosum virus
gccugagaagcuguaccuggug

SEQ ID NO: 377148 - RNA, 23 nt, Molluscum contagiosum virus
gccugagcuucuuuggcauugac

SEQ ID NO: 377149 - RNA, 20 nt, Molluscum contagiosum virus
gccugcaaacgcgaaacugg

SEQ ID NO: 377150 - RNA, 22 nt, Molluscum contagiosum virus
gccugcaaacgcgaaacuggac

SEQ ID NO: 377151 - RNA, 13 nt, Molluscum contagiosum virus
gccugcacaagca

SEQ ID NO: 377152 - RNA, 14 nt, Molluscum contagiosum virus
gccugcacaagcag

SEQ ID NO: 377153 - RNA, 18 nt, Molluscum contagiosum virus
gccugcaccgagugcugg

SEQ ID NO: 377154 - RNA, 14 nt, Molluscum contagiosum virus
gccugcacugagaa

SEQ ID NO: 377155 - RNA, 20 nt, Molluscum contagiosum virus
gccugcccaucuugugauga

SEQ ID NO: 377156 - RNA, 19 nt, Molluscum contagiosum virus
gccugccgcgagcacuggc

SEQ ID NO: 377157 - RNA, 19 nt, Molluscum contagiosum virus
gccugcgcgagcaagcgcc

SEQ ID NO: 377158 - RNA, 15 nt, Molluscum contagiosum virus
gccugcugcagcucc

SEQ ID NO: 377159 - RNA, 11 nt, Molluscum contagiosum virus
gccugcugcgc

SEQ ID NO: 377160 - RNA, 13 nt, Molluscum contagiosum virus
gccuggugcugcg

SEQ ID NO: 377161 - RNA, 14 nt, Molluscum contagiosum virus
gccuguaaauggac

SEQ ID NO: 377162 - RNA, 23 nt, Molluscum contagiosum virus
gccuguaaauggaccacaagcag

SEQ ID NO: 377163 - RNA, 20 nt, Molluscum contagiosum virus
gccuguaguagcagcuucuu

SEQ ID NO: 377164 - RNA, 16 nt, Molluscum contagiosum virus
gccugugcccaguuau

SEQ ID NO: 377165 - RNA, 14 nt, Molluscum contagiosum virus
gccuuagugccgua

SEQ ID NO: 377166 - RNA, 16 nt, Molluscum contagiosum virus
gccuugauucggccaa

SEQ ID NO: 377167 - RNA, 22 nt, Molluscum contagiosum virus
gccuuggcggcgcggcuagcac

SEQ ID NO: 377168 - RNA, 16 nt, Molluscum contagiosum virus
gccuugggcacuuccu

SEQ ID NO: 377169 - RNA, 22 nt, Molluscum contagiosum virus
gccuuuguggacgcgcaagugu

SEQ ID NO: 377170 - RNA, 18 nt, Molluscum contagiosum virus
gcgaacgagggacacgca

SEQ ID NO: 377171 - RNA, 19 nt, Molluscum contagiosum virus
gcgaacgagggaugcacac

SEQ ID NO: 377172 - RNA, 13 nt, Molluscum contagiosum virus
gcgaacgccggcg

SEQ ID NO: 377173 - RNA, 14 nt, Molluscum contagiosum virus
gcgaacgcgcaagu

SEQ ID NO: 377174 - RNA, 18 nt, Molluscum contagiosum virus
gcgaacucgcggcagugc

SEQ ID NO: 377175 - RNA, 14 nt, Molluscum contagiosum virus
gcgaagggcuuuuu

SEQ ID NO: 377176 - RNA, 17 nt, Molluscum contagiosum virus
gcgacaggggccacaag

SEQ ID NO: 377177 - RNA, 21 nt, Molluscum contagiosum virus
gcgacaggggccacaagcacg

SEQ ID NO: 377178 - RNA, 18 nt, Molluscum contagiosum virus
gcgacaugccucgcggcc

SEQ ID NO: 377179 - RNA, 20 nt, Molluscum contagiosum virus
gcgacccccguuuguucaca

SEQ ID NO: 377180 - RNA, 20 nt, Molluscum contagiosum virus
gcgaccuacgaggugcugcg

SEQ ID NO: 377181 - RNA, 23 nt, Molluscum contagiosum virus
gcgacgacgacuucggcgcaacg

SEQ ID NO: 377182 - RNA, 19 nt, Molluscum contagiosum virus
gcgacgagcucacgccgga

SEQ ID NO: 377183 - RNA, 21 nt, Molluscum contagiosum virus
gcgacuccuuugcgagcacug

SEQ ID NO: 377184 - RNA, 22 nt, Molluscum contagiosum virus
gcgacuccuuugcgagcacugu

SEQ ID NO: 377185 - RNA, 21 nt, Molluscum contagiosum virus
gcgagaaguucugcacagcac

SEQ ID NO: 377186 - RNA, 20 nt, Molluscum contagiosum virus
gcgagaccgcuagagugcgc

SEQ ID NO: 377187 - RNA, 15 nt, Molluscum contagiosum virus
gcgagacgggcacgc

SEQ ID NO: 377188 - RNA, 19 nt, Molluscum contagiosum virus
gcgagagacagcacggcac

SEQ ID NO: 377189 - RNA, 18 nt, Molluscum contagiosum virus
gcgagcaaagacgugugu

SEQ ID NO: 377190 - RNA, 17 nt, Molluscum contagiosum virus
gcgagccacucgcauug

SEQ ID NO: 377191 - RNA, 16 nt, Molluscum contagiosum virus
gcgagcgcgugcucuu

SEQ ID NO: 377192 - RNA, 18 nt, Molluscum contagiosum virus
gcgagcguuucugccgga

SEQ ID NO: 377193 - RNA, 18 nt, Molluscum contagiosum virus
gcgagcuacgcgcucuac

SEQ ID NO: 377194 - RNA, 14 nt, Molluscum contagiosum virus
gcgagcuagugcac

SEQ ID NO: 377195 - RNA, 15 nt, Molluscum contagiosum virus
gcgagcucgucgcgc

SEQ ID NO: 377196 - RNA, 22 nt, Molluscum contagiosum virus
gcgaggccugcguggacagcau

SEQ ID NO: 377197 - RNA, 22 nt, Molluscum contagiosum virus
gcgagucgcccguguucgcgga

SEQ ID NO: 377198 - RNA, 15 nt, Molluscum contagiosum virus
gcgagucgcgggcgc

SEQ ID NO: 377199 - RNA, 20 nt, Molluscum contagiosum virus
gcgagucucccguggcgcgc

SEQ ID NO: 377200 - RNA, 19 nt, Molluscum contagiosum virus
gcgagucucuguaacaagc

SEQ ID NO: 377201 - RNA, 13 nt, Molluscum contagiosum virus
gcgaucgcggcca

SEQ ID NO: 377202 - RNA, 18 nt, Molluscum contagiosum virus
gcgaugucgccgcagugc

SEQ ID NO: 377203 - RNA, 20 nt, Molluscum contagiosum virus
gcgcaacauguccgcaagca

SEQ ID NO: 377204 - RNA, 17 nt, Molluscum contagiosum virus
gcgcaaccgcgugcgug

SEQ ID NO: 377205 - RNA, 21 nt, Molluscum contagiosum virus
gcgcaaccgcgugcgugcaca

SEQ ID NO: 377206 - RNA, 13 nt, Molluscum contagiosum virus
gcgcaacgcgggc

SEQ ID NO: 377207 - RNA, 21 nt, Molluscum contagiosum virus
gcgcaacgucuuccgcgcgcu

SEQ ID NO: 377208 - RNA, 16 nt, Molluscum contagiosum virus
gcgcaagaacaaccag

SEQ ID NO: 377209 - RNA, 20 nt, Molluscum contagiosum virus
gcgcaaggccgcgcccaaga

SEQ ID NO: 377210 - RNA, 16 nt, Molluscum contagiosum virus
gcgcaagugugcgcau

SEQ ID NO: 377211 - RNA, 17 nt, Molluscum contagiosum virus
gcgcacaagauggcgca

SEQ ID NO: 377212 - RNA, 16 nt, Molluscum contagiosum virus
gcgcacacggacgagc

SEQ ID NO: 377213 - RNA, 18 nt, Molluscum contagiosum virus
gcgcacacuccucggcgc

SEQ ID NO: 377214 - RNA, 13 nt, Molluscum contagiosum virus
gcgcacacuugcg

SEQ ID NO: 377215 - RNA, 15 nt, Molluscum contagiosum virus
gcgcaccaucuucaa

SEQ ID NO: 377216 - RNA, 20 nt, Molluscum contagiosum virus
gcgcacccgagggcgugcgc

SEQ ID NO: 377217 - RNA, 19 nt, Molluscum contagiosum virus
gcgcaccguugacgagcug

SEQ ID NO: 377218 - RNA, 19 nt, Molluscum contagiosum virus
gcgcaccugcuagagcaua

SEQ ID NO: 377219 - RNA, 21 nt, Molluscum contagiosum virus
gcgcaccuggaguacuucaag

SEQ ID NO: 377220 - RNA, 16 nt, Molluscum contagiosum virus
gcgcacgagcgcgggc

SEQ ID NO: 377221 - RNA, 18 nt, Molluscum contagiosum virus
gcgcacgagcgcgggcgc

SEQ ID NO: 377222 - RNA, 18 nt, Molluscum contagiosum virus
gcgcacgauguacuccac

SEQ ID NO: 377223 - RNA, 21 nt, Molluscum contagiosum virus
gcgcacgcugcgcacgggcgc

SEQ ID NO: 377224 - RNA, 22 nt, Molluscum contagiosum virus
gcgcacgcugcuguccuucaag

SEQ ID NO: 377225 - RNA, 22 nt, Molluscum contagiosum virus
gcgcacgcuuguccgcggacgc

SEQ ID NO: 377226 - RNA, 19 nt, Molluscum contagiosum virus
gcgcacuacucgucuugcg

SEQ ID NO: 377227 - RNA, 21 nt, Molluscum contagiosum virus
gcgcacugcucgcgcacgcgc

SEQ ID NO: 377228 - RNA, 15 nt, Molluscum contagiosum virus
gcgcagacgccgagc

SEQ ID NO: 377229 - RNA, 13 nt, Molluscum contagiosum virus
gcgcagacguggu

SEQ ID NO: 377230 - RNA, 15 nt, Molluscum contagiosum virus
gcgcagccacgacuc

SEQ ID NO: 377231 - RNA, 23 nt, Molluscum contagiosum virus
gcgcagcgcccgcguacacgugc

SEQ ID NO: 377232 - RNA, 17 nt, Molluscum contagiosum virus
gcgcagcugcgccugca

SEQ ID NO: 377233 - RNA, 13 nt, Molluscum contagiosum virus
gcgcaggugcacg

SEQ ID NO: 377234 - RNA, 13 nt, Molluscum contagiosum virus
gcgcaucaugcgc

SEQ ID NO: 377235 - RNA, 20 nt, Molluscum contagiosum virus
gcgcaucgcgggcacgcagc

SEQ ID NO: 377236 - RNA, 18 nt, Molluscum contagiosum virus
gcgcaugaaaggcaccug

SEQ ID NO: 377237 - RNA, 23 nt, Molluscum contagiosum virus
gcgcaugguugugcuuguucucu

SEQ ID NO: 377238 - RNA, 15 nt, Molluscum contagiosum virus
gcgcauucgcgcgcc

SEQ ID NO: 377239 - RNA, 16 nt, Molluscum contagiosum virus
gcgcauucgcgcgccc

SEQ ID NO: 377240 - RNA, 13 nt, Molluscum contagiosum virus
gcgccaacaacca

SEQ ID NO: 377241 - RNA, 14 nt, Molluscum contagiosum virus
gcgccaacaaccac

SEQ ID NO: 377242 - RNA, 13 nt, Molluscum contagiosum virus
gcgccaaggcgcu

SEQ ID NO: 377243 - RNA, 22 nt, Molluscum contagiosum virus
gcgccacgagcgccgcgugcgc

SEQ ID NO: 377244 - RNA, 16 nt, Molluscum contagiosum virus
gcgccagcacgcgcuc

SEQ ID NO: 377245 - RNA, 16 nt, Molluscum contagiosum virus
gcgccaggugcgaagg

SEQ ID NO: 377246 - RNA, 14 nt, Molluscum contagiosum virus
gcgccauugcucgc

SEQ ID NO: 377247 - RNA, 12 nt, Molluscum contagiosum virus
gcgcccaccagc

SEQ ID NO: 377248 - RNA, 17 nt, Molluscum contagiosum virus
gcgcccgccgcccaagg

SEQ ID NO: 377249 - RNA, 13 nt, Molluscum contagiosum virus
gcgcccgcggcgc

SEQ ID NO: 377250 - RNA, 20 nt, Molluscum contagiosum virus
gcgcccgugcuugcgcacgg

SEQ ID NO: 377251 - RNA, 15 nt, Molluscum contagiosum virus
gcgcccucgcgcgcg

SEQ ID NO: 377252 - RNA, 22 nt, Molluscum contagiosum virus
gcgcccuggagcgcagucccag

SEQ ID NO: 377253 - RNA, 12 nt, Molluscum contagiosum virus
gcgcccuugcac

SEQ ID NO: 377254 - RNA, 15 nt, Molluscum contagiosum virus
gcgccgaaacacggc

SEQ ID NO: 377255 - RNA, 13 nt, Molluscum contagiosum virus
gcgccgaggacua

SEQ ID NO: 377256 - RNA, 23 nt, Molluscum contagiosum virus
gcgccgcacgcugcugcgugcgc

SEQ ID NO: 377257 - RNA, 18 nt, Molluscum contagiosum virus
gcgccgcacgugcugcgc

SEQ ID NO: 377258 - RNA, 12 nt, Molluscum contagiosum virus
gcgccgccagcg

SEQ ID NO: 377259 - RNA, 18 nt, Molluscum contagiosum virus
gcgccgccucgcgcgcac

SEQ ID NO: 377260 - RNA, 16 nt, Molluscum contagiosum virus
gcgccgcgcgagugcc

SEQ ID NO: 377261 - RNA, 13 nt, Molluscum contagiosum virus
gcgccgcucgcac

SEQ ID NO: 377262 - RNA, 21 nt, Molluscum contagiosum virus
gcgccgcucgucgcugcggac

SEQ ID NO: 377263 - RNA, 20 nt, Molluscum contagiosum virus
gcgccggcacccgugcgcgc

SEQ ID NO: 377264 - RNA, 16 nt, Molluscum contagiosum virus
gcgccuacucuugcgc

SEQ ID NO: 377265 - RNA, 14 nt, Molluscum contagiosum virus
gcgccuagcuccag

SEQ ID NO: 377266 - RNA, 14 nt, Molluscum contagiosum virus
gcgcgaaacaagcg

SEQ ID NO: 377267 - RNA, 20 nt, Molluscum contagiosum virus
gcgcgaaccuagacacgagc

SEQ ID NO: 377268 - RNA, 14 nt, Molluscum contagiosum virus
gcgcgacaugcugc

SEQ ID NO: 377269 - RNA, 24 nt, Molluscum contagiosum virus
gcgcgacgucgucaaggauguagc

SEQ ID NO: 377270 - RNA, 21 nt, Molluscum contagiosum virus
gcgcgacuccaucugcgcgac

SEQ ID NO: 377271 - RNA, 20 nt, Molluscum contagiosum virus
gcgcgagacgcugcugcaca

SEQ ID NO: 377272 - RNA, 15 nt, Molluscum contagiosum virus
gcgcgagaugcucgc

SEQ ID NO: 377273 - RNA, 14 nt, Molluscum contagiosum virus
gcgcgagcaaagac

SEQ ID NO: 377274 - RNA, 14 nt, Molluscum contagiosum virus
gcgcgcaacacugc

SEQ ID NO: 377275 - RNA, 20 nt, Molluscum contagiosum virus
gcgcgcacaaacgcgcgcac

SEQ ID NO: 377276 - RNA, 14 nt, Molluscum contagiosum virus
gcgcgcacgcgcac

SEQ ID NO: 377277 - RNA, 17 nt, Molluscum contagiosum virus
gcgcgcacugcgggacc

SEQ ID NO: 377278 - RNA, 18 nt, Molluscum contagiosum virus
gcgcgcagacgcggugga

SEQ ID NO: 377279 - RNA, 13 nt, Molluscum contagiosum virus
gcgcgcagcgccc

SEQ ID NO: 377280 - RNA, 15 nt, Molluscum contagiosum virus
gcgcgcaggaaaggu

SEQ ID NO: 377281 - RNA, 19 nt, Molluscum contagiosum virus
gcgcgcaucgcgggcacgc

SEQ ID NO: 377282 - RNA, 16 nt, Molluscum contagiosum virus
gcgcgccagcagcgcc

SEQ ID NO: 377283 - RNA, 15 nt, Molluscum contagiosum virus
gcgcgcccaccagca

SEQ ID NO: 377284 - RNA, 17 nt, Molluscum contagiosum virus
gcgcgcccgcugcgcgc

SEQ ID NO: 377285 - RNA, 16 nt, Molluscum contagiosum virus
gcgcgccgcgggccgc

SEQ ID NO: 377286 - RNA, 22 nt, Molluscum contagiosum virus
gcgcgccgcugcucgcuugccc

SEQ ID NO: 377287 - RNA, 22 nt, Molluscum contagiosum virus
gcgcgcgacgacguugugcucc

SEQ ID NO: 377288 - RNA, 13 nt, Molluscum contagiosum virus
gcgcgcgcaauuc

SEQ ID NO: 377289 - RNA, 15 nt, Molluscum contagiosum virus
gcgcgcgcagcgcgc

SEQ ID NO: 377290 - RNA, 21 nt, Molluscum contagiosum virus
gcgcgcgccauccagcgcauc

SEQ ID NO: 377291 - RNA, 15 nt, Molluscum contagiosum virus
gcgcgcggcgcgccc

SEQ ID NO: 377292 - RNA, 16 nt, Molluscum contagiosum virus
gcgcgcggugcugcgc

SEQ ID NO: 377293 - RNA, 16 nt, Molluscum contagiosum virus
gcgcgcgugcggacgc

SEQ ID NO: 377294 - RNA, 14 nt, Molluscum contagiosum virus
gcgcgcgugcuguc

SEQ ID NO: 377295 - RNA, 15 nt, Molluscum contagiosum virus
gcgcgcguugccuga

SEQ ID NO: 377296 - RNA, 21 nt, Molluscum contagiosum virus
gcgcgcguuugucgcgggcgc

SEQ ID NO: 377297 - RNA, 22 nt, Molluscum contagiosum virus
gcgcgcucgaacgcgcgugcgc

SEQ ID NO: 377298 - RNA, 15 nt, Molluscum contagiosum virus
gcgcgcucgaggcgc

SEQ ID NO: 377299 - RNA, 20 nt, Molluscum contagiosum virus
gcgcgcucgccaccgcgccc

SEQ ID NO: 377300 - RNA, 15 nt, Molluscum contagiosum virus
gcgcgcucgcgcagg

SEQ ID NO: 377301 - RNA, 12 nt, Molluscum contagiosum virus
gcgcgcugcgcc

SEQ ID NO: 377302 - RNA, 21 nt, Molluscum contagiosum virus
gcgcgcugcugguucugcucg

SEQ ID NO: 377303 - RNA, 16 nt, Molluscum contagiosum virus
gcgcgcuggcgugcgc

SEQ ID NO: 377304 - RNA, 22 nt, Molluscum contagiosum virus
gcgcgcuuuuugccgcucacag

SEQ ID NO: 377305 - RNA, 15 nt, Molluscum contagiosum virus
gcgcggaagaagcug

SEQ ID NO: 377306 - RNA, 14 nt, Molluscum contagiosum virus
gcgcggaggcgcua

SEQ ID NO: 377307 - RNA, 13 nt, Molluscum contagiosum virus
gcgcggcacgccc

SEQ ID NO: 377308 - RNA, 18 nt, Molluscum contagiosum virus
gcgcggcccgagcaggac

SEQ ID NO: 377309 - RNA, 17 nt, Molluscum contagiosum virus
gcgcggcgcucugccac

SEQ ID NO: 377310 - RNA, 20 nt, Molluscum contagiosum virus
gcgcggcgguguaugcucgu

SEQ ID NO: 377311 - RNA, 15 nt, Molluscum contagiosum virus
gcgcggcucgcgcac

SEQ ID NO: 377312 - RNA, 14 nt, Molluscum contagiosum virus
gcgcgggagcucac

SEQ ID NO: 377313 - RNA, 16 nt, Molluscum contagiosum virus
gcgcgggcacgccgca

SEQ ID NO: 377314 - RNA, 16 nt, Molluscum contagiosum virus
gcgcgguccagccgca

SEQ ID NO: 377315 - RNA, 15 nt, Molluscum contagiosum virus
gcgcggugcugcgcc

SEQ ID NO: 377316 - RNA, 19 nt, Molluscum contagiosum virus
gcgcggugcugcgccagga

SEQ ID NO: 377317 - RNA, 15 nt, Molluscum contagiosum virus
gcgcguaagaccaug

SEQ ID NO: 377318 - RNA, 16 nt, Molluscum contagiosum virus
gcgcguccgcaaagac

SEQ ID NO: 377319 - RNA, 19 nt, Molluscum contagiosum virus
gcgcgucugcgaguggcgc

SEQ ID NO: 377320 - RNA, 16 nt, Molluscum contagiosum virus
gcgcgugagcacgggc

SEQ ID NO: 377321 - RNA, 14 nt, Molluscum contagiosum virus
gcgcgugagccaau

SEQ ID NO: 377322 - RNA, 13 nt, Molluscum contagiosum virus
gcgcgugcgcagg

SEQ ID NO: 377323 - RNA, 23 nt, Molluscum contagiosum virus
gcgcgugcucgacucggaugcgc

SEQ ID NO: 377324 - RNA, 19 nt, Molluscum contagiosum virus
gcgcgugcuggacgcgcac

SEQ ID NO: 377325 - RNA, 15 nt, Molluscum contagiosum virus
gcgcguucagcgcac

SEQ ID NO: 377326 - RNA, 19 nt, Molluscum contagiosum virus
gcgcuacgacgacaugcac

SEQ ID NO: 377327 - RNA, 17 nt, Molluscum contagiosum virus
gcgcuacuugcuggcgc

SEQ ID NO: 377328 - RNA, 18 nt, Molluscum contagiosum virus
gcgcuagccccagcacca

SEQ ID NO: 377329 - RNA, 14 nt, Molluscum contagiosum virus
gcgcucaacaucca

SEQ ID NO: 377330 - RNA, 15 nt, Molluscum contagiosum virus
gcgcuccaugcugcc

SEQ ID NO: 377331 - RNA, 16 nt, Molluscum contagiosum virus
gcgcucgagcuccgag

SEQ ID NO: 377332 - RNA, 17 nt, Molluscum contagiosum virus
gcgcucggcguggugcu

SEQ ID NO: 377333 - RNA, 19 nt, Molluscum contagiosum virus
gcgcucgucaaugcgcacg

SEQ ID NO: 377334 - RNA, 19 nt, Molluscum contagiosum virus
gcgcucuacuaaaguacga

SEQ ID NO: 377335 - RNA, 17 nt, Molluscum contagiosum virus
gcgcucucagagcauua

SEQ ID NO: 377336 - RNA, 19 nt, Molluscum contagiosum virus
gcgcucuucguggugcuca

SEQ ID NO: 377337 - RNA, 20 nt, Molluscum contagiosum virus
gcgcucuucguggugcucac

SEQ ID NO: 377338 - RNA, 22 nt, Molluscum contagiosum virus
gcgcugcaaccucgacauuucg

SEQ ID NO: 377339 - RNA, 21 nt, Molluscum contagiosum virus
gcgcugcccgcgcacaacaag

SEQ ID NO: 377340 - RNA, 13 nt, Molluscum contagiosum virus
gcgcugcgccacu

SEQ ID NO: 377341 - RNA, 22 nt, Molluscum contagiosum virus
gcgcugcuacaagcggugcagc

SEQ ID NO: 377342 - RNA, 22 nt, Molluscum contagiosum virus
gcgcuggagaaagaagugugcc

SEQ ID NO: 377343 - RNA, 16 nt, Molluscum contagiosum virus
gcgcuggaugcugcuc

SEQ ID NO: 377344 - RNA, 16 nt, Molluscum contagiosum virus
gcgcuggcccacgcug

SEQ ID NO: 377345 - RNA, 14 nt, Molluscum contagiosum virus
gcgcuggcgugcgc

SEQ ID NO: 377346 - RNA, 18 nt, Molluscum contagiosum virus
gcgcuucacggagaucag

SEQ ID NO: 377347 - RNA, 14 nt, Molluscum contagiosum virus
gcgcuucuuugcgc

SEQ ID NO: 377348 - RNA, 12 nt, Molluscum contagiosum virus
gcgcuugcucac

SEQ ID NO: 377349 - RNA, 15 nt, Molluscum contagiosum virus
gcgcuugggcacugc

SEQ ID NO: 377350 - RNA, 16 nt, Molluscum contagiosum virus
gcgcuugggcacugcu

SEQ ID NO: 377351 - RNA, 22 nt, Molluscum contagiosum virus
gcgcuuuucgcacgagcgaaaa

SEQ ID NO: 377352 - RNA, 17 nt, Molluscum contagiosum virus
gcgcuuuuuuuguccug

SEQ ID NO: 377353 - RNA, 22 nt, Molluscum contagiosum virus
gcggaacuggacgccguugcgc

SEQ ID NO: 377354 - RNA, 20 nt, Molluscum contagiosum virus
gcggaagaaacagccaugug

SEQ ID NO: 377355 - RNA, 21 nt, Molluscum contagiosum virus
gcggaagcuccugcugguuca

SEQ ID NO: 377356 - RNA, 17 nt, Molluscum contagiosum virus
gcggaauaaauggacga

SEQ ID NO: 377357 - RNA, 13 nt, Molluscum contagiosum virus
gcggacaagacaa

SEQ ID NO: 377358 - RNA, 22 nt, Molluscum contagiosum virus
gcggacacguuccagagcacug

SEQ ID NO: 377359 - RNA, 20 nt, Molluscum contagiosum virus
gcggacagagcccgcggcgc

SEQ ID NO: 377360 - RNA, 23 nt, Molluscum contagiosum virus
gcggacgaaagcgucgugugcgc

SEQ ID NO: 377361 - RNA, 19 nt, Molluscum contagiosum virus
gcggacgaagcugugcaag

SEQ ID NO: 377362 - RNA, 13 nt, Molluscum contagiosum virus
gcggacgccggcg

SEQ ID NO: 377363 - RNA, 16 nt, Molluscum contagiosum virus
gcggagaucgccgcgc

SEQ ID NO: 377364 - RNA, 14 nt, Molluscum contagiosum virus
gcggagcucgccaa

SEQ ID NO: 377365 - RNA, 23 nt, Molluscum contagiosum virus
gcggauguccuugaugccguggu

SEQ ID NO: 377366 - RNA, 15 nt, Molluscum contagiosum virus
gcggcaaccgcgccc

SEQ ID NO: 377367 - RNA, 21 nt, Molluscum contagiosum virus
gcggcaaccgcgcccgcgcgc

SEQ ID NO: 377368 - RNA, 16 nt, Molluscum contagiosum virus
gcggcaacgagcacgu

SEQ ID NO: 377369 - RNA, 18 nt, Molluscum contagiosum virus
gcggcaacgagcacgugu

SEQ ID NO: 377370 - RNA, 16 nt, Molluscum contagiosum virus
gcggcacacacuugca

SEQ ID NO: 377371 - RNA, 17 nt, Molluscum contagiosum virus
gcggcacacacuugcac

SEQ ID NO: 377372 - RNA, 18 nt, Molluscum contagiosum virus
gcggcacgccgcucggca

SEQ ID NO: 377373 - RNA, 15 nt, Molluscum contagiosum virus
gcggcacgcgagcgc

SEQ ID NO: 377374 - RNA, 23 nt, Molluscum contagiosum virus
gcggcagcucugcagcgccgcgc

SEQ ID NO: 377375 - RNA, 20 nt, Molluscum contagiosum virus
gcggcaggaagcuggcgcgg

SEQ ID NO: 377376 - RNA, 15 nt, Molluscum contagiosum virus
gcggcaugcgcgcgc

SEQ ID NO: 377377 - RNA, 18 nt, Molluscum contagiosum virus
gcggccaccagcgcggcc

SEQ ID NO: 377378 - RNA, 19 nt, Molluscum contagiosum virus
gcggcccgcgggcugcaag

SEQ ID NO: 377379 - RNA, 18 nt, Molluscum contagiosum virus
gcggccgccgugugcaca

SEQ ID NO: 377380 - RNA, 15 nt, Molluscum contagiosum virus
gcggccgcgagacgc

SEQ ID NO: 377381 - RNA, 14 nt, Molluscum contagiosum virus
gcggccguggcacu

SEQ ID NO: 377382 - RNA, 14 nt, Molluscum contagiosum virus
gcggccguggcugc

SEQ ID NO: 377383 - RNA, 15 nt, Molluscum contagiosum virus
gcggccguugccgga

SEQ ID NO: 377384 - RNA, 19 nt, Molluscum contagiosum virus
gcggccucccucgucgcgc

SEQ ID NO: 377385 - RNA, 21 nt, Molluscum contagiosum virus
gcggcgagcgcauucgcgcgc

SEQ ID NO: 377386 - RNA, 12 nt, Molluscum contagiosum virus
gcggcgcagugc

SEQ ID NO: 377387 - RNA, 15 nt, Molluscum contagiosum virus
gcggcgccguggcgc

SEQ ID NO: 377388 - RNA, 18 nt, Molluscum contagiosum virus
gcggcgcgacggcgacgc

SEQ ID NO: 377389 - RNA, 14 nt, Molluscum contagiosum virus
gcggcgcgccgcgc

SEQ ID NO: 377390 - RNA, 14 nt, Molluscum contagiosum virus
gcggcgcgugucgc

SEQ ID NO: 377391 - RNA, 16 nt, Molluscum contagiosum virus
gcggcgcucguggcgc

SEQ ID NO: 377392 - RNA, 13 nt, Molluscum contagiosum virus
gcggcgcugcuac

SEQ ID NO: 377393 - RNA, 14 nt, Molluscum contagiosum virus
gcggcgucgcgcgc

SEQ ID NO: 377394 - RNA, 14 nt, Molluscum contagiosum virus
gcggcuccgcgcgc

SEQ ID NO: 377395 - RNA, 15 nt, Molluscum contagiosum virus
gcggcucucgcggcc

SEQ ID NO: 377396 - RNA, 13 nt, Molluscum contagiosum virus
gcggcugcggcgc

SEQ ID NO: 377397 - RNA, 19 nt, Molluscum contagiosum virus
gcggcugugcccgcggcgu

SEQ ID NO: 377398 - RNA, 17 nt, Molluscum contagiosum virus
gcggcuuucucacgccc

SEQ ID NO: 377399 - RNA, 22 nt, Molluscum contagiosum virus
gcgggaccugguucaugcuggc

SEQ ID NO: 377400 - RNA, 16 nt, Molluscum contagiosum virus
gcgggcaagcagggcc

SEQ ID NO: 377401 - RNA, 23 nt, Molluscum contagiosum virus
gcgggcacauccgcuaccuggug

SEQ ID NO: 377402 - RNA, 20 nt, Molluscum contagiosum virus
gcgggcacgcagcucuucca

SEQ ID NO: 377403 - RNA, 22 nt, Molluscum contagiosum virus
gcgggcacggguguacaaagag

SEQ ID NO: 377404 - RNA, 22 nt, Molluscum contagiosum virus
gcgggccaguacuacucggcgc

SEQ ID NO: 377405 - RNA, 21 nt, Molluscum contagiosum virus
gcgggccaugucugugcgcga

SEQ ID NO: 377406 - RNA, 13 nt, Molluscum contagiosum virus
gcgggccugcgcc

SEQ ID NO: 377407 - RNA, 14 nt, Molluscum contagiosum virus
gcgggccugcgccc

SEQ ID NO: 377408 - RNA, 17 nt, Molluscum contagiosum virus
gcgggccugcgcccgca

SEQ ID NO: 377409 - RNA, 19 nt, Molluscum contagiosum virus
gcgggccuguaccugcgac

SEQ ID NO: 377410 - RNA, 18 nt, Molluscum contagiosum virus
gcgggccuguccgcgggc

SEQ ID NO: 377411 - RNA, 13 nt, Molluscum contagiosum virus
gcgggcgcaggcc

SEQ ID NO: 377412 - RNA, 14 nt, Molluscum contagiosum virus
gcgggcgcaggccc

SEQ ID NO: 377413 - RNA, 15 nt, Molluscum contagiosum virus
gcgggcgccgggcgc

SEQ ID NO: 377414 - RNA, 12 nt, Molluscum contagiosum virus
gcgggcgcgcac

SEQ ID NO: 377415 - RNA, 14 nt, Molluscum contagiosum virus
gcgggcggcggccc

SEQ ID NO: 377416 - RNA, 20 nt, Molluscum contagiosum virus
gcgggcguguccgcgggcgc

SEQ ID NO: 377417 - RNA, 19 nt, Molluscum contagiosum virus
gcgggcucuuccaccggca

SEQ ID NO: 377418 - RNA, 15 nt, Molluscum contagiosum virus
gcggggcaggcagug

SEQ ID NO: 377419 - RNA, 18 nt, Molluscum contagiosum virus
gcgggugccgccgugggc

SEQ ID NO: 377420 - RNA, 21 nt, Molluscum contagiosum virus
gcgguccgacucggugcucau

SEQ ID NO: 377421 - RNA, 13 nt, Molluscum contagiosum virus
gcggugcagcgcc

SEQ ID NO: 377422 - RNA, 14 nt, Molluscum contagiosum virus
gcggugcagcgccc

SEQ ID NO: 377423 - RNA, 16 nt, Molluscum contagiosum virus
gcggugcgcacaugcc

SEQ ID NO: 377424 - RNA, 19 nt, Molluscum contagiosum virus
gcggugcgggcgcgagcga

SEQ ID NO: 377425 - RNA, 14 nt, Molluscum contagiosum virus
gcgguggcaggcgc

SEQ ID NO: 377426 - RNA, 12 nt, Molluscum contagiosum virus
gcguaagaccau

SEQ ID NO: 377427 - RNA, 20 nt, Molluscum contagiosum virus
gcguacagcgcgcgugccgc

SEQ ID NO: 377428 - RNA, 16 nt, Molluscum contagiosum virus
gcguacauaaaaugga

SEQ ID NO: 377429 - RNA, 21 nt, Molluscum contagiosum virus
gcguacaucccgcacgugggc

SEQ ID NO: 377430 - RNA, 19 nt, Molluscum contagiosum virus
gcguaccaagccgugacgc

SEQ ID NO: 377431 - RNA, 11 nt, Molluscum contagiosum virus
gcguaccagcg

SEQ ID NO: 377432 - RNA, 22 nt, Molluscum contagiosum virus
gcguacgcacgugccgugcugu

SEQ ID NO: 377433 - RNA, 18 nt, Molluscum contagiosum virus
gcguacgcgccggggcgc

SEQ ID NO: 377434 - RNA, 14 nt, Molluscum contagiosum virus
gcguacgcgugcgc

SEQ ID NO: 377435 - RNA, 16 nt, Molluscum contagiosum virus
gcguacgugcacgugg

SEQ ID NO: 377436 - RNA, 17 nt, Molluscum contagiosum virus
gcguacguguccaugca

SEQ ID NO: 377437 - RNA, 22 nt, Molluscum contagiosum virus
gcguacucgugucacaauggca

SEQ ID NO: 377438 - RNA, 23 nt, Molluscum contagiosum virus
gcguacugggagcuuuccuugcg

SEQ ID NO: 377439 - RNA, 13 nt, Molluscum contagiosum virus
gcguacuuggaag

SEQ ID NO: 377440 - RNA, 21 nt, Molluscum contagiosum virus
gcguagagcaauacguggcgc

SEQ ID NO: 377441 - RNA, 21 nt, Molluscum contagiosum virus
gcgucaagaucaaccgcaagg

SEQ ID NO: 377442 - RNA, 18 nt, Molluscum contagiosum virus
gcguccacgacgagccug

SEQ ID NO: 377443 - RNA, 22 nt, Molluscum contagiosum virus
gcguccgcccuuacgacaagcg

SEQ ID NO: 377444 - RNA, 14 nt, Molluscum contagiosum virus
gcguccggcgcucg

SEQ ID NO: 377445 - RNA, 16 nt, Molluscum contagiosum virus
gcgucgagggcgccgg

SEQ ID NO: 377446 - RNA, 19 nt, Molluscum contagiosum virus
gcgucgcgcgccgcgcugg

SEQ ID NO: 377447 - RNA, 20 nt, Molluscum contagiosum virus
gcgucgcggagcgcgcacgg

SEQ ID NO: 377448 - RNA, 17 nt, Molluscum contagiosum virus
gcgucguagacgcgccc

SEQ ID NO: 377449 - RNA, 18 nt, Molluscum contagiosum virus
gcgucuuacugcugcaau

SEQ ID NO: 377450 - RNA, 21 nt, Molluscum contagiosum virus
gcgugacacaccgcguggaca

SEQ ID NO: 377451 - RNA, 15 nt, Molluscum contagiosum virus
gcgugaccagugcgu

SEQ ID NO: 377452 - RNA, 17 nt, Molluscum contagiosum virus
gcgugacccucuucgac

SEQ ID NO: 377453 - RNA, 20 nt, Molluscum contagiosum virus
gcgugacucggccgcggggc

SEQ ID NO: 377454 - RNA, 14 nt, Molluscum contagiosum virus
gcgugagagccauu

SEQ ID NO: 377455 - RNA, 19 nt, Molluscum contagiosum virus
gcgugagcgccuaccgcaa

SEQ ID NO: 377456 - RNA, 21 nt, Molluscum contagiosum virus
gcgugaggaggcggcacugcu

SEQ ID NO: 377457 - RNA, 15 nt, Molluscum contagiosum virus
gcgugcaguuucucc

SEQ ID NO: 377458 - RNA, 15 nt, Molluscum contagiosum virus
gcgugccuguggcgc

SEQ ID NO: 377459 - RNA, 15 nt, Molluscum contagiosum virus
gcgugcgaguguucc

SEQ ID NO: 377460 - RNA, 15 nt, Molluscum contagiosum virus
gcgugcgcaccagcu

SEQ ID NO: 377461 - RNA, 20 nt, Molluscum contagiosum virus
gcgugcguacgugcacgugg

SEQ ID NO: 377462 - RNA, 14 nt, Molluscum contagiosum virus
gcgugcgugcugcg

SEQ ID NO: 377463 - RNA, 14 nt, Molluscum contagiosum virus
gcgugcucacgccc

SEQ ID NO: 377464 - RNA, 16 nt, Molluscum contagiosum virus
gcgugcugcgcggcgc

SEQ ID NO: 377465 - RNA, 15 nt, Molluscum contagiosum virus
gcgugcugucagugg

SEQ ID NO: 377466 - RNA, 19 nt, Molluscum contagiosum virus
gcgugcuuguagcgcaagg

SEQ ID NO: 377467 - RNA, 19 nt, Molluscum contagiosum virus
gcguggacaacagcacgac

SEQ ID NO: 377468 - RNA, 22 nt, Molluscum contagiosum virus
gcguggacagcaucccugccac

SEQ ID NO: 377469 - RNA, 18 nt, Molluscum contagiosum virus
gcguggaggacaccgccg

SEQ ID NO: 377470 - RNA, 17 nt, Molluscum contagiosum virus
gcguggcgcaccugcua

SEQ ID NO: 377471 - RNA, 17 nt, Molluscum contagiosum virus
gcgugguguucgccggc

SEQ ID NO: 377472 - RNA, 22 nt, Molluscum contagiosum virus
gcguguacucgaaggugcucag

SEQ ID NO: 377473 - RNA, 17 nt, Molluscum contagiosum virus
gcgugugguugcuugca

SEQ ID NO: 377474 - RNA, 15 nt, Molluscum contagiosum virus
gcguuccaggaacgc

SEQ ID NO: 377475 - RNA, 18 nt, Molluscum contagiosum virus
gcguucgcgcgugcugga

SEQ ID NO: 377476 - RNA, 20 nt, Molluscum contagiosum virus
gcguucuagcagcgugcgca

SEQ ID NO: 377477 - RNA, 15 nt, Molluscum contagiosum virus
gcguucuccaggaac

SEQ ID NO: 377478 - RNA, 17 nt, Molluscum contagiosum virus
gcguucuccaggaacgc

SEQ ID NO: 377479 - RNA, 16 nt, Molluscum contagiosum virus
gcguucuucguggcgc

SEQ ID NO: 377480 - RNA, 21 nt, Molluscum contagiosum virus
gcguuggcaacgcgggggcca

SEQ ID NO: 377481 - RNA, 14 nt, Molluscum contagiosum virus
gcguuucucaggua

SEQ ID NO: 377482 - RNA, 15 nt, Molluscum contagiosum virus
gcguuucucagguac

SEQ ID NO: 377483 - RNA, 22 nt, Molluscum contagiosum virus
gcuacaggacguccuugucgaa

SEQ ID NO: 377484 - RNA, 14 nt, Molluscum contagiosum virus
gcuacaugcacaga

SEQ ID NO: 377485 - RNA, 18 nt, Molluscum contagiosum virus
gcuaccaagaacagagaa

SEQ ID NO: 377486 - RNA, 16 nt, Molluscum contagiosum virus
gcuaccagcucgcgca

SEQ ID NO: 377487 - RNA, 20 nt, Molluscum contagiosum virus
gcuacccguugcugcgccac

SEQ ID NO: 377488 - RNA, 15 nt, Molluscum contagiosum virus
gcuaccgcaagcuca

SEQ ID NO: 377489 - RNA, 15 nt, Molluscum contagiosum virus
gcuaccugaugcgca

SEQ ID NO: 377490 - RNA, 15 nt, Molluscum contagiosum virus
gcuaccugcgcaagc

SEQ ID NO: 377491 - RNA, 19 nt, Molluscum contagiosum virus
gcuaccugguggagcacuu

SEQ ID NO: 377492 - RNA, 13 nt, Molluscum contagiosum virus
gcuacgcacuuca

SEQ ID NO: 377493 - RNA, 14 nt, Molluscum contagiosum virus
gcuacgcgagcacu

SEQ ID NO: 377494 - RNA, 15 nt, Molluscum contagiosum virus
gcuacgcgagcacug

SEQ ID NO: 377495 - RNA, 17 nt, Molluscum contagiosum virus
gcuacgcgagcacugcg

SEQ ID NO: 377496 - RNA, 23 nt, Molluscum contagiosum virus
gcuacgugcgcaccaucuucaac

SEQ ID NO: 377497 - RNA, 18 nt, Molluscum contagiosum virus
gcuacugcaacguggcgc

SEQ ID NO: 377498 - RNA, 20 nt, Molluscum contagiosum virus
gcuacuucacacgucuugca

SEQ ID NO: 377499 - RNA, 18 nt, Molluscum contagiosum virus
gcuagcaggcgucgcgca

SEQ ID NO: 377500 - RNA, 19 nt, Molluscum contagiosum virus
gcuagcguucccaagcaaa

SEQ ID NO: 377501 - RNA, 16 nt, Molluscum contagiosum virus
gcuagcugcgugcgua

SEQ ID NO: 377502 - RNA, 17 nt, Molluscum contagiosum virus
gcuagucguuggcgcgc

SEQ ID NO: 377503 - RNA, 23 nt, Molluscum contagiosum virus
gcuagugcagaugaggcugcucu

SEQ ID NO: 377504 - RNA, 20 nt, Molluscum contagiosum virus
gcuagugcgcgccaagaaca

SEQ ID NO: 377505 - RNA, 14 nt, Molluscum contagiosum virus
gcucaagaucucgc

SEQ ID NO: 377506 - RNA, 15 nt, Molluscum contagiosum virus
gcucaagcacugccu

SEQ ID NO: 377507 - RNA, 12 nt, Molluscum contagiosum virus
gcucaagcugcu

SEQ ID NO: 377508 - RNA, 19 nt, Molluscum contagiosum virus
gcucagaacgacaccgcga

SEQ ID NO: 377509 - RNA, 19 nt, Molluscum contagiosum virus
gcucagcaggcuguguucc

SEQ ID NO: 377510 - RNA, 17 nt, Molluscum contagiosum virus
gcucaucggcgagcucu

SEQ ID NO: 377511 - RNA, 18 nt, Molluscum contagiosum virus
gcucauggacaugcucga

SEQ ID NO: 377512 - RNA, 19 nt, Molluscum contagiosum virus
gcucauggacaugcucgac

SEQ ID NO: 377513 - RNA, 19 nt, Molluscum contagiosum virus
gcuccagcauggcgccaca

SEQ ID NO: 377514 - RNA, 12 nt, Molluscum contagiosum virus
gcuccaugacag

SEQ ID NO: 377515 - RNA, 14 nt, Molluscum contagiosum virus
gcuccccgccagca

SEQ ID NO: 377516 - RNA, 11 nt, Molluscum contagiosum virus
gcucccgcugu

SEQ ID NO: 377517 - RNA, 21 nt, Molluscum contagiosum virus
gcucccucgcgcgcagcuuua

SEQ ID NO: 377518 - RNA, 20 nt, Molluscum contagiosum virus
gcuccgcaagaagcgaaaca

SEQ ID NO: 377519 - RNA, 13 nt, Molluscum contagiosum virus
gcuccgcacguga

SEQ ID NO: 377520 - RNA, 13 nt, Molluscum contagiosum virus
gcuccgcacgugg

SEQ ID NO: 377521 - RNA, 21 nt, Molluscum contagiosum virus
gcuccuacaucgacaagcacg

SEQ ID NO: 377522 - RNA, 22 nt, Molluscum contagiosum virus
gcuccuauaaauggccgcgccc

SEQ ID NO: 377523 - RNA, 17 nt, Molluscum contagiosum virus
gcuccucgcacgggcgc

SEQ ID NO: 377524 - RNA, 14 nt, Molluscum contagiosum virus
gcuccuucucaggg

SEQ ID NO: 377525 - RNA, 18 nt, Molluscum contagiosum virus
gcuccuucuucaaguacc

SEQ ID NO: 377526 - RNA, 20 nt, Molluscum contagiosum virus
gcuccuucuucaaguaccug

SEQ ID NO: 377527 - RNA, 17 nt, Molluscum contagiosum virus
gcucgacauuaacugag

SEQ ID NO: 377528 - RNA, 18 nt, Molluscum contagiosum virus
gcucgacguguuuuaccc

SEQ ID NO: 377529 - RNA, 20 nt, Molluscum contagiosum virus
gcucgacucggaugcgcugc

SEQ ID NO: 377530 - RNA, 12 nt, Molluscum contagiosum virus
gcucgagaacga

SEQ ID NO: 377531 - RNA, 15 nt, Molluscum contagiosum virus
gcucgagcgcgcgcc

SEQ ID NO: 377532 - RNA, 14 nt, Molluscum contagiosum virus
gcucgcaaacacaa

SEQ ID NO: 377533 - RNA, 19 nt, Molluscum contagiosum virus
gcucgcacuugccgggcga

SEQ ID NO: 377534 - RNA, 17 nt, Molluscum contagiosum virus
gcucgcagcacaugcag

SEQ ID NO: 377535 - RNA, 14 nt, Molluscum contagiosum virus
gcucgccgcgcgcc

SEQ ID NO: 377536 - RNA, 18 nt, Molluscum contagiosum virus
gcucgcgugcgugcugcg

SEQ ID NO: 377537 - RNA, 14 nt, Molluscum contagiosum virus
gcucgcgugcuagg

SEQ ID NO: 377538 - RNA, 13 nt, Molluscum contagiosum virus
gcucgcugccugg

SEQ ID NO: 377539 - RNA, 12 nt, Molluscum contagiosum virus
gcucgcuugccg

SEQ ID NO: 377540 - RNA, 23 nt, Molluscum contagiosum virus
gcucgcuugccggcggcgcaagc

SEQ ID NO: 377541 - RNA, 16 nt, Molluscum contagiosum virus
gcucggacacacgcac

SEQ ID NO: 377542 - RNA, 16 nt, Molluscum contagiosum virus
gcucggcgugaucuuc

SEQ ID NO: 377543 - RNA, 19 nt, Molluscum contagiosum virus
gcucgggcuagcaagcacg

SEQ ID NO: 377544 - RNA, 23 nt, Molluscum contagiosum virus
gcucgugaagcugucaacagugc

SEQ ID NO: 377545 - RNA, 14 nt, Molluscum contagiosum virus
gcucgugcgacaaa

SEQ ID NO: 377546 - RNA, 20 nt, Molluscum contagiosum virus
gcucgugcucucugcgcagg

SEQ ID NO: 377547 - RNA, 14 nt, Molluscum contagiosum virus
gcucuacgccagcg

SEQ ID NO: 377548 - RNA, 19 nt, Molluscum contagiosum virus
gcucuacuuccacgagcug

SEQ ID NO: 377549 - RNA, 15 nt, Molluscum contagiosum virus
gcucucagagcauua

SEQ ID NO: 377550 - RNA, 19 nt, Molluscum contagiosum virus
gcucucgagcucacaggua

SEQ ID NO: 377551 - RNA, 15 nt, Molluscum contagiosum virus
gcucucggccaugga

SEQ ID NO: 377552 - RNA, 23 nt, Molluscum contagiosum virus
gcucucggccauggaggcgcuag

SEQ ID NO: 377553 - RNA, 20 nt, Molluscum contagiosum virus
gcucugucccgcaagccaca

SEQ ID NO: 377554 - RNA, 20 nt, Molluscum contagiosum virus
gcucuuccgcgagcacgugg

SEQ ID NO: 377555 - RNA, 20 nt, Molluscum contagiosum virus
gcucuucucgcagcguucca

SEQ ID NO: 377556 - RNA, 20 nt, Molluscum contagiosum virus
gcucuuguuguucguacuca

SEQ ID NO: 377557 - RNA, 22 nt, Molluscum contagiosum virus
gcucuuuuuccugaacaagcug

SEQ ID NO: 377558 - RNA, 17 nt, Molluscum contagiosum virus
gcugaccgagcgugggc

SEQ ID NO: 377559 - RNA, 19 nt, Molluscum contagiosum virus
gcugacggccggcgggcgc

SEQ ID NO: 377560 - RNA, 18 nt, Molluscum contagiosum virus
gcugacucggacacugga

SEQ ID NO: 377561 - RNA, 13 nt, Molluscum contagiosum virus
gcugagccacaaa

SEQ ID NO: 377562 - RNA, 22 nt, Molluscum contagiosum virus
gcugcaagccagcccgcugcgc

SEQ ID NO: 377563 - RNA, 19 nt, Molluscum contagiosum virus
gcugcacacaccgcgagca

SEQ ID NO: 377564 - RNA, 13 nt, Molluscum contagiosum virus
gcugcacaguuca

SEQ ID NO: 377565 - RNA, 18 nt, Molluscum contagiosum virus
gcugcacgugcagcggcg

SEQ ID NO: 377566 - RNA, 23 nt, Molluscum contagiosum virus
gcugcacuacaaccauggcgcgc

SEQ ID NO: 377567 - RNA, 14 nt, Molluscum contagiosum virus
gcugcagaacugcc

SEQ ID NO: 377568 - RNA, 15 nt, Molluscum contagiosum virus
gcugcagaacugccu

SEQ ID NO: 377569 - RNA, 22 nt, Molluscum contagiosum virus
gcugcagagcgugcuggucaac

SEQ ID NO: 377570 - RNA, 23 nt, Molluscum contagiosum virus
gcugcagcguauggaucuucuca

SEQ ID NO: 377571 - RNA, 15 nt, Molluscum contagiosum virus
gcugcagcugcgcga

SEQ ID NO: 377572 - RNA, 20 nt, Molluscum contagiosum virus
gcugcccuuuagcguggcgc

SEQ ID NO: 377573 - RNA, 23 nt, Molluscum contagiosum virus
gcugccgcuucgugcgcggagac

SEQ ID NO: 377574 - RNA, 24 nt, Molluscum contagiosum virus
gcugccgggagaggaaaggcgcac

SEQ ID NO: 377575 - RNA, 20 nt, Molluscum contagiosum virus
gcugccugacgucgcagggg

SEQ ID NO: 377576 - RNA, 17 nt, Molluscum contagiosum virus
gcugcgcaggugcacgc

SEQ ID NO: 377577 - RNA, 15 nt, Molluscum contagiosum virus
gcugcgccacugcca

SEQ ID NO: 377578 - RNA, 15 nt, Molluscum contagiosum virus
gcugcgccgccagcg

SEQ ID NO: 377579 - RNA, 18 nt, Molluscum contagiosum virus
gcugcgcgagcgcgcgcu

SEQ ID NO: 377580 - RNA, 16 nt, Molluscum contagiosum virus
gcugcgcgaguaccug

SEQ ID NO: 377581 - RNA, 15 nt, Molluscum contagiosum virus
gcugcgcuacaugua

SEQ ID NO: 377582 - RNA, 15 nt, Molluscum contagiosum virus
gcugcgcuaccacga

SEQ ID NO: 377583 - RNA, 18 nt, Molluscum contagiosum virus
gcugcgcuccaugcugcc

SEQ ID NO: 377584 - RNA, 16 nt, Molluscum contagiosum virus
gcugcggacaagacaa

SEQ ID NO: 377585 - RNA, 13 nt, Molluscum contagiosum virus
gcugcggcgcucg

SEQ ID NO: 377586 - RNA, 21 nt, Molluscum contagiosum virus
gcugcgguaucuacacuccgu

SEQ ID NO: 377587 - RNA, 17 nt, Molluscum contagiosum virus
gcugcgucacaagcacc

SEQ ID NO: 377588 - RNA, 21 nt, Molluscum contagiosum virus
gcugcguuuccagggcaguac

SEQ ID NO: 377589 - RNA, 18 nt, Molluscum contagiosum virus
gcugcuagagaaccugug

SEQ ID NO: 377590 - RNA, 20 nt, Molluscum contagiosum virus
gcugcucaaggacuaccagc

SEQ ID NO: 377591 - RNA, 20 nt, Molluscum contagiosum virus
gcugcuccccgccagcacca

SEQ ID NO: 377592 - RNA, 15 nt, Molluscum contagiosum virus
gcugcucuacuucca

SEQ ID NO: 377593 - RNA, 18 nt, Molluscum contagiosum virus
gcugcucuccgaagaaga

SEQ ID NO: 377594 - RNA, 13 nt, Molluscum contagiosum virus
gcugcugcacagc

SEQ ID NO: 377595 - RNA, 19 nt, Molluscum contagiosum virus
gcugcugcagaacugccug

SEQ ID NO: 377596 - RNA, 14 nt, Molluscum contagiosum virus
gcugcugcucgcac

SEQ ID NO: 377597 - RNA, 18 nt, Molluscum contagiosum virus
gcugcuggcggugcucuu

SEQ ID NO: 377598 - RNA, 21 nt, Molluscum contagiosum virus
gcugcugggcaucgugcucuu

SEQ ID NO: 377599 - RNA, 19 nt, Molluscum contagiosum virus
gcugcuuccgcaccugguc

SEQ ID NO: 377600 - RNA, 13 nt, Molluscum contagiosum virus
gcuggacacucgc

SEQ ID NO: 377601 - RNA, 13 nt, Molluscum contagiosum virus
gcuggacgugggc

SEQ ID NO: 377602 - RNA, 14 nt, Molluscum contagiosum virus
gcuggacuuccugc

SEQ ID NO: 377603 - RNA, 15 nt, Molluscum contagiosum virus
gcuggacuugcgcga

SEQ ID NO: 377604 - RNA, 22 nt, Molluscum contagiosum virus
gcuggagaacggcgugcgagug

SEQ ID NO: 377605 - RNA, 16 nt, Molluscum contagiosum virus
gcuggagacggcagug

SEQ ID NO: 377606 - RNA, 20 nt, Molluscum contagiosum virus
gcuggagaucgacaagauca

SEQ ID NO: 377607 - RNA, 13 nt, Molluscum contagiosum virus
gcuggagcacgac

SEQ ID NO: 377608 - RNA, 22 nt, Molluscum contagiosum virus
gcuggagcgagugcgcgugcgc

SEQ ID NO: 377609 - RNA, 21 nt, Molluscum contagiosum virus
gcuggagcugccgcugcgcga

SEQ ID NO: 377610 - RNA, 15 nt, Molluscum contagiosum virus
gcuggcaccgggcgc

SEQ ID NO: 377611 - RNA, 23 nt, Molluscum contagiosum virus
gcuggcacggccggcgccgcgca

SEQ ID NO: 377612 - RNA, 17 nt, Molluscum contagiosum virus
gcuggccgaugccuaug

SEQ ID NO: 377613 - RNA, 15 nt, Molluscum contagiosum virus
gcuggcgagcacguc

SEQ ID NO: 377614 - RNA, 15 nt, Molluscum contagiosum virus
gcuggcgcgcggaga

SEQ ID NO: 377615 - RNA, 21 nt, Molluscum contagiosum virus
gcuggcgcucggcguggugcu

SEQ ID NO: 377616 - RNA, 20 nt, Molluscum contagiosum virus
gcuggcggcgcacgcgagca

SEQ ID NO: 377617 - RNA, 20 nt, Molluscum contagiosum virus
gcugggcacaagcuuucuca

SEQ ID NO: 377618 - RNA, 14 nt, Molluscum contagiosum virus
gcugggcgugggca

SEQ ID NO: 377619 - RNA, 18 nt, Molluscum contagiosum virus
gcuggugaucacgcacga

SEQ ID NO: 377620 - RNA, 13 nt, Molluscum contagiosum virus
gcugguucugcuc

SEQ ID NO: 377621 - RNA, 14 nt, Molluscum contagiosum virus
gcugguuugcgcga

SEQ ID NO: 377622 - RNA, 13 nt, Molluscum contagiosum virus
gcuguacaugccg

SEQ ID NO: 377623 - RNA, 22 nt, Molluscum contagiosum virus
gcugucaacagugcgugccagg

SEQ ID NO: 377624 - RNA, 19 nt, Molluscum contagiosum virus
gcuguccaaggugaacgac

SEQ ID NO: 377625 - RNA, 17 nt, Molluscum contagiosum virus
gcuguccuacuucguca

SEQ ID NO: 377626 - RNA, 22 nt, Molluscum contagiosum virus
gcugugccaucucgcacacugc

SEQ ID NO: 377627 - RNA, 16 nt, Molluscum contagiosum virus
gcugugcguacaccua

SEQ ID NO: 377628 - RNA, 14 nt, Molluscum contagiosum virus
gcuguucgcggcgc

SEQ ID NO: 377629 - RNA, 12 nt, Molluscum contagiosum virus
gcuguugcugcu

SEQ ID NO: 377630 - RNA, 18 nt, Molluscum contagiosum virus
gcuucacgcugcucgugc

SEQ ID NO: 377631 - RNA, 22 nt, Molluscum contagiosum virus
gcuucacgcugcucgugcugcu

SEQ ID NO: 377632 - RNA, 16 nt, Molluscum contagiosum virus
gcuucauccgcgcgcu

SEQ ID NO: 377633 - RNA, 15 nt, Molluscum contagiosum virus
gcuucccgaguacua

SEQ ID NO: 377634 - RNA, 19 nt, Molluscum contagiosum virus
gcuuccgacgucaagcauc

SEQ ID NO: 377635 - RNA, 19 nt, Molluscum contagiosum virus
gcuuccgcaccuggucgag

SEQ ID NO: 377636 - RNA, 18 nt, Molluscum contagiosum virus
gcuuccucuacaccagcu

SEQ ID NO: 377637 - RNA, 19 nt, Molluscum contagiosum virus
gcuuccucuacaccagcug

SEQ ID NO: 377638 - RNA, 15 nt, Molluscum contagiosum virus
gcuucgagugcuccc

SEQ ID NO: 377639 - RNA, 16 nt, Molluscum contagiosum virus
gcuucgcguacauccc

SEQ ID NO: 377640 - RNA, 23 nt, Molluscum contagiosum virus
gcuucguggacgagcgcuaccug

SEQ ID NO: 377641 - RNA, 17 nt, Molluscum contagiosum virus
gcuucuuggagcccuug

SEQ ID NO: 377642 - RNA, 21 nt, Molluscum contagiosum virus
gcuugagcacacgguagagcu

SEQ ID NO: 377643 - RNA, 15 nt, Molluscum contagiosum virus
gcuugcauguucucu

SEQ ID NO: 377644 - RNA, 23 nt, Molluscum contagiosum virus
gcuugcccgaccuuggugcucau

SEQ ID NO: 377645 - RNA, 22 nt, Molluscum contagiosum virus
gcuugccggcggcgcaagcacc

SEQ ID NO: 377646 - RNA, 22 nt, Molluscum contagiosum virus
gcuugcgcacggaccucaagga

SEQ ID NO: 377647 - RNA, 19 nt, Molluscum contagiosum virus
gcuugcucccucgcgcgca

SEQ ID NO: 377648 - RNA, 15 nt, Molluscum contagiosum virus
gcuuggccggaacgc

SEQ ID NO: 377649 - RNA, 18 nt, Molluscum contagiosum virus
gcuuggcgagcgcugccg

SEQ ID NO: 377650 - RNA, 15 nt, Molluscum contagiosum virus
gcuugucugccucaa

SEQ ID NO: 377651 - RNA, 22 nt, Molluscum contagiosum virus
gcuugucugccucaaggcgcca

SEQ ID NO: 377652 - RNA, 18 nt, Molluscum contagiosum virus
gcuuugucggugugcuuu

SEQ ID NO: 377653 - RNA, 22 nt, Molluscum contagiosum virus
ggaaaccucaccucugcgcggc

SEQ ID NO: 377654 - RNA, 22 nt, Molluscum contagiosum virus
ggaaagaagggcucgccaugcu

SEQ ID NO: 377655 - RNA, 17 nt, Molluscum contagiosum virus
ggaaagcgcacacuugc

SEQ ID NO: 377656 - RNA, 22 nt, Molluscum contagiosum virus
ggaaaggcacccgcaacaagga

SEQ ID NO: 377657 - RNA, 19 nt, Molluscum contagiosum virus
ggaacaccacacgcgcggc

SEQ ID NO: 377658 - RNA, 11 nt, Molluscum contagiosum virus
ggaacaucagc

SEQ ID NO: 377659 - RNA, 20 nt, Molluscum contagiosum virus
ggaacgcaaguacaacccaa

SEQ ID NO: 377660 - RNA, 14 nt, Molluscum contagiosum virus
ggaacucgcgcgcg

SEQ ID NO: 377661 - RNA, 21 nt, Molluscum contagiosum virus
ggaacucuacgacaugcucgc

SEQ ID NO: 377662 - RNA, 15 nt, Molluscum contagiosum virus
ggaacugcagcagcu

SEQ ID NO: 377663 - RNA, 22 nt, Molluscum contagiosum virus
ggaagacguggacgaggccaac

SEQ ID NO: 377664 - RNA, 18 nt, Molluscum contagiosum virus
ggaagcaacgacaaggaa

SEQ ID NO: 377665 - RNA, 15 nt, Molluscum contagiosum virus
ggaagcugcacgugc

SEQ ID NO: 377666 - RNA, 23 nt, Molluscum contagiosum virus
ggaaugaucgacucgagcauuug

SEQ ID NO: 377667 - RNA, 13 nt, Molluscum contagiosum virus
ggaauuaugugua

SEQ ID NO: 377668 - RNA, 10 nt, Molluscum contagiosum virus
ggaauuccuu

SEQ ID NO: 377669 - RNA, 15 nt, Molluscum contagiosum virus
ggacacgcacuggcg

SEQ ID NO: 377670 - RNA, 21 nt, Molluscum contagiosum virus
ggacacguuccagagcacugc

SEQ ID NO: 377671 - RNA, 19 nt, Molluscum contagiosum virus
ggacagagcccgcggcgca

SEQ ID NO: 377672 - RNA, 19 nt, Molluscum contagiosum virus
ggacagcauccccaacauc

SEQ ID NO: 377673 - RNA, 23 nt, Molluscum contagiosum virus
ggacagcucagcaggcuguguuc

SEQ ID NO: 377674 - RNA, 19 nt, Molluscum contagiosum virus
ggacgagagggcgcgcguc

SEQ ID NO: 377675 - RNA, 22 nt, Molluscum contagiosum virus
ggacgcccuccucgaccugcac

SEQ ID NO: 377676 - RNA, 12 nt, Molluscum contagiosum virus
ggacgcgcaagu

SEQ ID NO: 377677 - RNA, 13 nt, Molluscum contagiosum virus
ggacgcggaccua

SEQ ID NO: 377678 - RNA, 18 nt, Molluscum contagiosum virus
ggacgcguucuccaggaa

SEQ ID NO: 377679 - RNA, 16 nt, Molluscum contagiosum virus
ggacggcgcgcagcgc

SEQ ID NO: 377680 - RNA, 18 nt, Molluscum contagiosum virus
ggacguccacaaagcccu

SEQ ID NO: 377681 - RNA, 17 nt, Molluscum contagiosum virus
ggacguggucgcgcgcg

SEQ ID NO: 377682 - RNA, 19 nt, Molluscum contagiosum virus
ggacugagccgcaagcaca

SEQ ID NO: 377683 - RNA, 12 nt, Molluscum contagiosum virus
ggacuucuugcg

SEQ ID NO: 377684 - RNA, 16 nt, Molluscum contagiosum virus
ggacuugcgcgagcga

SEQ ID NO: 377685 - RNA, 17 nt, Molluscum contagiosum virus
ggacuuuucgcgcgugc

SEQ ID NO: 377686 - RNA, 15 nt, Molluscum contagiosum virus
ggagaaagacaaaga

SEQ ID NO: 377687 - RNA, 13 nt, Molluscum contagiosum virus
ggagacaccagcu

SEQ ID NO: 377688 - RNA, 12 nt, Molluscum contagiosum virus
ggagacauaugu

SEQ ID NO: 377689 - RNA, 15 nt, Molluscum contagiosum virus
ggagacauauguucu

SEQ ID NO: 377690 - RNA, 21 nt, Molluscum contagiosum virus
ggagacauauguucuucgaca

SEQ ID NO: 377691 - RNA, 19 nt, Molluscum contagiosum virus
ggagaccuggucacacugg

SEQ ID NO: 377692 - RNA, 16 nt, Molluscum contagiosum virus
ggagagcagugccgcu

SEQ ID NO: 377693 - RNA, 14 nt, Molluscum contagiosum virus
ggagagcgcgcggc

SEQ ID NO: 377694 - RNA, 12 nt, Molluscum contagiosum virus
ggagagguugcg

SEQ ID NO: 377695 - RNA, 22 nt, Molluscum contagiosum virus
ggagccaagcaacggcggcgca

SEQ ID NO: 377696 - RNA, 19 nt, Molluscum contagiosum virus
ggagccagccucucucgga

SEQ ID NO: 377697 - RNA, 21 nt, Molluscum contagiosum virus
ggagccagccucucucggaga

SEQ ID NO: 377698 - RNA, 22 nt, Molluscum contagiosum virus
ggagcccacguugccgcgcgcu

SEQ ID NO: 377699 - RNA, 20 nt, Molluscum contagiosum virus
ggagcccgucuacauuuugc

SEQ ID NO: 377700 - RNA, 12 nt, Molluscum contagiosum virus
ggagccgcggca

SEQ ID NO: 377701 - RNA, 17 nt, Molluscum contagiosum virus
ggagccucccccgcgca

SEQ ID NO: 377702 - RNA, 21 nt, Molluscum contagiosum virus
ggagcgcaaaugccgagcgca

SEQ ID NO: 377703 - RNA, 14 nt, Molluscum contagiosum virus
ggagcgcgcgcagg

SEQ ID NO: 377704 - RNA, 23 nt, Molluscum contagiosum virus
ggagcucacggcuguggacauga

SEQ ID NO: 377705 - RNA, 17 nt, Molluscum contagiosum virus
ggagcugcgcgagacgc

SEQ ID NO: 377706 - RNA, 19 nt, Molluscum contagiosum virus
ggagcuggccacucucgcg

SEQ ID NO: 377707 - RNA, 21 nt, Molluscum contagiosum virus
ggagcuggcguugccgagcga

SEQ ID NO: 377708 - RNA, 14 nt, Molluscum contagiosum virus
ggagcugguccagg

SEQ ID NO: 377709 - RNA, 16 nt, Molluscum contagiosum virus
ggagcuuaauuuugca

SEQ ID NO: 377710 - RNA, 13 nt, Molluscum contagiosum virus
ggaggacacgcgc

SEQ ID NO: 377711 - RNA, 14 nt, Molluscum contagiosum virus
ggaggacacgcgca

SEQ ID NO: 377712 - RNA, 20 nt, Molluscum contagiosum virus
ggaggaucgcuacgugcgca

SEQ ID NO: 377713 - RNA, 16 nt, Molluscum contagiosum virus
ggaggcaaucugucca

SEQ ID NO: 377714 - RNA, 17 nt, Molluscum contagiosum virus
ggaggcgcuagugcaga

SEQ ID NO: 377715 - RNA, 17 nt, Molluscum contagiosum virus
ggaggcggcacugcuag

SEQ ID NO: 377716 - RNA, 22 nt, Molluscum contagiosum virus
ggaggcugcucccucucgagga

SEQ ID NO: 377717 - RNA, 17 nt, Molluscum contagiosum virus
ggaguaccggcucaaga

SEQ ID NO: 377718 - RNA, 16 nt, Molluscum contagiosum virus
ggagucacgaccgacc

SEQ ID NO: 377719 - RNA, 22 nt, Molluscum contagiosum virus
ggaguccucgacaaugagcacu

SEQ ID NO: 377720 - RNA, 12 nt, Molluscum contagiosum virus
ggauacuguugg

SEQ ID NO: 377721 - RNA, 18 nt, Molluscum contagiosum virus
ggaucgcgcgcaccugca

SEQ ID NO: 377722 - RNA, 12 nt, Molluscum contagiosum virus
ggaucuucucaa

SEQ ID NO: 377723 - RNA, 16 nt, Molluscum contagiosum virus
ggaugcacacacucgc

SEQ ID NO: 377724 - RNA, 13 nt, Molluscum contagiosum virus
ggauggacaaaga

SEQ ID NO: 377725 - RNA, 13 nt, Molluscum contagiosum virus
ggcaaacgcugac

SEQ ID NO: 377726 - RNA, 20 nt, Molluscum contagiosum virus
ggcaaagcggggcgcgcgcc

SEQ ID NO: 377727 - RNA, 20 nt, Molluscum contagiosum virus
ggcaaccgcgcccgcgcgcu

SEQ ID NO: 377728 - RNA, 21 nt, Molluscum contagiosum virus
ggcaacuggcuuuucaugugc

SEQ ID NO: 377729 - RNA, 22 nt, Molluscum contagiosum virus
ggcaacuggcuuuucaugugcg

SEQ ID NO: 377730 - RNA, 18 nt, Molluscum contagiosum virus
ggcaagaacgacugcuac

SEQ ID NO: 377731 - RNA, 15 nt, Molluscum contagiosum virus
ggcaagaccaucauc

SEQ ID NO: 377732 - RNA, 18 nt, Molluscum contagiosum virus
ggcaaggacaucuacauc

SEQ ID NO: 377733 - RNA, 18 nt, Molluscum contagiosum virus
ggcaaugccgaugcuagc

SEQ ID NO: 377734 - RNA, 14 nt, Molluscum contagiosum virus
ggcacacacuugca

SEQ ID NO: 377735 - RNA, 20 nt, Molluscum contagiosum virus
ggcacacacuugcacgcgca

SEQ ID NO: 377736 - RNA, 22 nt, Molluscum contagiosum virus
ggcacccaccaggaacagggaa

SEQ ID NO: 377737 - RNA, 14 nt, Molluscum contagiosum virus
ggcacccgcaggaa

SEQ ID NO: 377738 - RNA, 18 nt, Molluscum contagiosum virus
ggcacccgugcgcgcgcu

SEQ ID NO: 377739 - RNA, 21 nt, Molluscum contagiosum virus
ggcacccuggcugcugcgcga

SEQ ID NO: 377740 - RNA, 20 nt, Molluscum contagiosum virus
ggcaccggcgcucacugcga

SEQ ID NO: 377741 - RNA, 14 nt, Molluscum contagiosum virus
ggcaccugcaggaa

SEQ ID NO: 377742 - RNA, 19 nt, Molluscum contagiosum virus
ggcacgaugucggaaccca

SEQ ID NO: 377743 - RNA, 13 nt, Molluscum contagiosum virus
ggcacgcacaaag

SEQ ID NO: 377744 - RNA, 15 nt, Molluscum contagiosum virus
ggcacgcacaaaguu

SEQ ID NO: 377745 - RNA, 18 nt, Molluscum contagiosum virus
ggcacgcagcucuuccac

SEQ ID NO: 377746 - RNA, 22 nt, Molluscum contagiosum virus
ggcacgcucauacuccugcugg

SEQ ID NO: 377747 - RNA, 18 nt, Molluscum contagiosum virus
ggcacgcugcacaugugc

SEQ ID NO: 377748 - RNA, 15 nt, Molluscum contagiosum virus
ggcacgggcacgcgc

SEQ ID NO: 377749 - RNA, 20 nt, Molluscum contagiosum virus
ggcacgggcucgaucugcgc

SEQ ID NO: 377750 - RNA, 10 nt, Molluscum contagiosum virus
ggcacuggcg

SEQ ID NO: 377751 - RNA, 13 nt, Molluscum contagiosum virus
ggcagaagcucau

SEQ ID NO: 377752 - RNA, 23 nt, Molluscum contagiosum virus
ggcagacaacaccagcgugcccu

SEQ ID NO: 377753 - RNA, 14 nt, Molluscum contagiosum virus
ggcagauagcucgc

SEQ ID NO: 377754 - RNA, 19 nt, Molluscum contagiosum virus
ggcagcaagcgcaccuuuu

SEQ ID NO: 377755 - RNA, 17 nt, Molluscum contagiosum virus
ggcagcagcgugcauag

SEQ ID NO: 377756 - RNA, 13 nt, Molluscum contagiosum virus
ggcagcgccagcg

SEQ ID NO: 377757 - RNA, 16 nt, Molluscum contagiosum virus
ggcagcgccgcgcgcg

SEQ ID NO: 377758 - RNA, 24 nt, Molluscum contagiosum virus
ggcagcugcugcgcuccaugcugc

SEQ ID NO: 377759 - RNA, 16 nt, Molluscum contagiosum virus
ggcagcuucugcucgc

SEQ ID NO: 377760 - RNA, 23 nt, Molluscum contagiosum virus
ggcaggcagugccgccgcgcgcg

SEQ ID NO: 377761 - RNA, 16 nt, Molluscum contagiosum virus
ggcaguacgcgcgugg

SEQ ID NO: 377762 - RNA, 21 nt, Molluscum contagiosum virus
ggcauaccugugccagcgccu

SEQ ID NO: 377763 - RNA, 18 nt, Molluscum contagiosum virus
ggcaucgcgcugcuggug

SEQ ID NO: 377764 - RNA, 14 nt, Molluscum contagiosum virus
ggcauggaaagcuu

SEQ ID NO: 377765 - RNA, 17 nt, Molluscum contagiosum virus
ggcauucgaaccuggaa

SEQ ID NO: 377766 - RNA, 20 nt, Molluscum contagiosum virus
ggcauucucggacagugccu

SEQ ID NO: 377767 - RNA, 17 nt, Molluscum contagiosum virus
ggccacgcucgcgcgca

SEQ ID NO: 377768 - RNA, 23 nt, Molluscum contagiosum virus
ggccauggaggcgcuagugcaga

SEQ ID NO: 377769 - RNA, 23 nt, Molluscum contagiosum virus
ggcccaccuucuugucgcgcgcc

SEQ ID NO: 377770 - RNA, 19 nt, Molluscum contagiosum virus
ggccccgcaccagugccga

SEQ ID NO: 377771 - RNA, 18 nt, Molluscum contagiosum virus
ggcccgaagccguagucu

SEQ ID NO: 377772 - RNA, 14 nt, Molluscum contagiosum virus
ggcccgcaaacacg

SEQ ID NO: 377773 - RNA, 23 nt, Molluscum contagiosum virus
ggcccgcguggcaagggcuccuu

SEQ ID NO: 377774 - RNA, 20 nt, Molluscum contagiosum virus
ggcccgugcucaggccagca

SEQ ID NO: 377775 - RNA, 17 nt, Molluscum contagiosum virus
ggcccuaaauaaugaac

SEQ ID NO: 377776 - RNA, 22 nt, Molluscum contagiosum virus
ggcccuggcggcuuuccuguca

SEQ ID NO: 377777 - RNA, 14 nt, Molluscum contagiosum virus
ggccgcccacgcuc

SEQ ID NO: 377778 - RNA, 18 nt, Molluscum contagiosum virus
ggccgcgcccaagaagaa

SEQ ID NO: 377779 - RNA, 18 nt, Molluscum contagiosum virus
ggccgcgcccacgggcuu

SEQ ID NO: 377780 - RNA, 20 nt, Molluscum contagiosum virus
ggccgcggagaagugcgcag

SEQ ID NO: 377781 - RNA, 22 nt, Molluscum contagiosum virus
ggccggcaagcucaagcccggc

SEQ ID NO: 377782 - RNA, 18 nt, Molluscum contagiosum virus
ggccgucgggcgccaaca

SEQ ID NO: 377783 - RNA, 19 nt, Molluscum contagiosum virus
ggccguguacaugcucaag

SEQ ID NO: 377784 - RNA, 16 nt, Molluscum contagiosum virus
ggccguuggacaucag

SEQ ID NO: 377785 - RNA, 17 nt, Molluscum contagiosum virus
ggccugcgggcggcaca

SEQ ID NO: 377786 - RNA, 23 nt, Molluscum contagiosum virus
ggccuucuaccacagguuucuca

SEQ ID NO: 377787 - RNA, 15 nt, Molluscum contagiosum virus
ggcgacgagggcgcc

SEQ ID NO: 377788 - RNA, 13 nt, Molluscum contagiosum virus
ggcgagucgcggg

SEQ ID NO: 377789 - RNA, 14 nt, Molluscum contagiosum virus
ggcgaucugcucgc

SEQ ID NO: 377790 - RNA, 15 nt, Molluscum contagiosum virus
ggcgauguccauguc

SEQ ID NO: 377791 - RNA, 19 nt, Molluscum contagiosum virus
ggcgaugucgccgcagugc

SEQ ID NO: 377792 - RNA, 23 nt, Molluscum contagiosum virus
ggcgcaaccgcgugcgugcacag

SEQ ID NO: 377793 - RNA, 14 nt, Molluscum contagiosum virus
ggcgcaacgcuggc

SEQ ID NO: 377794 - RNA, 14 nt, Molluscum contagiosum virus
ggcgcacgcgagca

SEQ ID NO: 377795 - RNA, 15 nt, Molluscum contagiosum virus
ggcgcacgcuugucc

SEQ ID NO: 377796 - RNA, 16 nt, Molluscum contagiosum virus
ggcgcacgcuuguccg

SEQ ID NO: 377797 - RNA, 20 nt, Molluscum contagiosum virus
ggcgcacggccugcggcagg

SEQ ID NO: 377798 - RNA, 16 nt, Molluscum contagiosum virus
ggcgcaggccgcgccc

SEQ ID NO: 377799 - RNA, 14 nt, Molluscum contagiosum virus
ggcgcagugcucuu

SEQ ID NO: 377800 - RNA, 22 nt, Molluscum contagiosum virus
ggcgccacuggaagaacaggcc

SEQ ID NO: 377801 - RNA, 21 nt, Molluscum contagiosum virus
ggcgccaucgagaugcucaag

SEQ ID NO: 377802 - RNA, 13 nt, Molluscum contagiosum virus
ggcgcccgugccg

SEQ ID NO: 377803 - RNA, 23 nt, Molluscum contagiosum virus
ggcgccgacaacgugcugcucaa

SEQ ID NO: 377804 - RNA, 23 nt, Molluscum contagiosum virus
ggcgccgccaaccgagcuugcca

SEQ ID NO: 377805 - RNA, 16 nt, Molluscum contagiosum virus
ggcgccggcgcgcgcg

SEQ ID NO: 377806 - RNA, 20 nt, Molluscum contagiosum virus
ggcgcgagaugcucgccggc

SEQ ID NO: 377807 - RNA, 21 nt, Molluscum contagiosum virus
ggcgcgagaugcucgccggca

SEQ ID NO: 377808 - RNA, 16 nt, Molluscum contagiosum virus
ggcgcgcacuaccgca

SEQ ID NO: 377809 - RNA, 23 nt, Molluscum contagiosum virus
ggcgcgcccggcgcccgcagcgc

SEQ ID NO: 377810 - RNA, 20 nt, Molluscum contagiosum virus
ggcgcgcgacgacguugugc

SEQ ID NO: 377811 - RNA, 19 nt, Molluscum contagiosum virus
ggcgcgcgacgugugcucu

SEQ ID NO: 377812 - RNA, 20 nt, Molluscum contagiosum virus
ggcgcgugccagucgcgcga

SEQ ID NO: 377813 - RNA, 13 nt, Molluscum contagiosum virus
ggcgcucgcgaga

SEQ ID NO: 377814 - RNA, 14 nt, Molluscum contagiosum virus
ggcgcucgcgcgca

SEQ ID NO: 377815 - RNA, 18 nt, Molluscum contagiosum virus
ggcgcucggcguggugcu

SEQ ID NO: 377816 - RNA, 19 nt, Molluscum contagiosum virus
ggcgcuugggcacugcuac

SEQ ID NO: 377817 - RNA, 15 nt, Molluscum contagiosum virus
ggcggaaguggugcc

SEQ ID NO: 377818 - RNA, 13 nt, Molluscum contagiosum virus
ggcggcacugcua

SEQ ID NO: 377819 - RNA, 22 nt, Molluscum contagiosum virus
ggcggcauccugaugacggcag

SEQ ID NO: 377820 - RNA, 23 nt, Molluscum contagiosum virus
ggcggccccugccuuugccaaga

SEQ ID NO: 377821 - RNA, 21 nt, Molluscum contagiosum virus
ggcggccguguccuacacgcc

SEQ ID NO: 377822 - RNA, 16 nt, Molluscum contagiosum virus
ggcggcgucgcgcgcg

SEQ ID NO: 377823 - RNA, 15 nt, Molluscum contagiosum virus
ggcggcuggaccugc

SEQ ID NO: 377824 - RNA, 18 nt, Molluscum contagiosum virus
ggcgggccugcgcccgca

SEQ ID NO: 377825 - RNA, 22 nt, Molluscum contagiosum virus
ggcggucuuccagcacugcgcc

SEQ ID NO: 377826 - RNA, 13 nt, Molluscum contagiosum virus
ggcggugagcgcc

SEQ ID NO: 377827 - RNA, 20 nt, Molluscum contagiosum virus
ggcggugcccgccaagagcu

SEQ ID NO: 377828 - RNA, 18 nt, Molluscum contagiosum virus
ggcguaagagcgugaaca

SEQ ID NO: 377829 - RNA, 18 nt, Molluscum contagiosum virus
ggcguacgugcgccagcu

SEQ ID NO: 377830 - RNA, 17 nt, Molluscum contagiosum virus
ggcguacucgugucaca

SEQ ID NO: 377831 - RNA, 18 nt, Molluscum contagiosum virus
ggcguacucgugucacaa

SEQ ID NO: 377832 - RNA, 19 nt, Molluscum contagiosum virus
ggcguacucgugucacaau

SEQ ID NO: 377833 - RNA, 14 nt, Molluscum contagiosum virus
ggcgucaagacucg

SEQ ID NO: 377834 - RNA, 14 nt, Molluscum contagiosum virus
ggcgugcgccgugc

SEQ ID NO: 377835 - RNA, 16 nt, Molluscum contagiosum virus
ggcguggcgcaccugc

SEQ ID NO: 377836 - RNA, 16 nt, Molluscum contagiosum virus
ggcguuacagcaccuu

SEQ ID NO: 377837 - RNA, 14 nt, Molluscum contagiosum virus
ggcguucgcagugc

SEQ ID NO: 377838 - RNA, 15 nt, Molluscum contagiosum virus
ggcguuggcuuucug

SEQ ID NO: 377839 - RNA, 17 nt, Molluscum contagiosum virus
ggcguuggucuugugac

SEQ ID NO: 377840 - RNA, 16 nt, Molluscum contagiosum virus
ggcuagcgcugcucua

SEQ ID NO: 377841 - RNA, 17 nt, Molluscum contagiosum virus
ggcuagcgcugcucuac

SEQ ID NO: 377842 - RNA, 17 nt, Molluscum contagiosum virus
ggcuagugccauuguga

SEQ ID NO: 377843 - RNA, 17 nt, Molluscum contagiosum virus
ggcuaugaggaggccaa

SEQ ID NO: 377844 - RNA, 13 nt, Molluscum contagiosum virus
ggcuccgcuggac

SEQ ID NO: 377845 - RNA, 15 nt, Molluscum contagiosum virus
ggcucgaggugugcc

SEQ ID NO: 377846 - RNA, 16 nt, Molluscum contagiosum virus
ggcucgggaacaaagg

SEQ ID NO: 377847 - RNA, 15 nt, Molluscum contagiosum virus
ggcucguacugcugc

SEQ ID NO: 377848 - RNA, 18 nt, Molluscum contagiosum virus
ggcugauccugcgcgugu

SEQ ID NO: 377849 - RNA, 21 nt, Molluscum contagiosum virus
ggcugcaagcacaacgggcuc

SEQ ID NO: 377850 - RNA, 20 nt, Molluscum contagiosum virus
ggcugccggcgcgugagcgc

SEQ ID NO: 377851 - RNA, 14 nt, Molluscum contagiosum virus
ggcugcgaccaaga

SEQ ID NO: 377852 - RNA, 17 nt, Molluscum contagiosum virus
ggcugcugccugcucaa

SEQ ID NO: 377853 - RNA, 19 nt, Molluscum contagiosum virus
ggcuggaccugcgccagcg

SEQ ID NO: 377854 - RNA, 17 nt, Molluscum contagiosum virus
ggcuucuccaccuucag

SEQ ID NO: 377855 - RNA, 16 nt, Molluscum contagiosum virus
ggcuugcucggacaca

SEQ ID NO: 377856 - RNA, 14 nt, Molluscum contagiosum virus
gggaaagggcugcu

SEQ ID NO: 377857 - RNA, 20 nt, Molluscum contagiosum virus
gggaacagcuuggcacagug

SEQ ID NO: 377858 - RNA, 11 nt, Molluscum contagiosum virus
gggaagcacag

SEQ ID NO: 377859 - RNA, 13 nt, Molluscum contagiosum virus
gggaagcacaguc

SEQ ID NO: 377860 - RNA, 18 nt, Molluscum contagiosum virus
gggaagcugcacgugcag

SEQ ID NO: 377861 - RNA, 22 nt, Molluscum contagiosum virus
gggaauaccggagacaccagcu

SEQ ID NO: 377862 - RNA, 11 nt, Molluscum contagiosum virus
gggacacaagg

SEQ ID NO: 377863 - RNA, 16 nt, Molluscum contagiosum virus
gggacacgcacuugcg

SEQ ID NO: 377864 - RNA, 14 nt, Molluscum contagiosum virus
gggagcuggagcga

SEQ ID NO: 377865 - RNA, 24 nt, Molluscum contagiosum virus
gggagcuuuccuugcgcuuguccu

SEQ ID NO: 377866 - RNA, 23 nt, Molluscum contagiosum virus
gggauacagcgcggagagaacaa

SEQ ID NO: 377867 - RNA, 16 nt, Molluscum contagiosum virus
gggaugccagugcagu

SEQ ID NO: 377868 - RNA, 22 nt, Molluscum contagiosum virus
gggauuugccgguugcgcgugu

SEQ ID NO: 377869 - RNA, 15 nt, Molluscum contagiosum virus
gggcacgcugcacau

SEQ ID NO: 377870 - RNA, 17 nt, Molluscum contagiosum virus
gggcacuucucgcgcga

SEQ ID NO: 377871 - RNA, 19 nt, Molluscum contagiosum virus
gggcaucccgccgcugcgc

SEQ ID NO: 377872 - RNA, 12 nt, Molluscum contagiosum virus
gggccaugucug

SEQ ID NO: 377873 - RNA, 21 nt, Molluscum contagiosum virus
gggccggacguccauccucuc

SEQ ID NO: 377874 - RNA, 15 nt, Molluscum contagiosum virus
gggcgcauccucucc

SEQ ID NO: 377875 - RNA, 11 nt, Molluscum contagiosum virus
gggcgccagcu

SEQ ID NO: 377876 - RNA, 17 nt, Molluscum contagiosum virus
gggcgccgcggcugccu

SEQ ID NO: 377877 - RNA, 17 nt, Molluscum contagiosum virus
gggcgccggcucugccu

SEQ ID NO: 377878 - RNA, 13 nt, Molluscum contagiosum virus
gggcgcgugcugg

SEQ ID NO: 377879 - RNA, 23 nt, Molluscum contagiosum virus
gggcguguccgcgggcgcgcgcc

SEQ ID NO: 377880 - RNA, 13 nt, Molluscum contagiosum virus
gggcucgaggugu

SEQ ID NO: 377881 - RNA, 21 nt, Molluscum contagiosum virus
ggggacucucccgucgccgga

SEQ ID NO: 377882 - RNA, 19 nt, Molluscum contagiosum virus
ggggcccaugcucaccgcc

SEQ ID NO: 377883 - RNA, 21 nt, Molluscum contagiosum virus
ggggccuguucggcaugcagc

SEQ ID NO: 377884 - RNA, 14 nt, Molluscum contagiosum virus
ggggcgcgugcugg

SEQ ID NO: 377885 - RNA, 15 nt, Molluscum contagiosum virus
ggggcuggacagcau

SEQ ID NO: 377886 - RNA, 13 nt, Molluscum contagiosum virus
ggguaccgugcgc

SEQ ID NO: 377887 - RNA, 20 nt, Molluscum contagiosum virus
gggucgaucccgacacugcg

SEQ ID NO: 377888 - RNA, 19 nt, Molluscum contagiosum virus
gggucgugcaggucgagga

SEQ ID NO: 377889 - RNA, 23 nt, Molluscum contagiosum virus
gggugccgugccccugcuagucc

SEQ ID NO: 377890 - RNA, 13 nt, Molluscum contagiosum virus
gguaacgcgcgcg

SEQ ID NO: 377891 - RNA, 14 nt, Molluscum contagiosum virus
gguacaugcugucc

SEQ ID NO: 377892 - RNA, 22 nt, Molluscum contagiosum virus
gguacccgcaaccccgcgcgua

SEQ ID NO: 377893 - RNA, 22 nt, Molluscum contagiosum virus
gguacugcggacaccagaaccu

SEQ ID NO: 377894 - RNA, 20 nt, Molluscum contagiosum virus
gguagacgacgaugcaaaca

SEQ ID NO: 377895 - RNA, 14 nt, Molluscum contagiosum virus
gguagcgcgccgca

SEQ ID NO: 377896 - RNA, 14 nt, Molluscum contagiosum virus
gguagcuagcucug

SEQ ID NO: 377897 - RNA, 21 nt, Molluscum contagiosum virus
ggucaacuccgagcgcgcgcg

SEQ ID NO: 377898 - RNA, 18 nt, Molluscum contagiosum virus
ggucaagaacaugugcuc

SEQ ID NO: 377899 - RNA, 20 nt, Molluscum contagiosum virus
ggucacacucgacuugcuau

SEQ ID NO: 377900 - RNA, 12 nt, Molluscum contagiosum virus
ggucacacuggu

SEQ ID NO: 377901 - RNA, 23 nt, Molluscum contagiosum virus
ggucacgcgcaaggccgcgccca

SEQ ID NO: 377902 - RNA, 16 nt, Molluscum contagiosum virus
ggucaucgggcugcag

SEQ ID NO: 377903 - RNA, 21 nt, Molluscum contagiosum virus
gguccaguauuucaaugcagu

SEQ ID NO: 377904 - RNA, 22 nt, Molluscum contagiosum virus
gguccaguauuucaaugcagua

SEQ ID NO: 377905 - RNA, 15 nt, Molluscum contagiosum virus
ggucgacgagugcgc

SEQ ID NO: 377906 - RNA, 19 nt, Molluscum contagiosum virus
ggucgacgggaacgagguc

SEQ ID NO: 377907 - RNA, 19 nt, Molluscum contagiosum virus
ggucgaucccgacacugcg

SEQ ID NO: 377908 - RNA, 16 nt, Molluscum contagiosum virus
ggucuacaacgagcuc

SEQ ID NO: 377909 - RNA, 23 nt, Molluscum contagiosum virus
ggucucgcugcugggcaucgugc

SEQ ID NO: 377910 - RNA, 15 nt, Molluscum contagiosum virus
ggugaacgaccucaa

SEQ ID NO: 377911 - RNA, 17 nt, Molluscum contagiosum virus
ggugacucgccguguga

SEQ ID NO: 377912 - RNA, 21 nt, Molluscum contagiosum virus
ggugagcucgccaauggagcc

SEQ ID NO: 377913 - RNA, 14 nt, Molluscum contagiosum virus
ggugagugcgcgca

SEQ ID NO: 377914 - RNA, 17 nt, Molluscum contagiosum virus
ggugcagccgcugcugc

SEQ ID NO: 377915 - RNA, 21 nt, Molluscum contagiosum virus
ggugccuggcguccgcacgca

SEQ ID NO: 377916 - RNA, 17 nt, Molluscum contagiosum virus
ggugcgaaauugccaca

SEQ ID NO: 377917 - RNA, 22 nt, Molluscum contagiosum virus
ggugcgagucucuguaacaagc

SEQ ID NO: 377918 - RNA, 14 nt, Molluscum contagiosum virus
ggugcgcgcgcgcg

SEQ ID NO: 377919 - RNA, 20 nt, Molluscum contagiosum virus
gucgugcgcguucggaacgc

SEQ ID NO: 377920 - RNA, 13 nt, Molluscum contagiosum virus
gucuccacaaaga

SEQ ID NO: 377921 - RNA, 14 nt, Molluscum contagiosum virus
gucuccacaaagac

SEQ ID NO: 377922 - RNA, 23 nt, Molluscum contagiosum virus
gucucgagcuuccucaaggcgca

SEQ ID NO: 377923 - RNA, 15 nt, Molluscum contagiosum virus
gucucgaugugacaa

SEQ ID NO: 377924 - RNA, 12 nt, Molluscum contagiosum virus
gucucgcugcug

SEQ ID NO: 377925 - RNA, 17 nt, Molluscum contagiosum virus
gucucugugugcuuaua

SEQ ID NO: 377926 - RNA, 20 nt, Molluscum contagiosum virus
gucugcaagcgugacucacc

SEQ ID NO: 377927 - RNA, 13 nt, Molluscum contagiosum virus
gucugcaaggccu

SEQ ID NO: 377928 - RNA, 17 nt, Molluscum contagiosum virus
gucugcuuugucugcag

SEQ ID NO: 377929 - RNA, 16 nt, Molluscum contagiosum virus
gucuggaaacacgugg

SEQ ID NO: 377930 - RNA, 19 nt, Molluscum contagiosum virus
gucuucaggaacaaggcca

SEQ ID NO: 377931 - RNA, 20 nt, Molluscum contagiosum virus
gucuucgagagccuucguca

SEQ ID NO: 377932 - RNA, 14 nt, Molluscum contagiosum virus
gucuuuccuggcuc

SEQ ID NO: 377933 - RNA, 17 nt, Molluscum contagiosum virus
gugaacaauacaugcug

SEQ ID NO: 377934 - RNA, 20 nt, Molluscum contagiosum virus
gugaacucuucccguuccug

SEQ ID NO: 377935 - RNA, 14 nt, Molluscum contagiosum virus
gugacaacauguga

SEQ ID NO: 377936 - RNA, 21 nt, Molluscum contagiosum virus
gugacaaggauggacaaagau

SEQ ID NO: 377937 - RNA, 17 nt, Molluscum contagiosum virus
gugacccucuucgacuu

SEQ ID NO: 377938 - RNA, 15 nt, Molluscum contagiosum virus
gugacgccucgagaa

SEQ ID NO: 377939 - RNA, 21 nt, Molluscum contagiosum virus
gugacggccguguacaugcuc

SEQ ID NO: 377940 - RNA, 19 nt, Molluscum contagiosum virus
ugcagucacgacuguguuc

SEQ ID NO: 377941 - RNA, 14 nt, Molluscum contagiosum virus
ugcauacacuuccu

SEQ ID NO: 377942 - RNA, 22 nt, Molluscum contagiosum virus
ugcauauauagacguauacucc

SEQ ID NO: 377943 - RNA, 20 nt, Molluscum contagiosum virus
ugcauccuggggaaccgcug

SEQ ID NO: 377944 - RNA, 23 nt, Molluscum contagiosum virus
ugcauccuggggaaccgcugcuu

SEQ ID NO: 377945 - RNA, 21 nt, Molluscum contagiosum virus
ugcaucuuuuuuaugcacuuu

SEQ ID NO: 377946 - RNA, 22 nt, Molluscum contagiosum virus
ugcaucuuuuuuaugcacuuuc

SEQ ID NO: 377947 - RNA, 15 nt, Molluscum contagiosum virus
ugcaugcggagcugg

SEQ ID NO: 377948 - RNA, 20 nt, Molluscum contagiosum virus
ugcauguuuguucgcgcgcc

SEQ ID NO: 377949 - RNA, 21 nt, Molluscum contagiosum virus
ugcauucguaacgugauccga

SEQ ID NO: 377950 - RNA, 23 nt, Molluscum contagiosum virus
ugccaaagcuaugcgcagcugcg

SEQ ID NO: 377951 - RNA, 14 nt, Molluscum contagiosum virus
ugccacaccagcug

SEQ ID NO: 377952 - RNA, 23 nt, Molluscum contagiosum virus
ugccacggccgcgcgcgacuuug

SEQ ID NO: 377953 - RNA, 13 nt, Molluscum contagiosum virus
ugccacggcugca

SEQ ID NO: 377954 - RNA, 21 nt, Molluscum contagiosum virus
ugccagauugccggcgcgcgc

SEQ ID NO: 377955 - RNA, 16 nt, Molluscum contagiosum virus
ugccagcagagcugcc

SEQ ID NO: 377956 - RNA, 19 nt, Molluscum contagiosum virus
ugccaggcaacgcacaaaa

SEQ ID NO: 377957 - RNA, 17 nt, Molluscum contagiosum virus
ugccaggcggucuucca

SEQ ID NO: 377958 - RNA, 12 nt, Molluscum contagiosum virus
ugccagugcagu

SEQ ID NO: 377959 - RNA, 19 nt, Molluscum contagiosum virus
ugccaucucgcacacugca

SEQ ID NO: 377960 - RNA, 22 nt, Molluscum contagiosum virus
ugccaucucgcacacugcagca

SEQ ID NO: 377961 - RNA, 19 nt, Molluscum contagiosum virus
ugcccacgcgcaaggucuu

SEQ ID NO: 377962 - RNA, 21 nt, Molluscum contagiosum virus
ugcccacgcgcaaggucuucc

SEQ ID NO: 377963 - RNA, 20 nt, Molluscum contagiosum virus
ugcccccaccgggguccgcu

SEQ ID NO: 377964 - RNA, 18 nt, Molluscum contagiosum virus
ugcccccgagguggccaa

SEQ ID NO: 377965 - RNA, 14 nt, Molluscum contagiosum virus
ugccccguccucgc

SEQ ID NO: 377966 - RNA, 20 nt, Molluscum contagiosum virus
ugcccgaccuuggugcucau

SEQ ID NO: 377967 - RNA, 22 nt, Molluscum contagiosum virus
ugcccgccuucgacggcuucau

SEQ ID NO: 377968 - RNA, 16 nt, Molluscum contagiosum virus
ugcccuggaccuccau

SEQ ID NO: 377969 - RNA, 14 nt, Molluscum contagiosum virus
ugcccuguccacaa

SEQ ID NO: 377970 - RNA, 23 nt, Molluscum contagiosum virus
ugcccuguccacaaaaccaaaac

SEQ ID NO: 377971 - RNA, 21 nt, Molluscum contagiosum virus
ugcccuuuuuuauaugagaac

SEQ ID NO: 377972 - RNA, 17 nt, Molluscum contagiosum virus
ugccgaggaggugcucu

SEQ ID NO: 377973 - RNA, 14 nt, Molluscum contagiosum virus
ugccgcggcacugg

SEQ ID NO: 377974 - RNA, 16 nt, Molluscum contagiosum virus
ugccgcucggcacaaa

SEQ ID NO: 377975 - RNA, 14 nt, Molluscum contagiosum virus
ugccgcugcgcugg

SEQ ID NO: 377976 - RNA, 21 nt, Molluscum contagiosum virus
ugccgcuggcgcuaccuaccg

SEQ ID NO: 377977 - RNA, 13 nt, Molluscum contagiosum virus
ugccggcgcguga

SEQ ID NO: 377978 - RNA, 23 nt, Molluscum contagiosum virus
ugccggggaugaacgcgcugcgc

SEQ ID NO: 377979 - RNA, 21 nt, Molluscum contagiosum virus
ugccgucgcgcauagugccgu

SEQ ID NO: 377980 - RNA, 17 nt, Molluscum contagiosum virus
ugccgugcccaucuccu

SEQ ID NO: 377981 - RNA, 13 nt, Molluscum contagiosum virus
ugccucgugccuu

SEQ ID NO: 377982 - RNA, 15 nt, Molluscum contagiosum virus
ugccugagaagcugu

SEQ ID NO: 377983 - RNA, 23 nt, Molluscum contagiosum virus
ugccugagaagcuguaccuggug

SEQ ID NO: 377984 - RNA, 19 nt, Molluscum contagiosum virus
ugccugcaagaggcgcugu

SEQ ID NO: 377985 - RNA, 12 nt, Molluscum contagiosum virus
ugccugcucaac

SEQ ID NO: 377986 - RNA, 15 nt, Molluscum contagiosum virus
ugccugcugcgcuuc

SEQ ID NO: 377987 - RNA, 17 nt, Molluscum contagiosum virus
ugccuggagggcagugc

SEQ ID NO: 377988 - RNA, 14 nt, Molluscum contagiosum virus
ugccuguuugccac

SEQ ID NO: 377989 - RNA, 15 nt, Molluscum contagiosum virus
ugccuguuugccacg

SEQ ID NO: 377990 - RNA, 18 nt, Molluscum contagiosum virus
ugccuuggcgcccgugcc

SEQ ID NO: 377991 - RNA, 14 nt, Molluscum contagiosum virus
ugcgaacagccgcc

SEQ ID NO: 377992 - RNA, 22 nt, Molluscum contagiosum virus
ugcgaacgcgcaagugugcgca

SEQ ID NO: 377993 - RNA, 19 nt, Molluscum contagiosum virus
ugcgaagacgagcgcgugc

SEQ ID NO: 377994 - RNA, 19 nt, Molluscum contagiosum virus
ugcgaaggcucgagcugca

SEQ ID NO: 377995 - RNA, 14 nt, Molluscum contagiosum virus
ugcgaaggucauca

SEQ ID NO: 377996 - RNA, 23 nt, Molluscum contagiosum virus
ugcgaccccagugcgagaucgac

SEQ ID NO: 377997 - RNA, 17 nt, Molluscum contagiosum virus
ugcgagaacucgcgugc

SEQ ID NO: 377998 - RNA, 11 nt, Molluscum contagiosum virus
ugcgagccagu

SEQ ID NO: 377999 - RNA, 22 nt, Molluscum contagiosum virus
ugcgagcgcggcuuacacacgc

SEQ ID NO: 378000 - RNA, 14 nt, Molluscum contagiosum virus
ugcgauaacaucug

SEQ ID NO: 378001 - RNA, 18 nt, Molluscum contagiosum virus
ugcgauaacaucugcuau

SEQ ID NO: 378002 - RNA, 14 nt, Molluscum contagiosum virus
ugcgcaacugcgau

SEQ ID NO: 378003 - RNA, 14 nt, Molluscum contagiosum virus
ugcgcaagcauuuc

SEQ ID NO: 378004 - RNA, 19 nt, Molluscum contagiosum virus
ugcgcaagcgcuacuugcu

SEQ ID NO: 378005 - RNA, 16 nt, Molluscum contagiosum virus
ugcgcacacacuugcu

SEQ ID NO: 378006 - RNA, 15 nt, Molluscum contagiosum virus
ugcgcaccaguaccu

SEQ ID NO: 378007 - RNA, 18 nt, Molluscum contagiosum virus
ugcgcacgcgcgucaugu

SEQ ID NO: 378008 - RNA, 19 nt, Molluscum contagiosum virus
ugcgcacggaccucaagga

SEQ ID NO: 378009 - RNA, 18 nt, Molluscum contagiosum virus
caagauggcgcagcacuu

SEQ ID NO: 378010 - RNA, 13 nt, Molluscum contagiosum virus
caagcacaugugu

SEQ ID NO: 378011 - RNA, 22 nt, Molluscum contagiosum virus
caagcacgcaacgucgcacugg

SEQ ID NO: 378012 - RNA, 14 nt, Molluscum contagiosum virus
caagcacgcuacug

SEQ ID NO: 378013 - RNA, 15 nt, Molluscum contagiosum virus
caagcagccgcagua

SEQ ID NO: 378014 - RNA, 20 nt, Molluscum contagiosum virus
caagcagguggccgcgcgcg

SEQ ID NO: 378015 - RNA, 13 nt, Molluscum contagiosum virus
caagcaguaccug

SEQ ID NO: 378016 - RNA, 17 nt, Molluscum contagiosum virus
caagcaguaccugcuaa

SEQ ID NO: 378017 - RNA, 23 nt, Molluscum contagiosum virus
caagcaugcgguguguguucuca

SEQ ID NO: 378018 - RNA, 15 nt, Molluscum contagiosum virus
caagcccagcagcga

SEQ ID NO: 378019 - RNA, 21 nt, Molluscum contagiosum virus
caagcccgaguucgcggcgcg

SEQ ID NO: 378020 - RNA, 22 nt, Molluscum contagiosum virus
caagccguccgccucgagcacg

SEQ ID NO: 378021 - RNA, 18 nt, Molluscum contagiosum virus
caagcgcgaguacaagcu

SEQ ID NO: 378022 - RNA, 14 nt, Molluscum contagiosum virus
caagcgcuucccuu

SEQ ID NO: 378023 - RNA, 15 nt, Molluscum contagiosum virus
caagcgcuugcucuu

SEQ ID NO: 378024 - RNA, 21 nt, Molluscum contagiosum virus
caagcggucaggccgggcgcg

SEQ ID NO: 378025 - RNA, 14 nt, Molluscum contagiosum virus
caagcggugcagcu

SEQ ID NO: 378026 - RNA, 15 nt, Molluscum contagiosum virus
caagcggugcagcua

SEQ ID NO: 378027 - RNA, 15 nt, Molluscum contagiosum virus
caagcucauccaccu

SEQ ID NO: 378028 - RNA, 17 nt, Molluscum contagiosum virus
caagcucgaugccguuu

SEQ ID NO: 378029 - RNA, 14 nt, Molluscum contagiosum virus
caagcuuugugcuc

SEQ ID NO: 378030 - RNA, 15 nt, Molluscum contagiosum virus
caaggaaaacugcau

SEQ ID NO: 378031 - RNA, 13 nt, Molluscum contagiosum virus
caaggaaaggcac

SEQ ID NO: 378032 - RNA, 13 nt, Molluscum contagiosum virus
caaggacaccgcg

SEQ ID NO: 378033 - RNA, 11 nt, Molluscum contagiosum virus
caaggacaucu

SEQ ID NO: 378034 - RNA, 15 nt, Molluscum contagiosum virus
caaggacuaccagcu

SEQ ID NO: 378035 - RNA, 16 nt, Molluscum contagiosum virus
caaggacuaccagcuc

SEQ ID NO: 378036 - RNA, 19 nt, Molluscum contagiosum virus
caaggcaugcgcgcagugc

SEQ ID NO: 378037 - RNA, 17 nt, Molluscum contagiosum virus
caaggccuacggcaaga

SEQ ID NO: 378038 - RNA, 22 nt, Molluscum contagiosum virus
caaggcgcgcaucgcgggcacg

SEQ ID NO: 378039 - RNA, 17 nt, Molluscum contagiosum virus
caagggccugcgggcgg

SEQ ID NO: 378040 - RNA, 18 nt, Molluscum contagiosum virus
caaggucuuccacgccuu

SEQ ID NO: 378041 - RNA, 20 nt, Molluscum contagiosum virus
caaggugugcgcgcugcacg

SEQ ID NO: 378042 - RNA, 16 nt, Molluscum contagiosum virus
caaguacaacccaaac

SEQ ID NO: 378043 - RNA, 20 nt, Molluscum contagiosum virus
caaguacaugcacgucgaca

SEQ ID NO: 378044 - RNA, 13 nt, Molluscum contagiosum virus
caagucacugcua

SEQ ID NO: 378045 - RNA, 14 nt, Molluscum contagiosum virus
caaguccaccuucu

SEQ ID NO: 378046 - RNA, 22 nt, Molluscum contagiosum virus
caauaacaacgaccagcuuagc

SEQ ID NO: 378047 - RNA, 23 nt, Molluscum contagiosum virus
caauaccaggccacgugcucaag

SEQ ID NO: 378048 - RNA, 15 nt, Molluscum contagiosum virus
caauacggugcagcc

SEQ ID NO: 378049 - RNA, 17 nt, Molluscum contagiosum virus
caaugcaguaugugaac

SEQ ID NO: 378050 - RNA, 13 nt, Molluscum contagiosum virus
caaugcagugcac

SEQ ID NO: 378051 - RNA, 15 nt, Molluscum contagiosum virus
caaugcagugcacca

SEQ ID NO: 378052 - RNA, 18 nt, Molluscum contagiosum virus
caaugcagugcaccagca

SEQ ID NO: 378053 - RNA, 22 nt, Molluscum contagiosum virus
caaugcugccguguacgucuuu

SEQ ID NO: 378054 - RNA, 22 nt, Molluscum contagiosum virus
caauggagccgcugcugcggua

SEQ ID NO: 378055 - RNA, 21 nt, Molluscum contagiosum virus
caauggcgcgcgagcacagcg

SEQ ID NO: 378056 - RNA, 22 nt, Molluscum contagiosum virus
caaugguagacgacgaugcaaa

SEQ ID NO: 378057 - RNA, 15 nt, Molluscum contagiosum virus
caauguuggucuccu

SEQ ID NO: 378058 - RNA, 19 nt, Molluscum contagiosum virus
caauugcugggcacaagcu

SEQ ID NO: 378059 - RNA, 22 nt, Molluscum contagiosum virus
caauugcugggcacaagcuuuc

SEQ ID NO: 378060 - RNA, 11 nt, Molluscum contagiosum virus
cacaaaaccuu

SEQ ID NO: 378061 - RNA, 17 nt, Molluscum contagiosum virus
cacaacgggcucgugcu

SEQ ID NO: 378062 - RNA, 20 nt, Molluscum contagiosum virus
cacaagauggcgcagcacuu

SEQ ID NO: 378063 - RNA, 20 nt, Molluscum contagiosum virus
cacaagcaggaguccgugac

SEQ ID NO: 378064 - RNA, 22 nt, Molluscum contagiosum virus
cacaagcaggaguccgugacag

SEQ ID NO: 378065 - RNA, 23 nt, Molluscum contagiosum virus
cacaagcaggaguccgugacaga

SEQ ID NO: 378066 - RNA, 22 nt, Molluscum contagiosum virus
cacaagggcagcucaagcugcu

SEQ ID NO: 378067 - RNA, 17 nt, Molluscum contagiosum virus
cacaauggcacuagccu

SEQ ID NO: 378068 - RNA, 14 nt, Molluscum contagiosum virus
cacacacacacucg

SEQ ID NO: 378069 - RNA, 14 nt, Molluscum contagiosum virus
cacacaccgcgagc

SEQ ID NO: 378070 - RNA, 14 nt, Molluscum contagiosum virus
cacacacucgcucu

SEQ ID NO: 378071 - RNA, 12 nt, Molluscum contagiosum virus
cacacacuugca

SEQ ID NO: 378072 - RNA, 14 nt, Molluscum contagiosum virus
cacaccagacaaag

SEQ ID NO: 378073 - RNA, 20 nt, Molluscum contagiosum virus
cacaccccuguaacaaggaa

SEQ ID NO: 378074 - RNA, 19 nt, Molluscum contagiosum virus
cacaccgcguggacaacag

SEQ ID NO: 378075 - RNA, 21 nt, Molluscum contagiosum virus
cacaccuuuugcuccaugaca

SEQ ID NO: 378076 - RNA, 13 nt, Molluscum contagiosum virus
cacacgcaccagu

SEQ ID NO: 378077 - RNA, 20 nt, Molluscum contagiosum virus
cacacgcgcgcgugcugcug

SEQ ID NO: 378078 - RNA, 22 nt, Molluscum contagiosum virus
cacacgcgcgcgugcugcugga

SEQ ID NO: 378079 - RNA, 15 nt, Molluscum contagiosum virus
uuucuuuuuccggga

SEQ ID NO: 378080 - RNA, 19 nt, Molluscum contagiosum virus
uuugauggcugcucauucu

SEQ ID NO: 378081 - RNA, 17 nt, Molluscum contagiosum virus
uuugccaaagcucucuu

SEQ ID NO: 378082 - RNA, 19 nt, Molluscum contagiosum virus
uuugcgaacgcgcaagugu

SEQ ID NO: 378083 - RNA, 16 nt, Molluscum contagiosum virus
uuugcgagcacuguac

SEQ ID NO: 378084 - RNA, 21 nt, Molluscum contagiosum virus
uuugcgagcacuguacgcacg

SEQ ID NO: 378085 - RNA, 16 nt, Molluscum contagiosum virus
uuugcgcggcacuugc

SEQ ID NO: 378086 - RNA, 18 nt, Molluscum contagiosum virus
uuugcgcucucagagcau

SEQ ID NO: 378087 - RNA, 21 nt, Molluscum contagiosum virus
uuugcggacgcgcgagugugc

SEQ ID NO: 378088 - RNA, 22 nt, Molluscum contagiosum virus
uuugcggacgcgcgagugugcg

SEQ ID NO: 378089 - RNA, 19 nt, Molluscum contagiosum virus
uuuguggacgcgcaagugu

SEQ ID NO: 378090 - RNA, 10 nt, Molluscum contagiosum virus
uuuguguugg

SEQ ID NO: 378091 - RNA, 18 nt, Molluscum contagiosum virus
uuuuaccccgagguucuc

SEQ ID NO: 378092 - RNA, 17 nt, Molluscum contagiosum virus
uuuuccaaccuguuaaa

SEQ ID NO: 378093 - RNA, 17 nt, Molluscum contagiosum virus
uuuuccugaacaagcug

SEQ ID NO: 378094 - RNA, 22 nt, Molluscum contagiosum virus
uuuuucguugccugcacugaga

SEQ ID NO: 378095 - RNA, 21 nt, Molluscum contagiosum virus
uuuuucugugcucgcgccuga

SEQ ID NO: 378096 - RNA, 13 nt, Moloney murine sarcoma virus
aaaaauacauaac

SEQ ID NO: 378097 - RNA, 15 nt, Moloney murine sarcoma virus
aaaaauacauaacug

SEQ ID NO: 378098 - RNA, 21 nt, Moloney murine sarcoma virus
aaaagauuuuauuuagucucc

SEQ ID NO: 378099 - RNA, 15 nt, Moloney murine sarcoma virus
aaacaggauaucugu

SEQ ID NO: 378100 - RNA, 17 nt, Moloney murine sarcoma virus
aaacaggauaucugugg

SEQ ID NO: 378101 - RNA, 19 nt, Moloney murine sarcoma virus
aaacaggauaucuguggua

SEQ ID NO: 378102 - RNA, 23 nt, Moloney murine sarcoma virus
aaagaaacagcugaauaccaaac

SEQ ID NO: 378103 - RNA, 17 nt, Moloney murine sarcoma virus
aaauacauaacugagaa

SEQ ID NO: 378104 - RNA, 16 nt, Moloney murine sarcoma virus
aacaaagaaacagcug

SEQ ID NO: 378105 - RNA, 13 nt, Moloney murine sarcoma virus
aacagaugagaca

SEQ ID NO: 378106 - RNA, 17 nt, Moloney murine sarcoma virus
aacagaugagacagcug

SEQ ID NO: 378107 - RNA, 19 nt, Moloney murine sarcoma virus
aacaggauaucugugguaa

SEQ ID NO: 378108 - RNA, 20 nt, Moloney murine sarcoma virus
aagaaacagcugaauaccaa

SEQ ID NO: 378109 - RNA, 14 nt, Moloney murine sarcoma virus
aagcaguuccugcc

SEQ ID NO: 378110 - RNA, 14 nt, Moloney murine sarcoma virus
aagcgguuccugcc

SEQ ID NO: 378111 - RNA, 19 nt, Moloney murine sarcoma virus
aaggcauggaaaaauacau

SEQ ID NO: 378112 - RNA, 19 nt, Moloney murine sarcoma virus
aaguaacgccacuuugcaa

SEQ ID NO: 378113 - RNA, 16 nt, Moloney murine sarcoma virus
acagaugagacagcug

SEQ ID NO: 378114 - RNA, 22 nt, Moloney murine sarcoma virus
acagcugaauaccaaacaggau

SEQ ID NO: 378115 - RNA, 15 nt, Moloney murine sarcoma virus
acagcugagugaugg

SEQ ID NO: 378116 - RNA, 18 nt, Moloney murine sarcoma virus
acccguauucccaauaaa

SEQ ID NO: 378117 - RNA, 19 nt, Moloney murine sarcoma virus
acccguauucccaauaaag

SEQ ID NO: 378118 - RNA, 16 nt, Moloney murine sarcoma virus
accuuauuugaacuaa

SEQ ID NO: 378119 - RNA, 14 nt, Moloney murine sarcoma virus
agacagcugaguga

SEQ ID NO: 378120 - RNA, 22 nt, Moloney murine sarcoma virus
agaucaaggucaggaacaaaga

SEQ ID NO: 378121 - RNA, 22 nt, Moloney murine sarcoma virus
agaugagacagcugagugaugg

SEQ ID NO: 378122 - RNA, 20 nt, Moloney murine sarcoma virus
agcugaauaccaaacaggau

SEQ ID NO: 378123 - RNA, 21 nt, Moloney murine sarcoma virus
agcugagugaugggccaaaca

SEQ ID NO: 378124 - RNA, 18 nt, Moloney murine sarcoma virus
aggaacaaagaaacagcu

SEQ ID NO: 378125 - RNA, 16 nt, Moloney murine sarcoma virus
aggauaucugugguaa

SEQ ID NO: 378126 - RNA, 21 nt, Moloney murine sarcoma virus
aggcauggaaaaauacauaac

SEQ ID NO: 378127 - RNA, 16 nt, Moloney murine sarcoma virus
agggccaagaacagau

SEQ ID NO: 378128 - RNA, 17 nt, Moloney murine sarcoma virus
aguuccugccccggcuc

SEQ ID NO: 378129 - RNA, 23 nt, Moloney murine sarcoma virus
auaaagccucuugcuguuugcau

SEQ ID NO: 378130 - RNA, 11 nt, Moloney murine sarcoma virus
auaccaaacag

SEQ ID NO: 378131 - RNA, 22 nt, Moloney murine sarcoma virus
auaccaaacaggauaucugugg

SEQ ID NO: 378132 - RNA, 15 nt, Moloney murine sarcoma virus
aucaaggucaggaac

SEQ ID NO: 378133 - RNA, 16 nt, Moloney murine sarcoma virus
augggccaaacaggau

SEQ ID NO: 378134 - RNA, 15 nt, Moloney murine sarcoma virus
caaacaggauaucug

SEQ ID NO: 378135 - RNA, 20 nt, Moloney murine sarcoma virus
caaacaggauaucuguggua

SEQ ID NO: 378136 - RNA, 15 nt, Moloney murine sarcoma virus
caaagaaacagcuga

SEQ ID NO: 378137 - RNA, 12 nt, Moloney murine sarcoma virus
caagaacagaug

SEQ ID NO: 378138 - RNA, 21 nt, Moloney murine sarcoma virus
gcaaggcauggaaaaauacau

SEQ ID NO: 378139 - RNA, 17 nt, Moloney murine sarcoma virus
gcauccgaaucgugguc

SEQ ID NO: 378140 - RNA, 20 nt, Moloney murine sarcoma virus
gccaaacaggauaucugugg

SEQ ID NO: 378141 - RNA, 16 nt, Moloney murine sarcoma virus
gccaagaacagaugag

SEQ ID NO: 378142 - RNA, 17 nt, Moloney murine sarcoma virus
gccacuuugcaaggcau

SEQ ID NO: 378143 - RNA, 18 nt, Moloney murine sarcoma virus
gccucuugcuguuugcau

SEQ ID NO: 378144 - RNA, 16 nt, Moloney murine sarcoma virus
gcucagggccaagaac

SEQ ID NO: 378145 - RNA, 17 nt, Moloney murine sarcoma virus
gcucagggccaagaaca

SEQ ID NO: 378146 - RNA, 19 nt, Moloney murine sarcoma virus
gcucagggccaagaacaga

SEQ ID NO: 378147 - RNA, 16 nt, Moloney murine sarcoma virus
gcucggggccaagaac

SEQ ID NO: 378148 - RNA, 17 nt, Moloney murine sarcoma virus
gcucggggccaagaaca

SEQ ID NO: 378149 - RNA, 18 nt, Moloney murine sarcoma virus
gcucuccgagcucaauaa

SEQ ID NO: 378150 - RNA, 20 nt, Moloney murine sarcoma virus
gcugaauaccaaacaggaua

SEQ ID NO: 378151 - RNA, 20 nt, Moloney murine sarcoma virus
ggaacaaagaaacagcugaa

SEQ ID NO: 378152 - RNA, 14 nt, Moloney murine sarcoma virus
ggauaucuguggua

SEQ ID NO: 378153 - RNA, 22 nt, Moloney murine sarcoma virus
ggauaucugugguaagcaguuc

SEQ ID NO: 378154 - RNA, 16 nt, Moloney murine sarcoma virus
ggcucagggccaagaa

SEQ ID NO: 378155 - RNA, 18 nt, Moloney murine sarcoma virus
ggcucagggccaagaaca

SEQ ID NO: 378156 - RNA, 12 nt, Moloney murine sarcoma virus
ggcucggggcca

SEQ ID NO: 378157 - RNA, 13 nt, Moloney murine sarcoma virus
ggcucggggccaa

SEQ ID NO: 378158 - RNA, 16 nt, Moloney murine sarcoma virus
ggcucggggccaagaa

SEQ ID NO: 378159 - RNA, 18 nt, Moloney murine sarcoma virus
ggcucggggccaagaaca

SEQ ID NO: 378160 - RNA, 20 nt, Moloney murine sarcoma virus
gggccaaacaggauaucugu

SEQ ID NO: 378161 - RNA, 16 nt, Moloney murine sarcoma virus
ggggccaagaacagau

SEQ ID NO: 378162 - RNA, 19 nt, Moloney murine sarcoma virus
gguccccagaugcggucca

SEQ ID NO: 378163 - RNA, 19 nt, Moloney murine sarcoma virus
guaccuuauuugaacuaac

SEQ ID NO: 378164 - RNA, 17 nt, Moloney murine sarcoma virus
gugaugggccaaacagg

SEQ ID NO: 378165 - RNA, 22 nt, Moloney murine sarcoma virus
uaagcaguuccugccccggcuc

SEQ ID NO: 378166 - RNA, 15 nt, Moloney murine sarcoma virus
uaagcgguuccugcc

SEQ ID NO: 378167 - RNA, 18 nt, Moloney murine sarcoma virus
uagaaaaguucagaucaa

SEQ ID NO: 378168 - RNA, 11 nt, Moloney murine sarcoma virus
uaucuguggua

SEQ ID NO: 378169 - RNA, 14 nt, Moloney murine sarcoma virus
ucagauguuuccag

SEQ ID NO: 378170 - RNA, 19 nt, Moloney murine sarcoma virus
uccagggugccccaaggac

SEQ ID NO: 378171 - RNA, 23 nt, Moloney murine sarcoma virus
uccugccccggcucagggccaag

SEQ ID NO: 378172 - RNA, 16 nt, Moloney murine sarcoma virus
ugaacuaaccaaucag

SEQ ID NO: 378173 - RNA, 14 nt, Moloney murine sarcoma virus
ugaauaccaaacag

SEQ ID NO: 378174 - RNA, 16 nt, Moloney murine sarcoma virus
ugaauaccaaacagga

SEQ ID NO: 378175 - RNA, 18 nt, Moloney murine sarcoma virus
ugaauaccaaacaggaua

SEQ ID NO: 378176 - RNA, 15 nt, Moloney murine sarcoma virus
ugagugaugggccaa

SEQ ID NO: 378177 - RNA, 15 nt, Moloney murine sarcoma virus
ugaugggccaaacag

SEQ ID NO: 378178 - RNA, 19 nt, Moloney murine sarcoma virus
ugaugggccaaacaggaua

SEQ ID NO: 378179 - RNA, 20 nt, Moloney murine sarcoma virus
ugaugggccaaacaggauau

SEQ ID NO: 378180 - RNA, 15 nt, Moloney murine sarcoma virus
ugccccggcucaggg

SEQ ID NO: 378181 - RNA, 15 nt, Moloney murine sarcoma virus
ugccccggcucgggg

SEQ ID NO: 378182 - RNA, 12 nt, Moloney murine sarcoma virus
ugggccaaacag

SEQ ID NO: 378183 - RNA, 22 nt, Moloney murine sarcoma virus
uuaaguaacgccacuuugcaag

SEQ ID NO: 378184 - RNA, 14 nt, Moloney murine sarcoma virus
aaacaggauaucug

SEQ ID NO: 378185 - RNA, 16 nt, Moloney murine sarcoma virus
aaacaggauaucugug

SEQ ID NO: 378186 - RNA, 13 nt, Moloney murine sarcoma virus
aaagaaacagcug

SEQ ID NO: 378187 - RNA, 21 nt, Moloney murine sarcoma virus
aaagauuuuauuuagucucca

SEQ ID NO: 378188 - RNA, 14 nt, Moloney murine sarcoma virus
aacaggauaucugu

SEQ ID NO: 378189 - RNA, 15 nt, Moloney murine sarcoma virus
aacaggauaucugug

SEQ ID NO: 378190 - RNA, 22 nt, Moloney murine sarcoma virus
aacgccacuuugcaaggcaugg

SEQ ID NO: 378191 - RNA, 17 nt, Moloney murine sarcoma virus
aagaaacagcugaauac

SEQ ID NO: 378192 - RNA, 11 nt, Moloney murine sarcoma virus
aagaacagaug

SEQ ID NO: 378193 - RNA, 16 nt, Moloney murine sarcoma virus
aagaacagaugguccc

SEQ ID NO: 378194 - RNA, 21 nt, Moloney murine sarcoma virus
aagcaguuccugccccggcuc

SEQ ID NO: 378195 - RNA, 21 nt, Moloney murine sarcoma virus
aagcgguuccugccccggcuc

SEQ ID NO: 378196 - RNA, 12 nt, Moloney murine sarcoma virus
aauaccaaacag

SEQ ID NO: 378197 - RNA, 19 nt, Moloney murine sarcoma virus
acagcugaauaccaaacag

SEQ ID NO: 378198 - RNA, 21 nt, Moloney murine sarcoma virus
acagcugagugaugggccaaa

SEQ ID NO: 378199 - RNA, 16 nt, Moloney murine sarcoma virus
acaggauaucuguggu

SEQ ID NO: 378200 - RNA, 18 nt, Moloney murine sarcoma virus
acaggauaucugugguaa

SEQ ID NO: 378201 - RNA, 17 nt, Moloney murine sarcoma virus
accuuauuugaacuaac

SEQ ID NO: 378202 - RNA, 17 nt, Moloney murine sarcoma virus
agaaaaguucagaucaa

SEQ ID NO: 378203 - RNA, 23 nt, Moloney murine sarcoma virus
agaaacagcugaauaccaaacag

SEQ ID NO: 378204 - RNA, 20 nt, Moloney murine sarcoma virus
agaucaaggucaggaacaaa

SEQ ID NO: 378205 - RNA, 16 nt, Moloney murine sarcoma virus
agcugaauaccaaaca

SEQ ID NO: 378206 - RNA, 13 nt, Moloney murine sarcoma virus
aggauaucugugg

SEQ ID NO: 378207 - RNA, 21 nt, Moloney murine sarcoma virus
agugaaucaucagauguuucc

SEQ ID NO: 378208 - RNA, 17 nt, Moloney murine sarcoma virus
agugaugggccaaacag

SEQ ID NO: 378209 - RNA, 20 nt, Moloney murine sarcoma virus
agugaugggccaaacaggau

SEQ ID NO: 378210 - RNA, 13 nt, Moloney murine sarcoma virus
auaccaaacagga

SEQ ID NO: 378211 - RNA, 14 nt, Moloney murine sarcoma virus
auaccaaacaggau

SEQ ID NO: 378212 - RNA, 12 nt, Moloney murine sarcoma virus
caaacaggauau

SEQ ID NO: 378213 - RNA, 21 nt, Moloney murine sarcoma virus
caaacaggauaucugugguaa

SEQ ID NO: 378214 - RNA, 13 nt, Moloney murine sarcoma virus
caagaacagaugg

SEQ ID NO: 378215 - RNA, 18 nt, Moloney murine sarcoma virus
cacgacgggggucuuuca

SEQ ID NO: 378216 - RNA, 16 nt, Moloney murine sarcoma virus
cagaugagacagcuga

SEQ ID NO: 378217 - RNA, 20 nt, Moloney murine sarcoma virus
cagcaguuucuagugaauca

SEQ ID NO: 378218 - RNA, 20 nt, Moloney murine sarcoma virus
cagcccucagcaguuucuag

SEQ ID NO: 378219 - RNA, 22 nt, Moloney murine sarcoma virus
caggaacaaagaaacagcugaa

SEQ ID NO: 378220 - RNA, 16 nt, Moloney murine sarcoma virus
cagggccaagaacaga

SEQ ID NO: 378221 - RNA, 14 nt, Moloney murine sarcoma virus
caguuucuagugaa

SEQ ID NO: 378222 - RNA, 16 nt, Moloney murine sarcoma virus
caucagauguuuccag

SEQ ID NO: 378223 - RNA, 17 nt, Moloney murine sarcoma virus
ccaaacaggauaucugu

SEQ ID NO: 378224 - RNA, 16 nt, Moloney murine sarcoma virus
cccggcucggggccaa

SEQ ID NO: 378225 - RNA, 19 nt, Moloney murine sarcoma virus
cccggcucggggccaagaa

SEQ ID NO: 378226 - RNA, 12 nt, Moloney murine sarcoma virus
ccggcucagggc

SEQ ID NO: 378227 - RNA, 18 nt, Moloney murine sarcoma virus
ccggcucagggccaagaa

SEQ ID NO: 378228 - RNA, 19 nt, Moloney murine sarcoma virus
ccggcucagggccaagaac

SEQ ID NO: 378229 - RNA, 21 nt, Moloney murine sarcoma virus
cacucggcgcgccagucuucc

SEQ ID NO: 378230 - RNA, 23 nt, Moloney murine sarcoma virus
cagaucaaggucaggaacaaaga

SEQ ID NO: 378231 - RNA, 21 nt, Moloney murine sarcoma virus
cagcugagugaugggccaaac

SEQ ID NO: 378232 - RNA, 23 nt, Moloney murine sarcoma virus
cagcugagugaugggccaaacag

SEQ ID NO: 378233 - RNA, 14 nt, Moloney murine sarcoma virus
caggauaucugugg

SEQ ID NO: 378234 - RNA, 16 nt, Moloney murine sarcoma virus
caggauaucuguggua

SEQ ID NO: 378235 - RNA, 12 nt, Moloney murine sarcoma virus
cagggccaagaa

SEQ ID NO: 378236 - RNA, 17 nt, Moloney murine sarcoma virus
cagggccaagaacagau

SEQ ID NO: 378237 - RNA, 19 nt, Moloney murine sarcoma virus
cagggccaagaacagauga

SEQ ID NO: 378238 - RNA, 17 nt, Moloney murine sarcoma virus
caguuccugccccggcu

SEQ ID NO: 378239 - RNA, 15 nt, Moloney murine sarcoma virus
caucagauguuucca

SEQ ID NO: 378240 - RNA, 16 nt, Moloney murine sarcoma virus
ccaaacaggauaucug

SEQ ID NO: 378241 - RNA, 19 nt, Moloney murine sarcoma virus
ccaaacaggauaucugugg

SEQ ID NO: 378242 - RNA, 21 nt, Moloney murine sarcoma virus
ccaaacaggauaucuguggua

SEQ ID NO: 378243 - RNA, 17 nt, Moloney murine sarcoma virus
ccagcccucagcaguuu

SEQ ID NO: 378244 - RNA, 19 nt, Moloney murine sarcoma virus
ccagcccucagcaguuucu

SEQ ID NO: 378245 - RNA, 16 nt, Moloney murine sarcoma virus
cccggcucagggccaa

SEQ ID NO: 378246 - RNA, 19 nt, Moloney murine sarcoma virus
cccggcucagggccaagaa

SEQ ID NO: 378247 - RNA, 20 nt, Moloney murine sarcoma virus
cccggcucggggccaagaac

SEQ ID NO: 378248 - RNA, 15 nt, Moloney murine sarcoma virus
ccggcucagggccaa

SEQ ID NO: 378249 - RNA, 12 nt, Moloney murine sarcoma virus
ccggcucggggc

SEQ ID NO: 378250 - RNA, 15 nt, Moloney murine sarcoma virus
ccggcucggggccaa

SEQ ID NO: 378251 - RNA, 18 nt, Moloney murine sarcoma virus
ccggcucggggccaagaa

SEQ ID NO: 378252 - RNA, 13 nt, Moloney murine sarcoma virus
ccugccccggcuc

SEQ ID NO: 378253 - RNA, 21 nt, Moloney murine sarcoma virus
ccugccccggcucagggccaa

SEQ ID NO: 378254 - RNA, 16 nt, Moloney murine sarcoma virus
cggggccaagaacaga

SEQ ID NO: 378255 - RNA, 14 nt, Moloney murine sarcoma virus
cucagggccaagaa

SEQ ID NO: 378256 - RNA, 16 nt, Moloney murine sarcoma virus
cucagggccaagaaca

SEQ ID NO: 378257 - RNA, 20 nt, Moloney murine sarcoma virus
cucagggccaagaacagaug

SEQ ID NO: 378258 - RNA, 20 nt, Moloney murine sarcoma virus
cucggggccaagaacagaug

SEQ ID NO: 378259 - RNA, 14 nt, Moloney murine sarcoma virus
cucuccgagcucaa

SEQ ID NO: 378260 - RNA, 14 nt, Moloney murine sarcoma virus
cugaauaccaaaca

SEQ ID NO: 378261 - RNA, 22 nt, Moloney murine sarcoma virus
cugccccggcucggggccaaga

SEQ ID NO: 378262 - RNA, 16 nt, Moloney murine sarcoma virus
cugugguaagcaguuc

SEQ ID NO: 378263 - RNA, 22 nt, Moloney murine sarcoma virus
gaaaaguucagaucaaggucag

SEQ ID NO: 378264 - RNA, 22 nt, Moloney murine sarcoma virus
gaaacagcugaauaccaaacag

SEQ ID NO: 378265 - RNA, 13 nt, Moloney murine sarcoma virus
gaauaccaaacag

SEQ ID NO: 378266 - RNA, 21 nt, Moloney murine sarcoma virus
gagugaugggccaaacaggau

SEQ ID NO: 378267 - RNA, 11 nt, Moloney murine sarcoma virus
gauaucugugg

SEQ ID NO: 378268 - RNA, 13 nt, Moloney murine sarcoma virus
gauaucuguggua

SEQ ID NO: 378269 - RNA, 21 nt, Moloney murine sarcoma virus
gauaucugugguaagcaguuc

SEQ ID NO: 378270 - RNA, 17 nt, Moloney murine sarcoma virus
gaucaaggucaggaaca

SEQ ID NO: 378271 - RNA, 18 nt, Moloney murine sarcoma virus
gaugggccaaacaggaua

SEQ ID NO: 378272 - RNA, 19 nt, Moloney murine sarcoma virus
ccggcucggggccaagaac

SEQ ID NO: 378273 - RNA, 21 nt, Moloney murine sarcoma virus
ccugccccggcucggggccaa

SEQ ID NO: 378274 - RNA, 13 nt, Moloney murine sarcoma virus
cgccagucuuccg

SEQ ID NO: 378275 - RNA, 17 nt, Moloney murine sarcoma virus
cggcucagggccaagaa

SEQ ID NO: 378276 - RNA, 14 nt, Moloney murine sarcoma virus
cggcucggggccaa

SEQ ID NO: 378277 - RNA, 17 nt, Moloney murine sarcoma virus
cggcucggggccaagaa

SEQ ID NO: 378278 - RNA, 17 nt, Moloney murine sarcoma virus
cggggccaagaacagau

SEQ ID NO: 378279 - RNA, 17 nt, Moloney murine sarcoma virus
cgguuccugccccggcu

SEQ ID NO: 378280 - RNA, 12 nt, Moloney murine sarcoma virus
cucagcaguuuc

SEQ ID NO: 378281 - RNA, 12 nt, Moloney murine sarcoma virus
cucagggccaag

SEQ ID NO: 378282 - RNA, 15 nt, Moloney murine sarcoma virus
cucagggccaagaac

SEQ ID NO: 378283 - RNA, 12 nt, Moloney murine sarcoma virus
cucggggccaag

SEQ ID NO: 378284 - RNA, 16 nt, Moloney murine sarcoma virus
cucggggccaagaaca

SEQ ID NO: 378285 - RNA, 16 nt, Moloney murine sarcoma virus
cugaauaccaaacagg

SEQ ID NO: 378286 - RNA, 16 nt, Moloney murine sarcoma virus
cugagugaugggccaa

SEQ ID NO: 378287 - RNA, 20 nt, Moloney murine sarcoma virus
cugagugaugggccaaacag

SEQ ID NO: 378288 - RNA, 21 nt, Moloney murine sarcoma virus
cugagugaugggccaaacagg

SEQ ID NO: 378289 - RNA, 22 nt, Moloney murine sarcoma virus
cugccccggcucagggccaaga

SEQ ID NO: 378290 - RNA, 21 nt, Moloney murine sarcoma virus
cugugguaagcaguuccugcc

SEQ ID NO: 378291 - RNA, 21 nt, Moloney murine sarcoma virus
cugugguaagcgguuccugcc

SEQ ID NO: 378292 - RNA, 20 nt, Moloney murine sarcoma virus
cuuccgcucuccgagcucaa

SEQ ID NO: 378293 - RNA, 18 nt, Moloney murine sarcoma virus
gaaaaauacauaacugag

SEQ ID NO: 378294 - RNA, 18 nt, Moloney murine sarcoma virus
gaaacagcugaauaccaa

SEQ ID NO: 378295 - RNA, 11 nt, Moloney murine sarcoma virus
gaacagaugag

SEQ ID NO: 378296 - RNA, 16 nt, Moloney murine sarcoma virus
gaauaccaaacaggau

SEQ ID NO: 378297 - RNA, 17 nt, Moloney murine sarcoma virus
gaauaccaaacaggaua

SEQ ID NO: 378298 - RNA, 22 nt, Moloney murine sarcoma virus
gacagcugagugaugggccaaa

SEQ ID NO: 378299 - RNA, 18 nt, Moloney murine sarcoma virus
gagugaugggccaaacag

SEQ ID NO: 378300 - RNA, 19 nt, Moloney murine sarcoma virus
gaucaaggucaggaacaaa

SEQ ID NO: 378301 - RNA, 18 nt, Moloney murine sarcoma virus
gaugcgguccagcccuca

SEQ ID NO: 378302 - RNA, 21 nt, Moloney murine sarcoma virus
gauguuuccagggugccccaa

SEQ ID NO: 378303 - RNA, 14 nt, Moloney murine sarcoma virus
gccaaacaggauau

SEQ ID NO: 378304 - RNA, 22 nt, Moloney murine sarcoma virus
gccagucuuccgauagacugcg

SEQ ID NO: 378305 - RNA, 14 nt, Moloney murine sarcoma virus
gcccucagcaguuu

SEQ ID NO: 378306 - RNA, 19 nt, Moloney murine sarcoma virus
gcucggggccaagaacaga

SEQ ID NO: 378307 - RNA, 21 nt, Moloney murine sarcoma virus
gcugaauaccaaacaggauau

SEQ ID NO: 378308 - RNA, 18 nt, Moloney murine sarcoma virus
gcugagugaugggccaaa

SEQ ID NO: 378309 - RNA, 12 nt, Moloney murine sarcoma virus
gggccaagaaca

SEQ ID NO: 378310 - RNA, 17 nt, Moloney murine sarcoma virus
gguaagcaguuccugcc

SEQ ID NO: 378311 - RNA, 17 nt, Moloney murine sarcoma virus
gguaagcgguuccugcc

SEQ ID NO: 378312 - RNA, 21 nt, Moloney murine sarcoma virus
gguccagcccucagcaguuuc

SEQ ID NO: 378313 - RNA, 15 nt, Moloney murine sarcoma virus
gugaugggccaaaca

SEQ ID NO: 378314 - RNA, 20 nt, Moloney murine sarcoma virus
gugaugggccaaacaggaua

SEQ ID NO: 378315 - RNA, 14 nt, Moloney murine sarcoma virus
gugguaagcaguuc

SEQ ID NO: 378316 - RNA, 16 nt, Moloney murine sarcoma virus
guuccugccccggcuc

SEQ ID NO: 378317 - RNA, 12 nt, Moloney murine sarcoma virus
uaucugugguaa

SEQ ID NO: 378318 - RNA, 23 nt, Moloney murine sarcoma virus
ucacucggcgcgccagucuuccg

SEQ ID NO: 378319 - RNA, 14 nt, Moloney murine sarcoma virus
ucagggccaagaac

SEQ ID NO: 378320 - RNA, 16 nt, Moloney murine sarcoma virus
ucaucagauguuucca

SEQ ID NO: 378321 - RNA, 14 nt, Moloney murine sarcoma virus
uccgagcucaauaa

SEQ ID NO: 378322 - RNA, 23 nt, Moloney murine sarcoma virus
uccugccccggcucggggccaag

SEQ ID NO: 378323 - RNA, 14 nt, Moloney murine sarcoma virus
ucuccucugaguga

SEQ ID NO: 378324 - RNA, 13 nt, Moloney murine sarcoma virus
ugaauaccaaaca

SEQ ID NO: 378325 - RNA, 15 nt, Moloney murine sarcoma virus
ugaauaccaaacagg

SEQ ID NO: 378326 - RNA, 18 nt, Moloney murine sarcoma virus
ugagugaugggccaaaca

SEQ ID NO: 378327 - RNA, 19 nt, Moloney murine sarcoma virus
ugagugaugggccaaacag

SEQ ID NO: 378328 - RNA, 12 nt, Moloney murine sarcoma virus
ugaugggccaaa

SEQ ID NO: 378329 - RNA, 17 nt, Moloney murine sarcoma virus
ugaugggccaaacagga

SEQ ID NO: 378330 - RNA, 11 nt, Moloney murine sarcoma virus
ugccccggcuc

SEQ ID NO: 378331 - RNA, 20 nt, Moloney murine sarcoma virus
ugccccggcucagggccaag

SEQ ID NO: 378332 - RNA, 20 nt, Moloney murine sarcoma virus
ugccccggcucggggccaag

SEQ ID NO: 378333 - RNA, 19 nt, Moloney murine sarcoma virus
uggaaaaauacauaacuga

SEQ ID NO: 378334 - RNA, 21 nt, Moloney murine sarcoma virus
ugugguaagcaguuccugccc

SEQ ID NO: 378335 - RNA, 21 nt, Moloney murine sarcoma virus
ugugguaagcgguuccugccc

SEQ ID NO: 378336 - RNA, 16 nt, Moloney murine sarcoma virus
uugaacuaaccaauca

SEQ ID NO: 378337 - RNA, 21 nt, Mouse mammary tumor virus
aaauuuuugaguaaacuugca

SEQ ID NO: 378338 - RNA, 14 nt, Mouse mammary tumor virus
aauuuuugaguaaa

SEQ ID NO: 378339 - RNA, 19 nt, Mouse mammary tumor virus
acaguccuaacauucaccu

SEQ ID NO: 378340 - RNA, 12 nt, Mouse mammary tumor virus
agccaaagcccc

SEQ ID NO: 378341 - RNA, 13 nt, Mouse mammary tumor virus
agcucgagcagaa

SEQ ID NO: 378342 - RNA, 18 nt, Mouse mammary tumor virus
agcucgagcagaaccacc

SEQ ID NO: 378343 - RNA, 13 nt, Mouse mammary tumor virus
aggucgagcagag

SEQ ID NO: 378344 - RNA, 19 nt, Mouse mammary tumor virus
aucaaauguuuugaucuaa

SEQ ID NO: 378345 - RNA, 17 nt, Mouse mammary tumor virus
auguaaaccaugauaua

SEQ ID NO: 378346 - RNA, 18 nt, Mouse mammary tumor virus
auguaaaccaugauauaa

SEQ ID NO: 378347 - RNA, 22 nt, Mouse mammary tumor virus
auguucuuuuggauucuaucca

SEQ ID NO: 378348 - RNA, 23 nt, Mouse mammary tumor virus
auguucuuuuggauucuauccaa

SEQ ID NO: 378349 - RNA, 16 nt, Mouse mammary tumor virus
auguuuugaucuaagc

SEQ ID NO: 378350 - RNA, 14 nt, Mouse mammary tumor virus
caacaguccuaaca

SEQ ID NO: 378351 - RNA, 17 nt, Mouse mammary tumor virus
caagugguuuccugacu

SEQ ID NO: 378352 - RNA, 16 nt, Mouse mammary tumor virus
cacuuauccuucacuu

SEQ ID NO: 378353 - RNA, 17 nt, Mouse mammary tumor virus
ccgucuccgcucgucac

SEQ ID NO: 378354 - RNA, 13 nt, Mouse mammary tumor virus
ccuucacuuucca

SEQ ID NO: 378355 - RNA, 23 nt, Mouse mammary tumor virus
cgucacuuauccuucacuuucca

SEQ ID NO: 378356 - RNA, 22 nt, Mouse mammary tumor virus
cuugcaacaguccuaacauuca

SEQ ID NO: 378357 - RNA, 14 nt, Mouse mammary tumor virus
gcaacaguccuaac

SEQ ID NO: 378358 - RNA, 20 nt, Mouse mammary tumor virus
gcacgucagcucgagcagaa

SEQ ID NO: 378359 - RNA, 13 nt, Mouse mammary tumor virus
gcagaccccggug

SEQ ID NO: 378360 - RNA, 18 nt, Mouse mammary tumor virus
gcucgagcagaaccaccc

SEQ ID NO: 378361 - RNA, 17 nt, Mouse mammary tumor virus
gcucuaaaugcucuaac

SEQ ID NO: 378362 - RNA, 13 nt, Mouse mammary tumor virus
gcucuaaccuccu

SEQ ID NO: 378363 - RNA, 17 nt, Mouse mammary tumor virus
guaaguucauggucaca

SEQ ID NO: 378364 - RNA, 20 nt, Mouse mammary tumor virus
guaucaaauguuuugaucua

SEQ ID NO: 378365 - RNA, 16 nt, Mouse mammary tumor virus
gucagcucgagcagaa

SEQ ID NO: 378366 - RNA, 16 nt, Mouse mammary tumor virus
gucgagcagagccaaa

SEQ ID NO: 378367 - RNA, 14 nt, Mouse mammary tumor virus
uaaaccaugauaua

SEQ ID NO: 378368 - RNA, 20 nt, Mouse mammary tumor virus
uaaacuugcaacaguccuaa

SEQ ID NO: 378369 - RNA, 16 nt, Mouse mammary tumor virus
uaaaugcucuaaccuc

SEQ ID NO: 378370 - RNA, 16 nt, Mouse mammary tumor virus
uauaaaagagugcuaa

SEQ ID NO: 378371 - RNA, 22 nt, Mouse mammary tumor virus
ucaaauguuuugaucuaagcuc

SEQ ID NO: 378372 - RNA, 16 nt, Mouse mammary tumor virus
ucacuuauccuucacu

SEQ ID NO: 378373 - RNA, 15 nt, Mouse mammary tumor virus
ucauggucacagacu

SEQ ID NO: 378374 - RNA, 13 nt, Mouse mammary tumor virus
ucuaaaugcucua

SEQ ID NO: 378375 - RNA, 22 nt, Mouse mammary tumor virus
ugaguaaacuugcaacaguccu

SEQ ID NO: 378376 - RNA, 14 nt, Mouse mammary tumor virus
ugcucuaaccuccu

SEQ ID NO: 378377 - RNA, 16 nt, Mouse mammary tumor virus
uguaaaccaugauaua

SEQ ID NO: 378378 - RNA, 18 nt, Mouse mammary tumor virus
uguaaaccaugauauaaa

SEQ ID NO: 378379 - RNA, 22 nt, Mouse mammary tumor virus
uguucuuuuggauucuauccaa

SEQ ID NO: 378380 - RNA, 13 nt, Mouse mammary tumor virus
aaccaugauauaa

SEQ ID NO: 378381 - RNA, 18 nt, Mouse mammary tumor virus
aucaaauguuuugaucua

SEQ ID NO: 378382 - RNA, 20 nt, Mouse mammary tumor virus
cacuuauccuucacuuucca

SEQ ID NO: 378383 - RNA, 20 nt, Mouse mammary tumor virus
cagcucgagcagaaccaccc

SEQ ID NO: 378384 - RNA, 22 nt, Mouse mammary tumor virus
ccaaguuuuauguaaaugcuua

SEQ ID NO: 378385 - RNA, 23 nt, Mouse mammary tumor virus
cgcucgucacuuauccuucacuu

SEQ ID NO: 378386 - RNA, 18 nt, Mouse mammary tumor virus
cuaagcucuaaaugcucu

SEQ ID NO: 378387 - RNA, 19 nt, Mouse mammary tumor virus
cuuauccuucacuuuccag

SEQ ID NO: 378388 - RNA, 19 nt, Mouse mammary tumor virus
gauauaaaagagugcuaaa

SEQ ID NO: 378389 - RNA, 21 nt, Mouse mammary tumor virus
gcagagccaaagcccccggug

SEQ ID NO: 378390 - RNA, 22 nt, Mouse mammary tumor virus
gcucgagcagaaccacccguga

SEQ ID NO: 378391 - RNA, 16 nt, Mouse mammary tumor virus
gcucuaaaugcucuaa

SEQ ID NO: 378392 - RNA, 17 nt, Mouse mammary tumor virus
gcuuauguaaaccauga

SEQ ID NO: 378393 - RNA, 17 nt, Mouse mammary tumor virus
gucgcggguucgcucgc

SEQ ID NO: 378394 - RNA, 21 nt, Mouse mammary tumor virus
guuaggucgagcagagccaaa

SEQ ID NO: 378395 - RNA, 17 nt, Mouse mammary tumor virus
guuuccugacuuggcuu

SEQ ID NO: 378396 - RNA, 13 nt, Mouse mammary tumor virus
uaaaagagugcua

SEQ ID NO: 378397 - RNA, 11 nt, Mouse mammary tumor virus
uaacauucacc

SEQ ID NO: 378398 - RNA, 18 nt, Mouse mammary tumor virus
uaagcucuaaaugcucua

SEQ ID NO: 378399 - RNA, 20 nt, Mouse mammary tumor virus
uaucaaauguuuugaucuaa

SEQ ID NO: 378400 - RNA, 17 nt, Mouse mammary tumor virus
uauccuucacuuuccag

SEQ ID NO: 378401 - RNA, 14 nt, Mouse mammary tumor virus
uauguaaaugcuua

SEQ ID NO: 378402 - RNA, 18 nt, Mouse mammary tumor virus
ucaaauguuuugaucuaa

SEQ ID NO: 378403 - RNA, 14 nt, Mouse mammary tumor virus
ucuaaaugcucuaa

SEQ ID NO: 378404 - RNA, 23 nt, Mouse mammary tumor virus
ugcaacaguccuaacauucaccu

SEQ ID NO: 378405 - RNA, 23 nt, Mouse mammary tumor virus
uuaaguaaguucauggucacaga

SEQ ID NO: 378406 - RNA, 13 nt, Mouse mammary tumor virus
uucacuuuccaga

SEQ ID NO: 378407 - RNA, 24 nt, Mouse mammary tumor virus
uugaucuaagcucuaaaugcucua

SEQ ID NO: 378408 - RNA, 16 nt, Mouse mammary tumor virus
uuuauguaaaugcuua

SEQ ID NO: 378409 - RNA, 21 nt, Murine leukemia virus
aaaagauuuuauuuagucucc

SEQ ID NO: 378410 - RNA, 16 nt, Murine leukemia virus
aaacaggauaucugug

SEQ ID NO: 378411 - RNA, 19 nt, Murine leukemia virus
aaacccucuugcaguugca

SEQ ID NO: 378412 - RNA, 17 nt, Murine leukemia virus
aaauacauaacugagaa

SEQ ID NO: 378413 - RNA, 13 nt, Murine leukemia virus
aacccucuugcag

SEQ ID NO: 378414 - RNA, 23 nt, Murine leukemia virus
accgacccaccaccgggagguaa

SEQ ID NO: 378415 - RNA, 12 nt, Murine leukemia virus
acuuaucugugu

SEQ ID NO: 378416 - RNA, 22 nt, Murine leukemia virus
agaucaaggucaggaacagaug

SEQ ID NO: 378417 - RNA, 19 nt, Murine leukemia virus
agaugcgguccagcccuca

SEQ ID NO: 378418 - RNA, 17 nt, Murine leukemia virus
agcugaauaugggccaa

SEQ ID NO: 378419 - RNA, 16 nt, Murine leukemia virus
aggucaggaacagaug

SEQ ID NO: 378420 - RNA, 20 nt, Murine leukemia virus
auaaacccucuugcaguugc

SEQ ID NO: 378421 - RNA, 20 nt, Murine leukemia virus
aucaaggucaggaacagaug

SEQ ID NO: 378422 - RNA, 14 nt, Murine leukemia virus
caacuuaucugugu

SEQ ID NO: 378423 - RNA, 12 nt, Murine leukemia virus
caagaacagaug

SEQ ID NO: 378424 - RNA, 13 nt, Murine leukemia virus
caagaacagaugg

SEQ ID NO: 378425 - RNA, 19 nt, Murine leukemia virus
caaggucaggaacagaugg

SEQ ID NO: 378426 - RNA, 15 nt, Murine leukemia virus
cagcgccaguccucc

SEQ ID NO: 378427 - RNA, 20 nt, Murine leukemia virus
cagcugaauaugggccaaac

SEQ ID NO: 378428 - RNA, 19 nt, Murine leukemia virus
cagggccaagaacagaugg

SEQ ID NO: 378429 - RNA, 17 nt, Murine leukemia virus
cauaacugagaauagag

SEQ ID NO: 378430 - RNA, 16 nt, Murine leukemia virus
caucagauguuuccag

SEQ ID NO: 378431 - RNA, 17 nt, Murine leukemia virus
ccagcccucagcaguuu

SEQ ID NO: 378432 - RNA, 20 nt, Murine leukemia virus
ccaguccuccgauugacuga

SEQ ID NO: 378433 - RNA, 15 nt, Murine leukemia virus
ccaucagauguuucc

SEQ ID NO: 378434 - RNA, 17 nt, Murine leukemia virus
cggggcgccaguccucc

SEQ ID NO: 378435 - RNA, 16 nt, Murine leukemia virus
cuagugucuaugacug

SEQ ID NO: 378436 - RNA, 17 nt, Murine leukemia virus
cuagugucuaugacuga

SEQ ID NO: 378437 - RNA, 12 nt, Murine leukemia virus
cucagcaguuuc

SEQ ID NO: 378438 - RNA, 12 nt, Murine leukemia virus
cucagggccaag

SEQ ID NO: 378439 - RNA, 18 nt, Murine leukemia virus
cuccgauugacugagucg

SEQ ID NO: 378440 - RNA, 15 nt, Murine leukemia virus
cugcccagggaccac

SEQ ID NO: 378441 - RNA, 16 nt, Murine leukemia virus
cugugguaagcaguuc

SEQ ID NO: 378442 - RNA, 20 nt, Murine leukemia virus
cuucugcuccccgagcucaa

SEQ ID NO: 378443 - RNA, 18 nt, Murine leukemia virus
gaaaaauacauaacugag

SEQ ID NO: 378444 - RNA, 19 nt, Murine leukemia virus
gaaccaucagauguuucca

SEQ ID NO: 378445 - RNA, 21 nt, Murine leukemia virus
gaauagagaaguucagaucaa

SEQ ID NO: 378446 - RNA, 17 nt, Murine leukemia virus
gagaccccugcccaggg

SEQ ID NO: 378447 - RNA, 11 nt, Murine leukemia virus
gauaucugugg

SEQ ID NO: 378448 - RNA, 21 nt, Murine leukemia virus
gauaucugugguaagcaguuc

SEQ ID NO: 378449 - RNA, 15 nt, Murine leukemia virus
gauggaacagcugaa

SEQ ID NO: 378450 - RNA, 23 nt, Murine leukemia virus
gcaguuccugccccggcucaggg

SEQ ID NO: 378451 - RNA, 20 nt, Murine leukemia virus
gccaaacaggauaucugugg

SEQ ID NO: 378452 - RNA, 22 nt, Murine leukemia virus
gccaguccuccgauugacugag

SEQ ID NO: 378453 - RNA, 12 nt, Murine leukemia virus
gcccagggacca

SEQ ID NO: 378454 - RNA, 15 nt, Murine leukemia virus
gccccaaggaccuga

SEQ ID NO: 378455 - RNA, 17 nt, Murine leukemia virus
gcugaauaugggccaaa

SEQ ID NO: 378456 - RNA, 18 nt, Murine leukemia virus
gcugaauaugggccaaac

SEQ ID NO: 378457 - RNA, 22 nt, Murine leukemia virus
ggaacagcugaauaugggccaa

SEQ ID NO: 378458 - RNA, 13 nt, Murine leukemia virus
ggcucagggccaa

SEQ ID NO: 378459 - RNA, 18 nt, Murine leukemia virus
ggcucagggccaagaaca

SEQ ID NO: 378460 - RNA, 16 nt, Murine leukemia virus
guacccguguauccaa

SEQ ID NO: 378461 - RNA, 17 nt, Murine leukemia virus
guauccaauaaacccuc

SEQ ID NO: 378462 - RNA, 22 nt, Murine leukemia virus
guauccaauaaacccucuugca

SEQ ID NO: 378463 - RNA, 21 nt, Murine leukemia virus
ucacucggggcgccaguccuc

SEQ ID NO: 378464 - RNA, 18 nt, Murine leukemia virus
uccucugagugauugacu

SEQ ID NO: 378465 - RNA, 23 nt, Murine leukemia virus
uccugccccggcucagggccaag

SEQ ID NO: 378466 - RNA, 16 nt, Murine leukemia virus
ugaacuaaccaaucag

SEQ ID NO: 378467 - RNA, 15 nt, Murine leukemia virus
ugaauaugggccaaa

SEQ ID NO: 378468 - RNA, 19 nt, Murine leukemia virus
ugacugagucgcccgggua

SEQ ID NO: 378469 - RNA, 22 nt, Murine leukemia virus
ugcaguugcagcgccaguccuc

SEQ ID NO: 378470 - RNA, 12 nt, Murine leukemia virus
ugggccaaacag

SEQ ID NO: 378471 - RNA, 15 nt, Murine leukemia virus
aaaaauacauaacug

SEQ ID NO: 378472 - RNA, 15 nt, Murine leukemia virus
aacgccauuuugcaa

SEQ ID NO: 378473 - RNA, 13 nt, Murine leukemia virus
aacuuaucugugu

SEQ ID NO: 378474 - RNA, 11 nt, Murine leukemia virus
aagaacagaug

SEQ ID NO: 378475 - RNA, 23 nt, Murine leukemia virus
aagaacagaugguccccagaugc

SEQ ID NO: 378476 - RNA, 17 nt, Murine leukemia virus
aaggucaggaacagaug

SEQ ID NO: 378477 - RNA, 13 nt, Murine leukemia virus
aauaugggccaaa

SEQ ID NO: 378478 - RNA, 20 nt, Murine leukemia virus
aauaugggccaaacaggaua

SEQ ID NO: 378479 - RNA, 18 nt, Murine leukemia virus
acaggauaucugugguaa

SEQ ID NO: 378480 - RNA, 14 nt, Murine leukemia virus
acccguguauccaa

SEQ ID NO: 378481 - RNA, 18 nt, Murine leukemia virus
agaucaaggucaggaaca

SEQ ID NO: 378482 - RNA, 18 nt, Murine leukemia virus
agauggaacagcugaaua

SEQ ID NO: 378483 - RNA, 15 nt, Murine leukemia virus
agcaacuuaucugug

SEQ ID NO: 378484 - RNA, 19 nt, Murine leukemia virus
aggaacagauggaacagcu

SEQ ID NO: 378485 - RNA, 13 nt, Murine leukemia virus
aggauaucugugg

SEQ ID NO: 378486 - RNA, 16 nt, Murine leukemia virus
agggccaagaacagau

SEQ ID NO: 378487 - RNA, 17 nt, Murine leukemia virus
aguaacgccauuuugca

SEQ ID NO: 378488 - RNA, 11 nt, Murine leukemia virus
agucuccagaa

SEQ ID NO: 378489 - RNA, 19 nt, Murine leukemia virus
auggaacagcugaauaugg

SEQ ID NO: 378490 - RNA, 16 nt, Murine leukemia virus
augggccaaacaggau

SEQ ID NO: 378491 - RNA, 22 nt, Murine leukemia virus
cagcaguuucuagagaaccauc

SEQ ID NO: 378492 - RNA, 18 nt, Murine leukemia virus
cagcugaauaugggccaa

SEQ ID NO: 378493 - RNA, 14 nt, Murine leukemia virus
caggauaucugugg

SEQ ID NO: 378494 - RNA, 19 nt, Murine leukemia virus
ccaauaaacccucuugcag

SEQ ID NO: 378495 - RNA, 16 nt, Murine leukemia virus
cccggcucagggccaa

SEQ ID NO: 378496 - RNA, 15 nt, Murine leukemia virus
ccggcucagggccaa

SEQ ID NO: 378497 - RNA, 18 nt, Murine leukemia virus
ccggcucagggccaagaa

SEQ ID NO: 378498 - RNA, 21 nt, Murine leukemia virus
ccgucagcgggggucuuucau

SEQ ID NO: 378499 - RNA, 15 nt, Murine leukemia virus
ccucugagugauuga

SEQ ID NO: 378500 - RNA, 21 nt, Murine leukemia virus
ccugccccggcucagggccaa

SEQ ID NO: 378501 - RNA, 15 nt, Murine leukemia virus
cgccaguccuccgau

SEQ ID NO: 378502 - RNA, 20 nt, Murine leukemia virus
cucagggccaagaacagaug

SEQ ID NO: 378503 - RNA, 14 nt, Murine leukemia virus
cuccccgagcucaa

SEQ ID NO: 378504 - RNA, 13 nt, Murine leukemia virus
cuccgauugacug

SEQ ID NO: 378505 - RNA, 13 nt, Murine leukemia virus
cuccucugaguga

SEQ ID NO: 378506 - RNA, 21 nt, Murine leukemia virus
gaacagcugaauaugggccaa

SEQ ID NO: 378507 - RNA, 21 nt, Murine leukemia virus
gaacuaaccaaucaguucgcu

SEQ ID NO: 378508 - RNA, 13 nt, Murine leukemia virus
gauaucuguggua

SEQ ID NO: 378509 - RNA, 23 nt, Murine leukemia virus
gauaucugugguaagcaguuccu

SEQ ID NO: 378510 - RNA, 17 nt, Murine leukemia virus
gaucaaggucaggaaca

SEQ ID NO: 378511 - RNA, 15 nt, Murine leukemia virus
gcaacuuaucugugu

SEQ ID NO: 378512 - RNA, 17 nt, Murine leukemia virus
gcauccgacuugugguc

SEQ ID NO: 378513 - RNA, 14 nt, Murine leukemia virus
gcccucagcaguuu

SEQ ID NO: 378514 - RNA, 22 nt, Murine leukemia virus
gcucaauaaaagagcccacaac

SEQ ID NO: 378515 - RNA, 19 nt, Murine leukemia virus
gcucagggccaagaacaga

SEQ ID NO: 378516 - RNA, 18 nt, Murine leukemia virus
gcuggccagcaacuuauc

SEQ ID NO: 378517 - RNA, 22 nt, Murine leukemia virus
ggauaucugugguaagcaguuc

SEQ ID NO: 378518 - RNA, 20 nt, Murine leukemia virus
gggccaaacaggauaucugu

SEQ ID NO: 378519 - RNA, 21 nt, Murine leukemia virus
gguccagcccucagcaguuuc

SEQ ID NO: 378520 - RNA, 18 nt, Murine leukemia virus
gucagcgggggucuuuca

SEQ ID NO: 378521 - RNA, 17 nt, Murine leukemia virus
guccuccgauugacuga

SEQ ID NO: 378522 - RNA, 14 nt, Murine leukemia virus
gugguaagcaguuc

SEQ ID NO: 378523 - RNA, 19 nt, Murine leukemia virus
guuuggcaagcuagcuuaa

SEQ ID NO: 378524 - RNA, 22 nt, Murine leukemia virus
uaagcaguuccugccccggcuc

SEQ ID NO: 378525 - RNA, 20 nt, Murine leukemia virus
uaucugugguaagcaguucc

SEQ ID NO: 378526 - RNA, 14 nt, Murine leukemia virus
uccuccgauugacu

SEQ ID NO: 378527 - RNA, 20 nt, Murine leukemia virus
ugccccggcucagggccaag

SEQ ID NO: 378528 - RNA, 19 nt, Murine leukemia virus
uggaaaaauacauaacuga

SEQ ID NO: 378529 - RNA, 13 nt, Murine leukemia virus
uggaacagcugaa

SEQ ID NO: 378530 - RNA, 14 nt, Murine osteosarcoma virus
aaagaccccuucau

SEQ ID NO: 378531 - RNA, 23 nt, Murine osteosarcoma virus
aaauaccagagcugauguucuca

SEQ ID NO: 378532 - RNA, 22 nt, Murine osteosarcoma virus
aagaacaaaugguucccagaaa

SEQ ID NO: 378533 - RNA, 17 nt, Murine osteosarcoma virus
aagaacagaugguuccc

SEQ ID NO: 378534 - RNA, 23 nt, Murine osteosarcoma virus
aauaccagagcugauguucucag

SEQ ID NO: 378535 - RNA, 15 nt, Murine osteosarcoma virus
aaugguucccagaaa

SEQ ID NO: 378536 - RNA, 16 nt, Murine osteosarcoma virus
acaaaugguucccaga

SEQ ID NO: 378537 - RNA, 18 nt, Murine osteosarcoma virus
acagaugguucccagaaa

SEQ ID NO: 378538 - RNA, 22 nt, Murine osteosarcoma virus
acaguuucaagagacccagaaa

SEQ ID NO: 378539 - RNA, 18 nt, Murine osteosarcoma virus
accagagcugauguucuc

SEQ ID NO: 378540 - RNA, 18 nt, Murine osteosarcoma virus
accgggacuagggccaaa

SEQ ID NO: 378541 - RNA, 12 nt, Murine osteosarcoma virus
acuagggccaaa

SEQ ID NO: 378542 - RNA, 14 nt, Murine osteosarcoma virus
acuagggccaaaca

SEQ ID NO: 378543 - RNA, 12 nt, Murine osteosarcoma virus
acuagggccaag

SEQ ID NO: 378544 - RNA, 23 nt, Murine osteosarcoma virus
acuagggccccggccagggccaa

SEQ ID NO: 378545 - RNA, 22 nt, Murine osteosarcoma virus
acuuccagaguggucagggccu

SEQ ID NO: 378546 - RNA, 20 nt, Murine osteosarcoma virus
acuugaucgucgggggcaau

SEQ ID NO: 378547 - RNA, 15 nt, Murine osteosarcoma virus
agaaaaacaagaaca

SEQ ID NO: 378548 - RNA, 21 nt, Murine osteosarcoma virus
agaaacugucucaagguuccc

SEQ ID NO: 378549 - RNA, 16 nt, Murine osteosarcoma virus
agaacaaaugguuccc

SEQ ID NO: 378550 - RNA, 15 nt, Murine osteosarcoma virus
agagaggcuggaaag

SEQ ID NO: 378551 - RNA, 17 nt, Murine osteosarcoma virus
agccaggaaaccgugaa

SEQ ID NO: 378552 - RNA, 21 nt, Murine osteosarcoma virus
agggccaagaacagaugguuc

SEQ ID NO: 378553 - RNA, 20 nt, Murine osteosarcoma virus
agggccccggccagggccaa

SEQ ID NO: 378554 - RNA, 15 nt, Murine osteosarcoma virus
auagaggcuggaaag

SEQ ID NO: 378555 - RNA, 15 nt, Murine osteosarcoma virus
augaccggggaucaa

SEQ ID NO: 378556 - RNA, 22 nt, Murine osteosarcoma virus
auuuaaacuaaccaaucagcuc

SEQ ID NO: 378557 - RNA, 17 nt, Murine osteosarcoma virus
caaaugguucccagaaa

SEQ ID NO: 378558 - RNA, 16 nt, Murine osteosarcoma virus
caaugccuuccaggga

SEQ ID NO: 378559 - RNA, 16 nt, Murine osteosarcoma virus
cacaacauugacaaag

SEQ ID NO: 378560 - RNA, 14 nt, Murine osteosarcoma virus
caguuucaagagac

SEQ ID NO: 378561 - RNA, 21 nt, Murine osteosarcoma virus
ccagagcugauguucucagaa

SEQ ID NO: 378562 - RNA, 13 nt, Murine osteosarcoma virus
ccagggccaagaa

SEQ ID NO: 378563 - RNA, 19 nt, Murine osteosarcoma virus
ccggccagggccaagaaca

SEQ ID NO: 378564 - RNA, 13 nt, Murine osteosarcoma virus
ccuaaggugggca

SEQ ID NO: 378565 - RNA, 11 nt, Murine osteosarcoma virus
cgcggacaaag

SEQ ID NO: 378566 - RNA, 20 nt, Murine osteosarcoma virus
cggccugcuacuuccagagu

SEQ ID NO: 378567 - RNA, 15 nt, Murine osteosarcoma virus
cgggacuagggccaa

SEQ ID NO: 378568 - RNA, 15 nt, Murine osteosarcoma virus
cuagggccaagaaca

SEQ ID NO: 378569 - RNA, 20 nt, Murine osteosarcoma virus
cucagaaaaacaagaacaag

SEQ ID NO: 378570 - RNA, 13 nt, Murine osteosarcoma virus
cuggaaaguaccg

SEQ ID NO: 378571 - RNA, 15 nt, Murine osteosarcoma virus
cuguggucaagcacu

SEQ ID NO: 378572 - RNA, 18 nt, Murine osteosarcoma virus
cuugaucgucgggggcaa

SEQ ID NO: 378573 - RNA, 16 nt, Murine osteosarcoma virus
gaaaaacaagaacaag

SEQ ID NO: 378574 - RNA, 23 nt, Murine osteosarcoma virus
gaaaguaccgggacuagggccaa

SEQ ID NO: 378575 - RNA, 16 nt, Murine osteosarcoma virus
aaaaaucacgugaaua

SEQ ID NO: 378576 - RNA, 22 nt, Murine osteosarcoma virus
aaacaagaacaaggagguaaag

SEQ ID NO: 378577 - RNA, 22 nt, Murine osteosarcoma virus
aaacaggauaucuguggucaag

SEQ ID NO: 378578 - RNA, 22 nt, Murine osteosarcoma virus
aaaguaccgggacuagggccaa

SEQ ID NO: 378579 - RNA, 21 nt, Murine osteosarcoma virus
aagaacagaugguucccagaa

SEQ ID NO: 378580 - RNA, 22 nt, Murine osteosarcoma virus
aagaacagaugguucccagaaa

SEQ ID NO: 378581 - RNA, 14 nt, Murine osteosarcoma virus
aagagacccagaaa

SEQ ID NO: 378582 - RNA, 19 nt, Murine osteosarcoma virus
aaggcaugggaaaauacca

SEQ ID NO: 378583 - RNA, 22 nt, Murine osteosarcoma virus
aauaccagagcugauguucuca

SEQ ID NO: 378584 - RNA, 18 nt, Murine osteosarcoma virus
acaaaugguucccagaaa

SEQ ID NO: 378585 - RNA, 18 nt, Murine osteosarcoma virus
acaacaacaguuucaaga

SEQ ID NO: 378586 - RNA, 16 nt, Murine osteosarcoma virus
acagaugguucccaga

SEQ ID NO: 378587 - RNA, 14 nt, Murine osteosarcoma virus
acuagggccaagaa

SEQ ID NO: 378588 - RNA, 17 nt, Murine osteosarcoma virus
acuagggccaagaacaa

SEQ ID NO: 378589 - RNA, 22 nt, Murine osteosarcoma virus
acugcaguaacgccauuuugca

SEQ ID NO: 378590 - RNA, 12 nt, Murine osteosarcoma virus
agagacccagaa

SEQ ID NO: 378591 - RNA, 15 nt, Murine osteosarcoma virus
agagcugauguucuc

SEQ ID NO: 378592 - RNA, 16 nt, Murine osteosarcoma virus
agaguggucagggccu

SEQ ID NO: 378593 - RNA, 21 nt, Murine osteosarcoma virus
agggccaagaacaaaugguuc

SEQ ID NO: 378594 - RNA, 20 nt, Murine osteosarcoma virus
aguaccgggacuagggccaa

SEQ ID NO: 378595 - RNA, 19 nt, Murine osteosarcoma virus
aucgucgggggcaaugccu

SEQ ID NO: 378596 - RNA, 18 nt, Murine osteosarcoma virus
aucuguggucaagcacua

SEQ ID NO: 378597 - RNA, 14 nt, Murine osteosarcoma virus
augguucccagaaa

SEQ ID NO: 378598 - RNA, 15 nt, Murine osteosarcoma virus
augguucccagaaau

SEQ ID NO: 378599 - RNA, 13 nt, Murine osteosarcoma virus
auguucucagaaa

SEQ ID NO: 378600 - RNA, 18 nt, Murine osteosarcoma virus
auucaguuuacagaaaga

SEQ ID NO: 378601 - RNA, 21 nt, Murine osteosarcoma virus
caaacaggauaucugugguca

SEQ ID NO: 378602 - RNA, 15 nt, Murine osteosarcoma virus
cagaaaaacaagaac

SEQ ID NO: 378603 - RNA, 17 nt, Murine osteosarcoma virus
cagaugguucccagaaa

SEQ ID NO: 378604 - RNA, 12 nt, Murine osteosarcoma virus
ccagagugguca

SEQ ID NO: 378605 - RNA, 16 nt, Murine osteosarcoma virus
cccagaaauagcuaaa

SEQ ID NO: 378606 - RNA, 14 nt, Murine osteosarcoma virus
ccggccagggccaa

SEQ ID NO: 378607 - RNA, 18 nt, Murine osteosarcoma virus
ccggccagggccaagaac

SEQ ID NO: 378608 - RNA, 20 nt, Murine osteosarcoma virus
ccgggacuagggccaagaac

SEQ ID NO: 378609 - RNA, 22 nt, Murine osteosarcoma virus
ccugcggcgagccugccagaag

SEQ ID NO: 378610 - RNA, 15 nt, Murine osteosarcoma virus
cggccagggccaaga

SEQ ID NO: 378611 - RNA, 12 nt, Murine osteosarcoma virus
cuagggccaaga

SEQ ID NO: 378612 - RNA, 13 nt, Murine osteosarcoma virus
cuagggccaagaa

SEQ ID NO: 378613 - RNA, 16 nt, Murine osteosarcoma virus
cuagggccaagaacaa

SEQ ID NO: 378614 - RNA, 17 nt, Murine osteosarcoma virus
cuagggccaagaacaaa

SEQ ID NO: 378615 - RNA, 23 nt, Murine osteosarcoma virus
cuagggccccggccagggccaag

SEQ ID NO: 378616 - RNA, 21 nt, Murine osteosarcoma virus
cuggccggucaccucgagggu

SEQ ID NO: 378617 - RNA, 14 nt, Murine osteosarcoma virus
cugggcgcggacaa

SEQ ID NO: 378618 - RNA, 19 nt, Murine osteosarcoma virus
gaacaaaugguucccagaa

SEQ ID NO: 378619 - RNA, 12 nt, Murine osteosarcoma virus
gacuagggccaa

SEQ ID NO: 378620 - RNA, 15 nt, Murine osteosarcoma virus
gacuagggccaaaca

SEQ ID NO: 378621 - RNA, 21 nt, Murine osteosarcoma virus
gacuagggccaaacaggauau

SEQ ID NO: 378622 - RNA, 17 nt, Murine osteosarcoma virus
gacuagggccaagaaca

SEQ ID NO: 378623 - RNA, 19 nt, Murine osteosarcoma virus
gacuagggccaagaacaaa

SEQ ID NO: 378624 - RNA, 17 nt, Murine osteosarcoma virus
gagccugccagaagcac

SEQ ID NO: 378625 - RNA, 15 nt, Murine osteosarcoma virus
gaugguucccagaaa

SEQ ID NO: 378626 - RNA, 12 nt, Murine osteosarcoma virus
gccacacuggcc

SEQ ID NO: 378627 - RNA, 12 nt, Murine osteosarcoma virus
gccagggccaag

SEQ ID NO: 378628 - RNA, 15 nt, Murine osteosarcoma virus
gccagggccaagaac

SEQ ID NO: 378629 - RNA, 17 nt, Murine osteosarcoma virus
gccccggccagggccaa

SEQ ID NO: 378630 - RNA, 22 nt, Murine osteosarcoma virus
gccccggccagggccaagaaca

SEQ ID NO: 378631 - RNA, 16 nt, Murine osteosarcoma virus
gcccgagccaggaaac

SEQ ID NO: 378632 - RNA, 18 nt, Murine osteosarcoma virus
gccugcuacuuccagagu

SEQ ID NO: 378633 - RNA, 12 nt, Murine osteosarcoma virus
ggccagggccaa

SEQ ID NO: 378634 - RNA, 14 nt, Murine osteosarcoma virus
gggaucaaccccaa

SEQ ID NO: 378635 - RNA, 15 nt, Murine osteosarcoma virus
ggguaagaaccccac

SEQ ID NO: 378636 - RNA, 17 nt, Murine osteosarcoma virus
guaccgggacuagggcc

SEQ ID NO: 378637 - RNA, 21 nt, Murine osteosarcoma virus
guucucagaaaaacaagaaca

SEQ ID NO: 378638 - RNA, 19 nt, Murine osteosarcoma virus
guuucaagagacccagaaa

SEQ ID NO: 378639 - RNA, 18 nt, Murine osteosarcoma virus
uaccgggacuagggccaa

SEQ ID NO: 378640 - RNA, 18 nt, Murine osteosarcoma virus
uacuuccagaguggucag

SEQ ID NO: 378641 - RNA, 21 nt, Murine osteosarcoma virus
uagggccccggccagggccaa

SEQ ID NO: 378642 - RNA, 16 nt, Murine osteosarcoma virus
ucaagagacccagaaa

SEQ ID NO: 378643 - RNA, 19 nt, Murine osteosarcoma virus
ugacaaagcgccgguugua

SEQ ID NO: 378644 - RNA, 14 nt, Murine osteosarcoma virus
ugccagaagcacga

SEQ ID NO: 378645 - RNA, 13 nt, Murine osteosarcoma virus
ugguucccagaaa

SEQ ID NO: 378646 - RNA, 15 nt, Murine osteosarcoma virus
uguggucaagcacua

SEQ ID NO: 378647 - RNA, 21 nt, Murine osteosarcoma virus
gaacagaugguucccagaaau

SEQ ID NO: 378648 - RNA, 13 nt, Murine osteosarcoma virus
gacuagggccaaa

SEQ ID NO: 378649 - RNA, 13 nt, Murine osteosarcoma virus
gacuagggccaag

SEQ ID NO: 378650 - RNA, 16 nt, Murine osteosarcoma virus
gacuagggccaagaac

SEQ ID NO: 378651 - RNA, 17 nt, Murine osteosarcoma virus
gcaaugccuuccaggga

SEQ ID NO: 378652 - RNA, 18 nt, Murine osteosarcoma virus
gcacuagggccccggcca

SEQ ID NO: 378653 - RNA, 11 nt, Murine osteosarcoma virus
gccagggccaa

SEQ ID NO: 378654 - RNA, 18 nt, Murine osteosarcoma virus
gccagggccaagaacaga

SEQ ID NO: 378655 - RNA, 18 nt, Murine osteosarcoma virus
gccggucaccucgagggu

SEQ ID NO: 378656 - RNA, 22 nt, Murine osteosarcoma virus
gccucuacgccacacuggccua

SEQ ID NO: 378657 - RNA, 18 nt, Murine osteosarcoma virus
gccucuuggcccggccug

SEQ ID NO: 378658 - RNA, 13 nt, Murine osteosarcoma virus
ggacuagggccaa

SEQ ID NO: 378659 - RNA, 18 nt, Murine osteosarcoma virus
ggacuagggccaagaaca

SEQ ID NO: 378660 - RNA, 17 nt, Murine osteosarcoma virus
ggccagggccaagaaca

SEQ ID NO: 378661 - RNA, 13 nt, Murine osteosarcoma virus
gggccaagaacaa

SEQ ID NO: 378662 - RNA, 20 nt, Murine osteosarcoma virus
uaccagagcugauguucuca

SEQ ID NO: 378663 - RNA, 13 nt, Murine osteosarcoma virus
uaucuguggucaa

SEQ ID NO: 378664 - RNA, 20 nt, Murine osteosarcoma virus
ucucagaaaaacaagaacaa

SEQ ID NO: 378665 - RNA, 21 nt, Murray Valley encephalitis virus
aagccucccagaaccgucucg

SEQ ID NO: 378666 - RNA, 23 nt, Murray Valley encephalitis virus
accaaccccaggaggacuggguu

SEQ ID NO: 378667 - RNA, 15 nt, Murray Valley encephalitis virus
acuggguaaacaaag

SEQ ID NO: 378668 - RNA, 15 nt, Murray Valley encephalitis virus
acuggguuaccaaag

SEQ ID NO: 378669 - RNA, 12 nt, Murray Valley encephalitis virus
aggugaugcaaa

SEQ ID NO: 378670 - RNA, 23 nt, Murray Valley encephalitis virus
ccaggaggacuggguaaacaaag

SEQ ID NO: 378671 - RNA, 17 nt, Murray Valley encephalitis virus
ccccaggaggacugggu

SEQ ID NO: 378672 - RNA, 16 nt, Murray Valley encephalitis virus
cgccgaggagugcaau

SEQ ID NO: 378673 - RNA, 16 nt, Murray Valley encephalitis virus
gacuggguuaccaaag

SEQ ID NO: 378674 - RNA, 11 nt, Murray Valley encephalitis virus
gaggagugcaa

SEQ ID NO: 378675 - RNA, 12 nt, Murray Valley encephalitis virus
gaggagugcaau

SEQ ID NO: 378676 - RNA, 13 nt, Murray Valley encephalitis virus
gccgaggagugca

SEQ ID NO: 378677 - RNA, 16 nt, Murray Valley encephalitis virus
gccgaggagugcaauc

SEQ ID NO: 378678 - RNA, 20 nt, Murray Valley encephalitis virus
ggccccaggaggacugggua

SEQ ID NO: 378679 - RNA, 16 nt, Murray Valley encephalitis virus
guagacggugcugccu

SEQ ID NO: 378680 - RNA, 19 nt, Murray Valley encephalitis virus
guuaggcugccaccgaagg

SEQ ID NO: 378681 - RNA, 15 nt, Murray Valley encephalitis virus
uaauguaauauagua

SEQ ID NO: 378682 - RNA, 12 nt, Murray Valley encephalitis virus
uguaauauagua

SEQ ID NO: 378683 - RNA, 20 nt, Murray Valley encephalitis virus
aaccccaggaggacuggguu

SEQ ID NO: 378684 - RNA, 18 nt, Murray Valley encephalitis virus
accccaggaggacugggu

SEQ ID NO: 378685 - RNA, 16 nt, Murray Valley encephalitis virus
acgguuggaaagccuc

SEQ ID NO: 378686 - RNA, 17 nt, Murray Valley encephalitis virus
agaugaagcccguguca

SEQ ID NO: 378687 - RNA, 21 nt, Murray Valley encephalitis virus
agcugauucuccacgguugga

SEQ ID NO: 378688 - RNA, 16 nt, Murray Valley encephalitis virus
aggacuagagguuaga

SEQ ID NO: 378689 - RNA, 13 nt, Murray Valley encephalitis virus
aggaggacugggu

SEQ ID NO: 378690 - RNA, 14 nt, Murray Valley encephalitis virus
aggaggacugggua

SEQ ID NO: 378691 - RNA, 14 nt, Murray Valley encephalitis virus
aggaggugaugcaa

SEQ ID NO: 378692 - RNA, 22 nt, Murray Valley encephalitis virus
caggaggacuggguuaccaaag

SEQ ID NO: 378693 - RNA, 15 nt, Murray Valley encephalitis virus
caggccagccgguua

SEQ ID NO: 378694 - RNA, 16 nt, Murray Valley encephalitis virus
cccaggaggacugggu

SEQ ID NO: 378695 - RNA, 17 nt, Murray Valley encephalitis virus
cccaggaggacugggua

SEQ ID NO: 378696 - RNA, 17 nt, Murray Valley encephalitis virus
cccaggaggacuggguu

SEQ ID NO: 378697 - RNA, 13 nt, Murray Valley encephalitis virus
ccgaggagugcaa

SEQ ID NO: 378698 - RNA, 19 nt, Murray Valley encephalitis virus
ccgggaggaggugaugcaa

SEQ ID NO: 378699 - RNA, 21 nt, Murray Valley encephalitis virus
gacuggguaaacaaagccgua

SEQ ID NO: 378700 - RNA, 17 nt, Murray Valley encephalitis virus
gcaagacuugauaguca

SEQ ID NO: 378701 - RNA, 20 nt, Murray Valley encephalitis virus
gccgggaggaggugaugcaa

SEQ ID NO: 378702 - RNA, 13 nt, Murray Valley encephalitis virus
guuaggcugccac

SEQ ID NO: 378703 - RNA, 23 nt, Murray Valley encephalitis virus
uaaguagcaagacuugauaguca

SEQ ID NO: 378704 - RNA, 14 nt, Norwalk virus
aaagguaucaacaa

SEQ ID NO: 378705 - RNA, 23 nt, Norwalk virus
aagaucuguggcaggagcuccag

SEQ ID NO: 378706 - RNA, 20 nt, Norwalk virus
aaugugggcaucauauucau

SEQ ID NO: 378707 - RNA, 22 nt, Norwalk virus
aauuagguuuaauuagguuuaa

SEQ ID NO: 378708 - RNA, 13 nt, Norwalk virus
acaaaauuugcaa

SEQ ID NO: 378709 - RNA, 18 nt, Norwalk virus
acagcagguagugcucug

SEQ ID NO: 378710 - RNA, 10 nt, Norwalk virus
accagugcug

SEQ ID NO: 378711 - RNA, 21 nt, Norwalk virus
agagucaggauuaugcuagcu

SEQ ID NO: 378712 - RNA, 14 nt, Norwalk virus
agguuaaugcuucu

SEQ ID NO: 378713 - RNA, 13 nt, Norwalk virus
auaauuaauaauu

SEQ ID NO: 378714 - RNA, 12 nt, Norwalk virus
auaccauuugcc

SEQ ID NO: 378715 - RNA, 14 nt, Norwalk virus
auaugaaauguggg

SEQ ID NO: 378716 - RNA, 19 nt, Norwalk virus
auaugaaaugugggcauca

SEQ ID NO: 378717 - RNA, 22 nt, Norwalk virus
auauucauuuaauuagguuuaa

SEQ ID NO: 378718 - RNA, 23 nt, Norwalk virus
aucagguugaagcuucaaaucaa

SEQ ID NO: 378719 - RNA, 20 nt, Norwalk virus
augaaaugugggcaucauau

SEQ ID NO: 378720 - RNA, 18 nt, Norwalk virus
augugggcaucauauuca

SEQ ID NO: 378721 - RNA, 23 nt, Norwalk virus
augugggcaucauauucauuuaa

SEQ ID NO: 378722 - RNA, 14 nt, Norwalk virus
auugaucccuggau

SEQ ID NO: 378723 - RNA, 16 nt, Norwalk virus
auuuaauuagguuuaa

SEQ ID NO: 378724 - RNA, 12 nt, Norwalk virus
caaaauuugcaa

SEQ ID NO: 378725 - RNA, 17 nt, Norwalk virus
cacagcagguagugcuc

SEQ ID NO: 378726 - RNA, 13 nt, Norwalk virus
cauauucauuuaa

SEQ ID NO: 378727 - RNA, 19 nt, Norwalk virus
cauuugccucuaagcaaaa

SEQ ID NO: 378728 - RNA, 15 nt, Norwalk virus
cccgcauuguagauu

SEQ ID NO: 378729 - RNA, 20 nt, Norwalk virus
cccuggauaauuaauaauuu

SEQ ID NO: 378730 - RNA, 14 nt, Norwalk virus
ccgaguccucugcu

SEQ ID NO: 378731 - RNA, 20 nt, Norwalk virus
cgaguccucugcuaccacau

SEQ ID NO: 378732 - RNA, 22 nt, Norwalk virus
gaauggcgugagagugucugcu

SEQ ID NO: 378733 - RNA, 18 nt, Norwalk virus
gaguccucugcuaccaca

SEQ ID NO: 378734 - RNA, 13 nt, Norwalk virus
gcaucauauucau

SEQ ID NO: 378735 - RNA, 18 nt, Norwalk virus
gcaucauauucauuuaau

SEQ ID NO: 378736 - RNA, 16 nt, Norwalk virus
gcuaccacauugagau

SEQ ID NO: 378737 - RNA, 24 nt, Norwalk virus
gcuccagucacccgcauuguagau

SEQ ID NO: 378738 - RNA, 13 nt, Norwalk virus
ggcaucauauuca

SEQ ID NO: 378739 - RNA, 15 nt, Norwalk virus
gggcaucauauucau

SEQ ID NO: 378740 - RNA, 21 nt, Norwalk virus
guaauaugaaaugugggcauc

SEQ ID NO: 378741 - RNA, 16 nt, Norwalk virus
gugggcaucauauuca

SEQ ID NO: 378742 - RNA, 19 nt, Norwalk virus
uaaaaauuuggcaacuaga

SEQ ID NO: 378743 - RNA, 23 nt, Norwalk virus
uaauaugaaaugugggcaucaua

SEQ ID NO: 378744 - RNA, 18 nt, Norwalk virus
uaauuagguuuaauuuga

SEQ ID NO: 378745 - RNA, 23 nt, Norwalk virus
uaucaacaaaauuugcaacugca

SEQ ID NO: 378746 - RNA, 16 nt, Norwalk virus
uaucagguugaagcuu

SEQ ID NO: 378747 - RNA, 19 nt, Norwalk virus
ucaacaaaauuugcaacug

SEQ ID NO: 378748 - RNA, 17 nt, Norwalk virus
ucacccgcauuguagau

SEQ ID NO: 378749 - RNA, 21 nt, Norwalk virus
ucaguucccauaccauuugcc

SEQ ID NO: 378750 - RNA, 15 nt, Norwalk virus
ucauuuaauuagguu

SEQ ID NO: 378751 - RNA, 13 nt, Norwalk virus
uccaaagccaaag

SEQ ID NO: 378752 - RNA, 13 nt, Norwalk virus
uccccaucuuaau

SEQ ID NO: 378753 - RNA, 14 nt, Norwalk virus
uccuauugaucccu

SEQ ID NO: 378754 - RNA, 20 nt, Norwalk virus
ucugacccucuugcaaugga

SEQ ID NO: 378755 - RNA, 18 nt, Norwalk virus
ugaaaugugggcaucaua

SEQ ID NO: 378756 - RNA, 19 nt, Norwalk virus
ugaaaugugggcaucauau

SEQ ID NO: 378757 - RNA, 20 nt, Norwalk virus
ugaaaugugggcaucauauu

SEQ ID NO: 378758 - RNA, 15 nt, Norwalk virus
ugacccucuugcaau

SEQ ID NO: 378759 - RNA, 20 nt, Norwalk virus
ugauuggguaucagguugaa

SEQ ID NO: 378760 - RNA, 17 nt, Norwalk virus
ugcaauugcugcuucca

SEQ ID NO: 378761 - RNA, 15 nt, Norwalk virus
ugccucuaagcaaaa

SEQ ID NO: 378762 - RNA, 11 nt, Norwalk virus
ugcuucugacc

SEQ ID NO: 378763 - RNA, 16 nt, Norwalk virus
uggcuaaaaauuuggc

SEQ ID NO: 378764 - RNA, 14 nt, Norwalk virus
ugggcaucauauuc

SEQ ID NO: 378765 - RNA, 15 nt, Norwalk virus
ugggcaucauauuca

SEQ ID NO: 378766 - RNA, 16 nt, Norwalk virus
ugggcaucauauucau

SEQ ID NO: 378767 - RNA, 20 nt, Norwalk virus
ugggcaucauauucauuuaa

SEQ ID NO: 378768 - RNA, 13 nt, Norwalk virus
uggugcaauugcu

SEQ ID NO: 378769 - RNA, 17 nt, Norwalk virus
uggugcaauugcugcuu

SEQ ID NO: 378770 - RNA, 21 nt, Norwalk virus
ugguggcgaagcggcccucca

SEQ ID NO: 378771 - RNA, 14 nt, Norwalk virus
uguagauuggaaug

SEQ ID NO: 378772 - RNA, 19 nt, Norwalk virus
uguagcagguucuucgaca

SEQ ID NO: 378773 - RNA, 21 nt, Norwalk virus
ugugcaagccccccaagguga

SEQ ID NO: 378774 - RNA, 16 nt, Norwalk virus
uuaauccuuucuugcu

SEQ ID NO: 378775 - RNA, 17 nt, Norwalk virus
uucaugucaguucccau

SEQ ID NO: 378776 - RNA, 12 nt, Norwalk virus
ugggcaucauau

SEQ ID NO: 378777 - RNA, 13 nt, Norwalk virus
ugggcaucauauu

SEQ ID NO: 378778 - RNA, 16 nt, Norwalk virus
ugugggcaucauauuc

SEQ ID NO: 378779 - RNA, 20 nt, Norwalk virus
uuaauuagguuuaauuugau

SEQ ID NO: 378780 - RNA, 13 nt, Norwalk virus
uucacauaaucuu

SEQ ID NO: 378781 - RNA, 14 nt, Norwalk virus
uugccucuaagcaa

SEQ ID NO: 378782 - RNA, 18 nt, Norwalk virus
uuggugcaauugcugcuu

SEQ ID NO: 378783 - RNA, 13 nt, Norwalk virus
aaaaauuuggcaa

SEQ ID NO: 378784 - RNA, 13 nt, Norwalk virus
aacaaaauuugca

SEQ ID NO: 378785 - RNA, 15 nt, Norwalk virus
aagauaauaguuucc

SEQ ID NO: 378786 - RNA, 14 nt, Norwalk virus
aaugccuuuacugc

SEQ ID NO: 378787 - RNA, 22 nt, Norwalk virus
aaugcuucugacccucuugcaa

SEQ ID NO: 378788 - RNA, 15 nt, Norwalk virus
aaugugggcaucaua

SEQ ID NO: 378789 - RNA, 19 nt, Norwalk virus
aaugugggcaucauauuca

SEQ ID NO: 378790 - RNA, 21 nt, Norwalk virus
aaugugggcaucauauucauu

SEQ ID NO: 378791 - RNA, 23 nt, Norwalk virus
aaugugggcaucauauucauuua

SEQ ID NO: 378792 - RNA, 19 nt, Norwalk virus
aauuagguuuaauuugaug

SEQ ID NO: 378793 - RNA, 23 nt, Norwalk virus
aauuauuggcuaaaaauuuggca

SEQ ID NO: 378794 - RNA, 12 nt, Norwalk virus
acaaaauuugca

SEQ ID NO: 378795 - RNA, 12 nt, Norwalk virus
agauauucacuc

SEQ ID NO: 378796 - RNA, 19 nt, Norwalk virus
agguaucaacaaaauuugc

SEQ ID NO: 378797 - RNA, 20 nt, Norwalk virus
agguaucaacaaaauuugca

SEQ ID NO: 378798 - RNA, 14 nt, Norwalk virus
aggugaauuuacua

SEQ ID NO: 378799 - RNA, 19 nt, Norwalk virus
aggugaauuuacuauuucc

SEQ ID NO: 378800 - RNA, 12 nt, Norwalk virus
aguccucugcua

SEQ ID NO: 378801 - RNA, 14 nt, Norwalk virus
agugucugcucccg

SEQ ID NO: 378802 - RNA, 17 nt, Norwalk virus
auaauacccccggugau

SEQ ID NO: 378803 - RNA, 17 nt, Norwalk virus
auaauaguuuccugcau

SEQ ID NO: 378804 - RNA, 17 nt, Norwalk virus
augaaaugugggcauca

SEQ ID NO: 378805 - RNA, 21 nt, Norwalk virus
augaaaugugggcaucauauu

SEQ ID NO: 378806 - RNA, 22 nt, Norwalk virus
augaaaugugggcaucauauuc

SEQ ID NO: 378807 - RNA, 21 nt, Norwalk virus
auugagauccgguggcuucau

SEQ ID NO: 378808 - RNA, 14 nt, Norwalk virus
auugcugcuuccac

SEQ ID NO: 378809 - RNA, 15 nt, Norwalk virus
auuuaauuagguuua

SEQ ID NO: 378810 - RNA, 18 nt, Norwalk virus
auuuaauuagguuuaauu

SEQ ID NO: 378811 - RNA, 15 nt, Norwalk virus
caauugcugcuucca

SEQ ID NO: 378812 - RNA, 16 nt, Norwalk virus
cacuccuccgugcugg

SEQ ID NO: 378813 - RNA, 14 nt, Norwalk virus
cauaccauuugccu

SEQ ID NO: 378814 - RNA, 15 nt, Norwalk virus
cauaccauuugccuc

SEQ ID NO: 378815 - RNA, 15 nt, Norwalk virus
caucauauucauuua

SEQ ID NO: 378816 - RNA, 18 nt, Norwalk virus
cauuugccucuaagcaaa

SEQ ID NO: 378817 - RNA, 17 nt, Norwalk virus
ccaaggugaauuuacua

SEQ ID NO: 378818 - RNA, 14 nt, Norwalk virus
ccagucacccgcau

SEQ ID NO: 378819 - RNA, 15 nt, Norwalk virus
ccauaccauuugccu

SEQ ID NO: 378820 - RNA, 14 nt, Norwalk virus
cccaaggugaauuu

SEQ ID NO: 378821 - RNA, 19 nt, Norwalk virus
cccgaguccucugcuacca

SEQ ID NO: 378822 - RNA, 14 nt, Norwalk virus
ccuccaaagccaaa

SEQ ID NO: 378823 - RNA, 12 nt, Norwalk virus
ccucuaagcaaa

SEQ ID NO: 378824 - RNA, 18 nt, Norwalk virus
cggcccuccaaagccaaa

SEQ ID NO: 378825 - RNA, 16 nt, Norwalk virus
cgggcauacagguugg

SEQ ID NO: 378826 - RNA, 15 nt, Norwalk virus
cuaccacauugagau

SEQ ID NO: 378827 - RNA, 22 nt, Norwalk virus
cuagcugguaaugccuuuacug

SEQ ID NO: 378828 - RNA, 14 nt, Norwalk virus
cuccaaagccaaag

SEQ ID NO: 378829 - RNA, 22 nt, Norwalk virus
gaaaauucuuuuaaacaugaca

SEQ ID NO: 378830 - RNA, 18 nt, Norwalk virus
gaaaugugggcaucauau

SEQ ID NO: 378831 - RNA, 21 nt, Norwalk virus
gaaaugugggcaucauauuca

SEQ ID NO: 378832 - RNA, 22 nt, Norwalk virus
gagauccgguggcuucauguca

SEQ ID NO: 378833 - RNA, 15 nt, Norwalk virus
gcaagaucuguggca

SEQ ID NO: 378834 - RNA, 23 nt, Norwalk virus
gcccaagccauaauuggugcaau

SEQ ID NO: 378835 - RNA, 17 nt, Norwalk virus
gcccuccaaagccaaag

SEQ ID NO: 378836 - RNA, 14 nt, Norwalk virus
gccucuaagcaaaa

SEQ ID NO: 378837 - RNA, 15 nt, Norwalk virus
gcuaaaaauuuggca

SEQ ID NO: 378838 - RNA, 23 nt, Norwalk virus
gcuuccacagcagguagugcucu

SEQ ID NO: 378839 - RNA, 17 nt, Norwalk virus
ggcaucauauucauuua

SEQ ID NO: 378840 - RNA, 22 nt, Norwalk virus
gggaagauaauaguuuccugca

SEQ ID NO: 378841 - RNA, 20 nt, Norwalk virus
guaauaugaaaugugggcau

SEQ ID NO: 378842 - RNA, 16 nt, Norwalk virus
guuugaccagugcuga

SEQ ID NO: 378843 - RNA, 17 nt, Norwalk virus
uaauuagguuuaauuag

SEQ ID NO: 378844 - RNA, 20 nt, Norwalk virus
uaauuagguuuaauuugaug

SEQ ID NO: 378845 - RNA, 17 nt, Norwalk virus
uaguuuccugcauaccc

SEQ ID NO: 378846 - RNA, 20 nt, Norwalk virus
uaugaaaugugggcaucaua

SEQ ID NO: 378847 - RNA, 20 nt, Norwalk virus
uauucauuuaauuagguuua

SEQ ID NO: 378848 - RNA, 21 nt, Norwalk virus
uauucauuuaauuagguuuaa

SEQ ID NO: 378849 - RNA, 20 nt, Norwalk virus
uccagucacccgcauuguag

SEQ ID NO: 378850 - RNA, 19 nt, Norwalk virus
uccuauugaucccuggaua

SEQ ID NO: 378851 - RNA, 16 nt, Norwalk virus
ucgcgacugcuggaca

SEQ ID NO: 378852 - RNA, 15 nt, Norwalk virus
ucuaucacaaaugua

SEQ ID NO: 378853 - RNA, 17 nt, Norwalk virus
ucugcuaccacauugag

SEQ ID NO: 378854 - RNA, 13 nt, Norwalk virus
ucuuaauccuuuc

SEQ ID NO: 378855 - RNA, 22 nt, Norwalk virus
ucuuaauccuuucuugcuccau

SEQ ID NO: 378856 - RNA, 22 nt, Norwalk virus
ugaaaugugggcaucauauuca

SEQ ID NO: 378857 - RNA, 16 nt, Norwalk virus
ugaagcuucaaaucaa

SEQ ID NO: 378858 - RNA, 13 nt, Norwalk virus
ugaauuuacuauu

SEQ ID NO: 378859 - RNA, 17 nt, Norwalk virus
ugaucccuggauaauua

SEQ ID NO: 378860 - RNA, 19 nt, Norwalk virus
ugcaauugcugcuuccaca

SEQ ID NO: 378861 - RNA, 14 nt, Norwalk virus
ugcugcuuccacag

SEQ ID NO: 378862 - RNA, 23 nt, Norwalk virus
ugcuggacaaguuaauccuauug

SEQ ID NO: 378863 - RNA, 12 nt, Norwalk virus
ugcuucugaccc

SEQ ID NO: 378864 - RNA, 13 nt, O`nyong-nyong virus
aacaauagguaua

SEQ ID NO: 378865 - RNA, 14 nt, O`nyong-nyong virus
acaccaacaauagg

SEQ ID NO: 378866 - RNA, 17 nt, O`nyong-nyong virus
acauuauagaaccaggu

SEQ ID NO: 378867 - RNA, 17 nt, O`nyong-nyong virus
acauuauuuaaccagug

SEQ ID NO: 378868 - RNA, 20 nt, O`nyong-nyong virus
acauuauuuaaccagugaaa

SEQ ID NO: 378869 - RNA, 19 nt, O`nyong-nyong virus
accagugaaaauagguauu

SEQ ID NO: 378870 - RNA, 16 nt, O`nyong-nyong virus
acccccuuagagguac

SEQ ID NO: 378871 - RNA, 15 nt, O`nyong-nyong virus
acuguacagguauac

SEQ ID NO: 378872 - RNA, 23 nt, O`nyong-nyong virus
aguaauauacuguacagguauac

SEQ ID NO: 378873 - RNA, 18 nt, O`nyong-nyong virus
auaaaaacagguauuggu

SEQ ID NO: 378874 - RNA, 21 nt, O`nyong-nyong virus
auacaaaaguauaaaaacagg

SEQ ID NO: 378875 - RNA, 17 nt, O`nyong-nyong virus
auauguauuauccauaa

SEQ ID NO: 378876 - RNA, 16 nt, O`nyong-nyong virus
auuauaaaauacaaaa

SEQ ID NO: 378877 - RNA, 17 nt, O`nyong-nyong virus
caaaguaauauacugua

SEQ ID NO: 378878 - RNA, 16 nt, O`nyong-nyong virus
caccaacaauagguau

SEQ ID NO: 378879 - RNA, 16 nt, O`nyong-nyong virus
cagcacgauauaugua

SEQ ID NO: 378880 - RNA, 17 nt, O`nyong-nyong virus
cauuauagaaccaggua

SEQ ID NO: 378881 - RNA, 18 nt, O`nyong-nyong virus
cauuauagaaccagguau

SEQ ID NO: 378882 - RNA, 17 nt, O`nyong-nyong virus
cauuauuuaaccaguga

SEQ ID NO: 378883 - RNA, 19 nt, O`nyong-nyong virus
ccccuuagaggcacauuau

SEQ ID NO: 378884 - RNA, 18 nt, O`nyong-nyong virus
cccuuagagguacauuau

SEQ ID NO: 378885 - RNA, 22 nt, O`nyong-nyong virus
cugagcagcacgauauauguau

SEQ ID NO: 378886 - RNA, 23 nt, O`nyong-nyong virus
cuuagaggcacauuauagaacca

SEQ ID NO: 378887 - RNA, 21 nt, O`nyong-nyong virus
gaaaauagguauuggugcccc

SEQ ID NO: 378888 - RNA, 22 nt, O`nyong-nyong virus
gcacauuauagaaccagguaua

SEQ ID NO: 378889 - RNA, 16 nt, O`nyong-nyong virus
gcccccuuagaggcac

SEQ ID NO: 378890 - RNA, 16 nt, O`nyong-nyong virus
gcccccuuagagguac

SEQ ID NO: 378891 - RNA, 18 nt, O`nyong-nyong virus
gcccccuuaguggcacac

SEQ ID NO: 378892 - RNA, 12 nt, O`nyong-nyong virus
gguacaccaaca

SEQ ID NO: 378893 - RNA, 20 nt, O`nyong-nyong virus
gguacauuauuuaaccagug

SEQ ID NO: 378894 - RNA, 19 nt, O`nyong-nyong virus
gguacccccuuagagguac

SEQ ID NO: 378895 - RNA, 20 nt, O`nyong-nyong virus
guacagguauacgugcuccc

SEQ ID NO: 378896 - RNA, 13 nt, O`nyong-nyong virus
uaaaaacagguau

SEQ ID NO: 378897 - RNA, 23 nt, O`nyong-nyong virus
uacaaaaguauaaaaacagguau

SEQ ID NO: 378898 - RNA, 17 nt, O`nyong-nyong virus
uacauuauuuaaccagu

SEQ ID NO: 378899 - RNA, 13 nt, O`nyong-nyong virus
uagaaccagguau

SEQ ID NO: 378900 - RNA, 23 nt, O`nyong-nyong virus
uaggugcccccuuagagguacac

SEQ ID NO: 378901 - RNA, 19 nt, O`nyong-nyong virus
uauugguacccccuuagag

SEQ ID NO: 378902 - RNA, 19 nt, O`nyong-nyong virus
uauuggugcccccuuagag

SEQ ID NO: 378903 - RNA, 20 nt, O`nyong-nyong virus
uggugcccccuuagaggcac

SEQ ID NO: 378904 - RNA, 11 nt, O`nyong-nyong virus
uguacagguau

SEQ ID NO: 378905 - RNA, 14 nt, O`nyong-nyong virus
uuagagguacauua

SEQ ID NO: 378906 - RNA, 19 nt, O`nyong-nyong virus
aaaaguauaaaaacaggua

SEQ ID NO: 378907 - RNA, 15 nt, O`nyong-nyong virus
aaaauagguauuggu

SEQ ID NO: 378908 - RNA, 15 nt, O`nyong-nyong virus
aaccaccacaaucgg

SEQ ID NO: 378909 - RNA, 20 nt, O`nyong-nyong virus
aaccagugaaaauagguauu

SEQ ID NO: 378910 - RNA, 14 nt, O`nyong-nyong virus
aagagacguaggua

SEQ ID NO: 378911 - RNA, 20 nt, O`nyong-nyong virus
aauacaaaaguauaaaaaca

SEQ ID NO: 378912 - RNA, 22 nt, O`nyong-nyong virus
aauaugaagagacguagguaug

SEQ ID NO: 378913 - RNA, 13 nt, O`nyong-nyong virus
acaauagguauaa

SEQ ID NO: 378914 - RNA, 16 nt, O`nyong-nyong virus
acauuauagaaccagg

SEQ ID NO: 378915 - RNA, 21 nt, O`nyong-nyong virus
acauuauagaaccagguauag

SEQ ID NO: 378916 - RNA, 16 nt, O`nyong-nyong virus
acauuauuuaaccagu

SEQ ID NO: 378917 - RNA, 22 nt, O`nyong-nyong virus
agagguacaccaacaauaggua

SEQ ID NO: 378918 - RNA, 14 nt, O`nyong-nyong virus
agugaaaauaggua

SEQ ID NO: 378919 - RNA, 22 nt, O`nyong-nyong virus
auacaaaaguauaaaaacaggu

SEQ ID NO: 378920 - RNA, 18 nt, O`nyong-nyong virus
auagaaccagguauaggu

SEQ ID NO: 378921 - RNA, 18 nt, O`nyong-nyong virus
auaggugcccccuuagag

SEQ ID NO: 378922 - RNA, 22 nt, O`nyong-nyong virus
auuauaaaauacaaaaguauaa

SEQ ID NO: 378923 - RNA, 14 nt, O`nyong-nyong virus
auuauagaaccagg

SEQ ID NO: 378924 - RNA, 15 nt, O`nyong-nyong virus
auuauagaaccaggu

SEQ ID NO: 378925 - RNA, 14 nt, O`nyong-nyong virus
auuauccauaaaag

SEQ ID NO: 378926 - RNA, 18 nt, O`nyong-nyong virus
auugguacccccuuagag

SEQ ID NO: 378927 - RNA, 18 nt, O`nyong-nyong virus
auuggugcccccuuagag

SEQ ID NO: 378928 - RNA, 21 nt, O`nyong-nyong virus
caaaaguauaaaaacagguau

SEQ ID NO: 378929 - RNA, 12 nt, O`nyong-nyong virus
caaaguaauaua

SEQ ID NO: 378930 - RNA, 14 nt, O`nyong-nyong virus
caaucgguaauaug

SEQ ID NO: 378931 - RNA, 17 nt, O`nyong-nyong virus
caccaacaauagguaua

SEQ ID NO: 378932 - RNA, 18 nt, O`nyong-nyong virus
ccaaaguaauauacugua

SEQ ID NO: 378933 - RNA, 14 nt, O`nyong-nyong virus
cccccuuagaggca

SEQ ID NO: 378934 - RNA, 14 nt, O`nyong-nyong virus
cccccuuaguggca

SEQ ID NO: 378935 - RNA, 19 nt, O`nyong-nyong virus
ccccuuagagguacauuau

SEQ ID NO: 378936 - RNA, 18 nt, O`nyong-nyong virus
cccuuagaggcacauuau

SEQ ID NO: 378937 - RNA, 19 nt, O`nyong-nyong virus
gaaaaacaaaacaaaaaua

SEQ ID NO: 378938 - RNA, 20 nt, O`nyong-nyong virus
gaaccagguauaggugcccc

SEQ ID NO: 378939 - RNA, 15 nt, O`nyong-nyong virus
gauauauguauuauc

SEQ ID NO: 378940 - RNA, 18 nt, O`nyong-nyong virus
gcccccuuagaggcacau

SEQ ID NO: 378941 - RNA, 19 nt, O`nyong-nyong virus
ggcacauuauagaaccagg

SEQ ID NO: 378942 - RNA, 19 nt, O`nyong-nyong virus
ggugcccccuuagagguac

SEQ ID NO: 378943 - RNA, 20 nt, O`nyong-nyong virus
guaauauacuguacagguau

SEQ ID NO: 378944 - RNA, 16 nt, O`nyong-nyong virus
guauaaaaacagguau

SEQ ID NO: 378945 - RNA, 15 nt, O`nyong-nyong virus
uaaccaccacaaucg

SEQ ID NO: 378946 - RNA, 20 nt, O`nyong-nyong virus
uaaccagugaaaauagguau

SEQ ID NO: 378947 - RNA, 13 nt, O`nyong-nyong virus
uacaaaaguauaa

SEQ ID NO: 378948 - RNA, 18 nt, O`nyong-nyong virus
uacaaaaguauaaaaaca

SEQ ID NO: 378949 - RNA, 22 nt, O`nyong-nyong virus
uacacaugccccaaaguaauau

SEQ ID NO: 378950 - RNA, 14 nt, O`nyong-nyong virus
uacaccaacaauag

SEQ ID NO: 378951 - RNA, 18 nt, O`nyong-nyong virus
uacaccaacaauagguau

SEQ ID NO: 378952 - RNA, 22 nt, O`nyong-nyong virus
uacccccuuagagguacauuau

SEQ ID NO: 378953 - RNA, 23 nt, O`nyong-nyong virus
uacccccuuagagguacauuauu

SEQ ID NO: 378954 - RNA, 14 nt, O`nyong-nyong virus
uacuguacagguau

SEQ ID NO: 378955 - RNA, 21 nt, O`nyong-nyong virus
uaggugcccccuuagagguac

SEQ ID NO: 378956 - RNA, 22 nt, O`nyong-nyong virus
uaguggcacacuaaccaccaca

SEQ ID NO: 378957 - RNA, 19 nt, O`nyong-nyong virus
uauaggugcccccuuagag

SEQ ID NO: 378958 - RNA, 15 nt, O`nyong-nyong virus
uauauguauuaucca

SEQ ID NO: 378959 - RNA, 23 nt, O`nyong-nyong virus
ugccccaaaguaauauacuguac

SEQ ID NO: 378960 - RNA, 21 nt, O`nyong-nyong virus
ugcccccuuagaggcacauua

SEQ ID NO: 378961 - RNA, 22 nt, O`nyong-nyong virus
ugcccccuuaguggcacacuaa

SEQ ID NO: 378962 - RNA, 20 nt, O`nyong-nyong virus
ugguacccccuuagagguac

SEQ ID NO: 378963 - RNA, 14 nt, O`nyong-nyong virus
uuagaggcacauua

SEQ ID NO: 378964 - RNA, 16 nt, O`nyong-nyong virus
uuauagaaccagguau

SEQ ID NO: 378965 - RNA, 22 nt, Ovine lentivirus
aaagcagagucaggaugacaca

SEQ ID NO: 378966 - RNA, 17 nt, Ovine lentivirus
aagcacaaucauuguua

SEQ ID NO: 378967 - RNA, 15 nt, Ovine lentivirus
aagcagagucaggau

SEQ ID NO: 378968 - RNA, 17 nt, Ovine lentivirus
aauguaaccguuaucag

SEQ ID NO: 378969 - RNA, 15 nt, Ovine lentivirus
agaaagcagagucag

SEQ ID NO: 378970 - RNA, 17 nt, Ovine lentivirus
agagucaggaugacaca

SEQ ID NO: 378971 - RNA, 22 nt, Ovine lentivirus
agcugggagagaucagagcacu

SEQ ID NO: 378972 - RNA, 19 nt, Ovine lentivirus
aggaugacacagcaaaugu

SEQ ID NO: 378973 - RNA, 19 nt, Ovine lentivirus
aggucauaaccgcaauugu

SEQ ID NO: 378974 - RNA, 17 nt, Ovine lentivirus
augacacagcaaaugua

SEQ ID NO: 378975 - RNA, 16 nt, Ovine lentivirus
auguaaccgcaaguuc

SEQ ID NO: 378976 - RNA, 21 nt, Ovine lentivirus
auguaaccguuaucagaaagc

SEQ ID NO: 378977 - RNA, 13 nt, Ovine lentivirus
caggaugacacag

SEQ ID NO: 378978 - RNA, 19 nt, Ovine lentivirus
cauuguuaucagaaagcag

SEQ ID NO: 378979 - RNA, 17 nt, Ovine lentivirus
ccguuaucagaaagcag

SEQ ID NO: 378980 - RNA, 13 nt, Ovine lentivirus
ccuauaaaagcug

SEQ ID NO: 378981 - RNA, 14 nt, Ovine lentivirus
gaaagcagagucag

SEQ ID NO: 378982 - RNA, 19 nt, Ovine lentivirus
gagucaggaugacacagca

SEQ ID NO: 378983 - RNA, 11 nt, Ovine lentivirus
ggaugacacag

SEQ ID NO: 378984 - RNA, 16 nt, Ovine lentivirus
ucaggaugacacagca

SEQ ID NO: 378985 - RNA, 11 nt, Ovine lentivirus
uuaucagaaag

SEQ ID NO: 378986 - RNA, 18 nt, Ovine lentivirus
uuaucagaaagcagaguc

SEQ ID NO: 378987 - RNA, 16 nt, Ovine lentivirus
aaagcagagucaggau

SEQ ID NO: 378988 - RNA, 18 nt, Ovine lentivirus
aaagcagagucaggauga

SEQ ID NO: 378989 - RNA, 19 nt, Ovine lentivirus
aaaucauguaucagcugau

SEQ ID NO: 378990 - RNA, 15 nt, Ovine lentivirus
aaucauuguuaucag

SEQ ID NO: 378991 - RNA, 20 nt, Ovine lentivirus
accguuaucagaaagcagag

SEQ ID NO: 378992 - RNA, 17 nt, Ovine lentivirus
agaaagcagagucagga

SEQ ID NO: 378993 - RNA, 14 nt, Ovine lentivirus
agagucaggaugac

SEQ ID NO: 378994 - RNA, 23 nt, Ovine lentivirus
agcagagucaggaugacacagca

SEQ ID NO: 378995 - RNA, 14 nt, Ovine lentivirus
agucaggaugacac

SEQ ID NO: 378996 - RNA, 14 nt, Ovine lentivirus
aucagaaagcagag

SEQ ID NO: 378997 - RNA, 23 nt, Ovine lentivirus
aucauuguuaucagaaagcagag

SEQ ID NO: 378998 - RNA, 16 nt, Ovine lentivirus
auuguuaucagaaagc

SEQ ID NO: 378999 - RNA, 16 nt, Ovine lentivirus
caaucauuguuaucag

SEQ ID NO: 379000 - RNA, 14 nt, Ovine lentivirus
cagaaagcagaguc

SEQ ID NO: 379001 - RNA, 17 nt, Ovine lentivirus
cagaaagcagagucagg

SEQ ID NO: 379002 - RNA, 17 nt, Ovine lentivirus
cagagucaggaugacac

SEQ ID NO: 379003 - RNA, 15 nt, Ovine lentivirus
cugggagagaucaga

SEQ ID NO: 379004 - RNA, 12 nt, Ovine lentivirus
cuguggagacaa

SEQ ID NO: 379005 - RNA, 11 nt, Ovine lentivirus
gcagagucagg

SEQ ID NO: 379006 - RNA, 18 nt, Ovine lentivirus
gcagagucaggaugacac

SEQ ID NO: 379007 - RNA, 22 nt, Ovine lentivirus
gcagagucaggaugacacagca

SEQ ID NO: 379008 - RNA, 20 nt, Ovine lentivirus
gcucccaggucucuccugcc

SEQ ID NO: 379009 - RNA, 14 nt, Ovine lentivirus
guaaccguuaucag

SEQ ID NO: 379010 - RNA, 19 nt, Ovine lentivirus
gucaggaugacacagcaaa

SEQ ID NO: 379011 - RNA, 14 nt, Ovine lentivirus
uaucagaaagcaga

SEQ ID NO: 379012 - RNA, 20 nt, Ovine lentivirus
ucagaaagcagagucaggau

SEQ ID NO: 379013 - RNA, 21 nt, Ovine lentivirus
ucagaaagcagagucaggaug

SEQ ID NO: 379014 - RNA, 17 nt, Ovine lentivirus
ucaggaugacacagcaa

SEQ ID NO: 379015 - RNA, 19 nt, Ovine lentivirus
ugccugacuguggagacaa

SEQ ID NO: 379016 - RNA, 13 nt, Ovine lentivirus
uguaaacaaguug

SEQ ID NO: 379017 - RNA, 13 nt, Ovine lentivirus
uguuaucagaaag

SEQ ID NO: 379018 - RNA, 20 nt, Ovine lentivirus
uguuaucagaaagcagaguc

SEQ ID NO: 379019 - RNA, 18 nt, Ovine lentivirus
uuguuaucagaaagcaga

SEQ ID NO: 379020 - RNA, 22 nt, Poliovirus
aauuggauugggucauacuguu

SEQ ID NO: 379021 - RNA, 13 nt, Poliovirus
accucagucgaau

SEQ ID NO: 379022 - RNA, 15 nt, Poliovirus
auuuuucuuuaauuc

SEQ ID NO: 379023 - RNA, 17 nt, Poliovirus
ccucagucgaauuggau

SEQ ID NO: 379024 - RNA, 18 nt, Poliovirus
ccucagucgaauuggauu

SEQ ID NO: 379025 - RNA, 15 nt, Poliovirus
cucagucgaauugga

SEQ ID NO: 379026 - RNA, 22 nt, Poliovirus
gaauuggauugggucauacugu

SEQ ID NO: 379027 - RNA, 15 nt, Poliovirus
gggguaaauuuuucu

SEQ ID NO: 379028 - RNA, 13 nt, Poliovirus
gggucauacuguu

SEQ ID NO: 379029 - RNA, 21 nt, Poliovirus
ggucauacuguuguaggggua

SEQ ID NO: 379030 - RNA, 22 nt, Poliovirus
guagggguaaauuuuucuuuaa

SEQ ID NO: 379031 - RNA, 13 nt, Poliovirus
guuguagggguaa

SEQ ID NO: 379032 - RNA, 13 nt, Poliovirus
uacuguuguaggg

SEQ ID NO: 379033 - RNA, 12 nt, Poliovirus
ucauacuguugu

SEQ ID NO: 379034 - RNA, 19 nt, Poliovirus
uggauugggucauacuguu

SEQ ID NO: 379035 - RNA, 22 nt, Poliovirus
uggauugggucauacuguugua

SEQ ID NO: 379036 - RNA, 14 nt, Poliovirus
ugggucauacuguu

SEQ ID NO: 379037 - RNA, 21 nt, Poliovirus
ugggucauacuguuguagggg

SEQ ID NO: 379038 - RNA, 14 nt, Poliovirus
uuguagggguaaau

SEQ ID NO: 379039 - RNA, 11 nt, Poliovirus
uuuucuuuaau

SEQ ID NO: 379040 - RNA, 11 nt, Poliovirus
auacuguugua

SEQ ID NO: 379041 - RNA, 17 nt, Poliovirus
auacuguuguaggggua

SEQ ID NO: 379042 - RNA, 13 nt, Poliovirus
cuguuguaggggu

SEQ ID NO: 379043 - RNA, 17 nt, Poliovirus
gauugggucauacuguu

SEQ ID NO: 379044 - RNA, 14 nt, Poliovirus
gggucauacuguug

SEQ ID NO: 379045 - RNA, 21 nt, Poliovirus
gucgaauuggauugggucaua

SEQ ID NO: 379046 - RNA, 18 nt, Poliovirus
uaccucagucgaauugga

SEQ ID NO: 379047 - RNA, 19 nt, Poliovirus
uaccucagucgaauuggau

SEQ ID NO: 379048 - RNA, 15 nt, Poliovirus
uacuguuguaggggu

SEQ ID NO: 379049 - RNA, 19 nt, Poliovirus
ucauacuguuguaggggua

SEQ ID NO: 379050 - RNA, 18 nt, Poliovirus
uggauugggucauacugu

SEQ ID NO: 379051 - RNA, 14 nt, Poliovirus
uuggauugggucau

SEQ ID NO: 379052 - RNA, 21 nt, Poliovirus
uuggauugggucauacuguug

SEQ ID NO: 379053 - RNA, 15 nt, Puumala virus
aacauguagacauau

SEQ ID NO: 379054 - RNA, 12 nt, Puumala virus
aauacagggauc

SEQ ID NO: 379055 - RNA, 16 nt, Puumala virus
aauacagggaucacua

SEQ ID NO: 379056 - RNA, 18 nt, Puumala virus
aauauauuaagacauuau

SEQ ID NO: 379057 - RNA, 17 nt, Puumala virus
aaucaauacagggauca

SEQ ID NO: 379058 - RNA, 19 nt, Puumala virus
aaucauuaucuaauuagca

SEQ ID NO: 379059 - RNA, 22 nt, Puumala virus
aaucauuaucuaauuagcauua

SEQ ID NO: 379060 - RNA, 17 nt, Puumala virus
aauuaacaaacuaauca

SEQ ID NO: 379061 - RNA, 16 nt, Puumala virus
acaaucaauacaggga

SEQ ID NO: 379062 - RNA, 14 nt, Puumala virus
accucagugugcuu

SEQ ID NO: 379063 - RNA, 17 nt, Puumala virus
acggguuuauaguugca

SEQ ID NO: 379064 - RNA, 17 nt, Puumala virus
acuaauggcaguuauga

SEQ ID NO: 379065 - RNA, 24 nt, Puumala virus
acuuuuuuucucaaaacuuauuca

SEQ ID NO: 379066 - RNA, 15 nt, Puumala virus
agaaauguagcauua

SEQ ID NO: 379067 - RNA, 20 nt, Puumala virus
agcauuauaaguacauauca

SEQ ID NO: 379068 - RNA, 18 nt, Puumala virus
aguuacuaaucuuuaugc

SEQ ID NO: 379069 - RNA, 19 nt, Puumala virus
aguugcaguuaucaggguc

SEQ ID NO: 379070 - RNA, 22 nt, Puumala virus
auaacaaucaauacagggauca

SEQ ID NO: 379071 - RNA, 14 nt, Puumala virus
auaaguacauauca

SEQ ID NO: 379072 - RNA, 17 nt, Puumala virus
auacuucuuauugcucu

SEQ ID NO: 379073 - RNA, 13 nt, Puumala virus
auauauucaggga

SEQ ID NO: 379074 - RNA, 17 nt, Puumala virus
auaucuaaucauuauau

SEQ ID NO: 379075 - RNA, 15 nt, Puumala virus
auaugacuaccuaua

SEQ ID NO: 379076 - RNA, 19 nt, Puumala virus
auauuauauauucagggau

SEQ ID NO: 379077 - RNA, 13 nt, Puumala virus
auauucagggauc

SEQ ID NO: 379078 - RNA, 14 nt, Puumala virus
aucuuuaugcuaua

SEQ ID NO: 379079 - RNA, 15 nt, Puumala virus
aucuuuaugcuauau

SEQ ID NO: 379080 - RNA, 16 nt, Puumala virus
auguagugaguuguua

SEQ ID NO: 379081 - RNA, 22 nt, Puumala virus
augugcuaguuguuuacuaauc

SEQ ID NO: 379082 - RNA, 20 nt, Puumala virus
auuaacaaacuaaucagggu

SEQ ID NO: 379083 - RNA, 21 nt, Puumala virus
auuaacaaacuaaucaggguu

SEQ ID NO: 379084 - RNA, 22 nt, Puumala virus
auuaacaaacuaaucaggguua

SEQ ID NO: 379085 - RNA, 17 nt, Puumala virus
auuacauaugcacugau

SEQ ID NO: 379086 - RNA, 20 nt, Puumala virus
auuacauaugcacugauuau

SEQ ID NO: 379087 - RNA, 22 nt, Puumala virus
auuauacggguuuauaguugca

SEQ ID NO: 379088 - RNA, 22 nt, Puumala virus
auuauagauguagugaguuguu

SEQ ID NO: 379089 - RNA, 17 nt, Puumala virus
auuauauauucagggau

SEQ ID NO: 379090 - RNA, 19 nt, Puumala virus
auuaucuaauuagcauuau

SEQ ID NO: 379091 - RNA, 16 nt, Puumala virus
auucauuucuaccuca

SEQ ID NO: 379092 - RNA, 15 nt, Puumala virus
caaacuaaucagggu

SEQ ID NO: 379093 - RNA, 16 nt, Puumala virus
caaucaauacagggau

SEQ ID NO: 379094 - RNA, 22 nt, Puumala virus
caaucaauacagggaucacuaa

SEQ ID NO: 379095 - RNA, 23 nt, Puumala virus
cacuuuuuuucucaaaacuuauu

SEQ ID NO: 379096 - RNA, 14 nt, Puumala virus
cauaucaacuaaua

SEQ ID NO: 379097 - RNA, 14 nt, Puumala virus
cauaucauguauau

SEQ ID NO: 379098 - RNA, 13 nt, Puumala virus
cauaugacuaccu

SEQ ID NO: 379099 - RNA, 19 nt, Puumala virus
cauauuauauauucaggga

SEQ ID NO: 379100 - RNA, 20 nt, Puumala virus
cauauuauauauucagggau

SEQ ID NO: 379101 - RNA, 15 nt, Puumala virus
cauguagacauauua

SEQ ID NO: 379102 - RNA, 17 nt, Puumala virus
cauuaauuaacaaacua

SEQ ID NO: 379103 - RNA, 20 nt, Puumala virus
cauuaauuaacaaacuaauc

SEQ ID NO: 379104 - RNA, 18 nt, Puumala virus
cauuauaaguacauauca

SEQ ID NO: 379105 - RNA, 22 nt, Puumala virus
cauuauaaguacauaucaacua

SEQ ID NO: 379106 - RNA, 15 nt, Puumala virus
cauuauuucauauca

SEQ ID NO: 379107 - RNA, 12 nt, Puumala virus
cccaaacaugug

SEQ ID NO: 379108 - RNA, 15 nt, Puumala virus
ccucauacugauuau

SEQ ID NO: 379109 - RNA, 16 nt, Puumala virus
cuaauaacaaucaaua

SEQ ID NO: 379110 - RNA, 17 nt, Puumala virus
cuaauuacauuaccuca

SEQ ID NO: 379111 - RNA, 23 nt, Puumala virus
cuagugcagucaccauaugacua

SEQ ID NO: 379112 - RNA, 22 nt, Puumala virus
cuauauucgauuuacuagugca

SEQ ID NO: 379113 - RNA, 17 nt, Puumala virus
cucggagcauacuacua

SEQ ID NO: 379114 - RNA, 13 nt, Puumala virus
cugauuaugccug

SEQ ID NO: 379115 - RNA, 20 nt, Puumala virus
cuuaauuacauaugcacuga

SEQ ID NO: 379116 - RNA, 14 nt, Puumala virus
cuucuuauugcucu

SEQ ID NO: 379117 - RNA, 16 nt, Puumala virus
cuucuuauugcucuuu

SEQ ID NO: 379118 - RNA, 19 nt, Puumala virus
cuugcggagucuacuacua

SEQ ID NO: 379119 - RNA, 19 nt, Puumala virus
cuuuucucggagcauacua

SEQ ID NO: 379120 - RNA, 20 nt, Puumala virus
gaaauguagcauuauaagua

SEQ ID NO: 379121 - RNA, 20 nt, Puumala virus
gacuaccuauaugccauuau

SEQ ID NO: 379122 - RNA, 16 nt, Puumala virus
gaguuguuaacaugua

SEQ ID NO: 379123 - RNA, 17 nt, Puumala virus
gauuauagauguaguga

SEQ ID NO: 379124 - RNA, 13 nt, Puumala virus
gcacuuuacuaau

SEQ ID NO: 379125 - RNA, 14 nt, Puumala virus
gcaguuaucagggu

SEQ ID NO: 379126 - RNA, 13 nt, Puumala virus
gcaguuaugaaua

SEQ ID NO: 379127 - RNA, 14 nt, Puumala virus
gcccaaacauguga

SEQ ID NO: 379128 - RNA, 21 nt, Puumala virus
gcuaguuguuuacuaaucaaa

SEQ ID NO: 379129 - RNA, 13 nt, Puumala virus
ggagcauacuacu

SEQ ID NO: 379130 - RNA, 19 nt, Puumala virus
ggguuuauaguugcaguua

SEQ ID NO: 379131 - RNA, 22 nt, Puumala virus
guagcauuauaaguacauauca

SEQ ID NO: 379132 - RNA, 21 nt, Puumala virus
guucuugcggagucuacuacu

SEQ ID NO: 379133 - RNA, 15 nt, Puumala virus
guuguuuacuaauca

SEQ ID NO: 379134 - RNA, 13 nt, Puumala virus
uaacaaacuaauc

SEQ ID NO: 379135 - RNA, 15 nt, Puumala virus
uaacaaacuaaucag

SEQ ID NO: 379136 - RNA, 13 nt, Puumala virus
uaauaacaaucaa

SEQ ID NO: 379137 - RNA, 23 nt, Puumala virus
uaauaacaaucaauacagggauc

SEQ ID NO: 379138 - RNA, 19 nt, Puumala virus
uaaugggcccaaacaugug

SEQ ID NO: 379139 - RNA, 23 nt, Puumala virus
uacauaucaacuaauaacaauca

SEQ ID NO: 379140 - RNA, 10 nt, Puumala virus
uacuaaucaa

SEQ ID NO: 379141 - RNA, 19 nt, Puumala virus
uacuaaucuuuaugcuaua

SEQ ID NO: 379142 - RNA, 22 nt, Puumala virus
uacuagugcagucaccauauga

SEQ ID NO: 379143 - RNA, 17 nt, Puumala virus
uagaaauguagcauuau

SEQ ID NO: 379144 - RNA, 17 nt, Puumala virus
uagcauuauaaguacau

SEQ ID NO: 379145 - RNA, 21 nt, Puumala virus
uagcauuauaaguacauauca

SEQ ID NO: 379146 - RNA, 22 nt, Puumala virus
uauaaguacauaucaacuaaua

SEQ ID NO: 379147 - RNA, 19 nt, Puumala virus
uaucaacuaauaacaauca

SEQ ID NO: 379148 - RNA, 14 nt, Puumala virus
uaugacuaccuaua

SEQ ID NO: 379149 - RNA, 22 nt, Puumala virus
uauucagggaucauaugugcua

SEQ ID NO: 379150 - RNA, 15 nt, Puumala virus
uauugcucuuuucuc

SEQ ID NO: 379151 - RNA, 18 nt, Puumala virus
ucaacuaauaacaaucaa

SEQ ID NO: 379152 - RNA, 12 nt, Puumala virus
ucaauacaggga

SEQ ID NO: 379153 - RNA, 14 nt, Puumala virus
ucaauacagggauc

SEQ ID NO: 379154 - RNA, 14 nt, Puumala virus
ucacuaauggcagu

SEQ ID NO: 379155 - RNA, 12 nt, Puumala virus
ucauaugugcua

SEQ ID NO: 379156 - RNA, 18 nt, Puumala virus
ucauuaucuaauuagcau

SEQ ID NO: 379157 - RNA, 17 nt, Puumala virus
ucuuuucucggagcaua

SEQ ID NO: 379158 - RNA, 18 nt, Puumala virus
ugacuaccuauaugccau

SEQ ID NO: 379159 - RNA, 18 nt, Puumala virus
ugccauuauuucauauca

SEQ ID NO: 379160 - RNA, 16 nt, Puumala virus
ugggcccaaacaugug

SEQ ID NO: 379161 - RNA, 20 nt, Puumala virus
uguuaacauguagacauauu

SEQ ID NO: 379162 - RNA, 18 nt, Puumala virus
uuaaugggcccaaacaug

SEQ ID NO: 379163 - RNA, 19 nt, Puumala virus
uuaauuaacaaacuaauca

SEQ ID NO: 379164 - RNA, 19 nt, Puumala virus
uuacauuaccucauacuga

SEQ ID NO: 379165 - RNA, 14 nt, Puumala virus
uuaccucauacuga

SEQ ID NO: 379166 - RNA, 16 nt, Puumala virus
uuauaaguacauauca

SEQ ID NO: 379167 - RNA, 15 nt, Puumala virus
uuaucuaauuagcau

SEQ ID NO: 379168 - RNA, 15 nt, Puumala virus
aguuguuaacaugua

SEQ ID NO: 379169 - RNA, 16 nt, Puumala virus
aguuguuuacuaauca

SEQ ID NO: 379170 - RNA, 15 nt, Puumala virus
auaaguacauaucaa

SEQ ID NO: 379171 - RNA, 17 nt, Puumala virus
auaaucauuaucuaauu

SEQ ID NO: 379172 - RNA, 18 nt, Puumala virus
auacuucuuauugcucuu

SEQ ID NO: 379173 - RNA, 18 nt, Puumala virus
auauaaaaaaaacuagca

SEQ ID NO: 379174 - RNA, 16 nt, Puumala virus
auauauuaagacauua

SEQ ID NO: 379175 - RNA, 16 nt, Puumala virus
auauauucagggauca

SEQ ID NO: 379176 - RNA, 23 nt, Puumala virus
auauucagggaucauaugugcua

SEQ ID NO: 379177 - RNA, 17 nt, Puumala virus
aucaacuaauaacaauc

SEQ ID NO: 379178 - RNA, 19 nt, Puumala virus
aucaacuaauaacaaucaa

SEQ ID NO: 379179 - RNA, 14 nt, Puumala virus
aucaauacagggau

SEQ ID NO: 379180 - RNA, 15 nt, Puumala virus
aucaauacagggauc

SEQ ID NO: 379181 - RNA, 23 nt, Puumala virus
aucacuuuuuuucucaaaacuua

SEQ ID NO: 379182 - RNA, 19 nt, Puumala virus
aucauaugugcuaguuguu

SEQ ID NO: 379183 - RNA, 15 nt, Puumala virus
aucuaauuagcauua

SEQ ID NO: 379184 - RNA, 16 nt, Puumala virus
augccuggacuuuugu

SEQ ID NO: 379185 - RNA, 22 nt, Puumala virus
auguagcauuauaaguacauau

SEQ ID NO: 379186 - RNA, 14 nt, Puumala virus
auguauauuaucuu

SEQ ID NO: 379187 - RNA, 20 nt, Puumala virus
auuaauuaacaaacuaauca

SEQ ID NO: 379188 - RNA, 19 nt, Puumala virus
auuaccucauacugauuau

SEQ ID NO: 379189 - RNA, 23 nt, Puumala virus
auuauagauguagugaguuguua

SEQ ID NO: 379190 - RNA, 18 nt, Puumala virus
auuauauauucagggauc

SEQ ID NO: 379191 - RNA, 20 nt, Puumala virus
auuaucuaauuagcauuaug

SEQ ID NO: 379192 - RNA, 17 nt, Puumala virus
auugcucuuuucucgga

SEQ ID NO: 379193 - RNA, 10 nt, Puumala virus
caaacuaauc

SEQ ID NO: 379194 - RNA, 20 nt, Puumala virus
caauacagggaucacuaaug

SEQ ID NO: 379195 - RNA, 15 nt, Puumala virus
caaucaauacaggga

SEQ ID NO: 379196 - RNA, 22 nt, Puumala virus
cagggaucacuaauggcaguua

SEQ ID NO: 379197 - RNA, 20 nt, Puumala virus
cagucaccauaugacuaccu

SEQ ID NO: 379198 - RNA, 13 nt, Puumala virus
cagugugcuuaua

SEQ ID NO: 379199 - RNA, 13 nt, Puumala virus
caguuaucagggu

SEQ ID NO: 379200 - RNA, 14 nt, Puumala virus
caguuaugaauaua

SEQ ID NO: 379201 - RNA, 13 nt, Puumala virus
cauaucaacuaau

SEQ ID NO: 379202 - RNA, 14 nt, Puumala virus
cauaugacuaccua

SEQ ID NO: 379203 - RNA, 15 nt, Puumala virus
cauauuauauauuca

SEQ ID NO: 379204 - RNA, 14 nt, Puumala virus
cauguagacauauu

SEQ ID NO: 379205 - RNA, 14 nt, Puumala virus
cauuaauuaacaaa

SEQ ID NO: 379206 - RNA, 16 nt, Puumala virus
ccauaugacuaccuau

SEQ ID NO: 379207 - RNA, 13 nt, Puumala virus
cccaaacauguga

SEQ ID NO: 379208 - RNA, 14 nt, Puumala virus
ccuauaugccauua

SEQ ID NO: 379209 - RNA, 19 nt, Puumala virus
ccuauaugccauuauuuca

SEQ ID NO: 379210 - RNA, 15 nt, Puumala virus
cuaauuacauuaccu

SEQ ID NO: 379211 - RNA, 18 nt, Puumala virus
cuaauuacauuaccucau

SEQ ID NO: 379212 - RNA, 21 nt, Puumala virus
cuagugcagucaccauaugac

SEQ ID NO: 379213 - RNA, 18 nt, Puumala virus
cuaguuguuuacuaauca

SEQ ID NO: 379214 - RNA, 14 nt, Puumala virus
cuauaugccauuau

SEQ ID NO: 379215 - RNA, 16 nt, Puumala virus
cuuaauuacauaugca

SEQ ID NO: 379216 - RNA, 20 nt, Puumala virus
cuuuacuaauuacauuaccu

SEQ ID NO: 379217 - RNA, 22 nt, Puumala virus
cuuuucucggagcauacuacua

SEQ ID NO: 379218 - RNA, 23 nt, Puumala virus
gaguuguuaacauguagacauau

SEQ ID NO: 379219 - RNA, 20 nt, Puumala virus
gauuuacuagugcagucacc

SEQ ID NO: 379220 - RNA, 13 nt, Puumala virus
gcccaaacaugug

SEQ ID NO: 379221 - RNA, 14 nt, Puumala virus
ggcccaaacaugug

SEQ ID NO: 379222 - RNA, 18 nt, Puumala virus
gguuuauaguugcaguua

SEQ ID NO: 379223 - RNA, 21 nt, Puumala virus
guagugaguuguuaacaugua

SEQ ID NO: 379224 - RNA, 20 nt, Puumala virus
gugcuaguuguuuacuaauc

SEQ ID NO: 379225 - RNA, 18 nt, Puumala virus
guucuugcggagucuacu

SEQ ID NO: 379226 - RNA, 20 nt, Puumala virus
uaaacuagaaauguagcauu

SEQ ID NO: 379227 - RNA, 14 nt, Puumala virus
uaacaaacuaauca

SEQ ID NO: 379228 - RNA, 18 nt, Puumala virus
uaacaaucaauacaggga

SEQ ID NO: 379229 - RNA, 16 nt, Puumala virus
uaacauguagacauau

SEQ ID NO: 379230 - RNA, 21 nt, Puumala virus
uaagacauuauuuuauaauca

SEQ ID NO: 379231 - RNA, 20 nt, Puumala virus
uaaguacauaucaacuaaua

SEQ ID NO: 379232 - RNA, 18 nt, Puumala virus
uaaucauuaucuaauuag

SEQ ID NO: 379233 - RNA, 15 nt, Puumala virus
uaaucuuuaugcuau

SEQ ID NO: 379234 - RNA, 13 nt, Puumala virus
uaauuaacaaacu

SEQ ID NO: 379235 - RNA, 17 nt, Puumala virus
uaauuaacaaacuaauc

SEQ ID NO: 379236 - RNA, 19 nt, Puumala virus
uaauuaacaaacuaaucag

SEQ ID NO: 379237 - RNA, 18 nt, Puumala virus
uaauuacauuaccucaua

SEQ ID NO: 379238 - RNA, 19 nt, Puumala virus
uaauuagcauuauguaggu

SEQ ID NO: 379239 - RNA, 14 nt, Puumala virus
uacauuaccucaua

SEQ ID NO: 379240 - RNA, 16 nt, Puumala virus
uaccucagugugcuua

SEQ ID NO: 379241 - RNA, 13 nt, Puumala virus
uacuaaucaaauu

SEQ ID NO: 379242 - RNA, 14 nt, Puumala virus
uagcacuuuacuaa

SEQ ID NO: 379243 - RNA, 18 nt, Puumala virus
uagcacuuuacuaauuac

SEQ ID NO: 379244 - RNA, 20 nt, Puumala virus
uagugaguuguuaacaugua

SEQ ID NO: 379245 - RNA, 19 nt, Puumala virus
uauaaaaaaaacuagcacu

SEQ ID NO: 379246 - RNA, 18 nt, Puumala virus
uauacuucuuauugcucu

SEQ ID NO: 379247 - RNA, 20 nt, Puumala virus
uauacuucuuauugcucuuu

SEQ ID NO: 379248 - RNA, 12 nt, Puumala virus
uaucaacuaaua

SEQ ID NO: 379249 - RNA, 18 nt, Puumala virus
uaucaacuaauaacaauc

SEQ ID NO: 379250 - RNA, 20 nt, Puumala virus
uaugacuaccuauaugccau

SEQ ID NO: 379251 - RNA, 15 nt, Puumala virus
uauucgauuuacuag

SEQ ID NO: 379252 - RNA, 13 nt, Puumala virus
uauuucauaucau

SEQ ID NO: 379253 - RNA, 15 nt, Puumala virus
ucaaauuauacgggu

SEQ ID NO: 379254 - RNA, 13 nt, Puumala virus
ucaacuaauaaca

SEQ ID NO: 379255 - RNA, 17 nt, Puumala virus
ucauuaauuaacaaacu

SEQ ID NO: 379256 - RNA, 22 nt, Puumala virus
ucauuaauuaacaaacuaauca

SEQ ID NO: 379257 - RNA, 19 nt, Puumala virus
ucauuaucuaauuagcauu

SEQ ID NO: 379258 - RNA, 15 nt, Puumala virus
ucuaauuagcauuau

SEQ ID NO: 379259 - RNA, 16 nt, Puumala virus
ucuuauugcucuuuuc

SEQ ID NO: 379260 - RNA, 14 nt, Puumala virus
ucuuuaugcuauau

SEQ ID NO: 379261 - RNA, 18 nt, Puumala virus
ugaauauauuaagacauu

SEQ ID NO: 379262 - RNA, 17 nt, Puumala virus
ugaguuguuaacaugua

SEQ ID NO: 379263 - RNA, 18 nt, Puumala virus
ugauuauagauguaguga

SEQ ID NO: 379264 - RNA, 21 nt, Puumala virus
ugcuaguuguuuacuaaucaa

SEQ ID NO: 379265 - RNA, 21 nt, Puumala virus
uguagacauauuauauauuca

SEQ ID NO: 379266 - RNA, 23 nt, Puumala virus
ugugcuaguuguuuacuaaucaa

SEQ ID NO: 379267 - RNA, 20 nt, Puumala virus
uuaaacuagaaauguagcau

SEQ ID NO: 379268 - RNA, 16 nt, Puumala virus
uuaacaaacuaaucag

SEQ ID NO: 379269 - RNA, 22 nt, Puumala virus
uuaagacauuauuuuauaauca

SEQ ID NO: 379270 - RNA, 17 nt, Puumala virus
uuauauauucagggauc

SEQ ID NO: 379271 - RNA, 14 nt, Puumala virus
uucagggaucauau

SEQ ID NO: 379272 - RNA, 19 nt, Puumala virus
uucagggaucauaugugcu

SEQ ID NO: 379273 - RNA, 20 nt, Puumala virus
uucagggaucauaugugcua

SEQ ID NO: 379274 - RNA, 17 nt, Puumala virus
uucuaccucagugugcu

SEQ ID NO: 379275 - RNA, 16 nt, Puumala virus
uugcaguuaucagggu

SEQ ID NO: 379276 - RNA, 19 nt, Puumala virus
uuucuaccucagugugcuu

SEQ ID NO: 379277 - RNA, 17 nt, Puumala virus
uuucucggagcauacua

SEQ ID NO: 379278 - RNA, 20 nt, Puumala virus
uuucucggagcauacuacua

SEQ ID NO: 379279 - RNA, 13 nt, Puumala virus
uuauuucauauca

SEQ ID NO: 379280 - RNA, 14 nt, Puumala virus
uuauuucauaucau

SEQ ID NO: 379281 - RNA, 19 nt, Puumala virus
uucuaccucagugugcuua

SEQ ID NO: 379282 - RNA, 15 nt, Puumala virus
uucucggagcauacu

SEQ ID NO: 379283 - RNA, 18 nt, Puumala virus
uucuugcggagucuacua

SEQ ID NO: 379284 - RNA, 14 nt, Puumala virus
uuuauaguugcagu

SEQ ID NO: 379285 - RNA, 20 nt, Puumala virus
uuuuucucaaaacuuauuca

SEQ ID NO: 379286 - RNA, 13 nt, Puumala virus
aaauguagcauua

SEQ ID NO: 379287 - RNA, 14 nt, Puumala virus
aaauguagcauuau

SEQ ID NO: 379288 - RNA, 13 nt, Puumala virus
aaauuauacgggu

SEQ ID NO: 379289 - RNA, 9 nt, Puumala virus
aacauguag

SEQ ID NO: 379290 - RNA, 16 nt, Puumala virus
aacuagaaauguagca

SEQ ID NO: 379291 - RNA, 16 nt, Puumala virus
aaguacauaucaacua

SEQ ID NO: 379292 - RNA, 14 nt, Puumala virus
aaucaauacaggga

SEQ ID NO: 379293 - RNA, 11 nt, Puumala virus
aauuagcauua

SEQ ID NO: 379294 - RNA, 17 nt, Puumala virus
acaaacuaaucaggguu

SEQ ID NO: 379295 - RNA, 23 nt, Puumala virus
acauauuauauauucagggauca

SEQ ID NO: 379296 - RNA, 19 nt, Puumala virus
accuauaugccauuauuuc

SEQ ID NO: 379297 - RNA, 18 nt, Puumala virus
acuagaaauguagcauua

SEQ ID NO: 379298 - RNA, 22 nt, Puumala virus
acuagcacuuuacuaauuacau

SEQ ID NO: 379299 - RNA, 16 nt, Puumala virus
acuucuuauugcucuu

SEQ ID NO: 379300 - RNA, 13 nt, Puumala virus
acuuuacuaauua

SEQ ID NO: 379301 - RNA, 17 nt, Puumala virus
agaaauguagcauuaua

SEQ ID NO: 379302 - RNA, 21 nt, Puumala virus
agcauuauaaguacauaucaa

SEQ ID NO: 379303 - RNA, 14 nt, Puumala virus
agggaucacuaaug

SEQ ID NO: 379304 - RNA, 14 nt, Puumala virus
aguuaucaggguca

SEQ ID NO: 379305 - RNA, 14 nt, Puumala virus
aguugcaguuauca

SEQ ID NO: 379306 - RNA, 23 nt, Red clover mottle virus
uauuuuaauauaguacuauugug

SEQ ID NO: 379307 - RNA, 19 nt, Red clover mottle virus
ucuugcuugaguguguuau

SEQ ID NO: 379308 - RNA, 22 nt, Red clover mottle virus
ugugauaauauuagcuuuaaag

SEQ ID NO: 379309 - RNA, 18 nt, Red clover mottle virus
ugugguauugcuuuaaag

SEQ ID NO: 379310 - RNA, 22 nt, Red clover mottle virus
uuaauauaguacuauuguggua

SEQ ID NO: 379311 - RNA, 16 nt, Red clover mottle virus
uuacuuuugugauuac

SEQ ID NO: 379312 - RNA, 15 nt, Red clover mottle virus
uugcuuuaaaguuau

SEQ ID NO: 379313 - RNA, 21 nt, Red clover mottle virus
uugugauaauauuagcuuuaa

SEQ ID NO: 379314 - RNA, 18 nt, Red clover mottle virus
uugugauuacuuuguaug

SEQ ID NO: 379315 - RNA, 16 nt, Red clover mottle virus
uugugguauugcuuua

SEQ ID NO: 379316 - RNA, 17 nt, Red clover mottle virus
uuuacaaauuugugaua

SEQ ID NO: 379317 - RNA, 18 nt, Red clover mottle virus
uuuacaaauuugugauaa

SEQ ID NO: 379318 - RNA, 23 nt, Red clover mottle virus
uuugugauaauauuagcuuuaaa

SEQ ID NO: 379319 - RNA, 12 nt, Red clover mottle virus
aaauuugugaua

SEQ ID NO: 379320 - RNA, 15 nt, Red clover mottle virus
aauauuagcuuuaaa

SEQ ID NO: 379321 - RNA, 23 nt, Red clover mottle virus
aguacuauugugguauugcuuua

SEQ ID NO: 379322 - RNA, 15 nt, Red clover mottle virus
auaauauuagcuuua

SEQ ID NO: 379323 - RNA, 17 nt, Red clover mottle virus
auaauauuagcuuuaaa

SEQ ID NO: 379324 - RNA, 14 nt, Red clover mottle virus
auauuagcuuuaaa

SEQ ID NO: 379325 - RNA, 22 nt, Red clover mottle virus
auguuuuuacaaauuugugaua

SEQ ID NO: 379326 - RNA, 19 nt, Red clover mottle virus
cuauugugguauugcuuua

SEQ ID NO: 379327 - RNA, 14 nt, Red clover mottle virus
gcuuuaaaguuauu

SEQ ID NO: 379328 - RNA, 13 nt, Red clover mottle virus
guauugcuuuaaa

SEQ ID NO: 379329 - RNA, 14 nt, Red clover mottle virus
uaauauuagcuuua

SEQ ID NO: 379330 - RNA, 16 nt, Red clover mottle virus
uacaaauuugugauaa

SEQ ID NO: 379331 - RNA, 21 nt, Red clover mottle virus
uacuauugugguauugcuuua

SEQ ID NO: 379332 - RNA, 22 nt, Red clover mottle virus
uacuauugugguauugcuuuaa

SEQ ID NO: 379333 - RNA, 19 nt, Red clover mottle virus
uauaguacuauugugguau

SEQ ID NO: 379334 - RNA, 23 nt, Red clover mottle virus
uauaguacuauugugguauugcu

SEQ ID NO: 379335 - RNA, 20 nt, Red clover mottle virus
ucauuuucuuucuugcuuga

SEQ ID NO: 379336 - RNA, 15 nt, Red clover mottle virus
ucuuuucgugugaug

SEQ ID NO: 379337 - RNA, 23 nt, Red clover mottle virus
ugauaauauuagcuuuaaaguua

SEQ ID NO: 379338 - RNA, 19 nt, Red clover mottle virus
ugguauugcuuuaaaguua

SEQ ID NO: 379339 - RNA, 16 nt, Red clover mottle virus
ugugauaauauuagcu

SEQ ID NO: 379340 - RNA, 14 nt, Red clover mottle virus
ugugauuacuuugu

SEQ ID NO: 379341 - RNA, 17 nt, Red clover mottle virus
uuacaaauuugugauaa

SEQ ID NO: 379342 - RNA, 16 nt, Red clover mottle virus
uuagcuuuaaaguuau

SEQ ID NO: 379343 - RNA, 22 nt, Red clover mottle virus
uucgugugauggcuuacuuuug

SEQ ID NO: 379344 - RNA, 20 nt, Red clover mottle virus
uugugauaauauuagcuuua

SEQ ID NO: 379345 - RNA, 17 nt, Red clover mottle virus
uugugguauugcuuuaa

SEQ ID NO: 379346 - RNA, 19 nt, Red clover mottle virus
uuuacaaauuugugauaau

SEQ ID NO: 379347 - RNA, 12 nt, Red clover mottle virus
uuucgugugaug

SEQ ID NO: 379348 - RNA, 21 nt, Red clover mottle virus
uuuuuacaaauuugugauaau

SEQ ID NO: 379349 - RNA, 22 nt, Red clover mottle virus
acuauugugguauugcuuuaaa

SEQ ID NO: 379350 - RNA, 12 nt, Red clover mottle virus
acuuuugugauu

SEQ ID NO: 379351 - RNA, 20 nt, Red clover mottle virus
auggcuuacuuuugugauua

SEQ ID NO: 379352 - RNA, 13 nt, Red clover mottle virus
caaauuugugaua

SEQ ID NO: 379353 - RNA, 14 nt, Red clover mottle virus
cuuuugugauuacu

SEQ ID NO: 379354 - RNA, 16 nt, Red clover mottle virus
gcuuacuuuugugauu

SEQ ID NO: 379355 - RNA, 16 nt, Red clover mottle virus
gcuugaguguguuauu

SEQ ID NO: 379356 - RNA, 14 nt, Red clover mottle virus
gcuuuaaaguuaug

SEQ ID NO: 379357 - RNA, 14 nt, Red clover mottle virus
gugauuacuuugua

SEQ ID NO: 379358 - RNA, 15 nt, Red clover mottle virus
uaauauuagcuuuaa

SEQ ID NO: 379359 - RNA, 12 nt, Red clover mottle virus
uaguugcauauu

SEQ ID NO: 379360 - RNA, 20 nt, Red clover mottle virus
uauugugguauugcuuuaaa

SEQ ID NO: 379361 - RNA, 20 nt, Red clover mottle virus
uauuuuaauauaguacuauu

SEQ ID NO: 379362 - RNA, 18 nt, Respiratory syncytial virus
aauggcucuuagcaaagu

SEQ ID NO: 379363 - RNA, 22 nt, Respiratory syncytial virus
aauuaccgcaauccuugcugca

SEQ ID NO: 379364 - RNA, 23 nt, Respiratory syncytial virus
aauucaaccauuauaaacccaac

SEQ ID NO: 379365 - RNA, 19 nt, Respiratory syncytial virus
aauucuggccuuacuuuac

SEQ ID NO: 379366 - RNA, 22 nt, Respiratory syncytial virus
aauugaauaccagauuaacuua

SEQ ID NO: 379367 - RNA, 20 nt, Respiratory syncytial virus
aauuuaaauccaaaucuaau

SEQ ID NO: 379368 - RNA, 18 nt, Respiratory syncytial virus
acaaaacaguaaccuugc

SEQ ID NO: 379369 - RNA, 12 nt, Respiratory syncytial virus
acaaaaccacau

SEQ ID NO: 379370 - RNA, 15 nt, Respiratory syncytial virus
acaaaaccacaucaa

SEQ ID NO: 379371 - RNA, 22 nt, Respiratory syncytial virus
acaaaaccacaucaacaucuca

SEQ ID NO: 379372 - RNA, 16 nt, Respiratory syncytial virus
acaaagaaaccauaga

SEQ ID NO: 379373 - RNA, 18 nt, Respiratory syncytial virus
acaaagacugaugaucac

SEQ ID NO: 379374 - RNA, 12 nt, Respiratory syncytial virus
acaacaugcagu

SEQ ID NO: 379375 - RNA, 23 nt, Respiratory syncytial virus
acaaguuaaaucuuaaaucuaua

SEQ ID NO: 379376 - RNA, 16 nt, Respiratory syncytial virus
acaauagaauucucaa

SEQ ID NO: 379377 - RNA, 14 nt, Respiratory syncytial virus
acaaugacaccaca

SEQ ID NO: 379378 - RNA, 20 nt, Respiratory syncytial virus
acacaagagucacacaaucu

SEQ ID NO: 379379 - RNA, 18 nt, Respiratory syncytial virus
acacacaacaccaacaga

SEQ ID NO: 379380 - RNA, 15 nt, Respiratory syncytial virus
acacacuauauuuca

SEQ ID NO: 379381 - RNA, 23 nt, Respiratory syncytial virus
acacucuguuuugcuuccaguca

SEQ ID NO: 379382 - RNA, 16 nt, Respiratory syncytial virus
acagaagaugcuaauc

SEQ ID NO: 379383 - RNA, 20 nt, Respiratory syncytial virus
acagaagaugcuaaucauaa

SEQ ID NO: 379384 - RNA, 20 nt, Respiratory syncytial virus
acagaauugcaguugcucau

SEQ ID NO: 379385 - RNA, 21 nt, Respiratory syncytial virus
acagagcuaccaaauuccuag

SEQ ID NO: 379386 - RNA, 15 nt, Respiratory syncytial virus
acagaugauacugua

SEQ ID NO: 379387 - RNA, 14 nt, Respiratory syncytial virus
acaucaacaucuca

SEQ ID NO: 379388 - RNA, 15 nt, Respiratory syncytial virus
acaucaacaucucac

SEQ ID NO: 379389 - RNA, 16 nt, Respiratory syncytial virus
acaucaacaucucacc

SEQ ID NO: 379390 - RNA, 14 nt, Respiratory syncytial virus
acaucaccuaaaga

SEQ ID NO: 379391 - RNA, 15 nt, Respiratory syncytial virus
acaucaccuaaagau

SEQ ID NO: 379392 - RNA, 18 nt, Respiratory syncytial virus
acaucagugaguugauuc

SEQ ID NO: 379393 - RNA, 15 nt, Respiratory syncytial virus
acauccauaacaaua

SEQ ID NO: 379394 - RNA, 12 nt, Respiratory syncytial virus
acaucucaccau

SEQ ID NO: 379395 - RNA, 15 nt, Respiratory syncytial virus
acaucucaccaugca

SEQ ID NO: 379396 - RNA, 20 nt, Respiratory syncytial virus
acaugagaccauugucacuu

SEQ ID NO: 379397 - RNA, 19 nt, Respiratory syncytial virus
acauggggcaaauaaucau

SEQ ID NO: 379398 - RNA, 19 nt, Respiratory syncytial virus
acauuauccauucuggcaa

SEQ ID NO: 379399 - RNA, 17 nt, Respiratory syncytial virus
accaaaauaaccauaua

SEQ ID NO: 379400 - RNA, 14 nt, Respiratory syncytial virus
accaacucacccau

SEQ ID NO: 379401 - RNA, 18 nt, Respiratory syncytial virus
accacaucaacaucucac

SEQ ID NO: 379402 - RNA, 24 nt, Respiratory syncytial virus
accagagacaucauaacacacaga

SEQ ID NO: 379403 - RNA, 14 nt, Respiratory syncytial virus
accaucauaaucac

SEQ ID NO: 379404 - RNA, 20 nt, Respiratory syncytial virus
accauccaacggagcacagg

SEQ ID NO: 379405 - RNA, 14 nt, Respiratory syncytial virus
accauucaaugaaa

SEQ ID NO: 379406 - RNA, 19 nt, Respiratory syncytial virus
accauucaaugaaauccau

SEQ ID NO: 379407 - RNA, 19 nt, Respiratory syncytial virus
accgcaauccuugcugcag

SEQ ID NO: 379408 - RNA, 18 nt, Respiratory syncytial virus
accuaaagaucccaagaa

SEQ ID NO: 379409 - RNA, 17 nt, Respiratory syncytial virus
accugggacacucucaa

SEQ ID NO: 379410 - RNA, 18 nt, Respiratory syncytial virus
acgaaggcuccacauaca

SEQ ID NO: 379411 - RNA, 14 nt, Respiratory syncytial virus
acuagugaaacaaa

SEQ ID NO: 379412 - RNA, 16 nt, Respiratory syncytial virus
acuauaauaauaucac

SEQ ID NO: 379413 - RNA, 12 nt, Respiratory syncytial virus
acuauacaaaga

SEQ ID NO: 379414 - RNA, 15 nt, Respiratory syncytial virus
acuauguauaaucaa

SEQ ID NO: 379415 - RNA, 16 nt, Respiratory syncytial virus
acuauguauaaucaaa

SEQ ID NO: 379416 - RNA, 15 nt, Respiratory syncytial virus
acuauugcacaaagu

SEQ ID NO: 379417 - RNA, 14 nt, Respiratory syncytial virus
acucaccgaaucaa

SEQ ID NO: 379418 - RNA, 20 nt, Respiratory syncytial virus
acucaccgaaucaaccauuc

SEQ ID NO: 379419 - RNA, 15 nt, Respiratory syncytial virus
acucucaaucaucua

SEQ ID NO: 379420 - RNA, 13 nt, Respiratory syncytial virus
acuuacauuauuu

SEQ ID NO: 379421 - RNA, 20 nt, Respiratory syncytial virus
acuuauaaaagaacuagcua

SEQ ID NO: 379422 - RNA, 21 nt, Respiratory syncytial virus
acuuauaauugcagccaucau

SEQ ID NO: 379423 - RNA, 17 nt, Respiratory syncytial virus
acuuuuagugaacuaau

SEQ ID NO: 379424 - RNA, 22 nt, Respiratory syncytial virus
agaaacauuugauaacaaugaa

SEQ ID NO: 379425 - RNA, 13 nt, Respiratory syncytial virus
agaaaccauagaa

SEQ ID NO: 379426 - RNA, 22 nt, Respiratory syncytial virus
agaagaccaacaaacaaaccaa

SEQ ID NO: 379427 - RNA, 22 nt, Respiratory syncytial virus
agaaguaaccaaagaaagcccu

SEQ ID NO: 379428 - RNA, 14 nt, Respiratory syncytial virus
agacaaaacuuuau

SEQ ID NO: 379429 - RNA, 15 nt, Respiratory syncytial virus
agacaaaacuuuaug

SEQ ID NO: 379430 - RNA, 17 nt, Respiratory syncytial virus
agacaacccaucuauca

SEQ ID NO: 379431 - RNA, 16 nt, Respiratory syncytial virus
agacaggccacauuua

SEQ ID NO: 379432 - RNA, 14 nt, Respiratory syncytial virus
agaccauugucacu

SEQ ID NO: 379433 - RNA, 17 nt, Respiratory syncytial virus
agaccauugucacuuga

SEQ ID NO: 379434 - RNA, 13 nt, Respiratory syncytial virus
agacuaacaauaa

SEQ ID NO: 379435 - RNA, 18 nt, Respiratory syncytial virus
agacuauaauaauaucac

SEQ ID NO: 379436 - RNA, 22 nt, Respiratory syncytial virus
agacugaugaucacagacauga

SEQ ID NO: 379437 - RNA, 21 nt, Respiratory syncytial virus
agaggugucauuuuagucaua

SEQ ID NO: 379438 - RNA, 21 nt, Respiratory syncytial virus
agauacuauaguuacaaaaaa

SEQ ID NO: 379439 - RNA, 20 nt, Respiratory syncytial virus
agauaguaucauaucuguca

SEQ ID NO: 379440 - RNA, 20 nt, Respiratory syncytial virus
agauauagaaguaaccaaag

SEQ ID NO: 379441 - RNA, 21 nt, Respiratory syncytial virus
agaugauacuguagggaacaa

SEQ ID NO: 379442 - RNA, 16 nt, Respiratory syncytial virus
agcaucgauacuuuau

SEQ ID NO: 379443 - RNA, 17 nt, Respiratory syncytial virus
agcaucgauacuuuauc

SEQ ID NO: 379444 - RNA, 14 nt, Respiratory syncytial virus
agccaucauauuca

SEQ ID NO: 379445 - RNA, 17 nt, Respiratory syncytial virus
agccucagaucauccca

SEQ ID NO: 379446 - RNA, 16 nt, Respiratory syncytial virus
agcuaccaaauuccua

SEQ ID NO: 379447 - RNA, 18 nt, Respiratory syncytial virus
agcuauucauaugaagaa

SEQ ID NO: 379448 - RNA, 14 nt, Respiratory syncytial virus
aggaauccuugcaa

SEQ ID NO: 379449 - RNA, 16 nt, Respiratory syncytial virus
aggaggaauaaauuua

SEQ ID NO: 379450 - RNA, 17 nt, Respiratory syncytial virus
agguauguuauaugcua

SEQ ID NO: 379451 - RNA, 13 nt, Respiratory syncytial virus
aguaaccaaagaa

SEQ ID NO: 379452 - RNA, 16 nt, Respiratory syncytial virus
aguaaguuucaaagaa

SEQ ID NO: 379453 - RNA, 19 nt, Respiratory syncytial virus
aguauaaauuccauacuaa

SEQ ID NO: 379454 - RNA, 15 nt, Respiratory syncytial virus
agucaugauaaacuc

SEQ ID NO: 379455 - RNA, 24 nt, Respiratory syncytial virus
agucuauggauaaaagcaucgaua

SEQ ID NO: 379456 - RNA, 17 nt, Respiratory syncytial virus
aguguuauaacuauaga

SEQ ID NO: 379457 - RNA, 20 nt, Respiratory syncytial virus
aguuaauauaaaacuugaca

SEQ ID NO: 379458 - RNA, 19 nt, Respiratory syncytial virus
aguuauauaaaacaauuga

SEQ ID NO: 379459 - RNA, 16 nt, Respiratory syncytial virus
auaaaacaagaauuag

SEQ ID NO: 379460 - RNA, 20 nt, Respiratory syncytial virus
auaaauauaaaagugcugua

SEQ ID NO: 379461 - RNA, 23 nt, Respiratory syncytial virus
auaaauaucaacuagcaaaucaa

SEQ ID NO: 379462 - RNA, 19 nt, Respiratory syncytial virus
auaacaauagaauucucaa

SEQ ID NO: 379463 - RNA, 19 nt, Respiratory syncytial virus
auaacaauggaguugccaa

SEQ ID NO: 379464 - RNA, 23 nt, Respiratory syncytial virus
caaauauggaaacauacgugaac

SEQ ID NO: 379465 - RNA, 16 nt, Respiratory syncytial virus
caaaucacauuaucca

SEQ ID NO: 379466 - RNA, 14 nt, Respiratory syncytial virus
caaaugagacagau

SEQ ID NO: 379467 - RNA, 23 nt, Respiratory syncytial virus
caaaugagacagaugauacugua

SEQ ID NO: 379468 - RNA, 11 nt, Respiratory syncytial virus
caaaugcaaac

SEQ ID NO: 379469 - RNA, 22 nt, Respiratory syncytial virus
caaauggagccugaaaauuaua

SEQ ID NO: 379470 - RNA, 18 nt, Respiratory syncytial virus
caacacaaaauauggcac

SEQ ID NO: 379471 - RNA, 21 nt, Respiratory syncytial virus
caacagagcuaccaaauuccu

SEQ ID NO: 379472 - RNA, 13 nt, Respiratory syncytial virus
caacauacuagug

SEQ ID NO: 379473 - RNA, 16 nt, Respiratory syncytial virus
caacaugcagugcagu

SEQ ID NO: 379474 - RNA, 21 nt, Respiratory syncytial virus
caaccaauggaaaauacaucc

SEQ ID NO: 379475 - RNA, 15 nt, Respiratory syncytial virus
caacccaucuaucau

SEQ ID NO: 379476 - RNA, 18 nt, Respiratory syncytial virus
caacgcaccaccaagaca

SEQ ID NO: 379477 - RNA, 22 nt, Respiratory syncytial virus
caacuagcaaaucaaugucacu

SEQ ID NO: 379478 - RNA, 23 nt, Respiratory syncytial virus
caacuagcaaaucaaugucacua

SEQ ID NO: 379479 - RNA, 14 nt, Respiratory syncytial virus
caacuaugaaauga

SEQ ID NO: 379480 - RNA, 14 nt, Respiratory syncytial virus
caacuucacuuaua

SEQ ID NO: 379481 - RNA, 20 nt, Respiratory syncytial virus
caacuucaugcauaaccaca

SEQ ID NO: 379482 - RNA, 16 nt, Respiratory syncytial virus
caagccaucauccaua

SEQ ID NO: 379483 - RNA, 16 nt, Respiratory syncytial virus
caagcccaauuaucaa

SEQ ID NO: 379484 - RNA, 21 nt, Respiratory syncytial virus
caaggaccaacgcaccaccaa

SEQ ID NO: 379485 - RNA, 18 nt, Respiratory syncytial virus
caagucauuguucaucag

SEQ ID NO: 379486 - RNA, 22 nt, Respiratory syncytial virus
caaguuaaaucuuaaaucuaua

SEQ ID NO: 379487 - RNA, 19 nt, Respiratory syncytial virus
caauaaagggcaaauucac

SEQ ID NO: 379488 - RNA, 15 nt, Respiratory syncytial virus
caauagaauucucaa

SEQ ID NO: 379489 - RNA, 13 nt, Respiratory syncytial virus
caauaucugucaa

SEQ ID NO: 379490 - RNA, 19 nt, Respiratory syncytial virus
caaucaucuauuauucaua

SEQ ID NO: 379491 - RNA, 22 nt, Respiratory syncytial virus
caaucaucuauuauucauauca

SEQ ID NO: 379492 - RNA, 17 nt, Respiratory syncytial virus
caauccuugcugcaguc

SEQ ID NO: 379493 - RNA, 22 nt, Respiratory syncytial virus
caaugacaccacaccacaaaga

SEQ ID NO: 379494 - RNA, 13 nt, Respiratory syncytial virus
caaugauaaucuc

SEQ ID NO: 379495 - RNA, 15 nt, Respiratory syncytial virus
caaugauaaucucaa

SEQ ID NO: 379496 - RNA, 21 nt, Respiratory syncytial virus
caaugauaaucucaacuucac

SEQ ID NO: 379497 - RNA, 17 nt, Respiratory syncytial virus
caauggaccuucauuaa

SEQ ID NO: 379498 - RNA, 16 nt, Respiratory syncytial virus
caaugguuucauaucu

SEQ ID NO: 379499 - RNA, 18 nt, Respiratory syncytial virus
caaugguuucauaucugc

SEQ ID NO: 379500 - RNA, 14 nt, Respiratory syncytial virus
caaugucuuagaaa

SEQ ID NO: 379501 - RNA, 16 nt, Respiratory syncytial virus
cacaaaauauggcacu

SEQ ID NO: 379502 - RNA, 22 nt, Respiratory syncytial virus
cacacagauuuauauacuugau

SEQ ID NO: 379503 - RNA, 15 nt, Respiratory syncytial virus
cacacuauauuucaa

SEQ ID NO: 379504 - RNA, 19 nt, Respiratory syncytial virus
cacacuauauuucaaucaa

SEQ ID NO: 379505 - RNA, 23 nt, Respiratory syncytial virus
cacauacacagcugcuguucaau

SEQ ID NO: 379506 - RNA, 16 nt, Respiratory syncytial virus
cacaucaacaucucac

SEQ ID NO: 379507 - RNA, 18 nt, Respiratory syncytial virus
cacccauccaaccaaaca

SEQ ID NO: 379508 - RNA, 14 nt, Respiratory syncytial virus
caccucuuuacaaa

SEQ ID NO: 379509 - RNA, 18 nt, Respiratory syncytial virus
cacgaaggcuccacauac

SEQ ID NO: 379510 - RNA, 21 nt, Respiratory syncytial virus
cacuaauacacaugauaacaa

SEQ ID NO: 379511 - RNA, 23 nt, Respiratory syncytial virus
cacuaauacacaugauaacaaca

SEQ ID NO: 379512 - RNA, 14 nt, Respiratory syncytial virus
cacuauauuucaau

SEQ ID NO: 379513 - RNA, 16 nt, Respiratory syncytial virus
cacucucaaucaucua

SEQ ID NO: 379514 - RNA, 19 nt, Respiratory syncytial virus
cacugaagaauuuuaucaa

SEQ ID NO: 379515 - RNA, 17 nt, Respiratory syncytial virus
cacugcuuguaagacaa

SEQ ID NO: 379516 - RNA, 18 nt, Respiratory syncytial virus
cacugcuuguaagacaaa

SEQ ID NO: 379517 - RNA, 22 nt, Respiratory syncytial virus
cacuuauaauugcagccaucau

SEQ ID NO: 379518 - RNA, 22 nt, Respiratory syncytial virus
cagagacaucauaacacacaga

SEQ ID NO: 379519 - RNA, 16 nt, Respiratory syncytial virus
cagauuuacuuauaaa

SEQ ID NO: 379520 - RNA, 17 nt, Respiratory syncytial virus
cagcugcuguucaauac

SEQ ID NO: 379521 - RNA, 16 nt, Respiratory syncytial virus
caguugcucaugcaaa

SEQ ID NO: 379522 - RNA, 20 nt, Respiratory syncytial virus
cauaacaauagaauucucaa

SEQ ID NO: 379523 - RNA, 15 nt, Respiratory syncytial virus
cauaagaugaaagau

SEQ ID NO: 379524 - RNA, 17 nt, Respiratory syncytial virus
cauacuaauaacaagua

SEQ ID NO: 379525 - RNA, 21 nt, Respiratory syncytial virus
cauagccucggcaaaccacaa

SEQ ID NO: 379526 - RNA, 18 nt, Respiratory syncytial virus
caucaacacacaacacca

SEQ ID NO: 379527 - RNA, 13 nt, Respiratory syncytial virus
caucaacaucuca

SEQ ID NO: 379528 - RNA, 21 nt, Respiratory syncytial virus
caucaacaucucaccaugcaa

SEQ ID NO: 379529 - RNA, 12 nt, Respiratory syncytial virus
caucacuuacaa

SEQ ID NO: 379530 - RNA, 21 nt, Respiratory syncytial virus
caucauaaucaccaacccucu

SEQ ID NO: 379531 - RNA, 18 nt, Respiratory syncytial virus
caucauauucauagccuc

SEQ ID NO: 379532 - RNA, 23 nt, Respiratory syncytial virus
caucauauucauagccucggcaa

SEQ ID NO: 379533 - RNA, 14 nt, Respiratory syncytial virus
caucaugauugcaa

SEQ ID NO: 379534 - RNA, 22 nt, Respiratory syncytial virus
caucaugauugcaauacugaac

SEQ ID NO: 379535 - RNA, 18 nt, Respiratory syncytial virus
cauccaaccaaacaucua

SEQ ID NO: 379536 - RNA, 19 nt, Respiratory syncytial virus
cauccagcaaauacaccau

SEQ ID NO: 379537 - RNA, 14 nt, Respiratory syncytial virus
cauccauaacaaua

SEQ ID NO: 379538 - RNA, 15 nt, Respiratory syncytial virus
caucgauacuuuauc

SEQ ID NO: 379539 - RNA, 14 nt, Respiratory syncytial virus
caucuauacgccaa

SEQ ID NO: 379540 - RNA, 19 nt, Respiratory syncytial virus
caucuauuauucauaucau

SEQ ID NO: 379541 - RNA, 14 nt, Respiratory syncytial virus
caucucaccaugca

SEQ ID NO: 379542 - RNA, 17 nt, Respiratory syncytial virus
caucucaccaugcaagc

SEQ ID NO: 379543 - RNA, 22 nt, Respiratory syncytial virus
caugauaacaacaauaaucucu

SEQ ID NO: 379544 - RNA, 17 nt, Respiratory syncytial virus
cauggagaagaugcaaa

SEQ ID NO: 379545 - RNA, 17 nt, Respiratory syncytial virus
cauguuauuaaucacag

SEQ ID NO: 379546 - RNA, 17 nt, Respiratory syncytial virus
cauguucuuacaauggu

SEQ ID NO: 379547 - RNA, 15 nt, Respiratory syncytial virus
cauuauaaacccaac

SEQ ID NO: 379548 - RNA, 22 nt, Respiratory syncytial virus
cauucuggcaaugauaaucuca

SEQ ID NO: 379549 - RNA, 12 nt, Respiratory syncytial virus
ccaaaacuagcc

SEQ ID NO: 379550 - RNA, 15 nt, Respiratory syncytial virus
ccaacgcaccaccaa

SEQ ID NO: 379551 - RNA, 10 nt, Respiratory syncytial virus
ccaacuaauc

SEQ ID NO: 379552 - RNA, 16 nt, Respiratory syncytial virus
ccaacucacccaucca

SEQ ID NO: 379553 - RNA, 18 nt, Respiratory syncytial virus
ccaauggaaaauacaucc

SEQ ID NO: 379554 - RNA, 15 nt, Respiratory syncytial virus
ccaauuaucaaagaa

SEQ ID NO: 379555 - RNA, 12 nt, Respiratory syncytial virus
ccacaucaucaa

SEQ ID NO: 379556 - RNA, 21 nt, Respiratory syncytial virus
ccagagacaucauaacacaca

SEQ ID NO: 379557 - RNA, 22 nt, Respiratory syncytial virus
ccagagacaucauaacacacag

SEQ ID NO: 379558 - RNA, 23 nt, Respiratory syncytial virus
ccagagacaucauaacacacaga

SEQ ID NO: 379559 - RNA, 17 nt, Respiratory syncytial virus
ccagcaaauacaccauc

SEQ ID NO: 379560 - RNA, 20 nt, Respiratory syncytial virus
ccauaaaaauacucagagau

SEQ ID NO: 379561 - RNA, 13 nt, Respiratory syncytial virus
ccaucauccauau

SEQ ID NO: 379562 - RNA, 19 nt, Respiratory syncytial virus
ccaucauccauauuauaaa

SEQ ID NO: 379563 - RNA, 18 nt, Respiratory syncytial virus
ccauggacacaacacaca

SEQ ID NO: 379564 - RNA, 21 nt, Respiratory syncytial virus
ccauggacacaacacacaaug

SEQ ID NO: 379565 - RNA, 19 nt, Respiratory syncytial virus
ccauucaaugaaauccauu

SEQ ID NO: 379566 - RNA, 16 nt, Respiratory syncytial virus
gcuaaucauaaucucc

SEQ ID NO: 379567 - RNA, 18 nt, Respiratory syncytial virus
gcuccacauacacagcug

SEQ ID NO: 379568 - RNA, 16 nt, Respiratory syncytial virus
ggaaauccaacuaauc

SEQ ID NO: 379569 - RNA, 16 nt, Respiratory syncytial virus
ggaagagaagacacca

SEQ ID NO: 379570 - RNA, 12 nt, Respiratory syncytial virus
ggagcacaggag

SEQ ID NO: 379571 - RNA, 21 nt, Respiratory syncytial virus
ggcaaauaaaacaucauggaa

SEQ ID NO: 379572 - RNA, 16 nt, Respiratory syncytial virus
ggcaaauucacaucac

SEQ ID NO: 379573 - RNA, 17 nt, Respiratory syncytial virus
ggcaaugauaaucucaa

SEQ ID NO: 379574 - RNA, 21 nt, Respiratory syncytial virus
ggcauguuauuaaucacagaa

SEQ ID NO: 379575 - RNA, 19 nt, Respiratory syncytial virus
gguaagaggugucauuuua

SEQ ID NO: 379576 - RNA, 22 nt, Respiratory syncytial virus
ggugucauuuuagucauaauua

SEQ ID NO: 379577 - RNA, 21 nt, Respiratory syncytial virus
guauaaauuccauacuaauaa

SEQ ID NO: 379578 - RNA, 23 nt, Respiratory syncytial virus
guaucauaucugucaacucaaua

SEQ ID NO: 379579 - RNA, 16 nt, Respiratory syncytial virus
gucacuugagacuaua

SEQ ID NO: 379580 - RNA, 17 nt, Respiratory syncytial virus
gugcagaaacacaucaa

SEQ ID NO: 379581 - RNA, 15 nt, Respiratory syncytial virus
guucaacuaaucaaa

SEQ ID NO: 379582 - RNA, 18 nt, Respiratory syncytial virus
guugaaugauacacucaa

SEQ ID NO: 379583 - RNA, 18 nt, Respiratory syncytial virus
uaaaaaaaauggggcaaa

SEQ ID NO: 379584 - RNA, 14 nt, Respiratory syncytial virus
uaaaaauaaucaua

SEQ ID NO: 379585 - RNA, 13 nt, Respiratory syncytial virus
uaaaacaagaauu

SEQ ID NO: 379586 - RNA, 16 nt, Respiratory syncytial virus
uaaaagugcuguaaca

SEQ ID NO: 379587 - RNA, 13 nt, Respiratory syncytial virus
uaaaauugauaaa

SEQ ID NO: 379588 - RNA, 14 nt, Respiratory syncytial virus
uaaagaucccaaga

SEQ ID NO: 379589 - RNA, 15 nt, Respiratory syncytial virus
uaaagggcaaauuca

SEQ ID NO: 379590 - RNA, 18 nt, Respiratory syncytial virus
uaaagggcaaauucacau

SEQ ID NO: 379591 - RNA, 19 nt, Respiratory syncytial virus
uaaauucacuggguuaaua

SEQ ID NO: 379592 - RNA, 22 nt, Respiratory syncytial virus
uaaauuuaaauccaaaucuaau

SEQ ID NO: 379593 - RNA, 18 nt, Respiratory syncytial virus
uaacaacuucaugcauaa

SEQ ID NO: 379594 - RNA, 15 nt, Respiratory syncytial virus
uaacagaauugcagu

SEQ ID NO: 379595 - RNA, 22 nt, Respiratory syncytial virus
uaacagaauugcaguugcucau

SEQ ID NO: 379596 - RNA, 16 nt, Respiratory syncytial virus
uaacaucaaauucaac

SEQ ID NO: 379597 - RNA, 16 nt, Respiratory syncytial virus
uaaccauauauacuca

SEQ ID NO: 379598 - RNA, 13 nt, Respiratory syncytial virus
uaaguaauaucaa

SEQ ID NO: 379599 - RNA, 23 nt, Respiratory syncytial virus
uaaucacagaagaugcuaaucau

SEQ ID NO: 379600 - RNA, 14 nt, Respiratory syncytial virus
uaaucauaaucucc

SEQ ID NO: 379601 - RNA, 17 nt, Respiratory syncytial virus
uaauuaaaaauaaucau

SEQ ID NO: 379602 - RNA, 22 nt, Respiratory syncytial virus
uaauuaaaaauaaucauaacaa

SEQ ID NO: 379603 - RNA, 23 nt, Respiratory syncytial virus
uaauuuaaaauuaaggagagaca

SEQ ID NO: 379604 - RNA, 23 nt, Respiratory syncytial virus
uacaaaaauggcucuuagcaaag

SEQ ID NO: 379605 - RNA, 13 nt, Respiratory syncytial virus
uacaaaaccacau

SEQ ID NO: 379606 - RNA, 23 nt, Respiratory syncytial virus
uacaaacuuucuaccuacauucu

SEQ ID NO: 379607 - RNA, 16 nt, Respiratory syncytial virus
uacauccauaacaaua

SEQ ID NO: 379608 - RNA, 23 nt, Respiratory syncytial virus
uacauuccuggucaacuaugaaa

SEQ ID NO: 379609 - RNA, 14 nt, Respiratory syncytial virus
uacgugaacaaacu

SEQ ID NO: 379610 - RNA, 20 nt, Respiratory syncytial virus
uacugaauacaacacaaaau

SEQ ID NO: 379611 - RNA, 20 nt, Respiratory syncytial virus
uacugaugauauauacacaa

SEQ ID NO: 379612 - RNA, 18 nt, Respiratory syncytial virus
uagaaacauuugauaaca

SEQ ID NO: 379613 - RNA, 22 nt, Respiratory syncytial virus
uagauauagaaguaaccaaaga

SEQ ID NO: 379614 - RNA, 12 nt, Respiratory syncytial virus
uagcacaaauca

SEQ ID NO: 379615 - RNA, 13 nt, Respiratory syncytial virus
uagcacaaaucac

SEQ ID NO: 379616 - RNA, 15 nt, Respiratory syncytial virus
uagcacaaaucacau

SEQ ID NO: 379617 - RNA, 19 nt, Respiratory syncytial virus
uagcacaaaucacauuauc

SEQ ID NO: 379618 - RNA, 24 nt, Respiratory syncytial virus
uagccucggcaaaccacaaaguca

SEQ ID NO: 379619 - RNA, 20 nt, Respiratory syncytial virus
uaggaagagaagacaccaua

SEQ ID NO: 379620 - RNA, 16 nt, Respiratory syncytial virus
uaguauaaauuccaua

SEQ ID NO: 379621 - RNA, 16 nt, Respiratory syncytial virus
uaguauugauacuccu

SEQ ID NO: 379622 - RNA, 18 nt, Respiratory syncytial virus
uaguuaauauaaaacuug

SEQ ID NO: 379623 - RNA, 11 nt, Respiratory syncytial virus
uauaacaucaa

SEQ ID NO: 379624 - RNA, 14 nt, Respiratory syncytial virus
uauaauaaauauca

SEQ ID NO: 379625 - RNA, 20 nt, Respiratory syncytial virus
uauacaaagaaaccauagaa

SEQ ID NO: 379626 - RNA, 21 nt, Respiratory syncytial virus
uauacuugauaaaucaugaau

SEQ ID NO: 379627 - RNA, 16 nt, Respiratory syncytial virus
uauauauuagugucau

SEQ ID NO: 379628 - RNA, 21 nt, Respiratory syncytial virus
uaucauaucugucaacucaau

SEQ ID NO: 379629 - RNA, 19 nt, Respiratory syncytial virus
uaucugucaacauagacaa

SEQ ID NO: 379630 - RNA, 15 nt, Respiratory syncytial virus
uauuauucauaucau

SEQ ID NO: 379631 - RNA, 21 nt, Respiratory syncytial virus
ucaaaacaucacugaagaauu

SEQ ID NO: 379632 - RNA, 18 nt, Respiratory syncytial virus
ucaaaacuauacaaagaa

SEQ ID NO: 379633 - RNA, 19 nt, Respiratory syncytial virus
ucaaaacuauacaaagaaa

SEQ ID NO: 379634 - RNA, 16 nt, Respiratory syncytial virus
ucaaacaacaugcagu

SEQ ID NO: 379635 - RNA, 21 nt, Respiratory syncytial virus
ucaaacaacaugcagugcagu

SEQ ID NO: 379636 - RNA, 19 nt, Respiratory syncytial virus
ucaaacuauuaacucaaac

SEQ ID NO: 379637 - RNA, 17 nt, Respiratory syncytial virus
ucaacauacuagugaaa

SEQ ID NO: 379638 - RNA, 18 nt, Respiratory syncytial virus
ucaacaucucaccaugca

SEQ ID NO: 379639 - RNA, 19 nt, Respiratory syncytial virus
ucaacaucucaccaugcaa

SEQ ID NO: 379640 - RNA, 12 nt, Respiratory syncytial virus
ucaacuaaucaa

SEQ ID NO: 379641 - RNA, 16 nt, Respiratory syncytial virus
ucaacuagcaaaucaa

SEQ ID NO: 379642 - RNA, 22 nt, Respiratory syncytial virus
ucaacuagcaaaucaaugucac

SEQ ID NO: 379643 - RNA, 20 nt, Respiratory syncytial virus
ucaaggaaaauaaguguaau

SEQ ID NO: 379644 - RNA, 23 nt, Respiratory syncytial virus
ucaaucaucuauuauucauauca

SEQ ID NO: 379645 - RNA, 15 nt, Respiratory syncytial virus
ucaaugaaauccauu

SEQ ID NO: 379646 - RNA, 16 nt, Respiratory syncytial virus
ucacaauaucugucaa

SEQ ID NO: 379647 - RNA, 19 nt, Respiratory syncytial virus
ucacagaagaugcuaauca

SEQ ID NO: 379648 - RNA, 18 nt, Respiratory syncytial virus
ucaccaugcaagccauca

SEQ ID NO: 379649 - RNA, 19 nt, Respiratory syncytial virus
ucaccucuuuacaaaacca

SEQ ID NO: 379650 - RNA, 15 nt, Respiratory syncytial virus
ucacuuacauuauuu

SEQ ID NO: 379651 - RNA, 17 nt, Respiratory syncytial virus
ucacuuacauuauuuaa

SEQ ID NO: 379652 - RNA, 22 nt, Respiratory syncytial virus
ucacuuauaauugcagccauca

SEQ ID NO: 379653 - RNA, 13 nt, Respiratory syncytial virus
ucauaacacucaa

SEQ ID NO: 379654 - RNA, 13 nt, Respiratory syncytial virus
ucauccagcaaau

SEQ ID NO: 379655 - RNA, 13 nt, Respiratory syncytial virus
ucauccauauuau

SEQ ID NO: 379656 - RNA, 14 nt, Respiratory syncytial virus
uccaaaacuagcca

SEQ ID NO: 379657 - RNA, 14 nt, Respiratory syncytial virus
uccaacuaaucaca

SEQ ID NO: 379658 - RNA, 16 nt, Respiratory syncytial virus
uccaacuaaucacaau

SEQ ID NO: 379659 - RNA, 18 nt, Respiratory syncytial virus
uccaaucauccaugccag

SEQ ID NO: 379660 - RNA, 13 nt, Respiratory syncytial virus
uccauaguucaaa

SEQ ID NO: 379661 - RNA, 13 nt, Respiratory syncytial virus
uccauucuggcaa

SEQ ID NO: 379662 - RNA, 17 nt, Respiratory syncytial virus
uccauuggaccucucaa

SEQ ID NO: 379663 - RNA, 18 nt, Respiratory syncytial virus
uccuaaugcuuaccacau

SEQ ID NO: 379664 - RNA, 19 nt, Respiratory syncytial virus
ucuaguaaguuucaaagaa

SEQ ID NO: 379665 - RNA, 22 nt, Respiratory syncytial virus
ucuaguaaguuucaaagaagac

SEQ ID NO: 379666 - RNA, 17 nt, Respiratory syncytial virus
ucuauaaaccaucucac

SEQ ID NO: 379667 - RNA, 19 nt, Respiratory syncytial virus
ucuauacgccaaucagcca

SEQ ID NO: 379668 - RNA, 20 nt, Respiratory syncytial virus
aggcuaucuuagugcucuaa

SEQ ID NO: 379669 - RNA, 15 nt, Respiratory syncytial virus
aggcuccacauacac

SEQ ID NO: 379670 - RNA, 14 nt, Respiratory syncytial virus
agggcaaauucaca

SEQ ID NO: 379671 - RNA, 17 nt, Respiratory syncytial virus
agucauuguucaucaga

SEQ ID NO: 379672 - RNA, 17 nt, Respiratory syncytial virus
agugucauaacacucaa

SEQ ID NO: 379673 - RNA, 18 nt, Respiratory syncytial virus
aguugaaugauacacuca

SEQ ID NO: 379674 - RNA, 19 nt, Respiratory syncytial virus
aguugaaugauacacucaa

SEQ ID NO: 379675 - RNA, 16 nt, Respiratory syncytial virus
auaacaacuucaugca

SEQ ID NO: 379676 - RNA, 14 nt, Respiratory syncytial virus
auaaccacacucca

SEQ ID NO: 379677 - RNA, 20 nt, Respiratory syncytial virus
auaacuuuuagugaacuaau

SEQ ID NO: 379678 - RNA, 18 nt, Respiratory syncytial virus
auaauaucacuaaccaga

SEQ ID NO: 379679 - RNA, 15 nt, Respiratory syncytial virus
auaaucauaacaaug

SEQ ID NO: 379680 - RNA, 16 nt, Respiratory syncytial virus
auaaucucuuugcuaa

SEQ ID NO: 379681 - RNA, 22 nt, Respiratory syncytial virus
auaauugcagccaucauauuca

SEQ ID NO: 379682 - RNA, 17 nt, Respiratory syncytial virus
auacaaagaaaccauag

SEQ ID NO: 379683 - RNA, 14 nt, Respiratory syncytial virus
auacacaugauaac

SEQ ID NO: 379684 - RNA, 21 nt, Respiratory syncytial virus
auacacaugauaacaacaaua

SEQ ID NO: 379685 - RNA, 15 nt, Respiratory syncytial virus
auacauccauaacaa

SEQ ID NO: 379686 - RNA, 17 nt, Respiratory syncytial virus
auacauccauaacaaua

SEQ ID NO: 379687 - RNA, 16 nt, Respiratory syncytial virus
auagaaguaaccaaag

SEQ ID NO: 379688 - RNA, 19 nt, Respiratory syncytial virus
auagccucggcaaaccaca

SEQ ID NO: 379689 - RNA, 21 nt, Respiratory syncytial virus
auaguucaaauggagccugaa

SEQ ID NO: 379690 - RNA, 13 nt, Respiratory syncytial virus
auaucugcucaua

SEQ ID NO: 379691 - RNA, 12 nt, Respiratory syncytial virus
auauuaagacua

SEQ ID NO: 379692 - RNA, 22 nt, Respiratory syncytial virus
auauuagugucauaacacucaa

SEQ ID NO: 379693 - RNA, 13 nt, Respiratory syncytial virus
auauuucaaucaa

SEQ ID NO: 379694 - RNA, 17 nt, Respiratory syncytial virus
aucaaacaacaugcagu

SEQ ID NO: 379695 - RNA, 22 nt, Respiratory syncytial virus
aucaaacaacaugcagugcagu

SEQ ID NO: 379696 - RNA, 12 nt, Respiratory syncytial virus
aucaacaucuca

SEQ ID NO: 379697 - RNA, 13 nt, Respiratory syncytial virus
aucaacaucucac

SEQ ID NO: 379698 - RNA, 19 nt, Respiratory syncytial virus
aucaacaucucaccaugca

SEQ ID NO: 379699 - RNA, 21 nt, Respiratory syncytial virus
aucaaggaaaauaaguguaau

SEQ ID NO: 379700 - RNA, 13 nt, Respiratory syncytial virus
aucaaugucacua

SEQ ID NO: 379701 - RNA, 21 nt, Respiratory syncytial virus
aucacuaaccagagacaucau

SEQ ID NO: 379702 - RNA, 22 nt, Respiratory syncytial virus
aucagugaguugauucauacaa

SEQ ID NO: 379703 - RNA, 19 nt, Respiratory syncytial virus
aucauaucugucaacucaa

SEQ ID NO: 379704 - RNA, 16 nt, Respiratory syncytial virus
aucaucccaagucauu

SEQ ID NO: 379705 - RNA, 21 nt, Respiratory syncytial virus
aucaugauugcaauacugaac

SEQ ID NO: 379706 - RNA, 19 nt, Respiratory syncytial virus
aucauuggaggaaauccaa

SEQ ID NO: 379707 - RNA, 13 nt, Respiratory syncytial virus
auccaaccaaaca

SEQ ID NO: 379708 - RNA, 20 nt, Respiratory syncytial virus
auccauucuggcaaugauaa

SEQ ID NO: 379709 - RNA, 16 nt, Respiratory syncytial virus
auccucaaaacaaaug

SEQ ID NO: 379710 - RNA, 16 nt, Respiratory syncytial virus
auccuugcaaauuuga

SEQ ID NO: 379711 - RNA, 18 nt, Respiratory syncytial virus
aucgaaacucucaucuau

SEQ ID NO: 379712 - RNA, 15 nt, Respiratory syncytial virus
aucuauaaaccaucu

SEQ ID NO: 379713 - RNA, 13 nt, Respiratory syncytial virus
aucuauagcacaa

SEQ ID NO: 379714 - RNA, 15 nt, Respiratory syncytial virus
aucuauagcacaaau

SEQ ID NO: 379715 - RNA, 20 nt, Respiratory syncytial virus
aucuauagcacaaaucacau

SEQ ID NO: 379716 - RNA, 21 nt, Respiratory syncytial virus
aucuaucauuggauuuucuua

SEQ ID NO: 379717 - RNA, 19 nt, Respiratory syncytial virus
aucucaccaugcaagccau

SEQ ID NO: 379718 - RNA, 22 nt, Respiratory syncytial virus
aucucuuugcuaaucauaaucu

SEQ ID NO: 379719 - RNA, 22 nt, Respiratory syncytial virus
aucugaacuucaucgaaacucu

SEQ ID NO: 379720 - RNA, 16 nt, Respiratory syncytial virus
aucugauggcacaaaa

SEQ ID NO: 379721 - RNA, 18 nt, Respiratory syncytial virus
aucugauggcacaaaaca

SEQ ID NO: 379722 - RNA, 18 nt, Respiratory syncytial virus
augaccaaaucaaccaga

SEQ ID NO: 379723 - RNA, 21 nt, Respiratory syncytial virus
augauaacaacaauaaucucu

SEQ ID NO: 379724 - RNA, 13 nt, Respiratory syncytial virus
augcaaacaacag

SEQ ID NO: 379725 - RNA, 13 nt, Respiratory syncytial virus
augcaagccauca

SEQ ID NO: 379726 - RNA, 15 nt, Respiratory syncytial virus
augcuuaccacauca

SEQ ID NO: 379727 - RNA, 13 nt, Respiratory syncytial virus
auggaaacauacg

SEQ ID NO: 379728 - RNA, 14 nt, Respiratory syncytial virus
auggaguugccaau

SEQ ID NO: 379729 - RNA, 17 nt, Respiratory syncytial virus
auggggcaaauaaucau

SEQ ID NO: 379730 - RNA, 23 nt, Respiratory syncytial virus
auguauagugagaaaacuugaug

SEQ ID NO: 379731 - RNA, 16 nt, Respiratory syncytial virus
augucaacauacuagu

SEQ ID NO: 379732 - RNA, 19 nt, Respiratory syncytial virus
augugcagaaacacaucaa

SEQ ID NO: 379733 - RNA, 13 nt, Respiratory syncytial virus
ucgauacuuuauc

SEQ ID NO: 379734 - RNA, 16 nt, Respiratory syncytial virus
ucggcaaaccacaaag

SEQ ID NO: 379735 - RNA, 23 nt, Respiratory syncytial virus
ucuauaaaccaucucacuuacau

SEQ ID NO: 379736 - RNA, 21 nt, Respiratory syncytial virus
ucuaucauuggauuuucuuaa

SEQ ID NO: 379737 - RNA, 16 nt, Respiratory syncytial virus
ucucaaucaucuauua

SEQ ID NO: 379738 - RNA, 15 nt, Respiratory syncytial virus
ucucacuuacauuau

SEQ ID NO: 379739 - RNA, 18 nt, Respiratory syncytial virus
ucuguacaucaacacaca

SEQ ID NO: 379740 - RNA, 22 nt, Respiratory syncytial virus
ucugucaacauagacaagucaa

SEQ ID NO: 379741 - RNA, 13 nt, Respiratory syncytial virus
ucugucaacucaa

SEQ ID NO: 379742 - RNA, 19 nt, Respiratory syncytial virus
ucugugguucaacuaauca

SEQ ID NO: 379743 - RNA, 13 nt, Respiratory syncytial virus
ucuuaaaucuaua

SEQ ID NO: 379744 - RNA, 14 nt, Respiratory syncytial virus
ucuuagcaaaguca

SEQ ID NO: 379745 - RNA, 16 nt, Respiratory syncytial virus
ucuuuacaaaaccaca

SEQ ID NO: 379746 - RNA, 15 nt, Respiratory syncytial virus
ugaaacaaauaucca

SEQ ID NO: 379747 - RNA, 19 nt, Respiratory syncytial virus
ugaaacuauugcacaaagu

SEQ ID NO: 379748 - RNA, 21 nt, Respiratory syncytial virus
ugaaagauggggcaaauacaa

SEQ ID NO: 379749 - RNA, 15 nt, Respiratory syncytial virus
ugaaauaacaacuuc

SEQ ID NO: 379750 - RNA, 15 nt, Respiratory syncytial virus
ugaacuaauccuaaa

SEQ ID NO: 379751 - RNA, 15 nt, Respiratory syncytial virus
ugaauacaacacaaa

SEQ ID NO: 379752 - RNA, 15 nt, Respiratory syncytial virus
ugaauuccauggaga

SEQ ID NO: 379753 - RNA, 12 nt, Respiratory syncytial virus
ugaccaaaucaa

SEQ ID NO: 379754 - RNA, 16 nt, Respiratory syncytial virus
ugaccaaaucaaccag

SEQ ID NO: 379755 - RNA, 17 nt, Respiratory syncytial virus
ugagaaaacuugaugaa

SEQ ID NO: 379756 - RNA, 20 nt, Respiratory syncytial virus
ugagacuauaauaauaucac

SEQ ID NO: 379757 - RNA, 13 nt, Respiratory syncytial virus
ugauaaacucaag

SEQ ID NO: 379758 - RNA, 19 nt, Respiratory syncytial virus
ugauaacaacaauaaucuc

SEQ ID NO: 379759 - RNA, 20 nt, Respiratory syncytial virus
ugauaacaacaauaaucucu

SEQ ID NO: 379760 - RNA, 13 nt, Respiratory syncytial virus
ugauaacaaugaa

SEQ ID NO: 379761 - RNA, 12 nt, Respiratory syncytial virus
ugauacacucaa

SEQ ID NO: 379762 - RNA, 13 nt, Respiratory syncytial virus
ugauauauacaca

SEQ ID NO: 379763 - RNA, 17 nt, Respiratory syncytial virus
ugaucacagacaugaga

SEQ ID NO: 379764 - RNA, 16 nt, Respiratory syncytial virus
ugcaagccaucaucca

SEQ ID NO: 379765 - RNA, 19 nt, Respiratory syncytial virus
ugcaauuaccgcaauccuu

SEQ ID NO: 379766 - RNA, 14 nt, Respiratory syncytial virus
ugcagaaacacauc

SEQ ID NO: 379767 - RNA, 16 nt, Respiratory syncytial virus
ugcagaaacacaucaa

SEQ ID NO: 379768 - RNA, 19 nt, Respiratory syncytial virus
ugcagaaacacaucaauaa

SEQ ID NO: 379769 - RNA, 16 nt, Respiratory syncytial virus
ugcauaaccacacucc

SEQ ID NO: 379770 - RNA, 17 nt, Respiratory syncytial virus
ugcauaaccacacucca

SEQ ID NO: 379771 - RNA, 14 nt, Respiratory syncytial virus
ugcccauguuccaa

SEQ ID NO: 379772 - RNA, 16 nt, Respiratory syncytial virus
ugcuaaucauaaucuc

SEQ ID NO: 379773 - RNA, 17 nt, Respiratory syncytial virus
ugcuaaucauaaucucc

SEQ ID NO: 379774 - RNA, 21 nt, Respiratory syncytial virus
uggacacaacacacaaugaca

SEQ ID NO: 379775 - RNA, 18 nt, Respiratory syncytial virus
uggagaagaugcaaacaa

SEQ ID NO: 379776 - RNA, 14 nt, Respiratory syncytial virus
uggaggaaauccaa

SEQ ID NO: 379777 - RNA, 18 nt, Respiratory syncytial virus
uggcaaugauaaucucaa

SEQ ID NO: 379778 - RNA, 18 nt, Respiratory syncytial virus
ugggaagcacuaaauaca

SEQ ID NO: 379779 - RNA, 14 nt, Respiratory syncytial virus
ugggacacucucaa

SEQ ID NO: 379780 - RNA, 14 nt, Respiratory syncytial virus
uggggcaaauacaa

SEQ ID NO: 379781 - RNA, 14 nt, Respiratory syncytial virus
uggggcaaaugcaa

SEQ ID NO: 379782 - RNA, 14 nt, Respiratory syncytial virus
ugguucaacuaauc

SEQ ID NO: 379783 - RNA, 17 nt, Respiratory syncytial virus
uguagggaacaagccca

SEQ ID NO: 379784 - RNA, 14 nt, Respiratory syncytial virus
uguauaaucaaaag

SEQ ID NO: 379785 - RNA, 19 nt, Respiratory syncytial virus
uguauagugagaaaacuug

SEQ ID NO: 379786 - RNA, 20 nt, Respiratory syncytial virus
ugucacgaaggaauccuugc

SEQ ID NO: 379787 - RNA, 15 nt, Respiratory syncytial virus
ugucacuaacaccau

SEQ ID NO: 379788 - RNA, 18 nt, Respiratory syncytial virus
ugugguucaacuaaucaa

SEQ ID NO: 379789 - RNA, 14 nt, Respiratory syncytial virus
uguuauuaaucaca

SEQ ID NO: 379790 - RNA, 15 nt, Respiratory syncytial virus
uguucaauacaaugu

SEQ ID NO: 379791 - RNA, 22 nt, Respiratory syncytial virus
uuaaaaagcguauuauugcaaa

SEQ ID NO: 379792 - RNA, 16 nt, Respiratory syncytial virus
uuaaacagaauacuua

SEQ ID NO: 379793 - RNA, 13 nt, Respiratory syncytial virus
uuaacucaaacaa

SEQ ID NO: 379794 - RNA, 15 nt, Respiratory syncytial virus
uuaauaaaaauaucc

SEQ ID NO: 379795 - RNA, 22 nt, Respiratory syncytial virus
uuaauuaaaaauaaucauaaca

SEQ ID NO: 379796 - RNA, 13 nt, Respiratory syncytial virus
uuacaaaaccaca

SEQ ID NO: 379797 - RNA, 13 nt, Respiratory syncytial virus
uuauauacuugau

SEQ ID NO: 379798 - RNA, 12 nt, Respiratory syncytial virus
uucaaagaagac

SEQ ID NO: 379799 - RNA, 17 nt, Respiratory syncytial virus
uucacaucaccuaaaga

SEQ ID NO: 379800 - RNA, 22 nt, Respiratory syncytial virus
uucaccaaucugauggcacaaa

SEQ ID NO: 379801 - RNA, 14 nt, Respiratory syncytial virus
uucaccaucauaau

SEQ ID NO: 379802 - RNA, 23 nt, Respiratory syncytial virus
uucacgaaggcuccacauacaca

SEQ ID NO: 379803 - RNA, 23 nt, Respiratory syncytial virus
uucacuuauaauugcagccauca

SEQ ID NO: 379804 - RNA, 21 nt, Respiratory syncytial virus
uucaucagaucuaguacucaa

SEQ ID NO: 379805 - RNA, 22 nt, Respiratory syncytial virus
uucaucgaaacucucaucuaua

SEQ ID NO: 379806 - RNA, 20 nt, Respiratory syncytial virus
uucuggcaaugauaaucuca

SEQ ID NO: 379807 - RNA, 20 nt, Respiratory syncytial virus
uugagacuauaauaauauca

SEQ ID NO: 379808 - RNA, 19 nt, Respiratory syncytial virus
uugccaauccucaaaacaa

SEQ ID NO: 379809 - RNA, 13 nt, Respiratory syncytial virus
uugcucaugcaaa

SEQ ID NO: 379810 - RNA, 16 nt, Respiratory syncytial virus
uugcucaugcaaagca

SEQ ID NO: 379811 - RNA, 18 nt, Respiratory syncytial virus
uuugcuccugaauuccau

SEQ ID NO: 379812 - RNA, 21 nt, Respiratory syncytial virus
uuuuagugaacuaauccuaaa

SEQ ID NO: 379813 - RNA, 22 nt, Respiratory syncytial virus
caaaugcaauuaccgcaauccu

SEQ ID NO: 379814 - RNA, 13 nt, Respiratory syncytial virus
caaauuccuagaa

SEQ ID NO: 379815 - RNA, 13 nt, Respiratory syncytial virus
caacaauaaucuc

SEQ ID NO: 379816 - RNA, 16 nt, Respiratory syncytial virus
caacaaucgagccaga

SEQ ID NO: 379817 - RNA, 19 nt, Respiratory syncytial virus
caacacaaaauauggcacu

SEQ ID NO: 379818 - RNA, 20 nt, Respiratory syncytial virus
caacacacaaugacaccaca

SEQ ID NO: 379819 - RNA, 21 nt, Respiratory syncytial virus
caacaugcagugcagucagca

SEQ ID NO: 379820 - RNA, 19 nt, Respiratory syncytial virus
caaccaaaauaaccauaua

SEQ ID NO: 379821 - RNA, 21 nt, Respiratory syncytial virus
caacccaucuaucauuggauu

SEQ ID NO: 379822 - RNA, 13 nt, Respiratory syncytial virus
caagccaucaucc

SEQ ID NO: 379823 - RNA, 14 nt, Respiratory syncytial virus
caagccaucaucca

SEQ ID NO: 379824 - RNA, 17 nt, Respiratory syncytial virus
caagccaucauccauau

SEQ ID NO: 379825 - RNA, 14 nt, Respiratory syncytial virus
caauaaagggcaaa

SEQ ID NO: 379826 - RNA, 24 nt, Respiratory syncytial virus
caauaugggugcccauguuccaau

SEQ ID NO: 379827 - RNA, 15 nt, Respiratory syncytial virus
caaucauccaugcca

SEQ ID NO: 379828 - RNA, 20 nt, Respiratory syncytial virus
caaucaucuauuauucauau

SEQ ID NO: 379829 - RNA, 23 nt, Respiratory syncytial virus
caauccuaaugcuuaccacauca

SEQ ID NO: 379830 - RNA, 15 nt, Respiratory syncytial virus
caaucuguacaucaa

SEQ ID NO: 379831 - RNA, 14 nt, Respiratory syncytial virus
caaugaaauccauu

SEQ ID NO: 379832 - RNA, 19 nt, Respiratory syncytial virus
caaugacaccacaccacaa

SEQ ID NO: 379833 - RNA, 13 nt, Respiratory syncytial virus
cacacaacaccaa

SEQ ID NO: 379834 - RNA, 17 nt, Respiratory syncytial virus
cacacaacaccaacaga

SEQ ID NO: 379835 - RNA, 23 nt, Respiratory syncytial virus
cacacagauuuauauacuugaua

SEQ ID NO: 379836 - RNA, 21 nt, Respiratory syncytial virus
cacaccacaaagacugaugau

SEQ ID NO: 379837 - RNA, 20 nt, Respiratory syncytial virus
cacacucuguuuugcuucca

SEQ ID NO: 379838 - RNA, 19 nt, Respiratory syncytial virus
cacagauuuauauacuuga

SEQ ID NO: 379839 - RNA, 15 nt, Respiratory syncytial virus
cacaucaacaucuca

SEQ ID NO: 379840 - RNA, 15 nt, Respiratory syncytial virus
cacaucaccuaaaga

SEQ ID NO: 379841 - RNA, 16 nt, Respiratory syncytial virus
caccacaccacaaaga

SEQ ID NO: 379842 - RNA, 15 nt, Respiratory syncytial virus
caccaccaagacacu

SEQ ID NO: 379843 - RNA, 17 nt, Respiratory syncytial virus
caccaugcaagccauca

SEQ ID NO: 379844 - RNA, 18 nt, Respiratory syncytial virus
caccaugcaagccaucau

SEQ ID NO: 379845 - RNA, 19 nt, Respiratory syncytial virus
caccuaaagaucccaagaa

SEQ ID NO: 379846 - RNA, 19 nt, Respiratory syncytial virus
cacgaaggcuccacauaca

SEQ ID NO: 379847 - RNA, 21 nt, Respiratory syncytial virus
cacuuauaauugcagccauca

SEQ ID NO: 379848 - RNA, 15 nt, Respiratory syncytial virus
cagaaacacaucaau

SEQ ID NO: 379849 - RNA, 14 nt, Respiratory syncytial virus
cagaauugcaguug

SEQ ID NO: 379850 - RNA, 23 nt, Respiratory syncytial virus
cagaauugcaguugcucaugcaa

SEQ ID NO: 379851 - RNA, 14 nt, Respiratory syncytial virus
cagagacaucauaa

SEQ ID NO: 379852 - RNA, 19 nt, Respiratory syncytial virus
cagauuuauauacuugaua

SEQ ID NO: 379853 - RNA, 17 nt, Respiratory syncytial virus
cagccaauccaaaacua

SEQ ID NO: 379854 - RNA, 19 nt, Respiratory syncytial virus
cagcugcuguucaauacaa

SEQ ID NO: 379855 - RNA, 16 nt, Respiratory syncytial virus
cauaaccacacuccau

SEQ ID NO: 379856 - RNA, 14 nt, Respiratory syncytial virus
cauacgugaacaaa

SEQ ID NO: 379857 - RNA, 17 nt, Respiratory syncytial virus
cauacuagugaaacaaa

SEQ ID NO: 379858 - RNA, 19 nt, Respiratory syncytial virus
cauacuagugaaacaaaua

SEQ ID NO: 379859 - RNA, 13 nt, Respiratory syncytial virus
cauagacaaguca

SEQ ID NO: 379860 - RNA, 21 nt, Respiratory syncytial virus
cauaucugucaacucaauaga

SEQ ID NO: 379861 - RNA, 22 nt, Respiratory syncytial virus
cauaucugucaacucaauagau

SEQ ID NO: 379862 - RNA, 18 nt, Respiratory syncytial virus
caucaaauucaaccauua

SEQ ID NO: 379863 - RNA, 14 nt, Respiratory syncytial virus
caucaacaucucac

SEQ ID NO: 379864 - RNA, 11 nt, Respiratory syncytial virus
caucauggaaa

SEQ ID NO: 379865 - RNA, 20 nt, Respiratory syncytial virus
cauccagcaaauacaccauc

SEQ ID NO: 379866 - RNA, 18 nt, Respiratory syncytial virus
cauccauauuauaaagua

SEQ ID NO: 379867 - RNA, 18 nt, Respiratory syncytial virus
caucuauuauucauauca

SEQ ID NO: 379868 - RNA, 16 nt, Respiratory syncytial virus
caugauaacaacaaua

SEQ ID NO: 379869 - RNA, 15 nt, Respiratory syncytial virus
caugcagugcaguca

SEQ ID NO: 379870 - RNA, 16 nt, Respiratory syncytial virus
cauggacacaacacac

SEQ ID NO: 379871 - RNA, 23 nt, Respiratory syncytial virus
cauuaaaaagcguauuauugcaa

SEQ ID NO: 379872 - RNA, 21 nt, Respiratory syncytial virus
cauuauaaacccaacaaauga

SEQ ID NO: 379873 - RNA, 11 nt, Respiratory syncytial virus
cauugucacuu

SEQ ID NO: 379874 - RNA, 15 nt, Respiratory syncytial virus
cauugucacuugaga

SEQ ID NO: 379875 - RNA, 22 nt, Respiratory syncytial virus
ccaaaauaaccauauauacuca

SEQ ID NO: 379876 - RNA, 21 nt, Respiratory syncytial virus
ccaacaaacaaaccaacucac

SEQ ID NO: 379877 - RNA, 12 nt, Respiratory syncytial virus
ccaaccaaacau

SEQ ID NO: 379878 - RNA, 17 nt, Respiratory syncytial virus
ccaacucacccauccaa

SEQ ID NO: 379879 - RNA, 16 nt, Respiratory syncytial virus
ccaaucagccaaucca

SEQ ID NO: 379880 - RNA, 16 nt, Respiratory syncytial virus
ccaaucauccaugcca

SEQ ID NO: 379881 - RNA, 16 nt, Respiratory syncytial virus
ccaaucuguacaucaa

SEQ ID NO: 379882 - RNA, 14 nt, Respiratory syncytial virus
ccaauuaucaaaga

SEQ ID NO: 379883 - RNA, 14 nt, Respiratory syncytial virus
ccaucauauucaua

SEQ ID NO: 379884 - RNA, 15 nt, Respiratory syncytial virus
ccaucauauucauag

SEQ ID NO: 379885 - RNA, 13 nt, Respiratory syncytial virus
ccauccaaccaaa

SEQ ID NO: 379886 - RNA, 16 nt, Respiratory syncytial virus
ccaugaccaaaucaac

SEQ ID NO: 379887 - RNA, 19 nt, Respiratory syncytial virus
ccaugcaagccaucaucca

SEQ ID NO: 379888 - RNA, 15 nt, Respiratory syncytial virus
ccauguuccaaucau

SEQ ID NO: 379889 - RNA, 23 nt, Respiratory syncytial virus
ccauucuggcaaugauaaucuca

SEQ ID NO: 379890 - RNA, 13 nt, Respiratory syncytial virus
cccauccaaccaa

SEQ ID NO: 379891 - RNA, 20 nt, Respiratory syncytial virus
cccuauaacaucaaauucaa

SEQ ID NO: 379892 - RNA, 23 nt, Respiratory syncytial virus
cccuuuucaaaacuauacaaaga

SEQ ID NO: 379893 - RNA, 18 nt, Respiratory syncytial virus
ccucaaaacaaaugcaau

SEQ ID NO: 379894 - RNA, 16 nt, Respiratory syncytial virus
ccucggcaaaccacaa

SEQ ID NO: 379895 - RNA, 20 nt, Respiratory syncytial virus
ccucugugguucaacuaauc

SEQ ID NO: 379896 - RNA, 19 nt, Respiratory syncytial virus
ccucuuuacaaaaccacau

SEQ ID NO: 379897 - RNA, 23 nt, Respiratory syncytial virus
cgcaauccuugcugcagucacac

SEQ ID NO: 379898 - RNA, 15 nt, Respiratory syncytial virus
cgccaggcaaaauca

SEQ ID NO: 379899 - RNA, 18 nt, Respiratory syncytial virus
cguauuauugcaaaaagc

SEQ ID NO: 379900 - RNA, 16 nt, Respiratory syncytial virus
cuaaagaucccaagaa

SEQ ID NO: 379901 - RNA, 22 nt, Respiratory syncytial virus
cuaaauacaaaaaauauacuga

SEQ ID NO: 379902 - RNA, 20 nt, Respiratory syncytial virus
cuaagauauuaagacuaaca

SEQ ID NO: 379903 - RNA, 21 nt, Respiratory syncytial virus
cuaagauauuaagacuaacaa

SEQ ID NO: 379904 - RNA, 16 nt, Respiratory syncytial virus
cuaaucauguucuuac

SEQ ID NO: 379905 - RNA, 22 nt, Respiratory syncytial virus
cuaaucauguucuuacaauggu

SEQ ID NO: 379906 - RNA, 16 nt, Respiratory syncytial virus
cuaaugucaacauacu

SEQ ID NO: 379907 - RNA, 21 nt, Respiratory syncytial virus
cuacauucuucacuucaccau

SEQ ID NO: 379908 - RNA, 14 nt, Respiratory syncytial virus
cuagcaaaucaaug

SEQ ID NO: 379909 - RNA, 20 nt, Respiratory syncytial virus
cuaguguuauaacuauagaa

SEQ ID NO: 379910 - RNA, 17 nt, Respiratory syncytial virus
cuauaauaauaucacua

SEQ ID NO: 379911 - RNA, 15 nt, Respiratory syncytial virus
cuauagcacaaauca

SEQ ID NO: 379912 - RNA, 18 nt, Respiratory syncytial virus
cuauagcacaaaucacau

SEQ ID NO: 379913 - RNA, 20 nt, Respiratory syncytial virus
cuaucauuggauuuucuuaa

SEQ ID NO: 379914 - RNA, 22 nt, Respiratory syncytial virus
cuaucauuggauuuucuuaaaa

SEQ ID NO: 379915 - RNA, 17 nt, Respiratory syncytial virus
uaaaaauaaucauaaca

SEQ ID NO: 379916 - RNA, 13 nt, Respiratory syncytial virus
uaaaaauacucag

SEQ ID NO: 379917 - RNA, 20 nt, Respiratory syncytial virus
uaaaagugcuguaacagaau

SEQ ID NO: 379918 - RNA, 18 nt, Respiratory syncytial virus
uaaaccaucucacuuaca

SEQ ID NO: 379919 - RNA, 21 nt, Respiratory syncytial virus
uaaagaucccaagaaaaaaga

SEQ ID NO: 379920 - RNA, 18 nt, Respiratory syncytial virus
uaaauauaaaagugcugu

SEQ ID NO: 379921 - RNA, 16 nt, Respiratory syncytial virus
uaaaucuauagcacaa

SEQ ID NO: 379922 - RNA, 17 nt, Respiratory syncytial virus
uaaaucuuaaaucuaua

SEQ ID NO: 379923 - RNA, 18 nt, Respiratory syncytial virus
uaacaauagaauucucaa

SEQ ID NO: 379924 - RNA, 21 nt, Respiratory syncytial virus
uaacaauggaguugccaaucc

SEQ ID NO: 379925 - RNA, 12 nt, Respiratory syncytial virus
uaacacucaauc

SEQ ID NO: 379926 - RNA, 15 nt, Respiratory syncytial virus
uaacacucaauccua

SEQ ID NO: 379927 - RNA, 10 nt, Respiratory syncytial virus
uaaccaaaga

SEQ ID NO: 379928 - RNA, 15 nt, Respiratory syncytial virus
uaaccagagacauca

SEQ ID NO: 379929 - RNA, 17 nt, Respiratory syncytial virus
uaaccauauauacucac

SEQ ID NO: 379930 - RNA, 17 nt, Respiratory syncytial virus
uaagacaaaacuuuaug

SEQ ID NO: 379931 - RNA, 24 nt, Respiratory syncytial virus
uaagauauuaagacuaacaauaac

SEQ ID NO: 379932 - RNA, 15 nt, Respiratory syncytial virus
uaaucacaauaucug

SEQ ID NO: 379933 - RNA, 21 nt, Respiratory syncytial virus
uaaucauuggaggaaauccaa

SEQ ID NO: 379934 - RNA, 15 nt, Respiratory syncytial virus
uaaugucaacauacu

SEQ ID NO: 379935 - RNA, 23 nt, Respiratory syncytial virus
uaauuaugaugugcagaaacaca

SEQ ID NO: 379936 - RNA, 22 nt, Respiratory syncytial virus
uaauugcagccaucauauucau

SEQ ID NO: 379937 - RNA, 12 nt, Respiratory syncytial virus
uacaaaaauggc

SEQ ID NO: 379938 - RNA, 15 nt, Respiratory syncytial virus
uacaaaaccacauca

SEQ ID NO: 379939 - RNA, 20 nt, Respiratory syncytial virus
uacaacacaaaauauggcac

SEQ ID NO: 379940 - RNA, 16 nt, Respiratory syncytial virus
uacaacaucuagguau

SEQ ID NO: 379941 - RNA, 22 nt, Respiratory syncytial virus
uacaaugguuucauaucugcuc

SEQ ID NO: 379942 - RNA, 19 nt, Respiratory syncytial virus
uacacagcugcuguucaau

SEQ ID NO: 379943 - RNA, 21 nt, Respiratory syncytial virus
uacacaugauaacaacaauaa

SEQ ID NO: 379944 - RNA, 22 nt, Respiratory syncytial virus
uacacaugauaacaacaauaau

SEQ ID NO: 379945 - RNA, 14 nt, Respiratory syncytial virus
uacauccauaacaa

SEQ ID NO: 379946 - RNA, 18 nt, Respiratory syncytial virus
uaccaaucuguacaucaa

SEQ ID NO: 379947 - RNA, 17 nt, Respiratory syncytial virus
uacuagugaaacaaaua

SEQ ID NO: 379948 - RNA, 16 nt, Respiratory syncytial virus
uacucaccgaaucaac

SEQ ID NO: 379949 - RNA, 13 nt, Respiratory syncytial virus
uacuccuaauuau

SEQ ID NO: 379950 - RNA, 16 nt, Respiratory syncytial virus
uacuuaagucuaugga

SEQ ID NO: 379951 - RNA, 13 nt, Respiratory syncytial virus
uagaaaagaccug

SEQ ID NO: 379952 - RNA, 16 nt, Respiratory syncytial virus
uagaaguaaccaaaga

SEQ ID NO: 379953 - RNA, 20 nt, Respiratory syncytial virus
uagaaucaauaaagggcaaa

SEQ ID NO: 379954 - RNA, 13 nt, Respiratory syncytial virus
uagcuaaugucaa

SEQ ID NO: 379955 - RNA, 17 nt, Respiratory syncytial virus
uaguaaguuucaaagaa

SEQ ID NO: 379956 - RNA, 21 nt, Respiratory syncytial virus
uaguauaaauuccauacuaau

SEQ ID NO: 379957 - RNA, 19 nt, Respiratory syncytial virus
uagugaaacaaauauccac

SEQ ID NO: 379958 - RNA, 23 nt, Respiratory syncytial virus
uaguguuauaacuauagaauuaa

SEQ ID NO: 379959 - RNA, 12 nt, Respiratory syncytial virus
uaguuaauauaa

SEQ ID NO: 379960 - RNA, 14 nt, Respiratory syncytial virus
uauaaaccaucuca

SEQ ID NO: 379961 - RNA, 15 nt, Respiratory syncytial virus
uauaaacccaacaaa

SEQ ID NO: 379962 - RNA, 18 nt, Respiratory syncytial virus
uauaaauuccauacuaau

SEQ ID NO: 379963 - RNA, 15 nt, Respiratory syncytial virus
uauaauugcagccau

SEQ ID NO: 379964 - RNA, 17 nt, Respiratory syncytial virus
uauaauugcagccauca

SEQ ID NO: 379965 - RNA, 23 nt, Respiratory syncytial virus
uauaauugcagccaucauauuca

SEQ ID NO: 379966 - RNA, 22 nt, Respiratory syncytial virus
uauacugaauacaacacaaaau

SEQ ID NO: 379967 - RNA, 19 nt, Respiratory syncytial virus
uauagaaguaaccaaagaa

SEQ ID NO: 379968 - RNA, 19 nt, Respiratory syncytial virus
uauagugagaaaacuugau

SEQ ID NO: 379969 - RNA, 14 nt, Respiratory syncytial virus
uauauuucaaucaa

SEQ ID NO: 379970 - RNA, 14 nt, Respiratory syncytial virus
uauccacacccaau

SEQ ID NO: 379971 - RNA, 21 nt, Respiratory syncytial virus
uauccacauggggcaaauaau

SEQ ID NO: 379972 - RNA, 23 nt, Respiratory syncytial virus
uaucugcucauagacaacccauc

SEQ ID NO: 379973 - RNA, 14 nt, Respiratory syncytial virus
uaucuuagugcucu

SEQ ID NO: 379974 - RNA, 22 nt, Respiratory syncytial virus
uaugaugugcagaaacacauca

SEQ ID NO: 379975 - RNA, 20 nt, Respiratory syncytial virus
uauuuugaauggccacccca

SEQ ID NO: 379976 - RNA, 16 nt, Respiratory syncytial virus
ucaaaacaaaugcaau

SEQ ID NO: 379977 - RNA, 17 nt, Respiratory syncytial virus
ucaaaacaaaugcaauu

SEQ ID NO: 379978 - RNA, 12 nt, Respiratory syncytial virus
ucaaaacaucac

SEQ ID NO: 379979 - RNA, 23 nt, Respiratory syncytial virus
ucaaaagaacacacuauauuuca

SEQ ID NO: 379980 - RNA, 19 nt, Respiratory syncytial virus
ucaaaauuuucuacaacau

SEQ ID NO: 379981 - RNA, 17 nt, Respiratory syncytial virus
ucaaacaacaugcagug

SEQ ID NO: 379982 - RNA, 16 nt, Respiratory syncytial virus
ucaaacuauuaacuca

SEQ ID NO: 379983 - RNA, 20 nt, Respiratory syncytial virus
ucaacacaagagucacacaa

SEQ ID NO: 379984 - RNA, 22 nt, Respiratory syncytial virus
ucaacacaagagucacacaauc

SEQ ID NO: 379985 - RNA, 16 nt, Respiratory syncytial virus
aaaaagccaugaccaa

SEQ ID NO: 379986 - RNA, 21 nt, Respiratory syncytial virus
aaaaagccaugaccaaaucaa

SEQ ID NO: 379987 - RNA, 20 nt, Respiratory syncytial virus
aaaaagcguauuauugcaaa

SEQ ID NO: 379988 - RNA, 21 nt, Respiratory syncytial virus
aaaaauaaucauaacaaugaa

SEQ ID NO: 379989 - RNA, 14 nt, Respiratory syncytial virus
aaaacaaaugcaau

SEQ ID NO: 379990 - RNA, 15 nt, Respiratory syncytial virus
aaaaccacaucaaca

SEQ ID NO: 379991 - RNA, 20 nt, Respiratory syncytial virus
aaaaccacaucaacaucuca

SEQ ID NO: 379992 - RNA, 15 nt, Respiratory syncytial virus
aaaacuauacaaaga

SEQ ID NO: 379993 - RNA, 19 nt, Respiratory syncytial virus
aaaagaccugggacacucu

SEQ ID NO: 379994 - RNA, 22 nt, Respiratory syncytial virus
aaaagaccugggacacucucaa

SEQ ID NO: 379995 - RNA, 21 nt, Respiratory syncytial virus
aaaauaaccauauauacucac

SEQ ID NO: 379996 - RNA, 12 nt, Respiratory syncytial virus
aaaauaaucaua

SEQ ID NO: 379997 - RNA, 15 nt, Respiratory syncytial virus
aaaauaaucauaaca

SEQ ID NO: 379998 - RNA, 16 nt, Respiratory syncytial virus
aaaauaaucauaacaa

SEQ ID NO: 379999 - RNA, 20 nt, Respiratory syncytial virus
aaaauggaucccauuauuaa

SEQ ID NO: 380000 - RNA, 20 nt, Respiratory syncytial virus
aaaauggcucuuagcaaagu

SEQ ID NO: 380001 - RNA, 19 nt, Respiratory syncytial virus
aaacaacagagcuaccaaa

SEQ ID NO: 380002 - RNA, 23 nt, Respiratory syncytial virus
aaacauacgugaacaaacuucac

SEQ ID NO: 380003 - RNA, 20 nt, Respiratory syncytial virus
aaacaucuauacgccaauca

SEQ ID NO: 380004 - RNA, 13 nt, Respiratory syncytial virus
aaacuucacgaag

SEQ ID NO: 380005 - RNA, 14 nt, Respiratory syncytial virus
aaagaacuagcuaa

SEQ ID NO: 380006 - RNA, 20 nt, Respiratory syncytial virus
aaagaccugggacacucuca

SEQ ID NO: 380007 - RNA, 22 nt, Respiratory syncytial virus
aaagauaguaucauaucuguca

SEQ ID NO: 380008 - RNA, 13 nt, Respiratory syncytial virus
aaagaucccaaga

SEQ ID NO: 380009 - RNA, 19 nt, Respiratory syncytial virus
aaagcacaccggcaaccaa

SEQ ID NO: 380010 - RNA, 18 nt, Respiratory syncytial virus
aaagcaucgauacuuuau

SEQ ID NO: 380011 - RNA, 23 nt, Respiratory syncytial virus
aaagccaugaccaaaucaaccag

SEQ ID NO: 380012 - RNA, 14 nt, Respiratory syncytial virus
aaagucaaguugaa

SEQ ID NO: 380013 - RNA, 19 nt, Respiratory syncytial virus
aaagugggaagcacuaaau

SEQ ID NO: 380014 - RNA, 22 nt, Respiratory syncytial virus
aaaguuugcuccugaauuccau

SEQ ID NO: 380015 - RNA, 11 nt, Respiratory syncytial virus
aaauaaaucaa

SEQ ID NO: 380016 - RNA, 14 nt, Respiratory syncytial virus
aaauagauacuaua

SEQ ID NO: 380017 - RNA, 18 nt, Respiratory syncytial virus
aaauagauacuauaguua

SEQ ID NO: 380018 - RNA, 23 nt, Respiratory syncytial virus
aaauauacugaauacaacacaaa

SEQ ID NO: 380019 - RNA, 15 nt, Respiratory syncytial virus
aaaucaaugucacua

SEQ ID NO: 380020 - RNA, 19 nt, Respiratory syncytial virus
aaaucuauagcacaaauca

SEQ ID NO: 380021 - RNA, 22 nt, Respiratory syncytial virus
aaaucuauagcacaaaucacau

SEQ ID NO: 380022 - RNA, 22 nt, Respiratory syncytial virus
aaaugcaaacauguccaaaaac

SEQ ID NO: 380023 - RNA, 12 nt, Respiratory syncytial virus
aaauucacauca

SEQ ID NO: 380024 - RNA, 14 nt, Respiratory syncytial virus
aaauuuaaauccaa

SEQ ID NO: 380025 - RNA, 18 nt, Respiratory syncytial virus
aaauuuaaauccaaaucu

SEQ ID NO: 380026 - RNA, 21 nt, Respiratory syncytial virus
aaauuuaaauccaaaucuaau

SEQ ID NO: 380027 - RNA, 19 nt, Respiratory syncytial virus
aacaaaugagacagaugau

SEQ ID NO: 380028 - RNA, 19 nt, Respiratory syncytial virus
aacaacagagcuaccaaau

SEQ ID NO: 380029 - RNA, 15 nt, Respiratory syncytial virus
aacaacccucaccuc

SEQ ID NO: 380030 - RNA, 21 nt, Respiratory syncytial virus
aacaacccucaccucuuuaca

SEQ ID NO: 380031 - RNA, 16 nt, Respiratory syncytial virus
aacacaagagucacac

SEQ ID NO: 380032 - RNA, 21 nt, Respiratory syncytial virus
aacacacuauauuucaaucaa

SEQ ID NO: 380033 - RNA, 16 nt, Respiratory syncytial virus
aacaguaaccuugcau

SEQ ID NO: 380034 - RNA, 22 nt, Respiratory syncytial virus
aacaucucaccaugcaagccau

SEQ ID NO: 380035 - RNA, 20 nt, Respiratory syncytial virus
aaccaauggaaaauacaucc

SEQ ID NO: 380036 - RNA, 14 nt, Respiratory syncytial virus
aaccaucucacuua

SEQ ID NO: 380037 - RNA, 15 nt, Respiratory syncytial virus
aaccauggacacaac

SEQ ID NO: 380038 - RNA, 23 nt, Respiratory syncytial virus
aacccucugugguucaacuaauc

SEQ ID NO: 380039 - RNA, 18 nt, Respiratory syncytial virus
aaccucuaguaaguuuca

SEQ ID NO: 380040 - RNA, 15 nt, Respiratory syncytial virus
aacuauugcacaaag

SEQ ID NO: 380041 - RNA, 22 nt, Respiratory syncytial virus
aacucacccauccaaccaaaca

SEQ ID NO: 380042 - RNA, 20 nt, Respiratory syncytial virus
aacuucaucgaaacucucau

SEQ ID NO: 380043 - RNA, 13 nt, Respiratory syncytial virus
aacuugacagaag

SEQ ID NO: 380044 - RNA, 17 nt, Respiratory syncytial virus
aacuugaugaaagacag

SEQ ID NO: 380045 - RNA, 13 nt, Respiratory syncytial virus
aagaagacccuac

SEQ ID NO: 380046 - RNA, 21 nt, Respiratory syncytial virus
aagaauuuuaucaaacaacau

SEQ ID NO: 380047 - RNA, 15 nt, Respiratory syncytial virus
aagacaaaacuuuau

SEQ ID NO: 380048 - RNA, 20 nt, Respiratory syncytial virus
aagacugaugaucacagaca

SEQ ID NO: 380049 - RNA, 18 nt, Respiratory syncytial virus
aagacuugauugaugcaa

SEQ ID NO: 380050 - RNA, 21 nt, Respiratory syncytial virus
aagaucaacuucugucaucca

SEQ ID NO: 380051 - RNA, 13 nt, Respiratory syncytial virus
aagaucccaagaa

SEQ ID NO: 380052 - RNA, 18 nt, Respiratory syncytial virus
aagauggggcaaauacaa

SEQ ID NO: 380053 - RNA, 13 nt, Respiratory syncytial virus
aagcacuaaauac

SEQ ID NO: 380054 - RNA, 17 nt, Respiratory syncytial virus
aagcaucgauacuuuau

SEQ ID NO: 380055 - RNA, 19 nt, Respiratory syncytial virus
aagcaucgauacuuuauca

SEQ ID NO: 380056 - RNA, 13 nt, Respiratory syncytial virus
aagccaucaucca

SEQ ID NO: 380057 - RNA, 18 nt, Respiratory syncytial virus
aagcccaauuaucaaaga

SEQ ID NO: 380058 - RNA, 17 nt, Respiratory syncytial virus
aagcccuauaacaucaa

SEQ ID NO: 380059 - RNA, 14 nt, Respiratory syncytial virus
aaguugaaugauac

SEQ ID NO: 380060 - RNA, 19 nt, Respiratory syncytial virus
aaguugaaugauacacuca

SEQ ID NO: 380061 - RNA, 14 nt, Respiratory syncytial virus
aauaacaauggagu

SEQ ID NO: 380062 - RNA, 21 nt, Respiratory syncytial virus
aauaacaauggaguugccaau

SEQ ID NO: 380063 - RNA, 18 nt, Respiratory syncytial virus
aauaaccauauauacuca

SEQ ID NO: 380064 - RNA, 22 nt, Respiratory syncytial virus
aauaaucucuuugcuaaucaua

SEQ ID NO: 380065 - RNA, 20 nt, Respiratory syncytial virus
aauacacaugauaacaacaa

SEQ ID NO: 380066 - RNA, 20 nt, Respiratory syncytial virus
aauacauccauaacaauaga

SEQ ID NO: 380067 - RNA, 16 nt, Respiratory syncytial virus
aauauggaaacauacg

SEQ ID NO: 380068 - RNA, 16 nt, Respiratory syncytial virus
aaucauaacaaugaac

SEQ ID NO: 380069 - RNA, 14 nt, Respiratory syncytial virus
aaucauaaucucca

SEQ ID NO: 380070 - RNA, 13 nt, Respiratory syncytial virus
aaucaucuauuau

SEQ ID NO: 380071 - RNA, 16 nt, Respiratory syncytial virus
aaucauguucuuacaa

SEQ ID NO: 380072 - RNA, 22 nt, Respiratory syncytial virus
aauccauuggaccucucaagac

SEQ ID NO: 380073 - RNA, 20 nt, Respiratory syncytial virus
aaucuagcuauucauaugaa

SEQ ID NO: 380074 - RNA, 15 nt, Respiratory syncytial virus
aaucucaacuucacu

SEQ ID NO: 380075 - RNA, 20 nt, Respiratory syncytial virus
aaugacaccacaccacaaag

SEQ ID NO: 380076 - RNA, 22 nt, Respiratory syncytial virus
aaugacaccacaccacaaagac

SEQ ID NO: 380077 - RNA, 17 nt, Respiratory syncytial virus
aaugauaaucucaacuu

SEQ ID NO: 380078 - RNA, 21 nt, Respiratory syncytial virus
aaugcaaacauguccaaaaac

SEQ ID NO: 380079 - RNA, 20 nt, Respiratory syncytial virus
aaugcuuaccacaucaucaa

SEQ ID NO: 380080 - RNA, 14 nt, Respiratory syncytial virus
aauggaaaauacau

SEQ ID NO: 380081 - RNA, 23 nt, Respiratory syncytial virus
aauggaucccauuauuaauggaa

SEQ ID NO: 380082 - RNA, 22 nt, Respiratory syncytial virus
aauggcucuuagcaaagucaag

SEQ ID NO: 380083 - RNA, 16 nt, Respiratory syncytial virus
aaugucaacauacuag

SEQ ID NO: 380084 - RNA, 19 nt, Respiratory syncytial virus
aauucacaucaccuaaaga

SEQ ID NO: 380085 - RNA, 20 nt, Respiratory syncytial virus
aauucacaucaccuaaagau

SEQ ID NO: 380086 - RNA, 20 nt, Respiratory syncytial virus
aauucagccgacccaaccau

SEQ ID NO: 380087 - RNA, 20 nt, Respiratory syncytial virus
aauugcagccaucauauuca

SEQ ID NO: 380088 - RNA, 15 nt, Respiratory syncytial virus
aauugcaguugcuca

SEQ ID NO: 380089 - RNA, 15 nt, Respiratory syncytial virus
acaaagacugaugau

SEQ ID NO: 380090 - RNA, 21 nt, Respiratory syncytial virus
acaaagaucaacuucugucau

SEQ ID NO: 380091 - RNA, 14 nt, Respiratory syncytial virus
acaaauauccacac

SEQ ID NO: 380092 - RNA, 22 nt, Respiratory syncytial virus
acaaauauccacacccaaugga

SEQ ID NO: 380093 - RNA, 14 nt, Respiratory syncytial virus
acaacaauaaucuc

SEQ ID NO: 380094 - RNA, 14 nt, Respiratory syncytial virus
acaacacacaauga

SEQ ID NO: 380095 - RNA, 17 nt, Respiratory syncytial virus
acaacuucaugcauaac

SEQ ID NO: 380096 - RNA, 20 nt, Respiratory syncytial virus
acaagcccaauuaucaaaga

SEQ ID NO: 380097 - RNA, 17 nt, Respiratory syncytial virus
acaaugguuucauaucu

SEQ ID NO: 380098 - RNA, 14 nt, Respiratory syncytial virus
acaccacaccacaa

SEQ ID NO: 380099 - RNA, 17 nt, Respiratory syncytial virus
acaccacaccacaaaga

SEQ ID NO: 380100 - RNA, 19 nt, Respiratory syncytial virus
acacucaacaaagaucaac

SEQ ID NO: 380101 - RNA, 18 nt, Respiratory syncytial virus
acagaagaccaacaaaca

SEQ ID NO: 380102 - RNA, 23 nt, Respiratory syncytial virus
acagaagaccaacaaacaaacca

SEQ ID NO: 380103 - RNA, 13 nt, Respiratory syncytial virus
acagaauugcagu

SEQ ID NO: 380104 - RNA, 21 nt, Respiratory syncytial virus
acagaauugcaguugcucaug

SEQ ID NO: 380105 - RNA, 20 nt, Respiratory syncytial virus
acagauuuauauacuugaua

SEQ ID NO: 380106 - RNA, 18 nt, Respiratory syncytial virus
acagcugcuguucaauac

SEQ ID NO: 380107 - RNA, 16 nt, Respiratory syncytial virus
acaggccacauuuaca

SEQ ID NO: 380108 - RNA, 14 nt, Respiratory syncytial virus
acaguaaccuugca

SEQ ID NO: 380109 - RNA, 14 nt, Respiratory syncytial virus
acauacgugaacaa

SEQ ID NO: 380110 - RNA, 15 nt, Respiratory syncytial virus
acauacgugaacaaa

SEQ ID NO: 380111 - RNA, 17 nt, Respiratory syncytial virus
acauacuagugaaacaa

SEQ ID NO: 380112 - RNA, 14 nt, Respiratory syncytial virus
acaugcagugcagu

SEQ ID NO: 380113 - RNA, 16 nt, Respiratory syncytial virus
acaugcagugcaguca

SEQ ID NO: 380114 - RNA, 18 nt, Respiratory syncytial virus
acauuugauaacaaugaa

SEQ ID NO: 380115 - RNA, 21 nt, Respiratory syncytial virus
acauuugauaacaaugaagaa

SEQ ID NO: 380116 - RNA, 21 nt, Respiratory syncytial virus
accaacaaacaaaccaacuca

SEQ ID NO: 380117 - RNA, 22 nt, Respiratory syncytial virus
accaacagaagaccaacaaaca

SEQ ID NO: 380118 - RNA, 17 nt, Respiratory syncytial virus
accaauggaaaauacau

SEQ ID NO: 380119 - RNA, 15 nt, Respiratory syncytial virus
accacaccacaaaga

SEQ ID NO: 380120 - RNA, 23 nt, Respiratory syncytial virus
accauuaguuaauauaaaacuug

SEQ ID NO: 380121 - RNA, 23 nt, Respiratory syncytial virus
accauugucacuugagacuauaa

SEQ ID NO: 380122 - RNA, 19 nt, Respiratory syncytial virus
acccaucuggagccucaga

SEQ ID NO: 380123 - RNA, 20 nt, Respiratory syncytial virus
accucuuuacaaaaccacau

SEQ ID NO: 380124 - RNA, 23 nt, Respiratory syncytial virus
accucuuuacaaaaccacaucaa

SEQ ID NO: 380125 - RNA, 22 nt, Respiratory syncytial virus
acgcuaagguaaaauugauaaa

SEQ ID NO: 380126 - RNA, 22 nt, Respiratory syncytial virus
acuauuaacucaaacaauucaa

SEQ ID NO: 380127 - RNA, 14 nt, Respiratory syncytial virus
acuugauaaaucau

SEQ ID NO: 380128 - RNA, 13 nt, Respiratory syncytial virus
agaaaaccucuag

SEQ ID NO: 380129 - RNA, 24 nt, Respiratory syncytial virus
agaaaagaccugggacacucucaa

SEQ ID NO: 380130 - RNA, 23 nt, Respiratory syncytial virus
agaacacacuauauuucaaucaa

SEQ ID NO: 380131 - RNA, 19 nt, Respiratory syncytial virus
agaagaaucuagcuauuca

SEQ ID NO: 380132 - RNA, 15 nt, Respiratory syncytial virus
agaagacaccauaaa

SEQ ID NO: 380133 - RNA, 12 nt, Respiratory syncytial virus
agaaucaauaaa

SEQ ID NO: 380134 - RNA, 18 nt, Respiratory syncytial virus
agaauuaaguaauaucaa

SEQ ID NO: 380135 - RNA, 17 nt, Respiratory syncytial virus
agacagaugauacugua

SEQ ID NO: 380136 - RNA, 14 nt, Respiratory syncytial virus
agacaucauaacac

SEQ ID NO: 380137 - RNA, 13 nt, Respiratory syncytial virus
agaccaacaaaca

SEQ ID NO: 380138 - RNA, 17 nt, Respiratory syncytial virus
agacuauaauaauauca

SEQ ID NO: 380139 - RNA, 20 nt, Respiratory syncytial virus
agacugaugaucacagacau

SEQ ID NO: 380140 - RNA, 22 nt, Respiratory syncytial virus
agacuugauugaugcaauucaa

SEQ ID NO: 380141 - RNA, 16 nt, Respiratory syncytial virus
agagaagacaccauaa

SEQ ID NO: 380142 - RNA, 15 nt, Respiratory syncytial virus
agagacaucauaaca

SEQ ID NO: 380143 - RNA, 14 nt, Respiratory syncytial virus
agagucacacaauc

SEQ ID NO: 380144 - RNA, 20 nt, Respiratory syncytial virus
agauaguauugauacuccua

SEQ ID NO: 380145 - RNA, 18 nt, Respiratory syncytial virus
agauauagaaguaaccaa

SEQ ID NO: 380146 - RNA, 21 nt, Respiratory syncytial virus
agauauagaaguaaccaaaga

SEQ ID NO: 380147 - RNA, 18 nt, Respiratory syncytial virus
agcaaauacaccauccaa

SEQ ID NO: 380148 - RNA, 13 nt, Respiratory syncytial virus
agccaauccaaaa

SEQ ID NO: 380149 - RNA, 13 nt, Respiratory syncytial virus
agccaucauccau

SEQ ID NO: 380150 - RNA, 22 nt, Respiratory syncytial virus
agcccuauaacaucaaauucaa

SEQ ID NO: 380151 - RNA, 23 nt, Respiratory syncytial virus
agcuaccaaauuccuagaaucaa

SEQ ID NO: 380152 - RNA, 15 nt, Respiratory syncytial virus
agcuauucauaugaa

SEQ ID NO: 380153 - RNA, 18 nt, Respiratory syncytial virus
agcugcuguucaauacaa

SEQ ID NO: 380154 - RNA, 22 nt, Respiratory syncytial virus
aggaaaauaaguguaauggaac

SEQ ID NO: 380155 - RNA, 20 nt, Respiratory syncytial virus
auguuaaacagaauacuuaa

SEQ ID NO: 380156 - RNA, 23 nt, Respiratory syncytial virus
auuaaaaagcguauuauugcaaa

SEQ ID NO: 380157 - RNA, 22 nt, Respiratory syncytial virus
auuaaaaauaaucauaacaaug

SEQ ID NO: 380158 - RNA, 15 nt, Respiratory syncytial virus
auuaaguaauaucaa

SEQ ID NO: 380159 - RNA, 22 nt, Respiratory syncytial virus
auuacugaugauauauacacaa

SEQ ID NO: 380160 - RNA, 24 nt, Respiratory syncytial virus
auuacugaugauauauacacaaua

SEQ ID NO: 380161 - RNA, 17 nt, Respiratory syncytial virus
auuaucauuuugaucua

SEQ ID NO: 380162 - RNA, 14 nt, Respiratory syncytial virus
auuauucauaucau

SEQ ID NO: 380163 - RNA, 14 nt, Respiratory syncytial virus
auucacaucaccua

SEQ ID NO: 380164 - RNA, 20 nt, Respiratory syncytial virus
auuccuggucaacuaugaaa

SEQ ID NO: 380165 - RNA, 21 nt, Respiratory syncytial virus
auucuggcaaugauaaucuca

SEQ ID NO: 380166 - RNA, 15 nt, Respiratory syncytial virus
auugauaaaacaaga

SEQ ID NO: 380167 - RNA, 13 nt, Respiratory syncytial virus
auugcaauacuga

SEQ ID NO: 380168 - RNA, 13 nt, Respiratory syncytial virus
auugcagccauca

SEQ ID NO: 380169 - RNA, 14 nt, Respiratory syncytial virus
auugcaguugcuca

SEQ ID NO: 380170 - RNA, 20 nt, Respiratory syncytial virus
auugcaguugcucaugcaaa

SEQ ID NO: 380171 - RNA, 14 nt, Respiratory syncytial virus
auuggaccucucaa

SEQ ID NO: 380172 - RNA, 16 nt, Respiratory syncytial virus
auuggaggaaauccaa

SEQ ID NO: 380173 - RNA, 13 nt, Respiratory syncytial virus
auuuaaauccaaa

SEQ ID NO: 380174 - RNA, 16 nt, Respiratory syncytial virus
auuuucuacaacaucu

SEQ ID NO: 380175 - RNA, 13 nt, Respiratory syncytial virus
caaaaagccauga

SEQ ID NO: 380176 - RNA, 16 nt, Respiratory syncytial virus
caaaacaaaugcaauu

SEQ ID NO: 380177 - RNA, 12 nt, Respiratory syncytial virus
caaaacaaccaa

SEQ ID NO: 380178 - RNA, 22 nt, Respiratory syncytial virus
caaaacaaccaaaauaaccaua

SEQ ID NO: 380179 - RNA, 16 nt, Respiratory syncytial virus
caaaaccacaucaaca

SEQ ID NO: 380180 - RNA, 17 nt, Respiratory syncytial virus
caaacaaaccaacucac

SEQ ID NO: 380181 - RNA, 22 nt, Respiratory syncytial virus
caaacaucuauacgccaaucag

SEQ ID NO: 380182 - RNA, 13 nt, Respiratory syncytial virus
caaaccacaaagu

SEQ ID NO: 380183 - RNA, 18 nt, Respiratory syncytial virus
caaagaaaaccucuagua

SEQ ID NO: 380184 - RNA, 15 nt, Respiratory syncytial virus
caaagaaaccauaga

SEQ ID NO: 380185 - RNA, 19 nt, Respiratory syncytial virus
caaagcacaccggcaacca

SEQ ID NO: 380186 - RNA, 14 nt, Respiratory syncytial virus
caaauaaaucaauu

SEQ ID NO: 380187 - RNA, 17 nt, Respiratory syncytial virus
caaauaacaauggaguu

SEQ ID NO: 380188 - RNA, 22 nt, Respiratory syncytial virus
caaauauggaaacauacgugaa

SEQ ID NO: 380189 - RNA, 14 nt, Respiratory syncytial virus
caaaucaaugucac

SEQ ID NO: 380190 - RNA, 18 nt, Respiratory syncytial virus
caaaugcaaacaugucca

SEQ ID NO: 380191 - RNA, 18 nt, Respiratory syncytial virus
caaaugcaauuaccgcaa

SEQ ID NO: 380192 - RNA, 12 nt, Respiratory syncytial virus
cuauucauauga

SEQ ID NO: 380193 - RNA, 22 nt, Respiratory syncytial virus
cucaagacuugauugaugcaau

SEQ ID NO: 380194 - RNA, 22 nt, Respiratory syncytial virus
cucaaucaucuauuauucauau

SEQ ID NO: 380195 - RNA, 18 nt, Respiratory syncytial virus
cucaccaugcaagccauc

SEQ ID NO: 380196 - RNA, 20 nt, Respiratory syncytial virus
cucaccaugcaagccaucau

SEQ ID NO: 380197 - RNA, 20 nt, Respiratory syncytial virus
cucacccauccaaccaaaca

SEQ ID NO: 380198 - RNA, 20 nt, Respiratory syncytial virus
cucaccgaaucaaccauuca

SEQ ID NO: 380199 - RNA, 18 nt, Respiratory syncytial virus
cucaccucuuuacaaaac

SEQ ID NO: 380200 - RNA, 17 nt, Respiratory syncytial virus
cucaucuauaaaccauc

SEQ ID NO: 380201 - RNA, 16 nt, Respiratory syncytial virus
cucaugcaaagcacac

SEQ ID NO: 380202 - RNA, 20 nt, Respiratory syncytial virus
cucggcaaaccacaaaguca

SEQ ID NO: 380203 - RNA, 16 nt, Respiratory syncytial virus
cucuuuacaaaaccac

SEQ ID NO: 380204 - RNA, 14 nt, Respiratory syncytial virus
cugauggcacaaaa

SEQ ID NO: 380205 - RNA, 15 nt, Respiratory syncytial virus
cugauggcacaaaac

SEQ ID NO: 380206 - RNA, 16 nt, Respiratory syncytial virus
cugauggcacaaaaca

SEQ ID NO: 380207 - RNA, 14 nt, Respiratory syncytial virus
cugcuguucaauac

SEQ ID NO: 380208 - RNA, 23 nt, Respiratory syncytial virus
cugcuuguaagacaaaacuuuau

SEQ ID NO: 380209 - RNA, 18 nt, Respiratory syncytial virus
cuguacaucaacacacaa

SEQ ID NO: 380210 - RNA, 19 nt, Respiratory syncytial virus
cuuaaaucuauagcacaaa

SEQ ID NO: 380211 - RNA, 15 nt, Respiratory syncytial virus
cuuaagucuauggau

SEQ ID NO: 380212 - RNA, 16 nt, Respiratory syncytial virus
cuuagugcucuaagaa

SEQ ID NO: 380213 - RNA, 23 nt, Respiratory syncytial virus
cuucacuuauaauugcagccauc

SEQ ID NO: 380214 - RNA, 15 nt, Respiratory syncytial virus
cuuccagucaaaaca

SEQ ID NO: 380215 - RNA, 19 nt, Respiratory syncytial virus
cuuguaguauaaauuccau

SEQ ID NO: 380216 - RNA, 16 nt, Respiratory syncytial virus
cuuuacaaaaccacau

SEQ ID NO: 380217 - RNA, 21 nt, Respiratory syncytial virus
gaaaauacauccauaacaaua

SEQ ID NO: 380218 - RNA, 21 nt, Respiratory syncytial virus
gaaacauuugauaacaaugaa

SEQ ID NO: 380219 - RNA, 15 nt, Respiratory syncytial virus
gaaacuauugcacaa

SEQ ID NO: 380220 - RNA, 19 nt, Respiratory syncytial virus
gaaaugaaacuauugcaca

SEQ ID NO: 380221 - RNA, 15 nt, Respiratory syncytial virus
gaacaacccucaccu

SEQ ID NO: 380222 - RNA, 22 nt, Respiratory syncytial virus
gaacaagcccaauuaucaaaga

SEQ ID NO: 380223 - RNA, 16 nt, Respiratory syncytial virus
gaacuagcuaauguca

SEQ ID NO: 380224 - RNA, 20 nt, Respiratory syncytial virus
gaacuggggcaaauauguca

SEQ ID NO: 380225 - RNA, 19 nt, Respiratory syncytial virus
gaagaauuuuaucaaacaa

SEQ ID NO: 380226 - RNA, 22 nt, Respiratory syncytial virus
gaagacaccauaaaaauacuca

SEQ ID NO: 380227 - RNA, 14 nt, Respiratory syncytial virus
gaagaccaacaaac

SEQ ID NO: 380228 - RNA, 15 nt, Respiratory syncytial virus
gaagaccaacaaaca

SEQ ID NO: 380229 - RNA, 22 nt, Respiratory syncytial virus
gaagacccuacgccaagugaua

SEQ ID NO: 380230 - RNA, 17 nt, Respiratory syncytial virus
gaagaugcuaaucauaa

SEQ ID NO: 380231 - RNA, 16 nt, Respiratory syncytial virus
gaaggcuccacauaca

SEQ ID NO: 380232 - RNA, 13 nt, Respiratory syncytial virus
gaaguaaccaaag

SEQ ID NO: 380233 - RNA, 14 nt, Respiratory syncytial virus
gaaguaaccaaaga

SEQ ID NO: 380234 - RNA, 16 nt, Respiratory syncytial virus
gaauacuuaagucuau

SEQ ID NO: 380235 - RNA, 16 nt, Respiratory syncytial virus
gaaucuagcuauucau

SEQ ID NO: 380236 - RNA, 15 nt, Respiratory syncytial virus
gaaugauacacucaa

SEQ ID NO: 380237 - RNA, 20 nt, Respiratory syncytial virus
gacaccacaccacaaagacu

SEQ ID NO: 380238 - RNA, 16 nt, Respiratory syncytial virus
gacaggccacauuuac

SEQ ID NO: 380239 - RNA, 23 nt, Respiratory syncytial virus
gacaucauaacacacagauuuau

SEQ ID NO: 380240 - RNA, 21 nt, Respiratory syncytial virus
gacuugauugaugcaauucaa

SEQ ID NO: 380241 - RNA, 21 nt, Respiratory syncytial virus
gagacaucauaacacacagau

SEQ ID NO: 380242 - RNA, 18 nt, Respiratory syncytial virus
gaggugucauuuuaguca

SEQ ID NO: 380243 - RNA, 13 nt, Respiratory syncytial virus
gauaacaacaaua

SEQ ID NO: 380244 - RNA, 19 nt, Respiratory syncytial virus
gauaacaacaauaaucucu

SEQ ID NO: 380245 - RNA, 16 nt, Respiratory syncytial virus
gauaaucccuuuucaa

SEQ ID NO: 380246 - RNA, 16 nt, Respiratory syncytial virus
gauacacucaacaaag

SEQ ID NO: 380247 - RNA, 19 nt, Respiratory syncytial virus
gauacuauaguuacaaaaa

SEQ ID NO: 380248 - RNA, 20 nt, Respiratory syncytial virus
gauauagaaguaaccaaaga

SEQ ID NO: 380249 - RNA, 14 nt, Respiratory syncytial virus
gaucuaguacucaa

SEQ ID NO: 380250 - RNA, 22 nt, Respiratory syncytial virus
gaugacccugcaucacuuacaa

SEQ ID NO: 380251 - RNA, 20 nt, Respiratory syncytial virus
gaugugcagaaacacaucaa

SEQ ID NO: 380252 - RNA, 23 nt, Respiratory syncytial virus
gauuaggaagagaagacaccaua

SEQ ID NO: 380253 - RNA, 22 nt, Respiratory syncytial virus
gcaaaaagccaugaccaaauca

SEQ ID NO: 380254 - RNA, 21 nt, Respiratory syncytial virus
gcaaaggcuaucuuagugcuc

SEQ ID NO: 380255 - RNA, 17 nt, Respiratory syncytial virus
gcaaauaaaacaucaug

SEQ ID NO: 380256 - RNA, 19 nt, Respiratory syncytial virus
gcaaauauggaaacauacg

SEQ ID NO: 380257 - RNA, 19 nt, Respiratory syncytial virus
gcaauccuugcugcaguca

SEQ ID NO: 380258 - RNA, 16 nt, Respiratory syncytial virus
gcaaugauaaucucaa

SEQ ID NO: 380259 - RNA, 16 nt, Respiratory syncytial virus
gcacaaaucacauuau

SEQ ID NO: 380260 - RNA, 16 nt, Respiratory syncytial virus
gcaccaccaagacacu

SEQ ID NO: 380261 - RNA, 16 nt, Respiratory syncytial virus
gcagccaucauauuca

SEQ ID NO: 380262 - RNA, 18 nt, Respiratory syncytial virus
gcauaaccacacuccaua

SEQ ID NO: 380263 - RNA, 13 nt, Respiratory syncytial virus
gccaauccaaaac

SEQ ID NO: 380264 - RNA, 16 nt, Respiratory syncytial virus
gccaggcaaaaucaac

SEQ ID NO: 380265 - RNA, 21 nt, Respiratory syncytial virus
gccaugaccaaaucaaccaga

SEQ ID NO: 380266 - RNA, 15 nt, Respiratory syncytial virus
gccucggcaaaccac

SEQ ID NO: 380267 - RNA, 12 nt, Respiratory syncytial virus
gcucauagacaa

SEQ ID NO: 380268 - RNA, 18 nt, Respiratory syncytial virus
gcucauagacaacccauc

SEQ ID NO: 380269 - RNA, 23 nt, Respiratory syncytial virus
gcucaugcaaagcacaccggcaa

SEQ ID NO: 380270 - RNA, 15 nt, Respiratory syncytial virus
gcuccugaauuccau

SEQ ID NO: 380271 - RNA, 19 nt, Respiratory syncytial virus
gcuccugaauuccauggag

SEQ ID NO: 380272 - RNA, 23 nt, Respiratory syncytial virus
ggaacaagcccaauuaucaaaga

SEQ ID NO: 380273 - RNA, 12 nt, Respiratory syncytial virus
ggcaaaccacaa

SEQ ID NO: 380274 - RNA, 10 nt, Respiratory syncytial virus
ggcaaugaua

SEQ ID NO: 380275 - RNA, 20 nt, Respiratory syncytial virus
ggccuuacuuuacacuaaua

SEQ ID NO: 380276 - RNA, 19 nt, Respiratory syncytial virus
ggcuaucuuagugcucuaa

SEQ ID NO: 380277 - RNA, 21 nt, Respiratory syncytial virus
gggacacucucaaucaucuau

SEQ ID NO: 380278 - RNA, 15 nt, Respiratory syncytial virus
gguaaaauugauaaa

SEQ ID NO: 380279 - RNA, 17 nt, Respiratory syncytial virus
gguauacuaguguuaua

SEQ ID NO: 380280 - RNA, 13 nt, Respiratory syncytial virus
ggucaacuaugaa

SEQ ID NO: 380281 - RNA, 17 nt, Respiratory syncytial virus
guaacagaauugcaguu

SEQ ID NO: 380282 - RNA, 14 nt, Respiratory syncytial virus
guaagaggugucau

SEQ ID NO: 380283 - RNA, 14 nt, Respiratory syncytial virus
gucacuaacaccau

SEQ ID NO: 380284 - RNA, 15 nt, Respiratory syncytial virus
gucaugauaaacuca

SEQ ID NO: 380285 - RNA, 12 nt, Respiratory syncytial virus
gugaacaaacuu

SEQ ID NO: 380286 - RNA, 17 nt, Respiratory syncytial virus
gugucauuuuagucaua

SEQ ID NO: 380287 - RNA, 17 nt, Respiratory syncytial virus
guuaaaucuuaaaucua

SEQ ID NO: 380288 - RNA, 18 nt, Respiratory syncytial virus
guuacuauguauaaucaa

SEQ ID NO: 380289 - RNA, 21 nt, Respiratory syncytial virus
guuacuauguauaaucaaaag

SEQ ID NO: 380290 - RNA, 17 nt, Respiratory syncytial virus
guuauuaaucacagaag

SEQ ID NO: 380291 - RNA, 23 nt, Respiratory syncytial virus
guucaucagaucuaguacucaaa

SEQ ID NO: 380292 - RNA, 14 nt, Respiratory syncytial virus
guugcucaugcaaa

SEQ ID NO: 380293 - RNA, 15 nt, Respiratory syncytial virus
uaaaaauaaucauaa

SEQ ID NO: 380294 - RNA, 12 nt, Respiratory syncytial virus
ucaacaucucac

SEQ ID NO: 380295 - RNA, 22 nt, Respiratory syncytial virus
ucaacucuggggcaaauaacaa

SEQ ID NO: 380296 - RNA, 11 nt, Respiratory syncytial virus
ucaaucaaaac

SEQ ID NO: 380297 - RNA, 20 nt, Respiratory syncytial virus
ucaaucaaaacaaccaaaau

SEQ ID NO: 380298 - RNA, 14 nt, Respiratory syncytial virus
ucacauuauccauu

SEQ ID NO: 380299 - RNA, 22 nt, Respiratory syncytial virus
ucaccaugcaagccaucaucca

SEQ ID NO: 380300 - RNA, 21 nt, Respiratory syncytial virus
ucaccucuuuacaaaaccaca

SEQ ID NO: 380301 - RNA, 21 nt, Respiratory syncytial virus
ucacgaaggcuccacauacac

SEQ ID NO: 380302 - RNA, 22 nt, Respiratory syncytial virus
ucacuucaccaucauaaucacc

SEQ ID NO: 380303 - RNA, 17 nt, Respiratory syncytial virus
ucacuugagacuauaau

SEQ ID NO: 380304 - RNA, 18 nt, Respiratory syncytial virus
ucagaucaucccaaguca

SEQ ID NO: 380305 - RNA, 14 nt, Respiratory syncytial virus
ucagccaauccaaa

SEQ ID NO: 380306 - RNA, 21 nt, Respiratory syncytial virus
ucauagacaacccaucuauca

SEQ ID NO: 380307 - RNA, 21 nt, Respiratory syncytial virus
ucauagccucggcaaaccaca

SEQ ID NO: 380308 - RNA, 22 nt, Respiratory syncytial virus
ucauaucaucgugcuuauacaa

SEQ ID NO: 380309 - RNA, 12 nt, Respiratory syncytial virus
ucauauucauag

SEQ ID NO: 380310 - RNA, 21 nt, Respiratory syncytial virus
ucaucaaacuauuaacucaaa

SEQ ID NO: 380311 - RNA, 23 nt, Respiratory syncytial virus
ucaucagaucuaguacucaaaua

SEQ ID NO: 380312 - RNA, 19 nt, Respiratory syncytial virus
ucaucuauuauucauauca

SEQ ID NO: 380313 - RNA, 15 nt, Respiratory syncytial virus
ucaugcaaagcacac

SEQ ID NO: 380314 - RNA, 15 nt, Respiratory syncytial virus
ucauuuuagucauaa

SEQ ID NO: 380315 - RNA, 15 nt, Respiratory syncytial virus
uccaacggagcacag

SEQ ID NO: 380316 - RNA, 13 nt, Respiratory syncytial virus
uccacauacacag

SEQ ID NO: 380317 - RNA, 13 nt, Respiratory syncytial virus
uccagcaaauaca

SEQ ID NO: 380318 - RNA, 18 nt, Respiratory syncytial virus
uccagcaaauacaccauc

SEQ ID NO: 380319 - RNA, 19 nt, Respiratory syncytial virus
uccagcaaauacaccaucc

SEQ ID NO: 380320 - RNA, 21 nt, Respiratory syncytial virus
uccagucaaaacaucacugaa

SEQ ID NO: 380321 - RNA, 18 nt, Respiratory syncytial virus
uccauaguucaaauggag

SEQ ID NO: 380322 - RNA, 19 nt, Respiratory syncytial virus
uccuaguuuauaguuauau

SEQ ID NO: 380323 - RNA, 20 nt, Respiratory syncytial virus
uccucaaaacaaaugcaauu

SEQ ID NO: 380324 - RNA, 13 nt, Respiratory syncytial virus
uccugaauuccau

SEQ ID NO: 380325 - RNA, 17 nt, Respiratory syncytial virus
aaaaauaaucauaacaa

SEQ ID NO: 380326 - RNA, 16 nt, Respiratory syncytial virus
aaaaauagauacuaua

SEQ ID NO: 380327 - RNA, 18 nt, Respiratory syncytial virus
aaaacaaggaccaacgca

SEQ ID NO: 380328 - RNA, 13 nt, Respiratory syncytial virus
aaaacaauugaau

SEQ ID NO: 380329 - RNA, 10 nt, Respiratory syncytial virus
aaaaccacau

SEQ ID NO: 380330 - RNA, 16 nt, Respiratory syncytial virus
aaaacuauacaaagaa

SEQ ID NO: 380331 - RNA, 14 nt, Respiratory syncytial virus
aaaagaacuagcua

SEQ ID NO: 380332 - RNA, 12 nt, Respiratory syncytial virus
aaaauaaccaua

SEQ ID NO: 380333 - RNA, 14 nt, Respiratory syncytial virus
aaaauaaucauaac

SEQ ID NO: 380334 - RNA, 14 nt, Respiratory syncytial virus
aaaauacauccaua

SEQ ID NO: 380335 - RNA, 16 nt, Respiratory syncytial virus
aaacaacaugcagugc

SEQ ID NO: 380336 - RNA, 18 nt, Respiratory syncytial virus
aaacaaggaccaacgcac

SEQ ID NO: 380337 - RNA, 20 nt, Respiratory syncytial virus
aaacauuugauaacaaugaa

SEQ ID NO: 380338 - RNA, 12 nt, Respiratory syncytial virus
aaaccaacucac

SEQ ID NO: 380339 - RNA, 18 nt, Respiratory syncytial virus
aaaccacaucaacaucuc

SEQ ID NO: 380340 - RNA, 19 nt, Respiratory syncytial virus
aaaccacaucaacaucuca

SEQ ID NO: 380341 - RNA, 15 nt, Respiratory syncytial virus
aaaccaucucacuua

SEQ ID NO: 380342 - RNA, 23 nt, Respiratory syncytial virus
aaacccaucuggagccucagauc

SEQ ID NO: 380343 - RNA, 14 nt, Respiratory syncytial virus
aaacuauacaaaga

SEQ ID NO: 380344 - RNA, 12 nt, Respiratory syncytial virus
aaacuauugcac

SEQ ID NO: 380345 - RNA, 13 nt, Respiratory syncytial virus
aaacuauugcaca

SEQ ID NO: 380346 - RNA, 12 nt, Respiratory syncytial virus
aaacucaagaag

SEQ ID NO: 380347 - RNA, 21 nt, Respiratory syncytial virus
aaagaccugggacacucucaa

SEQ ID NO: 380348 - RNA, 21 nt, Respiratory syncytial virus
aaagcacaccggcaaccaaca

SEQ ID NO: 380349 - RNA, 15 nt, Respiratory syncytial virus
aaauaacaacuucau

SEQ ID NO: 380350 - RNA, 13 nt, Respiratory syncytial virus
aaauacaccaucc

SEQ ID NO: 380351 - RNA, 18 nt, Respiratory syncytial virus
aaauauaaaagugcugua

SEQ ID NO: 380352 - RNA, 23 nt, Respiratory syncytial virus
aaaucuuauauuaaaaauuccca

SEQ ID NO: 380353 - RNA, 15 nt, Respiratory syncytial virus
aaaugcaaacauguc

SEQ ID NO: 380354 - RNA, 16 nt, Respiratory syncytial virus
aaauucacaucaccua

SEQ ID NO: 380355 - RNA, 19 nt, Respiratory syncytial virus
aaauucacaucaccuaaag

SEQ ID NO: 380356 - RNA, 14 nt, Respiratory syncytial virus
aaauucccauagcu

SEQ ID NO: 380357 - RNA, 23 nt, Respiratory syncytial virus
aaauucgaggucauugcuugaau

SEQ ID NO: 380358 - RNA, 19 nt, Respiratory syncytial virus
aacaaaccaacucacccau

SEQ ID NO: 380359 - RNA, 20 nt, Respiratory syncytial virus
aacaaauauccacacccaau

SEQ ID NO: 380360 - RNA, 20 nt, Respiratory syncytial virus
aacaaaugagacagaugaua

SEQ ID NO: 380361 - RNA, 14 nt, Respiratory syncytial virus
aacaacuucaugca

SEQ ID NO: 380362 - RNA, 21 nt, Respiratory syncytial virus
aacaagcccaauuaucaaaga

SEQ ID NO: 380363 - RNA, 16 nt, Respiratory syncytial virus
aacaauagaauucuca

SEQ ID NO: 380364 - RNA, 18 nt, Respiratory syncytial virus
aacacacuauauuucaau

SEQ ID NO: 380365 - RNA, 20 nt, Respiratory syncytial virus
aacacaucaauaaguuaugu

SEQ ID NO: 380366 - RNA, 19 nt, Respiratory syncytial virus
aacagaauacuuaagucua

SEQ ID NO: 380367 - RNA, 20 nt, Respiratory syncytial virus
aacauacuagugaaacaaau

SEQ ID NO: 380368 - RNA, 16 nt, Respiratory syncytial virus
aacaucuauacgccaa

SEQ ID NO: 380369 - RNA, 19 nt, Respiratory syncytial virus
aacaucuauacgccaauca

SEQ ID NO: 380370 - RNA, 21 nt, Respiratory syncytial virus
aacauuugauaacaaugaaga

SEQ ID NO: 380371 - RNA, 16 nt, Respiratory syncytial virus
aaccaaaauaaccaua

SEQ ID NO: 380372 - RNA, 17 nt, Respiratory syncytial virus
aaccaaagaaagcccua

SEQ ID NO: 380373 - RNA, 18 nt, Respiratory syncytial virus
aaccacaucaacaucuca

SEQ ID NO: 380374 - RNA, 15 nt, Respiratory syncytial virus
aaccauauauacuca

SEQ ID NO: 380375 - RNA, 16 nt, Respiratory syncytial virus
aacgcaccaccaagac

SEQ ID NO: 380376 - RNA, 21 nt, Respiratory syncytial virus
aacuaaucaaacaaaacccau

SEQ ID NO: 380377 - RNA, 18 nt, Respiratory syncytial virus
aacuagcuaaugucaaca

SEQ ID NO: 380378 - RNA, 12 nt, Respiratory syncytial virus
aacuauugcaca

SEQ ID NO: 380379 - RNA, 14 nt, Respiratory syncytial virus
aacuauugcacaaa

SEQ ID NO: 380380 - RNA, 22 nt, Respiratory syncytial virus
aacucaaacaauucaagccaug

SEQ ID NO: 380381 - RNA, 12 nt, Respiratory syncytial virus
aacucaauagau

SEQ ID NO: 380382 - RNA, 22 nt, Respiratory syncytial virus
aacucuggggcaaauaacaaug

SEQ ID NO: 380383 - RNA, 18 nt, Respiratory syncytial virus
aacuuuuagugaacuaau

SEQ ID NO: 380384 - RNA, 14 nt, Respiratory syncytial virus
aagaaaccauagaa

SEQ ID NO: 380385 - RNA, 16 nt, Respiratory syncytial virus
aagacaaaacuuuaug

SEQ ID NO: 380386 - RNA, 19 nt, Respiratory syncytial virus
aagaccugggacacucuca

SEQ ID NO: 380387 - RNA, 20 nt, Respiratory syncytial virus
aagaccugggacacucucaa

SEQ ID NO: 380388 - RNA, 15 nt, Respiratory syncytial virus
aagaucaacuucugu

SEQ ID NO: 380389 - RNA, 21 nt, Respiratory syncytial virus
aagaugcuaaucauaaauuca

SEQ ID NO: 380390 - RNA, 17 nt, Respiratory syncytial virus
aagauggggcaaauaca

SEQ ID NO: 380391 - RNA, 19 nt, Respiratory syncytial virus
aagccaucauccauauuau

SEQ ID NO: 380392 - RNA, 19 nt, Respiratory syncytial virus
aaggaauccuugcaaauuu

SEQ ID NO: 380393 - RNA, 12 nt, Respiratory syncytial virus
aaguaaccaaag

SEQ ID NO: 380394 - RNA, 13 nt, Respiratory syncytial virus
aaguaaccaaaga

SEQ ID NO: 380395 - RNA, 14 nt, Respiratory syncytial virus
aaguaaccaaagaa

SEQ ID NO: 380396 - RNA, 19 nt, Respiratory syncytial virus
aaguagauuccuaguuuau

SEQ ID NO: 380397 - RNA, 21 nt, Respiratory syncytial virus
aagugaacaacccucaccucu

SEQ ID NO: 380398 - RNA, 12 nt, Respiratory syncytial virus
aauaaaacauca

SEQ ID NO: 380399 - RNA, 18 nt, Respiratory syncytial virus
aauaaucauaacaaugaa

SEQ ID NO: 380400 - RNA, 14 nt, Respiratory syncytial virus
aauacaacacaaaa

SEQ ID NO: 380401 - RNA, 19 nt, Respiratory syncytial virus
aauaucacuaaccagagac

SEQ ID NO: 380402 - RNA, 14 nt, Respiratory syncytial virus
aauauccacauggg

SEQ ID NO: 380403 - RNA, 14 nt, Respiratory syncytial virus
aaucaaccauucaa

SEQ ID NO: 380404 - RNA, 15 nt, Respiratory syncytial virus
aaucagccaauccaa

SEQ ID NO: 380405 - RNA, 15 nt, Respiratory syncytial virus
aaucauaacaaugaa

SEQ ID NO: 380406 - RNA, 15 nt, Respiratory syncytial virus
aaucauccaugccag

SEQ ID NO: 380407 - RNA, 23 nt, Respiratory syncytial virus
aaucaucuauuauucauaucauc

SEQ ID NO: 380408 - RNA, 12 nt, Respiratory syncytial virus
aaucaugaaugu

SEQ ID NO: 380409 - RNA, 13 nt, Respiratory syncytial virus
aauccaacuaauc

SEQ ID NO: 380410 - RNA, 15 nt, Respiratory syncytial virus
aauccaacuaaucac

SEQ ID NO: 380411 - RNA, 14 nt, Respiratory syncytial virus
aaucuagcuauuca

SEQ ID NO: 380412 - RNA, 14 nt, Respiratory syncytial virus
aaucucaacuucac

SEQ ID NO: 380413 - RNA, 18 nt, Respiratory syncytial virus
aaucucuuugcuaaucau

SEQ ID NO: 380414 - RNA, 14 nt, Respiratory syncytial virus
aaugauaaucucaa

SEQ ID NO: 380415 - RNA, 14 nt, Respiratory syncytial virus
aaugauacacucaa

SEQ ID NO: 380416 - RNA, 13 nt, Respiratory syncytial virus
auaaucauaacaa

SEQ ID NO: 380417 - RNA, 22 nt, Respiratory syncytial virus
auaaucauuggaggaaauccaa

SEQ ID NO: 380418 - RNA, 15 nt, Respiratory syncytial virus
auaaucccuuuucaa

SEQ ID NO: 380419 - RNA, 20 nt, Respiratory syncytial virus
auaauuuuuuaauaacuuuu

SEQ ID NO: 380420 - RNA, 13 nt, Respiratory syncytial virus
auacauccauaac

SEQ ID NO: 380421 - RNA, 16 nt, Respiratory syncytial virus
auaccagauuaacuua

SEQ ID NO: 380422 - RNA, 13 nt, Respiratory syncytial virus
auacuaauaacaa

SEQ ID NO: 380423 - RNA, 14 nt, Respiratory syncytial virus
auacuaguguuaua

SEQ ID NO: 380424 - RNA, 21 nt, Respiratory syncytial virus
auacuguagggaacaagccca

SEQ ID NO: 380425 - RNA, 15 nt, Respiratory syncytial virus
auagaaguaaccaaa

SEQ ID NO: 380426 - RNA, 17 nt, Respiratory syncytial virus
auagaaguaaccaaaga

SEQ ID NO: 380427 - RNA, 17 nt, Respiratory syncytial virus
auagacaacccaucuau

SEQ ID NO: 380428 - RNA, 21 nt, Respiratory syncytial virus
auagauauagaaguaaccaaa

SEQ ID NO: 380429 - RNA, 11 nt, Respiratory syncytial virus
auagcacaaau

SEQ ID NO: 380430 - RNA, 13 nt, Respiratory syncytial virus
auagcacaaauca

SEQ ID NO: 380431 - RNA, 18 nt, Respiratory syncytial virus
auagcacaaaucacauua

SEQ ID NO: 380432 - RNA, 20 nt, Respiratory syncytial virus
auagccucggcaaaccacaa

SEQ ID NO: 380433 - RNA, 22 nt, Respiratory syncytial virus
auagccucggcaaaccacaaag

SEQ ID NO: 380434 - RNA, 21 nt, Respiratory syncytial virus
auagguauguuauaugcuaug

SEQ ID NO: 380435 - RNA, 19 nt, Respiratory syncytial virus
auagugagaaaacuugaug

SEQ ID NO: 380436 - RNA, 19 nt, Respiratory syncytial virus
auauagaaguaaccaaaga

SEQ ID NO: 380437 - RNA, 17 nt, Respiratory syncytial virus
auaucacuaaccagaga

SEQ ID NO: 380438 - RNA, 22 nt, Respiratory syncytial virus
auaugggugcccauguuccaau

SEQ ID NO: 380439 - RNA, 16 nt, Respiratory syncytial virus
auauuagugucauaac

SEQ ID NO: 380440 - RNA, 19 nt, Respiratory syncytial virus
auauucauagccucggcaa

SEQ ID NO: 380441 - RNA, 14 nt, Respiratory syncytial virus
aucaaccauucaau

SEQ ID NO: 380442 - RNA, 18 nt, Respiratory syncytial virus
aucaacuucugucaucca

SEQ ID NO: 380443 - RNA, 14 nt, Respiratory syncytial virus
aucacagacaugag

SEQ ID NO: 380444 - RNA, 21 nt, Respiratory syncytial virus
aucaccaacccucugugguuc

SEQ ID NO: 380445 - RNA, 14 nt, Respiratory syncytial virus
aucacuuacaauau

SEQ ID NO: 380446 - RNA, 15 nt, Respiratory syncytial virus
aucauaacacacaga

SEQ ID NO: 380447 - RNA, 16 nt, Respiratory syncytial virus
aucaucaaacuauuaa

SEQ ID NO: 380448 - RNA, 22 nt, Respiratory syncytial virus
aucaucaaacuauuaacucaaa

SEQ ID NO: 380449 - RNA, 20 nt, Respiratory syncytial virus
aucaucuauuauucauauca

SEQ ID NO: 380450 - RNA, 12 nt, Respiratory syncytial virus
auccaacuaauc

SEQ ID NO: 380451 - RNA, 18 nt, Respiratory syncytial virus
auccuaaugcuuaccaca

SEQ ID NO: 380452 - RNA, 20 nt, Respiratory syncytial virus
auccucaaaacaaaugcaau

SEQ ID NO: 380453 - RNA, 17 nt, Respiratory syncytial virus
auccuugcugcagucac

SEQ ID NO: 380454 - RNA, 14 nt, Respiratory syncytial virus
aucgauacuuuauc

SEQ ID NO: 380455 - RNA, 14 nt, Respiratory syncytial virus
aucuauaaaccauc

SEQ ID NO: 380456 - RNA, 22 nt, Respiratory syncytial virus
aucuauaaaccaucucacuuac

SEQ ID NO: 380457 - RNA, 14 nt, Respiratory syncytial virus
aucuauagcacaaa

SEQ ID NO: 380458 - RNA, 17 nt, Respiratory syncytial virus
aucuauuauucauauca

SEQ ID NO: 380459 - RNA, 21 nt, Respiratory syncytial virus
aucuccaucaugauugcaaua

SEQ ID NO: 380460 - RNA, 18 nt, Respiratory syncytial virus
aucucuuugcuaaucaua

SEQ ID NO: 380461 - RNA, 21 nt, Respiratory syncytial virus
aucucuuugcuaaucauaauc

SEQ ID NO: 380462 - RNA, 15 nt, Respiratory syncytial virus
aucugauggcacaaa

SEQ ID NO: 380463 - RNA, 18 nt, Respiratory syncytial virus
aucugucaacauagacaa

SEQ ID NO: 380464 - RNA, 23 nt, Respiratory syncytial virus
augaaauccauuggaccucucaa

SEQ ID NO: 380465 - RNA, 20 nt, Respiratory syncytial virus
augauaacaacaauaaucuc

SEQ ID NO: 380466 - RNA, 22 nt, Respiratory syncytial virus
augauacacucaacaaagauca

SEQ ID NO: 380467 - RNA, 19 nt, Respiratory syncytial virus
augaucacagacaugagac

SEQ ID NO: 380468 - RNA, 22 nt, Respiratory syncytial virus
augaugugcagaaacacaucaa

SEQ ID NO: 380469 - RNA, 22 nt, Respiratory syncytial virus
augcaagccaucauccauauua

SEQ ID NO: 380470 - RNA, 12 nt, Respiratory syncytial virus
augcaauucaaa

SEQ ID NO: 380471 - RNA, 15 nt, Respiratory syncytial virus
augcacugcuuguaa

SEQ ID NO: 380472 - RNA, 15 nt, Respiratory syncytial virus
augcagugcagucag

SEQ ID NO: 380473 - RNA, 19 nt, Respiratory syncytial virus
augcagugcagucagcaaa

SEQ ID NO: 380474 - RNA, 14 nt, Respiratory syncytial virus
augcauaaccacac

SEQ ID NO: 380475 - RNA, 18 nt, Respiratory syncytial virus
auggaaaauacauccaua

SEQ ID NO: 380476 - RNA, 13 nt, Respiratory syncytial virus
auggagccugaaa

SEQ ID NO: 380477 - RNA, 13 nt, Respiratory syncytial virus
auggaguugccaa

SEQ ID NO: 380478 - RNA, 13 nt, Respiratory syncytial virus
auggcacaaaaca

SEQ ID NO: 380479 - RNA, 14 nt, Respiratory syncytial virus
auggggcaaauaca

SEQ ID NO: 380480 - RNA, 12 nt, Respiratory syncytial virus
auguauaaucaa

SEQ ID NO: 380481 - RNA, 14 nt, Respiratory syncytial virus
auguauaaucaaaa

SEQ ID NO: 380482 - RNA, 14 nt, Respiratory syncytial virus
augucaacauacua

SEQ ID NO: 380483 - RNA, 18 nt, Respiratory syncytial virus
augucaacauacuaguga

SEQ ID NO: 380484 - RNA, 18 nt, Respiratory syncytial virus
auguccaaaaacaaggac

SEQ ID NO: 380485 - RNA, 18 nt, Respiratory syncytial virus
augugcagaaacacauca

SEQ ID NO: 380486 - RNA, 17 nt, Respiratory syncytial virus
auguuccaaucauccau

SEQ ID NO: 380487 - RNA, 14 nt, Respiratory syncytial virus
auuaacucaaacaa

SEQ ID NO: 380488 - RNA, 17 nt, Respiratory syncytial virus
auuaacucaaacaauuc

SEQ ID NO: 380489 - RNA, 14 nt, Respiratory syncytial virus
auuaagacuaacaa

SEQ ID NO: 380490 - RNA, 16 nt, Respiratory syncytial virus
auuaagacuaacaaua

SEQ ID NO: 380491 - RNA, 22 nt, Respiratory syncytial virus
auuaagagucaugauaaacuca

SEQ ID NO: 380492 - RNA, 15 nt, Respiratory syncytial virus
auuagugucauaaca

SEQ ID NO: 380493 - RNA, 20 nt, Respiratory syncytial virus
auuagugucauaacacucaa

SEQ ID NO: 380494 - RNA, 19 nt, Respiratory syncytial virus
auuauccauucuggcaaug

SEQ ID NO: 380495 - RNA, 23 nt, Respiratory syncytial virus
auucaccaaucugauggcacaaa

SEQ ID NO: 380496 - RNA, 13 nt, Respiratory syncytial virus
auucauaugaaga

SEQ ID NO: 380497 - RNA, 19 nt, Respiratory syncytial virus
auucucaagcaaauucugg

SEQ ID NO: 380498 - RNA, 18 nt, Respiratory syncytial virus
auucuggccuuacuuuac

SEQ ID NO: 380499 - RNA, 13 nt, Respiratory syncytial virus
auuucaaucaaaa

SEQ ID NO: 380500 - RNA, 23 nt, Respiratory syncytial virus
auuucaaucaaaacaaccaaaau

SEQ ID NO: 380501 - RNA, 15 nt, Respiratory syncytial virus
caaaacaaaugcaau

SEQ ID NO: 380502 - RNA, 14 nt, Respiratory syncytial virus
caaaaccacaucaa

SEQ ID NO: 380503 - RNA, 20 nt, Respiratory syncytial virus
caaaaccacaucaacaucuc

SEQ ID NO: 380504 - RNA, 12 nt, Respiratory syncytial virus
caaaacccaucu

SEQ ID NO: 380505 - RNA, 13 nt, Respiratory syncytial virus
caaaacuauacaa

SEQ ID NO: 380506 - RNA, 13 nt, Respiratory syncytial virus
caaaauaaccaua

SEQ ID NO: 380507 - RNA, 13 nt, Respiratory syncytial virus
caaaauauggcac

SEQ ID NO: 380508 - RNA, 14 nt, Respiratory syncytial virus
caaacaacaugcag

SEQ ID NO: 380509 - RNA, 20 nt, Respiratory syncytial virus
caaacaacaugcagugcagu

SEQ ID NO: 380510 - RNA, 17 nt, Respiratory syncytial virus
caaaccacaaagucaca

SEQ ID NO: 380511 - RNA, 21 nt, Respiratory syncytial virus
caaacuuucuaccuacauucu

SEQ ID NO: 380512 - RNA, 19 nt, Respiratory syncytial virus
caaagaaagcccuauaaca

SEQ ID NO: 380513 - RNA, 23 nt, Respiratory syncytial virus
caaagaaagcccuauaacaucaa

SEQ ID NO: 380514 - RNA, 18 nt, Respiratory syncytial virus
caaagacugaugaucaca

SEQ ID NO: 380515 - RNA, 19 nt, Respiratory syncytial virus
caaagaucaacuucuguca

SEQ ID NO: 380516 - RNA, 22 nt, Respiratory syncytial virus
caaaggcuaucuuagugcucua

SEQ ID NO: 380517 - RNA, 16 nt, Respiratory syncytial virus
caaauaacaauggagu

SEQ ID NO: 380518 - RNA, 17 nt, Respiratory syncytial virus
caaauauccacacccaa

SEQ ID NO: 380519 - RNA, 16 nt, Respiratory syncytial virus
cccauguuccaaucau

SEQ ID NO: 380520 - RNA, 21 nt, Respiratory syncytial virus
cccucugugguucaacuaauc

SEQ ID NO: 380521 - RNA, 20 nt, Respiratory syncytial virus
ccuauaacaucaaauucaac

SEQ ID NO: 380522 - RNA, 17 nt, Respiratory syncytial virus
ccucaaaacaaaugcaa

SEQ ID NO: 380523 - RNA, 22 nt, Respiratory syncytial virus
ccucaccucuuuacaaaaccac

SEQ ID NO: 380524 - RNA, 14 nt, Respiratory syncytial virus
ccucggcaaaccac

SEQ ID NO: 380525 - RNA, 15 nt, Respiratory syncytial virus
ccugcaucacuuaca

SEQ ID NO: 380526 - RNA, 16 nt, Respiratory syncytial virus
ccugcaucacuuacaa

SEQ ID NO: 380527 - RNA, 19 nt, Respiratory syncytial virus
ccugcaucacuuacaauau

SEQ ID NO: 380528 - RNA, 18 nt, Respiratory syncytial virus
ccuugcaaauuugaaauu

SEQ ID NO: 380529 - RNA, 21 nt, Respiratory syncytial virus
cgaggucauugcuugaauggu

SEQ ID NO: 380530 - RNA, 21 nt, Respiratory syncytial virus
cgaugacccugcaucacuuac

SEQ ID NO: 380531 - RNA, 22 nt, Respiratory syncytial virus
cgcaauccuugcugcagucaca

SEQ ID NO: 380532 - RNA, 20 nt, Respiratory syncytial virus
cgccaaucagccaauccaaa

SEQ ID NO: 380533 - RNA, 18 nt, Respiratory syncytial virus
cggcaaaccacaaaguca

SEQ ID NO: 380534 - RNA, 20 nt, Respiratory syncytial virus
cggcaaaccacaaagucaca

SEQ ID NO: 380535 - RNA, 14 nt, Respiratory syncytial virus
cuaacaauaacguu

SEQ ID NO: 380536 - RNA, 21 nt, Respiratory syncytial virus
cuaaccagagacaucauaaca

SEQ ID NO: 380537 - RNA, 20 nt, Respiratory syncytial virus
cuaaucauaaucuccaucau

SEQ ID NO: 380538 - RNA, 17 nt, Respiratory syncytial virus
cuaaucauguucuuaca

SEQ ID NO: 380539 - RNA, 15 nt, Respiratory syncytial virus
cuaaugucaacauac

SEQ ID NO: 380540 - RNA, 23 nt, Respiratory syncytial virus
cuaccaaauuccuagaaucaaua

SEQ ID NO: 380541 - RNA, 13 nt, Respiratory syncytial virus
cuagcuaauguca

SEQ ID NO: 380542 - RNA, 18 nt, Respiratory syncytial virus
cuaguaaguuucaaagaa

SEQ ID NO: 380543 - RNA, 17 nt, Respiratory syncytial virus
cuauagcacaaaucaca

SEQ ID NO: 380544 - RNA, 17 nt, Respiratory syncytial virus
cuauauuucaaucaaaa

SEQ ID NO: 380545 - RNA, 21 nt, Respiratory syncytial virus
cuaucauuggauuuucuuaaa

SEQ ID NO: 380546 - RNA, 16 nt, Respiratory syncytial virus
cuauguauaaucaaaa

SEQ ID NO: 380547 - RNA, 15 nt, Respiratory syncytial virus
cuauuauucauauca

SEQ ID NO: 380548 - RNA, 14 nt, Respiratory syncytial virus
cuauugcacaaagu

SEQ ID NO: 380549 - RNA, 15 nt, Respiratory syncytial virus
cucaaacaauucaag

SEQ ID NO: 380550 - RNA, 16 nt, Respiratory syncytial virus
cucaacaaagaucaac

SEQ ID NO: 380551 - RNA, 15 nt, Respiratory syncytial virus
cucaagaagugcagu

SEQ ID NO: 380552 - RNA, 17 nt, Respiratory syncytial virus
cucaccaugcaagccau

SEQ ID NO: 380553 - RNA, 18 nt, Respiratory syncytial virus
cucacccauccaaccaaa

SEQ ID NO: 380554 - RNA, 21 nt, Respiratory syncytial virus
cucaccgaaucaaccauucaa

SEQ ID NO: 380555 - RNA, 19 nt, Respiratory syncytial virus
cucauagacaacccaucua

SEQ ID NO: 380556 - RNA, 22 nt, Respiratory syncytial virus
cucauagacaacccaucuauca

SEQ ID NO: 380557 - RNA, 20 nt, Respiratory syncytial virus
cucaucuauaaaccaucuca

SEQ ID NO: 380558 - RNA, 17 nt, Respiratory syncytial virus
cuccacauacacagcug

SEQ ID NO: 380559 - RNA, 16 nt, Respiratory syncytial virus
cucggcaaaccacaaa

SEQ ID NO: 380560 - RNA, 12 nt, Respiratory syncytial virus
cucucaaucauc

SEQ ID NO: 380561 - RNA, 19 nt, Respiratory syncytial virus
cucucaucuauaaaccauc

SEQ ID NO: 380562 - RNA, 21 nt, Respiratory syncytial virus
cucuguuuugcuuccagucaa

SEQ ID NO: 380563 - RNA, 21 nt, Respiratory syncytial virus
cugaaauaacaacuucaugca

SEQ ID NO: 380564 - RNA, 17 nt, Respiratory syncytial virus
cugaauacaacacaaaa

SEQ ID NO: 380565 - RNA, 18 nt, Respiratory syncytial virus
cuggcaaugauaaucuca

SEQ ID NO: 380566 - RNA, 18 nt, Respiratory syncytial virus
cuggggcaaauaugucac

SEQ ID NO: 380567 - RNA, 18 nt, Respiratory syncytial virus
cuguaacagaauugcagu

SEQ ID NO: 380568 - RNA, 19 nt, Respiratory syncytial virus
cuguagggaacaagcccaa

SEQ ID NO: 380569 - RNA, 20 nt, Respiratory syncytial virus
cugucaacauagacaaguca

SEQ ID NO: 380570 - RNA, 14 nt, Respiratory syncytial virus
cugucaacucaaua

SEQ ID NO: 380571 - RNA, 23 nt, Respiratory syncytial virus
cuuaaaucuauagcacaaaucac

SEQ ID NO: 380572 - RNA, 19 nt, Respiratory syncytial virus
cuuauaaaagaacuagcua

SEQ ID NO: 380573 - RNA, 22 nt, Respiratory syncytial virus
cuucacgaaggcuccacauaca

SEQ ID NO: 380574 - RNA, 23 nt, Respiratory syncytial virus
cuucacgaaggcuccacauacac

SEQ ID NO: 380575 - RNA, 13 nt, Respiratory syncytial virus
cuugagacuauaa

SEQ ID NO: 380576 - RNA, 20 nt, Respiratory syncytial virus
cuugauugaugcaauucaaa

SEQ ID NO: 380577 - RNA, 21 nt, Respiratory syncytial virus
cuuguaagacaaaacuuuaug

SEQ ID NO: 380578 - RNA, 22 nt, Respiratory syncytial virus
cuuuacaaaaccacaucaacau

SEQ ID NO: 380579 - RNA, 20 nt, Respiratory syncytial virus
cuuugcuaaucauaaucucc

SEQ ID NO: 380580 - RNA, 21 nt, Respiratory syncytial virus
cuuuucaaaacuauacaaaga

SEQ ID NO: 380581 - RNA, 18 nt, Respiratory syncytial virus
gaaagcccuauaacauca

SEQ ID NO: 380582 - RNA, 15 nt, Respiratory syncytial virus
gaaauaacaacuuca

SEQ ID NO: 380583 - RNA, 22 nt, Respiratory syncytial virus
gaaauaacaacuucaugcauaa

SEQ ID NO: 380584 - RNA, 16 nt, Respiratory syncytial virus
gaaauucgaggucauu

SEQ ID NO: 380585 - RNA, 23 nt, Respiratory syncytial virus
gaacuagcuaaugucaacauacu

SEQ ID NO: 380586 - RNA, 21 nt, Respiratory syncytial virus
gaacuucaucgaaacucucau

SEQ ID NO: 380587 - RNA, 21 nt, Respiratory syncytial virus
gaagacccuacgccaagugau

SEQ ID NO: 380588 - RNA, 16 nt, Respiratory syncytial virus
gaagaugcaaacaaca

SEQ ID NO: 380589 - RNA, 22 nt, Respiratory syncytial virus
gaagaugcuaaucauaaauuca

SEQ ID NO: 380590 - RNA, 15 nt, Respiratory syncytial virus
gaaggcuccacauac

SEQ ID NO: 380591 - RNA, 14 nt, Respiratory syncytial virus
gaauaccagauuaa

SEQ ID NO: 380592 - RNA, 14 nt, Respiratory syncytial virus
gaaucaaccauuca

SEQ ID NO: 380593 - RNA, 15 nt, Respiratory syncytial virus
gaaucaaccauucaa

SEQ ID NO: 380594 - RNA, 19 nt, Respiratory syncytial virus
gaaucaaccauucaaugaa

SEQ ID NO: 380595 - RNA, 15 nt, Respiratory syncytial virus
gaaucuagcuauuca

SEQ ID NO: 380596 - RNA, 23 nt, Respiratory syncytial virus
gaauuagauaaauauaaaagugc

SEQ ID NO: 380597 - RNA, 18 nt, Respiratory syncytial virus
gacacucucaaucaucua

SEQ ID NO: 380598 - RNA, 19 nt, Respiratory syncytial virus
gaccaacaaacaaaccaac

SEQ ID NO: 380599 - RNA, 20 nt, Respiratory syncytial virus
gaccaacaaacaaaccaacu

SEQ ID NO: 380600 - RNA, 14 nt, Respiratory syncytial virus
gaccauugucacuu

SEQ ID NO: 380601 - RNA, 18 nt, Respiratory syncytial virus
gacuugauugaugcaauu

SEQ ID NO: 380602 - RNA, 16 nt, Respiratory syncytial virus
gagauaguauugauac

SEQ ID NO: 380603 - RNA, 21 nt, Respiratory syncytial virus
gaggugucauuuuagucauaa

SEQ ID NO: 380604 - RNA, 23 nt, Respiratory syncytial virus
gaguuacuauguauaaucaaaag

SEQ ID NO: 380605 - RNA, 16 nt, Respiratory syncytial virus
gauacuauaguuacaa

SEQ ID NO: 380606 - RNA, 19 nt, Respiratory syncytial virus
gauauagaaguaaccaaag

SEQ ID NO: 380607 - RNA, 20 nt, Respiratory syncytial virus
gaugauauauacacaauaua

SEQ ID NO: 380608 - RNA, 16 nt, Respiratory syncytial virus
gauugaugcaauucaa

SEQ ID NO: 380609 - RNA, 15 nt, Respiratory syncytial virus
gauugcaauacugaa

SEQ ID NO: 380610 - RNA, 16 nt, Respiratory syncytial virus
gcaaauaaaacaucau

SEQ ID NO: 380611 - RNA, 15 nt, Respiratory syncytial virus
gcaaauacaccaucc

SEQ ID NO: 380612 - RNA, 14 nt, Respiratory syncytial virus
gcaaugauaaucuc

SEQ ID NO: 380613 - RNA, 18 nt, Respiratory syncytial virus
gcaaugauaaucucaacu

SEQ ID NO: 380614 - RNA, 17 nt, Respiratory syncytial virus
gcacaccggcaaccaac

SEQ ID NO: 380615 - RNA, 17 nt, Respiratory syncytial virus
gcaguugcucaugcaaa

SEQ ID NO: 380616 - RNA, 20 nt, Respiratory syncytial virus
gccaaucagccaauccaaaa

SEQ ID NO: 380617 - RNA, 16 nt, Respiratory syncytial virus
gccaauccucaaaaca

SEQ ID NO: 380618 - RNA, 14 nt, Respiratory syncytial virus
gccaucauauucau

SEQ ID NO: 380619 - RNA, 22 nt, Respiratory syncytial virus
gccaugaccaaaucaaccagaa

SEQ ID NO: 380620 - RNA, 15 nt, Respiratory syncytial virus
gcguauuauugcaaa

SEQ ID NO: 380621 - RNA, 16 nt, Respiratory syncytial virus
ucucacuuacauuauu

SEQ ID NO: 380622 - RNA, 19 nt, Respiratory syncytial virus
ucugcucauagacaaccca

SEQ ID NO: 380623 - RNA, 21 nt, Respiratory syncytial virus
ucugcucauagacaacccauc

SEQ ID NO: 380624 - RNA, 15 nt, Respiratory syncytial virus
ucuuaaaaucugaac

SEQ ID NO: 380625 - RNA, 20 nt, Respiratory syncytial virus
ucuuaaaaucugaacuucau

SEQ ID NO: 380626 - RNA, 16 nt, Respiratory syncytial virus
ucuuugcuaaucauaa

SEQ ID NO: 380627 - RNA, 14 nt, Respiratory syncytial virus
ugaaacuauugcac

SEQ ID NO: 380628 - RNA, 17 nt, Respiratory syncytial virus
ugaaacuauugcacaaa

SEQ ID NO: 380629 - RNA, 19 nt, Respiratory syncytial virus
ugaaauucgaggucauugc

SEQ ID NO: 380630 - RNA, 16 nt, Respiratory syncytial virus
ugaacuaagauauuaa

SEQ ID NO: 380631 - RNA, 20 nt, Respiratory syncytial virus
ugaagaauuuuaucaaacaa

SEQ ID NO: 380632 - RNA, 15 nt, Respiratory syncytial virus
ugaaugauacacuca

SEQ ID NO: 380633 - RNA, 16 nt, Respiratory syncytial virus
ugaaugauacacucaa

SEQ ID NO: 380634 - RNA, 22 nt, Respiratory syncytial virus
ugagaccauugucacuugagac

SEQ ID NO: 380635 - RNA, 15 nt, Respiratory syncytial virus
ugcaagccaucaucc

SEQ ID NO: 380636 - RNA, 19 nt, Respiratory syncytial virus
ugcaagccaucauccauau

SEQ ID NO: 380637 - RNA, 17 nt, Respiratory syncytial virus
ugcaauuaccgcaaucc

SEQ ID NO: 380638 - RNA, 17 nt, Respiratory syncytial virus
ugcaguugcucaugcaa

SEQ ID NO: 380639 - RNA, 19 nt, Respiratory syncytial virus
ugcauaaccacacuccaua

SEQ ID NO: 380640 - RNA, 14 nt, Respiratory syncytial virus
ugccaauccucaaa

SEQ ID NO: 380641 - RNA, 21 nt, Respiratory syncytial virus
uggaaauucugcuaaugugua

SEQ ID NO: 380642 - RNA, 17 nt, Respiratory syncytial virus
uggagccucagaucauc

SEQ ID NO: 380643 - RNA, 22 nt, Respiratory syncytial virus
uggaggaaauccaacuaaucac

SEQ ID NO: 380644 - RNA, 13 nt, Respiratory syncytial virus
uggcacaaaacag

SEQ ID NO: 380645 - RNA, 19 nt, Respiratory syncytial virus
uggcacuuuuccuaugcca

SEQ ID NO: 380646 - RNA, 20 nt, Respiratory syncytial virus
uggcauguuauuaaucacag

SEQ ID NO: 380647 - RNA, 19 nt, Respiratory syncytial virus
ugggacacucucaaucauc

SEQ ID NO: 380648 - RNA, 12 nt, Respiratory syncytial virus
uggggcaaauaa

SEQ ID NO: 380649 - RNA, 17 nt, Respiratory syncytial virus
uggggcaaauaaaucaa

SEQ ID NO: 380650 - RNA, 14 nt, Respiratory syncytial virus
uggucaacuaugaa

SEQ ID NO: 380651 - RNA, 22 nt, Respiratory syncytial virus
uguaacagaauugcaguugcuc

SEQ ID NO: 380652 - RNA, 23 nt, Respiratory syncytial virus
uguaagacaaaacuuuauguuaa

SEQ ID NO: 380653 - RNA, 17 nt, Respiratory syncytial virus
uguacaucaacacacaa

SEQ ID NO: 380654 - RNA, 21 nt, Respiratory syncytial virus
uguauagugagaaaacuugau

SEQ ID NO: 380655 - RNA, 15 nt, Respiratory syncytial virus
uguauauuaacuaaa

SEQ ID NO: 380656 - RNA, 13 nt, Respiratory syncytial virus
ugucaacauacua

SEQ ID NO: 380657 - RNA, 21 nt, Respiratory syncytial virus
ugucaacauagacaagucaac

SEQ ID NO: 380658 - RNA, 19 nt, Respiratory syncytial virus
ugucacgaaggaauccuug

SEQ ID NO: 380659 - RNA, 23 nt, Respiratory syncytial virus
ugucauccagcaaauacaccauc

SEQ ID NO: 380660 - RNA, 18 nt, Respiratory syncytial virus
ugugcagaaacacaucaa

SEQ ID NO: 380661 - RNA, 23 nt, Respiratory syncytial virus
uuaaaucuauagcacaaaucaca

SEQ ID NO: 380662 - RNA, 17 nt, Respiratory syncytial virus
uuaagacuaacaauaac

SEQ ID NO: 380663 - RNA, 21 nt, Respiratory syncytial virus
uuaauaacuuuuagugaacua

SEQ ID NO: 380664 - RNA, 22 nt, Respiratory syncytial virus
uuacuauguauaaucaaaagaa

SEQ ID NO: 380665 - RNA, 15 nt, Respiratory syncytial virus
uuauaugcuaugucu

SEQ ID NO: 380666 - RNA, 20 nt, Respiratory syncytial virus
uuaucaaacaacaugcagug

SEQ ID NO: 380667 - RNA, 12 nt, Respiratory syncytial virus
uuauucauauca

SEQ ID NO: 380668 - RNA, 13 nt, Respiratory syncytial virus
uuauucauaucau

SEQ ID NO: 380669 - RNA, 15 nt, Respiratory syncytial virus
uucaauacaaugucu

SEQ ID NO: 380670 - RNA, 16 nt, Respiratory syncytial virus
uucaccaucauaauca

SEQ ID NO: 380671 - RNA, 20 nt, Respiratory syncytial virus
uucaccaucauaaucaccaa

SEQ ID NO: 380672 - RNA, 18 nt, Respiratory syncytial virus
uucacgaaggcuccacau

SEQ ID NO: 380673 - RNA, 19 nt, Respiratory syncytial virus
uucacuucaccaucauaau

SEQ ID NO: 380674 - RNA, 17 nt, Respiratory syncytial virus
uuccuagaaucaauaaa

SEQ ID NO: 380675 - RNA, 22 nt, Respiratory syncytial virus
uugauacuccuaauuaugaugu

SEQ ID NO: 380676 - RNA, 14 nt, Respiratory syncytial virus
uugcaaaaagccau

SEQ ID NO: 380677 - RNA, 12 nt, Respiratory syncytial virus
uugccaauccuc

SEQ ID NO: 380678 - RNA, 18 nt, Respiratory syncytial virus
uugccaauccucaaaaca

SEQ ID NO: 380679 - RNA, 11 nt, Respiratory syncytial virus
uugcuaaucau

SEQ ID NO: 380680 - RNA, 15 nt, Respiratory syncytial virus
uugcuuccagucaaa

SEQ ID NO: 380681 - RNA, 19 nt, Respiratory syncytial virus
uugcuuccagucaaaacau

SEQ ID NO: 380682 - RNA, 14 nt, Respiratory syncytial virus
uuuauauacuugau

SEQ ID NO: 380683 - RNA, 20 nt, Respiratory syncytial virus
uuuaucaaacaacaugcagu

SEQ ID NO: 380684 - RNA, 15 nt, Respiratory syncytial virus
uuucaaucaaaacaa

SEQ ID NO: 380685 - RNA, 19 nt, Respiratory syncytial virus
uuucaaucaaaacaaccaa

SEQ ID NO: 380686 - RNA, 13 nt, Respiratory syncytial virus
uuuccuaugccaa

SEQ ID NO: 380687 - RNA, 15 nt, Respiratory syncytial virus
uuugcuaaucauaau

SEQ ID NO: 380688 - RNA, 18 nt, Respiratory syncytial virus
uuugcuaaucauaaucuc

SEQ ID NO: 380689 - RNA, 13 nt, Reston Ebola virus (REBOV)
aaaaacuaaucca

SEQ ID NO: 380690 - RNA, 20 nt, Reston Ebola virus (REBOV)
aaaacauuugaugaagauua

SEQ ID NO: 380691 - RNA, 19 nt, Reston Ebola virus (REBOV)
aaaacuaaaccaagcaaua

SEQ ID NO: 380692 - RNA, 18 nt, Reston Ebola virus (REBOV)
aaacauuugaugaagauu

SEQ ID NO: 380693 - RNA, 20 nt, Reston Ebola virus (REBOV)
aaacuuggguuuugccuuau

SEQ ID NO: 380694 - RNA, 17 nt, Reston Ebola virus (REBOV)
aaagauuuagaguguau

SEQ ID NO: 380695 - RNA, 14 nt, Reston Ebola virus (REBOV)
aaauaauacuuuau

SEQ ID NO: 380696 - RNA, 13 nt, Reston Ebola virus (REBOV)
aaauggagauuau

SEQ ID NO: 380697 - RNA, 22 nt, Reston Ebola virus (REBOV)
aaauuaagaaaaacauuugaug

SEQ ID NO: 380698 - RNA, 19 nt, Reston Ebola virus (REBOV)
aacaaucuacuaucgcaau

SEQ ID NO: 380699 - RNA, 19 nt, Reston Ebola virus (REBOV)
aacaauggcuaagauuuca

SEQ ID NO: 380700 - RNA, 18 nt, Reston Ebola virus (REBOV)
aacaauguaccaagugaa

SEQ ID NO: 380701 - RNA, 13 nt, Reston Ebola virus (REBOV)
aacacagcaucca

SEQ ID NO: 380702 - RNA, 19 nt, Reston Ebola virus (REBOV)
aacagcagcaaaccaggaa

SEQ ID NO: 380703 - RNA, 19 nt, Reston Ebola virus (REBOV)
aaccagucgguauuuucca

SEQ ID NO: 380704 - RNA, 18 nt, Reston Ebola virus (REBOV)
aaccuucaucgccaguaa

SEQ ID NO: 380705 - RNA, 22 nt, Reston Ebola virus (REBOV)
aacuuaucggugcgagauuucc

SEQ ID NO: 380706 - RNA, 23 nt, Reston Ebola virus (REBOV)
aacuuaucggugcgagauuuccu

SEQ ID NO: 380707 - RNA, 19 nt, Reston Ebola virus (REBOV)
aacuuggguuuugccuuau

SEQ ID NO: 380708 - RNA, 19 nt, Reston Ebola virus (REBOV)
aagaaaaacauuugaugaa

SEQ ID NO: 380709 - RNA, 21 nt, Reston Ebola virus (REBOV)
aagagaaguucaacccaguca

SEQ ID NO: 380710 - RNA, 20 nt, Reston Ebola virus (REBOV)
aagaguuccauuuaguaaua

SEQ ID NO: 380711 - RNA, 15 nt, Reston Ebola virus (REBOV)
aagcuaaauacacuu

SEQ ID NO: 380712 - RNA, 18 nt, Reston Ebola virus (REBOV)
aagguagcugauucacug

SEQ ID NO: 380713 - RNA, 22 nt, Reston Ebola virus (REBOV)
aaguaagguagcugauucacug

SEQ ID NO: 380714 - RNA, 20 nt, Reston Ebola virus (REBOV)
aaguaaucaugauuuuauga

SEQ ID NO: 380715 - RNA, 14 nt, Reston Ebola virus (REBOV)
aaguccaaccauga

SEQ ID NO: 380716 - RNA, 24 nt, Reston Ebola virus (REBOV)
aagugaacagccgaacaacacagc

SEQ ID NO: 380717 - RNA, 11 nt, Reston Ebola virus (REBOV)
aauaacauguc

SEQ ID NO: 380718 - RNA, 13 nt, Reston Ebola virus (REBOV)
aauacacuuuauc

SEQ ID NO: 380719 - RNA, 22 nt, Reston Ebola virus (REBOV)
aauagauagcccugacuagaca

SEQ ID NO: 380720 - RNA, 16 nt, Reston Ebola virus (REBOV)
aaucaagcagaggcaa

SEQ ID NO: 380721 - RNA, 23 nt, Reston Ebola virus (REBOV)
aaucaucauaguaugaggaauaa

SEQ ID NO: 380722 - RNA, 16 nt, Reston Ebola virus (REBOV)
aauccauuauaacuua

SEQ ID NO: 380723 - RNA, 18 nt, Reston Ebola virus (REBOV)
aaucuaauuuuccagucu

SEQ ID NO: 380724 - RNA, 20 nt, Reston Ebola virus (REBOV)
cucauauuuugaucaaguaa

SEQ ID NO: 380725 - RNA, 17 nt, Reston Ebola virus (REBOV)
cuuaaaacaaucuacua

SEQ ID NO: 380726 - RNA, 13 nt, Reston Ebola virus (REBOV)
cuuaauuguuaga

SEQ ID NO: 380727 - RNA, 17 nt, Reston Ebola virus (REBOV)
cuuacaaacaugcacaa

SEQ ID NO: 380728 - RNA, 15 nt, Reston Ebola virus (REBOV)
cuugaccgauucauc

SEQ ID NO: 380729 - RNA, 22 nt, Reston Ebola virus (REBOV)
cuuugcuuauauugguguaacu

SEQ ID NO: 380730 - RNA, 18 nt, Reston Ebola virus (REBOV)
gaaaaaaucaugauugua

SEQ ID NO: 380731 - RNA, 15 nt, Reston Ebola virus (REBOV)
gaaaaugugaucuaa

SEQ ID NO: 380732 - RNA, 13 nt, Reston Ebola virus (REBOV)
gaaauggagauua

SEQ ID NO: 380733 - RNA, 21 nt, Reston Ebola virus (REBOV)
gaacaacacagcauccauuga

SEQ ID NO: 380734 - RNA, 13 nt, Reston Ebola virus (REBOV)
gaacaaugccuaa

SEQ ID NO: 380735 - RNA, 14 nt, Reston Ebola virus (REBOV)
gaacauagucauaa

SEQ ID NO: 380736 - RNA, 15 nt, Reston Ebola virus (REBOV)
gacuauugaacuauu

SEQ ID NO: 380737 - RNA, 17 nt, Reston Ebola virus (REBOV)
gacuucggugugcaauu

SEQ ID NO: 380738 - RNA, 20 nt, Reston Ebola virus (REBOV)
gagaaaugaccccaguuccu

SEQ ID NO: 380739 - RNA, 16 nt, Reston Ebola virus (REBOV)
gagacaaucacagguu

SEQ ID NO: 380740 - RNA, 15 nt, Reston Ebola virus (REBOV)
gagacggccaacagc

SEQ ID NO: 380741 - RNA, 17 nt, Reston Ebola virus (REBOV)
gagacggccaacagcag

SEQ ID NO: 380742 - RNA, 13 nt, Reston Ebola virus (REBOV)
gagauaaauggac

SEQ ID NO: 380743 - RNA, 14 nt, Reston Ebola virus (REBOV)
gagcuucuacuauc

SEQ ID NO: 380744 - RNA, 18 nt, Reston Ebola virus (REBOV)
gagguugauaacaaugua

SEQ ID NO: 380745 - RNA, 13 nt, Reston Ebola virus (REBOV)
gaguauacucaaa

SEQ ID NO: 380746 - RNA, 18 nt, Reston Ebola virus (REBOV)
gaguugguuacacaguga

SEQ ID NO: 380747 - RNA, 17 nt, Reston Ebola virus (REBOV)
gauaaauaauacuuuau

SEQ ID NO: 380748 - RNA, 21 nt, Reston Ebola virus (REBOV)
gauagguaaucuaacacugaa

SEQ ID NO: 380749 - RNA, 17 nt, Reston Ebola virus (REBOV)
gaucaaguaaucaugau

SEQ ID NO: 380750 - RNA, 14 nt, Reston Ebola virus (REBOV)
gauucuuaaucuaa

SEQ ID NO: 380751 - RNA, 18 nt, Reston Ebola virus (REBOV)
gauuugaacauagucaua

SEQ ID NO: 380752 - RNA, 13 nt, Reston Ebola virus (REBOV)
gcaaaccaggaac

SEQ ID NO: 380753 - RNA, 12 nt, Reston Ebola virus (REBOV)
gcagcaaaccag

SEQ ID NO: 380754 - RNA, 13 nt, Reston Ebola virus (REBOV)
gcaguaaccagaa

SEQ ID NO: 380755 - RNA, 13 nt, Reston Ebola virus (REBOV)
gcauugagcacug

SEQ ID NO: 380756 - RNA, 22 nt, Reston Ebola virus (REBOV)
gcauuguugaguuaacuaucua

SEQ ID NO: 380757 - RNA, 16 nt, Reston Ebola virus (REBOV)
gcauuucuuaaauggg

SEQ ID NO: 380758 - RNA, 16 nt, Reston Ebola virus (REBOV)
gcauuucuuaucuuca

SEQ ID NO: 380759 - RNA, 17 nt, Reston Ebola virus (REBOV)
gccccaaguccaaccau

SEQ ID NO: 380760 - RNA, 15 nt, Reston Ebola virus (REBOV)
gcggagcuucuacua

SEQ ID NO: 380761 - RNA, 18 nt, Reston Ebola virus (REBOV)
gcuaguaauuuuaaucuc

SEQ ID NO: 380762 - RNA, 16 nt, Reston Ebola virus (REBOV)
gcuuacgccuagauaa

SEQ ID NO: 380763 - RNA, 14 nt, Reston Ebola virus (REBOV)
ggagauaaauggac

SEQ ID NO: 380764 - RNA, 18 nt, Reston Ebola virus (REBOV)
ggaguuuuuuaaucuaau

SEQ ID NO: 380765 - RNA, 18 nt, Reston Ebola virus (REBOV)
ggccaacagcagcaaacc

SEQ ID NO: 380766 - RNA, 23 nt, Reston Ebola virus (REBOV)
ggccaacagcagcaaaccaggaa

SEQ ID NO: 380767 - RNA, 13 nt, Reston Ebola virus (REBOV)
gggauaaauaaua

SEQ ID NO: 380768 - RNA, 16 nt, Reston Ebola virus (REBOV)
gggaucaauagacuaa

SEQ ID NO: 380769 - RNA, 18 nt, Reston Ebola virus (REBOV)
ggucuuauuugaauauga

SEQ ID NO: 380770 - RNA, 18 nt, Reston Ebola virus (REBOV)
ggucuuuuugaaauggag

SEQ ID NO: 380771 - RNA, 14 nt, Reston Ebola virus (REBOV)
ggugcgagauuucc

SEQ ID NO: 380772 - RNA, 17 nt, Reston Ebola virus (REBOV)
guaaucaugauuuuaug

SEQ ID NO: 380773 - RNA, 15 nt, Reston Ebola virus (REBOV)
guaauuuuaaucucc

SEQ ID NO: 380774 - RNA, 18 nt, Reston Ebola virus (REBOV)
guacaugaaugagaauua

SEQ ID NO: 380775 - RNA, 21 nt, Reston Ebola virus (REBOV)
guacaugacuugaauguaaua

SEQ ID NO: 380776 - RNA, 21 nt, Reston Ebola virus (REBOV)
guaugucuagcaaauuaucaa

SEQ ID NO: 380777 - RNA, 16 nt, Reston Ebola virus (REBOV)
gucccaccaggaaaca

SEQ ID NO: 380778 - RNA, 19 nt, Reston Ebola virus (REBOV)
gucuagcaaauuaucaaua

SEQ ID NO: 380779 - RNA, 14 nt, Reston Ebola virus (REBOV)
gugcaauugucaag

SEQ ID NO: 380780 - RNA, 20 nt, Reston Ebola virus (REBOV)
gugggucuuaucuagcauug

SEQ ID NO: 380781 - RNA, 15 nt, Reston Ebola virus (REBOV)
guucuugauuugaac

SEQ ID NO: 380782 - RNA, 23 nt, Reston Ebola virus (REBOV)
guugguuacacagugaguauuag

SEQ ID NO: 380783 - RNA, 13 nt, Reston Ebola virus (REBOV)
guuuuuuaaucua

SEQ ID NO: 380784 - RNA, 22 nt, Reston Ebola virus (REBOV)
uaaaaccuucaucgccaguaaa

SEQ ID NO: 380785 - RNA, 20 nt, Reston Ebola virus (REBOV)
uaaacuuggguuuugccuua

SEQ ID NO: 380786 - RNA, 22 nt, Reston Ebola virus (REBOV)
uaaauaauacuuuauauuucug

SEQ ID NO: 380787 - RNA, 13 nt, Reston Ebola virus (REBOV)
uaaauacacuuaa

SEQ ID NO: 380788 - RNA, 21 nt, Reston Ebola virus (REBOV)
uaaauacacuuaagacuugac

SEQ ID NO: 380789 - RNA, 21 nt, Reston Ebola virus (REBOV)
uaaauucuccuaaccucauau

SEQ ID NO: 380790 - RNA, 18 nt, Reston Ebola virus (REBOV)
uaacaagugaugaagauu

SEQ ID NO: 380791 - RNA, 16 nt, Reston Ebola virus (REBOV)
uaacuaucuaaucuau

SEQ ID NO: 380792 - RNA, 23 nt, Reston Ebola virus (REBOV)
uaacuuaucggugcgagauuucc

SEQ ID NO: 380793 - RNA, 17 nt, Reston Ebola virus (REBOV)
uaagaguuuaaguaaua

SEQ ID NO: 380794 - RNA, 21 nt, Reston Ebola virus (REBOV)
uaauacgacuucggugugcaa

SEQ ID NO: 380795 - RNA, 15 nt, Reston Ebola virus (REBOV)
uaaucaugauuuuau

SEQ ID NO: 380796 - RNA, 13 nt, Reston Ebola virus (REBOV)
uaauccauuauaa

SEQ ID NO: 380797 - RNA, 16 nt, Reston Ebola virus (REBOV)
uaauugcauugagcac

SEQ ID NO: 380798 - RNA, 14 nt, Reston Ebola virus (REBOV)
uaauuuuaaucucc

SEQ ID NO: 380799 - RNA, 14 nt, Reston Ebola virus (REBOV)
uacaaacaugcaca

SEQ ID NO: 380800 - RNA, 23 nt, Reston Ebola virus (REBOV)
uacaugaaugagaauuaguugug

SEQ ID NO: 380801 - RNA, 13 nt, Reston Ebola virus (REBOV)
uacauguguauau

SEQ ID NO: 380802 - RNA, 20 nt, Reston Ebola virus (REBOV)
uaccacuccgagauggaucc

SEQ ID NO: 380803 - RNA, 19 nt, Reston Ebola virus (REBOV)
uacgccuagauaacuaaua

SEQ ID NO: 380804 - RNA, 18 nt, Reston Ebola virus (REBOV)
uacuaucugcaguaacca

SEQ ID NO: 380805 - RNA, 17 nt, Reston Ebola virus (REBOV)
uagacuaaaaaucugau

SEQ ID NO: 380806 - RNA, 22 nt, Reston Ebola virus (REBOV)
uagauagguaaucuaacacuga

SEQ ID NO: 380807 - RNA, 23 nt, Reston Ebola virus (REBOV)
uagauagguaaucuaacacugaa

SEQ ID NO: 380808 - RNA, 15 nt, Reston Ebola virus (REBOV)
uagcaaagaauugau

SEQ ID NO: 380809 - RNA, 19 nt, Reston Ebola virus (REBOV)
uagcccugacuagacaaau

SEQ ID NO: 380810 - RNA, 13 nt, Reston Ebola virus (REBOV)
uagcucuuugaau

SEQ ID NO: 380811 - RNA, 17 nt, Reston Ebola virus (REBOV)
uaguaauaaugauucuu

SEQ ID NO: 380812 - RNA, 14 nt, Reston Ebola virus (REBOV)
uagugcuacuuuuc

SEQ ID NO: 380813 - RNA, 12 nt, Reston Ebola virus (REBOV)
uauaaauacagu

SEQ ID NO: 380814 - RNA, 20 nt, Reston Ebola virus (REBOV)
uauaacuuauuagugcuacu

SEQ ID NO: 380815 - RNA, 12 nt, Reston Ebola virus (REBOV)
uaucagcauuuc

SEQ ID NO: 380816 - RNA, 17 nt, Reston Ebola virus (REBOV)
uaucugcaguaaccaga

SEQ ID NO: 380817 - RNA, 14 nt, Reston Ebola virus (REBOV)
uaugaauugugcag

SEQ ID NO: 380818 - RNA, 17 nt, Reston Ebola virus (REBOV)
uauuaagaaaaaaucau

SEQ ID NO: 380819 - RNA, 13 nt, Reston Ebola virus (REBOV)
uauucuaaucaga

SEQ ID NO: 380820 - RNA, 16 nt, Reston Ebola virus (REBOV)
uauucugaaugcucua

SEQ ID NO: 380821 - RNA, 18 nt, Reston Ebola virus (REBOV)
uauugauaagaauacacu

SEQ ID NO: 380822 - RNA, 18 nt, Reston Ebola virus (REBOV)
uauuuuccagacuuggca

SEQ ID NO: 380823 - RNA, 12 nt, Reston Ebola virus (REBOV)
uauuuugaucaa

SEQ ID NO: 380824 - RNA, 22 nt, Reston Ebola virus (REBOV)
uauuuugaucaaguaaucauga

SEQ ID NO: 380825 - RNA, 19 nt, Reston Ebola virus (REBOV)
ucaccgcgaacccaaugac

SEQ ID NO: 380826 - RNA, 20 nt, Reston Ebola virus (REBOV)
ucaccgcgaacccaaugaca

SEQ ID NO: 380827 - RNA, 17 nt, Reston Ebola virus (REBOV)
ucagccagacuauugaa

SEQ ID NO: 380828 - RNA, 18 nt, Reston Ebola virus (REBOV)
ucagucaauaaauuaaua

SEQ ID NO: 380829 - RNA, 14 nt, Reston Ebola virus (REBOV)
aaaacaaucuacua

SEQ ID NO: 380830 - RNA, 23 nt, Reston Ebola virus (REBOV)
aaaagaaucaagcagaggcaaca

SEQ ID NO: 380831 - RNA, 20 nt, Reston Ebola virus (REBOV)
aaaccaggaaccagcccagg

SEQ ID NO: 380832 - RNA, 16 nt, Reston Ebola virus (REBOV)
aaacuaauccauuaua

SEQ ID NO: 380833 - RNA, 17 nt, Reston Ebola virus (REBOV)
aaacuaauccauuauaa

SEQ ID NO: 380834 - RNA, 12 nt, Reston Ebola virus (REBOV)
aaagcuaaauac

SEQ ID NO: 380835 - RNA, 17 nt, Reston Ebola virus (REBOV)
aaaguuaaauucuccua

SEQ ID NO: 380836 - RNA, 14 nt, Reston Ebola virus (REBOV)
aaauaaguacauga

SEQ ID NO: 380837 - RNA, 21 nt, Reston Ebola virus (REBOV)
aaauuaagaaaaacauuugau

SEQ ID NO: 380838 - RNA, 19 nt, Reston Ebola virus (REBOV)
aaauuggagauaaauggac

SEQ ID NO: 380839 - RNA, 21 nt, Reston Ebola virus (REBOV)
aacaacacagcauccauugaa

SEQ ID NO: 380840 - RNA, 11 nt, Reston Ebola virus (REBOV)
aacaagcuauu

SEQ ID NO: 380841 - RNA, 14 nt, Reston Ebola virus (REBOV)
aacaagcuauuagu

SEQ ID NO: 380842 - RNA, 18 nt, Reston Ebola virus (REBOV)
aacacagcauccauugaa

SEQ ID NO: 380843 - RNA, 18 nt, Reston Ebola virus (REBOV)
aacccagucaaaacuaaa

SEQ ID NO: 380844 - RNA, 21 nt, Reston Ebola virus (REBOV)
aaccuuagauggaaccucagc

SEQ ID NO: 380845 - RNA, 17 nt, Reston Ebola virus (REBOV)
aagaguuuaaguaauau

SEQ ID NO: 380846 - RNA, 20 nt, Reston Ebola virus (REBOV)
aagcaauauucugaaugcuc

SEQ ID NO: 380847 - RNA, 13 nt, Reston Ebola virus (REBOV)
aagucagcccgga

SEQ ID NO: 380848 - RNA, 17 nt, Reston Ebola virus (REBOV)
aagugauucuuaaucua

SEQ ID NO: 380849 - RNA, 22 nt, Reston Ebola virus (REBOV)
aauacgacuucggugugcaauu

SEQ ID NO: 380850 - RNA, 14 nt, Reston Ebola virus (REBOV)
aauauaacaaguga

SEQ ID NO: 380851 - RNA, 18 nt, Reston Ebola virus (REBOV)
aaucacccaucugauguc

SEQ ID NO: 380852 - RNA, 22 nt, Reston Ebola virus (REBOV)
aaucuauuuucgcuaauugcau

SEQ ID NO: 380853 - RNA, 21 nt, Reston Ebola virus (REBOV)
aaucugauuguauagaauuau

SEQ ID NO: 380854 - RNA, 19 nt, Reston Ebola virus (REBOV)
aaucuuaaaauaaguacau

SEQ ID NO: 380855 - RNA, 21 nt, Reston Ebola virus (REBOV)
aaucuuaaaauaaguacauga

SEQ ID NO: 380856 - RNA, 19 nt, Reston Ebola virus (REBOV)
aaugauaauuccugacgac

SEQ ID NO: 380857 - RNA, 18 nt, Reston Ebola virus (REBOV)
aaugcuucgcccauugaa

SEQ ID NO: 380858 - RNA, 23 nt, Reston Ebola virus (REBOV)
aauuaguugugggucuuaucuag

SEQ ID NO: 380859 - RNA, 22 nt, Reston Ebola virus (REBOV)
aauuaucgauggaucuacccua

SEQ ID NO: 380860 - RNA, 18 nt, Reston Ebola virus (REBOV)
acaacacagcauccauug

SEQ ID NO: 380861 - RNA, 17 nt, Reston Ebola virus (REBOV)
acaacauccccgaugac

SEQ ID NO: 380862 - RNA, 22 nt, Reston Ebola virus (REBOV)
acaagugaugaagauuaagaaa

SEQ ID NO: 380863 - RNA, 18 nt, Reston Ebola virus (REBOV)
acaauggcuaagauuuca

SEQ ID NO: 380864 - RNA, 16 nt, Reston Ebola virus (REBOV)
acaauguaccaaguga

SEQ ID NO: 380865 - RNA, 17 nt, Reston Ebola virus (REBOV)
acacaucauaacuuuau

SEQ ID NO: 380866 - RNA, 17 nt, Reston Ebola virus (REBOV)
acagcagcaaaccagga

SEQ ID NO: 380867 - RNA, 13 nt, Reston Ebola virus (REBOV)
acauauacacuua

SEQ ID NO: 380868 - RNA, 20 nt, Reston Ebola virus (REBOV)
accaagucagcccggacuca

SEQ ID NO: 380869 - RNA, 22 nt, Reston Ebola virus (REBOV)
accaccauugccccaaguccaa

SEQ ID NO: 380870 - RNA, 15 nt, Reston Ebola virus (REBOV)
acccaaugacaacca

SEQ ID NO: 380871 - RNA, 14 nt, Reston Ebola virus (REBOV)
accccaguuccuau

SEQ ID NO: 380872 - RNA, 18 nt, Reston Ebola virus (REBOV)
acgacuucggugugcaau

SEQ ID NO: 380873 - RNA, 19 nt, Reston Ebola virus (REBOV)
acuauugggcggcuuccau

SEQ ID NO: 380874 - RNA, 21 nt, Reston Ebola virus (REBOV)
acugagucccaccaggaaaca

SEQ ID NO: 380875 - RNA, 15 nt, Reston Ebola virus (REBOV)
acuuaagacuugacc

SEQ ID NO: 380876 - RNA, 21 nt, Reston Ebola virus (REBOV)
acuuaucggugcgagauuucc

SEQ ID NO: 380877 - RNA, 18 nt, Reston Ebola virus (REBOV)
acuuauugauaagaauac

SEQ ID NO: 380878 - RNA, 16 nt, Reston Ebola virus (REBOV)
acuuggcauuucuuau

SEQ ID NO: 380879 - RNA, 22 nt, Reston Ebola virus (REBOV)
acuuuauuuuaauaacauguca

SEQ ID NO: 380880 - RNA, 15 nt, Reston Ebola virus (REBOV)
agaauacacuuuauc

SEQ ID NO: 380881 - RNA, 14 nt, Reston Ebola virus (REBOV)
agacaauuuacugg

SEQ ID NO: 380882 - RNA, 18 nt, Reston Ebola virus (REBOV)
agaccacgccagcaccca

SEQ ID NO: 380883 - RNA, 18 nt, Reston Ebola virus (REBOV)
agacggccaacagcagca

SEQ ID NO: 380884 - RNA, 13 nt, Reston Ebola virus (REBOV)
agaguaugccaau

SEQ ID NO: 380885 - RNA, 18 nt, Reston Ebola virus (REBOV)
agaguuuaaguaauauac

SEQ ID NO: 380886 - RNA, 24 nt, Reston Ebola virus (REBOV)
agaguuuaaguaauauacauauac

SEQ ID NO: 380887 - RNA, 20 nt, Reston Ebola virus (REBOV)
agauaaugauaauuccugac

SEQ ID NO: 380888 - RNA, 14 nt, Reston Ebola virus (REBOV)
agcaaauuaucaau

SEQ ID NO: 380889 - RNA, 14 nt, Reston Ebola virus (REBOV)
agcaauauucugaa

SEQ ID NO: 380890 - RNA, 22 nt, Reston Ebola virus (REBOV)
agcauuguugaguuaacuaucu

SEQ ID NO: 380891 - RNA, 13 nt, Reston Ebola virus (REBOV)
agcccacagacca

SEQ ID NO: 380892 - RNA, 12 nt, Reston Ebola virus (REBOV)
agcugauucacu

SEQ ID NO: 380893 - RNA, 13 nt, Reston Ebola virus (REBOV)
aggauuauguaga

SEQ ID NO: 380894 - RNA, 16 nt, Reston Ebola virus (REBOV)
aggggauaaauaauac

SEQ ID NO: 380895 - RNA, 18 nt, Reston Ebola virus (REBOV)
agguaaucuaacacugaa

SEQ ID NO: 380896 - RNA, 23 nt, Reston Ebola virus (REBOV)
agguggucuuuuugaaauggaga

SEQ ID NO: 380897 - RNA, 18 nt, Reston Ebola virus (REBOV)
agucaaaacuaaaccaag

SEQ ID NO: 380898 - RNA, 20 nt, Reston Ebola virus (REBOV)
agucaaaacuaaaccaagca

SEQ ID NO: 380899 - RNA, 17 nt, Reston Ebola virus (REBOV)
aguccaaccaugacaag

SEQ ID NO: 380900 - RNA, 19 nt, Reston Ebola virus (REBOV)
agucuugaguaauaaucau

SEQ ID NO: 380901 - RNA, 20 nt, Reston Ebola virus (REBOV)
aguuccgauucuaaguauau

SEQ ID NO: 380902 - RNA, 16 nt, Reston Ebola virus (REBOV)
aguuuauuagguuuau

SEQ ID NO: 380903 - RNA, 20 nt, Reston Ebola virus (REBOV)
auaacaauguaccaagugaa

SEQ ID NO: 380904 - RNA, 17 nt, Reston Ebola virus (REBOV)
auaaugauuguguguau

SEQ ID NO: 380905 - RNA, 15 nt, Reston Ebola virus (REBOV)
auacauauacacuua

SEQ ID NO: 380906 - RNA, 14 nt, Reston Ebola virus (REBOV)
auagaacaaugccu

SEQ ID NO: 380907 - RNA, 19 nt, Reston Ebola virus (REBOV)
auauaauguaaauauaaca

SEQ ID NO: 380908 - RNA, 20 nt, Reston Ebola virus (REBOV)
auaucggaagagaguaugcc

SEQ ID NO: 380909 - RNA, 15 nt, Reston Ebola virus (REBOV)
aucaucauaguauga

SEQ ID NO: 380910 - RNA, 18 nt, Reston Ebola virus (REBOV)
auccaaauguugugcuag

SEQ ID NO: 380911 - RNA, 19 nt, Reston Ebola virus (REBOV)
aucuacaaaaacuaaucca

SEQ ID NO: 380912 - RNA, 21 nt, Reston Ebola virus (REBOV)
auggucuuauuugaauaugac

SEQ ID NO: 380913 - RNA, 22 nt, Reston Ebola virus (REBOV)
auggucuuauuugaauaugaca

SEQ ID NO: 380914 - RNA, 19 nt, Reston Ebola virus (REBOV)
auguaccaagugaacagcc

SEQ ID NO: 380915 - RNA, 15 nt, Reston Ebola virus (REBOV)
augucuagcaaauua

SEQ ID NO: 380916 - RNA, 19 nt, Reston Ebola virus (REBOV)
auguguauauaaccaaucu

SEQ ID NO: 380917 - RNA, 19 nt, Reston Ebola virus (REBOV)
auuauaaaagaaucaagca

SEQ ID NO: 380918 - RNA, 17 nt, Reston Ebola virus (REBOV)
auugcucucagucaaua

SEQ ID NO: 380919 - RNA, 15 nt, Reston Ebola virus (REBOV)
auugugcagauuuaa

SEQ ID NO: 380920 - RNA, 14 nt, Reston Ebola virus (REBOV)
auuguguguauuaa

SEQ ID NO: 380921 - RNA, 20 nt, Reston Ebola virus (REBOV)
auuuucgcuaauugcauuga

SEQ ID NO: 380922 - RNA, 14 nt, Reston Ebola virus (REBOV)
auuuuuacaugugu

SEQ ID NO: 380923 - RNA, 15 nt, Reston Ebola virus (REBOV)
caaaacuaaaccaag

SEQ ID NO: 380924 - RNA, 20 nt, Reston Ebola virus (REBOV)
caaacuuacaaacaugcaca

SEQ ID NO: 380925 - RNA, 23 nt, Reston Ebola virus (REBOV)
caaauuaagaaaaacauuugaug

SEQ ID NO: 380926 - RNA, 18 nt, Reston Ebola virus (REBOV)
caacggagagacaaucac

SEQ ID NO: 380927 - RNA, 21 nt, Reston Ebola virus (REBOV)
caagcagaggcaacagacuca

SEQ ID NO: 380928 - RNA, 14 nt, Reston Ebola virus (REBOV)
caaggcaagccaca

SEQ ID NO: 380929 - RNA, 19 nt, Reston Ebola virus (REBOV)
caaugacucguuaacaauc

SEQ ID NO: 380930 - RNA, 15 nt, Reston Ebola virus (REBOV)
caauguaccaaguga

SEQ ID NO: 380931 - RNA, 14 nt, Reston Ebola virus (REBOV)
caauuuaccacucc

SEQ ID NO: 380932 - RNA, 13 nt, Reston Ebola virus (REBOV)
cacagaccaagac

SEQ ID NO: 380933 - RNA, 13 nt, Reston Ebola virus (REBOV)
caccauauccaaa

SEQ ID NO: 380934 - RNA, 14 nt, Reston Ebola virus (REBOV)
cacccacaacaucc

SEQ ID NO: 380935 - RNA, 20 nt, Reston Ebola virus (REBOV)
cacgauugcucucagucaau

SEQ ID NO: 380936 - RNA, 21 nt, Reston Ebola virus (REBOV)
cagaagagaaguucaacccag

SEQ ID NO: 380937 - RNA, 21 nt, Reston Ebola virus (REBOV)
cagcauauaaugauauugcau

SEQ ID NO: 380938 - RNA, 12 nt, Reston Ebola virus (REBOV)
cauaacuuuaua

SEQ ID NO: 380939 - RNA, 13 nt, Reston Ebola virus (REBOV)
cauauacacuuac

SEQ ID NO: 380940 - RNA, 14 nt, Reston Ebola virus (REBOV)
caucaaaaaaugag

SEQ ID NO: 380941 - RNA, 22 nt, Reston Ebola virus (REBOV)
caucuacaaaaacuaauccauu

SEQ ID NO: 380942 - RNA, 21 nt, Reston Ebola virus (REBOV)
cauucgagcuauuauucugcu

SEQ ID NO: 380943 - RNA, 17 nt, Reston Ebola virus (REBOV)
cauugagcacugcuaau

SEQ ID NO: 380944 - RNA, 14 nt, Reston Ebola virus (REBOV)
cauuuuuacaugug

SEQ ID NO: 380945 - RNA, 12 nt, Reston Ebola virus (REBOV)
ccaaccaugaca

SEQ ID NO: 380946 - RNA, 21 nt, Reston Ebola virus (REBOV)
ccaacggagagacaaucacag

SEQ ID NO: 380947 - RNA, 19 nt, Reston Ebola virus (REBOV)
ccaaggcucgaacaacucc

SEQ ID NO: 380948 - RNA, 21 nt, Reston Ebola virus (REBOV)
ccagucaaaacuaaaccaagc

SEQ ID NO: 380949 - RNA, 16 nt, Reston Ebola virus (REBOV)
ccauuauaacuuauua

SEQ ID NO: 380950 - RNA, 12 nt, Reston Ebola virus (REBOV)
cccacagaccaa

SEQ ID NO: 380951 - RNA, 13 nt, Reston Ebola virus (REBOV)
cccacagaccaag

SEQ ID NO: 380952 - RNA, 13 nt, Reston Ebola virus (REBOV)
cccaccaggaaac

SEQ ID NO: 380953 - RNA, 22 nt, Reston Ebola virus (REBOV)
cccgcaagagacggccaacagc

SEQ ID NO: 380954 - RNA, 13 nt, Reston Ebola virus (REBOV)
ccgaacaacacag

SEQ ID NO: 380955 - RNA, 22 nt, Reston Ebola virus (REBOV)
ccuauuugacgguacaugacuu

SEQ ID NO: 380956 - RNA, 17 nt, Reston Ebola virus (REBOV)
ccugacuagacaaauua

SEQ ID NO: 380957 - RNA, 17 nt, Reston Ebola virus (REBOV)
cgacuucggugugcaau

SEQ ID NO: 380958 - RNA, 15 nt, Reston Ebola virus (REBOV)
cgcagccggaccaag

SEQ ID NO: 380959 - RNA, 18 nt, Reston Ebola virus (REBOV)
cgcagccggaccaaguca

SEQ ID NO: 380960 - RNA, 20 nt, Reston Ebola virus (REBOV)
cgcccagagcccacagacca

SEQ ID NO: 380961 - RNA, 19 nt, Reston Ebola virus (REBOV)
cgcccauugaaaaugugau

SEQ ID NO: 380962 - RNA, 17 nt, Reston Ebola virus (REBOV)
cgccuagauaacuaaua

SEQ ID NO: 380963 - RNA, 21 nt, Reston Ebola virus (REBOV)
cuaaucagagguauaacaaug

SEQ ID NO: 380964 - RNA, 13 nt, Reston Ebola virus (REBOV)
cuaauccuaguau

SEQ ID NO: 380965 - RNA, 15 nt, Reston Ebola virus (REBOV)
cuaauccuaguauuu

SEQ ID NO: 380966 - RNA, 21 nt, Reston Ebola virus (REBOV)
cuacaaaaacuaauccauuau

SEQ ID NO: 380967 - RNA, 18 nt, Reston Ebola virus (REBOV)
cuaucugcaguaaccaga

SEQ ID NO: 380968 - RNA, 13 nt, Reston Ebola virus (REBOV)
cuaucuuugcuua

SEQ ID NO: 380969 - RNA, 21 nt, Reston Ebola virus (REBOV)
cuccuccagcauauaaugaua

SEQ ID NO: 380970 - RNA, 14 nt, Reston Ebola virus (REBOV)
cucuauagucuauu

SEQ ID NO: 380971 - RNA, 15 nt, Reston Ebola virus (REBOV)
cucucagucaauaaa

SEQ ID NO: 380972 - RNA, 16 nt, Reston Ebola virus (REBOV)
cugacuagacaaauua

SEQ ID NO: 380973 - RNA, 17 nt, Reston Ebola virus (REBOV)
cugagucccaccaggaa

SEQ ID NO: 380974 - RNA, 20 nt, Reston Ebola virus (REBOV)
cugaugucaccauauccaaa

SEQ ID NO: 380975 - RNA, 17 nt, Reston Ebola virus (REBOV)
cugauuguggauugacc

SEQ ID NO: 380976 - RNA, 17 nt, Reston Ebola virus (REBOV)
cuuaaucuaaggccauu

SEQ ID NO: 380977 - RNA, 22 nt, Reston Ebola virus (REBOV)
cuuacaccggucuauccaagau

SEQ ID NO: 380978 - RNA, 19 nt, Reston Ebola virus (REBOV)
cuuauuagugcuacuuuuc

SEQ ID NO: 380979 - RNA, 18 nt, Reston Ebola virus (REBOV)
cuuauuugaauaugacaa

SEQ ID NO: 380980 - RNA, 24 nt, Reston Ebola virus (REBOV)
cuucaucuucuaaagugagauauu

SEQ ID NO: 380981 - RNA, 18 nt, Reston Ebola virus (REBOV)
cuuccauuuuuacaugug

SEQ ID NO: 380982 - RNA, 14 nt, Reston Ebola virus (REBOV)
cuuuucagauuauc

SEQ ID NO: 380983 - RNA, 14 nt, Reston Ebola virus (REBOV)
gaaaaaaucaugau

SEQ ID NO: 380984 - RNA, 14 nt, Reston Ebola virus (REBOV)
gaaaaugugaucua

SEQ ID NO: 380985 - RNA, 20 nt, Reston Ebola virus (REBOV)
gaaauuggagauaaauggac

SEQ ID NO: 380986 - RNA, 18 nt, Reston Ebola virus (REBOV)
gaacaacacagcauccau

SEQ ID NO: 380987 - RNA, 22 nt, Reston Ebola virus (REBOV)
gaacaacacagcauccauugaa

SEQ ID NO: 380988 - RNA, 19 nt, Reston Ebola virus (REBOV)
gaacagccgaacaacacag

SEQ ID NO: 380989 - RNA, 15 nt, Reston Ebola virus (REBOV)
gaaccagcccaggaa

SEQ ID NO: 380990 - RNA, 12 nt, Reston Ebola virus (REBOV)
gaacccaaugac

SEQ ID NO: 380991 - RNA, 18 nt, Reston Ebola virus (REBOV)
gaacccaaugacaaccac

SEQ ID NO: 380992 - RNA, 18 nt, Reston Ebola virus (REBOV)
gaagauuaaaaccuucau

SEQ ID NO: 380993 - RNA, 21 nt, Reston Ebola virus (REBOV)
gaaucaagauuuauuuaacaa

SEQ ID NO: 380994 - RNA, 19 nt, Reston Ebola virus (REBOV)
gaauuggaagaucauucca

SEQ ID NO: 380995 - RNA, 20 nt, Reston Ebola virus (REBOV)
gacuugaauguaauaaggua

SEQ ID NO: 380996 - RNA, 15 nt, Reston Ebola virus (REBOV)
gagucccaccaggaa

SEQ ID NO: 380997 - RNA, 19 nt, Reston Ebola virus (REBOV)
gaguugguuacacagugag

SEQ ID NO: 380998 - RNA, 14 nt, Reston Ebola virus (REBOV)
gaguuuaaguaaua

SEQ ID NO: 380999 - RNA, 15 nt, Reston Ebola virus (REBOV)
gauuaucagcauuuc

SEQ ID NO: 381000 - RNA, 14 nt, Reston Ebola virus (REBOV)
gauucuaaguauau

SEQ ID NO: 381001 - RNA, 21 nt, Reston Ebola virus (REBOV)
gauucuuaaaacaaucuacua

SEQ ID NO: 381002 - RNA, 14 nt, Reston Ebola virus (REBOV)
gauuguagacaauu

SEQ ID NO: 381003 - RNA, 18 nt, Reston Ebola virus (REBOV)
gauuuauuuaacaaggca

SEQ ID NO: 381004 - RNA, 13 nt, Reston Ebola virus (REBOV)
gcaaauuaucaau

SEQ ID NO: 381005 - RNA, 20 nt, Reston Ebola virus (REBOV)
gcaagcaacgagacaauuua

SEQ ID NO: 381006 - RNA, 12 nt, Reston Ebola virus (REBOV)
gccccaagucca

SEQ ID NO: 381007 - RNA, 21 nt, Reston Ebola virus (REBOV)
gccccaaguccaaccaugaca

SEQ ID NO: 381008 - RNA, 12 nt, Reston Ebola virus (REBOV)
gcuaagauuuca

SEQ ID NO: 381009 - RNA, 15 nt, Reston Ebola virus (REBOV)
gcuauuaguuauuac

SEQ ID NO: 381010 - RNA, 15 nt, Reston Ebola virus (REBOV)
gcuauuauucugcua

SEQ ID NO: 381011 - RNA, 17 nt, Reston Ebola virus (REBOV)
ggaguuuuuuaaucuaa

SEQ ID NO: 381012 - RNA, 17 nt, Reston Ebola virus (REBOV)
gggaggaguuagcaauc

SEQ ID NO: 381013 - RNA, 18 nt, Reston Ebola virus (REBOV)
gguuuagcaaagaauuga

SEQ ID NO: 381014 - RNA, 15 nt, Reston Ebola virus (REBOV)
guaaucaugauuuua

SEQ ID NO: 381015 - RNA, 18 nt, Reston Ebola virus (REBOV)
guagacaauuuacuggua

SEQ ID NO: 381016 - RNA, 15 nt, Reston Ebola virus (REBOV)
guauccaaguuuaug

SEQ ID NO: 381017 - RNA, 17 nt, Reston Ebola virus (REBOV)
guauccaaguuuaugaa

SEQ ID NO: 381018 - RNA, 14 nt, Reston Ebola virus (REBOV)
gucccaccaggaaa

SEQ ID NO: 381019 - RNA, 17 nt, Reston Ebola virus (REBOV)
gucuauucuaaucagag

SEQ ID NO: 381020 - RNA, 16 nt, Reston Ebola virus (REBOV)
gucuuaucuagcauug

SEQ ID NO: 381021 - RNA, 17 nt, Reston Ebola virus (REBOV)
gucuuuuugaaauggag

SEQ ID NO: 381022 - RNA, 22 nt, Reston Ebola virus (REBOV)
gugcuacuuuucuauaagugau

SEQ ID NO: 381023 - RNA, 15 nt, Reston Ebola virus (REBOV)
guuaacaaucgcuag

SEQ ID NO: 381024 - RNA, 18 nt, Reston Ebola virus (REBOV)
guuacacagugaguauua

SEQ ID NO: 381025 - RNA, 19 nt, Reston Ebola virus (REBOV)
guuacacagugaguauuag

SEQ ID NO: 381026 - RNA, 19 nt, Reston Ebola virus (REBOV)
uaaacuuggguuuugccuu

SEQ ID NO: 381027 - RNA, 15 nt, Reston Ebola virus (REBOV)
uaaauaauacuuuau

SEQ ID NO: 381028 - RNA, 22 nt, Reston Ebola virus (REBOV)
uaaauaaugauuguguguauua

SEQ ID NO: 381029 - RNA, 14 nt, Reston Ebola virus (REBOV)
uaaauacacuuaag

SEQ ID NO: 381030 - RNA, 15 nt, Reston Ebola virus (REBOV)
uaagaauacacuuua

SEQ ID NO: 381031 - RNA, 16 nt, Reston Ebola virus (REBOV)
uaagacuugaccgauu

SEQ ID NO: 381032 - RNA, 13 nt, Reston Ebola virus (REBOV)
uaaugauauugca

SEQ ID NO: 381033 - RNA, 15 nt, Reston Ebola virus (REBOV)
uaaugauauugcaua

SEQ ID NO: 381034 - RNA, 18 nt, Reston Ebola virus (REBOV)
uaauuccgacgggaucaa

SEQ ID NO: 381035 - RNA, 14 nt, Reston Ebola virus (REBOV)
uacaaaaacuaauc

SEQ ID NO: 381036 - RNA, 17 nt, Reston Ebola virus (REBOV)
uacacagugaguauuag

SEQ ID NO: 381037 - RNA, 11 nt, Reston Ebola virus (REBOV)
uacacuuuauc

SEQ ID NO: 381038 - RNA, 15 nt, Reston Ebola virus (REBOV)
uacauauacacuuac

SEQ ID NO: 381039 - RNA, 16 nt, Reston Ebola virus (REBOV)
uacgccuagauaacua

SEQ ID NO: 381040 - RNA, 15 nt, Reston Ebola virus (REBOV)
uacuaucugcaguaa

SEQ ID NO: 381041 - RNA, 21 nt, Reston Ebola virus (REBOV)
uagaguguaugaauugugcag

SEQ ID NO: 381042 - RNA, 18 nt, Reston Ebola virus (REBOV)
uagcguaacacaucauaa

SEQ ID NO: 381043 - RNA, 23 nt, Reston Ebola virus (REBOV)
uagucauaaggggauaaauaaua

SEQ ID NO: 381044 - RNA, 22 nt, Reston Ebola virus (REBOV)
uaguugugggucuuaucuagca

SEQ ID NO: 381045 - RNA, 14 nt, Reston Ebola virus (REBOV)
uauaacaagugaug

SEQ ID NO: 381046 - RNA, 13 nt, Reston Ebola virus (REBOV)
uauaagugauucu

SEQ ID NO: 381047 - RNA, 16 nt, Reston Ebola virus (REBOV)
uauaaugauauugcau

SEQ ID NO: 381048 - RNA, 19 nt, Reston Ebola virus (REBOV)
uauagucuauucuaaucag

SEQ ID NO: 381049 - RNA, 15 nt, Reston Ebola virus (REBOV)
uauauaauguaaaua

SEQ ID NO: 381050 - RNA, 14 nt, Reston Ebola virus (REBOV)
uauauugguguaac

SEQ ID NO: 381051 - RNA, 18 nt, Reston Ebola virus (REBOV)
uaucacguuaaagauuua

SEQ ID NO: 381052 - RNA, 16 nt, Reston Ebola virus (REBOV)
uaucgcaauuaucgau

SEQ ID NO: 381053 - RNA, 22 nt, Reston Ebola virus (REBOV)
uauuaaggaguuuuuuaaucua

SEQ ID NO: 381054 - RNA, 23 nt, Reston Ebola virus (REBOV)
uauuaaggaguuuuuuaaucuaa

SEQ ID NO: 381055 - RNA, 14 nt, Reston Ebola virus (REBOV)
uauuagaauguacu

SEQ ID NO: 381056 - RNA, 16 nt, Reston Ebola virus (REBOV)
uauuauucugcuagua

SEQ ID NO: 381057 - RNA, 14 nt, Reston Ebola virus (REBOV)
uauucuaaucagag

SEQ ID NO: 381058 - RNA, 18 nt, Reston Ebola virus (REBOV)
uauucugaaugcucuaua

SEQ ID NO: 381059 - RNA, 17 nt, Reston Ebola virus (REBOV)
uauuuuaauaacauguc

SEQ ID NO: 381060 - RNA, 13 nt, Reston Ebola virus (REBOV)
uauuuuaucauca

SEQ ID NO: 381061 - RNA, 21 nt, Reston Ebola virus (REBOV)
ucaaaacuaaaccaagcaaua

SEQ ID NO: 381062 - RNA, 20 nt, Reston Ebola virus (REBOV)
ucaacccagucaaaacuaaa

SEQ ID NO: 381063 - RNA, 21 nt, Reston Ebola virus (REBOV)
ucaauaaauuaauauagauau

SEQ ID NO: 381064 - RNA, 18 nt, Reston Ebola virus (REBOV)
ucacguuaaagauuuaga

SEQ ID NO: 381065 - RNA, 13 nt, Reston Ebola virus (REBOV)
ucauaacuuuaua

SEQ ID NO: 381066 - RNA, 15 nt, Reston Ebola virus (REBOV)
ucauauuuugaucaa

SEQ ID NO: 381067 - RNA, 19 nt, Reston Ebola virus (REBOV)
ucaucuacaaaaacuaauc

SEQ ID NO: 381068 - RNA, 20 nt, Reston Ebola virus (REBOV)
ucaucuucuaaagugagaua

SEQ ID NO: 381069 - RNA, 22 nt, Reston Ebola virus (REBOV)
uccagcauauaaugauauugca

SEQ ID NO: 381070 - RNA, 15 nt, Reston Ebola virus (REBOV)
uccagucuugaguaa

SEQ ID NO: 381071 - RNA, 19 nt, Reston Ebola virus (REBOV)
uccagucuugaguaauaau

SEQ ID NO: 381072 - RNA, 14 nt, Reston Ebola virus (REBOV)
uccuaguauuuauu

SEQ ID NO: 381073 - RNA, 15 nt, Reston Ebola virus (REBOV)
uccuaucuuugcuua

SEQ ID NO: 381074 - RNA, 12 nt, Reston Ebola virus (REBOV)
ucuauucuaauc

SEQ ID NO: 381075 - RNA, 14 nt, Reston Ebola virus (REBOV)
ucuuaaaacaaucu

SEQ ID NO: 381076 - RNA, 14 nt, Reston Ebola virus (REBOV)
ucuuaaucuaaggc

SEQ ID NO: 381077 - RNA, 18 nt, Reston Ebola virus (REBOV)
ucuuauuugaauaugaca

SEQ ID NO: 381078 - RNA, 17 nt, Reston Ebola virus (REBOV)
ucuugaguaauaaucau

SEQ ID NO: 381079 - RNA, 14 nt, Reston Ebola virus (REBOV)
ucuuugaauuggaa

SEQ ID NO: 381080 - RNA, 18 nt, Reston Ebola virus (REBOV)
ugaaaaugugaucuaaua

SEQ ID NO: 381081 - RNA, 21 nt, Reston Ebola virus (REBOV)
ugaacagccgaacaacacagc

SEQ ID NO: 381082 - RNA, 18 nt, Reston Ebola virus (REBOV)
ugaauugugcagauuuaa

SEQ ID NO: 381083 - RNA, 13 nt, Reston Ebola virus (REBOV)
ugacaaccaccau

SEQ ID NO: 381084 - RNA, 16 nt, Reston Ebola virus (REBOV)
ugacaaccaccauugc

SEQ ID NO: 381085 - RNA, 17 nt, Reston Ebola virus (REBOV)
ugacgcuguugaugaua

SEQ ID NO: 381086 - RNA, 21 nt, Reston Ebola virus (REBOV)
ugaggaauaagauaaugauaa

SEQ ID NO: 381087 - RNA, 17 nt, Reston Ebola virus (REBOV)
ugagguauuuugucuag

SEQ ID NO: 381088 - RNA, 15 nt, Reston Ebola virus (REBOV)
ugagucccaccagga

SEQ ID NO: 381089 - RNA, 13 nt, Reston Ebola virus (REBOV)
ugaguuaacuauc

SEQ ID NO: 381090 - RNA, 21 nt, Reston Ebola virus (REBOV)
ugaguuaacuaucuaaucuau

SEQ ID NO: 381091 - RNA, 18 nt, Reston Ebola virus (REBOV)
ugcauuuguuaacuuauc

SEQ ID NO: 381092 - RNA, 13 nt, Reston Ebola virus (REBOV)
ugccuaacuauug

SEQ ID NO: 381093 - RNA, 14 nt, Reston Ebola virus (REBOV)
ugcuaauagguuug

SEQ ID NO: 381094 - RNA, 14 nt, Reston Ebola virus (REBOV)
uggaaccucagcca

SEQ ID NO: 381095 - RNA, 15 nt, Reston Ebola virus (REBOV)
uggagauaaauggac

SEQ ID NO: 381096 - RNA, 15 nt, Reston Ebola virus (REBOV)
uggucuuauuugaau

SEQ ID NO: 381097 - RNA, 21 nt, Reston Ebola virus (REBOV)
ugguuacacagugaguauuag

SEQ ID NO: 381098 - RNA, 15 nt, Reston Ebola virus (REBOV)
ugucaaugcuauacu

SEQ ID NO: 381099 - RNA, 16 nt, Reston Ebola virus (REBOV)
uuaacaaucgcuagua

SEQ ID NO: 381100 - RNA, 13 nt, Reston Ebola virus (REBOV)
uuacauguguaua

SEQ ID NO: 381101 - RNA, 23 nt, Reston Ebola virus (REBOV)
uuauaacgauuuugcauuucuaa

SEQ ID NO: 381102 - RNA, 14 nt, Reston Ebola virus (REBOV)
uuauucugcuagua

SEQ ID NO: 381103 - RNA, 16 nt, Reston Ebola virus (REBOV)
uuauucugcuaguaau

SEQ ID NO: 381104 - RNA, 23 nt, Reston Ebola virus (REBOV)
uuauuuaacaaggcaagccacaa

SEQ ID NO: 381105 - RNA, 21 nt, Reston Ebola virus (REBOV)
uucacugagucccaccaggaa

SEQ ID NO: 381106 - RNA, 16 nt, Reston Ebola virus (REBOV)
uucgcccauugaaaau

SEQ ID NO: 381107 - RNA, 13 nt, Reston Ebola virus (REBOV)
uugaaaaugugau

SEQ ID NO: 381108 - RNA, 16 nt, Reston Ebola virus (REBOV)
uugaacauagucauaa

SEQ ID NO: 381109 - RNA, 22 nt, Reston Ebola virus (REBOV)
uugaacauagucauaaggggau

SEQ ID NO: 381110 - RNA, 12 nt, Reston Ebola virus (REBOV)
uugguaucugag

SEQ ID NO: 381111 - RNA, 17 nt, Reston Ebola virus (REBOV)
uuuaaguaauauacaua

SEQ ID NO: 381112 - RNA, 17 nt, Reston Ebola virus (REBOV)
uuuaguuccgauucuaa

SEQ ID NO: 381113 - RNA, 17 nt, Reston Ebola virus (REBOV)
uuuccagucuugaguaa

SEQ ID NO: 381114 - RNA, 21 nt, Reston Ebola virus (REBOV)
aaucuuaauuguuagagguaa

SEQ ID NO: 381115 - RNA, 16 nt, Reston Ebola virus (REBOV)
aaugcuauacuguuaa

SEQ ID NO: 381116 - RNA, 17 nt, Reston Ebola virus (REBOV)
aauggcuaagauuucaa

SEQ ID NO: 381117 - RNA, 21 nt, Reston Ebola virus (REBOV)
aauugcauugagcacugcuaa

SEQ ID NO: 381118 - RNA, 17 nt, Reston Ebola virus (REBOV)
aauuggaagaucauucc

SEQ ID NO: 381119 - RNA, 18 nt, Reston Ebola virus (REBOV)
aauuggaagaucauucca

SEQ ID NO: 381120 - RNA, 14 nt, Reston Ebola virus (REBOV)
acaacacagcaucc

SEQ ID NO: 381121 - RNA, 23 nt, Reston Ebola virus (REBOV)
acaacauccccgaugacccagga

SEQ ID NO: 381122 - RNA, 23 nt, Reston Ebola virus (REBOV)
acaagauguuaugguuuagcaaa

SEQ ID NO: 381123 - RNA, 18 nt, Reston Ebola virus (REBOV)
acacaucauaacuuuaua

SEQ ID NO: 381124 - RNA, 13 nt, Reston Ebola virus (REBOV)
acagcagcaaacc

SEQ ID NO: 381125 - RNA, 16 nt, Reston Ebola virus (REBOV)
acaguuuuaguuccga

SEQ ID NO: 381126 - RNA, 22 nt, Reston Ebola virus (REBOV)
acaucgggauagaacaaugccu

SEQ ID NO: 381127 - RNA, 16 nt, Reston Ebola virus (REBOV)
acaucuugcuucuugu

SEQ ID NO: 381128 - RNA, 19 nt, Reston Ebola virus (REBOV)
acccaaugacaaccaccau

SEQ ID NO: 381129 - RNA, 21 nt, Reston Ebola virus (REBOV)
acccacaacauccccgaugac

SEQ ID NO: 381130 - RNA, 10 nt, Reston Ebola virus (REBOV)
acccauucug

SEQ ID NO: 381131 - RNA, 20 nt, Reston Ebola virus (REBOV)
accgcgaacccaaugacaac

SEQ ID NO: 381132 - RNA, 20 nt, Reston Ebola virus (REBOV)
acgauugcucucagucaaua

SEQ ID NO: 381133 - RNA, 18 nt, Reston Ebola virus (REBOV)
acugagucccaccaggaa

SEQ ID NO: 381134 - RNA, 23 nt, Reston Ebola virus (REBOV)
acugagucccaccaggaaacaaa

SEQ ID NO: 381135 - RNA, 19 nt, Reston Ebola virus (REBOV)
acuuacaccggucuaucca

SEQ ID NO: 381136 - RNA, 16 nt, Reston Ebola virus (REBOV)
acuucggugugcaauu

SEQ ID NO: 381137 - RNA, 21 nt, Reston Ebola virus (REBOV)
acuuggcauuucuuaucuuca

SEQ ID NO: 381138 - RNA, 19 nt, Reston Ebola virus (REBOV)
agaaaugaccccaguuccu

SEQ ID NO: 381139 - RNA, 14 nt, Reston Ebola virus (REBOV)
agaauacacuuuau

SEQ ID NO: 381140 - RNA, 18 nt, Reston Ebola virus (REBOV)
agaauuauaaaagaauca

SEQ ID NO: 381141 - RNA, 18 nt, Reston Ebola virus (REBOV)
agagcccacagaccaaga

SEQ ID NO: 381142 - RNA, 20 nt, Reston Ebola virus (REBOV)
agaucauuccaaacuuacaa

SEQ ID NO: 381143 - RNA, 14 nt, Reston Ebola virus (REBOV)
agcaaaccaggaac

SEQ ID NO: 381144 - RNA, 19 nt, Reston Ebola virus (REBOV)
agcagaggcaacagacuca

SEQ ID NO: 381145 - RNA, 14 nt, Reston Ebola virus (REBOV)
agcccggacucacu

SEQ ID NO: 381146 - RNA, 15 nt, Reston Ebola virus (REBOV)
agcuaaauacacuua

SEQ ID NO: 381147 - RNA, 17 nt, Reston Ebola virus (REBOV)
agguaacaagcuauuag

SEQ ID NO: 381148 - RNA, 17 nt, Reston Ebola virus (REBOV)
agguauuuugucuagag

SEQ ID NO: 381149 - RNA, 18 nt, Reston Ebola virus (REBOV)
aguaagguagcugauuca

SEQ ID NO: 381150 - RNA, 16 nt, Reston Ebola virus (REBOV)
aguaauugaggauuau

SEQ ID NO: 381151 - RNA, 15 nt, Reston Ebola virus (REBOV)
aguaauuuuaaucuc

SEQ ID NO: 381152 - RNA, 14 nt, Reston Ebola virus (REBOV)
agucccaccaggaa

SEQ ID NO: 381153 - RNA, 15 nt, Reston Ebola virus (REBOV)
agucccaccaggaaa

SEQ ID NO: 381154 - RNA, 13 nt, Reston Ebola virus (REBOV)
agucuauucuaau

SEQ ID NO: 381155 - RNA, 15 nt, Reston Ebola virus (REBOV)
aguucaacccaguca

SEQ ID NO: 381156 - RNA, 19 nt, Reston Ebola virus (REBOV)
aguuccgauucuaaguaua

SEQ ID NO: 381157 - RNA, 19 nt, Reston Ebola virus (REBOV)
auaacaauguaccaaguga

SEQ ID NO: 381158 - RNA, 19 nt, Reston Ebola virus (REBOV)
auaacaugucaaugcuaua

SEQ ID NO: 381159 - RNA, 13 nt, Reston Ebola virus (REBOV)
auaauacuuuaua

SEQ ID NO: 381160 - RNA, 22 nt, Reston Ebola virus (REBOV)
auaauguaaauauaacaaguga

SEQ ID NO: 381161 - RNA, 16 nt, Reston Ebola virus (REBOV)
auacacuuaagacuug

SEQ ID NO: 381162 - RNA, 14 nt, Reston Ebola virus (REBOV)
auacauauacacuu

SEQ ID NO: 381163 - RNA, 21 nt, Reston Ebola virus (REBOV)
auagaauuauaaaagaaucaa

SEQ ID NO: 381164 - RNA, 18 nt, Reston Ebola virus (REBOV)
aucacguuaaagauuuag

SEQ ID NO: 381165 - RNA, 13 nt, Reston Ebola virus (REBOV)
aucauaacuuuau

SEQ ID NO: 381166 - RNA, 14 nt, Reston Ebola virus (REBOV)
aucauaacuuuaua

SEQ ID NO: 381167 - RNA, 13 nt, Reston Ebola virus (REBOV)
aucaucauaguau

SEQ ID NO: 381168 - RNA, 16 nt, Reston Ebola virus (REBOV)
aucaucauaguaugag

SEQ ID NO: 381169 - RNA, 19 nt, Reston Ebola virus (REBOV)
aucgcuaguaauuuuaauc

SEQ ID NO: 381170 - RNA, 12 nt, Reston Ebola virus (REBOV)
aucuuugcuuau

SEQ ID NO: 381171 - RNA, 15 nt, Reston Ebola virus (REBOV)
augauuguagacaau

SEQ ID NO: 381172 - RNA, 15 nt, Reston Ebola virus (REBOV)
auggcuaagauuuca

SEQ ID NO: 381173 - RNA, 20 nt, Reston Ebola virus (REBOV)
augucaaugcuauacuguua

SEQ ID NO: 381174 - RNA, 17 nt, Reston Ebola virus (REBOV)
auucuaaucagagguau

SEQ ID NO: 381175 - RNA, 14 nt, Reston Ebola virus (REBOV)
auugagcacugcua

SEQ ID NO: 381176 - RNA, 17 nt, Reston Ebola virus (REBOV)
auuggagauaaauggac

SEQ ID NO: 381177 - RNA, 15 nt, Reston Ebola virus (REBOV)
auuguagacaauuua

SEQ ID NO: 381178 - RNA, 21 nt, Reston Ebola virus (REBOV)
auuugaugaagauuaaaaccu

SEQ ID NO: 381179 - RNA, 23 nt, Reston Ebola virus (REBOV)
auuuuaauaacaugucaaugcua

SEQ ID NO: 381180 - RNA, 23 nt, Reston Ebola virus (REBOV)
auuuugucuagaguauacucaaa

SEQ ID NO: 381181 - RNA, 16 nt, Reston Ebola virus (REBOV)
caagcaacgagacaau

SEQ ID NO: 381182 - RNA, 18 nt, Reston Ebola virus (REBOV)
caaggcucgaacaacucc

SEQ ID NO: 381183 - RNA, 13 nt, Reston Ebola virus (REBOV)
caaguccaaccau

SEQ ID NO: 381184 - RNA, 13 nt, Reston Ebola virus (REBOV)
caauaaauuaaua

SEQ ID NO: 381185 - RNA, 12 nt, Reston Ebola virus (REBOV)
caauauucugaa

SEQ ID NO: 381186 - RNA, 18 nt, Reston Ebola virus (REBOV)
caauauucugaaugcucu

SEQ ID NO: 381187 - RNA, 19 nt, Reston Ebola virus (REBOV)
cacaacauccccgaugacc

SEQ ID NO: 381188 - RNA, 18 nt, Reston Ebola virus (REBOV)
caccgcgaacccaaugac

SEQ ID NO: 381189 - RNA, 15 nt, Reston Ebola virus (REBOV)
cacguuaaagauuua

SEQ ID NO: 381190 - RNA, 14 nt, Reston Ebola virus (REBOV)
cagacuauugaacu

SEQ ID NO: 381191 - RNA, 17 nt, Reston Ebola virus (REBOV)
cagaggcaacagacuca

SEQ ID NO: 381192 - RNA, 13 nt, Reston Ebola virus (REBOV)
cagcagcaaacca

SEQ ID NO: 381193 - RNA, 17 nt, Reston Ebola virus (REBOV)
cagcagcaaaccaggaa

SEQ ID NO: 381194 - RNA, 13 nt, Reston Ebola virus (REBOV)
cagcauccauuga

SEQ ID NO: 381195 - RNA, 16 nt, Reston Ebola virus (REBOV)
cagcccggacucacua

SEQ ID NO: 381196 - RNA, 15 nt, Reston Ebola virus (REBOV)
caguaaaugauuaua

SEQ ID NO: 381197 - RNA, 19 nt, Reston Ebola virus (REBOV)
cauauuuugaucaaguaau

SEQ ID NO: 381198 - RNA, 16 nt, Reston Ebola virus (REBOV)
caugucaaugcuauac

SEQ ID NO: 381199 - RNA, 20 nt, Reston Ebola virus (REBOV)
cauuucuuuuguaauuaauu

SEQ ID NO: 381200 - RNA, 19 nt, Reston Ebola virus (REBOV)
cauuuuuacauguguauau

SEQ ID NO: 381201 - RNA, 22 nt, Reston Ebola virus (REBOV)
ccacgauugcucucagucaaua

SEQ ID NO: 381202 - RNA, 16 nt, Reston Ebola virus (REBOV)
ccaguaaaugauuaua

SEQ ID NO: 381203 - RNA, 15 nt, Reston Ebola virus (REBOV)
ccauuuaguaauaau

SEQ ID NO: 381204 - RNA, 22 nt, Reston Ebola virus (REBOV)
cccccaucggcaagcaacgaga

SEQ ID NO: 381205 - RNA, 21 nt, Reston Ebola virus (REBOV)
ccuccagcauauaaugauauu

SEQ ID NO: 381206 - RNA, 13 nt, Reston Ebola virus (REBOV)
cgaacccaaugac

SEQ ID NO: 381207 - RNA, 18 nt, Reston Ebola virus (REBOV)
cgacuucggugugcaauu

SEQ ID NO: 381208 - RNA, 17 nt, Reston Ebola virus (REBOV)
cgcccagagcccacaga

SEQ ID NO: 381209 - RNA, 19 nt, Reston Ebola virus (REBOV)
cggaagagaguaugccaau

SEQ ID NO: 381210 - RNA, 20 nt, Reston Ebola virus (REBOV)
cguaugucuagcaaauuauc

SEQ ID NO: 381211 - RNA, 14 nt, Reston Ebola virus (REBOV)
cuaaauacacuuaa

SEQ ID NO: 381212 - RNA, 17 nt, Reston Ebola virus (REBOV)
cuaauugcauugagcac

SEQ ID NO: 381213 - RNA, 13 nt, Reston Ebola virus (REBOV)
cuacuaucgcaau

SEQ ID NO: 381214 - RNA, 15 nt, Reston Ebola virus (REBOV)
cuacuaucugcagua

SEQ ID NO: 381215 - RNA, 17 nt, Reston Ebola virus (REBOV)
cuagcaaauuaucaaua

SEQ ID NO: 381216 - RNA, 14 nt, Reston Ebola virus (REBOV)
cuaucgcaauuauc

SEQ ID NO: 381217 - RNA, 21 nt, Reston Ebola virus (REBOV)
cuauuuuuccacgauugcucu

SEQ ID NO: 381218 - RNA, 17 nt, Reston Ebola virus (REBOV)
uccacgauugcucucag

SEQ ID NO: 381219 - RNA, 15 nt, Reston Ebola virus (REBOV)
uccauucgagcuauu

SEQ ID NO: 381220 - RNA, 22 nt, Reston Ebola virus (REBOV)
ucgagcuauuauucugcuagua

SEQ ID NO: 381221 - RNA, 17 nt, Reston Ebola virus (REBOV)
ucguaugucuagcaaau

SEQ ID NO: 381222 - RNA, 18 nt, Reston Ebola virus (REBOV)
ucuacaaaaacuaaucca

SEQ ID NO: 381223 - RNA, 15 nt, Reston Ebola virus (REBOV)
ucuagaguauacuca

SEQ ID NO: 381224 - RNA, 22 nt, Reston Ebola virus (REBOV)
ucuauaagugauucuuaaucua

SEQ ID NO: 381225 - RNA, 15 nt, Reston Ebola virus (REBOV)
ucugaaugcucuaua

SEQ ID NO: 381226 - RNA, 19 nt, Reston Ebola virus (REBOV)
ucugaugucaccauaucca

SEQ ID NO: 381227 - RNA, 14 nt, Reston Ebola virus (REBOV)
ucuuuuccuaucuu

SEQ ID NO: 381228 - RNA, 22 nt, Reston Ebola virus (REBOV)
ugaacagccgaacaacacagca

SEQ ID NO: 381229 - RNA, 23 nt, Reston Ebola virus (REBOV)
ugaacagccgaacaacacagcau

SEQ ID NO: 381230 - RNA, 21 nt, Reston Ebola virus (REBOV)
ugaauaugacaacaucuugcu

SEQ ID NO: 381231 - RNA, 13 nt, Reston Ebola virus (REBOV)
ugaaugcucuaua

SEQ ID NO: 381232 - RNA, 18 nt, Reston Ebola virus (REBOV)
ugaaugcucuauagucua

SEQ ID NO: 381233 - RNA, 15 nt, Reston Ebola virus (REBOV)
ugacaacaucuugcu

SEQ ID NO: 381234 - RNA, 21 nt, Reston Ebola virus (REBOV)
ugacccaggacccgcaagaga

SEQ ID NO: 381235 - RNA, 14 nt, Reston Ebola virus (REBOV)
ugacuugaauguaa

SEQ ID NO: 381236 - RNA, 13 nt, Reston Ebola virus (REBOV)
ugaguaauaauca

SEQ ID NO: 381237 - RNA, 18 nt, Reston Ebola virus (REBOV)
ugauaagaauacacuuua

SEQ ID NO: 381238 - RNA, 13 nt, Reston Ebola virus (REBOV)
ugaucaaguaauc

SEQ ID NO: 381239 - RNA, 23 nt, Reston Ebola virus (REBOV)
ugauuugaacauagucauaaggg

SEQ ID NO: 381240 - RNA, 14 nt, Reston Ebola virus (REBOV)
ugcaguaaccagaa

SEQ ID NO: 381241 - RNA, 16 nt, Reston Ebola virus (REBOV)
ugcuacuuuucuauaa

SEQ ID NO: 381242 - RNA, 15 nt, Reston Ebola virus (REBOV)
ugcucucagucaaua

SEQ ID NO: 381243 - RNA, 14 nt, Reston Ebola virus (REBOV)
uggaucuacccuau

SEQ ID NO: 381244 - RNA, 23 nt, Reston Ebola virus (REBOV)
uggcucaauguucuugauuugaa

SEQ ID NO: 381245 - RNA, 19 nt, Reston Ebola virus (REBOV)
uggucuuuuugaaauggag

SEQ ID NO: 381246 - RNA, 20 nt, Reston Ebola virus (REBOV)
uguaaauauaacaagugaug

SEQ ID NO: 381247 - RNA, 12 nt, Reston Ebola virus (REBOV)
ugucaaugcuau

SEQ ID NO: 381248 - RNA, 18 nt, Reston Ebola virus (REBOV)
ugucuagcaaauuaucaa

SEQ ID NO: 381249 - RNA, 13 nt, Reston Ebola virus (REBOV)
ugugcaauuguca

SEQ ID NO: 381250 - RNA, 14 nt, Reston Ebola virus (REBOV)
ugugcaauugucaa

SEQ ID NO: 381251 - RNA, 23 nt, Reston Ebola virus (REBOV)
uuaaauuccauucgagcuauuau

SEQ ID NO: 381252 - RNA, 20 nt, Reston Ebola virus (REBOV)
uuacgccuagauaacuaaua

SEQ ID NO: 381253 - RNA, 16 nt, Reston Ebola virus (REBOV)
uuagaauguacuacca

SEQ ID NO: 381254 - RNA, 21 nt, Reston Ebola virus (REBOV)
uuagauggaaccucagccaga

SEQ ID NO: 381255 - RNA, 17 nt, Reston Ebola virus (REBOV)
uuauuacuuauugauaa

SEQ ID NO: 381256 - RNA, 17 nt, Reston Ebola virus (REBOV)
uuccagacuuggcauuu

SEQ ID NO: 381257 - RNA, 16 nt, Reston Ebola virus (REBOV)
uuccagucuugaguaa

SEQ ID NO: 381258 - RNA, 23 nt, Reston Ebola virus (REBOV)
uuccgacgggaucaauagacuaa

SEQ ID NO: 381259 - RNA, 21 nt, Reston Ebola virus (REBOV)
uucgagcuauuauucugcuag

SEQ ID NO: 381260 - RNA, 23 nt, Reston Ebola virus (REBOV)
uucgagcuauuauucugcuagua

SEQ ID NO: 381261 - RNA, 20 nt, Reston Ebola virus (REBOV)
uucguaaagcuaaauacacu

SEQ ID NO: 381262 - RNA, 23 nt, Reston Ebola virus (REBOV)
uucuaauccuaguauuuauuaga

SEQ ID NO: 381263 - RNA, 23 nt, Reston Ebola virus (REBOV)
uucuugauuugaacauagucaua

SEQ ID NO: 381264 - RNA, 14 nt, Reston Ebola virus (REBOV)
uugaaaaugugauc

SEQ ID NO: 381265 - RNA, 16 nt, Reston Ebola virus (REBOV)
uuggaagaucauucca

SEQ ID NO: 381266 - RNA, 18 nt, Reston Ebola virus (REBOV)
uuuagcaaagaauugaua

SEQ ID NO: 381267 - RNA, 21 nt, Reston Ebola virus (REBOV)
uuuauuaagaaaaaaucauga

SEQ ID NO: 381268 - RNA, 12 nt, Reston Ebola virus (REBOV)
uuugaaauggag

SEQ ID NO: 381269 - RNA, 20 nt, Reston Ebola virus (REBOV)
uuuugaaauggagauuauca

SEQ ID NO: 381270 - RNA, 12 nt, Reston Ebola virus (REBOV)
uuuuuuaaucua

SEQ ID NO: 381271 - RNA, 20 nt, Rous sarcoma virus
aaauguagucuuaugcaaua

SEQ ID NO: 381272 - RNA, 18 nt, Rous sarcoma virus
aacgaugaguuagcaaua

SEQ ID NO: 381273 - RNA, 20 nt, Rous sarcoma virus
aacgaugaguuagcaauaug

SEQ ID NO: 381274 - RNA, 20 nt, Rous sarcoma virus
aauacuccuguagucuugca

SEQ ID NO: 381275 - RNA, 19 nt, Rous sarcoma virus
aauaugauggcgucuuccc

SEQ ID NO: 381276 - RNA, 12 nt, Rous sarcoma virus
aauaugccuuac

SEQ ID NO: 381277 - RNA, 15 nt, Rous sarcoma virus
aaugcuucuguagaa

SEQ ID NO: 381278 - RNA, 19 nt, Rous sarcoma virus
acaaggaaagaaaaggcac

SEQ ID NO: 381279 - RNA, 16 nt, Rous sarcoma virus
acaauucugcuuggaa

SEQ ID NO: 381280 - RNA, 19 nt, Rous sarcoma virus
acaccugaaugaagcagaa

SEQ ID NO: 381281 - RNA, 16 nt, Rous sarcoma virus
acauggauuggacgaa

SEQ ID NO: 381282 - RNA, 23 nt, Rous sarcoma virus
acauggauuggacgaaccacuga

SEQ ID NO: 381283 - RNA, 23 nt, Rous sarcoma virus
accuacaauugcucaaauaaugc

SEQ ID NO: 381284 - RNA, 22 nt, Rous sarcoma virus
acgaucgugccuuauuaggaag

SEQ ID NO: 381285 - RNA, 17 nt, Rous sarcoma virus
acgaugaguuagcaaua

SEQ ID NO: 381286 - RNA, 20 nt, Rous sarcoma virus
acgaugaguuagcaauaugc

SEQ ID NO: 381287 - RNA, 19 nt, Rous sarcoma virus
agaaaaggcaccgugcaug

SEQ ID NO: 381288 - RNA, 15 nt, Rous sarcoma virus
agcaauaugccuuac

SEQ ID NO: 381289 - RNA, 12 nt, Rous sarcoma virus
aggcaccgugca

SEQ ID NO: 381290 - RNA, 19 nt, Rous sarcoma virus
aggggaccaugauguguau

SEQ ID NO: 381291 - RNA, 18 nt, Rous sarcoma virus
aggugguacgaucgugcc

SEQ ID NO: 381292 - RNA, 23 nt, Rous sarcoma virus
agucugauggccaaauaaggcag

SEQ ID NO: 381293 - RNA, 22 nt, Rous sarcoma virus
agugccuagcucgauacaauaa

SEQ ID NO: 381294 - RNA, 12 nt, Rous sarcoma virus
aguuagcaauau

SEQ ID NO: 381295 - RNA, 21 nt, Rous sarcoma virus
aguuagcaauaugccuuacaa

SEQ ID NO: 381296 - RNA, 13 nt, Rous sarcoma virus
auaaggcaggcaa

SEQ ID NO: 381297 - RNA, 19 nt, Rous sarcoma virus
auaaggcaggcaagacagc

SEQ ID NO: 381298 - RNA, 13 nt, Rous sarcoma virus
auaaugugcaguu

SEQ ID NO: 381299 - RNA, 17 nt, Rous sarcoma virus
auagggagggggaaaug

SEQ ID NO: 381300 - RNA, 22 nt, Rous sarcoma virus
aucagacgggucuaacauggau

SEQ ID NO: 381301 - RNA, 16 nt, Rous sarcoma virus
augugcaguuugacug

SEQ ID NO: 381302 - RNA, 23 nt, Rous sarcoma virus
auuagggcuggaggcagcacgga

SEQ ID NO: 381303 - RNA, 20 nt, Rous sarcoma virus
auuguauuuaagugccuagc

SEQ ID NO: 381304 - RNA, 14 nt, Rous sarcoma virus
caagacagcuauuu

SEQ ID NO: 381305 - RNA, 20 nt, Rous sarcoma virus
caauaaacgccauuuuacca

SEQ ID NO: 381306 - RNA, 19 nt, Rous sarcoma virus
caauacuccuguagucuug

SEQ ID NO: 381307 - RNA, 15 nt, Rous sarcoma virus
caauucugcuuggaa

SEQ ID NO: 381308 - RNA, 15 nt, Rous sarcoma virus
caauugcucaaauaa

SEQ ID NO: 381309 - RNA, 21 nt, Rous sarcoma virus
caccacauuggugugcaccug

SEQ ID NO: 381310 - RNA, 16 nt, Rous sarcoma virus
cauucaccacauuggu

SEQ ID NO: 381311 - RNA, 17 nt, Rous sarcoma virus
cauuggugugcaccugg

SEQ ID NO: 381312 - RNA, 14 nt, Rous sarcoma virus
cauuuuaccauuca

SEQ ID NO: 381313 - RNA, 15 nt, Rous sarcoma virus
ccauuuuaccauuca

SEQ ID NO: 381314 - RNA, 19 nt, Rous sarcoma virus
ccccucaggacaauucugc

SEQ ID NO: 381315 - RNA, 15 nt, Rous sarcoma virus
ccuacaauugcucaa

SEQ ID NO: 381316 - RNA, 12 nt, Rous sarcoma virus
ccuguuuugccc

SEQ ID NO: 381317 - RNA, 14 nt, Rous sarcoma virus
ccuuagacuauucg

SEQ ID NO: 381318 - RNA, 17 nt, Rous sarcoma virus
cgaguugccucugugga

SEQ ID NO: 381319 - RNA, 16 nt, Rous sarcoma virus
cgcagagauauuguau

SEQ ID NO: 381320 - RNA, 15 nt, Rous sarcoma virus
cgugaccuacaauug

SEQ ID NO: 381321 - RNA, 18 nt, Rous sarcoma virus
cgugaccuacaauugcuc

SEQ ID NO: 381322 - RNA, 20 nt, Rous sarcoma virus
cgugaccuacaauugcucaa

SEQ ID NO: 381323 - RNA, 14 nt, Rous sarcoma virus
cucaggacaauucu

SEQ ID NO: 381324 - RNA, 15 nt, Rous sarcoma virus
cuccuguagucuugc

SEQ ID NO: 381325 - RNA, 15 nt, Rous sarcoma virus
cugauggccaaauaa

SEQ ID NO: 381326 - RNA, 20 nt, Rous sarcoma virus
cuguuuugcccuuagacuau

SEQ ID NO: 381327 - RNA, 16 nt, Rous sarcoma virus
gaaauacgcuuuugca

SEQ ID NO: 381328 - RNA, 17 nt, Rous sarcoma virus
aaaaggcaccgugcaug

SEQ ID NO: 381329 - RNA, 15 nt, Rous sarcoma virus
aaauacgcuuuugca

SEQ ID NO: 381330 - RNA, 23 nt, Rous sarcoma virus
aaauuguuuagcauuaggcgucc

SEQ ID NO: 381331 - RNA, 19 nt, Rous sarcoma virus
aacgaugaguuagcaauau

SEQ ID NO: 381332 - RNA, 22 nt, Rous sarcoma virus
aacugcgaaauacgcuuuugca

SEQ ID NO: 381333 - RNA, 12 nt, Rous sarcoma virus
aagcagaaggcu

SEQ ID NO: 381334 - RNA, 23 nt, Rous sarcoma virus
aagugccuagcucgauacaauaa

SEQ ID NO: 381335 - RNA, 15 nt, Rous sarcoma virus
aauaaggcaggcaag

SEQ ID NO: 381336 - RNA, 22 nt, Rous sarcoma virus
aauccccucaggacaauucugc

SEQ ID NO: 381337 - RNA, 19 nt, Rous sarcoma virus
aaugaagcagaaggcuuca

SEQ ID NO: 381338 - RNA, 13 nt, Rous sarcoma virus
aaugugcaguuug

SEQ ID NO: 381339 - RNA, 21 nt, Rous sarcoma virus
acaauucugcuuggaauauga

SEQ ID NO: 381340 - RNA, 21 nt, Rous sarcoma virus
acgaugaguuagcaauaugcc

SEQ ID NO: 381341 - RNA, 18 nt, Rous sarcoma virus
acgccauuuuaccauuca

SEQ ID NO: 381342 - RNA, 18 nt, Rous sarcoma virus
agaaauuguuuagcauua

SEQ ID NO: 381343 - RNA, 19 nt, Rous sarcoma virus
agauauuguauuuaagugc

SEQ ID NO: 381344 - RNA, 17 nt, Rous sarcoma virus
agcaauaugccuuacaa

SEQ ID NO: 381345 - RNA, 15 nt, Rous sarcoma virus
agcucgauacaauaa

SEQ ID NO: 381346 - RNA, 18 nt, Rous sarcoma virus
aggcaagacagcuauuug

SEQ ID NO: 381347 - RNA, 13 nt, Rous sarcoma virus
aggcaccgugcau

SEQ ID NO: 381348 - RNA, 13 nt, Rous sarcoma virus
agguauaaugugc

SEQ ID NO: 381349 - RNA, 14 nt, Rous sarcoma virus
agguauaaugugca

SEQ ID NO: 381350 - RNA, 19 nt, Rous sarcoma virus
aggugguacgaucgugccu

SEQ ID NO: 381351 - RNA, 14 nt, Rous sarcoma virus
agucugauggccaa

SEQ ID NO: 381352 - RNA, 15 nt, Rous sarcoma virus
agucuuaugcaauac

SEQ ID NO: 381353 - RNA, 22 nt, Rous sarcoma virus
auaaacgccauuuuaccauuca

SEQ ID NO: 381354 - RNA, 13 nt, Rous sarcoma virus
auacuccuguagu

SEQ ID NO: 381355 - RNA, 18 nt, Rous sarcoma virus
ccuagcucgauacaauaa

SEQ ID NO: 381356 - RNA, 15 nt, Rous sarcoma virus
ccucaggacaauucu

SEQ ID NO: 381357 - RNA, 15 nt, Rous sarcoma virus
ccugaaugaagcaga

SEQ ID NO: 381358 - RNA, 15 nt, Rous sarcoma virus
ccuggguugauggcc

SEQ ID NO: 381359 - RNA, 23 nt, Rous sarcoma virus
cgaggcgugaccuacaauugcuc

SEQ ID NO: 381360 - RNA, 17 nt, Rous sarcoma virus
cgauugcgaacaccuga

SEQ ID NO: 381361 - RNA, 17 nt, Rous sarcoma virus
cguccugcguugcuccg

SEQ ID NO: 381362 - RNA, 23 nt, Rous sarcoma virus
cuauucgaguugccucuguggau

SEQ ID NO: 381363 - RNA, 22 nt, Rous sarcoma virus
cugaggggaccaugauguguau

SEQ ID NO: 381364 - RNA, 15 nt, Rous sarcoma virus
gaaaaggcaccgugc

SEQ ID NO: 381365 - RNA, 14 nt, Rous sarcoma virus
gaaauguagucuua

SEQ ID NO: 381366 - RNA, 22 nt, Rous sarcoma virus
gacaauucugcuuggaauauga

SEQ ID NO: 381367 - RNA, 18 nt, Rous sarcoma virus
gaguuagcaauaugccuu

SEQ ID NO: 381368 - RNA, 19 nt, Rous sarcoma virus
gauacaauaaacgccauuu

SEQ ID NO: 381369 - RNA, 21 nt, Rous sarcoma virus
gauauuguauuuaagugccua

SEQ ID NO: 381370 - RNA, 20 nt, Rous sarcoma virus
gaugaguuagcaauaugccu

SEQ ID NO: 381371 - RNA, 14 nt, Rous sarcoma virus
gcagaaggcuucau

SEQ ID NO: 381372 - RNA, 20 nt, Rous sarcoma virus
gccggaccgucgauucccua

SEQ ID NO: 381373 - RNA, 22 nt, Rous sarcoma virus
ggaaauguagucuuaugcaaua

SEQ ID NO: 381374 - RNA, 22 nt, Rous sarcoma virus
ggacgaaccacugaauuccgca

SEQ ID NO: 381375 - RNA, 19 nt, Rous sarcoma virus
ggucagguauaaugugcag

SEQ ID NO: 381376 - RNA, 23 nt, Rous sarcoma virus
guaacgaugaguuagcaauaugc

SEQ ID NO: 381377 - RNA, 22 nt, Rous sarcoma virus
guaaggugguacgaucgugccu

SEQ ID NO: 381378 - RNA, 16 nt, Rous sarcoma virus
guacgcggauaggaau

SEQ ID NO: 381379 - RNA, 15 nt, Rous sarcoma virus
guagucuuaugcaau

SEQ ID NO: 381380 - RNA, 23 nt, Rous sarcoma virus
guaucagacgggucuaacaugga

SEQ ID NO: 381381 - RNA, 14 nt, Rous sarcoma virus
guauuuaagugccu

SEQ ID NO: 381382 - RNA, 23 nt, Rous sarcoma virus
uaaggcaggcaagacagcuauuu

SEQ ID NO: 381383 - RNA, 21 nt, Rous sarcoma virus
uaagugccuagcucgauacaa

SEQ ID NO: 381384 - RNA, 19 nt, Rous sarcoma virus
uacaaggaaagaaaaggca

SEQ ID NO: 381385 - RNA, 15 nt, Rous sarcoma virus
uacgaucgugccuua

SEQ ID NO: 381386 - RNA, 16 nt, Rous sarcoma virus
uacgaucgugccuuau

SEQ ID NO: 381387 - RNA, 18 nt, Rous sarcoma virus
uacuccuguagucuugca

SEQ ID NO: 381388 - RNA, 16 nt, Rous sarcoma virus
uagcaauaugccuuac

SEQ ID NO: 381389 - RNA, 21 nt, Rous sarcoma virus
uaggcguccugcguugcuccg

SEQ ID NO: 381390 - RNA, 14 nt, Rous sarcoma virus
uagucugauggcca

SEQ ID NO: 381391 - RNA, 13 nt, Rous sarcoma virus
uagucuugcaaca

SEQ ID NO: 381392 - RNA, 12 nt, Rous sarcoma virus
uauaaugugcag

SEQ ID NO: 381393 - RNA, 15 nt, Rous sarcoma virus
ucaggacaauucugc

SEQ ID NO: 381394 - RNA, 15 nt, Rous sarcoma virus
ugacugaggggacca

SEQ ID NO: 381395 - RNA, 14 nt, Rous sarcoma virus
ugaguuagcaauau

SEQ ID NO: 381396 - RNA, 20 nt, Rous sarcoma virus
ugaguuagcaauaugccuua

SEQ ID NO: 381397 - RNA, 23 nt, Rous sarcoma virus
ugcaauacuccuguagucuugca

SEQ ID NO: 381398 - RNA, 18 nt, Rous sarcoma virus
ugcauagggagggggaaa

SEQ ID NO: 381399 - RNA, 14 nt, Rous sarcoma virus
ugcuuggaauauga

SEQ ID NO: 381400 - RNA, 18 nt, Rous sarcoma virus
ugguacgaucgugccuua

SEQ ID NO: 381401 - RNA, 16 nt, Rous sarcoma virus
uguauuuaagugccua

SEQ ID NO: 381402 - RNA, 12 nt, Rous sarcoma virus
uguuuagcauua

SEQ ID NO: 381403 - RNA, 19 nt, Rous sarcoma virus
uguuuugcccuuagacuau

SEQ ID NO: 381404 - RNA, 21 nt, Rous sarcoma virus
uuaggcguccugcguugcucc

SEQ ID NO: 381405 - RNA, 22 nt, Rous sarcoma virus
uuaugcaauacuccuguagucu

SEQ ID NO: 381406 - RNA, 23 nt, Rous sarcoma virus
uucccuguuuugcccuuagacua

SEQ ID NO: 381407 - RNA, 14 nt, Rous sarcoma virus
uugcaacaugcuua

SEQ ID NO: 381408 - RNA, 23 nt, Rous sarcoma virus
uuggacgaaccacugaauuccgc

SEQ ID NO: 381409 - RNA, 13 nt, Rous sarcoma virus
uuuaagugccuag

SEQ ID NO: 381410 - RNA, 21 nt, Rous sarcoma virus
gaaauguagucuuaugcaaua

SEQ ID NO: 381411 - RNA, 13 nt, Rous sarcoma virus
gaauaugauggcg

SEQ ID NO: 381412 - RNA, 20 nt, Rous sarcoma virus
gaaugaagcagaaggcuuca

SEQ ID NO: 381413 - RNA, 23 nt, Rous sarcoma virus
gagauauuguauuuaagugccua

SEQ ID NO: 381414 - RNA, 15 nt, Rous sarcoma virus
gauagucugauggcc

SEQ ID NO: 381415 - RNA, 13 nt, Rous sarcoma virus
gaucgugccuuau

SEQ ID NO: 381416 - RNA, 15 nt, Rous sarcoma virus
gaugaguuagcaaua

SEQ ID NO: 381417 - RNA, 16 nt, Rous sarcoma virus
gauugcgaacaccuga

SEQ ID NO: 381418 - RNA, 18 nt, Rous sarcoma virus
gcaauacuccuguagucu

SEQ ID NO: 381419 - RNA, 14 nt, Rous sarcoma virus
gcaauaugccuuac

SEQ ID NO: 381420 - RNA, 20 nt, Rous sarcoma virus
gcucaaauaaugcuucugua

SEQ ID NO: 381421 - RNA, 13 nt, Rous sarcoma virus
ggacaauucugcu

SEQ ID NO: 381422 - RNA, 14 nt, Rous sarcoma virus
ggacaauucugcuu

SEQ ID NO: 381423 - RNA, 19 nt, Rous sarcoma virus
ggagggggaaauguagucu

SEQ ID NO: 381424 - RNA, 17 nt, Rous sarcoma virus
gggaaauguagucuuau

SEQ ID NO: 381425 - RNA, 17 nt, Rous sarcoma virus
gguauaaugugcaguuu

SEQ ID NO: 381426 - RNA, 16 nt, Rous sarcoma virus
guacgaucgugccuua

SEQ ID NO: 381427 - RNA, 21 nt, Rous sarcoma virus
gucuugcaacaugcuuaugua

SEQ ID NO: 381428 - RNA, 17 nt, Rous sarcoma virus
uacuccuguagucuugc

SEQ ID NO: 381429 - RNA, 12 nt, Rous sarcoma virus
uagcaauaugcc

SEQ ID NO: 381430 - RNA, 15 nt, Rous sarcoma virus
uagcaauaugccuua

SEQ ID NO: 381431 - RNA, 22 nt, Rous sarcoma virus
uagggagggggaaauguagucu

SEQ ID NO: 381432 - RNA, 15 nt, Rous sarcoma virus
uagucuuaugcaaua

SEQ ID NO: 381433 - RNA, 17 nt, Rous sarcoma virus
uaugauggcgucuuccc

SEQ ID NO: 381434 - RNA, 18 nt, Rous sarcoma virus
uauuuaagugccuagcuc

SEQ ID NO: 381435 - RNA, 19 nt, Rous sarcoma virus
ucaccacauuggugugcac

SEQ ID NO: 381436 - RNA, 20 nt, Rous sarcoma virus
ucagacgggucuaacaugga

SEQ ID NO: 381437 - RNA, 17 nt, Rous sarcoma virus
ucccuguuuugcccuua

SEQ ID NO: 381438 - RNA, 17 nt, Rous sarcoma virus
ugaccuacaauugcuca

SEQ ID NO: 381439 - RNA, 19 nt, Rous sarcoma virus
ugcaauacuccuguagucu

SEQ ID NO: 381440 - RNA, 18 nt, Rous sarcoma virus
ugccuagcucgauacaau

SEQ ID NO: 381441 - RNA, 19 nt, Rous sarcoma virus
ugguacgaucgugccuuau

SEQ ID NO: 381442 - RNA, 19 nt, Rous sarcoma virus
uguagucuugcaacaugcu

SEQ ID NO: 381443 - RNA, 18 nt, Rous sarcoma virus
uugcgaacaccugaauga

SEQ ID NO: 381444 - RNA, 19 nt, Rous sarcoma virus
uuggacgaaccacugaauu

SEQ ID NO: 381445 - RNA, 21 nt, Rous sarcoma virus
auaggaauccccucaggacaa

SEQ ID NO: 381446 - RNA, 23 nt, Rous sarcoma virus
auaggaauccccucaggacaauu

SEQ ID NO: 381447 - RNA, 21 nt, Rous sarcoma virus
auagggagggggaaauguagu

SEQ ID NO: 381448 - RNA, 12 nt, Rous sarcoma virus
aucgugccuuau

SEQ ID NO: 381449 - RNA, 19 nt, Rous sarcoma virus
aucgugccuuauuaggaag

SEQ ID NO: 381450 - RNA, 17 nt, Rous sarcoma virus
augaagcagaaggcuuc

SEQ ID NO: 381451 - RNA, 15 nt, Rous sarcoma virus
augaguuagcaauau

SEQ ID NO: 381452 - RNA, 16 nt, Rous sarcoma virus
augauggcgucuuccc

SEQ ID NO: 381453 - RNA, 24 nt, Rous sarcoma virus
augcaauacuccuguagucuugca

SEQ ID NO: 381454 - RNA, 14 nt, Rous sarcoma virus
augcuucuguagaa

SEQ ID NO: 381455 - RNA, 14 nt, Rous sarcoma virus
auuaggaagguauc

SEQ ID NO: 381456 - RNA, 19 nt, Rous sarcoma virus
auucugcuuggaauaugau

SEQ ID NO: 381457 - RNA, 15 nt, Rous sarcoma virus
auugcgaacaccuga

SEQ ID NO: 381458 - RNA, 23 nt, Rous sarcoma virus
auugcucaaauaaugcuucugua

SEQ ID NO: 381459 - RNA, 17 nt, Rous sarcoma virus
auuggacgaaccacuga

SEQ ID NO: 381460 - RNA, 18 nt, Rous sarcoma virus
auuguauuuaagugccua

SEQ ID NO: 381461 - RNA, 17 nt, Rous sarcoma virus
caaauaaugcuucugua

SEQ ID NO: 381462 - RNA, 15 nt, Rous sarcoma virus
caacaugcuuaugua

SEQ ID NO: 381463 - RNA, 21 nt, Rous sarcoma virus
caagacagcuauuuguaacug

SEQ ID NO: 381464 - RNA, 13 nt, Rous sarcoma virus
caauacuccugua

SEQ ID NO: 381465 - RNA, 13 nt, Rous sarcoma virus
caauaugccuuac

SEQ ID NO: 381466 - RNA, 20 nt, Rous sarcoma virus
caauucugcuuggaauauga

SEQ ID NO: 381467 - RNA, 15 nt, Rous sarcoma virus
cacauuggugugcac

SEQ ID NO: 381468 - RNA, 16 nt, Rous sarcoma virus
cagguauaaugugcag

SEQ ID NO: 381469 - RNA, 22 nt, Rous sarcoma virus
cauuaggcguccugcguugcuc

SEQ ID NO: 381470 - RNA, 15 nt, Rous sarcoma virus
cccucaggacaauuc

SEQ ID NO: 381471 - RNA, 17 nt, Rous sarcoma virus
ccuagcucgauacaaua

SEQ ID NO: 381472 - RNA, 17 nt, Rubella virus
aaacccgcacuaggcca

SEQ ID NO: 381473 - RNA, 18 nt, Rubella virus
aaacccgcacuaggccac

SEQ ID NO: 381474 - RNA, 15 nt, Rubella virus
aacccgcacuaggcc

SEQ ID NO: 381475 - RNA, 16 nt, Rubella virus
aacccgcacuaggcca

SEQ ID NO: 381476 - RNA, 23 nt, Rubella virus
accaaccugggcacccccccacu

SEQ ID NO: 381477 - RNA, 18 nt, Rubella virus
acccgcacuaggccacua

SEQ ID NO: 381478 - RNA, 19 nt, Rubella virus
acuagauccccgcaccugu

SEQ ID NO: 381479 - RNA, 17 nt, Rubella virus
agauccccgcaccuguu

SEQ ID NO: 381480 - RNA, 13 nt, Rubella virus
cacuagauccccg

SEQ ID NO: 381481 - RNA, 14 nt, Rubella virus
caugcaaaccgggc

SEQ ID NO: 381482 - RNA, 15 nt, Rubella virus
ccgcaccuguugcug

SEQ ID NO: 381483 - RNA, 19 nt, Rubella virus
ccgcacuaggccacuagau

SEQ ID NO: 381484 - RNA, 16 nt, Rubella virus
ccugcgugaccucgug

SEQ ID NO: 381485 - RNA, 23 nt, Rubella virus
cuagauccccgcaccuguugcug

SEQ ID NO: 381486 - RNA, 17 nt, Rubella virus
cuaggccacuagauccc

SEQ ID NO: 381487 - RNA, 22 nt, Rubella virus
cuaggccacuagauccccgcac

SEQ ID NO: 381488 - RNA, 13 nt, Rubella virus
cuguugcuguaua

SEQ ID NO: 381489 - RNA, 15 nt, Rubella virus
gcacuaggccacuag

SEQ ID NO: 381490 - RNA, 17 nt, Rubella virus
gcacuaggccacuagau

SEQ ID NO: 381491 - RNA, 18 nt, Rubella virus
uagauccccgcaccuguu

SEQ ID NO: 381492 - RNA, 14 nt, Rubella virus
uaggccacuagauc

SEQ ID NO: 381493 - RNA, 17 nt, Rubella virus
uccccgcaccuguugcu

SEQ ID NO: 381494 - RNA, 22 nt, Rubella virus
acccccgcgcaugcaaaccggg

SEQ ID NO: 381495 - RNA, 14 nt, Rubella virus
acccgcacuaggcc

SEQ ID NO: 381496 - RNA, 15 nt, Rubella virus
accgaggcacccacc

SEQ ID NO: 381497 - RNA, 15 nt, Rubella virus
accuguugcuguaua

SEQ ID NO: 381498 - RNA, 13 nt, Rubella virus
acuaggccacuag

SEQ ID NO: 381499 - RNA, 15 nt, Rubella virus
caccuguugcuguau

SEQ ID NO: 381500 - RNA, 16 nt, Rubella virus
caccuguugcuguaua

SEQ ID NO: 381501 - RNA, 20 nt, Rubella virus
cacuagauccccgcaccugu

SEQ ID NO: 381502 - RNA, 22 nt, Rubella virus
cacuagauccccgcaccuguug

SEQ ID NO: 381503 - RNA, 12 nt, Rubella virus
ccacuagauccc

SEQ ID NO: 381504 - RNA, 17 nt, Rubella virus
ccccgcaccuguugcug

SEQ ID NO: 381505 - RNA, 19 nt, Rubella virus
cccgcacuaggccacuaga

SEQ ID NO: 381506 - RNA, 14 nt, Rubella virus
ccgcaccuguugcu

SEQ ID NO: 381507 - RNA, 18 nt, Rubella virus
ccgcaccuguugcuguau

SEQ ID NO: 381508 - RNA, 14 nt, Rubella virus
ccgcacuaggccac

SEQ ID NO: 381509 - RNA, 15 nt, Rubella virus
ccgcggcaaccgggg

SEQ ID NO: 381510 - RNA, 17 nt, Rubella virus
ccugacaccgaggcacc

SEQ ID NO: 381511 - RNA, 21 nt, Rubella virus
ccugcauuucaccaaccuggg

SEQ ID NO: 381512 - RNA, 16 nt, Rubella virus
cgcaccuguugcugua

SEQ ID NO: 381513 - RNA, 14 nt, Rubella virus
cgcacuaggccacu

SEQ ID NO: 381514 - RNA, 19 nt, Rubella virus
cgcacuaggccacuagauc

SEQ ID NO: 381515 - RNA, 22 nt, Rubella virus
cuagauccccgcaccuguugcu

SEQ ID NO: 381516 - RNA, 15 nt, Rubella virus
gcaccuguugcugua

SEQ ID NO: 381517 - RNA, 16 nt, Rubella virus
gcacuaggccacuaga

SEQ ID NO: 381518 - RNA, 12 nt, Rubella virus
gcgaaacccgca

SEQ ID NO: 381519 - RNA, 17 nt, Rubella virus
uagauccccgcaccugu

SEQ ID NO: 381520 - RNA, 13 nt, Rubella virus
ucaccaaccuggg

SEQ ID NO: 381521 - RNA, 22 nt, Rubella virus
uccccgcaccuguugcuguaua

SEQ ID NO: 381522 - RNA, 18 nt, SARS coronavirus
aaaacagcgccgacccca

SEQ ID NO: 381523 - RNA, 15 nt, SARS coronavirus
aaaauugacaaugcu

SEQ ID NO: 381524 - RNA, 21 nt, SARS coronavirus
aaacagguacguuaauaguua

SEQ ID NO: 381525 - RNA, 17 nt, SARS coronavirus
aaacgaacuaacuauua

SEQ ID NO: 381526 - RNA, 17 nt, SARS coronavirus
aaagcuuguuuuccucu

SEQ ID NO: 381527 - RNA, 22 nt, SARS coronavirus
aaagguuuuaccuuuucauaga

SEQ ID NO: 381528 - RNA, 20 nt, SARS coronavirus
aaauuauucucuuccugaca

SEQ ID NO: 381529 - RNA, 14 nt, SARS coronavirus
aaauugacaaugcu

SEQ ID NO: 381530 - RNA, 19 nt, SARS coronavirus
aacagguuuuuguacauaa

SEQ ID NO: 381531 - RNA, 16 nt, SARS coronavirus
aacaugaaaauuauuc

SEQ ID NO: 381532 - RNA, 16 nt, SARS coronavirus
aacaugaaacuucuca

SEQ ID NO: 381533 - RNA, 15 nt, SARS coronavirus
aaccucaugugcuug

SEQ ID NO: 381534 - RNA, 12 nt, SARS coronavirus
aacgaacaugaa

SEQ ID NO: 381535 - RNA, 14 nt, SARS coronavirus
aacuccuggcagca

SEQ ID NO: 381536 - RNA, 13 nt, SARS coronavirus
aagaaauucaacu

SEQ ID NO: 381537 - RNA, 12 nt, SARS coronavirus
aagaaccuugcc

SEQ ID NO: 381538 - RNA, 16 nt, SARS coronavirus
aagagcccuaaugugu

SEQ ID NO: 381539 - RNA, 16 nt, SARS coronavirus
aagaucaguuucacca

SEQ ID NO: 381540 - RNA, 19 nt, SARS coronavirus
aaggaggaacuuagauucc

SEQ ID NO: 381541 - RNA, 14 nt, SARS coronavirus
aaggaguuccugau

SEQ ID NO: 381542 - RNA, 17 nt, SARS coronavirus
aaggcagaugggcuaug

SEQ ID NO: 381543 - RNA, 19 nt, SARS coronavirus
aagucuaaacgaacaugaa

SEQ ID NO: 381544 - RNA, 20 nt, SARS coronavirus
aauaauugcgcucaauaaaa

SEQ ID NO: 381545 - RNA, 17 nt, SARS coronavirus
aauacuuugcuucacca

SEQ ID NO: 381546 - RNA, 12 nt, SARS coronavirus
aaucugaacucu

SEQ ID NO: 381547 - RNA, 16 nt, SARS coronavirus
aaugcuucuccugcaa

SEQ ID NO: 381548 - RNA, 22 nt, SARS coronavirus
aauggcugauuuagucuaugcu

SEQ ID NO: 381549 - RNA, 21 nt, SARS coronavirus
aauuacacucaacauacuuca

SEQ ID NO: 381550 - RNA, 14 nt, SARS coronavirus
aauucaccauuuca

SEQ ID NO: 381551 - RNA, 21 nt, SARS coronavirus
aauugacuucuauuugugcuu

SEQ ID NO: 381552 - RNA, 20 nt, SARS coronavirus
aauugcugucgcuuccagga

SEQ ID NO: 381553 - RNA, 14 nt, SARS coronavirus
aauuuacugcugcu

SEQ ID NO: 381554 - RNA, 18 nt, SARS coronavirus
acaaauuaaaaugucuga

SEQ ID NO: 381555 - RNA, 15 nt, SARS coronavirus
acaacgguacuauua

SEQ ID NO: 381556 - RNA, 17 nt, SARS coronavirus
acaagagcucuacucgc

SEQ ID NO: 381557 - RNA, 23 nt, SARS coronavirus
acaaugcugccaccgugcuacaa

SEQ ID NO: 381558 - RNA, 18 nt, SARS coronavirus
acaauggaaccuaguaau

SEQ ID NO: 381559 - RNA, 15 nt, SARS coronavirus
acaauucuacuaaug

SEQ ID NO: 381560 - RNA, 20 nt, SARS coronavirus
acaccuaauguuacuaucaa

SEQ ID NO: 381561 - RNA, 22 nt, SARS coronavirus
acagaaugaaugagcucacuuu

SEQ ID NO: 381562 - RNA, 17 nt, SARS coronavirus
acagauugaaccagcuu

SEQ ID NO: 381563 - RNA, 22 nt, SARS coronavirus
acagucggugauuauuauuaac

SEQ ID NO: 381564 - RNA, 16 nt, SARS coronavirus
acaucuugcgagcuau

SEQ ID NO: 381565 - RNA, 18 nt, SARS coronavirus
acaucuugcgagcuauau

SEQ ID NO: 381566 - RNA, 21 nt, SARS coronavirus
acaugaaaauuauucucuucc

SEQ ID NO: 381567 - RNA, 13 nt, SARS coronavirus
accaaacugcugc

SEQ ID NO: 381568 - RNA, 22 nt, SARS coronavirus
accaacgguuuacgucuacucg

SEQ ID NO: 381569 - RNA, 15 nt, SARS coronavirus
acccaauaauacugc

SEQ ID NO: 381570 - RNA, 14 nt, SARS coronavirus
acccacagauucaa

SEQ ID NO: 381571 - RNA, 22 nt, SARS coronavirus
acccacagauucaacugacaau

SEQ ID NO: 381572 - RNA, 17 nt, SARS coronavirus
acccgcucaaugugguc

SEQ ID NO: 381573 - RNA, 15 nt, SARS coronavirus
acccucuugcugaca

SEQ ID NO: 381574 - RNA, 14 nt, SARS coronavirus
accuaauguuacua

SEQ ID NO: 381575 - RNA, 23 nt, SARS coronavirus
accuaggaacuggcccagaagcu

SEQ ID NO: 381576 - RNA, 17 nt, SARS coronavirus
acgaacuuauguacuca

SEQ ID NO: 381577 - RNA, 18 nt, SARS coronavirus
acgguuuacgucuacucg

SEQ ID NO: 381578 - RNA, 14 nt, SARS coronavirus
acuaaaagaaccuu

SEQ ID NO: 381579 - RNA, 20 nt, SARS coronavirus
acuaccgaagagcuacccga

SEQ ID NO: 381580 - RNA, 15 nt, SARS coronavirus
acuauccugaugaaa

SEQ ID NO: 381581 - RNA, 22 nt, SARS coronavirus
acuaugguucaaacaugcacac

SEQ ID NO: 381582 - RNA, 19 nt, SARS coronavirus
acuaugucuaacuaccaac

SEQ ID NO: 381583 - RNA, 23 nt, SARS coronavirus
acucccuuucggauggcuuguua

SEQ ID NO: 381584 - RNA, 21 nt, SARS coronavirus
acugcuuggcuuugugcucua

SEQ ID NO: 381585 - RNA, 18 nt, SARS coronavirus
acuggcccagaagcuuca

SEQ ID NO: 381586 - RNA, 13 nt, SARS coronavirus
acugucaagaucc

SEQ ID NO: 381587 - RNA, 15 nt, SARS coronavirus
acuuauagcacugcu

SEQ ID NO: 381588 - RNA, 16 nt, SARS coronavirus
acuuauagcacugcuu

SEQ ID NO: 381589 - RNA, 14 nt, SARS coronavirus
acuuccucaaggaa

SEQ ID NO: 381590 - RNA, 21 nt, SARS coronavirus
acuugcacuagcacacacuuu

SEQ ID NO: 381591 - RNA, 14 nt, SARS coronavirus
acuuuaauugacuu

SEQ ID NO: 381592 - RNA, 13 nt, SARS coronavirus
acuuuucaucaga

SEQ ID NO: 381593 - RNA, 14 nt, SARS coronavirus
agaaauacucguca

SEQ ID NO: 381594 - RNA, 14 nt, SARS coronavirus
agaagcuucacuuc

SEQ ID NO: 381595 - RNA, 17 nt, SARS coronavirus
agacaacgguacuauua

SEQ ID NO: 381596 - RNA, 21 nt, SARS coronavirus
agacacucuuuauuuaacuca

SEQ ID NO: 381597 - RNA, 15 nt, SARS coronavirus
agaucaauuacugca

SEQ ID NO: 381598 - RNA, 22 nt, SARS coronavirus
agauggugacaugguaccacau

SEQ ID NO: 381599 - RNA, 16 nt, SARS coronavirus
agcaacgauaccgcua

SEQ ID NO: 381600 - RNA, 22 nt, SARS coronavirus
agcaacgauaccgcuacaagcc

SEQ ID NO: 381601 - RNA, 22 nt, SARS coronavirus
agcacugcuuggcuuugugcuc

SEQ ID NO: 381602 - RNA, 21 nt, SARS coronavirus
agcccuuuauaagggcuucca

SEQ ID NO: 381603 - RNA, 13 nt, SARS coronavirus
agccucuucucgc

SEQ ID NO: 381604 - RNA, 19 nt, SARS coronavirus
agccucuucucgcuccuca

SEQ ID NO: 381605 - RNA, 20 nt, SARS coronavirus
agcuacuucguugcuuccuu

SEQ ID NO: 381606 - RNA, 21 nt, SARS coronavirus
agcuacuucguugcuuccuuc

SEQ ID NO: 381607 - RNA, 15 nt, SARS coronavirus
agcuagguguuggua

SEQ ID NO: 381608 - RNA, 12 nt, SARS coronavirus
aggaaagguuuu

SEQ ID NO: 381609 - RNA, 22 nt, SARS coronavirus
aggaaagguuuuaccuuuucau

SEQ ID NO: 381610 - RNA, 20 nt, SARS coronavirus
aggaacuggcccagaagcuu

SEQ ID NO: 381611 - RNA, 21 nt, SARS coronavirus
aggcaauuuauuagacucuua

SEQ ID NO: 381612 - RNA, 22 nt, SARS coronavirus
agggcuuccaguucauuugcaa

SEQ ID NO: 381613 - RNA, 19 nt, SARS coronavirus
aguaauagguuuccuauuc

SEQ ID NO: 381614 - RNA, 20 nt, SARS coronavirus
aguacagcgcugugcaucua

SEQ ID NO: 381615 - RNA, 20 nt, SARS coronavirus
aguuaagaggcauacuaugu

SEQ ID NO: 381616 - RNA, 23 nt, SARS coronavirus
aguucauuugcaauuuacugcug

SEQ ID NO: 381617 - RNA, 18 nt, SARS coronavirus
aguugcauaugcacugua

SEQ ID NO: 381618 - RNA, 21 nt, SARS coronavirus
auaaauuugcacuaacuugca

SEQ ID NO: 381619 - RNA, 19 nt, SARS coronavirus
auaauggaccccaaucaaa

SEQ ID NO: 381620 - RNA, 21 nt, SARS coronavirus
auacgagcauguaacuuugaa

SEQ ID NO: 381621 - RNA, 14 nt, SARS coronavirus
auacuaugucuaac

SEQ ID NO: 381622 - RNA, 23 nt, SARS coronavirus
auagcagagauauugauuaucau

SEQ ID NO: 381623 - RNA, 23 nt, SARS coronavirus
auagcguacuucuuuuucuugcu

SEQ ID NO: 381624 - RNA, 14 nt, SARS coronavirus
auauauuuucuaca

SEQ ID NO: 381625 - RNA, 19 nt, SARS coronavirus
auauauuuucuacaaugca

SEQ ID NO: 381626 - RNA, 14 nt, SARS coronavirus
auaucacuaucagg

SEQ ID NO: 381627 - RNA, 14 nt, SARS coronavirus
auauggaagagccc

SEQ ID NO: 381628 - RNA, 16 nt, SARS coronavirus
auauuuugguuuucac

SEQ ID NO: 381629 - RNA, 12 nt, SARS coronavirus
aucaaauguugu

SEQ ID NO: 381630 - RNA, 13 nt, SARS coronavirus
aucaacgcaugua

SEQ ID NO: 381631 - RNA, 17 nt, SARS coronavirus
aucgaggguacagugaa

SEQ ID NO: 381632 - RNA, 15 nt, SARS coronavirus
aucuaauaaaccuca

SEQ ID NO: 381633 - RNA, 16 nt, SARS coronavirus
aucuuguugacuucca

SEQ ID NO: 381634 - RNA, 14 nt, SARS coronavirus
augaaugagcucac

SEQ ID NO: 381635 - RNA, 18 nt, SARS coronavirus
augagauuuuuuacucuu

SEQ ID NO: 381636 - RNA, 17 nt, SARS coronavirus
augauguucaagcuccu

SEQ ID NO: 381637 - RNA, 21 nt, SARS coronavirus
augauguucaagcuccuaauu

SEQ ID NO: 381638 - RNA, 18 nt, SARS coronavirus
augcaguugcauaugcac

SEQ ID NO: 381639 - RNA, 16 nt, SARS coronavirus
augcuacagcaacgau

SEQ ID NO: 381640 - RNA, 19 nt, SARS coronavirus
auggaccccaaucaaacca

SEQ ID NO: 381641 - RNA, 16 nt, SARS coronavirus
auggaggcgcaauuuu

SEQ ID NO: 381642 - RNA, 15 nt, SARS coronavirus
auggcagcuagcccu

SEQ ID NO: 381643 - RNA, 13 nt, SARS coronavirus
auguuacuaucaa

SEQ ID NO: 381644 - RNA, 17 nt, SARS coronavirus
auuaacaauucuacuaa

SEQ ID NO: 381645 - RNA, 20 nt, SARS coronavirus
auuaauuuuaguagugcuau

SEQ ID NO: 381646 - RNA, 21 nt, SARS coronavirus
auuacugcacagccaguaaaa

SEQ ID NO: 381647 - RNA, 17 nt, SARS coronavirus
auuagggaggacuugaa

SEQ ID NO: 381648 - RNA, 16 nt, SARS coronavirus
auuaugaggacuuuca

SEQ ID NO: 381649 - RNA, 15 nt, SARS coronavirus
auuauuaacaauucu

SEQ ID NO: 381650 - RNA, 19 nt, SARS coronavirus
auuauucucuuccugacau

SEQ ID NO: 381651 - RNA, 16 nt, SARS coronavirus
auuauuucuuacucuc

SEQ ID NO: 381652 - RNA, 16 nt, SARS coronavirus
auucuacuaauguugu

SEQ ID NO: 381653 - RNA, 15 nt, SARS coronavirus
auucuccugcucgaa

SEQ ID NO: 381654 - RNA, 12 nt, SARS coronavirus
auugacaaugcu

SEQ ID NO: 381655 - RNA, 13 nt, SARS coronavirus
gguuuacccaaua

SEQ ID NO: 381656 - RNA, 13 nt, SARS coronavirus
gguuuuuguacau

SEQ ID NO: 381657 - RNA, 18 nt, SARS coronavirus
guaauacuuauagcacug

SEQ ID NO: 381658 - RNA, 11 nt, SARS coronavirus
guagugcuauc

SEQ ID NO: 381659 - RNA, 18 nt, SARS coronavirus
guauucuugcuagucaca

SEQ ID NO: 381660 - RNA, 15 nt, SARS coronavirus
gucaccaaacugcug

SEQ ID NO: 381661 - RNA, 23 nt, SARS coronavirus
guccagcgguugcuguccaugac

SEQ ID NO: 381662 - RNA, 16 nt, SARS coronavirus
gucuugguucacagcu

SEQ ID NO: 381663 - RNA, 16 nt, SARS coronavirus
gugacaugguaccaca

SEQ ID NO: 381664 - RNA, 20 nt, SARS coronavirus
gugcucuaggaaagguuuua

SEQ ID NO: 381665 - RNA, 14 nt, SARS coronavirus
gugguauucuugcu

SEQ ID NO: 381666 - RNA, 20 nt, SARS coronavirus
gugguccagaugaccaaauu

SEQ ID NO: 381667 - RNA, 23 nt, SARS coronavirus
guucaagcuccuaauuacacuca

SEQ ID NO: 381668 - RNA, 18 nt, SARS coronavirus
guuccaaucaacaccaau

SEQ ID NO: 381669 - RNA, 16 nt, SARS coronavirus
guugcaacugagggag

SEQ ID NO: 381670 - RNA, 15 nt, SARS coronavirus
guugcauaugcacug

SEQ ID NO: 381671 - RNA, 19 nt, SARS coronavirus
guuucauacuauuaaucau

SEQ ID NO: 381672 - RNA, 21 nt, SARS coronavirus
uaaauacacaauggcugauuu

SEQ ID NO: 381673 - RNA, 15 nt, SARS coronavirus
uaagaggcauacuau

SEQ ID NO: 381674 - RNA, 15 nt, SARS coronavirus
uaaggaugguauuua

SEQ ID NO: 381675 - RNA, 15 nt, SARS coronavirus
uaauacuuauagcac

SEQ ID NO: 381676 - RNA, 14 nt, SARS coronavirus
uaauagguuuccua

SEQ ID NO: 381677 - RNA, 22 nt, SARS coronavirus
uaauggaccccaaucaaaccaa

SEQ ID NO: 381678 - RNA, 18 nt, SARS coronavirus
uaauugcugucgcuucca

SEQ ID NO: 381679 - RNA, 13 nt, SARS coronavirus
uacaauagcagag

SEQ ID NO: 381680 - RNA, 13 nt, SARS coronavirus
uacacccaaagac

SEQ ID NO: 381681 - RNA, 17 nt, SARS coronavirus
uacagcgcugugcaucu

SEQ ID NO: 381682 - RNA, 21 nt, SARS coronavirus
uacaggguuucauacuauuaa

SEQ ID NO: 381683 - RNA, 21 nt, SARS coronavirus
uacauuaaaagaaauacucgu

SEQ ID NO: 381684 - RNA, 23 nt, SARS coronavirus
uacgagggcaauucaccauuuca

SEQ ID NO: 381685 - RNA, 22 nt, SARS coronavirus
uacugcgucuugguucacagcu

SEQ ID NO: 381686 - RNA, 22 nt, SARS coronavirus
uacuuuguaguuaagaggcaua

SEQ ID NO: 381687 - RNA, 18 nt, SARS coronavirus
uagaauuauuaugagaug

SEQ ID NO: 381688 - RNA, 23 nt, SARS coronavirus
uagcaaucuuuaaucaaugugua

SEQ ID NO: 381689 - RNA, 22 nt, SARS coronavirus
uagcagagauauugauuaucau

SEQ ID NO: 381690 - RNA, 18 nt, SARS coronavirus
uagggaggacuugaaaga

SEQ ID NO: 381691 - RNA, 20 nt, SARS coronavirus
uaucauuaugaggacuuuca

SEQ ID NO: 381692 - RNA, 19 nt, SARS coronavirus
uaugagauuuuuuacucuu

SEQ ID NO: 381693 - RNA, 20 nt, SARS coronavirus
uaugcaguugcauaugcacu

SEQ ID NO: 381694 - RNA, 13 nt, SARS coronavirus
uauggaagagccc

SEQ ID NO: 381695 - RNA, 17 nt, SARS coronavirus
uauggaggcgcaauuuu

SEQ ID NO: 381696 - RNA, 19 nt, SARS coronavirus
uaugucuaacuaccaacau

SEQ ID NO: 381697 - RNA, 15 nt, SARS coronavirus
uauuuaacucaggau

SEQ ID NO: 381698 - RNA, 23 nt, SARS coronavirus
uauuucucuaugcaguugcauau

SEQ ID NO: 381699 - RNA, 15 nt, SARS coronavirus
uauuuugguuuucac

SEQ ID NO: 381700 - RNA, 14 nt, SARS coronavirus
ucaaacaugcacac

SEQ ID NO: 381701 - RNA, 22 nt, SARS coronavirus
ucaagccucuucucgcuccuca

SEQ ID NO: 381702 - RNA, 17 nt, SARS coronavirus
ucaagcuccuaauuaca

SEQ ID NO: 381703 - RNA, 14 nt, SARS coronavirus
ucacucagcauggc

SEQ ID NO: 381704 - RNA, 17 nt, SARS coronavirus
ucauacuauuaaucaua

SEQ ID NO: 381705 - RNA, 13 nt, SARS coronavirus
ucauagauggcac

SEQ ID NO: 381706 - RNA, 17 nt, SARS coronavirus
ucauagauggcacacua

SEQ ID NO: 381707 - RNA, 18 nt, SARS coronavirus
ucaucuuguugacuucca

SEQ ID NO: 381708 - RNA, 18 nt, SARS coronavirus
ucauuguuuugacuugua

SEQ ID NO: 381709 - RNA, 20 nt, SARS coronavirus
ucauuugcaauuuacugcug

SEQ ID NO: 381710 - RNA, 15 nt, SARS coronavirus
uccaguucauuugca

SEQ ID NO: 381711 - RNA, 16 nt, SARS coronavirus
ucgugguauucuugcu

SEQ ID NO: 381712 - RNA, 23 nt, SARS coronavirus
ucuaguauuuuuaauacuuugcu

SEQ ID NO: 381713 - RNA, 21 nt, SARS coronavirus
ucuaugcaguugcauaugcac

SEQ ID NO: 381714 - RNA, 23 nt, SARS coronavirus
ucuaugcucuacgucauuuugau

SEQ ID NO: 381715 - RNA, 15 nt, SARS coronavirus
ucucuaugcaguugc

SEQ ID NO: 381716 - RNA, 18 nt, SARS coronavirus
ucucuuccugacauugau

SEQ ID NO: 381717 - RNA, 21 nt, SARS coronavirus
ucuuauuauuucuuacucuca

SEQ ID NO: 381718 - RNA, 21 nt, SARS coronavirus
ucuuccauuuuauucuaaugu

SEQ ID NO: 381719 - RNA, 15 nt, SARS coronavirus
ucuugguucacagcu

SEQ ID NO: 381720 - RNA, 15 nt, SARS coronavirus
ucuuuauuuaacuca

SEQ ID NO: 381721 - RNA, 23 nt, SARS coronavirus
ugacaacagauguuucaucuugu

SEQ ID NO: 381722 - RNA, 16 nt, SARS coronavirus
ugacaauaaauuugca

SEQ ID NO: 381723 - RNA, 16 nt, SARS coronavirus
ugacaauaaccagaau

SEQ ID NO: 381724 - RNA, 20 nt, SARS coronavirus
ugacuuccagguuacaauag

SEQ ID NO: 381725 - RNA, 18 nt, SARS coronavirus
ugacuuguauuucucuau

SEQ ID NO: 381726 - RNA, 23 nt, SARS coronavirus
ugauacauuaaaagaaauacucg

SEQ ID NO: 381727 - RNA, 20 nt, SARS coronavirus
ugauauauuuucuacaaugc

SEQ ID NO: 381728 - RNA, 21 nt, SARS coronavirus
ugauuguauuuacaucuugcg

SEQ ID NO: 381729 - RNA, 15 nt, SARS coronavirus
ugcaauuuacugcug

SEQ ID NO: 381730 - RNA, 13 nt, SARS coronavirus
ugcacuagcacac

SEQ ID NO: 381731 - RNA, 11 nt, SARS coronavirus
ugcauaugcac

SEQ ID NO: 381732 - RNA, 13 nt, SARS coronavirus
ugcaucuaauaaa

SEQ ID NO: 381733 - RNA, 19 nt, SARS coronavirus
ugcugacaauaaauuugca

SEQ ID NO: 381734 - RNA, 14 nt, SARS coronavirus
ugcuucuccugcaa

SEQ ID NO: 381735 - RNA, 16 nt, SARS coronavirus
uggacccacagauuca

SEQ ID NO: 381736 - RNA, 21 nt, SARS coronavirus
uggacccacagauucaacuga

SEQ ID NO: 381737 - RNA, 14 nt, SARS coronavirus
uggaccccaaucaa

SEQ ID NO: 381738 - RNA, 15 nt, SARS coronavirus
uggaccccaaucaaa

SEQ ID NO: 381739 - RNA, 17 nt, SARS coronavirus
uggauuauguuacuaca

SEQ ID NO: 381740 - RNA, 15 nt, SARS coronavirus
uggcguugcauuucu

SEQ ID NO: 381741 - RNA, 18 nt, SARS coronavirus
uggugacaugguaccaca

SEQ ID NO: 381742 - RNA, 20 nt, SARS coronavirus
uguaguacagcgcugugcau

SEQ ID NO: 381743 - RNA, 19 nt, SARS coronavirus
ugucauaccuuuuaaggau

SEQ ID NO: 381744 - RNA, 16 nt, SARS coronavirus
ugucuaacuaccaaca

SEQ ID NO: 381745 - RNA, 18 nt, SARS coronavirus
uguuaccaucuauucaca

SEQ ID NO: 381746 - RNA, 20 nt, SARS coronavirus
uuaaucaauguguaacauua

SEQ ID NO: 381747 - RNA, 16 nt, SARS coronavirus
uuacuaucaacuguca

SEQ ID NO: 381748 - RNA, 23 nt, SARS coronavirus
uuacugcugcuauuuguuaccau

SEQ ID NO: 381749 - RNA, 16 nt, SARS coronavirus
uuagccuuucugcuau

SEQ ID NO: 381750 - RNA, 23 nt, SARS coronavirus
uuagggaggacuugaaagagcca

SEQ ID NO: 381751 - RNA, 18 nt, SARS coronavirus
uuauacgagcauguaacu

SEQ ID NO: 381752 - RNA, 22 nt, SARS coronavirus
uuaucauuaugaggacuuucag

SEQ ID NO: 381753 - RNA, 16 nt, SARS coronavirus
uuauuaacaauucuac

SEQ ID NO: 381754 - RNA, 17 nt, SARS coronavirus
uuauuaacaauucuacu

SEQ ID NO: 381755 - RNA, 20 nt, SARS coronavirus
uuauuaacaauucuacuaau

SEQ ID NO: 381756 - RNA, 19 nt, SARS coronavirus
uuauuauuucuuacucuca

SEQ ID NO: 381757 - RNA, 15 nt, SARS coronavirus
uucaacaagagcucu

SEQ ID NO: 381758 - RNA, 21 nt, SARS coronavirus
uucaacugacaauaaccagaa

SEQ ID NO: 381759 - RNA, 17 nt, SARS coronavirus
uucacagcucucacuca

SEQ ID NO: 381760 - RNA, 21 nt, SARS coronavirus
uucacagcucucacucagcau

SEQ ID NO: 381761 - RNA, 23 nt, SARS coronavirus
cacgucagcgucuaacuaaauac

SEQ ID NO: 381762 - RNA, 21 nt, SARS coronavirus
cacuaugguucaaacaugcac

SEQ ID NO: 381763 - RNA, 16 nt, SARS coronavirus
cagaagcuucacuucc

SEQ ID NO: 381764 - RNA, 19 nt, SARS coronavirus
cagaaugaaugagcucacu

SEQ ID NO: 381765 - RNA, 21 nt, SARS coronavirus
cagaauggaggacgcaauggg

SEQ ID NO: 381766 - RNA, 20 nt, SARS coronavirus
cagcucucacucagcauggc

SEQ ID NO: 381767 - RNA, 18 nt, SARS coronavirus
cagggcguuccaaucaac

SEQ ID NO: 381768 - RNA, 15 nt, SARS coronavirus
caguaaaaauugaca

SEQ ID NO: 381769 - RNA, 20 nt, SARS coronavirus
caguaaaaauugacaaugcu

SEQ ID NO: 381770 - RNA, 16 nt, SARS coronavirus
cauaauaaagcuuguu

SEQ ID NO: 381771 - RNA, 20 nt, SARS coronavirus
cauacgagggcaauucacca

SEQ ID NO: 381772 - RNA, 13 nt, SARS coronavirus
cauaugcacugua

SEQ ID NO: 381773 - RNA, 21 nt, SARS coronavirus
caucuaauaaaccucaugugc

SEQ ID NO: 381774 - RNA, 15 nt, SARS coronavirus
caugaaaauuauucu

SEQ ID NO: 381775 - RNA, 24 nt, SARS coronavirus
caugaaggucaccaaacugcugca

SEQ ID NO: 381776 - RNA, 20 nt, SARS coronavirus
caugguaccacauauaucac

SEQ ID NO: 381777 - RNA, 18 nt, SARS coronavirus
cauuaagagaaagacaga

SEQ ID NO: 381778 - RNA, 13 nt, SARS coronavirus
cauuucacccucu

SEQ ID NO: 381779 - RNA, 14 nt, SARS coronavirus
cauuucacccucuu

SEQ ID NO: 381780 - RNA, 19 nt, SARS coronavirus
cauuucacccucuugcuga

SEQ ID NO: 381781 - RNA, 16 nt, SARS coronavirus
ccaaacugcugcauuu

SEQ ID NO: 381782 - RNA, 17 nt, SARS coronavirus
ccacagauucaacugac

SEQ ID NO: 381783 - RNA, 18 nt, SARS coronavirus
ccacagauucaacugaca

SEQ ID NO: 381784 - RNA, 20 nt, SARS coronavirus
ccacagauucaacugacaau

SEQ ID NO: 381785 - RNA, 12 nt, SARS coronavirus
ccagaagcuuca

SEQ ID NO: 381786 - RNA, 22 nt, SARS coronavirus
ccagaauggaggacgcaauggg

SEQ ID NO: 381787 - RNA, 16 nt, SARS coronavirus
ccagguuacaauagca

SEQ ID NO: 381788 - RNA, 17 nt, SARS coronavirus
ccaguucauuugcaauu

SEQ ID NO: 381789 - RNA, 19 nt, SARS coronavirus
ccaguucauuugcaauuua

SEQ ID NO: 381790 - RNA, 12 nt, SARS coronavirus
ccaugaacaaca

SEQ ID NO: 381791 - RNA, 19 nt, SARS coronavirus
cccacagauucaacugaca

SEQ ID NO: 381792 - RNA, 14 nt, SARS coronavirus
ccugacauugauug

SEQ ID NO: 381793 - RNA, 20 nt, SARS coronavirus
cgcaauggggcaaggccaaa

SEQ ID NO: 381794 - RNA, 17 nt, SARS coronavirus
cgcuauugcugcuagac

SEQ ID NO: 381795 - RNA, 16 nt, SARS coronavirus
cggcgcuaacaaagaa

SEQ ID NO: 381796 - RNA, 19 nt, SARS coronavirus
cguacuucuuuuucuugcu

SEQ ID NO: 381797 - RNA, 21 nt, SARS coronavirus
cguagugccccccgcauuaca

SEQ ID NO: 381798 - RNA, 21 nt, SARS coronavirus
cgucuugguucacagcucuca

SEQ ID NO: 381799 - RNA, 20 nt, SARS coronavirus
cguuuacgauacauagucua

SEQ ID NO: 381800 - RNA, 16 nt, SARS coronavirus
cuaauguuacuaucaa

SEQ ID NO: 381801 - RNA, 13 nt, SARS coronavirus
cuaauugcugucg

SEQ ID NO: 381802 - RNA, 23 nt, SARS coronavirus
cuaauugcugucgcuuccaggag

SEQ ID NO: 381803 - RNA, 19 nt, SARS coronavirus
cuacaacuuccucaaggaa

SEQ ID NO: 381804 - RNA, 13 nt, SARS coronavirus
cuacuaauguugu

SEQ ID NO: 381805 - RNA, 16 nt, SARS coronavirus
cuacucgcguguuaaa

SEQ ID NO: 381806 - RNA, 20 nt, SARS coronavirus
cuacuucguugcuuccuuca

SEQ ID NO: 381807 - RNA, 17 nt, SARS coronavirus
cuauaucacuaucagga

SEQ ID NO: 381808 - RNA, 17 nt, SARS coronavirus
cuaucagcugcgugcaa

SEQ ID NO: 381809 - RNA, 19 nt, SARS coronavirus
cuaugcaguugcauaugca

SEQ ID NO: 381810 - RNA, 20 nt, SARS coronavirus
cuaugcaguugcauaugcac

SEQ ID NO: 381811 - RNA, 19 nt, SARS coronavirus
cuaugguucaaacaugcac

SEQ ID NO: 381812 - RNA, 14 nt, SARS coronavirus
cuauuccuagccug

SEQ ID NO: 381813 - RNA, 16 nt, SARS coronavirus
cuauuuggaaucuuga

SEQ ID NO: 381814 - RNA, 18 nt, SARS coronavirus
cuauuuggaaucuugacg

SEQ ID NO: 381815 - RNA, 21 nt, SARS coronavirus
cucaauaaaagauggcagcua

SEQ ID NO: 381816 - RNA, 17 nt, SARS coronavirus
cucacuuuaauugacuu

SEQ ID NO: 381817 - RNA, 20 nt, SARS coronavirus
cucgccacuuuuucucauug

SEQ ID NO: 381818 - RNA, 21 nt, SARS coronavirus
cucuaugcaguugcauaugca

SEQ ID NO: 381819 - RNA, 12 nt, SARS coronavirus
cucuugcugaca

SEQ ID NO: 381820 - RNA, 23 nt, SARS coronavirus
cucuugcugacaauaaauuugca

SEQ ID NO: 381821 - RNA, 20 nt, SARS coronavirus
cugacauugauuguauuuac

SEQ ID NO: 381822 - RNA, 18 nt, SARS coronavirus
cuggauuauguuacuaca

SEQ ID NO: 381823 - RNA, 21 nt, SARS coronavirus
cuguaguacagcgcugugcau

SEQ ID NO: 381824 - RNA, 18 nt, SARS coronavirus
cuuagaucaauuacugca

SEQ ID NO: 381825 - RNA, 22 nt, SARS coronavirus
cuucacuucccuacggcgcuaa

SEQ ID NO: 381826 - RNA, 20 nt, SARS coronavirus
cuucaugaaggucaccaaac

SEQ ID NO: 381827 - RNA, 20 nt, SARS coronavirus
cuuccugacauugauuguau

SEQ ID NO: 381828 - RNA, 13 nt, SARS coronavirus
cuucuauuaccua

SEQ ID NO: 381829 - RNA, 23 nt, SARS coronavirus
cuugaauacacccaaagaccaca

SEQ ID NO: 381830 - RNA, 14 nt, SARS coronavirus
cuugauguggcuua

SEQ ID NO: 381831 - RNA, 17 nt, SARS coronavirus
cuugcgagcuauaucac

SEQ ID NO: 381832 - RNA, 12 nt, SARS coronavirus
cuugcuagucac

SEQ ID NO: 381833 - RNA, 20 nt, SARS coronavirus
cuugcugacaauaaauuugc

SEQ ID NO: 381834 - RNA, 22 nt, SARS coronavirus
cuuguuauuggcguugcauuuc

SEQ ID NO: 381835 - RNA, 22 nt, SARS coronavirus
cuuguugacuuccagguuacaa

SEQ ID NO: 381836 - RNA, 20 nt, SARS coronavirus
cuuuaaucaauguguaacau

SEQ ID NO: 381837 - RNA, 14 nt, SARS coronavirus
cuuuaaucucacau

SEQ ID NO: 381838 - RNA, 15 nt, SARS coronavirus
cuuugcuucaccauu

SEQ ID NO: 381839 - RNA, 18 nt, SARS coronavirus
cuuuugcuugucgcugca

SEQ ID NO: 381840 - RNA, 17 nt, SARS coronavirus
gaaaaaguugcugguuu

SEQ ID NO: 381841 - RNA, 23 nt, SARS coronavirus
gaaacuucucauuguuuugacuu

SEQ ID NO: 381842 - RNA, 23 nt, SARS coronavirus
gaaagugaguacgaacuuaugua

SEQ ID NO: 381843 - RNA, 17 nt, SARS coronavirus
gaacaaauuaaaauguc

SEQ ID NO: 381844 - RNA, 15 nt, SARS coronavirus
gaacaugaaacuucu

SEQ ID NO: 381845 - RNA, 22 nt, SARS coronavirus
gaaccuaguaauagguuuccua

SEQ ID NO: 381846 - RNA, 14 nt, SARS coronavirus
gaacuuagauuccc

SEQ ID NO: 381847 - RNA, 11 nt, SARS coronavirus
gaaucuugacg

SEQ ID NO: 381848 - RNA, 17 nt, SARS coronavirus
gaauggaggacgcaaug

SEQ ID NO: 381849 - RNA, 16 nt, SARS coronavirus
gacaauaaauuugcac

SEQ ID NO: 381850 - RNA, 20 nt, SARS coronavirus
gacauugauuguauuuacau

SEQ ID NO: 381851 - RNA, 21 nt, SARS coronavirus
gacccacagauucaacugaca

SEQ ID NO: 381852 - RNA, 20 nt, SARS coronavirus
gacuuucaggauugcuauuu

SEQ ID NO: 381853 - RNA, 16 nt, SARS coronavirus
gagcccuaauguguaa

SEQ ID NO: 381854 - RNA, 20 nt, SARS coronavirus
gagcuauaucacuaucagga

SEQ ID NO: 381855 - RNA, 14 nt, SARS coronavirus
gaggcauacuaugu

SEQ ID NO: 381856 - RNA, 18 nt, SARS coronavirus
gaggccagggcguuccaa

SEQ ID NO: 381857 - RNA, 13 nt, SARS coronavirus
gauccagcuggug

SEQ ID NO: 381858 - RNA, 12 nt, SARS coronavirus
gaugauguucaa

SEQ ID NO: 381859 - RNA, 20 nt, SARS coronavirus
gcaauccuaauaacaaugcu

SEQ ID NO: 381860 - RNA, 21 nt, SARS coronavirus
gcauuuagagacguacuuguu

SEQ ID NO: 381861 - RNA, 22 nt, SARS coronavirus
gccaguaaaaauugacaaugcu

SEQ ID NO: 381862 - RNA, 14 nt, SARS coronavirus
agacagauugaacc

SEQ ID NO: 381863 - RNA, 17 nt, SARS coronavirus
agaugaugaagaaccua

SEQ ID NO: 381864 - RNA, 21 nt, SARS coronavirus
agauguuucaucuuguugacu

SEQ ID NO: 381865 - RNA, 15 nt, SARS coronavirus
agauuuuuuacucuu

SEQ ID NO: 381866 - RNA, 16 nt, SARS coronavirus
agccccagaugguacu

SEQ ID NO: 381867 - RNA, 17 nt, SARS coronavirus
agccuggauuauguuac

SEQ ID NO: 381868 - RNA, 21 nt, SARS coronavirus
agcgccgaccccaagguuuac

SEQ ID NO: 381869 - RNA, 21 nt, SARS coronavirus
agcguacuucuuuuucuugcu

SEQ ID NO: 381870 - RNA, 12 nt, SARS coronavirus
agcuagguguug

SEQ ID NO: 381871 - RNA, 19 nt, SARS coronavirus
agcuauaucacuaucagga

SEQ ID NO: 381872 - RNA, 15 nt, SARS coronavirus
aggaacaacauugcc

SEQ ID NO: 381873 - RNA, 16 nt, SARS coronavirus
aggaacuggcccagaa

SEQ ID NO: 381874 - RNA, 22 nt, SARS coronavirus
aggcgcaauuuuuguaccucua

SEQ ID NO: 381875 - RNA, 14 nt, SARS coronavirus
aggcuugauguggc

SEQ ID NO: 381876 - RNA, 19 nt, SARS coronavirus
agguucaacaagagcucua

SEQ ID NO: 381877 - RNA, 17 nt, SARS coronavirus
agguuuuaccuuuucau

SEQ ID NO: 381878 - RNA, 19 nt, SARS coronavirus
aguaaaaauugacaaugcu

SEQ ID NO: 381879 - RNA, 14 nt, SARS coronavirus
aguaacacuugcuu

SEQ ID NO: 381880 - RNA, 19 nt, SARS coronavirus
aguuaagaggcauacuaug

SEQ ID NO: 381881 - RNA, 18 nt, SARS coronavirus
aguuccuaaaaacuaauu

SEQ ID NO: 381882 - RNA, 16 nt, SARS coronavirus
aguugcauaugcacug

SEQ ID NO: 381883 - RNA, 19 nt, SARS coronavirus
auaaaccucaugugcuuga

SEQ ID NO: 381884 - RNA, 22 nt, SARS coronavirus
auaauacugcgucuugguucac

SEQ ID NO: 381885 - RNA, 24 nt, SARS coronavirus
auaaugcuagggagagcugccuau

SEQ ID NO: 381886 - RNA, 20 nt, SARS coronavirus
auaccuaucagcugcgugca

SEQ ID NO: 381887 - RNA, 23 nt, SARS coronavirus
auagcaaucuuuaaucaaugugu

SEQ ID NO: 381888 - RNA, 20 nt, SARS coronavirus
auaucacgucagcgucuaac

SEQ ID NO: 381889 - RNA, 20 nt, SARS coronavirus
aucauacguuuggcaacccu

SEQ ID NO: 381890 - RNA, 20 nt, SARS coronavirus
augagcucacuuuaauugac

SEQ ID NO: 381891 - RNA, 15 nt, SARS coronavirus
augcaguugcauaug

SEQ ID NO: 381892 - RNA, 23 nt, SARS coronavirus
augcuacagcaacgauaccgcua

SEQ ID NO: 381893 - RNA, 21 nt, SARS coronavirus
auggcagacaacgguacuauu

SEQ ID NO: 381894 - RNA, 21 nt, SARS coronavirus
auggcugauuuagucuaugcu

SEQ ID NO: 381895 - RNA, 20 nt, SARS coronavirus
auggugacaugguaccacau

SEQ ID NO: 381896 - RNA, 17 nt, SARS coronavirus
augguucaaacaugcac

SEQ ID NO: 381897 - RNA, 16 nt, SARS coronavirus
auguuacuaucaacug

SEQ ID NO: 381898 - RNA, 20 nt, SARS coronavirus
auuaacaauucuacuaaugu

SEQ ID NO: 381899 - RNA, 19 nt, SARS coronavirus
auuaugaggacuuucagga

SEQ ID NO: 381900 - RNA, 15 nt, SARS coronavirus
auuauuuaagccucu

SEQ ID NO: 381901 - RNA, 19 nt, SARS coronavirus
auucucuuccugacauuga

SEQ ID NO: 381902 - RNA, 20 nt, SARS coronavirus
auucucuuccugacauugau

SEQ ID NO: 381903 - RNA, 22 nt, SARS coronavirus
auugcuauuuggaaucuugacg

SEQ ID NO: 381904 - RNA, 22 nt, SARS coronavirus
auuggcuacuaccgaagagcua

SEQ ID NO: 381905 - RNA, 14 nt, SARS coronavirus
auuuacugcugcua

SEQ ID NO: 381906 - RNA, 22 nt, SARS coronavirus
auuuauuagacucuuacuuugu

SEQ ID NO: 381907 - RNA, 22 nt, SARS coronavirus
auuucacccucuugcugacaau

SEQ ID NO: 381908 - RNA, 22 nt, SARS coronavirus
auuucucuaugcaguugcauau

SEQ ID NO: 381909 - RNA, 23 nt, SARS coronavirus
auuucucuaugcaguugcauaug

SEQ ID NO: 381910 - RNA, 14 nt, SARS coronavirus
auuugugcuuuuua

SEQ ID NO: 381911 - RNA, 14 nt, SARS coronavirus
auuuucuacaaugc

SEQ ID NO: 381912 - RNA, 16 nt, SARS coronavirus
caaacugcugcauuua

SEQ ID NO: 381913 - RNA, 17 nt, SARS coronavirus
caacagauguuucaucu

SEQ ID NO: 381914 - RNA, 14 nt, SARS coronavirus
caacuccuggaaca

SEQ ID NO: 381915 - RNA, 11 nt, SARS coronavirus
caacugucaag

SEQ ID NO: 381916 - RNA, 16 nt, SARS coronavirus
caacuuccucaaggaa

SEQ ID NO: 381917 - RNA, 14 nt, SARS coronavirus
caagagcucuacuc

SEQ ID NO: 381918 - RNA, 17 nt, SARS coronavirus
caagaucaguuucacca

SEQ ID NO: 381919 - RNA, 17 nt, SARS coronavirus
caaugcuucuccugcaa

SEQ ID NO: 381920 - RNA, 21 nt, SARS coronavirus
caauggggcaaggccaaaaca

SEQ ID NO: 381921 - RNA, 13 nt, SARS coronavirus
cacacuagccauc

SEQ ID NO: 381922 - RNA, 15 nt, SARS coronavirus
cacagcucucacuca

SEQ ID NO: 381923 - RNA, 21 nt, SARS coronavirus
caccgugcuacaacuuccuca

SEQ ID NO: 381924 - RNA, 23 nt, SARS coronavirus
caccgugcuacaacuuccucaag

SEQ ID NO: 381925 - RNA, 21 nt, SARS coronavirus
cacuaacuugcacuagcacac

SEQ ID NO: 381926 - RNA, 13 nt, SARS coronavirus
cacuaugguucaa

SEQ ID NO: 381927 - RNA, 13 nt, SARS coronavirus
cacucaacauacu

SEQ ID NO: 381928 - RNA, 21 nt, SARS coronavirus
cacucgaaauccaggaucuag

SEQ ID NO: 381929 - RNA, 22 nt, SARS coronavirus
cacugcuuggcuuugugcucua

SEQ ID NO: 381930 - RNA, 18 nt, SARS coronavirus
cagaaugaaugagcucac

SEQ ID NO: 381931 - RNA, 15 nt, SARS coronavirus
cagaugguacuucua

SEQ ID NO: 381932 - RNA, 22 nt, SARS coronavirus
cagauucaacugacaauaacca

SEQ ID NO: 381933 - RNA, 16 nt, SARS coronavirus
cagcgcugugcaucua

SEQ ID NO: 381934 - RNA, 13 nt, SARS coronavirus
caggaacauacga

SEQ ID NO: 381935 - RNA, 16 nt, SARS coronavirus
caggcacuaguacuga

SEQ ID NO: 381936 - RNA, 22 nt, SARS coronavirus
caguaaaaauugacaaugcuuc

SEQ ID NO: 381937 - RNA, 23 nt, SARS coronavirus
caguaaaaauugacaaugcuucu

SEQ ID NO: 381938 - RNA, 15 nt, SARS coronavirus
caguucauuugcaau

SEQ ID NO: 381939 - RNA, 18 nt, SARS coronavirus
cauaaaacgaacaugaaa

SEQ ID NO: 381940 - RNA, 17 nt, SARS coronavirus
caugaaaauuauucucu

SEQ ID NO: 381941 - RNA, 17 nt, SARS coronavirus
cauuaugaggacuuuca

SEQ ID NO: 381942 - RNA, 19 nt, SARS coronavirus
cauuguugcugcucuagua

SEQ ID NO: 381943 - RNA, 17 nt, SARS coronavirus
cauuguuuugacuugua

SEQ ID NO: 381944 - RNA, 18 nt, SARS coronavirus
cauuguuuugacuuguau

SEQ ID NO: 381945 - RNA, 22 nt, SARS coronavirus
ccaaagucuaaacgaacaugaa

SEQ ID NO: 381946 - RNA, 24 nt, SARS coronavirus
ccaauagugguccagaugaccaaa

SEQ ID NO: 381947 - RNA, 19 nt, SARS coronavirus
ccagaauggaggacgcaau

SEQ ID NO: 381948 - RNA, 14 nt, SARS coronavirus
ccagaugaccaaau

SEQ ID NO: 381949 - RNA, 16 nt, SARS coronavirus
ccagaugguacuucua

SEQ ID NO: 381950 - RNA, 23 nt, SARS coronavirus
ccagaugguacuucuauuaccua

SEQ ID NO: 381951 - RNA, 18 nt, SARS coronavirus
ccagggcguuccaaucaa

SEQ ID NO: 381952 - RNA, 15 nt, SARS coronavirus
ccaguucauuugcaa

SEQ ID NO: 381953 - RNA, 23 nt, SARS coronavirus
ccauuucacccucuugcugacaa

SEQ ID NO: 381954 - RNA, 21 nt, SARS coronavirus
cccagaagcuucacuucccua

SEQ ID NO: 381955 - RNA, 17 nt, SARS coronavirus
cccagaugguacuucua

SEQ ID NO: 381956 - RNA, 15 nt, SARS coronavirus
ccccaaucaaaccaa

SEQ ID NO: 381957 - RNA, 23 nt, SARS coronavirus
ccuaauguuacuaucaacuguca

SEQ ID NO: 381958 - RNA, 14 nt, SARS coronavirus
ccucuugcugacaa

SEQ ID NO: 381959 - RNA, 15 nt, SARS coronavirus
cgcucaaugugguca

SEQ ID NO: 381960 - RNA, 14 nt, SARS coronavirus
cgguaauucaagaa

SEQ ID NO: 381961 - RNA, 16 nt, SARS coronavirus
cgguugcuguccauga

SEQ ID NO: 381962 - RNA, 15 nt, SARS coronavirus
cgugguauucuugcu

SEQ ID NO: 381963 - RNA, 13 nt, SARS coronavirus
cguuccaaucaac

SEQ ID NO: 381964 - RNA, 21 nt, SARS coronavirus
cuaaacgaacaugaaacuucu

SEQ ID NO: 381965 - RNA, 17 nt, SARS coronavirus
cuaacuugcacuagcac

SEQ ID NO: 381966 - RNA, 20 nt, SARS coronavirus
cuaacuugcacuagcacaca

SEQ ID NO: 381967 - RNA, 17 nt, SARS coronavirus
cuaagaagaauuauucg

SEQ ID NO: 381968 - RNA, 13 nt, SARS coronavirus
cuaauaaaccuca

SEQ ID NO: 381969 - RNA, 21 nt, SARS coronavirus
cuaauguuacuaucaacuguc

SEQ ID NO: 381970 - RNA, 22 nt, SARS coronavirus
cuaauguuacuaucaacuguca

SEQ ID NO: 381971 - RNA, 13 nt, SARS coronavirus
cuacaacuuccuc

SEQ ID NO: 381972 - RNA, 14 nt, SARS coronavirus
cuacaacuuccuca

SEQ ID NO: 381973 - RNA, 20 nt, SARS coronavirus
cuaccaugaacaacaaguca

SEQ ID NO: 381974 - RNA, 23 nt, SARS coronavirus
cuagggguaauacuuauagcacu

SEQ ID NO: 381975 - RNA, 14 nt, SARS coronavirus
cuauaucacuauca

SEQ ID NO: 381976 - RNA, 15 nt, SARS coronavirus
cuaugguucaaacau

SEQ ID NO: 381977 - RNA, 14 nt, SARS coronavirus
cuauuaccuaggaa

SEQ ID NO: 381978 - RNA, 17 nt, SARS coronavirus
cucaauguggucauuca

SEQ ID NO: 381979 - RNA, 22 nt, SARS coronavirus
cucacuuuaauugacuucuauu

SEQ ID NO: 381980 - RNA, 16 nt, SARS coronavirus
cuccuaauuacacuca

SEQ ID NO: 381981 - RNA, 12 nt, SARS coronavirus
ucagacacucuu

SEQ ID NO: 381982 - RNA, 22 nt, SARS coronavirus
ucagcgucuaacuaaauacaca

SEQ ID NO: 381983 - RNA, 17 nt, SARS coronavirus
ucauaccuuuuaaggau

SEQ ID NO: 381984 - RNA, 15 nt, SARS coronavirus
ucauacuauuaauca

SEQ ID NO: 381985 - RNA, 19 nt, SARS coronavirus
ucauuguuuugacuuguau

SEQ ID NO: 381986 - RNA, 23 nt, SARS coronavirus
ucauuugcaauuuacugcugcua

SEQ ID NO: 381987 - RNA, 17 nt, SARS coronavirus
uccagcgguugcugucc

SEQ ID NO: 381988 - RNA, 18 nt, SARS coronavirus
uccagcugguggugcgcu

SEQ ID NO: 381989 - RNA, 22 nt, SARS coronavirus
ucccuacggcgcuaacaaagaa

SEQ ID NO: 381990 - RNA, 21 nt, SARS coronavirus
uccuauuccuagccuggauua

SEQ ID NO: 381991 - RNA, 20 nt, SARS coronavirus
uccucuggcucuuguggcca

SEQ ID NO: 381992 - RNA, 21 nt, SARS coronavirus
uccuuguaagguacaacacua

SEQ ID NO: 381993 - RNA, 17 nt, SARS coronavirus
ucuaacuaaauacacaa

SEQ ID NO: 381994 - RNA, 22 nt, SARS coronavirus
ucucauuguuuugacuuguauu

SEQ ID NO: 381995 - RNA, 17 nt, SARS coronavirus
ucucuaugcaguugcau

SEQ ID NO: 381996 - RNA, 16 nt, SARS coronavirus
ucucuuccugacauug

SEQ ID NO: 381997 - RNA, 12 nt, SARS coronavirus
ucuuacucucac

SEQ ID NO: 381998 - RNA, 17 nt, SARS coronavirus
ucuuagaucaauuacug

SEQ ID NO: 381999 - RNA, 20 nt, SARS coronavirus
ucuuagaucaauuacugcac

SEQ ID NO: 382000 - RNA, 22 nt, SARS coronavirus
ucuugcugacaauaaauuugca

SEQ ID NO: 382001 - RNA, 15 nt, SARS coronavirus
ucuuguugacuucca

SEQ ID NO: 382002 - RNA, 24 nt, SARS coronavirus
ugaaggucaccaaacugcugcauu

SEQ ID NO: 382003 - RNA, 13 nt, SARS coronavirus
ugaaugagcucac

SEQ ID NO: 382004 - RNA, 19 nt, SARS coronavirus
ugacaauaaauuugcacua

SEQ ID NO: 382005 - RNA, 21 nt, SARS coronavirus
ugagcucacuuuaauugacuu

SEQ ID NO: 382006 - RNA, 18 nt, SARS coronavirus
ugauuaucauuaugagga

SEQ ID NO: 382007 - RNA, 20 nt, SARS coronavirus
ugauuguauuuacaucuugc

SEQ ID NO: 382008 - RNA, 18 nt, SARS coronavirus
ugcaguugcauaugcacu

SEQ ID NO: 382009 - RNA, 23 nt, SARS coronavirus
ugcaguugcauaugcacuguagu

SEQ ID NO: 382010 - RNA, 20 nt, SARS coronavirus
ugcgucuugguucacagcuc

SEQ ID NO: 382011 - RNA, 15 nt, SARS coronavirus
ugcuuggcuuugugc

SEQ ID NO: 382012 - RNA, 19 nt, SARS coronavirus
ugcuuuuuagccuuucugc

SEQ ID NO: 382013 - RNA, 16 nt, SARS coronavirus
uggaacuuuaacauug

SEQ ID NO: 382014 - RNA, 20 nt, SARS coronavirus
uggaagagcccuaaugugua

SEQ ID NO: 382015 - RNA, 14 nt, SARS coronavirus
uggacccacagauu

SEQ ID NO: 382016 - RNA, 20 nt, SARS coronavirus
uggauuauguuacuacaauu

SEQ ID NO: 382017 - RNA, 14 nt, SARS coronavirus
uggcacacuauggu

SEQ ID NO: 382018 - RNA, 14 nt, SARS coronavirus
ugguaccuucauga

SEQ ID NO: 382019 - RNA, 15 nt, SARS coronavirus
uguauuucucuaugc

SEQ ID NO: 382020 - RNA, 14 nt, SARS coronavirus
ugugcaucuaauaa

SEQ ID NO: 382021 - RNA, 18 nt, SARS coronavirus
uguggccaguaacacuug

SEQ ID NO: 382022 - RNA, 19 nt, SARS coronavirus
uguuaacgugaguuuagua

SEQ ID NO: 382023 - RNA, 20 nt, SARS coronavirus
uguuacaggguuucauacua

SEQ ID NO: 382024 - RNA, 19 nt, SARS coronavirus
uguuaccaucuauucacau

SEQ ID NO: 382025 - RNA, 12 nt, SARS coronavirus
uguuacuaucaa

SEQ ID NO: 382026 - RNA, 13 nt, SARS coronavirus
uuaaucucacaua

SEQ ID NO: 382027 - RNA, 15 nt, SARS coronavirus
uuacaauagcagaga

SEQ ID NO: 382028 - RNA, 19 nt, SARS coronavirus
uuacacucaacauacuuca

SEQ ID NO: 382029 - RNA, 16 nt, SARS coronavirus
uuacaucuugcgagcu

SEQ ID NO: 382030 - RNA, 19 nt, SARS coronavirus
uuaguuaacuuuaaucuca

SEQ ID NO: 382031 - RNA, 21 nt, SARS coronavirus
uuauaagggcuuccaguucau

SEQ ID NO: 382032 - RNA, 15 nt, SARS coronavirus
uuauagcacugcuug

SEQ ID NO: 382033 - RNA, 23 nt, SARS coronavirus
uuaucauuaugaggacuuucagg

SEQ ID NO: 382034 - RNA, 20 nt, SARS coronavirus
uuauuauuucuuacucucac

SEQ ID NO: 382035 - RNA, 12 nt, SARS coronavirus
uuauuuaacuca

SEQ ID NO: 382036 - RNA, 16 nt, SARS coronavirus
uuauuucuuacucuca

SEQ ID NO: 382037 - RNA, 18 nt, SARS coronavirus
uucaaacaugcacaccua

SEQ ID NO: 382038 - RNA, 16 nt, SARS coronavirus
uucaacaagagcucua

SEQ ID NO: 382039 - RNA, 20 nt, SARS coronavirus
uucaagcuccuaauuacacu

SEQ ID NO: 382040 - RNA, 17 nt, SARS coronavirus
uucaugaaggucaccaa

SEQ ID NO: 382041 - RNA, 15 nt, SARS coronavirus
uucauuugcaauuua

SEQ ID NO: 382042 - RNA, 22 nt, SARS coronavirus
uucccuacggcgcuaacaaaga

SEQ ID NO: 382043 - RNA, 17 nt, SARS coronavirus
uuccucaaggaacaaca

SEQ ID NO: 382044 - RNA, 17 nt, SARS coronavirus
uucuaauguuacagggu

SEQ ID NO: 382045 - RNA, 18 nt, SARS coronavirus
uucucauuguugcugcuc

SEQ ID NO: 382046 - RNA, 21 nt, SARS coronavirus
uucucauuguuuugacuugua

SEQ ID NO: 382047 - RNA, 22 nt, SARS coronavirus
uucuccugcaaguacuguucau

SEQ ID NO: 382048 - RNA, 12 nt, SARS coronavirus
uucucuaugcag

SEQ ID NO: 382049 - RNA, 19 nt, SARS coronavirus
uucuuccauuuuauucuaa

SEQ ID NO: 382050 - RNA, 12 nt, SARS coronavirus
uugaaagagcca

SEQ ID NO: 382051 - RNA, 22 nt, SARS coronavirus
uugaccggugcaccacuuuuga

SEQ ID NO: 382052 - RNA, 15 nt, SARS coronavirus
uugcacuaacuugca

SEQ ID NO: 382053 - RNA, 14 nt, SARS coronavirus
uugcuguccaugac

SEQ ID NO: 382054 - RNA, 15 nt, SARS coronavirus
uuggcuuugugcucu

SEQ ID NO: 382055 - RNA, 18 nt, SARS coronavirus
uuguaagguacaacacua

SEQ ID NO: 382056 - RNA, 14 nt, SARS coronavirus
uuguugacuuccag

SEQ ID NO: 382057 - RNA, 12 nt, SARS coronavirus
uuuacaucuugc

SEQ ID NO: 382058 - RNA, 19 nt, SARS coronavirus
uuuacaucuugcgagcuau

SEQ ID NO: 382059 - RNA, 18 nt, SARS coronavirus
uuuagagacguacuuguu

SEQ ID NO: 382060 - RNA, 12 nt, SARS coronavirus
uuuauuuaacuc

SEQ ID NO: 382061 - RNA, 14 nt, SARS coronavirus
uuucauacuauuaa

SEQ ID NO: 382062 - RNA, 23 nt, SARS coronavirus
uuugcacuaacuugcacuagcac

SEQ ID NO: 382063 - RNA, 20 nt, SARS coronavirus
uuuucauagauggcacacua

SEQ ID NO: 382064 - RNA, 18 nt, SARS coronavirus
uuuuucagagcgcuacca

SEQ ID NO: 382065 - RNA, 13 nt, SARS coronavirus
uucauacuauuaa

SEQ ID NO: 382066 - RNA, 14 nt, SARS coronavirus
uucauacuauuaau

SEQ ID NO: 382067 - RNA, 17 nt, SARS coronavirus
uuccuuguuuuaauaau

SEQ ID NO: 382068 - RNA, 22 nt, SARS coronavirus
uuccuuguuuuaauaaugcuua

SEQ ID NO: 382069 - RNA, 13 nt, SARS coronavirus
uucuaauguuaca

SEQ ID NO: 382070 - RNA, 12 nt, SARS coronavirus
uucuacaaugca

SEQ ID NO: 382071 - RNA, 21 nt, SARS coronavirus
uucuacaaugcaucaacgcau

SEQ ID NO: 382072 - RNA, 16 nt, SARS coronavirus
uucuacuaauguuguu

SEQ ID NO: 382073 - RNA, 14 nt, SARS coronavirus
uucucuuccugaca

SEQ ID NO: 382074 - RNA, 19 nt, SARS coronavirus
uugacuucuauuugugcuu

SEQ ID NO: 382075 - RNA, 20 nt, SARS coronavirus
uugaugaggguaauugugau

SEQ ID NO: 382076 - RNA, 16 nt, SARS coronavirus
uugauuaucauuauga

SEQ ID NO: 382077 - RNA, 11 nt, SARS coronavirus
aaaagaaccuu

SEQ ID NO: 382078 - RNA, 17 nt, SARS coronavirus
aaaauugacaaugcuuc

SEQ ID NO: 382079 - RNA, 21 nt, SARS coronavirus
aaacgaacaugaaaauuauuc

SEQ ID NO: 382080 - RNA, 22 nt, SARS coronavirus
aaagauuguccagcgguugcug

SEQ ID NO: 382081 - RNA, 19 nt, SARS coronavirus
aaauuugcacuaacuugca

SEQ ID NO: 382082 - RNA, 13 nt, SARS coronavirus
aacaacauugcca

SEQ ID NO: 382083 - RNA, 21 nt, SARS coronavirus
aacaauggaaccuaguaauag

SEQ ID NO: 382084 - RNA, 22 nt, SARS coronavirus
aacauacgagggcaauucacca

SEQ ID NO: 382085 - RNA, 16 nt, SARS coronavirus
aacauacuucaucuau

SEQ ID NO: 382086 - RNA, 21 nt, SARS coronavirus
aacauugccaaaaggcuucua

SEQ ID NO: 382087 - RNA, 22 nt, SARS coronavirus
aaccuaguaauagguuuccuau

SEQ ID NO: 382088 - RNA, 20 nt, SARS coronavirus
aaccucaugugcuugaagau

SEQ ID NO: 382089 - RNA, 16 nt, SARS coronavirus
aacgaacuaacuauua

SEQ ID NO: 382090 - RNA, 21 nt, SARS coronavirus
aacgauaccgcuacaagccuc

SEQ ID NO: 382091 - RNA, 18 nt, SARS coronavirus
aacuaagaagaauuauuc

SEQ ID NO: 382092 - RNA, 14 nt, SARS coronavirus
aacuuauguacuca

SEQ ID NO: 382093 - RNA, 13 nt, SARS coronavirus
aagaaccuuguac

SEQ ID NO: 382094 - RNA, 16 nt, SARS coronavirus
aagcuccuaauuacac

SEQ ID NO: 382095 - RNA, 18 nt, SARS coronavirus
aaguacuguucaugcuac

SEQ ID NO: 382096 - RNA, 19 nt, SARS coronavirus
aaguacuguucaugcuaca

SEQ ID NO: 382097 - RNA, 22 nt, SARS coronavirus
aaguuccuaaaaacuaauugcu

SEQ ID NO: 382098 - RNA, 13 nt, SARS coronavirus
aauaaauuugcac

SEQ ID NO: 382099 - RNA, 12 nt, SARS coronavirus
aauaacaaugcu

SEQ ID NO: 382100 - RNA, 16 nt, SARS coronavirus
aauaacaaugcugcca

SEQ ID NO: 382101 - RNA, 23 nt, SARS coronavirus
aauacugcgucuugguucacagc

SEQ ID NO: 382102 - RNA, 14 nt, SARS coronavirus
aauacuuugcuuca

SEQ ID NO: 382103 - RNA, 19 nt, SARS coronavirus
aauuauucucuuccugaca

SEQ ID NO: 382104 - RNA, 15 nt, SARS coronavirus
aauucaccauuucac

SEQ ID NO: 382105 - RNA, 16 nt, SARS coronavirus
aauucuccugcucgaa

SEQ ID NO: 382106 - RNA, 12 nt, SARS coronavirus
aauugacaaugc

SEQ ID NO: 382107 - RNA, 16 nt, SARS coronavirus
aauugacaaugcuucu

SEQ ID NO: 382108 - RNA, 15 nt, SARS coronavirus
aauuuuuguaccucu

SEQ ID NO: 382109 - RNA, 15 nt, SARS coronavirus
acaaagaaggcaucg

SEQ ID NO: 382110 - RNA, 16 nt, SARS coronavirus
acaacgguacuauuac

SEQ ID NO: 382111 - RNA, 22 nt, SARS coronavirus
acaauagcagagauauugauua

SEQ ID NO: 382112 - RNA, 13 nt, SARS coronavirus
acaaugcugccac

SEQ ID NO: 382113 - RNA, 21 nt, SARS coronavirus
acaaugcuucuccugcaagua

SEQ ID NO: 382114 - RNA, 13 nt, SARS coronavirus
acaauucuacuaa

SEQ ID NO: 382115 - RNA, 21 nt, SARS coronavirus
acagauugaaccagcuugaga

SEQ ID NO: 382116 - RNA, 12 nt, SARS coronavirus
acauaccuauca

SEQ ID NO: 382117 - RNA, 14 nt, SARS coronavirus
acauaccuaucagc

SEQ ID NO: 382118 - RNA, 21 nt, SARS coronavirus
acauacgagggcaauucacca

SEQ ID NO: 382119 - RNA, 20 nt, SARS coronavirus
acaucuugcgagcuauauca

SEQ ID NO: 382120 - RNA, 16 nt, SARS coronavirus
acaugcacaccuaaug

SEQ ID NO: 382121 - RNA, 14 nt, SARS coronavirus
acaugguaccacau

SEQ ID NO: 382122 - RNA, 15 nt, SARS coronavirus
accacuuuugaugau

SEQ ID NO: 382123 - RNA, 18 nt, SARS coronavirus
accaugaacaacaaguca

SEQ ID NO: 382124 - RNA, 11 nt, SARS coronavirus
accccaaucaa

SEQ ID NO: 382125 - RNA, 11 nt, SARS coronavirus
acccucuugcu

SEQ ID NO: 382126 - RNA, 14 nt, SARS coronavirus
accuaggaacuggc

SEQ ID NO: 382127 - RNA, 16 nt, SARS coronavirus
accucaugugcuugaa

SEQ ID NO: 382128 - RNA, 21 nt, SARS coronavirus
accucaugugcuugaagaucc

SEQ ID NO: 382129 - RNA, 19 nt, SARS coronavirus
acgauaccgcuacaagccu

SEQ ID NO: 382130 - RNA, 18 nt, SARS coronavirus
acgguacucgacauaccu

SEQ ID NO: 382131 - RNA, 14 nt, SARS coronavirus
acuaucaacuguca

SEQ ID NO: 382132 - RNA, 16 nt, SARS coronavirus
acuccuggaacaaugg

SEQ ID NO: 382133 - RNA, 17 nt, SARS coronavirus
acugcugcuauuuguua

SEQ ID NO: 382134 - RNA, 17 nt, SARS coronavirus
acuuccagguuacaaua

SEQ ID NO: 382135 - RNA, 17 nt, SARS coronavirus
acuucccuacggcgcua

SEQ ID NO: 382136 - RNA, 18 nt, SARS coronavirus
acuucuauuaccuaggaa

SEQ ID NO: 382137 - RNA, 23 nt, SARS coronavirus
acuucucauuguuuugacuugua

SEQ ID NO: 382138 - RNA, 17 nt, SARS coronavirus
acuuuaauugacuucua

SEQ ID NO: 382139 - RNA, 18 nt, SARS coronavirus
agaagcuucacuucccua

SEQ ID NO: 382140 - RNA, 19 nt, SARS coronavirus
cucgcgcuauugcugcuag

SEQ ID NO: 382141 - RNA, 16 nt, SARS coronavirus
cucgcuccucaucacg

SEQ ID NO: 382142 - RNA, 12 nt, SARS coronavirus
cucuaugcaguu

SEQ ID NO: 382143 - RNA, 22 nt, SARS coronavirus
cucuaugcaguugcauaugcac

SEQ ID NO: 382144 - RNA, 23 nt, SARS coronavirus
cucuaugcaguugcauaugcacu

SEQ ID NO: 382145 - RNA, 12 nt, SARS coronavirus
cucuuacuuugu

SEQ ID NO: 382146 - RNA, 20 nt, SARS coronavirus
cucuuagaucaauuacugca

SEQ ID NO: 382147 - RNA, 19 nt, SARS coronavirus
cugacaauaaauuugcacu

SEQ ID NO: 382148 - RNA, 17 nt, SARS coronavirus
cugccacagagaaauca

SEQ ID NO: 382149 - RNA, 12 nt, SARS coronavirus
cugcuauuccuu

SEQ ID NO: 382150 - RNA, 18 nt, SARS coronavirus
cuguuuggaacuuuaaca

SEQ ID NO: 382151 - RNA, 17 nt, SARS coronavirus
cuuaggagaaugacaaa

SEQ ID NO: 382152 - RNA, 23 nt, SARS coronavirus
cuuauggauuuguuuaugagauu

SEQ ID NO: 382153 - RNA, 18 nt, SARS coronavirus
cuugaauacacccaaaga

SEQ ID NO: 382154 - RNA, 16 nt, SARS coronavirus
cuugcacuagcacaca

SEQ ID NO: 382155 - RNA, 13 nt, SARS coronavirus
cuugcugacaaua

SEQ ID NO: 382156 - RNA, 16 nt, SARS coronavirus
cuugcugcugucuaca

SEQ ID NO: 382157 - RNA, 18 nt, SARS coronavirus
cuugguucacagcucuca

SEQ ID NO: 382158 - RNA, 16 nt, SARS coronavirus
cuuguggccaguaaca

SEQ ID NO: 382159 - RNA, 12 nt, SARS coronavirus
cuuuaauugacu

SEQ ID NO: 382160 - RNA, 17 nt, SARS coronavirus
cuuuucauagauggcac

SEQ ID NO: 382161 - RNA, 14 nt, SARS coronavirus
cuuuucaucagaca

SEQ ID NO: 382162 - RNA, 14 nt, SARS coronavirus
cuuuugauauuuac

SEQ ID NO: 382163 - RNA, 13 nt, SARS coronavirus
gaaaaaguugcug

SEQ ID NO: 382164 - RNA, 23 nt, SARS coronavirus
gaaauuuuuagaucagacacucu

SEQ ID NO: 382165 - RNA, 19 nt, SARS coronavirus
gaacaaauuaaaaugucug

SEQ ID NO: 382166 - RNA, 18 nt, SARS coronavirus
gaaccuugcccaucagga

SEQ ID NO: 382167 - RNA, 14 nt, SARS coronavirus
gaacuaacuauuau

SEQ ID NO: 382168 - RNA, 16 nt, SARS coronavirus
gaauuauuaugagaug

SEQ ID NO: 382169 - RNA, 16 nt, SARS coronavirus
gacaacgguacuauua

SEQ ID NO: 382170 - RNA, 17 nt, SARS coronavirus
gacaacgguacuauuac

SEQ ID NO: 382171 - RNA, 14 nt, SARS coronavirus
gacaaugcuucucc

SEQ ID NO: 382172 - RNA, 17 nt, SARS coronavirus
gacagaaugaaugagcu

SEQ ID NO: 382173 - RNA, 18 nt, SARS coronavirus
gacagaaugaaugagcuc

SEQ ID NO: 382174 - RNA, 13 nt, SARS coronavirus
gaccacauuggca

SEQ ID NO: 382175 - RNA, 18 nt, SARS coronavirus
gagcuauaucacuaucag

SEQ ID NO: 382176 - RNA, 20 nt, SARS coronavirus
gagcucacuuuaauugacuu

SEQ ID NO: 382177 - RNA, 14 nt, SARS coronavirus
gaggacgcaauggg

SEQ ID NO: 382178 - RNA, 20 nt, SARS coronavirus
gaggagguucaacaagagcu

SEQ ID NO: 382179 - RNA, 16 nt, SARS coronavirus
gaggcauacuaugucu

SEQ ID NO: 382180 - RNA, 20 nt, SARS coronavirus
gauauauuuucuacaaugca

SEQ ID NO: 382181 - RNA, 21 nt, SARS coronavirus
gauccagcugguggugcgcuu

SEQ ID NO: 382182 - RNA, 13 nt, SARS coronavirus
gaugaagaaccua

SEQ ID NO: 382183 - RNA, 20 nt, SARS coronavirus
gaugaccaaauuggcuacua

SEQ ID NO: 382184 - RNA, 16 nt, SARS coronavirus
gauucaacugacaaua

SEQ ID NO: 382185 - RNA, 17 nt, SARS coronavirus
gauucccucgaggccag

SEQ ID NO: 382186 - RNA, 23 nt, SARS coronavirus
gauugaaccagcuugagagcaaa

SEQ ID NO: 382187 - RNA, 17 nt, SARS coronavirus
gauugcaauggcuugua

SEQ ID NO: 382188 - RNA, 15 nt, SARS coronavirus
gauugcgauugcaau

SEQ ID NO: 382189 - RNA, 23 nt, SARS coronavirus
gauuguccagcgguugcugucca

SEQ ID NO: 382190 - RNA, 13 nt, SARS coronavirus
gcaacgauaccgc

SEQ ID NO: 382191 - RNA, 18 nt, SARS coronavirus
gcaauggggcaaggccaa

SEQ ID NO: 382192 - RNA, 22 nt, SARS coronavirus
gcacacuaugguucaaacaugc

SEQ ID NO: 382193 - RNA, 15 nt, SARS coronavirus
gcacaggcacuagua

SEQ ID NO: 382194 - RNA, 15 nt, SARS coronavirus
gcacuaguacugaug

SEQ ID NO: 382195 - RNA, 16 nt, SARS coronavirus
gccaaaaggcuucuac

SEQ ID NO: 382196 - RNA, 20 nt, SARS coronavirus
gccaguaaaaauugacaaug

SEQ ID NO: 382197 - RNA, 21 nt, SARS coronavirus
gccaguaaaaauugacaaugc

SEQ ID NO: 382198 - RNA, 16 nt, SARS coronavirus
gccccagaugguacuu

SEQ ID NO: 382199 - RNA, 20 nt, SARS coronavirus
gcgucuaacuaaauacacaa

SEQ ID NO: 382200 - RNA, 21 nt, SARS coronavirus
gcguuccaaucaacaccaaua

SEQ ID NO: 382201 - RNA, 18 nt, SARS coronavirus
gcugacaauaaauuugca

SEQ ID NO: 382202 - RNA, 22 nt, SARS coronavirus
gcugcgugcaagaucaguuuca

SEQ ID NO: 382203 - RNA, 17 nt, SARS coronavirus
gcugucgcuuccaggag

SEQ ID NO: 382204 - RNA, 17 nt, SARS coronavirus
gcuuaucauggcagaca

SEQ ID NO: 382205 - RNA, 13 nt, SARS coronavirus
gcuuggcuuugug

SEQ ID NO: 382206 - RNA, 13 nt, SARS coronavirus
gcuugugcugacg

SEQ ID NO: 382207 - RNA, 15 nt, SARS coronavirus
ggaacaacauugcca

SEQ ID NO: 382208 - RNA, 15 nt, SARS coronavirus
ggcaaggccaaaaca

SEQ ID NO: 382209 - RNA, 23 nt, SARS coronavirus
ggcacaggcacuaguacugaugu

SEQ ID NO: 382210 - RNA, 19 nt, SARS coronavirus
ggcacuaguacugaugucg

SEQ ID NO: 382211 - RNA, 15 nt, SARS coronavirus
ggcagaugggcuaug

SEQ ID NO: 382212 - RNA, 22 nt, SARS coronavirus
ggcuuccaguucauuugcaauu

SEQ ID NO: 382213 - RNA, 19 nt, SARS coronavirus
ggcuucuacgcagagggaa

SEQ ID NO: 382214 - RNA, 17 nt, SARS coronavirus
gguauggaggcgcaauu

SEQ ID NO: 382215 - RNA, 12 nt, SARS coronavirus
gguauucuugcu

SEQ ID NO: 382216 - RNA, 17 nt, SARS coronavirus
gguccagaugaccaaau

SEQ ID NO: 382217 - RNA, 15 nt, SARS coronavirus
gguggacccacagau

SEQ ID NO: 382218 - RNA, 22 nt, SARS coronavirus
gguucaaacaugcacaccuaau

SEQ ID NO: 382219 - RNA, 18 nt, SARS coronavirus
guacuucuuuuucuugcu

SEQ ID NO: 382220 - RNA, 11 nt, SARS coronavirus
guauucuugcu

SEQ ID NO: 382221 - RNA, 13 nt, SARS coronavirus
guccagaugacca

SEQ ID NO: 382222 - RNA, 18 nt, SARS coronavirus
guccagcgguugcugucc

SEQ ID NO: 382223 - RNA, 20 nt, SARS coronavirus
gucugauaauggaccccaau

SEQ ID NO: 382224 - RNA, 17 nt, SARS coronavirus
gucuugguucacagcuc

SEQ ID NO: 382225 - RNA, 17 nt, SARS coronavirus
guggacccacagauuca

SEQ ID NO: 382226 - RNA, 16 nt, SARS coronavirus
gugguagugaccuuga

SEQ ID NO: 382227 - RNA, 20 nt, SARS coronavirus
guuaagaggcauacuauguc

SEQ ID NO: 382228 - RNA, 17 nt, SARS coronavirus
uaaaaauugacaaugcu

SEQ ID NO: 382229 - RNA, 16 nt, SARS coronavirus
uaaaccucaugugcuu

SEQ ID NO: 382230 - RNA, 15 nt, SARS coronavirus
uaacaaugcugccac

SEQ ID NO: 382231 - RNA, 14 nt, SARS coronavirus
uaacucaggauuua

SEQ ID NO: 382232 - RNA, 14 nt, SARS coronavirus
uaaucaauguguaa

SEQ ID NO: 382233 - RNA, 13 nt, SARS coronavirus
uaauuacacucaa

SEQ ID NO: 382234 - RNA, 12 nt, SARS coronavirus
uacaacuuccuc

SEQ ID NO: 382235 - RNA, 17 nt, SARS coronavirus
uacaauuugccuauucu

SEQ ID NO: 382236 - RNA, 11 nt, SARS coronavirus
uacaucuugcg

SEQ ID NO: 382237 - RNA, 18 nt, SARS coronavirus
uaccuucaugaaggucac

SEQ ID NO: 382238 - RNA, 14 nt, SARS coronavirus
uacucgacauaccu

SEQ ID NO: 382239 - RNA, 17 nt, SARS coronavirus
uacuuauagcacugcuu

SEQ ID NO: 382240 - RNA, 13 nt, SARS coronavirus
uagaugaugaaga

SEQ ID NO: 382241 - RNA, 22 nt, SARS coronavirus
uagcguacuucuuuuucuugcu

SEQ ID NO: 382242 - RNA, 23 nt, SARS coronavirus
uagcuacuucguugcuuccuuca

SEQ ID NO: 382243 - RNA, 14 nt, SARS coronavirus
uaggaaagguuuua

SEQ ID NO: 382244 - RNA, 15 nt, SARS coronavirus
uagguuuccuauucc

SEQ ID NO: 382245 - RNA, 20 nt, SARS coronavirus
uaguacagcgcugugcaucu

SEQ ID NO: 382246 - RNA, 13 nt, SARS coronavirus
uaguagugcuauc

SEQ ID NO: 382247 - RNA, 21 nt, SARS coronavirus
uauacgagcauguaacuuuga

SEQ ID NO: 382248 - RNA, 21 nt, SARS coronavirus
uauuaacaauucuacuaaugu

SEQ ID NO: 382249 - RNA, 21 nt, SARS coronavirus
uauuauuaacaauucuacuaa

SEQ ID NO: 382250 - RNA, 12 nt, SARS coronavirus
uauugcugcuag

SEQ ID NO: 382251 - RNA, 13 nt, SARS coronavirus
uauuuauuuugcu

SEQ ID NO: 382252 - RNA, 15 nt, SARS coronavirus
uauuuggaaucuuga

SEQ ID NO: 382253 - RNA, 16 nt, SARS coronavirus
ucaacaagagcucuac

SEQ ID NO: 382254 - RNA, 16 nt, SARS coronavirus
ucaacugucaagaucc

SEQ ID NO: 382255 - RNA, 17 nt, SARS coronavirus
ucaacugucaagaucca

SEQ ID NO: 382256 - RNA, 22 nt, SARS coronavirus
ucaagcuccuaauuacacucaa

SEQ ID NO: 382257 - RNA, 23 nt, SARS coronavirus
ucaaguuuagaguagauggugac

SEQ ID NO: 382258 - RNA, 16 nt, SARS coronavirus
ucaccaaaacuuuuca

SEQ ID NO: 382259 - RNA, 17 nt, SARS coronavirus
ucaccaaacugcugcau

SEQ ID NO: 382260 - RNA, 19 nt, SARS coronavirus
ucacuuuaauugacuucua

SEQ ID NO: 382261 - RNA, 21 nt, SARS coronavirus
auugacaaugcuucuccugca

SEQ ID NO: 382262 - RNA, 16 nt, SARS coronavirus
auugcaauggcuugua

SEQ ID NO: 382263 - RNA, 17 nt, SARS coronavirus
auugccaaaaggcuucu

SEQ ID NO: 382264 - RNA, 13 nt, SARS coronavirus
auugcugcuagac

SEQ ID NO: 382265 - RNA, 15 nt, SARS coronavirus
auuggcuacuaccga

SEQ ID NO: 382266 - RNA, 13 nt, SARS coronavirus
auuuacugcugcu

SEQ ID NO: 382267 - RNA, 14 nt, SARS coronavirus
auuucuuacucuca

SEQ ID NO: 382268 - RNA, 16 nt, SARS coronavirus
auuucuuccauuuuau

SEQ ID NO: 382269 - RNA, 12 nt, SARS coronavirus
auuugcaauuua

SEQ ID NO: 382270 - RNA, 20 nt, SARS coronavirus
auuuuauucuaauguuacag

SEQ ID NO: 382271 - RNA, 15 nt, SARS coronavirus
auuuucuacaaugca

SEQ ID NO: 382272 - RNA, 13 nt, SARS coronavirus
caaaaggcuucua

SEQ ID NO: 382273 - RNA, 16 nt, SARS coronavirus
caaaguuccuaaaaac

SEQ ID NO: 382274 - RNA, 23 nt, SARS coronavirus
caacaagagcucuacucgccacu

SEQ ID NO: 382275 - RNA, 17 nt, SARS coronavirus
caacugucaagauccag

SEQ ID NO: 382276 - RNA, 21 nt, SARS coronavirus
caagccucuucucgcuccuca

SEQ ID NO: 382277 - RNA, 14 nt, SARS coronavirus
caauauuguuaacg

SEQ ID NO: 382278 - RNA, 22 nt, SARS coronavirus
cacacacuuugcuuuugcuugu

SEQ ID NO: 382279 - RNA, 11 nt, SARS coronavirus
cacagcucuca

SEQ ID NO: 382280 - RNA, 18 nt, SARS coronavirus
cacagcucucacucagca

SEQ ID NO: 382281 - RNA, 21 nt, SARS coronavirus
cacgucagcgucuaacuaaau

SEQ ID NO: 382282 - RNA, 13 nt, SARS coronavirus
gccuuucugcuau

SEQ ID NO: 382283 - RNA, 18 nt, SARS coronavirus
gcgcaauuuuuguaccuc

SEQ ID NO: 382284 - RNA, 14 nt, SARS coronavirus
gcuauugcugcuag

SEQ ID NO: 382285 - RNA, 14 nt, SARS coronavirus
gcucuacucgccac

SEQ ID NO: 382286 - RNA, 23 nt, SARS coronavirus
gcucuuguggccaguaacacuug

SEQ ID NO: 382287 - RNA, 21 nt, SARS coronavirus
gcugguggugcgcuuauagcu

SEQ ID NO: 382288 - RNA, 21 nt, SARS coronavirus
gcuuaaacaacuccuggaaca

SEQ ID NO: 382289 - RNA, 18 nt, SARS coronavirus
gcuucuacgcagagggaa

SEQ ID NO: 382290 - RNA, 24 nt, SARS coronavirus
gcuucuccugcaaguacuguucau

SEQ ID NO: 382291 - RNA, 18 nt, SARS coronavirus
ggauuuguuuaugagauu

SEQ ID NO: 382292 - RNA, 19 nt, SARS coronavirus
ggcaaggccaaaacagcgc

SEQ ID NO: 382293 - RNA, 22 nt, SARS coronavirus
ggguaauacuuauagcacugcu

SEQ ID NO: 382294 - RNA, 21 nt, SARS coronavirus
ggguuuuugguucuaccauga

SEQ ID NO: 382295 - RNA, 15 nt, SARS coronavirus
ggucaccaaacugcu

SEQ ID NO: 382296 - RNA, 16 nt, SARS coronavirus
gguucaacaagagcuc

SEQ ID NO: 382297 - RNA, 20 nt, SARS coronavirus
uugcaauuuacugcugcuau

SEQ ID NO: 382298 - RNA, 17 nt, SARS coronavirus
uugcacuaacuugcacu

SEQ ID NO: 382299 - RNA, 18 nt, SARS coronavirus
uugccaaaaggcuucuac

SEQ ID NO: 382300 - RNA, 21 nt, SARS coronavirus
uugcccaucaggaacauacga

SEQ ID NO: 382301 - RNA, 16 nt, SARS coronavirus
uugcgagcuauaucac

SEQ ID NO: 382302 - RNA, 19 nt, SARS coronavirus
uugcuauuuggaaucuuga

SEQ ID NO: 382303 - RNA, 20 nt, SARS coronavirus
uuuacaucuugcgagcuaua

SEQ ID NO: 382304 - RNA, 14 nt, SARS coronavirus
uuucagagcgcuac

SEQ ID NO: 382305 - RNA, 12 nt, SARS coronavirus
uuucauacuauu

SEQ ID NO: 382306 - RNA, 21 nt, SARS coronavirus
uuucaucuuguugacuuccag

SEQ ID NO: 382307 - RNA, 18 nt, SARS coronavirus
uuucucauuguugcugcu

SEQ ID NO: 382308 - RNA, 13 nt, SARS coronavirus
uuucucuaugcag

SEQ ID NO: 382309 - RNA, 14 nt, SARS coronavirus
uuugcaauuuacug

SEQ ID NO: 382310 - RNA, 17 nt, SARS coronavirus
uuugguucuaccaugaa

SEQ ID NO: 382311 - RNA, 16 nt, SARS coronavirus
uuuuaaggaugguauu

SEQ ID NO: 382312 - RNA, 14 nt, SARS coronavirus
uuuuaguagugcua

SEQ ID NO: 382313 - RNA, 15 nt, SARS coronavirus
uuuucucauuguugc

SEQ ID NO: 382314 - RNA, 12 nt, SARS coronavirus
uuuuuagaucag

SEQ ID NO: 382315 - RNA, 23 nt, Seoul virus
aucgaguuuuaaacacuuuacca

SEQ ID NO: 382316 - RNA, 16 nt, Seoul virus
aucugauaacuaacuu

SEQ ID NO: 382317 - RNA, 19 nt, Seoul virus
aucugauaacuaacuuuca

SEQ ID NO: 382318 - RNA, 17 nt, Seoul virus
cuucauuuucauuuugc

SEQ ID NO: 382319 - RNA, 12 nt, Seoul virus
ggagucuacuac

SEQ ID NO: 382320 - RNA, 18 nt, Seoul virus
uaccauuaaaaacuuaac

SEQ ID NO: 382321 - RNA, 20 nt, Seoul virus
ucacuucauuuucauuuugc

SEQ ID NO: 382322 - RNA, 19 nt, Seoul virus
ucauuuugcggagucuacu

SEQ ID NO: 382323 - RNA, 23 nt, Seoul virus
ucauuuugcggagucuacuacua

SEQ ID NO: 382324 - RNA, 17 nt, Seoul virus
ucuugcggagucuacua

SEQ ID NO: 382325 - RNA, 19 nt, Seoul virus
uuacuaaaaaaaauacucu

SEQ ID NO: 382326 - RNA, 19 nt, Seoul virus
uucacuucauuuucauuuu

SEQ ID NO: 382327 - RNA, 18 nt, Seoul virus
uuuaaacacuuuaccauu

SEQ ID NO: 382328 - RNA, 16 nt, Seoul virus
uuugcggagucuacua

SEQ ID NO: 382329 - RNA, 19 nt, Seoul virus
uuugcggagucuacuacua

SEQ ID NO: 382330 - RNA, 12 nt, Seoul virus
uuuucauuuugc

SEQ ID NO: 382331 - RNA, 20 nt, Seoul virus
uuuucauuuugcggagucua

SEQ ID NO: 382332 - RNA, 16 nt, Seoul virus
auaucugauaacuaac

SEQ ID NO: 382333 - RNA, 22 nt, Seoul virus
auguaucgaguuuuaaacacuu

SEQ ID NO: 382334 - RNA, 19 nt, Seoul virus
auuuugcggagucuacuac

SEQ ID NO: 382335 - RNA, 19 nt, Seoul virus
cauuuugcggagucuacua

SEQ ID NO: 382336 - RNA, 21 nt, Seoul virus
cauuuugcggagucuacuacu

SEQ ID NO: 382337 - RNA, 22 nt, Seoul virus
cauuuugcggagucuacuacua

SEQ ID NO: 382338 - RNA, 16 nt, Seoul virus
cugauaacuaacuuuc

SEQ ID NO: 382339 - RNA, 20 nt, Seoul virus
ucucccaaucuuuuauugau

SEQ ID NO: 382340 - RNA, 14 nt, Seoul virus
ugcggagucuacua

SEQ ID NO: 382341 - RNA, 12 nt, Seoul virus
uuaaacacuuua

SEQ ID NO: 382342 - RNA, 21 nt, Seoul virus
uuaaccuggcucuaauaucug

SEQ ID NO: 382343 - RNA, 23 nt, Seoul virus
uuaaccuggcucuaauaucugau

SEQ ID NO: 382344 - RNA, 18 nt, Seoul virus
uuacuaaaaaaaauacuc

SEQ ID NO: 382345 - RNA, 21 nt, Seoul virus
uuauuaaucuucauagcaugu

SEQ ID NO: 382346 - RNA, 14 nt, Sin Nombre virus
aaaccaugacuugu

SEQ ID NO: 382347 - RNA, 19 nt, Sin Nombre virus
aaaccaugacuuguucucu

SEQ ID NO: 382348 - RNA, 18 nt, Sin Nombre virus
aacauuuguauauuccca

SEQ ID NO: 382349 - RNA, 17 nt, Sin Nombre virus
aaccaugacuuguucuc

SEQ ID NO: 382350 - RNA, 17 nt, Sin Nombre virus
aacccauuaacagcuaa

SEQ ID NO: 382351 - RNA, 12 nt, Sin Nombre virus
aauaagauuuau

SEQ ID NO: 382352 - RNA, 19 nt, Sin Nombre virus
aaucaaaauaagauuuaua

SEQ ID NO: 382353 - RNA, 13 nt, Sin Nombre virus
aaucccauuugcu

SEQ ID NO: 382354 - RNA, 21 nt, Sin Nombre virus
aauuuucuuuauuccaaacca

SEQ ID NO: 382355 - RNA, 23 nt, Sin Nombre virus
acaccuauauaaucccauuugcu

SEQ ID NO: 382356 - RNA, 18 nt, Sin Nombre virus
acauagauuuauuuuaua

SEQ ID NO: 382357 - RNA, 21 nt, Sin Nombre virus
acauagauuuauuuuauauac

SEQ ID NO: 382358 - RNA, 19 nt, Sin Nombre virus
acauuuguauauucccaua

SEQ ID NO: 382359 - RNA, 21 nt, Sin Nombre virus
accaugacuuguucucucuac

SEQ ID NO: 382360 - RNA, 11 nt, Sin Nombre virus
acugcucuguu

SEQ ID NO: 382361 - RNA, 15 nt, Sin Nombre virus
acugcucuguucucg

SEQ ID NO: 382362 - RNA, 17 nt, Sin Nombre virus
acugcucuguucucgga

SEQ ID NO: 382363 - RNA, 19 nt, Sin Nombre virus
acuuguucucucuacugcu

SEQ ID NO: 382364 - RNA, 14 nt, Sin Nombre virus
aguauuaagucaua

SEQ ID NO: 382365 - RNA, 13 nt, Sin Nombre virus
aguguuaagucau

SEQ ID NO: 382366 - RNA, 16 nt, Sin Nombre virus
aguuaagcuuauuaaa

SEQ ID NO: 382367 - RNA, 16 nt, Sin Nombre virus
auaguauuaagucaua

SEQ ID NO: 382368 - RNA, 13 nt, Sin Nombre virus
auauucagggcau

SEQ ID NO: 382369 - RNA, 11 nt, Sin Nombre virus
aaaccaugacu

SEQ ID NO: 382370 - RNA, 20 nt, Sin Nombre virus
aaaccaugacuuguucucuc

SEQ ID NO: 382371 - RNA, 12 nt, Sin Nombre virus
aacauuauuuca

SEQ ID NO: 382372 - RNA, 13 nt, Sin Nombre virus
aagucuauaugau

SEQ ID NO: 382373 - RNA, 13 nt, Sin Nombre virus
aauaacauuugua

SEQ ID NO: 382374 - RNA, 11 nt, Sin Nombre virus
aauccuuaaca

SEQ ID NO: 382375 - RNA, 16 nt, Sin Nombre virus
aauccuuaacaccuau

SEQ ID NO: 382376 - RNA, 15 nt, Sin Nombre virus
acaacauuauuucau

SEQ ID NO: 382377 - RNA, 19 nt, Sin Nombre virus
acaccuauauaaucccauu

SEQ ID NO: 382378 - RNA, 23 nt, Sin Nombre virus
acuuguucucucuacugcucugu

SEQ ID NO: 382379 - RNA, 22 nt, Sin Nombre virus
agauuuauauacauagauuuau

SEQ ID NO: 382380 - RNA, 15 nt, Sin Nombre virus
agucauuguuuauug

SEQ ID NO: 382381 - RNA, 16 nt, Sin Nombre virus
agucuauaugauuuau

SEQ ID NO: 382382 - RNA, 17 nt, Sin Nombre virus
agucuauaugauuuauu

SEQ ID NO: 382383 - RNA, 14 nt, Sin Nombre virus
aguguuaagucauu

SEQ ID NO: 382384 - RNA, 22 nt, Sin Nombre virus
aguuaaucuugauaguauuaag

SEQ ID NO: 382385 - RNA, 18 nt, Sin Nombre virus
aguuucgguaagucuguu

SEQ ID NO: 382386 - RNA, 21 nt, Sin Nombre virus
aguuuuguuaaguuguauuaa

SEQ ID NO: 382387 - RNA, 21 nt, Sin Nombre virus
auaacauuuguauauucccau

SEQ ID NO: 382388 - RNA, 18 nt, Sin Nombre virus
auaucaauaacauuugua

SEQ ID NO: 382389 - RNA, 17 nt, Sin Nombre virus
aucuuguuaaguuuguu

SEQ ID NO: 382390 - RNA, 22 nt, Sin Nombre virus
augacuuguucucucuacugcu

SEQ ID NO: 382391 - RNA, 23 nt, Sin Nombre virus
augacuuguucucucuacugcuc

SEQ ID NO: 382392 - RNA, 14 nt, Sin Nombre virus
augcuaagucuaua

SEQ ID NO: 382393 - RNA, 22 nt, Sin Nombre virus
augcuaagucuauaugauuuau

SEQ ID NO: 382394 - RNA, 17 nt, Sin Nombre virus
auuauaucacaggguau

SEQ ID NO: 382395 - RNA, 13 nt, Sin Nombre virus
auuccaaaccaug

SEQ ID NO: 382396 - RNA, 12 nt, Sin Nombre virus
caaaccaugacu

SEQ ID NO: 382397 - RNA, 13 nt, Sin Nombre virus
caaaccaugacuu

SEQ ID NO: 382398 - RNA, 15 nt, Sin Nombre virus
caauaacauuuguau

SEQ ID NO: 382399 - RNA, 22 nt, Sin Nombre virus
caccuauauaaucccauuugcu

SEQ ID NO: 382400 - RNA, 13 nt, Sin Nombre virus
cacuaaucagggu

SEQ ID NO: 382401 - RNA, 17 nt, Sin Nombre virus
cauuauauguauguucu

SEQ ID NO: 382402 - RNA, 13 nt, Sin Nombre virus
ccaaaccaugacu

SEQ ID NO: 382403 - RNA, 21 nt, Sin Nombre virus
ccaaaccaugacuuguucucu

SEQ ID NO: 382404 - RNA, 13 nt, Sin Nombre virus
ccaugacuuguuc

SEQ ID NO: 382405 - RNA, 19 nt, Sin Nombre virus
ccaugacuuguucucucua

SEQ ID NO: 382406 - RNA, 23 nt, Sin Nombre virus
ccaugacuuguucucucuacugc

SEQ ID NO: 382407 - RNA, 21 nt, Sin Nombre virus
ccuauauaaucccauuugcuu

SEQ ID NO: 382408 - RNA, 16 nt, Sin Nombre virus
cuacugcucuguucuc

SEQ ID NO: 382409 - RNA, 19 nt, Sin Nombre virus
cuauauaaucccauuugcu

SEQ ID NO: 382410 - RNA, 13 nt, Sin Nombre virus
cucucuacugcuc

SEQ ID NO: 382411 - RNA, 19 nt, Sin Nombre virus
cuguucucggagcauacua

SEQ ID NO: 382412 - RNA, 21 nt, Sin Nombre virus
cuuauaucaauaacauuugua

SEQ ID NO: 382413 - RNA, 16 nt, Sin Nombre virus
cuuauauucagggcau

SEQ ID NO: 382414 - RNA, 19 nt, Sin Nombre virus
cuugauaguauuaagucau

SEQ ID NO: 382415 - RNA, 16 nt, Sin Nombre virus
cuuguucucucuacug

SEQ ID NO: 382416 - RNA, 19 nt, Sin Nombre virus
cuuuauuccaaaccaugac

SEQ ID NO: 382417 - RNA, 20 nt, Sin Nombre virus
cuuuauuccaaaccaugacu

SEQ ID NO: 382418 - RNA, 21 nt, Sin Nombre virus
cuuuauuccaaaccaugacuu

SEQ ID NO: 382419 - RNA, 20 nt, Sin Nombre virus
gacuuguucucucuacugcu

SEQ ID NO: 382420 - RNA, 21 nt, Sin Nombre virus
gacuuguucucucuacugcuc

SEQ ID NO: 382421 - RNA, 21 nt, Sin Nombre virus
gcuaagucuauaugauuuauu

SEQ ID NO: 382422 - RNA, 20 nt, Sin Nombre virus
ggcauuauuauaaccagggu

SEQ ID NO: 382423 - RNA, 18 nt, Sin Nombre virus
gguaaugggcacuaauca

SEQ ID NO: 382424 - RNA, 21 nt, Sin Nombre virus
guauuaacuaacccauuaaca

SEQ ID NO: 382425 - RNA, 12 nt, Sin Nombre virus
guguuuaguguu

SEQ ID NO: 382426 - RNA, 20 nt, Sin Nombre virus
guguuuaguguuaagucauu

SEQ ID NO: 382427 - RNA, 18 nt, Sin Nombre virus
guucucggagcauacuac

SEQ ID NO: 382428 - RNA, 18 nt, Sin Nombre virus
uaaauguaguuaaucuug

SEQ ID NO: 382429 - RNA, 21 nt, Sin Nombre virus
uaagcuuauuaaaucuuguua

SEQ ID NO: 382430 - RNA, 20 nt, Sin Nombre virus
uaaucaaaauaagauuuaua

SEQ ID NO: 382431 - RNA, 17 nt, Sin Nombre virus
uaaugggcacuaaucag

SEQ ID NO: 382432 - RNA, 15 nt, Sin Nombre virus
uacugcucuguucuc

SEQ ID NO: 382433 - RNA, 13 nt, Sin Nombre virus
uaguguuaaguca

SEQ ID NO: 382434 - RNA, 13 nt, Sin Nombre virus
uaguuaaucuuga

SEQ ID NO: 382435 - RNA, 15 nt, Sin Nombre virus
uaguuaaucuugaua

SEQ ID NO: 382436 - RNA, 14 nt, Sin Nombre virus
uauacaaguauuaa

SEQ ID NO: 382437 - RNA, 13 nt, Sin Nombre virus
uauaucacagggu

SEQ ID NO: 382438 - RNA, 15 nt, Sin Nombre virus
uauaucacaggguau

SEQ ID NO: 382439 - RNA, 22 nt, Sin Nombre virus
uauaugugagcaagaguaugac

SEQ ID NO: 382440 - RNA, 14 nt, Sin Nombre virus
uauauucagggcau

SEQ ID NO: 382441 - RNA, 18 nt, Sin Nombre virus
uaugugagcaagaguaug

SEQ ID NO: 382442 - RNA, 17 nt, Sin Nombre virus
uauguucuuauaucaau

SEQ ID NO: 382443 - RNA, 20 nt, Sin Nombre virus
ucaacuuauauucagggcau

SEQ ID NO: 382444 - RNA, 19 nt, Sin Nombre virus
ucaagggccaauuauauca

SEQ ID NO: 382445 - RNA, 14 nt, Sin Nombre virus
uccaaaccaugacu

SEQ ID NO: 382446 - RNA, 22 nt, Sin Nombre virus
uccaaaccaugacuuguucucu

SEQ ID NO: 382447 - RNA, 18 nt, Sin Nombre virus
uccuuaacaccuauauaa

SEQ ID NO: 382448 - RNA, 22 nt, Sin Nombre virus
ucuguucucggagcauacuacu

SEQ ID NO: 382449 - RNA, 19 nt, Sin Nombre virus
ucuguuuaaugcuaagucu

SEQ ID NO: 382450 - RNA, 17 nt, Sin Nombre virus
ucuuuauuccaaaccau

SEQ ID NO: 382451 - RNA, 18 nt, Sin Nombre virus
ucuuuauuccaaaccaug

SEQ ID NO: 382452 - RNA, 23 nt, Sin Nombre virus
ugacuuguucucucuacugcucu

SEQ ID NO: 382453 - RNA, 16 nt, Sin Nombre virus
ugauaguauuaaguca

SEQ ID NO: 382454 - RNA, 20 nt, Sin Nombre virus
uguauuguuaguuaagcuua

SEQ ID NO: 382455 - RNA, 17 nt, Sin Nombre virus
uguuaaauguaguuaau

SEQ ID NO: 382456 - RNA, 23 nt, Sin Nombre virus
uguuaaguuuuguuaaguuguau

SEQ ID NO: 382457 - RNA, 21 nt, Sin Nombre virus
uguucucggagcauacuacua

SEQ ID NO: 382458 - RNA, 15 nt, Sin Nombre virus
uguucucucuacugc

SEQ ID NO: 382459 - RNA, 20 nt, Sin Nombre virus
uguucucucuacugcucugu

SEQ ID NO: 382460 - RNA, 14 nt, Sin Nombre virus
uuaacuaacccauu

SEQ ID NO: 382461 - RNA, 20 nt, Sin Nombre virus
uuaagcuuauuaaaucuugu

SEQ ID NO: 382462 - RNA, 15 nt, Sin Nombre virus
uuaguguuaagucau

SEQ ID NO: 382463 - RNA, 16 nt, Sin Nombre virus
uuauuccaaaccauga

SEQ ID NO: 382464 - RNA, 18 nt, Sin Nombre virus
uuauuccaaaccaugacu

SEQ ID NO: 382465 - RNA, 19 nt, Sin Nombre virus
uucauuauauguauguucu

SEQ ID NO: 382466 - RNA, 15 nt, Sin Nombre virus
uuccaaaccaugacu

SEQ ID NO: 382467 - RNA, 21 nt, Sin Nombre virus
uuccugcggagcauacuacua

SEQ ID NO: 382468 - RNA, 17 nt, Sin Nombre virus
uucgguaagucuguuaa

SEQ ID NO: 382469 - RNA, 15 nt, Sin Nombre virus
uucucggagcauacu

SEQ ID NO: 382470 - RNA, 18 nt, Sin Nombre virus
uuuauuccaaaccaugac

SEQ ID NO: 382471 - RNA, 21 nt, Sin Nombre virus
aucuguuuaaugcuaagucua

SEQ ID NO: 382472 - RNA, 14 nt, Sin Nombre virus
augacuuguucucu

SEQ ID NO: 382473 - RNA, 15 nt, Sin Nombre virus
augauuuauuaauca

SEQ ID NO: 382474 - RNA, 16 nt, Sin Nombre virus
auuauaaccaggguaa

SEQ ID NO: 382475 - RNA, 15 nt, Sin Nombre virus
auuccaaaccaugac

SEQ ID NO: 382476 - RNA, 23 nt, Sin Nombre virus
auuccaaaccaugacuuguucuc

SEQ ID NO: 382477 - RNA, 18 nt, Sin Nombre virus
auuguaguauuguauuau

SEQ ID NO: 382478 - RNA, 13 nt, Sin Nombre virus
auuguuaucuguu

SEQ ID NO: 382479 - RNA, 16 nt, Sin Nombre virus
caaaccaugacuuguu

SEQ ID NO: 382480 - RNA, 14 nt, Sin Nombre virus
caacauuauuucau

SEQ ID NO: 382481 - RNA, 19 nt, Sin Nombre virus
caauuauaucacaggguau

SEQ ID NO: 382482 - RNA, 23 nt, Sin Nombre virus
caauuuucuuuauuccaaaccau

SEQ ID NO: 382483 - RNA, 19 nt, Sin Nombre virus
cacuaaucaggguuuauug

SEQ ID NO: 382484 - RNA, 14 nt, Sin Nombre virus
ccaaaccaugacuu

SEQ ID NO: 382485 - RNA, 16 nt, Sin Nombre virus
ccaugacuuguucucu

SEQ ID NO: 382486 - RNA, 20 nt, Sin Nombre virus
ccaugacuuguucucucuac

SEQ ID NO: 382487 - RNA, 17 nt, Sin Nombre virus
cuacugcucuguucucg

SEQ ID NO: 382488 - RNA, 17 nt, Sin Nombre virus
cucggagcauacuacua

SEQ ID NO: 382489 - RNA, 19 nt, Sin Nombre virus
cugcucuguucucggagca

SEQ ID NO: 382490 - RNA, 19 nt, Sin Nombre virus
cuuguucucucuacugcuc

SEQ ID NO: 382491 - RNA, 16 nt, Sin Nombre virus
cuuuauuccaaaccau

SEQ ID NO: 382492 - RNA, 17 nt, Sin Nombre virus
cuuuauuccaaaccaug

SEQ ID NO: 382493 - RNA, 12 nt, Sin Nombre virus
gacuuguucucu

SEQ ID NO: 382494 - RNA, 17 nt, Sin Nombre virus
gauaguauuaagucaua

SEQ ID NO: 382495 - RNA, 13 nt, Sin Nombre virus
ggagcauacuacu

SEQ ID NO: 382496 - RNA, 15 nt, Sin Nombre virus
ggcacuaaucagggu

SEQ ID NO: 382497 - RNA, 18 nt, Sin Nombre virus
ggcaguaaucaacuuaua

SEQ ID NO: 382498 - RNA, 20 nt, Sin Nombre virus
ggccaauuauaucacagggu

SEQ ID NO: 382499 - RNA, 13 nt, Sin Nombre virus
guauuaagucaua

SEQ ID NO: 382500 - RNA, 16 nt, Sin Nombre virus
guuaaguuguauuaag

SEQ ID NO: 382501 - RNA, 18 nt, Sin Nombre virus
guucucucuacugcucug

SEQ ID NO: 382502 - RNA, 20 nt, Sin Nombre virus
guucucucuacugcucuguu

SEQ ID NO: 382503 - RNA, 22 nt, Sin Nombre virus
guucucucuacugcucuguucu

SEQ ID NO: 382504 - RNA, 23 nt, Sin Nombre virus
guucucucuacugcucuguucuc

SEQ ID NO: 382505 - RNA, 17 nt, Sin Nombre virus
guuuauuguuaucuguu

SEQ ID NO: 382506 - RNA, 18 nt, Sin Nombre virus
uaagauuuauauacauag

SEQ ID NO: 382507 - RNA, 14 nt, Sin Nombre virus
uaaugcuaagucua

SEQ ID NO: 382508 - RNA, 14 nt, Sin Nombre virus
uacauagauuuauu

SEQ ID NO: 382509 - RNA, 21 nt, Sin Nombre virus
uaggguggguucaagggccaa

SEQ ID NO: 382510 - RNA, 15 nt, Sin Nombre virus
uaguauuaagucaua

SEQ ID NO: 382511 - RNA, 12 nt, Sin Nombre virus
uauaaccagggu

SEQ ID NO: 382512 - RNA, 14 nt, Sin Nombre virus
uauaaccaggguaa

SEQ ID NO: 382513 - RNA, 12 nt, Sin Nombre virus
uauauaaucuau

SEQ ID NO: 382514 - RNA, 22 nt, Sin Nombre virus
uaugugagcaagaguaugacaa

SEQ ID NO: 382515 - RNA, 16 nt, Sin Nombre virus
uauguucuuauaucaa

SEQ ID NO: 382516 - RNA, 14 nt, Sin Nombre virus
uauuccaaaccaug

SEQ ID NO: 382517 - RNA, 17 nt, Sin Nombre virus
uauuccaaaccaugacu

SEQ ID NO: 382518 - RNA, 12 nt, Sin Nombre virus
uauuuauacuaa

SEQ ID NO: 382519 - RNA, 11 nt, Sin Nombre virus
uccaaaccaug

SEQ ID NO: 382520 - RNA, 17 nt, Sin Nombre virus
ucuacugcucuguucuc

SEQ ID NO: 382521 - RNA, 21 nt, Sin Nombre virus
ucucucuacugcucuguucuc

SEQ ID NO: 382522 - RNA, 21 nt, Sin Nombre virus
ucuuuauuccaaaccaugacu

SEQ ID NO: 382523 - RNA, 13 nt, Sin Nombre virus
ugacuuguucucu

SEQ ID NO: 382524 - RNA, 12 nt, Sin Nombre virus
ugcucuguucuc

SEQ ID NO: 382525 - RNA, 22 nt, Sin Nombre virus
uuaacaccuauauaaucccauu

SEQ ID NO: 382526 - RNA, 14 nt, Sin Nombre virus
uuaaguuguauuaa

SEQ ID NO: 382527 - RNA, 14 nt, Sin Nombre virus
uuaguguuaaguca

SEQ ID NO: 382528 - RNA, 17 nt, Sin Nombre virus
uuaguuaagcuuauuaa

SEQ ID NO: 382529 - RNA, 12 nt, Sin Nombre virus
uuauauacauag

SEQ ID NO: 382530 - RNA, 22 nt, Sin Nombre virus
uuccaaaccaugacuuguucuc

SEQ ID NO: 382531 - RNA, 23 nt, Sin Nombre virus
uuccaaaccaugacuuguucucu

SEQ ID NO: 382532 - RNA, 17 nt, Sin Nombre virus
uucuuuauuccaaacca

SEQ ID NO: 382533 - RNA, 13 nt, Sin Nombre virus
uugauaguauuaa

SEQ ID NO: 382534 - RNA, 18 nt, Sin Nombre virus
uugauaguauuaagucau

SEQ ID NO: 382535 - RNA, 19 nt, Sin Nombre virus
uuguucucucuacugcucu

SEQ ID NO: 382536 - RNA, 15 nt, Sin Nombre virus
uuuuauacaaguauu

SEQ ID NO: 382537 - RNA, 16 nt, Sin Nombre virus
uuuuauuuuuauacaa

SEQ ID NO: 382538 - RNA, 22 nt, Sin Nombre virus
uuuucuuuauuccaaaccauga

SEQ ID NO: 382539 - RNA, 15 nt, Sindbis virus
aaaaacucgauguac

SEQ ID NO: 382540 - RNA, 12 nt, Sindbis virus
aaacucgaugua

SEQ ID NO: 382541 - RNA, 23 nt, Sindbis virus
aacacuaaaaacucgauguacuu

SEQ ID NO: 382542 - RNA, 14 nt, Sindbis virus
aagcguggugcaua

SEQ ID NO: 382543 - RNA, 16 nt, Sindbis virus
aagcguggugcauaau

SEQ ID NO: 382544 - RNA, 22 nt, Sindbis virus
aaugcugcgcaguguugccaca

SEQ ID NO: 382545 - RNA, 22 nt, Sindbis virus
acacuaaaaacucgauguacuu

SEQ ID NO: 382546 - RNA, 21 nt, Sindbis virus
acgccaaaaacucaauguauu

SEQ ID NO: 382547 - RNA, 20 nt, Sindbis virus
acuaaaaacucgauguacuu

SEQ ID NO: 382548 - RNA, 13 nt, Sindbis virus
acugaugugcaua

SEQ ID NO: 382549 - RNA, 14 nt, Sindbis virus
agcgcagugcauaa

SEQ ID NO: 382550 - RNA, 19 nt, Sindbis virus
agcguggugcauaaugcca

SEQ ID NO: 382551 - RNA, 16 nt, Sindbis virus
aggaacugaugugcau

SEQ ID NO: 382552 - RNA, 17 nt, Sindbis virus
aggaacugaugugcaua

SEQ ID NO: 382553 - RNA, 22 nt, Sindbis virus
aggaagcgcagugcauaaugcu

SEQ ID NO: 382554 - RNA, 22 nt, Sindbis virus
aggaagcguggugcauaaugcc

SEQ ID NO: 382555 - RNA, 12 nt, Sindbis virus
auaaccacuaua

SEQ ID NO: 382556 - RNA, 14 nt, Sindbis virus
auccgaccagcaaa

SEQ ID NO: 382557 - RNA, 22 nt, Sindbis virus
augccacgcagcgucugcauaa

SEQ ID NO: 382558 - RNA, 17 nt, Sindbis virus
caaaacucgauguacuu

SEQ ID NO: 382559 - RNA, 14 nt, Sindbis virus
caacacuaaaaacu

SEQ ID NO: 382560 - RNA, 19 nt, Sindbis virus
caauauagcaacacuaaaa

SEQ ID NO: 382561 - RNA, 17 nt, Sindbis virus
cacgcagcgucugcaua

SEQ ID NO: 382562 - RNA, 19 nt, Sindbis virus
cagcaaaacucgauguacu

SEQ ID NO: 382563 - RNA, 23 nt, Sindbis virus
cagcaaaacucgauguacuuccg

SEQ ID NO: 382564 - RNA, 11 nt, Sindbis virus
cagugcauaau

SEQ ID NO: 382565 - RNA, 18 nt, Sindbis virus
caucaggcugguacauua

SEQ ID NO: 382566 - RNA, 22 nt, Sindbis virus
ccagcaaaacucgauguacuuc

SEQ ID NO: 382567 - RNA, 20 nt, Sindbis virus
ccgaggaagcgcagugcaua

SEQ ID NO: 382568 - RNA, 21 nt, Sindbis virus
ccgaggaagcgcagugcauaa

SEQ ID NO: 382569 - RNA, 19 nt, Sindbis virus
cgaggaagcgcagugcaua

SEQ ID NO: 382570 - RNA, 13 nt, Sindbis virus
cgucugcauaacu

SEQ ID NO: 382571 - RNA, 13 nt, Sindbis virus
cguggugcauaau

SEQ ID NO: 382572 - RNA, 11 nt, Sindbis virus
cucgauguacu

SEQ ID NO: 382573 - RNA, 14 nt, Sindbis virus
cucgauguacuucc

SEQ ID NO: 382574 - RNA, 15 nt, Sindbis virus
cucgauguacuuccg

SEQ ID NO: 382575 - RNA, 15 nt, Sindbis virus
cugaugugcauaaug

SEQ ID NO: 382576 - RNA, 18 nt, Sindbis virus
cuuuuauuaaucaacaaa

SEQ ID NO: 382577 - RNA, 19 nt, Sindbis virus
cuuuuauuaaucaacaaaa

SEQ ID NO: 382578 - RNA, 18 nt, Sindbis virus
gaacugaugugcauaaug

SEQ ID NO: 382579 - RNA, 18 nt, Sindbis virus
gaggaacugaugugcaua

SEQ ID NO: 382580 - RNA, 19 nt, Sindbis virus
gaggaagcgcagugcauaa

SEQ ID NO: 382581 - RNA, 18 nt, Sindbis virus
gaggaagcguggugcaua

SEQ ID NO: 382582 - RNA, 19 nt, Sindbis virus
gaggaagcguggugcauaa

SEQ ID NO: 382583 - RNA, 16 nt, Sindbis virus
gcaaaacucgauguac

SEQ ID NO: 382584 - RNA, 13 nt, Sindbis virus
gcauaacuuuuau

SEQ ID NO: 382585 - RNA, 22 nt, Sindbis virus
gcaucaggcugguacauuagau

SEQ ID NO: 382586 - RNA, 15 nt, Sindbis virus
gcgcagugcauaaug

SEQ ID NO: 382587 - RNA, 15 nt, Sindbis virus
gcugcgcaguguugc

SEQ ID NO: 382588 - RNA, 14 nt, Sindbis virus
ggaacugaugugca

SEQ ID NO: 382589 - RNA, 16 nt, Sindbis virus
ggaagcguggugcaua

SEQ ID NO: 382590 - RNA, 15 nt, Sindbis virus
gugcauaaugcugcg

SEQ ID NO: 382591 - RNA, 18 nt, Sindbis virus
uauagcaacacuaaaaac

SEQ ID NO: 382592 - RNA, 19 nt, Sindbis virus
uaucuagcggacgccaaaa

SEQ ID NO: 382593 - RNA, 20 nt, Sindbis virus
uccgaggaacugaugugcau

SEQ ID NO: 382594 - RNA, 14 nt, Sindbis virus
aaaaacucaaugua

SEQ ID NO: 382595 - RNA, 20 nt, Sindbis virus
aaaaacucgauguacuuccg

SEQ ID NO: 382596 - RNA, 15 nt, Sindbis virus
aaaacucgauguacu

SEQ ID NO: 382597 - RNA, 16 nt, Sindbis virus
aaaacucgauguacuu

SEQ ID NO: 382598 - RNA, 16 nt, Sindbis virus
aaacucgauguacuuc

SEQ ID NO: 382599 - RNA, 12 nt, Sindbis virus
aacugaugugca

SEQ ID NO: 382600 - RNA, 15 nt, Sindbis virus
aagcguggugcauaa

SEQ ID NO: 382601 - RNA, 19 nt, Sindbis virus
aauauagcaacacuaaaaa

SEQ ID NO: 382602 - RNA, 22 nt, Sindbis virus
accagcaaaacucgauguacuu

SEQ ID NO: 382603 - RNA, 16 nt, Sindbis virus
acucgauguacuuccg

SEQ ID NO: 382604 - RNA, 17 nt, Sindbis virus
acucgauguacuuccga

SEQ ID NO: 382605 - RNA, 14 nt, Sindbis virus
acugaugugcauaa

SEQ ID NO: 382606 - RNA, 21 nt, Sindbis virus
acugaugugcauaaugcauca

SEQ ID NO: 382607 - RNA, 19 nt, Sindbis virus
agcaaaacucgauguacuu

SEQ ID NO: 382608 - RNA, 22 nt, Sindbis virus
agcaaaacucgauguacuuccg

SEQ ID NO: 382609 - RNA, 13 nt, Sindbis virus
agcgcagugcaua

SEQ ID NO: 382610 - RNA, 15 nt, Sindbis virus
agcgcagugcauaau

SEQ ID NO: 382611 - RNA, 22 nt, Sindbis virus
aggaacugaugugcauaaugca

SEQ ID NO: 382612 - RNA, 16 nt, Sindbis virus
aggaagcgcagugcau

SEQ ID NO: 382613 - RNA, 16 nt, Sindbis virus
agugcauaaugcugcg

SEQ ID NO: 382614 - RNA, 16 nt, Sindbis virus
auauagcaacacuaaa

SEQ ID NO: 382615 - RNA, 19 nt, Sindbis virus
augccacgcagcgucugca

SEQ ID NO: 382616 - RNA, 14 nt, Sindbis virus
cacuaaaaacucga

SEQ ID NO: 382617 - RNA, 19 nt, Sindbis virus
cacuauauuaaccauuuau

SEQ ID NO: 382618 - RNA, 14 nt, Sindbis virus
cagcgucugcauaa

SEQ ID NO: 382619 - RNA, 16 nt, Sindbis virus
caguguugccacauaa

SEQ ID NO: 382620 - RNA, 17 nt, Sindbis virus
cauaaccacuauauuaa

SEQ ID NO: 382621 - RNA, 23 nt, Sindbis virus
cauuuaucuagcggacgccaaaa

SEQ ID NO: 382622 - RNA, 14 nt, Sindbis virus
ccagcaaaacucga

SEQ ID NO: 382623 - RNA, 20 nt, Sindbis virus
ccgaggaacugaugugcaua

SEQ ID NO: 382624 - RNA, 21 nt, Sindbis virus
ccgaggaacugaugugcauaa

SEQ ID NO: 382625 - RNA, 23 nt, Sindbis virus
cgaccagcaaaacucgauguacu

SEQ ID NO: 382626 - RNA, 19 nt, Sindbis virus
cgaggaacugaugugcaua

SEQ ID NO: 382627 - RNA, 16 nt, Sindbis virus
cgcagcgucugcauaa

SEQ ID NO: 382628 - RNA, 12 nt, Sindbis virus
cgcagugcauaa

SEQ ID NO: 382629 - RNA, 12 nt, Sindbis virus
cguggugcauaa

SEQ ID NO: 382630 - RNA, 19 nt, Sindbis virus
cuagcggacgccaaaaacu

SEQ ID NO: 382631 - RNA, 17 nt, Sindbis virus
cugaggaagcguggugc

SEQ ID NO: 382632 - RNA, 20 nt, Sindbis virus
cugaggaagcguggugcaua

SEQ ID NO: 382633 - RNA, 23 nt, Sindbis virus
cugaggaagcguggugcauaaug

SEQ ID NO: 382634 - RNA, 14 nt, Sindbis virus
cugaugugcauaau

SEQ ID NO: 382635 - RNA, 15 nt, Sindbis virus
gaacugaugugcaua

SEQ ID NO: 382636 - RNA, 15 nt, Sindbis virus
gaagcguggugcaua

SEQ ID NO: 382637 - RNA, 21 nt, Sindbis virus
gaccgcuacgccccaaugauc

SEQ ID NO: 382638 - RNA, 19 nt, Sindbis virus
gaggaacugaugugcauaa

SEQ ID NO: 382639 - RNA, 18 nt, Sindbis virus
gaggaagcgcagugcaua

SEQ ID NO: 382640 - RNA, 15 nt, Sindbis virus
gcaaaacucgaugua

SEQ ID NO: 382641 - RNA, 22 nt, Sindbis virus
gcaacacuaaaaacucgaugua

SEQ ID NO: 382642 - RNA, 22 nt, Sindbis virus
ggaacugaugugcauaaugcau

SEQ ID NO: 382643 - RNA, 16 nt, Sindbis virus
ggaagcgcagugcaua

SEQ ID NO: 382644 - RNA, 19 nt, Sindbis virus
ggaagcguggugcauaaug

SEQ ID NO: 382645 - RNA, 23 nt, Sindbis virus
ggaagcguggugcauaaugccac

SEQ ID NO: 382646 - RNA, 14 nt, Sindbis virus
guacauuagauccc

SEQ ID NO: 382647 - RNA, 18 nt, Sindbis virus
uaaaaacucgauguacuu

SEQ ID NO: 382648 - RNA, 17 nt, Sindbis virus
uacgccccaaugauccg

SEQ ID NO: 382649 - RNA, 22 nt, Sindbis virus
uauagcaacacuaaaaacucga

SEQ ID NO: 382650 - RNA, 21 nt, Sindbis virus
uccgaggaacugaugugcaua

SEQ ID NO: 382651 - RNA, 20 nt, Sindbis virus
uccgaggaagcgcagugcau

SEQ ID NO: 382652 - RNA, 12 nt, Sindbis virus
ucgauguacuuc

SEQ ID NO: 382653 - RNA, 22 nt, Sindbis virus
ucugaggaagcguggugcauaa

SEQ ID NO: 382654 - RNA, 20 nt, Sindbis virus
ugaggaagcguggugcauaa

SEQ ID NO: 382655 - RNA, 17 nt, Sindbis virus
ugauccgaccagcaaaa

SEQ ID NO: 382656 - RNA, 13 nt, Sindbis virus
ugaugugcauaau

SEQ ID NO: 382657 - RNA, 21 nt, Sindbis virus
ugcauaaugcugcgcaguguu

SEQ ID NO: 382658 - RNA, 20 nt, Sindbis virus
ugccacgcagcgucugcaua

SEQ ID NO: 382659 - RNA, 15 nt, Sindbis virus
ugcgcaguguugcca

SEQ ID NO: 382660 - RNA, 15 nt, Sindbis virus
ugugcauaaugcauc

SEQ ID NO: 382661 - RNA, 22 nt, Sindbis virus
uuccgaggaacugaugugcaua

SEQ ID NO: 382662 - RNA, 23 nt, Sindbis virus
uucugaggaagcguggugcauaa

SEQ ID NO: 382663 - RNA, 22 nt, Sindbis virus
uuuaucuagcggacgccaaaaa

SEQ ID NO: 382664 - RNA, 22 nt, Sindbis virus
uccgaggaacugaugugcauaa

SEQ ID NO: 382665 - RNA, 21 nt, Sindbis virus
uccgaggaagcgcagugcaua

SEQ ID NO: 382666 - RNA, 22 nt, Sindbis virus
uccgaggaagcgcagugcauaa

SEQ ID NO: 382667 - RNA, 11 nt, Sindbis virus
ucgauguacuu

SEQ ID NO: 382668 - RNA, 14 nt, Sindbis virus
ucgauguacuuccg

SEQ ID NO: 382669 - RNA, 19 nt, Sindbis virus
ucuagcggacgccaaaaac

SEQ ID NO: 382670 - RNA, 23 nt, Sindbis virus
ucuagcggacgccaaaaacucaa

SEQ ID NO: 382671 - RNA, 21 nt, Sindbis virus
ucugaggaagcguggugcaua

SEQ ID NO: 382672 - RNA, 16 nt, Sindbis virus
ugauccgaccagcaaa

SEQ ID NO: 382673 - RNA, 12 nt, Sindbis virus
ugaugugcauaa

SEQ ID NO: 382674 - RNA, 19 nt, Sindbis virus
ugaugugcauaaugcauca

SEQ ID NO: 382675 - RNA, 22 nt, Sindbis virus
ugcauaaugccacgcagcgucu

SEQ ID NO: 382676 - RNA, 20 nt, Sindbis virus
ugcaucaggcugguacauua

SEQ ID NO: 382677 - RNA, 13 nt, Sindbis virus
ugccacauaacca

SEQ ID NO: 382678 - RNA, 21 nt, Sindbis virus
ugccacgcagcgucugcauaa

SEQ ID NO: 382679 - RNA, 16 nt, Sindbis virus
uggugcauaaugccac

SEQ ID NO: 382680 - RNA, 19 nt, Sindbis virus
uuaucuagcggacgccaaa

SEQ ID NO: 382681 - RNA, 22 nt, Sindbis virus
uuccgaggaagcgcagugcaua

SEQ ID NO: 382682 - RNA, 15 nt, Tobacco etch virus
agcuauucacagugg

SEQ ID NO: 382683 - RNA, 23 nt, Tobacco etch virus
auauauaugaauagcuauucaca

SEQ ID NO: 382684 - RNA, 21 nt, Tobacco etch virus
auauaugaauagcuauucaca

SEQ ID NO: 382685 - RNA, 12 nt, Tobacco etch virus
cucauuacuuag

SEQ ID NO: 382686 - RNA, 19 nt, Tobacco etch virus
gaauagcuauucacagugg

SEQ ID NO: 382687 - RNA, 22 nt, Tobacco etch virus
uaauaugucuuauuagucucau

SEQ ID NO: 382688 - RNA, 20 nt, Tobacco etch virus
aauaugucuuauuagucuca

SEQ ID NO: 382689 - RNA, 18 nt, Tobacco etch virus
aggcgaacgacaaaguga

SEQ ID NO: 382690 - RNA, 16 nt, Tobacco etch virus
cuaauucuccuaugua

SEQ ID NO: 382691 - RNA, 17 nt, Tobacco etch virus
cuaauucuccuauguag

SEQ ID NO: 382692 - RNA, 14 nt, Tobacco etch virus
gaacgacaaaguga

SEQ ID NO: 382693 - RNA, 18 nt, Tobacco etch virus
gcuuuuaagcuuauugua

SEQ ID NO: 382694 - RNA, 20 nt, Tobacco etch virus
ucuuguguugaauaguaucu

SEQ ID NO: 382695 - RNA, 12 nt, Tobacco etch virus
ugaauagcuauu

SEQ ID NO: 382696 - RNA, 23 nt, Tobacco etch virus
ugcuuuccgcuuuuaagcuuauu

SEQ ID NO: 382697 - RNA, 14 nt, Tula virus
aaaucaaacacaua

SEQ ID NO: 382698 - RNA, 11 nt, Tula virus
aacuaccacuu

SEQ ID NO: 382699 - RNA, 13 nt, Tula virus
aaugcauauguac

SEQ ID NO: 382700 - RNA, 14 nt, Tula virus
aauucacacauaca

SEQ ID NO: 382701 - RNA, 19 nt, Tula virus
acaaaauucacaccaaugc

SEQ ID NO: 382702 - RNA, 18 nt, Tula virus
acaauucacacauacacu

SEQ ID NO: 382703 - RNA, 21 nt, Tula virus
acacacacgcacauccaauga

SEQ ID NO: 382704 - RNA, 22 nt, Tula virus
acacacacgcacauccaaugau

SEQ ID NO: 382705 - RNA, 19 nt, Tula virus
acaguauguguuuauauca

SEQ ID NO: 382706 - RNA, 20 nt, Tula virus
acaguauguguuuauaucaa

SEQ ID NO: 382707 - RNA, 17 nt, Tula virus
acucuaccucauaucga

SEQ ID NO: 382708 - RNA, 17 nt, Tula virus
acugagcuaucaucucu

SEQ ID NO: 382709 - RNA, 23 nt, Tula virus
acugauuggguugggugggucaa

SEQ ID NO: 382710 - RNA, 15 nt, Tula virus
acuuuacuacuacuc

SEQ ID NO: 382711 - RNA, 18 nt, Tula virus
acuuuacuacuacucuac

SEQ ID NO: 382712 - RNA, 12 nt, Tula virus
agcauacuacua

SEQ ID NO: 382713 - RNA, 17 nt, Tula virus
agguaaguuuacuaauc

SEQ ID NO: 382714 - RNA, 20 nt, Tula virus
auauaacuuuuuauuauucc

SEQ ID NO: 382715 - RNA, 17 nt, Tula virus
auauuacuaaucuccua

SEQ ID NO: 382716 - RNA, 20 nt, Tula virus
aucuccuauauuaacaguau

SEQ ID NO: 382717 - RNA, 16 nt, Tula virus
augcaugauuacaauu

SEQ ID NO: 382718 - RNA, 23 nt, Tula virus
augucacuaguguaaguucauua

SEQ ID NO: 382719 - RNA, 14 nt, Tula virus
auuacaauucacac

SEQ ID NO: 382720 - RNA, 19 nt, Tula virus
auucacaccaaugcaugau

SEQ ID NO: 382721 - RNA, 15 nt, Tula virus
auugcacuacagcuu

SEQ ID NO: 382722 - RNA, 15 nt, Tula virus
caaacugaacuguau

SEQ ID NO: 382723 - RNA, 17 nt, Tula virus
caaaucaaacacauaua

SEQ ID NO: 382724 - RNA, 12 nt, Tula virus
caauauaacuuu

SEQ ID NO: 382725 - RNA, 16 nt, Tula virus
caaugcaugauuacaa

SEQ ID NO: 382726 - RNA, 15 nt, Tula virus
cacacauacacugau

SEQ ID NO: 382727 - RNA, 16 nt, Tula virus
cacaccaaugcaugau

SEQ ID NO: 382728 - RNA, 19 nt, Tula virus
cacauccaaugauaugaau

SEQ ID NO: 382729 - RNA, 12 nt, Tula virus
cacuuuacuacu

SEQ ID NO: 382730 - RNA, 13 nt, Tula virus
cacuuuacuacua

SEQ ID NO: 382731 - RNA, 16 nt, Tula virus
cagcuuggucauugac

SEQ ID NO: 382732 - RNA, 21 nt, Tula virus
caugauuacaauucacacaua

SEQ ID NO: 382733 - RNA, 18 nt, Tula virus
ccaaugcaugauuacaau

SEQ ID NO: 382734 - RNA, 21 nt, Tula virus
cuacagcuuggucauugacca

SEQ ID NO: 382735 - RNA, 22 nt, Tula virus
cuacuaaguugauuauugcacu

SEQ ID NO: 382736 - RNA, 16 nt, Tula virus
cuacuacucuaccuca

SEQ ID NO: 382737 - RNA, 14 nt, Tula virus
cuacucuaccucau

SEQ ID NO: 382738 - RNA, 12 nt, Tula virus
cucauacuacuu

SEQ ID NO: 382739 - RNA, 21 nt, Tula virus
cuguauagcccucauacuacu

SEQ ID NO: 382740 - RNA, 18 nt, Tula virus
gaguacuauuuguugcuc

SEQ ID NO: 382741 - RNA, 15 nt, Tula virus
gauuacaauucacac

SEQ ID NO: 382742 - RNA, 13 nt, Tula virus
ggagcauacuacu

SEQ ID NO: 382743 - RNA, 16 nt, Tula virus
guaagguagcuacuaa

SEQ ID NO: 382744 - RNA, 14 nt, Tula virus
guacuuauaccuua

SEQ ID NO: 382745 - RNA, 20 nt, Tula virus
guuccugcggagcauacuac

SEQ ID NO: 382746 - RNA, 15 nt, Tula virus
guugauuauugcacu

SEQ ID NO: 382747 - RNA, 17 nt, Tula virus
guugcucuuuucucgga

SEQ ID NO: 382748 - RNA, 17 nt, Tula virus
uaaucguaagguagcua

SEQ ID NO: 382749 - RNA, 18 nt, Tula virus
uacaauucacacauacac

SEQ ID NO: 382750 - RNA, 17 nt, Tula virus
uaccacuuuacuacuac

SEQ ID NO: 382751 - RNA, 15 nt, Tula virus
uacuaaucuccuaua

SEQ ID NO: 382752 - RNA, 16 nt, Tula virus
uacuauuuguugcucu

SEQ ID NO: 382753 - RNA, 20 nt, Tula virus
uauagcccucauacuacuuc

SEQ ID NO: 382754 - RNA, 18 nt, Tula virus
uaucaaacugaacuguau

SEQ ID NO: 382755 - RNA, 19 nt, Tula virus
uaucaaacugaacuguaua

SEQ ID NO: 382756 - RNA, 16 nt, Tula virus
uaucuuauauuacuaa

SEQ ID NO: 382757 - RNA, 16 nt, Tula virus
uccaaaaaaaacuacc

SEQ ID NO: 382758 - RNA, 14 nt, Tula virus
ucuauuuaaacauu

SEQ ID NO: 382759 - RNA, 17 nt, Tula virus
ucuuuucucggagcaua

SEQ ID NO: 382760 - RNA, 15 nt, Tula virus
ugauuacaauucaca

SEQ ID NO: 382761 - RNA, 21 nt, Tula virus
ugauuacaauucacacauaca

SEQ ID NO: 382762 - RNA, 17 nt, Tula virus
ugauuauugcacuacag

SEQ ID NO: 382763 - RNA, 23 nt, Tula virus
ugcauacacacacgcacauccaa

SEQ ID NO: 382764 - RNA, 21 nt, Tula virus
ugcauauguacuuauaccuua

SEQ ID NO: 382765 - RNA, 22 nt, Tula virus
ugcaugauuacaauucacacau

SEQ ID NO: 382766 - RNA, 19 nt, Tula virus
uguaguuccugcauacaca

SEQ ID NO: 382767 - RNA, 23 nt, Tula virus
uguuccugcggagcauacuacua

SEQ ID NO: 382768 - RNA, 19 nt, Tula virus
uuaaugcauauguacuuau

SEQ ID NO: 382769 - RNA, 13 nt, Tula virus
uuacaauucacac

SEQ ID NO: 382770 - RNA, 19 nt, Tula virus
uuacaauucacacauacac

SEQ ID NO: 382771 - RNA, 17 nt, Tula virus
uuacuaaucuccuauau

SEQ ID NO: 382772 - RNA, 16 nt, Tula virus
uucacacauacacuga

SEQ ID NO: 382773 - RNA, 17 nt, Tula virus
uucacaccaaugcauga

SEQ ID NO: 382774 - RNA, 21 nt, Tula virus
uuccugcggagcauacuacua

SEQ ID NO: 382775 - RNA, 20 nt, Tula virus
uugauuauugcacuacagcu

SEQ ID NO: 382776 - RNA, 16 nt, Tula virus
uuuacuacuacucuac

SEQ ID NO: 382777 - RNA, 17 nt, Tula virus
uuucucggagcauacua

SEQ ID NO: 382778 - RNA, 22 nt, Tula virus
aaaaacuaccacuuuacuacua

SEQ ID NO: 382779 - RNA, 13 nt, Tula virus
aaaucaaacacau

SEQ ID NO: 382780 - RNA, 22 nt, Tula virus
aagguagcuacuaaguugauua

SEQ ID NO: 382781 - RNA, 23 nt, Tula virus
aaugaguacuauuuguugcucuu

SEQ ID NO: 382782 - RNA, 12 nt, Tula virus
aauucacacaua

SEQ ID NO: 382783 - RNA, 13 nt, Tula virus
acaaaauucacac

SEQ ID NO: 382784 - RNA, 20 nt, Tula virus
acaaaauucacaccaaugca

SEQ ID NO: 382785 - RNA, 22 nt, Tula virus
acaaaauucacaccaaugcaug

SEQ ID NO: 382786 - RNA, 19 nt, Tula virus
acacacgcacauccaauga

SEQ ID NO: 382787 - RNA, 16 nt, Tula virus
acgcacauccaaugau

SEQ ID NO: 382788 - RNA, 15 nt, Tula virus
acuaccacuuuacua

SEQ ID NO: 382789 - RNA, 14 nt, Tula virus
acuacucuaccuca

SEQ ID NO: 382790 - RNA, 16 nt, Tula virus
acuacucuaccucaua

SEQ ID NO: 382791 - RNA, 14 nt, Tula virus
acuauuuguugcuc

SEQ ID NO: 382792 - RNA, 16 nt, Tula virus
acucuaccucauaucg

SEQ ID NO: 382793 - RNA, 14 nt, Tula virus
acuuauaccuuaua

SEQ ID NO: 382794 - RNA, 12 nt, Tula virus
acuuuacuacua

SEQ ID NO: 382795 - RNA, 21 nt, Tula virus
acuuuacuacuacucuaccuc

SEQ ID NO: 382796 - RNA, 19 nt, Tula virus
aguacuauuuguugcucuu

SEQ ID NO: 382797 - RNA, 14 nt, Tula virus
auaacuuuuuauua

SEQ ID NO: 382798 - RNA, 19 nt, Tula virus
auagcccucauacuacuuc

SEQ ID NO: 382799 - RNA, 15 nt, Tula virus
auaucaaacugaacu

SEQ ID NO: 382800 - RNA, 19 nt, Tula virus
auaucaaacugaacuguau

SEQ ID NO: 382801 - RNA, 16 nt, Tula virus
aucuuauauuacuaau

SEQ ID NO: 382802 - RNA, 19 nt, Tula virus
aucuuauauuacuaaucuc

SEQ ID NO: 382803 - RNA, 19 nt, Tula virus
augaguacuauuuguugcu

SEQ ID NO: 382804 - RNA, 20 nt, Tula virus
augaguacuauuuguugcuc

SEQ ID NO: 382805 - RNA, 12 nt, Tula virus
augauuacaauu

SEQ ID NO: 382806 - RNA, 22 nt, Tula virus
augauuacaauucacacauaca

SEQ ID NO: 382807 - RNA, 21 nt, Tula virus
augcaugauuacaauucacac

SEQ ID NO: 382808 - RNA, 18 nt, Tula virus
auguacuuauaccuuaua

SEQ ID NO: 382809 - RNA, 20 nt, Tula virus
auuccuuaaugcauauguac

SEQ ID NO: 382810 - RNA, 20 nt, Tula virus
auugcacuacagcuugguca

SEQ ID NO: 382811 - RNA, 15 nt, Tula virus
caaaauucacaccaa

SEQ ID NO: 382812 - RNA, 17 nt, Tula virus
cacaaaauucacaccaa

SEQ ID NO: 382813 - RNA, 22 nt, Tula virus
cacaaaauucacaccaaugcau

SEQ ID NO: 382814 - RNA, 17 nt, Tula virus
cacacacgcacauccaa

SEQ ID NO: 382815 - RNA, 15 nt, Tula virus
cacucagguaaucug

SEQ ID NO: 382816 - RNA, 17 nt, Tula virus
cacucagguaaucugcu

SEQ ID NO: 382817 - RNA, 21 nt, Tula virus
cauacacacacgcacauccaa

SEQ ID NO: 382818 - RNA, 23 nt, Tula virus
cauaucgaucauuccuggacuuu

SEQ ID NO: 382819 - RNA, 16 nt, Tula virus
cgaucauuccuggacu

SEQ ID NO: 382820 - RNA, 21 nt, Tula virus
cuacuaaguugauuauugcac

SEQ ID NO: 382821 - RNA, 15 nt, Tula virus
cuauauuaacaguau

SEQ ID NO: 382822 - RNA, 13 nt, Tula virus
cuauuuguugcuc

SEQ ID NO: 382823 - RNA, 17 nt, Tula virus
cucggagcauacuacua

SEQ ID NO: 382824 - RNA, 12 nt, Tula virus
cugcauacacac

SEQ ID NO: 382825 - RNA, 19 nt, Tula virus
cuuuucucggagcauacua

SEQ ID NO: 382826 - RNA, 22 nt, Tula virus
cuuuucucggagcauacuacua

SEQ ID NO: 382827 - RNA, 14 nt, Tula virus
gagcuaucaucucu

SEQ ID NO: 382828 - RNA, 18 nt, Tula virus
gcaugauuacaauucaca

SEQ ID NO: 382829 - RNA, 23 nt, Tula virus
guacuauuuguugcucuuuucuc

SEQ ID NO: 382830 - RNA, 20 nt, Tula virus
guaguuccugcauacacaca

SEQ ID NO: 382831 - RNA, 18 nt, Tula virus
guauagcccucauacuac

SEQ ID NO: 382832 - RNA, 19 nt, Tula virus
guauagcccucauacuacu

SEQ ID NO: 382833 - RNA, 17 nt, Tula virus
gugaaacugagcuauca

SEQ ID NO: 382834 - RNA, 12 nt, Tula virus
uacaauucacac

SEQ ID NO: 382835 - RNA, 14 nt, Tula virus
uacuauuuguugcu

SEQ ID NO: 382836 - RNA, 20 nt, Tula virus
uacuauuuguugcucuuuuc

SEQ ID NO: 382837 - RNA, 14 nt, Tula virus
uacucuaccucaua

SEQ ID NO: 382838 - RNA, 14 nt, Tula virus
uacuuauaccuuau

SEQ ID NO: 382839 - RNA, 15 nt, Tula virus
uagguaaguuuacua

SEQ ID NO: 382840 - RNA, 18 nt, Tula virus
uauguacuuauaccuuau

SEQ ID NO: 382841 - RNA, 14 nt, Tula virus
ucaaacacauauaa

SEQ ID NO: 382842 - RNA, 16 nt, Tula virus
ucaaaucaaacacaua

SEQ ID NO: 382843 - RNA, 18 nt, Tula virus
ucaaaucaaacacauaua

SEQ ID NO: 382844 - RNA, 14 nt, Tula virus
ucacacauacacug

SEQ ID NO: 382845 - RNA, 16 nt, Tula virus
ucauaucgaucauucc

SEQ ID NO: 382846 - RNA, 17 nt, Tula virus
uccaaaaaaaacuacca

SEQ ID NO: 382847 - RNA, 14 nt, Tula virus
ucugcugcucugua

SEQ ID NO: 382848 - RNA, 13 nt, Tula virus
ugaaacugagcua

SEQ ID NO: 382849 - RNA, 15 nt, Tula virus
ugagcuaucaucucu

SEQ ID NO: 382850 - RNA, 22 nt, Tula virus
ugaguacuauuuguugcucuuu

SEQ ID NO: 382851 - RNA, 13 nt, Tula virus
ugauuauugcacu

SEQ ID NO: 382852 - RNA, 13 nt, Tula virus
ugcaugauuacaa

SEQ ID NO: 382853 - RNA, 17 nt, Tula virus
ugcucuguauguuuauu

SEQ ID NO: 382854 - RNA, 18 nt, Tula virus
ugggcacaaaauucacac

SEQ ID NO: 382855 - RNA, 22 nt, Tula virus
ugggucaaaucaaacacauaua

SEQ ID NO: 382856 - RNA, 17 nt, Tula virus
uuacaauucacacauac

SEQ ID NO: 382857 - RNA, 15 nt, Tula virus
uuacuacuacucuac

SEQ ID NO: 382858 - RNA, 23 nt, Tula virus
uuccugcauacacacacgcacau

SEQ ID NO: 382859 - RNA, 15 nt, Tula virus
uucucggagcauacu

SEQ ID NO: 382860 - RNA, 12 nt, Tula virus
uucuucaucucu

SEQ ID NO: 382861 - RNA, 14 nt, Tula virus
uugaccacucaggu

SEQ ID NO: 382862 - RNA, 19 nt, Tula virus
uugggcacaaaauucacac

SEQ ID NO: 382863 - RNA, 16 nt, Tula virus
uuguugcucuuuucuc

SEQ ID NO: 382864 - RNA, 20 nt, Tula virus
uuucucggagcauacuacua

SEQ ID NO: 382865 - RNA, 13 nt, Tula virus
uuucuucaucucu

SEQ ID NO: 382866 - RNA, 22 nt, Tula virus
uuuguauuaugucacuagugua

SEQ ID NO: 382867 - RNA, 17 nt, Uukuniemi virus
aaaacaccucagaucaa

SEQ ID NO: 382868 - RNA, 23 nt, Uukuniemi virus
aaaggcauugugcaucaugcaca

SEQ ID NO: 382869 - RNA, 16 nt, Uukuniemi virus
aaauuaaaacucucua

SEQ ID NO: 382870 - RNA, 14 nt, Uukuniemi virus
aacaugaaguucau

SEQ ID NO: 382871 - RNA, 15 nt, Uukuniemi virus
aacgcuuagguucau

SEQ ID NO: 382872 - RNA, 13 nt, Uukuniemi virus
aacuccagcagau

SEQ ID NO: 382873 - RNA, 17 nt, Uukuniemi virus
aagcccuuuuagagucc

SEQ ID NO: 382874 - RNA, 14 nt, Uukuniemi virus
aaggugauccagug

SEQ ID NO: 382875 - RNA, 22 nt, Uukuniemi virus
aaggugauccagugcuccucaa

SEQ ID NO: 382876 - RNA, 14 nt, Uukuniemi virus
aaguucaugugcuu

SEQ ID NO: 382877 - RNA, 14 nt, Uukuniemi virus
acaccucagaucaa

SEQ ID NO: 382878 - RNA, 13 nt, Uukuniemi virus
accucagaucaau

SEQ ID NO: 382879 - RNA, 16 nt, Uukuniemi virus
accucagaucaaugau

SEQ ID NO: 382880 - RNA, 11 nt, Uukuniemi virus
acuacagugau

SEQ ID NO: 382881 - RNA, 12 nt, Uukuniemi virus
acuacagugauc

SEQ ID NO: 382882 - RNA, 14 nt, Uukuniemi virus
acuacagugauccu

SEQ ID NO: 382883 - RNA, 18 nt, Uukuniemi virus
acucucaaaggugaucca

SEQ ID NO: 382884 - RNA, 22 nt, Uukuniemi virus
ggugcuugcucaauugcaguga

SEQ ID NO: 382885 - RNA, 20 nt, Uukuniemi virus
guccagcagucgcucccuag

SEQ ID NO: 382886 - RNA, 15 nt, Uukuniemi virus
guucaugugcuucuu

SEQ ID NO: 382887 - RNA, 17 nt, Uukuniemi virus
guugcaaggugcuugcu

SEQ ID NO: 382888 - RNA, 16 nt, Uukuniemi virus
uaccccuuucccuuau

SEQ ID NO: 382889 - RNA, 19 nt, Uukuniemi virus
uaucucucucucuuugaau

SEQ ID NO: 382890 - RNA, 15 nt, Uukuniemi virus
uauucacuuugccau

SEQ ID NO: 382891 - RNA, 21 nt, Uukuniemi virus
ucaaauuccaaaacaccucag

SEQ ID NO: 382892 - RNA, 13 nt, Uukuniemi virus
ucaauugcaguga

SEQ ID NO: 382893 - RNA, 17 nt, Uukuniemi virus
ucauaguugcaaggugc

SEQ ID NO: 382894 - RNA, 21 nt, Uukuniemi virus
ucaugugcuucuucuucaucc

SEQ ID NO: 382895 - RNA, 17 nt, Uukuniemi virus
uccagggugguccuuag

SEQ ID NO: 382896 - RNA, 23 nt, Uukuniemi virus
uccagugcuccucaagguugacu

SEQ ID NO: 382897 - RNA, 13 nt, Uukuniemi virus
uccuuggccucca

SEQ ID NO: 382898 - RNA, 17 nt, Uukuniemi virus
uccuuggugaauguggu

SEQ ID NO: 382899 - RNA, 22 nt, Uukuniemi virus
ucuaaaagggcuucggcccaaa

SEQ ID NO: 382900 - RNA, 16 nt, Uukuniemi virus
ucucuuugaauguauc

SEQ ID NO: 382901 - RNA, 16 nt, Uukuniemi virus
ucugaggacaguugca

SEQ ID NO: 382902 - RNA, 14 nt, Uukuniemi virus
ucugcccagugacc

SEQ ID NO: 382903 - RNA, 18 nt, Uukuniemi virus
ugacugggagucaggaag

SEQ ID NO: 382904 - RNA, 24 nt, Uukuniemi virus
ugauccagugcuccucaagguuga

SEQ ID NO: 382905 - RNA, 21 nt, Uukuniemi virus
ugaucugaggacaguugcagc

SEQ ID NO: 382906 - RNA, 22 nt, Uukuniemi virus
ugcaaggugcuugcucaauugc

SEQ ID NO: 382907 - RNA, 21 nt, Uukuniemi virus
ugcuggcauugcuuuuacuau

SEQ ID NO: 382908 - RNA, 15 nt, Uukuniemi virus
ugcuuuuacuaucuc

SEQ ID NO: 382909 - RNA, 17 nt, Uukuniemi virus
uggaugcuggcauugcu

SEQ ID NO: 382910 - RNA, 21 nt, Uukuniemi virus
uggcauugcuuuuacuaucuc

SEQ ID NO: 382911 - RNA, 14 nt, Uukuniemi virus
ugggagucaggaag

SEQ ID NO: 382912 - RNA, 21 nt, Uukuniemi virus
ugguccuggagaacuccagca

SEQ ID NO: 382913 - RNA, 14 nt, Uukuniemi virus
uggugaauguggug

SEQ ID NO: 382914 - RNA, 19 nt, Uukuniemi virus
uucauaguugcaaggugcu

SEQ ID NO: 382915 - RNA, 19 nt, Uukuniemi virus
uuccgcggugcuucacguu

SEQ ID NO: 382916 - RNA, 14 nt, Uukuniemi virus
uuccguccaccagc

SEQ ID NO: 382917 - RNA, 14 nt, Uukuniemi virus
uuccuuuacuucca

SEQ ID NO: 382918 - RNA, 13 nt, Uukuniemi virus
uucucugcaaugg

SEQ ID NO: 382919 - RNA, 14 nt, Uukuniemi virus
uucugcccagugac

SEQ ID NO: 382920 - RNA, 18 nt, Uukuniemi virus
uucugcccagugaccuga

SEQ ID NO: 382921 - RNA, 14 nt, Uukuniemi virus
uucuuccgaucuga

SEQ ID NO: 382922 - RNA, 19 nt, Uukuniemi virus
uuggguuggaugcuggcau

SEQ ID NO: 382923 - RNA, 15 nt, Uukuniemi virus
uuuaauucggccaaa

SEQ ID NO: 382924 - RNA, 14 nt, Uukuniemi virus
uuucucugcaaugg

SEQ ID NO: 382925 - RNA, 16 nt, Uukuniemi virus
aaacaccucagaucaa

SEQ ID NO: 382926 - RNA, 15 nt, Uukuniemi virus
aaaggugauccagug

SEQ ID NO: 382927 - RNA, 20 nt, Uukuniemi virus
aaaggugauccagugcuccu

SEQ ID NO: 382928 - RNA, 23 nt, Uukuniemi virus
aacaugaaguucaugugcuucuu

SEQ ID NO: 382929 - RNA, 12 nt, Uukuniemi virus
aacuacagugau

SEQ ID NO: 382930 - RNA, 16 nt, Uukuniemi virus
aacuacagugauccua

SEQ ID NO: 382931 - RNA, 20 nt, Uukuniemi virus
aacucucuaauuggacucua

SEQ ID NO: 382932 - RNA, 15 nt, Uukuniemi virus
aaggugcuugcucaa

SEQ ID NO: 382933 - RNA, 23 nt, Uukuniemi virus
aaggugcuugcucaauugcagug

SEQ ID NO: 382934 - RNA, 16 nt, Uukuniemi virus
aaucaaauuccaaaac

SEQ ID NO: 382935 - RNA, 23 nt, Uukuniemi virus
aaucaaauuccaaaacaccucag

SEQ ID NO: 382936 - RNA, 16 nt, Uukuniemi virus
aauccuuggugaaugu

SEQ ID NO: 382937 - RNA, 23 nt, Uukuniemi virus
aauguaucuuccuuuacuuccau

SEQ ID NO: 382938 - RNA, 14 nt, Uukuniemi virus
aauugcagugaaga

SEQ ID NO: 382939 - RNA, 13 nt, Uukuniemi virus
acagauccuucac

SEQ ID NO: 382940 - RNA, 13 nt, Uukuniemi virus
acaugaaguucau

SEQ ID NO: 382941 - RNA, 21 nt, Uukuniemi virus
acaugaaguucaugugcuucu

SEQ ID NO: 382942 - RNA, 17 nt, Uukuniemi virus
acggcuuuauucacuuu

SEQ ID NO: 382943 - RNA, 22 nt, Uukuniemi virus
acucucaaaggugauccagugc

SEQ ID NO: 382944 - RNA, 16 nt, Uukuniemi virus
agaaccuuuucucugc

SEQ ID NO: 382945 - RNA, 19 nt, Uukuniemi virus
agaaccuuuucucugcaau

SEQ ID NO: 382946 - RNA, 14 nt, Uukuniemi virus
agaauguggagaag

SEQ ID NO: 382947 - RNA, 19 nt, Uukuniemi virus
agaguuggauggacaguaa

SEQ ID NO: 382948 - RNA, 19 nt, Uukuniemi virus
agcccuuuuagaguccaau

SEQ ID NO: 382949 - RNA, 15 nt, Uukuniemi virus
agcuugccagaccag

SEQ ID NO: 382950 - RNA, 22 nt, Uukuniemi virus
aggaaggagcuugccagaccag

SEQ ID NO: 382951 - RNA, 19 nt, Uukuniemi virus
aggcauugugcaucaugca

SEQ ID NO: 382952 - RNA, 20 nt, Uukuniemi virus
agggagggucucaucgauca

SEQ ID NO: 382953 - RNA, 14 nt, Uukuniemi virus
aggugauccagugc

SEQ ID NO: 382954 - RNA, 18 nt, Uukuniemi virus
aggugauccagugcuccu

SEQ ID NO: 382955 - RNA, 22 nt, Uukuniemi virus
aggugcuugcucaauugcagug

SEQ ID NO: 382956 - RNA, 19 nt, Uukuniemi virus
agguugacuagaguuggau

SEQ ID NO: 382957 - RNA, 22 nt, Uukuniemi virus
agucaggaaggagcuugccaga

SEQ ID NO: 382958 - RNA, 22 nt, Uukuniemi virus
agucauuggcauccaagaucuc

SEQ ID NO: 382959 - RNA, 18 nt, Uukuniemi virus
aguccaauuagagaguuu

SEQ ID NO: 382960 - RNA, 22 nt, Uukuniemi virus
agucgcucccuagcacucucaa

SEQ ID NO: 382961 - RNA, 22 nt, Uukuniemi virus
agugauccuacgacuggccaau

SEQ ID NO: 382962 - RNA, 16 nt, Uukuniemi virus
auccagugcuccucaa

SEQ ID NO: 382963 - RNA, 23 nt, Uukuniemi virus
auccuuggugaauguggugucca

SEQ ID NO: 382964 - RNA, 16 nt, Uukuniemi virus
aucuccuuggccucca

SEQ ID NO: 382965 - RNA, 17 nt, Uukuniemi virus
aucuuccuuuacuucca

SEQ ID NO: 382966 - RNA, 14 nt, Uukuniemi virus
auuccaaaacaccu

SEQ ID NO: 382967 - RNA, 15 nt, Uukuniemi virus
auucugcccagugac

SEQ ID NO: 382968 - RNA, 15 nt, Uukuniemi virus
auuggcauccaagau

SEQ ID NO: 382969 - RNA, 16 nt, Uukuniemi virus
auuuaauucggccaaa

SEQ ID NO: 382970 - RNA, 14 nt, Uukuniemi virus
auuuccguccacca

SEQ ID NO: 382971 - RNA, 14 nt, Uukuniemi virus
auuugauuuaauuc

SEQ ID NO: 382972 - RNA, 21 nt, Uukuniemi virus
caaaacaccucagaucaauga

SEQ ID NO: 382973 - RNA, 16 nt, Uukuniemi virus
caaacaugaaguucau

SEQ ID NO: 382974 - RNA, 21 nt, Uukuniemi virus
caaacaugaaguucaugugcu

SEQ ID NO: 382975 - RNA, 18 nt, Uukuniemi virus
caaacuacagugauccua

SEQ ID NO: 382976 - RNA, 16 nt, Uukuniemi virus
caaaggugauccagug

SEQ ID NO: 382977 - RNA, 17 nt, Uukuniemi virus
caaaggugauccagugc

SEQ ID NO: 382978 - RNA, 22 nt, Uukuniemi virus
caaaggugauccagugcuccuc

SEQ ID NO: 382979 - RNA, 14 nt, Uukuniemi virus
caaggugcuugcuc

SEQ ID NO: 382980 - RNA, 21 nt, Uukuniemi virus
caauccuuggugaauguggug

SEQ ID NO: 382981 - RNA, 14 nt, Uukuniemi virus
caaugaucugagga

SEQ ID NO: 382982 - RNA, 14 nt, Uukuniemi virus
caauugcagugaag

SEQ ID NO: 382983 - RNA, 20 nt, Uukuniemi virus
cacagauccuucaccagauu

SEQ ID NO: 382984 - RNA, 20 nt, Uukuniemi virus
caccagcuugaagcucagca

SEQ ID NO: 382985 - RNA, 15 nt, Uukuniemi virus
cacucucaaagguga

SEQ ID NO: 382986 - RNA, 19 nt, Uukuniemi virus
cacucucaaaggugaucca

SEQ ID NO: 382987 - RNA, 19 nt, Uukuniemi virus
cagagcagagucauuggca

SEQ ID NO: 382988 - RNA, 21 nt, Uukuniemi virus
cagagucauuggcauccaaga

SEQ ID NO: 382989 - RNA, 17 nt, Uukuniemi virus
cagauucugcccaguga

SEQ ID NO: 382990 - RNA, 18 nt, Uukuniemi virus
cagauucugcccagugac

SEQ ID NO: 382991 - RNA, 19 nt, Uukuniemi virus
cagauucugcccagugacc

SEQ ID NO: 382992 - RNA, 21 nt, Uukuniemi virus
cagcaaaggcauugugcauca

SEQ ID NO: 382993 - RNA, 17 nt, Uukuniemi virus
caggaaggagcuugcca

SEQ ID NO: 382994 - RNA, 16 nt, Uukuniemi virus
caggccagcaaaggca

SEQ ID NO: 382995 - RNA, 22 nt, Uukuniemi virus
cagucgcucccuagcacucuca

SEQ ID NO: 382996 - RNA, 23 nt, Uukuniemi virus
cagugaagaaccuuuucucugca

SEQ ID NO: 382997 - RNA, 16 nt, Uukuniemi virus
cauaguugcaaggugc

SEQ ID NO: 382998 - RNA, 14 nt, Uukuniemi virus
caugcacacuggau

SEQ ID NO: 382999 - RNA, 22 nt, Uukuniemi virus
caugugcuucuucuucauccca

SEQ ID NO: 383000 - RNA, 19 nt, Uukuniemi virus
cauuggcauccaagaucuc

SEQ ID NO: 383001 - RNA, 12 nt, Uukuniemi virus
ccagcagucgcu

SEQ ID NO: 383002 - RNA, 23 nt, Uukuniemi virus
ccagcagucgcucccuagcacuc

SEQ ID NO: 383003 - RNA, 19 nt, Uukuniemi virus
ccagcuugaagcucagcag

SEQ ID NO: 383004 - RNA, 19 nt, Uukuniemi virus
ccaucuuggcggacuuugu

SEQ ID NO: 383005 - RNA, 15 nt, Uukuniemi virus
cccaaacuacaguga

SEQ ID NO: 383006 - RNA, 17 nt, Uukuniemi virus
cccaaacuacagugauc

SEQ ID NO: 383007 - RNA, 22 nt, Uukuniemi virus
cccuagcacucucaaaggugau

SEQ ID NO: 383008 - RNA, 14 nt, Uukuniemi virus
ccgaucugauucaa

SEQ ID NO: 383009 - RNA, 20 nt, Uukuniemi virus
ccuagcacucucaaagguga

SEQ ID NO: 383010 - RNA, 13 nt, Uukuniemi virus
ccugcagagcaga

SEQ ID NO: 383011 - RNA, 20 nt, Uukuniemi virus
ccuucaccagauucugccca

SEQ ID NO: 383012 - RNA, 23 nt, Uukuniemi virus
ccuucaccagauucugcccagug

SEQ ID NO: 383013 - RNA, 14 nt, Uukuniemi virus
ccuuuucucugcaa

SEQ ID NO: 383014 - RNA, 17 nt, Uukuniemi virus
ccuuuucucugcaaugg

SEQ ID NO: 383015 - RNA, 14 nt, Uukuniemi virus
cuccucaagguuga

SEQ ID NO: 383016 - RNA, 14 nt, Uukuniemi virus
cuccuuggccucca

SEQ ID NO: 383017 - RNA, 14 nt, Uukuniemi virus
cucuaauuggacuc

SEQ ID NO: 383018 - RNA, 20 nt, Uukuniemi virus
cucucaaaggugauccagug

SEQ ID NO: 383019 - RNA, 21 nt, Uukuniemi virus
cuuagguucauaguugcaagg

SEQ ID NO: 383020 - RNA, 23 nt, Uukuniemi virus
cuucaccagauucugcccaguga

SEQ ID NO: 383021 - RNA, 21 nt, Uukuniemi virus
cuucggcccaaacuacaguga

SEQ ID NO: 383022 - RNA, 22 nt, Uukuniemi virus
cuucggcccaaacuacagugau

SEQ ID NO: 383023 - RNA, 20 nt, Uukuniemi virus
cuugauggaguccucaggga

SEQ ID NO: 383024 - RNA, 16 nt, Uukuniemi virus
cuugccagaccagccu

SEQ ID NO: 383025 - RNA, 17 nt, Uukuniemi virus
cuugcucaauugcagug

SEQ ID NO: 383026 - RNA, 18 nt, Uukuniemi virus
cuugcucaauugcaguga

SEQ ID NO: 383027 - RNA, 14 nt, Uukuniemi virus
cuuuuagaguccaa

SEQ ID NO: 383028 - RNA, 13 nt, Uukuniemi virus
cuuuucucugcaa

SEQ ID NO: 383029 - RNA, 14 nt, Uukuniemi virus
gacaguaagguucu

SEQ ID NO: 383030 - RNA, 22 nt, Uukuniemi virus
gacuggccaauccuuggugaau

SEQ ID NO: 383031 - RNA, 20 nt, Uukuniemi virus
gagccugugggcaucgacca

SEQ ID NO: 383032 - RNA, 15 nt, Uukuniemi virus
gagcuugccagacca

SEQ ID NO: 383033 - RNA, 21 nt, Uukuniemi virus
gagucaggaaggagcuugcca

SEQ ID NO: 383034 - RNA, 15 nt, Uukuniemi virus
gaguuggauggacag

SEQ ID NO: 383035 - RNA, 13 nt, Uukuniemi virus
gaucaaugaucug

SEQ ID NO: 383036 - RNA, 20 nt, Uukuniemi virus
gcaauggucccccuugugac

SEQ ID NO: 383037 - RNA, 14 nt, Uukuniemi virus
gcaucgaccagggc

SEQ ID NO: 383038 - RNA, 16 nt, Uukuniemi virus
gccugcagagcagagu

SEQ ID NO: 383039 - RNA, 14 nt, Uukuniemi virus
gcuuuuacuaucuc

SEQ ID NO: 383040 - RNA, 17 nt, Uukuniemi virus
ggagcuugccagaccag

SEQ ID NO: 383041 - RNA, 23 nt, Uukuniemi virus
ggagggucucaucgaucaggcca

SEQ ID NO: 383042 - RNA, 12 nt, Uukuniemi virus
ggccagcaaagg

SEQ ID NO: 383043 - RNA, 18 nt, Uukuniemi virus
ggcccaaacuacagugau

SEQ ID NO: 383044 - RNA, 21 nt, Uukuniemi virus
gggagggucucaucgaucagg

SEQ ID NO: 383045 - RNA, 13 nt, Uukuniemi virus
ggugaauguggug

SEQ ID NO: 383046 - RNA, 21 nt, Uukuniemi virus
guccuggagaacuccagcaga

SEQ ID NO: 383047 - RNA, 22 nt, Uukuniemi virus
gugcuugcucaauugcagugaa

SEQ ID NO: 383048 - RNA, 14 nt, Uukuniemi virus
gugggcaucgacca

SEQ ID NO: 383049 - RNA, 12 nt, Uukuniemi virus
guuggaugcugg

SEQ ID NO: 383050 - RNA, 16 nt, Uukuniemi virus
uacuuccaucuuggcg

SEQ ID NO: 383051 - RNA, 19 nt, Uukuniemi virus
uagcacucucaaaggugau

SEQ ID NO: 383052 - RNA, 18 nt, Uukuniemi virus
ucaaaggugauccagugc

SEQ ID NO: 383053 - RNA, 20 nt, Uukuniemi virus
ucaaaggugauccagugcuc

SEQ ID NO: 383054 - RNA, 17 nt, Uukuniemi virus
ucagaucaaugaucuga

SEQ ID NO: 383055 - RNA, 13 nt, Uukuniemi virus
ucaggaaggagcu

SEQ ID NO: 383056 - RNA, 20 nt, Uukuniemi virus
ucaggaaggagcuugccaga

SEQ ID NO: 383057 - RNA, 14 nt, Uukuniemi virus
ucccccuugugacu

SEQ ID NO: 383058 - RNA, 16 nt, Uukuniemi virus
ucccuagcacucucaa

SEQ ID NO: 383059 - RNA, 22 nt, Uukuniemi virus
uccucagggagggucucaucga

SEQ ID NO: 383060 - RNA, 15 nt, Uukuniemi virus
uccuggagaacucca

SEQ ID NO: 383061 - RNA, 19 nt, Uukuniemi virus
uccuucaccagauucugcc

SEQ ID NO: 383062 - RNA, 13 nt, Uukuniemi virus
uccuuuacuucca

SEQ ID NO: 383063 - RNA, 16 nt, Uukuniemi virus
ucucaaaggugaucca

SEQ ID NO: 383064 - RNA, 17 nt, Uukuniemi virus
ucucaaaggugauccag

SEQ ID NO: 383065 - RNA, 19 nt, Uukuniemi virus
ucucaaaggugauccagug

SEQ ID NO: 383066 - RNA, 20 nt, Uukuniemi virus
ucucaaaggugauccagugc

SEQ ID NO: 383067 - RNA, 21 nt, Uukuniemi virus
ucuuccgaucugauucaaaca

SEQ ID NO: 383068 - RNA, 23 nt, Uukuniemi virus
ucuuccuuuacuuccaucuuggc

SEQ ID NO: 383069 - RNA, 20 nt, Uukuniemi virus
ucuuuucuggagaucaagaa

SEQ ID NO: 383070 - RNA, 20 nt, Uukuniemi virus
ugaagaaccuuuucucugca

SEQ ID NO: 383071 - RNA, 23 nt, Uukuniemi virus
ugaauguaucuuccuuuacuucc

SEQ ID NO: 383072 - RNA, 14 nt, Uukuniemi virus
ugaggacaguugca

SEQ ID NO: 383073 - RNA, 12 nt, Uukuniemi virus
ugcaaggugcuu

SEQ ID NO: 383074 - RNA, 15 nt, Uukuniemi virus
ugcucaauugcagug

SEQ ID NO: 383075 - RNA, 17 nt, Uukuniemi virus
ugcucaauugcagugaa

SEQ ID NO: 383076 - RNA, 20 nt, Uukuniemi virus
ugcuggcauugcuuuuacua

SEQ ID NO: 383077 - RNA, 22 nt, Uukuniemi virus
ugcuugcucaauugcagugaag

SEQ ID NO: 383078 - RNA, 16 nt, Uukuniemi virus
uggaguccucagggag

SEQ ID NO: 383079 - RNA, 23 nt, Uukuniemi virus
ugggcaucgaccagggccuugau

SEQ ID NO: 383080 - RNA, 13 nt, Uukuniemi virus
ugugcaucaugca

SEQ ID NO: 383081 - RNA, 21 nt, Uukuniemi virus
uuagguucauaguugcaaggu

SEQ ID NO: 383082 - RNA, 18 nt, Uukuniemi virus
uucauaguugcaaggugc

SEQ ID NO: 383083 - RNA, 21 nt, Uukuniemi virus
uucggcccaaacuacagugau

SEQ ID NO: 383084 - RNA, 11 nt, Uukuniemi virus
uucucugcaau

SEQ ID NO: 383085 - RNA, 21 nt, Uukuniemi virus
uucugacugggagucaggaag

SEQ ID NO: 383086 - RNA, 13 nt, Uukuniemi virus
uucugcccaguga

SEQ ID NO: 383087 - RNA, 15 nt, Uukuniemi virus
uucuucuucauccca

SEQ ID NO: 383088 - RNA, 16 nt, Uukuniemi virus
uugauggaguccucag

SEQ ID NO: 383089 - RNA, 20 nt, Uukuniemi virus
uugcaaggugcuugcucaau

SEQ ID NO: 383090 - RNA, 15 nt, Uukuniemi virus
uugccagaccagccu

SEQ ID NO: 383091 - RNA, 22 nt, Uukuniemi virus
uugccauuuccguccaccagcu

SEQ ID NO: 383092 - RNA, 19 nt, Uukuniemi virus
uugcucaauugcagugaag

SEQ ID NO: 383093 - RNA, 17 nt, Uukuniemi virus
uuggcauccaagaucuc

SEQ ID NO: 383094 - RNA, 21 nt, Uukuniemi virus
agaaccuuuucucugcaaugg

SEQ ID NO: 383095 - RNA, 15 nt, Uukuniemi virus
agaucaaugaucuga

SEQ ID NO: 383096 - RNA, 21 nt, Uukuniemi virus
agauccuucaccagauucugc

SEQ ID NO: 383097 - RNA, 14 nt, Uukuniemi virus
agauucugcccagu

SEQ ID NO: 383098 - RNA, 21 nt, Uukuniemi virus
agcagguaagcucucuucuga

SEQ ID NO: 383099 - RNA, 23 nt, Uukuniemi virus
agcagucgcucccuagcacucuc

SEQ ID NO: 383100 - RNA, 16 nt, Uukuniemi virus
agccugcagagcagag

SEQ ID NO: 383101 - RNA, 21 nt, Uukuniemi virus
agccugcagagcagagucauu

SEQ ID NO: 383102 - RNA, 16 nt, Uukuniemi virus
aggcacagauccuuca

SEQ ID NO: 383103 - RNA, 21 nt, Uukuniemi virus
aggugauccagugcuccucaa

SEQ ID NO: 383104 - RNA, 23 nt, Uukuniemi virus
aggugcuugcucaauugcaguga

SEQ ID NO: 383105 - RNA, 16 nt, Uukuniemi virus
agguucauaguugcaa

SEQ ID NO: 383106 - RNA, 19 nt, Uukuniemi virus
agguucauaguugcaaggu

SEQ ID NO: 383107 - RNA, 20 nt, Uukuniemi virus
agucaggaaggagcuugcca

SEQ ID NO: 383108 - RNA, 20 nt, Uukuniemi virus
agucgcucccuagcacucuc

SEQ ID NO: 383109 - RNA, 23 nt, Uukuniemi virus
agugaagaaccuuuucucugcaa

SEQ ID NO: 383110 - RNA, 20 nt, Uukuniemi virus
agugauccuacgacuggcca

SEQ ID NO: 383111 - RNA, 17 nt, Uukuniemi virus
aguugcaaggugcuugc

SEQ ID NO: 383112 - RNA, 20 nt, Uukuniemi virus
aguugcaaggugcuugcuca

SEQ ID NO: 383113 - RNA, 22 nt, Uukuniemi virus
aguugcaaggugcuugcucaau

SEQ ID NO: 383114 - RNA, 16 nt, Uukuniemi virus
auaguugcaaggugcu

SEQ ID NO: 383115 - RNA, 13 nt, Uukuniemi virus
auccagugcuccu

SEQ ID NO: 383116 - RNA, 19 nt, Uukuniemi virus
auccagugcuccucaaggu

SEQ ID NO: 383117 - RNA, 19 nt, Uukuniemi virus
auccuucaccagauucugc

SEQ ID NO: 383118 - RNA, 14 nt, Uukuniemi virus
aucgaucaggccag

SEQ ID NO: 383119 - RNA, 19 nt, Uukuniemi virus
aucuccuuggccuccauuc

SEQ ID NO: 383120 - RNA, 15 nt, Uukuniemi virus
aucuuccuuuacuuc

SEQ ID NO: 383121 - RNA, 21 nt, Uukuniemi virus
augguccuggagaacuccagc

SEQ ID NO: 383122 - RNA, 16 nt, Uukuniemi virus
augugcuucuucuuca

SEQ ID NO: 383123 - RNA, 15 nt, Uukuniemi virus
auuaaaacucucuaa

SEQ ID NO: 383124 - RNA, 19 nt, Uukuniemi virus
auuccaaaacaccucagau

SEQ ID NO: 383125 - RNA, 14 nt, Uukuniemi virus
auucugcccaguga

SEQ ID NO: 383126 - RNA, 14 nt, Uukuniemi virus
auuuaauucggcca

SEQ ID NO: 383127 - RNA, 17 nt, Uukuniemi virus
auuuaauucggccaaau

SEQ ID NO: 383128 - RNA, 17 nt, Uukuniemi virus
auuuccguccaccagcu

SEQ ID NO: 383129 - RNA, 17 nt, Uukuniemi virus
caaaacaccucagauca

SEQ ID NO: 383130 - RNA, 13 nt, Uukuniemi virus
caaacuacaguga

SEQ ID NO: 383131 - RNA, 19 nt, Uukuniemi virus
caaaggugauccagugcuc

SEQ ID NO: 383132 - RNA, 21 nt, Uukuniemi virus
caaaggugauccagugcuccu

SEQ ID NO: 383133 - RNA, 13 nt, Uukuniemi virus
caauugcagugaa

SEQ ID NO: 383134 - RNA, 21 nt, Uukuniemi virus
caauugcagugaagaaccuuu

SEQ ID NO: 383135 - RNA, 19 nt, Uukuniemi virus
caccagauucugcccagug

SEQ ID NO: 383136 - RNA, 21 nt, Uukuniemi virus
caccagauucugcccagugac

SEQ ID NO: 383137 - RNA, 22 nt, Uukuniemi virus
cacucucaaaggugauccagug

SEQ ID NO: 383138 - RNA, 23 nt, Uukuniemi virus
cagagucauuggcauccaagauc

SEQ ID NO: 383139 - RNA, 15 nt, Uukuniemi virus
cagauccuucaccag

SEQ ID NO: 383140 - RNA, 21 nt, Uukuniemi virus
caggaaggagcuugccagacc

SEQ ID NO: 383141 - RNA, 21 nt, Uukuniemi virus
cagggccuugauggaguccuc

SEQ ID NO: 383142 - RNA, 13 nt, Uukuniemi virus
cagguaagcucuc

SEQ ID NO: 383143 - RNA, 24 nt, Uukuniemi virus
cagugaagaaccuuuucucugcaa

SEQ ID NO: 383144 - RNA, 23 nt, Uukuniemi virus
cagugauccuacgacuggccaau

SEQ ID NO: 383145 - RNA, 18 nt, Uukuniemi virus
cauaacgcuuagguucau

SEQ ID NO: 383146 - RNA, 20 nt, Uukuniemi virus
cauaacgcuuagguucauag

SEQ ID NO: 383147 - RNA, 17 nt, Uukuniemi virus
cauugugcaucaugcac

SEQ ID NO: 383148 - RNA, 18 nt, Uukuniemi virus
cauugugcaucaugcaca

SEQ ID NO: 383149 - RNA, 18 nt, Uukuniemi virus
cauuuccguccaccagcu

SEQ ID NO: 383150 - RNA, 15 nt, Uukuniemi virus
ccaaacuacagugau

SEQ ID NO: 383151 - RNA, 18 nt, Uukuniemi virus
ccaaacuacagugauccu

SEQ ID NO: 383152 - RNA, 21 nt, Uukuniemi virus
ccagauucugcccagugaccu

SEQ ID NO: 383153 - RNA, 21 nt, Uukuniemi virus
ccagccugcagagcagaguca

SEQ ID NO: 383154 - RNA, 20 nt, Uukuniemi virus
ccauaacgcuuagguucaua

SEQ ID NO: 383155 - RNA, 16 nt, Uukuniemi virus
ccauuuccguccacca

SEQ ID NO: 383156 - RNA, 19 nt, Uukuniemi virus
cccaaacuacagugauccu

SEQ ID NO: 383157 - RNA, 15 nt, Uukuniemi virus
cccuagcacucucaa

SEQ ID NO: 383158 - RNA, 15 nt, Uukuniemi virus
ccuagcacucucaaa

SEQ ID NO: 383159 - RNA, 18 nt, Uukuniemi virus
ccuagcacucucaaaggu

SEQ ID NO: 383160 - RNA, 16 nt, Uukuniemi virus
ccucaagguugacuag

SEQ ID NO: 383161 - RNA, 12 nt, Uukuniemi virus
ccuugugacuag

SEQ ID NO: 383162 - RNA, 18 nt, Uukuniemi virus
ccuuuucucugcaauggu

SEQ ID NO: 383163 - RNA, 17 nt, Uukuniemi virus
cgaucugauucaaacau

SEQ ID NO: 383164 - RNA, 14 nt, Uukuniemi virus
cuagcacucucaaa

SEQ ID NO: 383165 - RNA, 19 nt, Uukuniemi virus
cucaaaggugauccagugc

SEQ ID NO: 383166 - RNA, 15 nt, Uukuniemi virus
cucaauugcagugaa

SEQ ID NO: 383167 - RNA, 14 nt, Uukuniemi virus
cucagaucaaugau

SEQ ID NO: 383168 - RNA, 16 nt, Uukuniemi virus
cucagaucaaugaucu

SEQ ID NO: 383169 - RNA, 16 nt, Uukuniemi virus
cucccuagcacucuca

SEQ ID NO: 383170 - RNA, 18 nt, Uukuniemi virus
cucccuagcacucucaaa

SEQ ID NO: 383171 - RNA, 22 nt, Uukuniemi virus
cucucaaaggugauccagugcu

SEQ ID NO: 383172 - RNA, 19 nt, Uukuniemi virus
cucucuaauuggacucuaa

SEQ ID NO: 383173 - RNA, 15 nt, Uukuniemi virus
cucucucucuuugaa

SEQ ID NO: 383174 - RNA, 11 nt, Uukuniemi virus
cucugcaaugg

SEQ ID NO: 383175 - RNA, 23 nt, Uukuniemi virus
cucugcaauggucccccuuguga

SEQ ID NO: 383176 - RNA, 16 nt, Uukuniemi virus
cugauucaaacaugaa

SEQ ID NO: 383177 - RNA, 21 nt, Uukuniemi virus
cugcaauggucccccuuguga

SEQ ID NO: 383178 - RNA, 14 nt, Uukuniemi virus
cuggacggcuuuau

SEQ ID NO: 383179 - RNA, 18 nt, Uukuniemi virus
cuggacggcuuuauucac

SEQ ID NO: 383180 - RNA, 20 nt, Uukuniemi virus
cuggagaucaagaaugugga

SEQ ID NO: 383181 - RNA, 23 nt, Uukuniemi virus
cuggagaucaagaauguggagaa

SEQ ID NO: 383182 - RNA, 23 nt, Uukuniemi virus
cuggcauugcuuuuacuaucucu

SEQ ID NO: 383183 - RNA, 14 nt, Uukuniemi virus
cuggccaauccuug

SEQ ID NO: 383184 - RNA, 12 nt, Uukuniemi virus
cugggagucagg

SEQ ID NO: 383185 - RNA, 14 nt, Uukuniemi virus
cuugauggaguccu

SEQ ID NO: 383186 - RNA, 15 nt, Uukuniemi virus
cuugccagaccagcc

SEQ ID NO: 383187 - RNA, 22 nt, Uukuniemi virus
cuugcucaauugcagugaagaa

SEQ ID NO: 383188 - RNA, 15 nt, Uukuniemi virus
cuuuucucugcaaug

SEQ ID NO: 383189 - RNA, 16 nt, Uukuniemi virus
cuuuucucugcaaugg

SEQ ID NO: 383190 - RNA, 22 nt, Uukuniemi virus
gaagcucagcagguaagcucuc

SEQ ID NO: 383191 - RNA, 14 nt, Uukuniemi virus
gaauguaucuuccu

SEQ ID NO: 383192 - RNA, 19 nt, Uukuniemi virus
gaauguggagaaggcacag

SEQ ID NO: 383193 - RNA, 24 nt, Uukuniemi virus
gaccagccugcagagcagagucau

SEQ ID NO: 383194 - RNA, 16 nt, Uukuniemi virus
gagaucaagaaugugg

SEQ ID NO: 383195 - RNA, 21 nt, Uukuniemi virus
gagccugugggcaucgaccag

SEQ ID NO: 383196 - RNA, 16 nt, Uukuniemi virus
gagcuugccagaccag

SEQ ID NO: 383197 - RNA, 13 nt, Uukuniemi virus
gaguccucaggga

SEQ ID NO: 383198 - RNA, 14 nt, Uukuniemi virus
gaguccucagggag

SEQ ID NO: 383199 - RNA, 18 nt, Uukuniemi virus
gaguuggauggacaguaa

SEQ ID NO: 383200 - RNA, 16 nt, Uukuniemi virus
gaucaagaauguggag

SEQ ID NO: 383201 - RNA, 19 nt, Uukuniemi virus
gaucugauucaaacaugaa

SEQ ID NO: 383202 - RNA, 14 nt, Uukuniemi virus
gauggaguccucag

SEQ ID NO: 383203 - RNA, 17 nt, Uukuniemi virus
gcacucucaaaggugau

SEQ ID NO: 383204 - RNA, 13 nt, Uukuniemi virus
gcagagcagaguc

SEQ ID NO: 383205 - RNA, 20 nt, Uukuniemi virus
gccaaauuaaaacucucuaa

SEQ ID NO: 383206 - RNA, 19 nt, Uukuniemi virus
gccaauccuuggugaaugu

SEQ ID NO: 383207 - RNA, 13 nt, Uukuniemi virus
gcccagugaccug

SEQ ID NO: 383208 - RNA, 15 nt, Uukuniemi virus
gcucaauugcaguga

SEQ ID NO: 383209 - RNA, 19 nt, Uukuniemi virus
gcuugaagcucagcaggua

SEQ ID NO: 383210 - RNA, 13 nt, Uukuniemi virus
ggcggacuuugug

SEQ ID NO: 383211 - RNA, 23 nt, Uukuniemi virus
ggcuucggcccaaacuacaguga

SEQ ID NO: 383212 - RNA, 14 nt, Uukuniemi virus
gggcaucgaccagg

SEQ ID NO: 383213 - RNA, 20 nt, Uukuniemi virus
ggucucaucgaucaggccag

SEQ ID NO: 383214 - RNA, 11 nt, Uukuniemi virus
ggugaaugugg

SEQ ID NO: 383215 - RNA, 19 nt, Venezuelan equine encephalitis virus
agcagcaauuggcaagcug

SEQ ID NO: 383216 - RNA, 14 nt, Venezuelan equine encephalitis virus
auuggcaagcugcu

SEQ ID NO: 383217 - RNA, 19 nt, Venezuelan equine encephalitis virus
caagcugcuuauauagaac

SEQ ID NO: 383218 - RNA, 19 nt, Venezuelan equine encephalitis virus
cagcaauuggcaagcugcu

SEQ ID NO: 383219 - RNA, 22 nt, Venezuelan equine encephalitis virus
ccgaaucggauuuuguuuuuaa

SEQ ID NO: 383220 - RNA, 20 nt, Venezuelan equine encephalitis virus
cgauuggcaugccgcuuuaa

SEQ ID NO: 383221 - RNA, 15 nt, Venezuelan equine encephalitis virus
gcaugccgcuuuaaa

SEQ ID NO: 383222 - RNA, 16 nt, Venezuelan equine encephalitis virus
uagcagcaauuggcaa

SEQ ID NO: 383223 - RNA, 16 nt, Venezuelan equine encephalitis virus
ugcuuauauagaacuu

SEQ ID NO: 383224 - RNA, 18 nt, Venezuelan equine encephalitis virus
uggcaagcugcuuauaua

SEQ ID NO: 383225 - RNA, 20 nt, Venezuelan equine encephalitis virus
acauagcagcaauuggcaag

SEQ ID NO: 383226 - RNA, 20 nt, Venezuelan equine encephalitis virus
agcaauuggcaagcugcuua

SEQ ID NO: 383227 - RNA, 23 nt, Venezuelan equine encephalitis virus
agcagcaauuggcaagcugcuua

SEQ ID NO: 383228 - RNA, 14 nt, Venezuelan equine encephalitis virus
caugccgcuuuaaa

SEQ ID NO: 383229 - RNA, 22 nt, Venezuelan equine encephalitis virus
gaacauagcagcaauuggcaag

SEQ ID NO: 383230 - RNA, 20 nt, Venezuelan equine encephalitis virus
gcagcaauuggcaagcugcu

SEQ ID NO: 383231 - RNA, 15 nt, Venezuelan equine encephalitis virus
ggcaugccgcuuuaa

SEQ ID NO: 383232 - RNA, 12 nt, Venezuelan equine encephalitis virus
ugccgcuuuaaa

SEQ ID NO: 383233 - RNA, 15 nt, Venezuelan equine encephalitis virus
ugcggcgauuggcau

SEQ ID NO: 383234 - RNA, 17 nt, Venezuelan equine encephalitis virus
ugcggcgauuggcaugc

SEQ ID NO: 383235 - RNA, 16 nt, Venezuelan equine encephalitis virus
uuauauagaacuugcg

SEQ ID NO: 383236 - RNA, 11 nt, Walleye dermal sarcoma virus
aaacuauguua

SEQ ID NO: 383237 - RNA, 16 nt, Walleye dermal sarcoma virus
aaacuauguuauguaa

SEQ ID NO: 383238 - RNA, 15 nt, Walleye dermal sarcoma virus
acaaaucaacacauc

SEQ ID NO: 383239 - RNA, 22 nt, Walleye dermal sarcoma virus
acacuuaggaaagugcuguaua

SEQ ID NO: 383240 - RNA, 15 nt, Walleye dermal sarcoma virus
acaguuggugcugaa

SEQ ID NO: 383241 - RNA, 23 nt, Walleye dermal sarcoma virus
acucccucacaguugcuguggug

SEQ ID NO: 383242 - RNA, 12 nt, Walleye dermal sarcoma virus
auggauauaauu

SEQ ID NO: 383243 - RNA, 15 nt, Walleye dermal sarcoma virus
cagaauuguacaaau

SEQ ID NO: 383244 - RNA, 16 nt, Walleye dermal sarcoma virus
caguauuuacuucuga

SEQ ID NO: 383245 - RNA, 23 nt, Walleye dermal sarcoma virus
caucuuuguguuguuaguacaaa

SEQ ID NO: 383246 - RNA, 18 nt, Walleye dermal sarcoma virus
ccagacgcuguauacuga

SEQ ID NO: 383247 - RNA, 13 nt, Walleye dermal sarcoma virus
cuaccucaugucc

SEQ ID NO: 383248 - RNA, 18 nt, Walleye dermal sarcoma virus
cuauucuuaaauuguuag

SEQ ID NO: 383249 - RNA, 15 nt, Walleye dermal sarcoma virus
cugacucauauguaa

SEQ ID NO: 383250 - RNA, 21 nt, Walleye dermal sarcoma virus
cuguauacugacucauaugua

SEQ ID NO: 383251 - RNA, 19 nt, Walleye dermal sarcoma virus
cuuaaauuguuaguaaggu

SEQ ID NO: 383252 - RNA, 21 nt, Walleye dermal sarcoma virus
cuuuguguuguuaguacaaaa

SEQ ID NO: 383253 - RNA, 14 nt, Walleye dermal sarcoma virus
gaaagugcuguaua

SEQ ID NO: 383254 - RNA, 23 nt, Walleye dermal sarcoma virus
gaaugcauguugccuucaaacag

SEQ ID NO: 383255 - RNA, 14 nt, Walleye dermal sarcoma virus
gacucauauguaac

SEQ ID NO: 383256 - RNA, 22 nt, Walleye dermal sarcoma virus
gauacaugcuuuuucuauguug

SEQ ID NO: 383257 - RNA, 21 nt, Walleye dermal sarcoma virus
gcuauucuuaaauuguuagua

SEQ ID NO: 383258 - RNA, 14 nt, Walleye dermal sarcoma virus
ggccuauaaaaaga

SEQ ID NO: 383259 - RNA, 14 nt, Walleye dermal sarcoma virus
ggugacauaugcau

SEQ ID NO: 383260 - RNA, 16 nt, Walleye dermal sarcoma virus
gucauagugcugcuga

SEQ ID NO: 383261 - RNA, 17 nt, Walleye dermal sarcoma virus
gucauagugcugcugaa

SEQ ID NO: 383262 - RNA, 14 nt, Walleye dermal sarcoma virus
guuaguacaaaagg

SEQ ID NO: 383263 - RNA, 19 nt, Walleye dermal sarcoma virus
guuggugcugaaugcaugu

SEQ ID NO: 383264 - RNA, 18 nt, Walleye dermal sarcoma virus
uaacagacaaaugugacu

SEQ ID NO: 383265 - RNA, 16 nt, Walleye dermal sarcoma virus
uaaggugacauaugca

SEQ ID NO: 383266 - RNA, 19 nt, Walleye dermal sarcoma virus
uaguaaggugacauaugca

SEQ ID NO: 383267 - RNA, 22 nt, Walleye dermal sarcoma virus
uaugcauuucuucugauacaug

SEQ ID NO: 383268 - RNA, 23 nt, Walleye dermal sarcoma virus
uauguaaccgguuacugccagac

SEQ ID NO: 383269 - RNA, 20 nt, Walleye dermal sarcoma virus
uauuuuauuauguucuuaua

SEQ ID NO: 383270 - RNA, 13 nt, Walleye dermal sarcoma virus
ucauagugcugcu

SEQ ID NO: 383271 - RNA, 23 nt, Walleye dermal sarcoma virus
uccccaccccuacaugucauagu

SEQ ID NO: 383272 - RNA, 15 nt, Walleye dermal sarcoma virus
ucccucacaguugcu

SEQ ID NO: 383273 - RNA, 14 nt, Walleye dermal sarcoma virus
ucgugucugaugca

SEQ ID NO: 383274 - RNA, 21 nt, Walleye dermal sarcoma virus
ucugagaauccaugaaaguau

SEQ ID NO: 383275 - RNA, 12 nt, Walleye dermal sarcoma virus
ugacucauaugu

SEQ ID NO: 383276 - RNA, 21 nt, Walleye dermal sarcoma virus
ugauacaugcuuuuucuaugu

SEQ ID NO: 383277 - RNA, 17 nt, Walleye dermal sarcoma virus
ugccagacgcuguauac

SEQ ID NO: 383278 - RNA, 13 nt, Walleye dermal sarcoma virus
uggaaauauaauu

SEQ ID NO: 383279 - RNA, 15 nt, Walleye dermal sarcoma virus
uguaaccguaaaggc

SEQ ID NO: 383280 - RNA, 13 nt, Walleye dermal sarcoma virus
uguauaacagaca

SEQ ID NO: 383281 - RNA, 15 nt, Walleye dermal sarcoma virus
uguguuaaacuaugu

SEQ ID NO: 383282 - RNA, 20 nt, Walleye dermal sarcoma virus
uguuaaacuauguuauguaa

SEQ ID NO: 383283 - RNA, 13 nt, Walleye dermal sarcoma virus
uguuaguacaaaa

SEQ ID NO: 383284 - RNA, 20 nt, Walleye dermal sarcoma virus
uuaaauuguuaguaagguga

SEQ ID NO: 383285 - RNA, 12 nt, Walleye dermal sarcoma virus
uuagauaaguga

SEQ ID NO: 383286 - RNA, 19 nt, Walleye dermal sarcoma virus
uuaggaaagugcuguauag

SEQ ID NO: 383287 - RNA, 17 nt, Walleye dermal sarcoma virus
uucuucugauacaugcu

SEQ ID NO: 383288 - RNA, 22 nt, Walleye dermal sarcoma virus
uuggugcugaaugcauguugcc

SEQ ID NO: 383289 - RNA, 13 nt, Walleye dermal sarcoma virus
uuuauuauguucu

SEQ ID NO: 383290 - RNA, 21 nt, Walleye dermal sarcoma virus
uuuuucagaauuguacaaauc

SEQ ID NO: 383291 - RNA, 17 nt, Walleye dermal sarcoma virus
aaacuauguuauguaac

SEQ ID NO: 383292 - RNA, 22 nt, Walleye dermal sarcoma virus
aauuguuaguaaggugacauau

SEQ ID NO: 383293 - RNA, 17 nt, Walleye dermal sarcoma virus
acgcugaucccagauca

SEQ ID NO: 383294 - RNA, 19 nt, Walleye dermal sarcoma virus
acgcuguauacugacucau

SEQ ID NO: 383295 - RNA, 14 nt, Walleye dermal sarcoma virus
agaauuguacaaau

SEQ ID NO: 383296 - RNA, 18 nt, Walleye dermal sarcoma virus
auacugacucauauguaa

SEQ ID NO: 383297 - RNA, 17 nt, Walleye dermal sarcoma virus
augcauguugccuucaa

SEQ ID NO: 383298 - RNA, 23 nt, Walleye dermal sarcoma virus
auguaaccguaaaggccuauaaa

SEQ ID NO: 383299 - RNA, 19 nt, Walleye dermal sarcoma virus
auuaaaagaaucuaccuca

SEQ ID NO: 383300 - RNA, 13 nt, Walleye dermal sarcoma virus
auuguacaaauca

SEQ ID NO: 383301 - RNA, 12 nt, Walleye dermal sarcoma virus
auuuuuguuauu

SEQ ID NO: 383302 - RNA, 15 nt, Walleye dermal sarcoma virus
cagacaaaugugacu

SEQ ID NO: 383303 - RNA, 17 nt, Walleye dermal sarcoma virus
caucuuuguguuguuag

SEQ ID NO: 383304 - RNA, 19 nt, Walleye dermal sarcoma virus
cauuauauuguugacacuu

SEQ ID NO: 383305 - RNA, 16 nt, Walleye dermal sarcoma virus
cauuucuucugauaca

SEQ ID NO: 383306 - RNA, 17 nt, Walleye dermal sarcoma virus
ccaccccuacaugucau

SEQ ID NO: 383307 - RNA, 16 nt, Walleye dermal sarcoma virus
ccagacgcuguauacu

SEQ ID NO: 383308 - RNA, 17 nt, Walleye dermal sarcoma virus
cccaccccuacauguca

SEQ ID NO: 383309 - RNA, 23 nt, Walleye dermal sarcoma virus
ccuaaaguagaaauaacaacuga

SEQ ID NO: 383310 - RNA, 16 nt, Walleye dermal sarcoma virus
cugaaugcauguugcc

SEQ ID NO: 383311 - RNA, 22 nt, Walleye dermal sarcoma virus
cuguauacugacucauauguaa

SEQ ID NO: 383312 - RNA, 15 nt, Walleye dermal sarcoma virus
cuucugauacaugcu

SEQ ID NO: 383313 - RNA, 20 nt, Walleye dermal sarcoma virus
cuuuguguuguuaguacaaa

SEQ ID NO: 383314 - RNA, 15 nt, Walleye dermal sarcoma virus
cuuuuucuauguugu

SEQ ID NO: 383315 - RNA, 21 nt, Walleye dermal sarcoma virus
gacacuuaggaaagugcugua

SEQ ID NO: 383316 - RNA, 14 nt, Walleye dermal sarcoma virus
gcauggugccagau

SEQ ID NO: 383317 - RNA, 15 nt, Walleye dermal sarcoma virus
gccagacgcuguaua

SEQ ID NO: 383318 - RNA, 23 nt, Walleye dermal sarcoma virus
gcuguauacugacucauauguaa

SEQ ID NO: 383319 - RNA, 19 nt, Walleye dermal sarcoma virus
guauacugacucauaugua

SEQ ID NO: 383320 - RNA, 21 nt, Walleye dermal sarcoma virus
guuaguaaggugacauaugca

SEQ ID NO: 383321 - RNA, 12 nt, Walleye dermal sarcoma virus
guuaguacaaaa

SEQ ID NO: 383322 - RNA, 21 nt, Walleye dermal sarcoma virus
guuauguaaccgguuacugcc

SEQ ID NO: 383323 - RNA, 15 nt, Walleye dermal sarcoma virus
guuguuaguacaaaa

SEQ ID NO: 383324 - RNA, 21 nt, Walleye dermal sarcoma virus
uacaugcuuuuucuauguugu

SEQ ID NO: 383325 - RNA, 22 nt, Walleye dermal sarcoma virus
uacugccagacgcuguauacug

SEQ ID NO: 383326 - RNA, 23 nt, Walleye dermal sarcoma virus
uauaauuaaaagaaucuaccuca

SEQ ID NO: 383327 - RNA, 18 nt, Walleye dermal sarcoma virus
uauacugacucauaugua

SEQ ID NO: 383328 - RNA, 18 nt, Walleye dermal sarcoma virus
uaugcauuucuucugaua

SEQ ID NO: 383329 - RNA, 16 nt, Walleye dermal sarcoma virus
ucaaacaguauuuacu

SEQ ID NO: 383330 - RNA, 15 nt, Walleye dermal sarcoma virus
ucagaauuguacaaa

SEQ ID NO: 383331 - RNA, 19 nt, Walleye dermal sarcoma virus
uccccaccccuacauguca

SEQ ID NO: 383332 - RNA, 12 nt, Walleye dermal sarcoma virus
ucuucugauaca

SEQ ID NO: 383333 - RNA, 23 nt, Walleye dermal sarcoma virus
ugaauuaacaugagaaacuaauu

SEQ ID NO: 383334 - RNA, 22 nt, Walleye dermal sarcoma virus
ugacacuuaggaaagugcugua

SEQ ID NO: 383335 - RNA, 12 nt, Walleye dermal sarcoma virus
ugacauaugcau

SEQ ID NO: 383336 - RNA, 13 nt, Walleye dermal sarcoma virus
ugauacaugcuuu

SEQ ID NO: 383337 - RNA, 23 nt, Walleye dermal sarcoma virus
ugcagaagauauuaauaaagugu

SEQ ID NO: 383338 - RNA, 18 nt, Walleye dermal sarcoma virus
uggaacaguuggugcuga

SEQ ID NO: 383339 - RNA, 14 nt, Walleye dermal sarcoma virus
uguauaggccuaaa

SEQ ID NO: 383340 - RNA, 22 nt, Walleye dermal sarcoma virus
uguuaguaaggugacauaugca

SEQ ID NO: 383341 - RNA, 12 nt, Walleye dermal sarcoma virus
uguuaguacaaa

SEQ ID NO: 383342 - RNA, 20 nt, Walleye dermal sarcoma virus
uuacugccagacgcuguaua

SEQ ID NO: 383343 - RNA, 20 nt, Walleye dermal sarcoma virus
uuagauaagugaauuugaau

SEQ ID NO: 383344 - RNA, 12 nt, Walleye dermal sarcoma virus
uuaggaaagugc

SEQ ID NO: 383345 - RNA, 23 nt, Walleye dermal sarcoma virus
uuaguaaggugacauaugcauuu

SEQ ID NO: 383346 - RNA, 22 nt, Walleye dermal sarcoma virus
uuccuuucuucgaacauggaua

SEQ ID NO: 383347 - RNA, 21 nt, Walleye dermal sarcoma virus
uuugucauuauauuguugaca

SEQ ID NO: 383348 - RNA, 20 nt, Walleye dermal sarcoma virus
uuuuccccaccccuacaugu

SEQ ID NO: 383349 - RNA, 18 nt, West Nile virus
accccaggaggacugggu

SEQ ID NO: 383350 - RNA, 15 nt, West Nile virus
acugggugaccaaag

SEQ ID NO: 383351 - RNA, 15 nt, West Nile virus
acuggguuaacaaag

SEQ ID NO: 383352 - RNA, 22 nt, West Nile virus
agaccacacuuuaaugugccac

SEQ ID NO: 383353 - RNA, 13 nt, West Nile virus
agguggacugggu

SEQ ID NO: 383354 - RNA, 18 nt, West Nile virus
aguagacggugcugccug

SEQ ID NO: 383355 - RNA, 22 nt, West Nile virus
agugcacggcccaacuuggcug

SEQ ID NO: 383356 - RNA, 18 nt, West Nile virus
aguuaguuuaguguaaau

SEQ ID NO: 383357 - RNA, 16 nt, West Nile virus
cacacuuuaaugugcc

SEQ ID NO: 383358 - RNA, 15 nt, West Nile virus
cagauuaaugcugcc

SEQ ID NO: 383359 - RNA, 16 nt, West Nile virus
ccagauuaaugcugcc

SEQ ID NO: 383360 - RNA, 17 nt, West Nile virus
ccagauuaaugcugcca

SEQ ID NO: 383361 - RNA, 20 nt, West Nile virus
ccaggaggacugggugacca

SEQ ID NO: 383362 - RNA, 16 nt, West Nile virus
cccagguggacugggu

SEQ ID NO: 383363 - RNA, 20 nt, West Nile virus
ccucaaagcccagugucaga

SEQ ID NO: 383364 - RNA, 13 nt, West Nile virus
cggagagugcagu

SEQ ID NO: 383365 - RNA, 16 nt, West Nile virus
cguaaaaaagugcacg

SEQ ID NO: 383366 - RNA, 20 nt, West Nile virus
cuagagguuagaggagaccc

SEQ ID NO: 383367 - RNA, 14 nt, West Nile virus
cugcgaggugaucc

SEQ ID NO: 383368 - RNA, 20 nt, West Nile virus
gaccacacuuuaaugugcca

SEQ ID NO: 383369 - RNA, 17 nt, West Nile virus
gacuggguuaacaaagg

SEQ ID NO: 383370 - RNA, 17 nt, West Nile virus
gccagauuaaugcugcc

SEQ ID NO: 383371 - RNA, 19 nt, West Nile virus
gccccagguggacuggguu

SEQ ID NO: 383372 - RNA, 17 nt, West Nile virus
gccucaaagcccagugu

SEQ ID NO: 383373 - RNA, 19 nt, West Nile virus
ggccagauuaaugcugcca

SEQ ID NO: 383374 - RNA, 23 nt, West Nile virus
gucugcgauagugccccaggugg

SEQ ID NO: 383375 - RNA, 20 nt, West Nile virus
aaccccaggaggacugggug

SEQ ID NO: 383376 - RNA, 20 nt, West Nile virus
agaggagaccccgcguaaaa

SEQ ID NO: 383377 - RNA, 19 nt, West Nile virus
aggaggaccccacgugcuu

SEQ ID NO: 383378 - RNA, 21 nt, West Nile virus
aggccagauuaaugcugccac

SEQ ID NO: 383379 - RNA, 14 nt, West Nile virus
aguagacggugcug

SEQ ID NO: 383380 - RNA, 22 nt, West Nile virus
agugccccagguggacuggguu

SEQ ID NO: 383381 - RNA, 13 nt, West Nile virus
caaagcccagugu

SEQ ID NO: 383382 - RNA, 16 nt, West Nile virus
cccaggaggacugggu

SEQ ID NO: 383383 - RNA, 17 nt, West Nile virus
cccaggaggacugggug

SEQ ID NO: 383384 - RNA, 17 nt, West Nile virus
cccagguggacuggguu

SEQ ID NO: 383385 - RNA, 17 nt, West Nile virus
ccccaggaggacugggu

SEQ ID NO: 383386 - RNA, 17 nt, West Nile virus
ccccagguggacugggu

SEQ ID NO: 383387 - RNA, 20 nt, West Nile virus
cccgcguaaaaaagugcacg

SEQ ID NO: 383388 - RNA, 16 nt, West Nile virus
ccggaaguugaguaga

SEQ ID NO: 383389 - RNA, 16 nt, West Nile virus
cgauagugccccaggu

SEQ ID NO: 383390 - RNA, 16 nt, West Nile virus
gacugggugaccaaag

SEQ ID NO: 383391 - RNA, 15 nt, West Nile virus
ggcucaaccccagga

SEQ ID NO: 383392 - RNA, 15 nt, West Nile virus
guagacggugcugcc

SEQ ID NO: 383393 - RNA, 14 nt, West Nile virus
guguuaaccaggga

SEQ ID NO: 383394 - RNA, 14 nt, West Nile virus
uagacggugcugcc

SEQ ID NO: 383395 - RNA, 20 nt, West Nile virus
ugaccaaagcugcgagguga

SEQ ID NO: 383396 - RNA, 20 nt, West Nile virus
ugcgauagugccccaggugg

SEQ ID NO: 383397 - RNA, 15 nt, West Nile virus
ugcggagagugcagu

SEQ ID NO: 383398 - RNA, 13 nt, Western equine encephalomyelitis virus
aaacacuauacac

SEQ ID NO: 383399 - RNA, 14 nt, Western equine encephalomyelitis virus
aaacacuauacaca

SEQ ID NO: 383400 - RNA, 20 nt, Western equine encephalomyelitis virus
aaacacuauacacacuuuau

SEQ ID NO: 383401 - RNA, 20 nt, Western equine encephalomyelitis virus
aagaagaagcagcaagccaa

SEQ ID NO: 383402 - RNA, 16 nt, Western equine encephalomyelitis virus
aagaagcagcaagcca

SEQ ID NO: 383403 - RNA, 14 nt, Western equine encephalomyelitis virus
aagcagcaagccaa

SEQ ID NO: 383404 - RNA, 14 nt, Western equine encephalomyelitis virus
aagcguggugcaua

SEQ ID NO: 383405 - RNA, 16 nt, Western equine encephalomyelitis virus
aagcguggugcauaau

SEQ ID NO: 383406 - RNA, 22 nt, Western equine encephalomyelitis virus
aaguuggagucggacaagacau

SEQ ID NO: 383407 - RNA, 15 nt, Western equine encephalomyelitis virus
acaacgaucaccuaa

SEQ ID NO: 383408 - RNA, 16 nt, Western equine encephalomyelitis virus
acacuauacacacuuu

SEQ ID NO: 383409 - RNA, 15 nt, Western equine encephalomyelitis virus
acacuauaucacuuu

SEQ ID NO: 383410 - RNA, 23 nt, Western equine encephalomyelitis virus
acauauuaacaacacuauaucac

SEQ ID NO: 383411 - RNA, 16 nt, Western equine encephalomyelitis virus
acauauuuuacuuaaa

SEQ ID NO: 383412 - RNA, 13 nt, Western equine encephalomyelitis virus
acuacacauauuu

SEQ ID NO: 383413 - RNA, 11 nt, Western equine encephalomyelitis virus
acuacauauua

SEQ ID NO: 383414 - RNA, 18 nt, Western equine encephalomyelitis virus
acuuaaaaacacuauaca

SEQ ID NO: 383415 - RNA, 18 nt, Western equine encephalomyelitis virus
agaagaagcagcaagcca

SEQ ID NO: 383416 - RNA, 22 nt, Western equine encephalomyelitis virus
agaagagugcuccuaagccaaa

SEQ ID NO: 383417 - RNA, 16 nt, Western equine encephalomyelitis virus
agacacgcaccuaccc

SEQ ID NO: 383418 - RNA, 15 nt, Western equine encephalomyelitis virus
agagugcuccuaagc

SEQ ID NO: 383419 - RNA, 20 nt, Western equine encephalomyelitis virus
agagugcuccuaagccaaaa

SEQ ID NO: 383420 - RNA, 13 nt, Western equine encephalomyelitis virus
agauccaaacccu

SEQ ID NO: 383421 - RNA, 19 nt, Western equine encephalomyelitis virus
agauccaaacccuccuagg

SEQ ID NO: 383422 - RNA, 14 nt, Western equine encephalomyelitis virus
agcagcaagccaag

SEQ ID NO: 383423 - RNA, 14 nt, Western equine encephalomyelitis virus
agcugaacuuucca

SEQ ID NO: 383424 - RNA, 17 nt, Western equine encephalomyelitis virus
agugcuccuaagccaaa

SEQ ID NO: 383425 - RNA, 14 nt, Western equine encephalomyelitis virus
auauacacuacaca

SEQ ID NO: 383426 - RNA, 21 nt, Western equine encephalomyelitis virus
auaucacacuacauauuaaca

SEQ ID NO: 383427 - RNA, 22 nt, Western equine encephalomyelitis virus
auauuuuacuuaaaaacacuau

SEQ ID NO: 383428 - RNA, 20 nt, Western equine encephalomyelitis virus
auuuuacuuaaaaacacuau

SEQ ID NO: 383429 - RNA, 17 nt, Western equine encephalomyelitis virus
caacacuauaucacuuu

SEQ ID NO: 383430 - RNA, 13 nt, Western equine encephalomyelitis virus
cacagugcauaau

SEQ ID NO: 383431 - RNA, 13 nt, Western equine encephalomyelitis virus
cacuaaaacucga

SEQ ID NO: 383432 - RNA, 17 nt, Western equine encephalomyelitis virus
cacuauacacacuuuau

SEQ ID NO: 383433 - RNA, 18 nt, Western equine encephalomyelitis virus
cagguccaccgccaaaga

SEQ ID NO: 383434 - RNA, 22 nt, Western equine encephalomyelitis virus
cauagcgguaaaacucgaugua

SEQ ID NO: 383435 - RNA, 21 nt, Western equine encephalomyelitis virus
cauuaaucguauaucacacua

SEQ ID NO: 383436 - RNA, 20 nt, Western equine encephalomyelitis virus
ccgaggaagcacagugcaua

SEQ ID NO: 383437 - RNA, 20 nt, Western equine encephalomyelitis virus
ccgaggaagcguggugcaua

SEQ ID NO: 383438 - RNA, 21 nt, Western equine encephalomyelitis virus
ccgaggaagcguggugcauaa

SEQ ID NO: 383439 - RNA, 21 nt, Western equine encephalomyelitis virus
cguauaucacacuacauauua

SEQ ID NO: 383440 - RNA, 20 nt, Western equine encephalomyelitis virus
cuaauauacacuacacauau

SEQ ID NO: 383441 - RNA, 22 nt, Western equine encephalomyelitis virus
cuaugggucucuaauauacacu

SEQ ID NO: 383442 - RNA, 12 nt, Western equine encephalomyelitis virus
cucagccuaaaa

SEQ ID NO: 383443 - RNA, 13 nt, Western equine encephalomyelitis virus
cuccuaagccaaa

SEQ ID NO: 383444 - RNA, 16 nt, Western equine encephalomyelitis virus
cucuaauauacacuac

SEQ ID NO: 383445 - RNA, 19 nt, Western equine encephalomyelitis virus
cuuuuaugagacucacuau

SEQ ID NO: 383446 - RNA, 19 nt, Western equine encephalomyelitis virus
gaggaagcguggugcauaa

SEQ ID NO: 383447 - RNA, 19 nt, Western equine encephalomyelitis virus
gagugcuccuaagccaaaa

SEQ ID NO: 383448 - RNA, 14 nt, Western equine encephalomyelitis virus
gcuccuaagccaaa

SEQ ID NO: 383449 - RNA, 16 nt, Western equine encephalomyelitis virus
ggaagcacagugcaua

SEQ ID NO: 383450 - RNA, 16 nt, Western equine encephalomyelitis virus
ggaagcguggugcaua

SEQ ID NO: 383451 - RNA, 17 nt, Western equine encephalomyelitis virus
uaaaaacacuauacaca

SEQ ID NO: 383452 - RNA, 23 nt, Western equine encephalomyelitis virus
uaaaaacacuauacacacuuuau

SEQ ID NO: 383453 - RNA, 14 nt, Western equine encephalomyelitis virus
uaauauacacuaca

SEQ ID NO: 383454 - RNA, 13 nt, Western equine encephalomyelitis virus
uaaucguauauca

SEQ ID NO: 383455 - RNA, 23 nt, Western equine encephalomyelitis virus
uacccaccggcagaauguuucca

SEQ ID NO: 383456 - RNA, 19 nt, Western equine encephalomyelitis virus
uacuuaaaaacacuauaca

SEQ ID NO: 383457 - RNA, 14 nt, Western equine encephalomyelitis virus
uauuaacaacacua

SEQ ID NO: 383458 - RNA, 16 nt, Western equine encephalomyelitis virus
ucagccuaaaaagaag

SEQ ID NO: 383459 - RNA, 18 nt, Western equine encephalomyelitis virus
uccaccaguuuacccuac

SEQ ID NO: 383460 - RNA, 17 nt, Western equine encephalomyelitis virus
uccaccgccaaagaaga

SEQ ID NO: 383461 - RNA, 21 nt, Western equine encephalomyelitis virus
uccgaggaagcacagugcaua

SEQ ID NO: 383462 - RNA, 22 nt, Western equine encephalomyelitis virus
uccgaggaagcacagugcauaa

SEQ ID NO: 383463 - RNA, 21 nt, Western equine encephalomyelitis virus
uccgaggaagcguggugcaua

SEQ ID NO: 383464 - RNA, 22 nt, Western equine encephalomyelitis virus
uccgaggaagcguggugcauaa

SEQ ID NO: 383465 - RNA, 20 nt, Western equine encephalomyelitis virus
ucucuaauauacacuacaca

SEQ ID NO: 383466 - RNA, 15 nt, Western equine encephalomyelitis virus
ugacacuaaaacucg

SEQ ID NO: 383467 - RNA, 17 nt, Western equine encephalomyelitis virus
ugacacuaaaacucgau

SEQ ID NO: 383468 - RNA, 22 nt, Western equine encephalomyelitis virus
ugacauagcgguaaaacucgau

SEQ ID NO: 383469 - RNA, 17 nt, Western equine encephalomyelitis virus
ugcuccuaagccaaaac

SEQ ID NO: 383470 - RNA, 13 nt, Western equine encephalomyelitis virus
uuaaaaacacuau

SEQ ID NO: 383471 - RNA, 14 nt, Western equine encephalomyelitis virus
uuaaaaacacuaua

SEQ ID NO: 383472 - RNA, 17 nt, Western equine encephalomyelitis virus
uuaacaacacuauauca

SEQ ID NO: 383473 - RNA, 19 nt, Western equine encephalomyelitis virus
uuccauacccucagcugaa

SEQ ID NO: 383474 - RNA, 22 nt, Western equine encephalomyelitis virus
uuccgaggaagcguggugcaua

SEQ ID NO: 383475 - RNA, 16 nt, Western equine encephalomyelitis virus
uuccgaucaugcugaa

SEQ ID NO: 383476 - RNA, 20 nt, Western equine encephalomyelitis virus
aaaaacacuauacacacuuu

SEQ ID NO: 383477 - RNA, 12 nt, Western equine encephalomyelitis virus
aaaacacuauac

SEQ ID NO: 383478 - RNA, 18 nt, Western equine encephalomyelitis virus
aaaccuacucagccuaaa

SEQ ID NO: 383479 - RNA, 15 nt, Western equine encephalomyelitis virus
aaacgcaagccuaaa

SEQ ID NO: 383480 - RNA, 12 nt, Western equine encephalomyelitis virus
aaacucgaugua

SEQ ID NO: 383481 - RNA, 21 nt, Western equine encephalomyelitis virus
aagaagagugcuccuaagcca

SEQ ID NO: 383482 - RNA, 22 nt, Western equine encephalomyelitis virus
aagaagagugcuccuaagccaa

SEQ ID NO: 383483 - RNA, 14 nt, Western equine encephalomyelitis virus
aagcacagugcaua

SEQ ID NO: 383484 - RNA, 15 nt, Western equine encephalomyelitis virus
aagcagcaagccaag

SEQ ID NO: 383485 - RNA, 15 nt, Western equine encephalomyelitis virus
acaacacuauaucac

SEQ ID NO: 383486 - RNA, 18 nt, Western equine encephalomyelitis virus
acacuauaucacuuuuau

SEQ ID NO: 383487 - RNA, 19 nt, Western equine encephalomyelitis virus
acauagcgguaaaacucga

SEQ ID NO: 383488 - RNA, 20 nt, Western equine encephalomyelitis virus
acauagcgguaaaacucgau

SEQ ID NO: 383489 - RNA, 18 nt, Western equine encephalomyelitis virus
acauauuaacaacacuau

SEQ ID NO: 383490 - RNA, 18 nt, Western equine encephalomyelitis virus
acauuaaucguauaucac

SEQ ID NO: 383491 - RNA, 19 nt, Western equine encephalomyelitis virus
acccucagcugaacuuucc

SEQ ID NO: 383492 - RNA, 14 nt, Western equine encephalomyelitis virus
accuacucagccua

SEQ ID NO: 383493 - RNA, 22 nt, Western equine encephalomyelitis virus
acuaugggucucuaauauacac

SEQ ID NO: 383494 - RNA, 15 nt, Western equine encephalomyelitis virus
agaagagugcuccua

SEQ ID NO: 383495 - RNA, 16 nt, Western equine encephalomyelitis virus
agaagagugcuccuaa

SEQ ID NO: 383496 - RNA, 16 nt, Western equine encephalomyelitis virus
agaagcagcaagccaa

SEQ ID NO: 383497 - RNA, 18 nt, Western equine encephalomyelitis virus
agaagcagcaagccaaga

SEQ ID NO: 383498 - RNA, 13 nt, Western equine encephalomyelitis virus
agacacgcaccua

SEQ ID NO: 383499 - RNA, 18 nt, Western equine encephalomyelitis virus
agagugcuccuaagccaa

SEQ ID NO: 383500 - RNA, 11 nt, Western equine encephalomyelitis virus
agcaagccaag

SEQ ID NO: 383501 - RNA, 14 nt, Western equine encephalomyelitis virus
agcacagugcauaa

SEQ ID NO: 383502 - RNA, 15 nt, Western equine encephalomyelitis virus
agcacagugcauaau

SEQ ID NO: 383503 - RNA, 14 nt, Western equine encephalomyelitis virus
agccaaaaccuacu

SEQ ID NO: 383504 - RNA, 14 nt, Western equine encephalomyelitis virus
agcguggugcauaa

SEQ ID NO: 383505 - RNA, 16 nt, Western equine encephalomyelitis virus
agucaacuugacuuuc

SEQ ID NO: 383506 - RNA, 14 nt, Western equine encephalomyelitis virus
auacacacuuuaua

SEQ ID NO: 383507 - RNA, 13 nt, Western equine encephalomyelitis virus
auacccucagcug

SEQ ID NO: 383508 - RNA, 16 nt, Western equine encephalomyelitis virus
auauuaacaacacuau

SEQ ID NO: 383509 - RNA, 19 nt, Western equine encephalomyelitis virus
auauuaacaacacuauauc

SEQ ID NO: 383510 - RNA, 23 nt, Western equine encephalomyelitis virus
auauuuuacuuaaaaacacuaua

SEQ ID NO: 383511 - RNA, 21 nt, Western equine encephalomyelitis virus
augcugugcagugucacauua

SEQ ID NO: 383512 - RNA, 14 nt, Western equine encephalomyelitis virus
auuaacaacacuau

SEQ ID NO: 383513 - RNA, 16 nt, Western equine encephalomyelitis virus
auuaacaacacuauau

SEQ ID NO: 383514 - RNA, 15 nt, Western equine encephalomyelitis virus
caacacuauaucacu

SEQ ID NO: 383515 - RNA, 20 nt, Western equine encephalomyelitis virus
caacacuauaucacuuuuau

SEQ ID NO: 383516 - RNA, 16 nt, Western equine encephalomyelitis virus
caacuugacuuucaaa

SEQ ID NO: 383517 - RNA, 13 nt, Western equine encephalomyelitis virus
cacuacacauauu

SEQ ID NO: 383518 - RNA, 12 nt, Western equine encephalomyelitis virus
cagcaagccaag

SEQ ID NO: 383519 - RNA, 15 nt, Western equine encephalomyelitis virus
cagugucacauuaau

SEQ ID NO: 383520 - RNA, 16 nt, Western equine encephalomyelitis virus
caguuuacccuacaaa

SEQ ID NO: 383521 - RNA, 18 nt, Western equine encephalomyelitis virus
cauauuaacaacacuaua

SEQ ID NO: 383522 - RNA, 24 nt, Western equine encephalomyelitis virus
ccaaagaagaagaagagugcuccu

SEQ ID NO: 383523 - RNA, 21 nt, Western equine encephalomyelitis virus
ccgaggaagcacagugcauaa

SEQ ID NO: 383524 - RNA, 16 nt, Western equine encephalomyelitis virus
cgaaacgcaagccuaa

SEQ ID NO: 383525 - RNA, 19 nt, Western equine encephalomyelitis virus
cgaggaagcacagugcaua

SEQ ID NO: 383526 - RNA, 19 nt, Western equine encephalomyelitis virus
cgaggaagcguggugcaua

SEQ ID NO: 383527 - RNA, 13 nt, Western equine encephalomyelitis virus
cguggugcauaau

SEQ ID NO: 383528 - RNA, 22 nt, Western equine encephalomyelitis virus
cuaauauacacuacacauauuu

SEQ ID NO: 383529 - RNA, 22 nt, Western equine encephalomyelitis virus
cuacauauuaacaacacuauau

SEQ ID NO: 383530 - RNA, 13 nt, Western equine encephalomyelitis virus
cuacucagccuaa

SEQ ID NO: 383531 - RNA, 15 nt, Western equine encephalomyelitis virus
cuauacacacuuuau

SEQ ID NO: 383532 - RNA, 15 nt, Western equine encephalomyelitis virus
cuauaucacuuuuau

SEQ ID NO: 383533 - RNA, 20 nt, Western equine encephalomyelitis virus
cucacuaugggucucuaaua

SEQ ID NO: 383534 - RNA, 17 nt, Western equine encephalomyelitis virus
cucuaauauacacuaca

SEQ ID NO: 383535 - RNA, 19 nt, Western equine encephalomyelitis virus
cuuaaaaacacuauacaca

SEQ ID NO: 383536 - RNA, 20 nt, Western equine encephalomyelitis virus
gaagagugcuccuaagccaa

SEQ ID NO: 383537 - RNA, 21 nt, Western equine encephalomyelitis virus
gaagagugcuccuaagccaaa

SEQ ID NO: 383538 - RNA, 16 nt, Western equine encephalomyelitis virus
gaagcacagugcauaa

SEQ ID NO: 383539 - RNA, 15 nt, Western equine encephalomyelitis virus
gaagcagcaagccaa

SEQ ID NO: 383540 - RNA, 19 nt, Western equine encephalomyelitis virus
gacacuaaaacucgaugua

SEQ ID NO: 383541 - RNA, 13 nt, Western equine encephalomyelitis virus
gcagcaagccaag

SEQ ID NO: 383542 - RNA, 17 nt, Western equine encephalomyelitis virus
guauaucacacuacaua

SEQ ID NO: 383543 - RNA, 13 nt, Western equine encephalomyelitis virus
uaacaacacuaua

SEQ ID NO: 383544 - RNA, 17 nt, Western equine encephalomyelitis virus
uaacaacacuauaucac

SEQ ID NO: 383545 - RNA, 16 nt, Western equine encephalomyelitis virus
uaauauacacuacaca

SEQ ID NO: 383546 - RNA, 22 nt, Western equine encephalomyelitis virus
uacauauuaacaacacuauauc

SEQ ID NO: 383547 - RNA, 21 nt, Western equine encephalomyelitis virus
uacccucagcugaacuuucca

SEQ ID NO: 383548 - RNA, 19 nt, Western equine encephalomyelitis virus
uagacacgcaccuacccac

SEQ ID NO: 383549 - RNA, 18 nt, Western equine encephalomyelitis virus
uagucaacuugacuuuca

SEQ ID NO: 383550 - RNA, 12 nt, Western equine encephalomyelitis virus
uauacacuacac

SEQ ID NO: 383551 - RNA, 17 nt, Western equine encephalomyelitis virus
uauacacuacacauauu

SEQ ID NO: 383552 - RNA, 14 nt, Western equine encephalomyelitis virus
uauaucacacuaca

SEQ ID NO: 383553 - RNA, 16 nt, Western equine encephalomyelitis virus
uauaucacacuacaua

SEQ ID NO: 383554 - RNA, 13 nt, Western equine encephalomyelitis virus
uaucacacuacau

SEQ ID NO: 383555 - RNA, 23 nt, Western equine encephalomyelitis virus
uauuuccgaggaagcacagugca

SEQ ID NO: 383556 - RNA, 20 nt, Western equine encephalomyelitis virus
ucacauuaaucguauaucac

SEQ ID NO: 383557 - RNA, 15 nt, Western equine encephalomyelitis virus
uccaccgccaaagaa

SEQ ID NO: 383558 - RNA, 12 nt, Western equine encephalomyelitis virus
ucguauaucaca

SEQ ID NO: 383559 - RNA, 18 nt, Western equine encephalomyelitis virus
ucuaauauacacuacaca

SEQ ID NO: 383560 - RNA, 20 nt, Western equine encephalomyelitis virus
ugacauagcgguaaaacucg

SEQ ID NO: 383561 - RNA, 15 nt, Western equine encephalomyelitis virus
ugcuccuaagccaaa

SEQ ID NO: 383562 - RNA, 17 nt, Western equine encephalomyelitis virus
uggagucggacaagaca

SEQ ID NO: 383563 - RNA, 21 nt, Western equine encephalomyelitis virus
uggcuuaccgagauccaaacc

SEQ ID NO: 383564 - RNA, 22 nt, Western equine encephalomyelitis virus
uuaacaacacuauaucacuuuu

SEQ ID NO: 383565 - RNA, 22 nt, Western equine encephalomyelitis virus
uuccgaggaagcacagugcaua

SEQ ID NO: 383566 - RNA, 18 nt, Western equine encephalomyelitis virus
uugacacuaaaacucgau

SEQ ID NO: 383567 - RNA, 17 nt, Yellow fever virus
aaaccugguuucuggga

SEQ ID NO: 383568 - RNA, 22 nt, Yellow fever virus
aaaccugguuucugggaccucc

SEQ ID NO: 383569 - RNA, 14 nt, Yellow fever virus
aaauagugggacca

SEQ ID NO: 383570 - RNA, 13 nt, Yellow fever virus
aauagugggacca

SEQ ID NO: 383571 - RNA, 19 nt, Yellow fever virus
acaaccugaaaccgggaua

SEQ ID NO: 383572 - RNA, 15 nt, Yellow fever virus
acacauugagacaga

SEQ ID NO: 383573 - RNA, 14 nt, Yellow fever virus
acagccgaccucca

SEQ ID NO: 383574 - RNA, 22 nt, Yellow fever virus
acaggaauaaccgggauacaaa

SEQ ID NO: 383575 - RNA, 20 nt, Yellow fever virus
accauauugacgccagggaa

SEQ ID NO: 383576 - RNA, 21 nt, Yellow fever virus
accauauugacgccagggaaa

SEQ ID NO: 383577 - RNA, 15 nt, Yellow fever virus
accaucuaacaggaa

SEQ ID NO: 383578 - RNA, 14 nt, Yellow fever virus
acccuccagggaac

SEQ ID NO: 383579 - RNA, 18 nt, Yellow fever virus
accgggauacaaaccacg

SEQ ID NO: 383580 - RNA, 18 nt, Yellow fever virus
accgggauauaaaccacg

SEQ ID NO: 383581 - RNA, 22 nt, Yellow fever virus
accgggauauaaaccacggcug

SEQ ID NO: 383582 - RNA, 22 nt, Yellow fever virus
accugguuucugggaccuccca

SEQ ID NO: 383583 - RNA, 17 nt, Yellow fever virus
acugcuaagcugugagg

SEQ ID NO: 383584 - RNA, 13 nt, Yellow fever virus
agaaaccgggaua

SEQ ID NO: 383585 - RNA, 16 nt, Yellow fever virus
agaaaccgggauaaaa

SEQ ID NO: 383586 - RNA, 18 nt, Yellow fever virus
agaccuuuggaugacaaa

SEQ ID NO: 383587 - RNA, 16 nt, Yellow fever virus
agaggucugugagcac

SEQ ID NO: 383588 - RNA, 12 nt, Yellow fever virus
agccgaccucca

SEQ ID NO: 383589 - RNA, 16 nt, Yellow fever virus
auaaccgggauacaaa

SEQ ID NO: 383590 - RNA, 12 nt, Yellow fever virus
auauaaaccacg

SEQ ID NO: 383591 - RNA, 20 nt, Yellow fever virus
auauaaaccacggcuggaga

SEQ ID NO: 383592 - RNA, 13 nt, Yellow fever virus
aucuaacaggaau

SEQ ID NO: 383593 - RNA, 12 nt, Yellow fever virus
cagaaaccggga

SEQ ID NO: 383594 - RNA, 22 nt, Yellow fever virus
cagggaacaaauagugggacca

SEQ ID NO: 383595 - RNA, 19 nt, Yellow fever virus
ccacaaccugaaaccggga

SEQ ID NO: 383596 - RNA, 20 nt, Yellow fever virus
ccacggcuggagaaccgggc

SEQ ID NO: 383597 - RNA, 23 nt, Yellow fever virus
ccaucuaacaggaauaaccggga

SEQ ID NO: 383598 - RNA, 14 nt, Yellow fever virus
cccacaaccugaaa

SEQ ID NO: 383599 - RNA, 13 nt, Yellow fever virus
cccuccagggaac

SEQ ID NO: 383600 - RNA, 11 nt, Yellow fever virus
ccgggauacaa

SEQ ID NO: 383601 - RNA, 18 nt, Yellow fever virus
ccugaaaccgggauauaa

SEQ ID NO: 383602 - RNA, 20 nt, Yellow fever virus
cuagagguuagaggagaccc

SEQ ID NO: 383603 - RNA, 12 nt, Yellow fever virus
gaaaaaccuggu

SEQ ID NO: 383604 - RNA, 20 nt, Yellow fever virus
gaagaaguugucagcccaga

SEQ ID NO: 383605 - RNA, 21 nt, Yellow fever virus
gaccauauugacgccagggaa

SEQ ID NO: 383606 - RNA, 13 nt, Yellow fever virus
gacgccagggaaa

SEQ ID NO: 383607 - RNA, 22 nt, Yellow fever virus
gagguuagaggagacccuccag

SEQ ID NO: 383608 - RNA, 14 nt, Yellow fever virus
gcuaagcugugagg

SEQ ID NO: 383609 - RNA, 19 nt, Yellow fever virus
gcugggacagccgaccucc

SEQ ID NO: 383610 - RNA, 23 nt, Yellow fever virus
uaacaggaauaaccgggauacaa

SEQ ID NO: 383611 - RNA, 19 nt, Yellow fever virus
uccagaggucugugagcac

SEQ ID NO: 383612 - RNA, 14 nt, Yellow fever virus
ugcaggcugggaca

SEQ ID NO: 383613 - RNA, 22 nt, Yellow fever virus
ugccacugcuaagcugugaggc

SEQ ID NO: 383614 - RNA, 22 nt, Yellow fever virus
ugguucucugcuuuuccuccag

SEQ ID NO: 383615 - RNA, 23 nt, Yellow fever virus
uuaaaaugaaacagaaaccggga

SEQ ID NO: 383616 - RNA, 21 nt, Yellow fever virus
uuccuccagaggucugugagc

SEQ ID NO: 383617 - RNA, 15 nt, Yellow fever virus
uugacgccagggaaa

SEQ ID NO: 383618 - RNA, 21 nt, Yellow fever virus
uugucagcccagaaccccaca

SEQ ID NO: 383619 - RNA, 11 nt, Yellow fever virus
uuucugggacc

SEQ ID NO: 383620 - RNA, 12 nt, Yellow fever virus
uuucugggaccu

SEQ ID NO: 383621 - RNA, 22 nt, Yellow fever virus
aaccugguuucugggaccuccc

SEQ ID NO: 383622 - RNA, 12 nt, Yellow fever virus
acauugagacag

SEQ ID NO: 383623 - RNA, 13 nt, Yellow fever virus
acccuccagggaa

SEQ ID NO: 383624 - RNA, 22 nt, Yellow fever virus
accgggauacaaaccacgggug

SEQ ID NO: 383625 - RNA, 20 nt, Yellow fever virus
accucccaccccagaguaaa

SEQ ID NO: 383626 - RNA, 20 nt, Yellow fever virus
accugguuucugggaccucc

SEQ ID NO: 383627 - RNA, 14 nt, Yellow fever virus
agaaccggacucca

SEQ ID NO: 383628 - RNA, 14 nt, Yellow fever virus
agacccuccaggga

SEQ ID NO: 383629 - RNA, 18 nt, Yellow fever virus
agacccuccagggaacaa

SEQ ID NO: 383630 - RNA, 19 nt, Yellow fever virus
agacccuccagggaacaaa

SEQ ID NO: 383631 - RNA, 14 nt, Yellow fever virus
agaggucugugagc

SEQ ID NO: 383632 - RNA, 16 nt, Yellow fever virus
aggaauaaccgggaua

SEQ ID NO: 383633 - RNA, 22 nt, Yellow fever virus
aggcugggacagccgaccucca

SEQ ID NO: 383634 - RNA, 19 nt, Yellow fever virus
agguuagaggagacccucc

SEQ ID NO: 383635 - RNA, 15 nt, Yellow fever virus
auaaccgggauacaa

SEQ ID NO: 383636 - RNA, 12 nt, Yellow fever virus
auacaaaccacg

SEQ ID NO: 383637 - RNA, 17 nt, Yellow fever virus
ccgcacuuaaaaugaaa

SEQ ID NO: 383638 - RNA, 16 nt, Yellow fever virus
ccgggauacaaaccac

SEQ ID NO: 383639 - RNA, 16 nt, Yellow fever virus
ccgggauauaaaccac

SEQ ID NO: 383640 - RNA, 20 nt, Yellow fever virus
ccucccacguggugguagaa

SEQ ID NO: 383641 - RNA, 16 nt, Yellow fever virus
cgggauacaaaccacg

SEQ ID NO: 383642 - RNA, 19 nt, Yellow fever virus
cuaacaggaauaaccggga

SEQ ID NO: 383643 - RNA, 18 nt, Yellow fever virus
cuuuggaugacaaacaca

SEQ ID NO: 383644 - RNA, 14 nt, Yellow fever virus
gacagccgaccucc

SEQ ID NO: 383645 - RNA, 14 nt, Yellow fever virus
gacccuccagggaa

SEQ ID NO: 383646 - RNA, 16 nt, Yellow fever virus
gaccucccaccccaga

SEQ ID NO: 383647 - RNA, 17 nt, Yellow fever virus
gagacccuccagggaac

SEQ ID NO: 383648 - RNA, 12 nt, Yellow fever virus
uaagcugugagg

SEQ ID NO: 383649 - RNA, 15 nt, Yellow fever virus
uccacacauugagac

SEQ ID NO: 383650 - RNA, 22 nt, Yellow fever virus
uccagguugcgaaaaaccuggu

SEQ ID NO: 383651 - RNA, 21 nt, Yellow fever virus
uccccacaaccugaaaccggg

SEQ ID NO: 383652 - RNA, 17 nt, Yellow fever virus
ugaaacagaaaccggga

SEQ ID NO: 383653 - RNA, 22 nt, Yellow fever virus
ugaaaccgggauauaaaccacg

SEQ ID NO: 383654 - RNA, 19 nt, Yellow fever virus
uggagaaccggacuccaca

SEQ ID NO: 383655 - RNA, 15 nt, Yellow fever virus
ugguuucugggaccu

SEQ ID NO: 383656 - RNA, 23 nt, Yellow fever virus
uuagaggagacccuccagggaac

SEQ ID NO: 383657 - RNA, 21 nt, Zaire Ebola virus (ZEBOV)
aaaagcucagccucaaaucaa

SEQ ID NO: 383658 - RNA, 20 nt, Zaire Ebola virus (ZEBOV)
aaaaggcaggacuguaaaau

SEQ ID NO: 383659 - RNA, 23 nt, Zaire Ebola virus (ZEBOV)
aaaccagguccggacaacagcac

SEQ ID NO: 383660 - RNA, 19 nt, Zaire Ebola virus (ZEBOV)
aaagcucagccucaaauca

SEQ ID NO: 383661 - RNA, 20 nt, Zaire Ebola virus (ZEBOV)
aaagcucagccucaaaucaa

SEQ ID NO: 383662 - RNA, 13 nt, Zaire Ebola virus (ZEBOV)
aaaggauugauug

SEQ ID NO: 383663 - RNA, 16 nt, Zaire Ebola virus (ZEBOV)
aaauagcuaacauuaa

SEQ ID NO: 383664 - RNA, 14 nt, Zaire Ebola virus (ZEBOV)
aaauccucacugua

SEQ ID NO: 383665 - RNA, 13 nt, Zaire Ebola virus (ZEBOV)
aaauuccucugca

SEQ ID NO: 383666 - RNA, 16 nt, Zaire Ebola virus (ZEBOV)
aacaaaauugaucuuu

SEQ ID NO: 383667 - RNA, 23 nt, Zaire Ebola virus (ZEBOV)
aacaagguuugacaucaaucuag

SEQ ID NO: 383668 - RNA, 18 nt, Zaire Ebola virus (ZEBOV)
aacaaugggaugauucaa

SEQ ID NO: 383669 - RNA, 23 nt, Zaire Ebola virus (ZEBOV)
aacagugaucaaagaaaaucaua

SEQ ID NO: 383670 - RNA, 13 nt, Zaire Ebola virus (ZEBOV)
aacaucaccgcag

SEQ ID NO: 383671 - RNA, 20 nt, Zaire Ebola virus (ZEBOV)
aacaucaguggucagagucc

SEQ ID NO: 383672 - RNA, 12 nt, Zaire Ebola virus (ZEBOV)
aacauuacaaau

SEQ ID NO: 383673 - RNA, 14 nt, Zaire Ebola virus (ZEBOV)
aacauuuacacgau

SEQ ID NO: 383674 - RNA, 16 nt, Zaire Ebola virus (ZEBOV)
aaccuaacacacauaa

SEQ ID NO: 383675 - RNA, 15 nt, Zaire Ebola virus (ZEBOV)
aaccugccaagcaua

SEQ ID NO: 383676 - RNA, 14 nt, Zaire Ebola virus (ZEBOV)
aacgacagcacagc

SEQ ID NO: 383677 - RNA, 18 nt, Zaire Ebola virus (ZEBOV)
aacucauaaauugcucuc

SEQ ID NO: 383678 - RNA, 15 nt, Zaire Ebola virus (ZEBOV)
aacucugcacucuuu

SEQ ID NO: 383679 - RNA, 14 nt, Zaire Ebola virus (ZEBOV)
aagacaacaucaua

SEQ ID NO: 383680 - RNA, 14 nt, Zaire Ebola virus (ZEBOV)
aagauuacuugaca

SEQ ID NO: 383681 - RNA, 19 nt, Zaire Ebola virus (ZEBOV)
aagcauaauaaauaaauac

SEQ ID NO: 383682 - RNA, 22 nt, Zaire Ebola virus (ZEBOV)
aagcauaauaaauaaauacuca

SEQ ID NO: 383683 - RNA, 12 nt, Zaire Ebola virus (ZEBOV)
aagcauaccucu

SEQ ID NO: 383684 - RNA, 17 nt, Zaire Ebola virus (ZEBOV)
aagcuagcuuauuauua

SEQ ID NO: 383685 - RNA, 16 nt, Zaire Ebola virus (ZEBOV)
aaggugugaauuauua

SEQ ID NO: 383686 - RNA, 16 nt, Zaire Ebola virus (ZEBOV)
aaguugaacaacauca

SEQ ID NO: 383687 - RNA, 13 nt, Zaire Ebola virus (ZEBOV)
aauaaacucugca

SEQ ID NO: 383688 - RNA, 17 nt, Zaire Ebola virus (ZEBOV)
aauaaauaaauacucau

SEQ ID NO: 383689 - RNA, 17 nt, Zaire Ebola virus (ZEBOV)
aauaauguuuuacucua

SEQ ID NO: 383690 - RNA, 20 nt, Zaire Ebola virus (ZEBOV)
aauacucauauuucuugaua

SEQ ID NO: 383691 - RNA, 18 nt, Zaire Ebola virus (ZEBOV)
aauaggagcuauaucucu

SEQ ID NO: 383692 - RNA, 16 nt, Zaire Ebola virus (ZEBOV)
aauaguuaucuugaca

SEQ ID NO: 383693 - RNA, 21 nt, Zaire Ebola virus (ZEBOV)
aauauaaccugccaagcauac

SEQ ID NO: 383694 - RNA, 17 nt, Zaire Ebola virus (ZEBOV)
aauauaauacacuggag

SEQ ID NO: 383695 - RNA, 17 nt, Zaire Ebola virus (ZEBOV)
aaucaugacaguugucu

SEQ ID NO: 383696 - RNA, 14 nt, Zaire Ebola virus (ZEBOV)
aauccucacuguaa

SEQ ID NO: 383697 - RNA, 20 nt, Zaire Ebola virus (ZEBOV)
aauccucacuguaagccagc

SEQ ID NO: 383698 - RNA, 14 nt, Zaire Ebola virus (ZEBOV)
aaucuaguuaucuc

SEQ ID NO: 383699 - RNA, 17 nt, Zaire Ebola virus (ZEBOV)
aaucuaguuaucucuuu

SEQ ID NO: 383700 - RNA, 20 nt, Zaire Ebola virus (ZEBOV)
aaucucaauaaacaacuauu

SEQ ID NO: 383701 - RNA, 17 nt, Zaire Ebola virus (ZEBOV)
aaugcaaauaggcguua

SEQ ID NO: 383702 - RNA, 22 nt, Zaire Ebola virus (ZEBOV)
aaugcagcaugugugacauauu

SEQ ID NO: 383703 - RNA, 19 nt, Zaire Ebola virus (ZEBOV)
aaugguucaagugcacagu

SEQ ID NO: 383704 - RNA, 22 nt, Zaire Ebola virus (ZEBOV)
aauguaauaggagcuauaucuc

SEQ ID NO: 383705 - RNA, 18 nt, Zaire Ebola virus (ZEBOV)
aauguagaacuuaacaaa

SEQ ID NO: 383706 - RNA, 15 nt, Zaire Ebola virus (ZEBOV)
aauguuuuacucuac

SEQ ID NO: 383707 - RNA, 12 nt, Zaire Ebola virus (ZEBOV)
aauuaagcuuua

SEQ ID NO: 383708 - RNA, 17 nt, Zaire Ebola virus (ZEBOV)
aauuaucauuacuuuaa

SEQ ID NO: 383709 - RNA, 10 nt, Zaire Ebola virus (ZEBOV)
aauugaucuu

SEQ ID NO: 383710 - RNA, 20 nt, Zaire Ebola virus (ZEBOV)
aauugcucucauacaucaua

SEQ ID NO: 383711 - RNA, 15 nt, Zaire Ebola virus (ZEBOV)
aauuguucauaucuc

SEQ ID NO: 383712 - RNA, 16 nt, Zaire Ebola virus (ZEBOV)
aauuguucauaucucg

SEQ ID NO: 383713 - RNA, 12 nt, Zaire Ebola virus (ZEBOV)
acaaaauugauc

SEQ ID NO: 383714 - RNA, 22 nt, Zaire Ebola virus (ZEBOV)
acaaauaauccuacuauaauca

SEQ ID NO: 383715 - RNA, 22 nt, Zaire Ebola virus (ZEBOV)
acaacacucaucaccaagauac

SEQ ID NO: 383716 - RNA, 20 nt, Zaire Ebola virus (ZEBOV)
acaacaucauagaauugcuu

SEQ ID NO: 383717 - RNA, 17 nt, Zaire Ebola virus (ZEBOV)
acaacuauuuaaauaac

SEQ ID NO: 383718 - RNA, 20 nt, Zaire Ebola virus (ZEBOV)
acaaguccccaaaaccacag

SEQ ID NO: 383719 - RNA, 16 nt, Zaire Ebola virus (ZEBOV)
acaauaaaagugauuc

SEQ ID NO: 383720 - RNA, 19 nt, Zaire Ebola virus (ZEBOV)
acaauacuccguauaccua

SEQ ID NO: 383721 - RNA, 22 nt, Zaire Ebola virus (ZEBOV)
acacccguguauaaacuugaca

SEQ ID NO: 383722 - RNA, 21 nt, Zaire Ebola virus (ZEBOV)
acacgaucguuuuauaauuaa

SEQ ID NO: 383723 - RNA, 16 nt, Zaire Ebola virus (ZEBOV)
acacuuuuaauugauc

SEQ ID NO: 383724 - RNA, 16 nt, Zaire Ebola virus (ZEBOV)
auugaucuuuaagauu

SEQ ID NO: 383725 - RNA, 19 nt, Zaire Ebola virus (ZEBOV)
auugaugaaagaucauaac

SEQ ID NO: 383726 - RNA, 19 nt, Zaire Ebola virus (ZEBOV)
auugccugcaugcuuacau

SEQ ID NO: 383727 - RNA, 22 nt, Zaire Ebola virus (ZEBOV)
auugcuggagucgcaggacuga

SEQ ID NO: 383728 - RNA, 15 nt, Zaire Ebola virus (ZEBOV)
auuguuauugauaua

SEQ ID NO: 383729 - RNA, 21 nt, Zaire Ebola virus (ZEBOV)
auuugagucuuaaugcaaaua

SEQ ID NO: 383730 - RNA, 20 nt, Zaire Ebola virus (ZEBOV)
auuuuaucaccagaaauccu

SEQ ID NO: 383731 - RNA, 13 nt, Zaire Ebola virus (ZEBOV)
auuuuugaauuua

SEQ ID NO: 383732 - RNA, 16 nt, Zaire Ebola virus (ZEBOV)
caaaagcagagaacac

SEQ ID NO: 383733 - RNA, 18 nt, Zaire Ebola virus (ZEBOV)
caaaagcagagaacacca

SEQ ID NO: 383734 - RNA, 19 nt, Zaire Ebola virus (ZEBOV)
caaagaaaaucauaaucuc

SEQ ID NO: 383735 - RNA, 18 nt, Zaire Ebola virus (ZEBOV)
caaauagcuaacauuaag

SEQ ID NO: 383736 - RNA, 21 nt, Zaire Ebola virus (ZEBOV)
caacaacacucaucaccaaga

SEQ ID NO: 383737 - RNA, 20 nt, Zaire Ebola virus (ZEBOV)
caacagcacccauaauacac

SEQ ID NO: 383738 - RNA, 20 nt, Zaire Ebola virus (ZEBOV)
caacgauccaucccaucaaa

SEQ ID NO: 383739 - RNA, 16 nt, Zaire Ebola virus (ZEBOV)
caacugaagaccacaa

SEQ ID NO: 383740 - RNA, 14 nt, Zaire Ebola virus (ZEBOV)
caacugcugaacua

SEQ ID NO: 383741 - RNA, 16 nt, Zaire Ebola virus (ZEBOV)
caauaaaagugauucu

SEQ ID NO: 383742 - RNA, 21 nt, Zaire Ebola virus (ZEBOV)
caauacuccguauaccuauca

SEQ ID NO: 383743 - RNA, 21 nt, Zaire Ebola virus (ZEBOV)
caauauacuaaaggugcuuua

SEQ ID NO: 383744 - RNA, 14 nt, Zaire Ebola virus (ZEBOV)
caaucuaguuaucu

SEQ ID NO: 383745 - RNA, 21 nt, Zaire Ebola virus (ZEBOV)
cacaacaaguccccaaaacca

SEQ ID NO: 383746 - RNA, 12 nt, Zaire Ebola virus (ZEBOV)
cacaaccaaacc

SEQ ID NO: 383747 - RNA, 22 nt, Zaire Ebola virus (ZEBOV)
cacagauaaauccucacuguaa

SEQ ID NO: 383748 - RNA, 22 nt, Zaire Ebola virus (ZEBOV)
cacagauucuauauauuacuaa

SEQ ID NO: 383749 - RNA, 19 nt, Zaire Ebola virus (ZEBOV)
cacauacuuuuugcccuua

SEQ ID NO: 383750 - RNA, 19 nt, Zaire Ebola virus (ZEBOV)
cacauguguuagguuucac

SEQ ID NO: 383751 - RNA, 17 nt, Zaire Ebola virus (ZEBOV)
caccaacacgagcaaga

SEQ ID NO: 383752 - RNA, 20 nt, Zaire Ebola virus (ZEBOV)
cagaaauaccuucuuuacaa

SEQ ID NO: 383753 - RNA, 13 nt, Zaire Ebola virus (ZEBOV)
cagagaacaccaa

SEQ ID NO: 383754 - RNA, 14 nt, Zaire Ebola virus (ZEBOV)
cagauaaauccuca

SEQ ID NO: 383755 - RNA, 15 nt, Zaire Ebola virus (ZEBOV)
cagauauauaagcau

SEQ ID NO: 383756 - RNA, 17 nt, Zaire Ebola virus (ZEBOV)
cagauugcuucauggaa

SEQ ID NO: 383757 - RNA, 15 nt, Zaire Ebola virus (ZEBOV)
cagcuuaaaauauaa

SEQ ID NO: 383758 - RNA, 14 nt, Zaire Ebola virus (ZEBOV)
caggacuguaaaau

SEQ ID NO: 383759 - RNA, 16 nt, Zaire Ebola virus (ZEBOV)
caguauuauaaucaau

SEQ ID NO: 383760 - RNA, 14 nt, Zaire Ebola virus (ZEBOV)
cauaaucagauaua

SEQ ID NO: 383761 - RNA, 18 nt, Zaire Ebola virus (ZEBOV)
cauagaauugcuuuauua

SEQ ID NO: 383762 - RNA, 15 nt, Zaire Ebola virus (ZEBOV)
cauaguauccugaua

SEQ ID NO: 383763 - RNA, 22 nt, Zaire Ebola virus (ZEBOV)
cauaguauccugauacuugcaa

SEQ ID NO: 383764 - RNA, 17 nt, Zaire Ebola virus (ZEBOV)
cauauauuuaaucaaga

SEQ ID NO: 383765 - RNA, 16 nt, Zaire Ebola virus (ZEBOV)
cauauuguuauugaua

SEQ ID NO: 383766 - RNA, 11 nt, Zaire Ebola virus (ZEBOV)
caucagugguc

SEQ ID NO: 383767 - RNA, 20 nt, Zaire Ebola virus (ZEBOV)
caucuaacaacccuugccac

SEQ ID NO: 383768 - RNA, 13 nt, Zaire Ebola virus (ZEBOV)
ccaaaaccacagc

SEQ ID NO: 383769 - RNA, 21 nt, Zaire Ebola virus (ZEBOV)
ccaaaagcagagaacaccaac

SEQ ID NO: 383770 - RNA, 23 nt, Zaire Ebola virus (ZEBOV)
ccagaaauccuauauacuaaaug

SEQ ID NO: 383771 - RNA, 17 nt, Zaire Ebola virus (ZEBOV)
ccagggaccaacacaac

SEQ ID NO: 383772 - RNA, 17 nt, Zaire Ebola virus (ZEBOV)
ccauaauuguaacucaa

SEQ ID NO: 383773 - RNA, 23 nt, Zaire Ebola virus (ZEBOV)
ccauaauuguaacucaauauucu

SEQ ID NO: 383774 - RNA, 14 nt, Zaire Ebola virus (ZEBOV)
ccaucccaucaaaa

SEQ ID NO: 383775 - RNA, 14 nt, Zaire Ebola virus (ZEBOV)
cccaaaaccacagc

SEQ ID NO: 383776 - RNA, 14 nt, Zaire Ebola virus (ZEBOV)
cccaaaagcagaga

SEQ ID NO: 383777 - RNA, 14 nt, Zaire Ebola virus (ZEBOV)
ccccaaucccucac

SEQ ID NO: 383778 - RNA, 17 nt, Zaire Ebola virus (ZEBOV)
cccccaaaagcagagaa

SEQ ID NO: 383779 - RNA, 18 nt, Zaire Ebola virus (ZEBOV)
cccuccgaaagaggcgaa

SEQ ID NO: 383780 - RNA, 15 nt, Zaire Ebola virus (ZEBOV)
cccuggauaauauaa

SEQ ID NO: 383781 - RNA, 14 nt, Zaire Ebola virus (ZEBOV)
ccggacaacagcac

SEQ ID NO: 383782 - RNA, 15 nt, Zaire Ebola virus (ZEBOV)
ccuaacacacauaaa

SEQ ID NO: 383783 - RNA, 15 nt, Zaire Ebola virus (ZEBOV)
ccuauauacuaaaug

SEQ ID NO: 383784 - RNA, 22 nt, Zaire Ebola virus (ZEBOV)
ccuccgacacucccucugccac

SEQ ID NO: 383785 - RNA, 20 nt, Zaire Ebola virus (ZEBOV)
ccuggaccccgccaccacaa

SEQ ID NO: 383786 - RNA, 21 nt, Zaire Ebola virus (ZEBOV)
ccuggauaauauaagucaauu

SEQ ID NO: 383787 - RNA, 21 nt, Zaire Ebola virus (ZEBOV)
ccugucagauggaauaguguu

SEQ ID NO: 383788 - RNA, 16 nt, Zaire Ebola virus (ZEBOV)
cgauccaucccaucaa

SEQ ID NO: 383789 - RNA, 15 nt, Zaire Ebola virus (ZEBOV)
cgcuggcaacaacaa

SEQ ID NO: 383790 - RNA, 17 nt, Zaire Ebola virus (ZEBOV)
cguauaccuaucaucau

SEQ ID NO: 383791 - RNA, 19 nt, Zaire Ebola virus (ZEBOV)
cguauaccuaucaucauau

SEQ ID NO: 383792 - RNA, 15 nt, Zaire Ebola virus (ZEBOV)
cuaaauuaaauuaca

SEQ ID NO: 383793 - RNA, 16 nt, Zaire Ebola virus (ZEBOV)
cuaaauuaaauuacau

SEQ ID NO: 383794 - RNA, 14 nt, Zaire Ebola virus (ZEBOV)
cuaacucauauaug

SEQ ID NO: 383795 - RNA, 12 nt, Zaire Ebola virus (ZEBOV)
cuaacucuauac

SEQ ID NO: 383796 - RNA, 13 nt, Zaire Ebola virus (ZEBOV)
cuaagauuacuug

SEQ ID NO: 383797 - RNA, 15 nt, Zaire Ebola virus (ZEBOV)
cuaagauuacuugac

SEQ ID NO: 383798 - RNA, 17 nt, Zaire Ebola virus (ZEBOV)
cuaagauuacuugacaa

SEQ ID NO: 383799 - RNA, 18 nt, Zaire Ebola virus (ZEBOV)
cuaagauuacuugacaaa

SEQ ID NO: 383800 - RNA, 18 nt, Zaire Ebola virus (ZEBOV)
cuaauaacauuacaaaua

SEQ ID NO: 383801 - RNA, 15 nt, Zaire Ebola virus (ZEBOV)
cuacuauaaucaaua

SEQ ID NO: 383802 - RNA, 13 nt, Zaire Ebola virus (ZEBOV)
cuagcagcuuaaa

SEQ ID NO: 383803 - RNA, 19 nt, Zaire Ebola virus (ZEBOV)
cuagcagcuuaaaauauaa

SEQ ID NO: 383804 - RNA, 23 nt, Zaire Ebola virus (ZEBOV)
cuagcgauuuaucuaaauuaaau

SEQ ID NO: 383805 - RNA, 22 nt, Zaire Ebola virus (ZEBOV)
cuagcuuauuauuacuagccgu

SEQ ID NO: 383806 - RNA, 21 nt, Zaire Ebola virus (ZEBOV)
cuauaggguacguuacauuaa

SEQ ID NO: 383807 - RNA, 20 nt, Zaire Ebola virus (ZEBOV)
cuauauauuacuaacucuau

SEQ ID NO: 383808 - RNA, 21 nt, Zaire Ebola virus (ZEBOV)
cuauauauuacuaacucuaua

SEQ ID NO: 383809 - RNA, 12 nt, Zaire Ebola virus (ZEBOV)
cucaaguugaac

SEQ ID NO: 383810 - RNA, 20 nt, Zaire Ebola virus (ZEBOV)
cucaaguugaacaacaucac

SEQ ID NO: 383811 - RNA, 19 nt, Zaire Ebola virus (ZEBOV)
cucaauauucuaacuagcg

SEQ ID NO: 383812 - RNA, 21 nt, Zaire Ebola virus (ZEBOV)
cucaauauucuaacuagcgau

SEQ ID NO: 383813 - RNA, 21 nt, Zaire Ebola virus (ZEBOV)
cucauacaucauauugaucua

SEQ ID NO: 383814 - RNA, 23 nt, Zaire Ebola virus (ZEBOV)
cucauacaucauauugaucuaau

SEQ ID NO: 383815 - RNA, 19 nt, Zaire Ebola virus (ZEBOV)
cucauauuguuauugauau

SEQ ID NO: 383816 - RNA, 16 nt, Zaire Ebola virus (ZEBOV)
cucauugcacauacuu

SEQ ID NO: 383817 - RNA, 13 nt, Zaire Ebola virus (ZEBOV)
cucccucugccac

SEQ ID NO: 383818 - RNA, 14 nt, Zaire Ebola virus (ZEBOV)
cuccgacacucccu

SEQ ID NO: 383819 - RNA, 23 nt, Zaire Ebola virus (ZEBOV)
cuccuaaauguagaacuuaacaa

SEQ ID NO: 383820 - RNA, 23 nt, Zaire Ebola virus (ZEBOV)
cucucccugcgugauaaucaaaa

SEQ ID NO: 383821 - RNA, 18 nt, Zaire Ebola virus (ZEBOV)
cugacuaaaacacuauau

SEQ ID NO: 383822 - RNA, 18 nt, Zaire Ebola virus (ZEBOV)
cugcaugcuuacaucuga

SEQ ID NO: 383823 - RNA, 14 nt, Zaire Ebola virus (ZEBOV)
cugcugaacuauag

SEQ ID NO: 383824 - RNA, 20 nt, Zaire Ebola virus (ZEBOV)
cuggaccccgccaccacaac

SEQ ID NO: 383825 - RNA, 22 nt, Zaire Ebola virus (ZEBOV)
cuggaccccgccaccacaacaa

SEQ ID NO: 383826 - RNA, 17 nt, Zaire Ebola virus (ZEBOV)
cuuaaaacaaaauugau

SEQ ID NO: 383827 - RNA, 14 nt, Zaire Ebola virus (ZEBOV)
cuuaauuaccaaua

SEQ ID NO: 383828 - RNA, 16 nt, Zaire Ebola virus (ZEBOV)
cuuacgucaauugaau

SEQ ID NO: 383829 - RNA, 16 nt, Zaire Ebola virus (ZEBOV)
uaggcuuaauuaccaa

SEQ ID NO: 383830 - RNA, 22 nt, Zaire Ebola virus (ZEBOV)
uaguauccugauacuugcaaag

SEQ ID NO: 383831 - RNA, 18 nt, Zaire Ebola virus (ZEBOV)
uaguguuuugguugauaa

SEQ ID NO: 383832 - RNA, 22 nt, Zaire Ebola virus (ZEBOV)
uauaaaaaacucauaaauugcu

SEQ ID NO: 383833 - RNA, 17 nt, Zaire Ebola virus (ZEBOV)
uauaaccuucuacuuga

SEQ ID NO: 383834 - RNA, 12 nt, Zaire Ebola virus (ZEBOV)
uauauaagcaua

SEQ ID NO: 383835 - RNA, 20 nt, Zaire Ebola virus (ZEBOV)
uauauauuacuaacucuaua

SEQ ID NO: 383836 - RNA, 22 nt, Zaire Ebola virus (ZEBOV)
uauaugaagagguaugauacaa

SEQ ID NO: 383837 - RNA, 17 nt, Zaire Ebola virus (ZEBOV)
uaucaaacggagccaaa

SEQ ID NO: 383838 - RNA, 21 nt, Zaire Ebola virus (ZEBOV)
uaucaaacggagccaaaaaca

SEQ ID NO: 383839 - RNA, 16 nt, Zaire Ebola virus (ZEBOV)
uaucaauauccuguca

SEQ ID NO: 383840 - RNA, 13 nt, Zaire Ebola virus (ZEBOV)
uaucaucauauau

SEQ ID NO: 383841 - RNA, 20 nt, Zaire Ebola virus (ZEBOV)
uauuacuaacucuauacucg

SEQ ID NO: 383842 - RNA, 23 nt, Zaire Ebola virus (ZEBOV)
uauuacuaacucuauacucguaa

SEQ ID NO: 383843 - RNA, 18 nt, Zaire Ebola virus (ZEBOV)
ucaaacaagagauuccaa

SEQ ID NO: 383844 - RNA, 19 nt, Zaire Ebola virus (ZEBOV)
ucaaguugaacaacaucac

SEQ ID NO: 383845 - RNA, 14 nt, Zaire Ebola virus (ZEBOV)
ucaauauccuguca

SEQ ID NO: 383846 - RNA, 15 nt, Zaire Ebola virus (ZEBOV)
ucaaucuaguuaucu

SEQ ID NO: 383847 - RNA, 22 nt, Zaire Ebola virus (ZEBOV)
ucacagauucuauauauuacua

SEQ ID NO: 383848 - RNA, 16 nt, Zaire Ebola virus (ZEBOV)
ucagauauauaagcau

SEQ ID NO: 383849 - RNA, 13 nt, Zaire Ebola virus (ZEBOV)
ucagauggaauag

SEQ ID NO: 383850 - RNA, 18 nt, Zaire Ebola virus (ZEBOV)
ucagauugcuucauggaa

SEQ ID NO: 383851 - RNA, 13 nt, Zaire Ebola virus (ZEBOV)
ucagcccuggaua

SEQ ID NO: 383852 - RNA, 22 nt, Zaire Ebola virus (ZEBOV)
ucagggauagugauaacaucua

SEQ ID NO: 383853 - RNA, 19 nt, Zaire Ebola virus (ZEBOV)
ucauaaacaagguuugaca

SEQ ID NO: 383854 - RNA, 18 nt, Zaire Ebola virus (ZEBOV)
ucauaaauugcucucaua

SEQ ID NO: 383855 - RNA, 21 nt, Zaire Ebola virus (ZEBOV)
ucauauugagcuaacucauau

SEQ ID NO: 383856 - RNA, 17 nt, Zaire Ebola virus (ZEBOV)
ucaucauccuuacguca

SEQ ID NO: 383857 - RNA, 15 nt, Zaire Ebola virus (ZEBOV)
ucaugacaguugucu

SEQ ID NO: 383858 - RNA, 20 nt, Zaire Ebola virus (ZEBOV)
ucccucaaacaagagauucc

SEQ ID NO: 383859 - RNA, 24 nt, Zaire Ebola virus (ZEBOV)
uccgacccagggaccaacacaaca

SEQ ID NO: 383860 - RNA, 15 nt, Zaire Ebola virus (ZEBOV)
uccuauauacuaaau

SEQ ID NO: 383861 - RNA, 23 nt, Zaire Ebola virus (ZEBOV)
ucuaacaacccuugccacaaucu

SEQ ID NO: 383862 - RNA, 14 nt, Zaire Ebola virus (ZEBOV)
ucuacuugaucaca

SEQ ID NO: 383863 - RNA, 16 nt, Zaire Ebola virus (ZEBOV)
ucuagguuguucacaa

SEQ ID NO: 383864 - RNA, 16 nt, Zaire Ebola virus (ZEBOV)
ucucagggauagugau

SEQ ID NO: 383865 - RNA, 21 nt, Zaire Ebola virus (ZEBOV)
ucucuccuaaauguagaacuu

SEQ ID NO: 383866 - RNA, 14 nt, Zaire Ebola virus (ZEBOV)
ucugacaguauuau

SEQ ID NO: 383867 - RNA, 15 nt, Zaire Ebola virus (ZEBOV)
ucugaggcaacucaa

SEQ ID NO: 383868 - RNA, 14 nt, Zaire Ebola virus (ZEBOV)
ucugggcucauauu

SEQ ID NO: 383869 - RNA, 13 nt, Zaire Ebola virus (ZEBOV)
ucuuaaaacaaaa

SEQ ID NO: 383870 - RNA, 22 nt, Zaire Ebola virus (ZEBOV)
ucuuaaaacaaaauugaucuuu

SEQ ID NO: 383871 - RNA, 20 nt, Zaire Ebola virus (ZEBOV)
ucuucagauugcuucaugga

SEQ ID NO: 383872 - RNA, 16 nt, Zaire Ebola virus (ZEBOV)
ugaaagaucauaacua

SEQ ID NO: 383873 - RNA, 13 nt, Zaire Ebola virus (ZEBOV)
ugaacaacaucac

SEQ ID NO: 383874 - RNA, 11 nt, Zaire Ebola virus (ZEBOV)
ugaauaagcau

SEQ ID NO: 383875 - RNA, 14 nt, Zaire Ebola virus (ZEBOV)
ugaauuauuaucac

SEQ ID NO: 383876 - RNA, 15 nt, Zaire Ebola virus (ZEBOV)
ugaauucucuagcac

SEQ ID NO: 383877 - RNA, 14 nt, Zaire Ebola virus (ZEBOV)
ugaauuuaaagcua

SEQ ID NO: 383878 - RNA, 22 nt, Zaire Ebola virus (ZEBOV)
ugacaaaugauaauauaauaca

SEQ ID NO: 383879 - RNA, 18 nt, Zaire Ebola virus (ZEBOV)
ugacaucucugcuuucau

SEQ ID NO: 383880 - RNA, 22 nt, Zaire Ebola virus (ZEBOV)
ugagaaugauaaacuugaugaa

SEQ ID NO: 383881 - RNA, 16 nt, Zaire Ebola virus (ZEBOV)
ugagcuaacucauaua

SEQ ID NO: 383882 - RNA, 20 nt, Zaire Ebola virus (ZEBOV)
ugauaauauaauacacugga

SEQ ID NO: 383883 - RNA, 20 nt, Zaire Ebola virus (ZEBOV)
ugauacaacccuaacaguga

SEQ ID NO: 383884 - RNA, 18 nt, Zaire Ebola virus (ZEBOV)
ugaucaaagaaaaucaua

SEQ ID NO: 383885 - RNA, 19 nt, Zaire Ebola virus (ZEBOV)
ugcaaagguugguuauuaa

SEQ ID NO: 383886 - RNA, 14 nt, Zaire Ebola virus (ZEBOV)
ugcaaccuaacaca

SEQ ID NO: 383887 - RNA, 17 nt, Zaire Ebola virus (ZEBOV)
ugcagugucgcaucuaa

SEQ ID NO: 383888 - RNA, 20 nt, Zaire Ebola virus (ZEBOV)
ugccuacugcuccuccugaa

SEQ ID NO: 383889 - RNA, 14 nt, Zaire Ebola virus (ZEBOV)
ugcgugauaaucaa

SEQ ID NO: 383890 - RNA, 19 nt, Zaire Ebola virus (ZEBOV)
uggaacaaugggaugauuc

SEQ ID NO: 383891 - RNA, 16 nt, Zaire Ebola virus (ZEBOV)
uggauaauauaaguca

SEQ ID NO: 383892 - RNA, 17 nt, Zaire Ebola virus (ZEBOV)
uggucgcacacaaaaau

SEQ ID NO: 383893 - RNA, 21 nt, Zaire Ebola virus (ZEBOV)
uguaauaggagcuauaucucu

SEQ ID NO: 383894 - RNA, 19 nt, Zaire Ebola virus (ZEBOV)
uguagaacuuaacaaaaga

SEQ ID NO: 383895 - RNA, 12 nt, Zaire Ebola virus (ZEBOV)
uguauaaacuug

SEQ ID NO: 383896 - RNA, 15 nt, Zaire Ebola virus (ZEBOV)
uguauaaacuugaca

SEQ ID NO: 383897 - RNA, 21 nt, Zaire Ebola virus (ZEBOV)
uguaucaaacggagccaaaaa

SEQ ID NO: 383898 - RNA, 20 nt, Zaire Ebola virus (ZEBOV)
ugucuaaggugugaauuauu

SEQ ID NO: 383899 - RNA, 22 nt, Zaire Ebola virus (ZEBOV)
ugugcaugauugcccuaauaua

SEQ ID NO: 383900 - RNA, 22 nt, Zaire Ebola virus (ZEBOV)
uguuaaucuuucucauugcaca

SEQ ID NO: 383901 - RNA, 15 nt, Zaire Ebola virus (ZEBOV)
uguuuugguugauaa

SEQ ID NO: 383902 - RNA, 13 nt, Zaire Ebola virus (ZEBOV)
uuaaaaccuucau

SEQ ID NO: 383903 - RNA, 20 nt, Zaire Ebola virus (ZEBOV)
uuaaacauagccaaugugau

SEQ ID NO: 383904 - RNA, 18 nt, Zaire Ebola virus (ZEBOV)
uuaaagcuagcuuauuau

SEQ ID NO: 383905 - RNA, 22 nt, Zaire Ebola virus (ZEBOV)
uuaaauuacauuaugcuuuuau

SEQ ID NO: 383906 - RNA, 20 nt, Zaire Ebola virus (ZEBOV)
uuaaccacagauaaauccuc

SEQ ID NO: 383907 - RNA, 21 nt, Zaire Ebola virus (ZEBOV)
uuaaccacagauaaauccuca

SEQ ID NO: 383908 - RNA, 15 nt, Zaire Ebola virus (ZEBOV)
uuaagaaaaagguaa

SEQ ID NO: 383909 - RNA, 13 nt, Zaire Ebola virus (ZEBOV)
uuacuaacucuau

SEQ ID NO: 383910 - RNA, 18 nt, Zaire Ebola virus (ZEBOV)
uuacuaacucuauacucg

SEQ ID NO: 383911 - RNA, 15 nt, Zaire Ebola virus (ZEBOV)
uuacuaaugaucucu

SEQ ID NO: 383912 - RNA, 12 nt, Zaire Ebola virus (ZEBOV)
uuacuugacaaa

SEQ ID NO: 383913 - RNA, 16 nt, Zaire Ebola virus (ZEBOV)
uuauagaaucuucuca

SEQ ID NO: 383914 - RNA, 23 nt, Zaire Ebola virus (ZEBOV)
uuauagccauaauuguaacucaa

SEQ ID NO: 383915 - RNA, 21 nt, Zaire Ebola virus (ZEBOV)
uuaucacaauaaaagugauuc

SEQ ID NO: 383916 - RNA, 18 nt, Zaire Ebola virus (ZEBOV)
uuaucaccagaaauccua

SEQ ID NO: 383917 - RNA, 16 nt, Zaire Ebola virus (ZEBOV)
uuaucuuuaaucuuca

SEQ ID NO: 383918 - RNA, 14 nt, Zaire Ebola virus (ZEBOV)
uuauuaacauacag

SEQ ID NO: 383919 - RNA, 16 nt, Zaire Ebola virus (ZEBOV)
uuauucaguacuauaa

SEQ ID NO: 383920 - RNA, 13 nt, Zaire Ebola virus (ZEBOV)
uucaacugcugaa

SEQ ID NO: 383921 - RNA, 13 nt, Zaire Ebola virus (ZEBOV)
uucacagauucua

SEQ ID NO: 383922 - RNA, 15 nt, Zaire Ebola virus (ZEBOV)
uucauauugagcuaa

SEQ ID NO: 383923 - RNA, 21 nt, Zaire Ebola virus (ZEBOV)
uucaucauccuuacgucaauu

SEQ ID NO: 383924 - RNA, 19 nt, Zaire Ebola virus (ZEBOV)
uucaugacuuacuaaugau

SEQ ID NO: 383925 - RNA, 20 nt, Zaire Ebola virus (ZEBOV)
uucucagggauagugauaac

SEQ ID NO: 383926 - RNA, 18 nt, Zaire Ebola virus (ZEBOV)
uucuuguacacaaauaau

SEQ ID NO: 383927 - RNA, 23 nt, Zaire Ebola virus (ZEBOV)
uugacaucaaucuaguuaucucu

SEQ ID NO: 383928 - RNA, 22 nt, Zaire Ebola virus (ZEBOV)
uugaugucuaaggugugaauua

SEQ ID NO: 383929 - RNA, 16 nt, Zaire Ebola virus (ZEBOV)
uuguaacucaauauuc

SEQ ID NO: 383930 - RNA, 15 nt, Zaire Ebola virus (ZEBOV)
uuguaucaauauccu

SEQ ID NO: 383931 - RNA, 19 nt, Zaire Ebola virus (ZEBOV)
uuuaaacauagccaaugug

SEQ ID NO: 383932 - RNA, 20 nt, Zaire Ebola virus (ZEBOV)
uuuaaccacagauaaauccu

SEQ ID NO: 383933 - RNA, 19 nt, Zaire Ebola virus (ZEBOV)
uuuaaucuucauccuugau

SEQ ID NO: 383934 - RNA, 17 nt, Zaire Ebola virus (ZEBOV)
cuuauuauuacuagccg

SEQ ID NO: 383935 - RNA, 21 nt, Zaire Ebola virus (ZEBOV)
cuuauucaguacuauaaucac

SEQ ID NO: 383936 - RNA, 21 nt, Zaire Ebola virus (ZEBOV)
cuucagauugcuucauggaaa

SEQ ID NO: 383937 - RNA, 20 nt, Zaire Ebola virus (ZEBOV)
cuuccgacccagggaccaac

SEQ ID NO: 383938 - RNA, 19 nt, Zaire Ebola virus (ZEBOV)
cuucuacuugaucacaaua

SEQ ID NO: 383939 - RNA, 23 nt, Zaire Ebola virus (ZEBOV)
cuucucagggauagugauaacau

SEQ ID NO: 383940 - RNA, 16 nt, Zaire Ebola virus (ZEBOV)
cuugaaucuaagauua

SEQ ID NO: 383941 - RNA, 14 nt, Zaire Ebola virus (ZEBOV)
cuugaucacaauac

SEQ ID NO: 383942 - RNA, 22 nt, Zaire Ebola virus (ZEBOV)
cuugccacaaucuccacgaguc

SEQ ID NO: 383943 - RNA, 23 nt, Zaire Ebola virus (ZEBOV)
cuuggauuggaaauguggagaaa

SEQ ID NO: 383944 - RNA, 17 nt, Zaire Ebola virus (ZEBOV)
cuuuuaauugaucaaua

SEQ ID NO: 383945 - RNA, 15 nt, Zaire Ebola virus (ZEBOV)
gaaaaucauaaucuc

SEQ ID NO: 383946 - RNA, 19 nt, Zaire Ebola virus (ZEBOV)
gaaaauuccucugcaaugg

SEQ ID NO: 383947 - RNA, 14 nt, Zaire Ebola virus (ZEBOV)
gaaagaggcgaaua

SEQ ID NO: 383948 - RNA, 14 nt, Zaire Ebola virus (ZEBOV)
gaaauguggagaaa

SEQ ID NO: 383949 - RNA, 17 nt, Zaire Ebola virus (ZEBOV)
gaacaccaacacgagca

SEQ ID NO: 383950 - RNA, 16 nt, Zaire Ebola virus (ZEBOV)
gaagaccacaaaauca

SEQ ID NO: 383951 - RNA, 19 nt, Zaire Ebola virus (ZEBOV)
gaagccuuuuuauuaaguu

SEQ ID NO: 383952 - RNA, 18 nt, Zaire Ebola virus (ZEBOV)
gaagggaagcugcagugu

SEQ ID NO: 383953 - RNA, 16 nt, Zaire Ebola virus (ZEBOV)
gaaucuaagauuacuu

SEQ ID NO: 383954 - RNA, 16 nt, Zaire Ebola virus (ZEBOV)
gacaaaugauaauaua

SEQ ID NO: 383955 - RNA, 20 nt, Zaire Ebola virus (ZEBOV)
gacacuuuuaauugaucaau

SEQ ID NO: 383956 - RNA, 14 nt, Zaire Ebola virus (ZEBOV)
gacccagggaccaa

SEQ ID NO: 383957 - RNA, 23 nt, Zaire Ebola virus (ZEBOV)
gacccauuucuagguuguucaca

SEQ ID NO: 383958 - RNA, 12 nt, Zaire Ebola virus (ZEBOV)
gacccccaaaag

SEQ ID NO: 383959 - RNA, 19 nt, Zaire Ebola virus (ZEBOV)
gaccgcuggcaacaacaac

SEQ ID NO: 383960 - RNA, 13 nt, Zaire Ebola virus (ZEBOV)
gacggaacauaaa

SEQ ID NO: 383961 - RNA, 22 nt, Zaire Ebola virus (ZEBOV)
gagaaugauaaacuugaugaag

SEQ ID NO: 383962 - RNA, 12 nt, Zaire Ebola virus (ZEBOV)
gagccaaaaaca

SEQ ID NO: 383963 - RNA, 16 nt, Zaire Ebola virus (ZEBOV)
gagccaaaaacaucag

SEQ ID NO: 383964 - RNA, 12 nt, Zaire Ebola virus (ZEBOV)
gauaaauccuca

SEQ ID NO: 383965 - RNA, 13 nt, Zaire Ebola virus (ZEBOV)
gaucuaaucucaa

SEQ ID NO: 383966 - RNA, 23 nt, Zaire Ebola virus (ZEBOV)
gaucuaaucucaauaaacaacua

SEQ ID NO: 383967 - RNA, 16 nt, Zaire Ebola virus (ZEBOV)
gauuaucuuuaaucuu

SEQ ID NO: 383968 - RNA, 23 nt, Zaire Ebola virus (ZEBOV)
gauuuaauuauauggauuacuug

SEQ ID NO: 383969 - RNA, 20 nt, Zaire Ebola virus (ZEBOV)
gcauaauaaauaaauacuca

SEQ ID NO: 383970 - RNA, 22 nt, Zaire Ebola virus (ZEBOV)
gcauaccucuugcacaaaguga

SEQ ID NO: 383971 - RNA, 21 nt, Zaire Ebola virus (ZEBOV)
gcaucuaacaacccuugccac

SEQ ID NO: 383972 - RNA, 18 nt, Zaire Ebola virus (ZEBOV)
gccggacccccaaaagca

SEQ ID NO: 383973 - RNA, 12 nt, Zaire Ebola virus (ZEBOV)
gccucaaaucaa

SEQ ID NO: 383974 - RNA, 14 nt, Zaire Ebola virus (ZEBOV)
gccucaaaucaaug

SEQ ID NO: 383975 - RNA, 19 nt, Zaire Ebola virus (ZEBOV)
ggagccaaaaacaucagug

SEQ ID NO: 383976 - RNA, 15 nt, Zaire Ebola virus (ZEBOV)
ggugauagccuuaau

SEQ ID NO: 383977 - RNA, 18 nt, Zaire Ebola virus (ZEBOV)
gguucaagugcacaguca

SEQ ID NO: 383978 - RNA, 16 nt, Zaire Ebola virus (ZEBOV)
guaaaauaagagauua

SEQ ID NO: 383979 - RNA, 19 nt, Zaire Ebola virus (ZEBOV)
guaaucuuucgauuaucuu

SEQ ID NO: 383980 - RNA, 22 nt, Zaire Ebola virus (ZEBOV)
guagaauacuucauauugagcu

SEQ ID NO: 383981 - RNA, 18 nt, Zaire Ebola virus (ZEBOV)
guauaaacuugacaucuc

SEQ ID NO: 383982 - RNA, 20 nt, Zaire Ebola virus (ZEBOV)
gugaagaguugucuuucaca

SEQ ID NO: 383983 - RNA, 16 nt, Zaire Ebola virus (ZEBOV)
guguaauaaccuuaac

SEQ ID NO: 383984 - RNA, 16 nt, Zaire Ebola virus (ZEBOV)
guguauaaacuugaca

SEQ ID NO: 383985 - RNA, 14 nt, Zaire Ebola virus (ZEBOV)
guuauuaacauaca

SEQ ID NO: 383986 - RNA, 14 nt, Zaire Ebola virus (ZEBOV)
uaaaauuguucaua

SEQ ID NO: 383987 - RNA, 20 nt, Zaire Ebola virus (ZEBOV)
uaaacucacaguuaaucaua

SEQ ID NO: 383988 - RNA, 15 nt, Zaire Ebola virus (ZEBOV)
uaaacuugacaucuc

SEQ ID NO: 383989 - RNA, 19 nt, Zaire Ebola virus (ZEBOV)
uaaaggugcuuuacaccau

SEQ ID NO: 383990 - RNA, 14 nt, Zaire Ebola virus (ZEBOV)
uaaauacucauauu

SEQ ID NO: 383991 - RNA, 17 nt, Zaire Ebola virus (ZEBOV)
uaaauguagaacuuaac

SEQ ID NO: 383992 - RNA, 22 nt, Zaire Ebola virus (ZEBOV)
uaacaacccuugccacaaucuc

SEQ ID NO: 383993 - RNA, 14 nt, Zaire Ebola virus (ZEBOV)
uaacagugaucaaa

SEQ ID NO: 383994 - RNA, 15 nt, Zaire Ebola virus (ZEBOV)
uaacauuuuugucua

SEQ ID NO: 383995 - RNA, 12 nt, Zaire Ebola virus (ZEBOV)
uaaccacagaua

SEQ ID NO: 383996 - RNA, 17 nt, Zaire Ebola virus (ZEBOV)
uaacucuauacucguaa

SEQ ID NO: 383997 - RNA, 22 nt, Zaire Ebola virus (ZEBOV)
uaagcauaauaaauaaauacuc

SEQ ID NO: 383998 - RNA, 13 nt, Zaire Ebola virus (ZEBOV)
uaauaaauaaaua

SEQ ID NO: 383999 - RNA, 18 nt, Zaire Ebola virus (ZEBOV)
uaauaaauaaauacucau

SEQ ID NO: 384000 - RNA, 14 nt, Zaire Ebola virus (ZEBOV)
uaauaauguuguau

SEQ ID NO: 384001 - RNA, 18 nt, Zaire Ebola virus (ZEBOV)
uaauagcagaggcuucaa

SEQ ID NO: 384002 - RNA, 22 nt, Zaire Ebola virus (ZEBOV)
uaaucaaaaaauucacaaugca

SEQ ID NO: 384003 - RNA, 23 nt, Zaire Ebola virus (ZEBOV)
uaaucaaaaaauucacaaugcag

SEQ ID NO: 384004 - RNA, 18 nt, Zaire Ebola virus (ZEBOV)
uaaucaagacgauauccu

SEQ ID NO: 384005 - RNA, 17 nt, Zaire Ebola virus (ZEBOV)
uaauccuacuauaauca

SEQ ID NO: 384006 - RNA, 15 nt, Zaire Ebola virus (ZEBOV)
uaaucuuuguguaaa

SEQ ID NO: 384007 - RNA, 16 nt, Zaire Ebola virus (ZEBOV)
uaauuaucauuacuuu

SEQ ID NO: 384008 - RNA, 20 nt, Zaire Ebola virus (ZEBOV)
uacaaauaauccuacuauaa

SEQ ID NO: 384009 - RNA, 19 nt, Zaire Ebola virus (ZEBOV)
uacaccauugucuuuuuuc

SEQ ID NO: 384010 - RNA, 15 nt, Zaire Ebola virus (ZEBOV)
uacacccguguauaa

SEQ ID NO: 384011 - RNA, 16 nt, Zaire Ebola virus (ZEBOV)
uacaucauauugaucu

SEQ ID NO: 384012 - RNA, 16 nt, Zaire Ebola virus (ZEBOV)
uaccucggcugagaga

SEQ ID NO: 384013 - RNA, 14 nt, Zaire Ebola virus (ZEBOV)
uacggugauucaaa

SEQ ID NO: 384014 - RNA, 13 nt, Zaire Ebola virus (ZEBOV)
uacuauaaucacu

SEQ ID NO: 384015 - RNA, 14 nt, Zaire Ebola virus (ZEBOV)
uacuccguauaccu

SEQ ID NO: 384016 - RNA, 15 nt, Zaire Ebola virus (ZEBOV)
uagaauacuucauau

SEQ ID NO: 384017 - RNA, 23 nt, Zaire Ebola virus (ZEBOV)
uagccuuaaucuuuguguaaaau

SEQ ID NO: 384018 - RNA, 13 nt, Zaire Ebola virus (ZEBOV)
uagcuaacauuaa

SEQ ID NO: 384019 - RNA, 17 nt, Zaire Ebola virus (ZEBOV)
uauaaacuugacaucuc

SEQ ID NO: 384020 - RNA, 19 nt, Zaire Ebola virus (ZEBOV)
uauaacuuaccuacuagcc

SEQ ID NO: 384021 - RNA, 15 nt, Zaire Ebola virus (ZEBOV)
uauagaaucuucuca

SEQ ID NO: 384022 - RNA, 13 nt, Zaire Ebola virus (ZEBOV)
uauauuauauacu

SEQ ID NO: 384023 - RNA, 14 nt, Zaire Ebola virus (ZEBOV)
uauauuuagccucu

SEQ ID NO: 384024 - RNA, 14 nt, Zaire Ebola virus (ZEBOV)
uaugaauaagcauu

SEQ ID NO: 384025 - RNA, 20 nt, Zaire Ebola virus (ZEBOV)
uauuaaguuguaauaaucag

SEQ ID NO: 384026 - RNA, 21 nt, Zaire Ebola virus (ZEBOV)
uauuacuaacucuauacucgu

SEQ ID NO: 384027 - RNA, 12 nt, Zaire Ebola virus (ZEBOV)
aaaaacaucagu

SEQ ID NO: 384028 - RNA, 12 nt, Zaire Ebola virus (ZEBOV)
aaaacacuauau

SEQ ID NO: 384029 - RNA, 19 nt, Zaire Ebola virus (ZEBOV)
aaaacggugauagccuuaa

SEQ ID NO: 384030 - RNA, 21 nt, Zaire Ebola virus (ZEBOV)
aaaacuaaugaugaagauuaa

SEQ ID NO: 384031 - RNA, 18 nt, Zaire Ebola virus (ZEBOV)
aaaacugacggaacauaa

SEQ ID NO: 384032 - RNA, 21 nt, Zaire Ebola virus (ZEBOV)
aaaacuuauucaguacuauaa

SEQ ID NO: 384033 - RNA, 20 nt, Zaire Ebola virus (ZEBOV)
aaaagcagagaacaccaaca

SEQ ID NO: 384034 - RNA, 19 nt, Zaire Ebola virus (ZEBOV)
aaaauuguuaaaaauauga

SEQ ID NO: 384035 - RNA, 16 nt, Zaire Ebola virus (ZEBOV)
aaacaaaauugaucuu

SEQ ID NO: 384036 - RNA, 21 nt, Zaire Ebola virus (ZEBOV)
aaaccagguccggacaacagc

SEQ ID NO: 384037 - RNA, 22 nt, Zaire Ebola virus (ZEBOV)
aaacggagccaaaaacaucagu

SEQ ID NO: 384038 - RNA, 17 nt, Zaire Ebola virus (ZEBOV)
aaacucacaguuaauca

SEQ ID NO: 384039 - RNA, 20 nt, Zaire Ebola virus (ZEBOV)
aaacuuauucaguacuauaa

SEQ ID NO: 384040 - RNA, 17 nt, Zaire Ebola virus (ZEBOV)
aaacuugacaucucuga

SEQ ID NO: 384041 - RNA, 18 nt, Zaire Ebola virus (ZEBOV)
aaauaaguauuucaugac

SEQ ID NO: 384042 - RNA, 18 nt, Zaire Ebola virus (ZEBOV)
aaauaauguuuuacucua

SEQ ID NO: 384043 - RNA, 12 nt, Zaire Ebola virus (ZEBOV)
aaauacucauau

SEQ ID NO: 384044 - RNA, 13 nt, Zaire Ebola virus (ZEBOV)
aaauccucacugu

SEQ ID NO: 384045 - RNA, 11 nt, Zaire Ebola virus (ZEBOV)
aaauguagaac

SEQ ID NO: 384046 - RNA, 22 nt, Zaire Ebola virus (ZEBOV)
aaauguagaacuuaacaaaaga

SEQ ID NO: 384047 - RNA, 18 nt, Zaire Ebola virus (ZEBOV)
aaauguuaaucuuucuca

SEQ ID NO: 384048 - RNA, 20 nt, Zaire Ebola virus (ZEBOV)
aaauugccugcaugcuuaca

SEQ ID NO: 384049 - RNA, 15 nt, Zaire Ebola virus (ZEBOV)
aacaaaauugaucuu

SEQ ID NO: 384050 - RNA, 22 nt, Zaire Ebola virus (ZEBOV)
aacaagguuugacaucaaucua

SEQ ID NO: 384051 - RNA, 21 nt, Zaire Ebola virus (ZEBOV)
aacaaguccccaaaaccacag

SEQ ID NO: 384052 - RNA, 15 nt, Zaire Ebola virus (ZEBOV)
aacacucaucaccaa

SEQ ID NO: 384053 - RNA, 18 nt, Zaire Ebola virus (ZEBOV)
aacauaauaaacucugca

SEQ ID NO: 384054 - RNA, 21 nt, Zaire Ebola virus (ZEBOV)
aacauaauaaacucugcacuc

SEQ ID NO: 384055 - RNA, 19 nt, Zaire Ebola virus (ZEBOV)
aacaucaccgcagaacaga

SEQ ID NO: 384056 - RNA, 12 nt, Zaire Ebola virus (ZEBOV)
aaccaaaccagg

SEQ ID NO: 384057 - RNA, 19 nt, Zaire Ebola virus (ZEBOV)
aacccgcaggucacaugug

SEQ ID NO: 384058 - RNA, 20 nt, Zaire Ebola virus (ZEBOV)
aacccuugccacaaucucca

SEQ ID NO: 384059 - RNA, 21 nt, Zaire Ebola virus (ZEBOV)
aaccugccaagcauaccucuu

SEQ ID NO: 384060 - RNA, 20 nt, Zaire Ebola virus (ZEBOV)
aacgauccaucccaucaaaa

SEQ ID NO: 384061 - RNA, 17 nt, Zaire Ebola virus (ZEBOV)
aacggugauagccuuaa

SEQ ID NO: 384062 - RNA, 18 nt, Zaire Ebola virus (ZEBOV)
aacuaauaacauuacaaa

SEQ ID NO: 384063 - RNA, 13 nt, Zaire Ebola virus (ZEBOV)
aacuaaugaugaa

SEQ ID NO: 384064 - RNA, 22 nt, Zaire Ebola virus (ZEBOV)
aacuauaggguacguuacauua

SEQ ID NO: 384065 - RNA, 16 nt, Zaire Ebola virus (ZEBOV)
aacucuauacucguaa

SEQ ID NO: 384066 - RNA, 11 nt, Zaire Ebola virus (ZEBOV)
aacuuaccuac

SEQ ID NO: 384067 - RNA, 20 nt, Zaire Ebola virus (ZEBOV)
aagaaaaaacuaaugaugaa

SEQ ID NO: 384068 - RNA, 17 nt, Zaire Ebola virus (ZEBOV)
aagagauuccaagacaa

SEQ ID NO: 384069 - RNA, 22 nt, Zaire Ebola virus (ZEBOV)
aagauuacuugacaaaugauaa

SEQ ID NO: 384070 - RNA, 19 nt, Zaire Ebola virus (ZEBOV)
aagcagagaacaccaacac

SEQ ID NO: 384071 - RNA, 18 nt, Zaire Ebola virus (ZEBOV)
aagcauaccucuugcaca

SEQ ID NO: 384072 - RNA, 21 nt, Zaire Ebola virus (ZEBOV)
aagcauaccucuugcacaaag

SEQ ID NO: 384073 - RNA, 14 nt, Zaire Ebola virus (ZEBOV)
aagccacaguuaua

SEQ ID NO: 384074 - RNA, 20 nt, Zaire Ebola virus (ZEBOV)
aagcuagcuuauuauuacua

SEQ ID NO: 384075 - RNA, 22 nt, Zaire Ebola virus (ZEBOV)
aagguaaucuuucgauuaucuu

SEQ ID NO: 384076 - RNA, 17 nt, Zaire Ebola virus (ZEBOV)
aaggugcuuuacaccau

SEQ ID NO: 384077 - RNA, 23 nt, Zaire Ebola virus (ZEBOV)
aaggugugaauuauuaucacaau

SEQ ID NO: 384078 - RNA, 13 nt, Zaire Ebola virus (ZEBOV)
aaguccccaaaac

SEQ ID NO: 384079 - RNA, 13 nt, Zaire Ebola virus (ZEBOV)
aagugauucuuau

SEQ ID NO: 384080 - RNA, 16 nt, Zaire Ebola virus (ZEBOV)
aauaaacaacuauuua

SEQ ID NO: 384081 - RNA, 20 nt, Zaire Ebola virus (ZEBOV)
aauaccuucuuuacaauaua

SEQ ID NO: 384082 - RNA, 19 nt, Zaire Ebola virus (ZEBOV)
aauacucauauuucuugau

SEQ ID NO: 384083 - RNA, 17 nt, Zaire Ebola virus (ZEBOV)
aauacuccguauaccua

SEQ ID NO: 384084 - RNA, 23 nt, Zaire Ebola virus (ZEBOV)
aauaggcguuaagccacaguuau

SEQ ID NO: 384085 - RNA, 22 nt, Zaire Ebola virus (ZEBOV)
aauaguguuuugguugauaaca

SEQ ID NO: 384086 - RNA, 12 nt, Zaire Ebola virus (ZEBOV)
aauauaagucaa

SEQ ID NO: 384087 - RNA, 16 nt, Zaire Ebola virus (ZEBOV)
aauauaagucaauuaa

SEQ ID NO: 384088 - RNA, 13 nt, Zaire Ebola virus (ZEBOV)
aauauacuaaagg

SEQ ID NO: 384089 - RNA, 21 nt, Zaire Ebola virus (ZEBOV)
aaucauaaacaagguuugaca

SEQ ID NO: 384090 - RNA, 17 nt, Zaire Ebola virus (ZEBOV)
aaucccucacaaccaaa

SEQ ID NO: 384091 - RNA, 21 nt, Zaire Ebola virus (ZEBOV)
aaucucaauaaacaacuauuu

SEQ ID NO: 384092 - RNA, 18 nt, Zaire Ebola virus (ZEBOV)
aaucuucauccuugauuc

SEQ ID NO: 384093 - RNA, 20 nt, Zaire Ebola virus (ZEBOV)
aaucuucguguuaaugauaa

SEQ ID NO: 384094 - RNA, 12 nt, Zaire Ebola virus (ZEBOV)
aaugaaaccagg

SEQ ID NO: 384095 - RNA, 13 nt, Zaire Ebola virus (ZEBOV)
aaugauacacuug

SEQ ID NO: 384096 - RNA, 16 nt, Zaire Ebola virus (ZEBOV)
aaugaugaagauuaaa

SEQ ID NO: 384097 - RNA, 17 nt, Zaire Ebola virus (ZEBOV)
aauguuaaucuuucuca

SEQ ID NO: 384098 - RNA, 15 nt, Zaire Ebola virus (ZEBOV)
aauuaaauuacauua

SEQ ID NO: 384099 - RNA, 17 nt, Zaire Ebola virus (ZEBOV)
aauuauuaucacaauaa

SEQ ID NO: 384100 - RNA, 21 nt, Zaire Ebola virus (ZEBOV)
aauugaucaauauacuaaagg

SEQ ID NO: 384101 - RNA, 22 nt, Zaire Ebola virus (ZEBOV)
aauugaucaauauacuaaaggu

SEQ ID NO: 384102 - RNA, 19 nt, Zaire Ebola virus (ZEBOV)
aauugaucuuuaagauuaa

SEQ ID NO: 384103 - RNA, 16 nt, Zaire Ebola virus (ZEBOV)
aauuuaacgcaacaua

SEQ ID NO: 384104 - RNA, 19 nt, Zaire Ebola virus (ZEBOV)
aauuugagucuuaaugcaa

SEQ ID NO: 384105 - RNA, 19 nt, Zaire Ebola virus (ZEBOV)
acaaaagacucauaauaua

SEQ ID NO: 384106 - RNA, 18 nt, Zaire Ebola virus (ZEBOV)
acaaauagcuaacauuaa

SEQ ID NO: 384107 - RNA, 19 nt, Zaire Ebola virus (ZEBOV)
acaaaugauaauauaauac

SEQ ID NO: 384108 - RNA, 13 nt, Zaire Ebola virus (ZEBOV)
acaacaacacuca

SEQ ID NO: 384109 - RNA, 19 nt, Zaire Ebola virus (ZEBOV)
acaacacucaucaccaaga

SEQ ID NO: 384110 - RNA, 21 nt, Zaire Ebola virus (ZEBOV)
acaacugaagaccacaaaauc

SEQ ID NO: 384111 - RNA, 22 nt, Zaire Ebola virus (ZEBOV)
acaacugaagaccacaaaauca

SEQ ID NO: 384112 - RNA, 13 nt, Zaire Ebola virus (ZEBOV)
acaagagauucca

SEQ ID NO: 384113 - RNA, 14 nt, Zaire Ebola virus (ZEBOV)
acaauaaaagugau

SEQ ID NO: 384114 - RNA, 15 nt, Zaire Ebola virus (ZEBOV)
acaaugggaugauuc

SEQ ID NO: 384115 - RNA, 14 nt, Zaire Ebola virus (ZEBOV)
acacaacuucuuaa

SEQ ID NO: 384116 - RNA, 14 nt, Zaire Ebola virus (ZEBOV)
acacuauauaaccu

SEQ ID NO: 384117 - RNA, 18 nt, Zaire Ebola virus (ZEBOV)
acacuauauaaccuucua

SEQ ID NO: 384118 - RNA, 15 nt, Zaire Ebola virus (ZEBOV)
acacucccucugcca

SEQ ID NO: 384119 - RNA, 17 nt, Zaire Ebola virus (ZEBOV)
acacuugugaguaucag

SEQ ID NO: 384120 - RNA, 15 nt, Zaire Ebola virus (ZEBOV)
acagauaaauccuca

SEQ ID NO: 384121 - RNA, 18 nt, Zaire Ebola virus (ZEBOV)
acagauucuauauauuac

SEQ ID NO: 384122 - RNA, 13 nt, Zaire Ebola virus (ZEBOV)
acauacuuuuugc

SEQ ID NO: 384123 - RNA, 20 nt, Zaire Ebola virus (ZEBOV)
acaucaaucuaguuaucucu

SEQ ID NO: 384124 - RNA, 20 nt, Zaire Ebola virus (ZEBOV)
acaucaccgcagaacagaca

SEQ ID NO: 384125 - RNA, 14 nt, Zaire Ebola virus (ZEBOV)
acaucauauugauc

SEQ ID NO: 384126 - RNA, 16 nt, Zaire Ebola virus (ZEBOV)
acaucucugcuuucau

SEQ ID NO: 384127 - RNA, 16 nt, Zaire Ebola virus (ZEBOV)
accaaaagugaugaag

SEQ ID NO: 384128 - RNA, 17 nt, Zaire Ebola virus (ZEBOV)
accaacacaacaacuga

SEQ ID NO: 384129 - RNA, 21 nt, Zaire Ebola virus (ZEBOV)
accaggacucagaaucccuca

SEQ ID NO: 384130 - RNA, 18 nt, Zaire Ebola virus (ZEBOV)
accagguccggacaacag

SEQ ID NO: 384131 - RNA, 20 nt, Zaire Ebola virus (ZEBOV)
acccagggaccaacacaaca

SEQ ID NO: 384132 - RNA, 15 nt, Zaire Ebola virus (ZEBOV)
accccgccaccacaa

SEQ ID NO: 384133 - RNA, 21 nt, Zaire Ebola virus (ZEBOV)
accgcuggcaacaacaacacu

SEQ ID NO: 384134 - RNA, 17 nt, Zaire Ebola virus (ZEBOV)
acgagcaagagcacuga

SEQ ID NO: 384135 - RNA, 19 nt, Zaire Ebola virus (ZEBOV)
acuaaugaugaagauuaaa

SEQ ID NO: 384136 - RNA, 22 nt, Zaire Ebola virus (ZEBOV)
acuauaggguacguuacauuaa

SEQ ID NO: 384137 - RNA, 21 nt, Zaire Ebola virus (ZEBOV)
acucaaguugaacaacaucac

SEQ ID NO: 384138 - RNA, 20 nt, Zaire Ebola virus (ZEBOV)
acucaauaguuaucuugaca

SEQ ID NO: 384139 - RNA, 18 nt, Zaire Ebola virus (ZEBOV)
acucauaaauugcucuca

SEQ ID NO: 384140 - RNA, 13 nt, Zaire Ebola virus (ZEBOV)
acucaucaccaag

SEQ ID NO: 384141 - RNA, 14 nt, Zaire Ebola virus (ZEBOV)
acucaucaccaaga

SEQ ID NO: 384142 - RNA, 19 nt, Zaire Ebola virus (ZEBOV)
acucucguuucaaauuaau

SEQ ID NO: 384143 - RNA, 17 nt, Zaire Ebola virus (ZEBOV)
acugacggaacauaaau

SEQ ID NO: 384144 - RNA, 14 nt, Zaire Ebola virus (ZEBOV)
acugaucacaggcg

SEQ ID NO: 384145 - RNA, 10 nt, Zaire Ebola virus (ZEBOV)
acuguaaaau

SEQ ID NO: 384146 - RNA, 18 nt, Zaire Ebola virus (ZEBOV)
acuguaagccagcuucca

SEQ ID NO: 384147 - RNA, 17 nt, Zaire Ebola virus (ZEBOV)
acuuacuaaugaucucu

SEQ ID NO: 384148 - RNA, 15 nt, Zaire Ebola virus (ZEBOV)
acuucuuaaaacaaa

SEQ ID NO: 384149 - RNA, 15 nt, Zaire Ebola virus (ZEBOV)
agaaaaaccuaccuc

SEQ ID NO: 384150 - RNA, 19 nt, Zaire Ebola virus (ZEBOV)
agacuagauaauaaucuuc

SEQ ID NO: 384151 - RNA, 23 nt, Zaire Ebola virus (ZEBOV)
agaguuuaguugcaaccuaacac

SEQ ID NO: 384152 - RNA, 21 nt, Zaire Ebola virus (ZEBOV)
agauuccaagacaacaucaua

SEQ ID NO: 384153 - RNA, 14 nt, Zaire Ebola virus (ZEBOV)
agcacccauaauac

SEQ ID NO: 384154 - RNA, 14 nt, Zaire Ebola virus (ZEBOV)
agcagagaacacca

SEQ ID NO: 384155 - RNA, 19 nt, Zaire Ebola virus (ZEBOV)
agcagaggcuucaacugcu

SEQ ID NO: 384156 - RNA, 23 nt, Zaire Ebola virus (ZEBOV)
agcagaggcuucaacugcugaac

SEQ ID NO: 384157 - RNA, 16 nt, Zaire Ebola virus (ZEBOV)
agccaaaaacaucagu

SEQ ID NO: 384158 - RNA, 22 nt, Zaire Ebola virus (ZEBOV)
agccaaugugauucuaacuccu

SEQ ID NO: 384159 - RNA, 20 nt, Zaire Ebola virus (ZEBOV)
agccauaauuguaacucaau

SEQ ID NO: 384160 - RNA, 16 nt, Zaire Ebola virus (ZEBOV)
agccuccgacacuccc

SEQ ID NO: 384161 - RNA, 14 nt, Zaire Ebola virus (ZEBOV)
agcgauuuaucuaa

SEQ ID NO: 384162 - RNA, 13 nt, Zaire Ebola virus (ZEBOV)
agcuuaaaauaua

SEQ ID NO: 384163 - RNA, 17 nt, Zaire Ebola virus (ZEBOV)
aggcuucaacugcugaa

SEQ ID NO: 384164 - RNA, 12 nt, Zaire Ebola virus (ZEBOV)
agguaugauaca

SEQ ID NO: 384165 - RNA, 23 nt, Zaire Ebola virus (ZEBOV)
aggugugaauuauuaucacaaua

SEQ ID NO: 384166 - RNA, 21 nt, Zaire Ebola virus (ZEBOV)
aguaagcuacuauuucauaca

SEQ ID NO: 384167 - RNA, 18 nt, Zaire Ebola virus (ZEBOV)
aguuaaucauaaacaagg

SEQ ID NO: 384168 - RNA, 13 nt, Zaire Ebola virus (ZEBOV)
aguuaucuugaca

SEQ ID NO: 384169 - RNA, 21 nt, Zaire Ebola virus (ZEBOV)
aguuuuauagaaucuucucag

SEQ ID NO: 384170 - RNA, 19 nt, Zaire Ebola virus (ZEBOV)
auaaaauuguucauaucuc

SEQ ID NO: 384171 - RNA, 16 nt, Zaire Ebola virus (ZEBOV)
auaaacaacuauuuaa

SEQ ID NO: 384172 - RNA, 19 nt, Zaire Ebola virus (ZEBOV)
auaaacuugaugaagauua

SEQ ID NO: 384173 - RNA, 17 nt, Zaire Ebola virus (ZEBOV)
auaaauccucacuguaa

SEQ ID NO: 384174 - RNA, 16 nt, Zaire Ebola virus (ZEBOV)
auaacacaacuucuua

SEQ ID NO: 384175 - RNA, 13 nt, Zaire Ebola virus (ZEBOV)
auaaccuuaacau

SEQ ID NO: 384176 - RNA, 17 nt, Zaire Ebola virus (ZEBOV)
auaaccuucuacuugau

SEQ ID NO: 384177 - RNA, 17 nt, Zaire Ebola virus (ZEBOV)
auaacuaauaacauuac

SEQ ID NO: 384178 - RNA, 19 nt, Zaire Ebola virus (ZEBOV)
auaacuaauaacauuacaa

SEQ ID NO: 384179 - RNA, 16 nt, Zaire Ebola virus (ZEBOV)
auaauaaauaaauacu

SEQ ID NO: 384180 - RNA, 20 nt, Zaire Ebola virus (ZEBOV)
auaauaaauaaauacucaua

SEQ ID NO: 384181 - RNA, 18 nt, Zaire Ebola virus (ZEBOV)
auaaucaaaaaauucaca

SEQ ID NO: 384182 - RNA, 17 nt, Zaire Ebola virus (ZEBOV)
auaaucaauacggugau

SEQ ID NO: 384183 - RNA, 14 nt, Zaire Ebola virus (ZEBOV)
auacagaaugauaa

SEQ ID NO: 384184 - RNA, 18 nt, Zaire Ebola virus (ZEBOV)
auacaucauauugaucua

SEQ ID NO: 384185 - RNA, 17 nt, Zaire Ebola virus (ZEBOV)
auaccuaucaucauaua

SEQ ID NO: 384186 - RNA, 22 nt, Zaire Ebola virus (ZEBOV)
auacuucauauugagcuaacuc

SEQ ID NO: 384187 - RNA, 23 nt, Zaire Ebola virus (ZEBOV)
auacuucauauugagcuaacuca

SEQ ID NO: 384188 - RNA, 16 nt, Zaire Ebola virus (ZEBOV)
auagccaaugugauuc

SEQ ID NO: 384189 - RNA, 13 nt, Zaire Ebola virus (ZEBOV)
auagugauaacau

SEQ ID NO: 384190 - RNA, 23 nt, Zaire Ebola virus (ZEBOV)
auaguguuuugguugauaacaca

SEQ ID NO: 384191 - RNA, 16 nt, Zaire Ebola virus (ZEBOV)
auauauuacuaacucu

SEQ ID NO: 384192 - RNA, 17 nt, Zaire Ebola virus (ZEBOV)
auauccuuuaaaacuua

SEQ ID NO: 384193 - RNA, 19 nt, Zaire Ebola virus (ZEBOV)
auaucucugacaguauuau

SEQ ID NO: 384194 - RNA, 16 nt, Zaire Ebola virus (ZEBOV)
auauuacuaacucuau

SEQ ID NO: 384195 - RNA, 19 nt, Zaire Ebola virus (ZEBOV)
aucaaacggagccaaaaac

SEQ ID NO: 384196 - RNA, 15 nt, Zaire Ebola virus (ZEBOV)
aucaauauccuguca

SEQ ID NO: 384197 - RNA, 17 nt, Zaire Ebola virus (ZEBOV)
aucccucacaaccaaac

SEQ ID NO: 384198 - RNA, 23 nt, Zaire Ebola virus (ZEBOV)
aucucguaucgcucguaauauaa

SEQ ID NO: 384199 - RNA, 18 nt, Zaire Ebola virus (ZEBOV)
aucucugaggcaacucaa

SEQ ID NO: 384200 - RNA, 17 nt, Zaire Ebola virus (ZEBOV)
aucuucauccuugauuc

SEQ ID NO: 384201 - RNA, 15 nt, Zaire Ebola virus (ZEBOV)
augauaauauaauac

SEQ ID NO: 384202 - RNA, 12 nt, Zaire Ebola virus (ZEBOV)
augggaugauuc

SEQ ID NO: 384203 - RNA, 15 nt, Zaire Ebola virus (ZEBOV)
augucuaagguguga

SEQ ID NO: 384204 - RNA, 16 nt, Zaire Ebola virus (ZEBOV)
augugauucuaacucc

SEQ ID NO: 384205 - RNA, 14 nt, Zaire Ebola virus (ZEBOV)
auuaacauacagau

SEQ ID NO: 384206 - RNA, 15 nt, Zaire Ebola virus (ZEBOV)
auuaacauacagauu

SEQ ID NO: 384207 - RNA, 19 nt, Zaire Ebola virus (ZEBOV)
auuauaaaaaacucauaaa

SEQ ID NO: 384208 - RNA, 22 nt, Zaire Ebola virus (ZEBOV)
auuaucacaauaaaagugauuc

SEQ ID NO: 384209 - RNA, 21 nt, Zaire Ebola virus (ZEBOV)
auucaaccgacaaauagcuaa

SEQ ID NO: 384210 - RNA, 16 nt, Zaire Ebola virus (ZEBOV)
auucacaaugcagcau

SEQ ID NO: 384211 - RNA, 22 nt, Zaire Ebola virus (ZEBOV)
auucuaacuagcgauuuaucua

SEQ ID NO: 384212 - RNA, 17 nt, Zaire Ebola virus (ZEBOV)
auucuacaaucaugaca

SEQ ID NO: 384213 - RNA, 16 nt, Zaire Ebola virus (ZEBOV)
auugagcuaacucaua

SEQ ID NO: 384214 - RNA, 22 nt, Zaire Ebola virus (ZEBOV)
auuuaguaauccguccauuaga

SEQ ID NO: 384215 - RNA, 21 nt, Zaire Ebola virus (ZEBOV)
caaaauuguuaaaaauaugag

SEQ ID NO: 384216 - RNA, 12 nt, Zaire Ebola virus (ZEBOV)
caaacaagagau

SEQ ID NO: 384217 - RNA, 14 nt, Zaire Ebola virus (ZEBOV)
caaacggagccaaa

SEQ ID NO: 384218 - RNA, 15 nt, Zaire Ebola virus (ZEBOV)
caaagaaaaucauaa

SEQ ID NO: 384219 - RNA, 16 nt, Zaire Ebola virus (ZEBOV)
caaagaaaaucauaau

SEQ ID NO: 384220 - RNA, 15 nt, Zaire Ebola virus (ZEBOV)
caaauaggcguuaag

SEQ ID NO: 384221 - RNA, 14 nt, Zaire Ebola virus (ZEBOV)
caacaacacucauc

SEQ ID NO: 384222 - RNA, 16 nt, Zaire Ebola virus (ZEBOV)
caacaaguccccaaaa

SEQ ID NO: 384223 - RNA, 20 nt, Zaire Ebola virus (ZEBOV)
caacaaguccccaaaaccac

SEQ ID NO: 384224 - RNA, 15 nt, Zaire Ebola virus (ZEBOV)
caacagcacccauaa

SEQ ID NO: 384225 - RNA, 16 nt, Zaire Ebola virus (ZEBOV)
caacccuaacagugau

SEQ ID NO: 384226 - RNA, 20 nt, Zaire Ebola virus (ZEBOV)
caacccuaacagugaucaaa

SEQ ID NO: 384227 - RNA, 17 nt, Zaire Ebola virus (ZEBOV)
caacgacagcacagccu

SEQ ID NO: 384228 - RNA, 19 nt, Zaire Ebola virus (ZEBOV)
caacgacagcacagccucc

SEQ ID NO: 384229 - RNA, 21 nt, Zaire Ebola virus (ZEBOV)
caacucaaguugaacaacauc

SEQ ID NO: 384230 - RNA, 17 nt, Zaire Ebola virus (ZEBOV)
caacugaagaccacaaa

SEQ ID NO: 384231 - RNA, 21 nt, Zaire Ebola virus (ZEBOV)
caagcauaccucuugcacaaa

SEQ ID NO: 384232 - RNA, 19 nt, Zaire Ebola virus (ZEBOV)
caaguccccaaaaccacag

SEQ ID NO: 384233 - RNA, 17 nt, Zaire Ebola virus (ZEBOV)
caauaguuaucuugaca

SEQ ID NO: 384234 - RNA, 23 nt, Zaire Ebola virus (ZEBOV)
caauauacuaaaggugcuuuaca

SEQ ID NO: 384235 - RNA, 18 nt, Zaire Ebola virus (ZEBOV)
caaucaugacaguugucu

SEQ ID NO: 384236 - RNA, 13 nt, Zaire Ebola virus (ZEBOV)
caaucccucacaa

SEQ ID NO: 384237 - RNA, 16 nt, Zaire Ebola virus (ZEBOV)
caaucccucacaacca

SEQ ID NO: 384238 - RNA, 19 nt, Zaire Ebola virus (ZEBOV)
caaucccucacaaccaaac

SEQ ID NO: 384239 - RNA, 16 nt, Zaire Ebola virus (ZEBOV)
caaugggaugauucaa

SEQ ID NO: 384240 - RNA, 14 nt, Zaire Ebola virus (ZEBOV)
caauugaauucucu

SEQ ID NO: 384241 - RNA, 20 nt, Zaire Ebola virus (ZEBOV)
caauuugagucuuaaugcaa

SEQ ID NO: 384242 - RNA, 15 nt, Zaire Ebola virus (ZEBOV)
cacaacuucuuaaaa

SEQ ID NO: 384243 - RNA, 20 nt, Zaire Ebola virus (ZEBOV)
cacauaaagcauuggucaaa

SEQ ID NO: 384244 - RNA, 16 nt, Zaire Ebola virus (ZEBOV)
caccacaacaaguccc

SEQ ID NO: 384245 - RNA, 16 nt, Zaire Ebola virus (ZEBOV)
cacgaguccccaaucc

SEQ ID NO: 384246 - RNA, 14 nt, Zaire Ebola virus (ZEBOV)
cacuauauaaccuu

SEQ ID NO: 384247 - RNA, 22 nt, Zaire Ebola virus (ZEBOV)
cagaaaauuccucugcaauggu

SEQ ID NO: 384248 - RNA, 18 nt, Zaire Ebola virus (ZEBOV)
cagaacagacaacgacag

SEQ ID NO: 384249 - RNA, 15 nt, Zaire Ebola virus (ZEBOV)
cagagaacaccaaca

SEQ ID NO: 384250 - RNA, 13 nt, Zaire Ebola virus (ZEBOV)
cagaggcuucaac

SEQ ID NO: 384251 - RNA, 22 nt, Zaire Ebola virus (ZEBOV)
cagcacagccuccgacacuccc

SEQ ID NO: 384252 - RNA, 15 nt, Zaire Ebola virus (ZEBOV)
caguacuauaaucac

SEQ ID NO: 384253 - RNA, 13 nt, Zaire Ebola virus (ZEBOV)
cagugaucaaaga

SEQ ID NO: 384254 - RNA, 18 nt, Zaire Ebola virus (ZEBOV)
caguugucuuuagugaca

SEQ ID NO: 384255 - RNA, 15 nt, Zaire Ebola virus (ZEBOV)
cauaacuaauaacau

SEQ ID NO: 384256 - RNA, 16 nt, Zaire Ebola virus (ZEBOV)
cauaauaaacucugca

SEQ ID NO: 384257 - RNA, 19 nt, Zaire Ebola virus (ZEBOV)
cauaauaaauaaauacuca

SEQ ID NO: 384258 - RNA, 22 nt, Zaire Ebola virus (ZEBOV)
cauagaauugcuuuauuauaug

SEQ ID NO: 384259 - RNA, 16 nt, Zaire Ebola virus (ZEBOV)
cauauaugcugacuca

SEQ ID NO: 384260 - RNA, 20 nt, Zaire Ebola virus (ZEBOV)
cauauugagcuaacucauau

SEQ ID NO: 384261 - RNA, 21 nt, Zaire Ebola virus (ZEBOV)
cauauugagcuaacucauaua

SEQ ID NO: 384262 - RNA, 14 nt, Zaire Ebola virus (ZEBOV)
cauauuucuugaua

SEQ ID NO: 384263 - RNA, 20 nt, Zaire Ebola virus (ZEBOV)
caucauauauuuaaucaaga

SEQ ID NO: 384264 - RNA, 18 nt, Zaire Ebola virus (ZEBOV)
caucauccuuacgucaau

SEQ ID NO: 384265 - RNA, 23 nt, Zaire Ebola virus (ZEBOV)
caucauccuuacgucaauugaau

SEQ ID NO: 384266 - RNA, 13 nt, Zaire Ebola virus (ZEBOV)
caucuaacaaccc

SEQ ID NO: 384267 - RNA, 14 nt, Zaire Ebola virus (ZEBOV)
cauuaaguagucaa

SEQ ID NO: 384268 - RNA, 20 nt, Zaire Ebola virus (ZEBOV)
cauuacaaauaauccuacua

SEQ ID NO: 384269 - RNA, 16 nt, Zaire Ebola virus (ZEBOV)
cauuagauaaguagau

SEQ ID NO: 384270 - RNA, 21 nt, Zaire Ebola virus (ZEBOV)
cauugucuuuuuucucuccua

SEQ ID NO: 384271 - RNA, 12 nt, Zaire Ebola virus (ZEBOV)
ccaaaccaaaag

SEQ ID NO: 384272 - RNA, 21 nt, Zaire Ebola virus (ZEBOV)
ccacgaguccccaaucccuca

SEQ ID NO: 384273 - RNA, 15 nt, Zaire Ebola virus (ZEBOV)
ccagggaccaacaca

SEQ ID NO: 384274 - RNA, 21 nt, Zaire Ebola virus (ZEBOV)
cccaaaagcagagaacaccaa

SEQ ID NO: 384275 - RNA, 15 nt, Zaire Ebola virus (ZEBOV)
cccagggaccaacac

SEQ ID NO: 384276 - RNA, 18 nt, Zaire Ebola virus (ZEBOV)
cccagggaccaacacaac

SEQ ID NO: 384277 - RNA, 21 nt, Zaire Ebola virus (ZEBOV)
ccccaaucccucacaaccaaa

SEQ ID NO: 384278 - RNA, 14 nt, Zaire Ebola virus (ZEBOV)
ccuaaauguagaac

SEQ ID NO: 384279 - RNA, 20 nt, Zaire Ebola virus (ZEBOV)
ccuaaauguagaacuuaaca

SEQ ID NO: 384280 - RNA, 18 nt, Zaire Ebola virus (ZEBOV)
ccuaacagugaucaaaga

SEQ ID NO: 384281 - RNA, 20 nt, Zaire Ebola virus (ZEBOV)
ccucaaacaagagauuccaa

SEQ ID NO: 384282 - RNA, 16 nt, Zaire Ebola virus (ZEBOV)
ccucaaaucaaugaaa

SEQ ID NO: 384283 - RNA, 21 nt, Zaire Ebola virus (ZEBOV)
ccucaaauugccugcaugcuu

SEQ ID NO: 384284 - RNA, 23 nt, Zaire Ebola virus (ZEBOV)
ccucacuguaagccagcuuccaa

SEQ ID NO: 384285 - RNA, 13 nt, Zaire Ebola virus (ZEBOV)
ccucuugcacaaa

SEQ ID NO: 384286 - RNA, 19 nt, Zaire Ebola virus (ZEBOV)
ccugaauauauggaggcca

SEQ ID NO: 384287 - RNA, 14 nt, Zaire Ebola virus (ZEBOV)
ccuuacaaaaacca

SEQ ID NO: 384288 - RNA, 20 nt, Zaire Ebola virus (ZEBOV)
cgacaaauagcuaacauuaa

SEQ ID NO: 384289 - RNA, 13 nt, Zaire Ebola virus (ZEBOV)
cgacacucccucu

SEQ ID NO: 384290 - RNA, 13 nt, Zaire Ebola virus (ZEBOV)
cgacagcacagcc

SEQ ID NO: 384291 - RNA, 18 nt, Zaire Ebola virus (ZEBOV)
cgacccagggaccaacac

SEQ ID NO: 384292 - RNA, 14 nt, Zaire Ebola virus (ZEBOV)
cgcagaacagacaa

SEQ ID NO: 384293 - RNA, 18 nt, Zaire Ebola virus (ZEBOV)
cgggacccauuucuaggu

SEQ ID NO: 384294 - RNA, 14 nt, Zaire Ebola virus (ZEBOV)
cguaauauaaccug

SEQ ID NO: 384295 - RNA, 15 nt, Zaire Ebola virus (ZEBOV)
cuaacucuauacucg

SEQ ID NO: 384296 - RNA, 14 nt, Zaire Ebola virus (ZEBOV)
cuaauaacauuaca

SEQ ID NO: 384297 - RNA, 14 nt, Zaire Ebola virus (ZEBOV)
cuaaucucaauaaa

SEQ ID NO: 384298 - RNA, 14 nt, Zaire Ebola virus (ZEBOV)
cuacaaucaugaca

SEQ ID NO: 384299 - RNA, 19 nt, Zaire Ebola virus (ZEBOV)
cuacugcuccuccugaaua

SEQ ID NO: 384300 - RNA, 16 nt, Zaire Ebola virus (ZEBOV)
cuacuugaucacaaua

SEQ ID NO: 384301 - RNA, 23 nt, Zaire Ebola virus (ZEBOV)
cuagccguuuuucaaaguucaau

SEQ ID NO: 384302 - RNA, 21 nt, Zaire Ebola virus (ZEBOV)
cuagccugcccaacauuuaca

SEQ ID NO: 384303 - RNA, 17 nt, Zaire Ebola virus (ZEBOV)
cuauuuaguaauccguc

SEQ ID NO: 384304 - RNA, 12 nt, Zaire Ebola virus (ZEBOV)
cucaaaucaaug

SEQ ID NO: 384305 - RNA, 18 nt, Zaire Ebola virus (ZEBOV)
cucaaguugaacaacauc

SEQ ID NO: 384306 - RNA, 21 nt, Zaire Ebola virus (ZEBOV)
cucaaguugaacaacaucacc

SEQ ID NO: 384307 - RNA, 15 nt, Zaire Ebola virus (ZEBOV)
cucaauauucuaacu

SEQ ID NO: 384308 - RNA, 16 nt, Zaire Ebola virus (ZEBOV)
cucacaguuaaucaua

SEQ ID NO: 384309 - RNA, 14 nt, Zaire Ebola virus (ZEBOV)
cucagaaucccuca

SEQ ID NO: 384310 - RNA, 13 nt, Zaire Ebola virus (ZEBOV)
cucauaaauugcu

SEQ ID NO: 384311 - RNA, 17 nt, Zaire Ebola virus (ZEBOV)
cucauaaauugcucuca

SEQ ID NO: 384312 - RNA, 14 nt, Zaire Ebola virus (ZEBOV)
cucauacaucauau

SEQ ID NO: 384313 - RNA, 21 nt, Zaire Ebola virus (ZEBOV)
cucauauaugcugacucaaua

SEQ ID NO: 384314 - RNA, 20 nt, Zaire Ebola virus (ZEBOV)
cucauauuguuauugauaua

SEQ ID NO: 384315 - RNA, 15 nt, Zaire Ebola virus (ZEBOV)
cucaucaccaagaua

SEQ ID NO: 384316 - RNA, 13 nt, Zaire Ebola virus (ZEBOV)
cuccuccugaaua

SEQ ID NO: 384317 - RNA, 13 nt, Zaire Ebola virus (ZEBOV)
cuccuuuaaacuc

SEQ ID NO: 384318 - RNA, 21 nt, Zaire Ebola virus (ZEBOV)
cucugacaguauuauaaucaa

SEQ ID NO: 384319 - RNA, 15 nt, Zaire Ebola virus (ZEBOV)
cucugaggcaacuca

SEQ ID NO: 384320 - RNA, 20 nt, Zaire Ebola virus (ZEBOV)
cugaacuauaggguacguua

SEQ ID NO: 384321 - RNA, 21 nt, Zaire Ebola virus (ZEBOV)
cugacaguauuauaaucaauu

SEQ ID NO: 384322 - RNA, 17 nt, Zaire Ebola virus (ZEBOV)
cugcagugucgcaucua

SEQ ID NO: 384323 - RNA, 13 nt, Zaire Ebola virus (ZEBOV)
cugcccaacauuu

SEQ ID NO: 384324 - RNA, 14 nt, Zaire Ebola virus (ZEBOV)
cuggauaauauaag

SEQ ID NO: 384325 - RNA, 16 nt, Zaire Ebola virus (ZEBOV)
cuggcaacaacaacac

SEQ ID NO: 384326 - RNA, 20 nt, Zaire Ebola virus (ZEBOV)
cuggcaacaacaacacucau

SEQ ID NO: 384327 - RNA, 22 nt, Zaire Ebola virus (ZEBOV)
cuuaacaaaagacucauaauau

SEQ ID NO: 384328 - RNA, 17 nt, Zaire Ebola virus (ZEBOV)
cuuaacauuuuugucua

SEQ ID NO: 384329 - RNA, 14 nt, Zaire Ebola virus (ZEBOV)
cuuacaucugagga

SEQ ID NO: 384330 - RNA, 14 nt, Zaire Ebola virus (ZEBOV)
cuuaccuacuagcc

SEQ ID NO: 384331 - RNA, 20 nt, Zaire Ebola virus (ZEBOV)
cuuacgucaauugaauucuc

SEQ ID NO: 384332 - RNA, 12 nt, Zaire Ebola virus (ZEBOV)
acagauaaaucc

SEQ ID NO: 384333 - RNA, 20 nt, Zaire Ebola virus (ZEBOV)
acaguugucuuuagugacaa

SEQ ID NO: 384334 - RNA, 15 nt, Zaire Ebola virus (ZEBOV)
acauuaaguagucaa

SEQ ID NO: 384335 - RNA, 15 nt, Zaire Ebola virus (ZEBOV)
accaaaagugaugaa

SEQ ID NO: 384336 - RNA, 17 nt, Zaire Ebola virus (ZEBOV)
accagguccggacaaca

SEQ ID NO: 384337 - RNA, 22 nt, Zaire Ebola virus (ZEBOV)
acccauuucuagguuguucaca

SEQ ID NO: 384338 - RNA, 20 nt, Zaire Ebola virus (ZEBOV)
acccgcaggucacauguguu

SEQ ID NO: 384339 - RNA, 15 nt, Zaire Ebola virus (ZEBOV)
accgcagaacagaca

SEQ ID NO: 384340 - RNA, 16 nt, Zaire Ebola virus (ZEBOV)
accgcagaacagacaa

SEQ ID NO: 384341 - RNA, 21 nt, Zaire Ebola virus (ZEBOV)
accgguagaguuuaguugcaa

SEQ ID NO: 384342 - RNA, 19 nt, Zaire Ebola virus (ZEBOV)
accugccaagcauaccucu

SEQ ID NO: 384343 - RNA, 19 nt, Zaire Ebola virus (ZEBOV)
acgucaauugaauucucua

SEQ ID NO: 384344 - RNA, 21 nt, Zaire Ebola virus (ZEBOV)
acuaaaugguuaauuguaacu

SEQ ID NO: 384345 - RNA, 20 nt, Zaire Ebola virus (ZEBOV)
acucaaguugaacaacauca

SEQ ID NO: 384346 - RNA, 17 nt, Zaire Ebola virus (ZEBOV)
acucauauuucuugaua

SEQ ID NO: 384347 - RNA, 19 nt, Zaire Ebola virus (ZEBOV)
acuguaagccagcuuccaa

SEQ ID NO: 384348 - RNA, 17 nt, Zaire Ebola virus (ZEBOV)
acuuaacaaaagacuca

SEQ ID NO: 384349 - RNA, 18 nt, Zaire Ebola virus (ZEBOV)
acuuauucaguacuauaa

SEQ ID NO: 384350 - RNA, 21 nt, Zaire Ebola virus (ZEBOV)
acuucauauugagcuaacuca

SEQ ID NO: 384351 - RNA, 22 nt, Zaire Ebola virus (ZEBOV)
acuucauauugagcuaacucau

SEQ ID NO: 384352 - RNA, 17 nt, Zaire Ebola virus (ZEBOV)
acuuguuuuuaaaggau

SEQ ID NO: 384353 - RNA, 16 nt, Zaire Ebola virus (ZEBOV)
agaaaaagguaaucuu

SEQ ID NO: 384354 - RNA, 18 nt, Zaire Ebola virus (ZEBOV)
agaaauaccuucuuuaca

SEQ ID NO: 384355 - RNA, 21 nt, Zaire Ebola virus (ZEBOV)
agaacagacaacgacagcaca

SEQ ID NO: 384356 - RNA, 15 nt, Zaire Ebola virus (ZEBOV)
agaaucuucucaggg

SEQ ID NO: 384357 - RNA, 17 nt, Zaire Ebola virus (ZEBOV)
agaaucuucucagggau

SEQ ID NO: 384358 - RNA, 17 nt, Zaire Ebola virus (ZEBOV)
agaaugauaaacuugau

SEQ ID NO: 384359 - RNA, 14 nt, Zaire Ebola virus (ZEBOV)
agaguuuaguugca

SEQ ID NO: 384360 - RNA, 16 nt, Zaire Ebola virus (ZEBOV)
agauauauaagcauaa

SEQ ID NO: 384361 - RNA, 18 nt, Zaire Ebola virus (ZEBOV)
agauauauaagcauaaua

SEQ ID NO: 384362 - RNA, 24 nt, Zaire Ebola virus (ZEBOV)
agauucuauauauuacuaacucua

SEQ ID NO: 384363 - RNA, 14 nt, Zaire Ebola virus (ZEBOV)
agcaugugugacau

SEQ ID NO: 384364 - RNA, 20 nt, Zaire Ebola virus (ZEBOV)
agccaaugugauucuaacuc

SEQ ID NO: 384365 - RNA, 17 nt, Zaire Ebola virus (ZEBOV)
agccacaguuauagcca

SEQ ID NO: 384366 - RNA, 15 nt, Zaire Ebola virus (ZEBOV)
agcccuggauaauau

SEQ ID NO: 384367 - RNA, 23 nt, Zaire Ebola virus (ZEBOV)
agccucucucccugcgugauaau

SEQ ID NO: 384368 - RNA, 19 nt, Zaire Ebola virus (ZEBOV)
aggaagggaagcugcagug

SEQ ID NO: 384369 - RNA, 17 nt, Zaire Ebola virus (ZEBOV)
aggcaacucaaguugaa

SEQ ID NO: 384370 - RNA, 18 nt, Zaire Ebola virus (ZEBOV)
aggcuucaacugcugaac

SEQ ID NO: 384371 - RNA, 22 nt, Zaire Ebola virus (ZEBOV)
aggcuucaacugcugaacuaua

SEQ ID NO: 384372 - RNA, 14 nt, Zaire Ebola virus (ZEBOV)
agggauagugauaa

SEQ ID NO: 384373 - RNA, 17 nt, Zaire Ebola virus (ZEBOV)
agguccggacaacagca

SEQ ID NO: 384374 - RNA, 15 nt, Zaire Ebola virus (ZEBOV)
aggucugggcucaua

SEQ ID NO: 384375 - RNA, 17 nt, Zaire Ebola virus (ZEBOV)
agguuucacagauucua

SEQ ID NO: 384376 - RNA, 17 nt, Zaire Ebola virus (ZEBOV)
aguacuauaaucacucu

SEQ ID NO: 384377 - RNA, 15 nt, Zaire Ebola virus (ZEBOV)
agucaaggaagggaa

SEQ ID NO: 384378 - RNA, 14 nt, Zaire Ebola virus (ZEBOV)
aguccccaaaacca

SEQ ID NO: 384379 - RNA, 16 nt, Zaire Ebola virus (ZEBOV)
agucuuaaugcaaaua

SEQ ID NO: 384380 - RNA, 13 nt, Zaire Ebola virus (ZEBOV)
agugccagcagcg

SEQ ID NO: 384381 - RNA, 14 nt, Zaire Ebola virus (ZEBOV)
aguuauagccauaa

SEQ ID NO: 384382 - RNA, 23 nt, Zaire Ebola virus (ZEBOV)
aguuaucucuuugagaaugauaa

SEQ ID NO: 384383 - RNA, 16 nt, Zaire Ebola virus (ZEBOV)
auaaaaaacucauaaa

SEQ ID NO: 384384 - RNA, 12 nt, Zaire Ebola virus (ZEBOV)
auaaauccucac

SEQ ID NO: 384385 - RNA, 22 nt, Zaire Ebola virus (ZEBOV)
auaaccugccaagcauaccucu

SEQ ID NO: 384386 - RNA, 21 nt, Zaire Ebola virus (ZEBOV)
auaaccuucuacuugaucaca

SEQ ID NO: 384387 - RNA, 19 nt, Zaire Ebola virus (ZEBOV)
auaaguauuucaugacuua

SEQ ID NO: 384388 - RNA, 19 nt, Zaire Ebola virus (ZEBOV)
auaauauaagucaauuaaa

SEQ ID NO: 384389 - RNA, 17 nt, Zaire Ebola virus (ZEBOV)
auacuccguauaccuau

SEQ ID NO: 384390 - RNA, 23 nt, Zaire Ebola virus (ZEBOV)
auagaauugcuuuauuauaugaa

SEQ ID NO: 384391 - RNA, 21 nt, Zaire Ebola virus (ZEBOV)
auagccauaauuguaacucaa

SEQ ID NO: 384392 - RNA, 14 nt, Zaire Ebola virus (ZEBOV)
auagcuaacauuaa

SEQ ID NO: 384393 - RNA, 22 nt, Zaire Ebola virus (ZEBOV)
auaguguuuugguugauaacac

SEQ ID NO: 384394 - RNA, 21 nt, Zaire Ebola virus (ZEBOV)
auauaaccuucuacuugauca

SEQ ID NO: 384395 - RNA, 23 nt, Zaire Ebola virus (ZEBOV)
auauaaccuucuacuugaucaca

SEQ ID NO: 384396 - RNA, 12 nt, Zaire Ebola virus (ZEBOV)
auauaagucaau

SEQ ID NO: 384397 - RNA, 16 nt, Zaire Ebola virus (ZEBOV)
auauauggaggccaua

SEQ ID NO: 384398 - RNA, 15 nt, Zaire Ebola virus (ZEBOV)
auauauuacuaacuc

SEQ ID NO: 384399 - RNA, 20 nt, Zaire Ebola virus (ZEBOV)
auaugaagagguaugauaca

SEQ ID NO: 384400 - RNA, 14 nt, Zaire Ebola virus (ZEBOV)
auauggaggccaua

SEQ ID NO: 384401 - RNA, 16 nt, Zaire Ebola virus (ZEBOV)
auauugagcuaacuca

SEQ ID NO: 384402 - RNA, 17 nt, Zaire Ebola virus (ZEBOV)
auauugagcuaacucau

SEQ ID NO: 384403 - RNA, 18 nt, Zaire Ebola virus (ZEBOV)
auauugagcuaacucaua

SEQ ID NO: 384404 - RNA, 11 nt, Zaire Ebola virus (ZEBOV)
auauugaucua

SEQ ID NO: 384405 - RNA, 15 nt, Zaire Ebola virus (ZEBOV)
auauuuaaucaagac

SEQ ID NO: 384406 - RNA, 18 nt, Zaire Ebola virus (ZEBOV)
aucaauacggugauucaa

SEQ ID NO: 384407 - RNA, 14 nt, Zaire Ebola virus (ZEBOV)
aucaauauacuaaa

SEQ ID NO: 384408 - RNA, 17 nt, Zaire Ebola virus (ZEBOV)
aucaccgcagaacagac

SEQ ID NO: 384409 - RNA, 18 nt, Zaire Ebola virus (ZEBOV)
aucagauauauaagcaua

SEQ ID NO: 384410 - RNA, 14 nt, Zaire Ebola virus (ZEBOV)
aucauauugaucua

SEQ ID NO: 384411 - RNA, 22 nt, Zaire Ebola virus (ZEBOV)
aucccucaaacaagagauucca

SEQ ID NO: 384412 - RNA, 14 nt, Zaire Ebola virus (ZEBOV)
auccuauauacuaa

SEQ ID NO: 384413 - RNA, 13 nt, Zaire Ebola virus (ZEBOV)
auccucacuguaa

SEQ ID NO: 384414 - RNA, 16 nt, Zaire Ebola virus (ZEBOV)
auccugauacuugcaa

SEQ ID NO: 384415 - RNA, 23 nt, Zaire Ebola virus (ZEBOV)
aucgcucguaauauaaccugcca

SEQ ID NO: 384416 - RNA, 13 nt, Zaire Ebola virus (ZEBOV)
aucuaguuaucuc

SEQ ID NO: 384417 - RNA, 13 nt, Zaire Ebola virus (ZEBOV)
aucucguaucgcu

SEQ ID NO: 384418 - RNA, 17 nt, Zaire Ebola virus (ZEBOV)
aucucugacaguauuau

SEQ ID NO: 384419 - RNA, 16 nt, Zaire Ebola virus (ZEBOV)
aucuuucgauuaucuu

SEQ ID NO: 384420 - RNA, 21 nt, Zaire Ebola virus (ZEBOV)
aucuuucgauuaucuuuaauc

SEQ ID NO: 384421 - RNA, 17 nt, Zaire Ebola virus (ZEBOV)
augaagagguaugauac

SEQ ID NO: 384422 - RNA, 21 nt, Zaire Ebola virus (ZEBOV)
augaauuuaacgcaacauaau

SEQ ID NO: 384423 - RNA, 17 nt, Zaire Ebola virus (ZEBOV)
augcuuacaucugagga

SEQ ID NO: 384424 - RNA, 15 nt, Zaire Ebola virus (ZEBOV)
auggauuacuugaau

SEQ ID NO: 384425 - RNA, 13 nt, Zaire Ebola virus (ZEBOV)
augugauucuaac

SEQ ID NO: 384426 - RNA, 19 nt, Zaire Ebola virus (ZEBOV)
auuaaguuguaauaaucag

SEQ ID NO: 384427 - RNA, 14 nt, Zaire Ebola virus (ZEBOV)
auuacauuaugcuu

SEQ ID NO: 384428 - RNA, 17 nt, Zaire Ebola virus (ZEBOV)
auuauaugaauaagcau

SEQ ID NO: 384429 - RNA, 16 nt, Zaire Ebola virus (ZEBOV)
auucaaccgacaaaua

SEQ ID NO: 384430 - RNA, 18 nt, Zaire Ebola virus (ZEBOV)
auucaguacuauaaucac

SEQ ID NO: 384431 - RNA, 13 nt, Zaire Ebola virus (ZEBOV)
auuccaagacaac

SEQ ID NO: 384432 - RNA, 18 nt, Zaire Ebola virus (ZEBOV)
auucuaacuagcgauuua

SEQ ID NO: 384433 - RNA, 17 nt, Zaire Ebola virus (ZEBOV)
auucuauauauuacuaa

SEQ ID NO: 384434 - RNA, 23 nt, Zaire Ebola virus (ZEBOV)
auugauauaauaauguuguauca

SEQ ID NO: 384435 - RNA, 14 nt, Zaire Ebola virus (ZEBOV)
auugaucuaaucuc

SEQ ID NO: 384436 - RNA, 19 nt, Zaire Ebola virus (ZEBOV)
auugaucuaaucucaauaa

SEQ ID NO: 384437 - RNA, 16 nt, Zaire Ebola virus (ZEBOV)
cuuauuuuugaauuua

SEQ ID NO: 384438 - RNA, 17 nt, Zaire Ebola virus (ZEBOV)
cuucagaaaauuccucu

SEQ ID NO: 384439 - RNA, 20 nt, Zaire Ebola virus (ZEBOV)
cuucaucuuguaaacguuga

SEQ ID NO: 384440 - RNA, 19 nt, Zaire Ebola virus (ZEBOV)
cuucuuaaaacaaaauuga

SEQ ID NO: 384441 - RNA, 14 nt, Zaire Ebola virus (ZEBOV)
cuugaugaagauua

SEQ ID NO: 384442 - RNA, 16 nt, Zaire Ebola virus (ZEBOV)
cuuucauaaucagaua

SEQ ID NO: 384443 - RNA, 22 nt, Zaire Ebola virus (ZEBOV)
cuuugagaaugauaaacuugau

SEQ ID NO: 384444 - RNA, 14 nt, Zaire Ebola virus (ZEBOV)
cuuuuaauugauca

SEQ ID NO: 384445 - RNA, 15 nt, Zaire Ebola virus (ZEBOV)
gaaagaucauaacua

SEQ ID NO: 384446 - RNA, 13 nt, Zaire Ebola virus (ZEBOV)
gaaauccuauaua

SEQ ID NO: 384447 - RNA, 19 nt, Zaire Ebola virus (ZEBOV)
gaacccgcaggucacaugu

SEQ ID NO: 384448 - RNA, 18 nt, Zaire Ebola virus (ZEBOV)
gaauauauggaggccaua

SEQ ID NO: 384449 - RNA, 20 nt, Zaire Ebola virus (ZEBOV)
gaaucuaagauuacuugaca

SEQ ID NO: 384450 - RNA, 18 nt, Zaire Ebola virus (ZEBOV)
gaauuuaacgcaacauaa

SEQ ID NO: 384451 - RNA, 20 nt, Zaire Ebola virus (ZEBOV)
gacaaauagcuaacauuaag

SEQ ID NO: 384452 - RNA, 13 nt, Zaire Ebola virus (ZEBOV)
gacaaaugauaau

SEQ ID NO: 384453 - RNA, 12 nt, Zaire Ebola virus (ZEBOV)
gacacucccucu

SEQ ID NO: 384454 - RNA, 19 nt, Zaire Ebola virus (ZEBOV)
gacacuuuuaauugaucaa

SEQ ID NO: 384455 - RNA, 22 nt, Zaire Ebola virus (ZEBOV)
gacauauuacugccgcaaugaa

SEQ ID NO: 384456 - RNA, 21 nt, Zaire Ebola virus (ZEBOV)
gacaucucugaggcaacucaa

SEQ ID NO: 384457 - RNA, 17 nt, Zaire Ebola virus (ZEBOV)
gacaucucugcuuucau

SEQ ID NO: 384458 - RNA, 16 nt, Zaire Ebola virus (ZEBOV)
gacccagggaccaaca

SEQ ID NO: 384459 - RNA, 20 nt, Zaire Ebola virus (ZEBOV)
gacccagggaccaacacaac

SEQ ID NO: 384460 - RNA, 17 nt, Zaire Ebola virus (ZEBOV)
gacuuacuaaugaucuc

SEQ ID NO: 384461 - RNA, 14 nt, Zaire Ebola virus (ZEBOV)
gagauuccaagaca

SEQ ID NO: 384462 - RNA, 14 nt, Zaire Ebola virus (ZEBOV)
gagcuuuaaacaua

SEQ ID NO: 384463 - RNA, 18 nt, Zaire Ebola virus (ZEBOV)
gaguccccaaucccucac

SEQ ID NO: 384464 - RNA, 18 nt, Zaire Ebola virus (ZEBOV)
gauaaucaaaaaauucac

SEQ ID NO: 384465 - RNA, 22 nt, Zaire Ebola virus (ZEBOV)
gaucaaagaaaaucauaaucuc

SEQ ID NO: 384466 - RNA, 14 nt, Zaire Ebola virus (ZEBOV)
gaucacaauacucc

SEQ ID NO: 384467 - RNA, 18 nt, Zaire Ebola virus (ZEBOV)
gaucuuuaagauuaaguu

SEQ ID NO: 384468 - RNA, 18 nt, Zaire Ebola virus (ZEBOV)
gauuaucuuuaaucuuca

SEQ ID NO: 384469 - RNA, 14 nt, Zaire Ebola virus (ZEBOV)
gauucuaacuccuu

SEQ ID NO: 384470 - RNA, 22 nt, Zaire Ebola virus (ZEBOV)
gauucuaacuccuuuaaacuca

SEQ ID NO: 384471 - RNA, 15 nt, Zaire Ebola virus (ZEBOV)
gauucuacaaucaug

SEQ ID NO: 384472 - RNA, 18 nt, Zaire Ebola virus (ZEBOV)
gauucuacaaucaugaca

SEQ ID NO: 384473 - RNA, 15 nt, Zaire Ebola virus (ZEBOV)
gauugauugaugaaa

SEQ ID NO: 384474 - RNA, 16 nt, Zaire Ebola virus (ZEBOV)
gcaaauaggcguuaag

SEQ ID NO: 384475 - RNA, 18 nt, Zaire Ebola virus (ZEBOV)
gcaacaacaacacucauc

SEQ ID NO: 384476 - RNA, 21 nt, Zaire Ebola virus (ZEBOV)
gcacucuuuauaauuaagcuu

SEQ ID NO: 384477 - RNA, 12 nt, Zaire Ebola virus (ZEBOV)
gcagaacagaca

SEQ ID NO: 384478 - RNA, 16 nt, Zaire Ebola virus (ZEBOV)
gcagugucgcaucuaa

SEQ ID NO: 384479 - RNA, 19 nt, Zaire Ebola virus (ZEBOV)
gcauaccucuugcacaaag

SEQ ID NO: 384480 - RNA, 14 nt, Zaire Ebola virus (ZEBOV)
gccaccacaacaag

SEQ ID NO: 384481 - RNA, 18 nt, Zaire Ebola virus (ZEBOV)
gccaccacaacaaguccc

SEQ ID NO: 384482 - RNA, 15 nt, Zaire Ebola virus (ZEBOV)
gccuccgacacuccc

SEQ ID NO: 384483 - RNA, 23 nt, Zaire Ebola virus (ZEBOV)
gccuccgacacucccucugccac

SEQ ID NO: 384484 - RNA, 13 nt, Zaire Ebola virus (ZEBOV)
gcgugauaaucaa

SEQ ID NO: 384485 - RNA, 22 nt, Zaire Ebola virus (ZEBOV)
gcucguaauauaaccugccaag

SEQ ID NO: 384486 - RNA, 15 nt, Zaire Ebola virus (ZEBOV)
gcucucauacaucau

SEQ ID NO: 384487 - RNA, 17 nt, Zaire Ebola virus (ZEBOV)
gcugacuaaaacacuau

SEQ ID NO: 384488 - RNA, 20 nt, Zaire Ebola virus (ZEBOV)
gcuggcaacaacaacacuca

SEQ ID NO: 384489 - RNA, 23 nt, Zaire Ebola virus (ZEBOV)
ggcggguuauauugccuacugcu

SEQ ID NO: 384490 - RNA, 24 nt, Zaire Ebola virus (ZEBOV)
guaugauacaacccuaacagugau

SEQ ID NO: 384491 - RNA, 12 nt, Zaire Ebola virus (ZEBOV)
guccccaaaacc

SEQ ID NO: 384492 - RNA, 20 nt, Zaire Ebola virus (ZEBOV)
guccggacaacagcacccau

SEQ ID NO: 384493 - RNA, 15 nt, Zaire Ebola virus (ZEBOV)
guugaacaacaucac

SEQ ID NO: 384494 - RNA, 12 nt, Zaire Ebola virus (ZEBOV)
guugcaaaaagg

SEQ ID NO: 384495 - RNA, 16 nt, Zaire Ebola virus (ZEBOV)
guuuugguugauaaca

SEQ ID NO: 384496 - RNA, 21 nt, Zaire Ebola virus (ZEBOV)
uaaaaauaaaucuauuucuuc

SEQ ID NO: 384497 - RNA, 19 nt, Zaire Ebola virus (ZEBOV)
uaaaauuguucauaucucg

SEQ ID NO: 384498 - RNA, 12 nt, Zaire Ebola virus (ZEBOV)
uaaacaacuauu

SEQ ID NO: 384499 - RNA, 14 nt, Zaire Ebola virus (ZEBOV)
uaaacaacuauuua

SEQ ID NO: 384500 - RNA, 15 nt, Zaire Ebola virus (ZEBOV)
uaaacucugcacucu

SEQ ID NO: 384501 - RNA, 17 nt, Zaire Ebola virus (ZEBOV)
uaaacuugaugaagauu

SEQ ID NO: 384502 - RNA, 22 nt, Zaire Ebola virus (ZEBOV)
uaaagcuagcuuauuauuacua

SEQ ID NO: 384503 - RNA, 14 nt, Zaire Ebola virus (ZEBOV)
uaaauaaauacuca

SEQ ID NO: 384504 - RNA, 15 nt, Zaire Ebola virus (ZEBOV)
uaaauaaauacucau

SEQ ID NO: 384505 - RNA, 12 nt, Zaire Ebola virus (ZEBOV)
uaaauacucaua

SEQ ID NO: 384506 - RNA, 22 nt, Zaire Ebola virus (ZEBOV)
uaaauacucauauuucuugaua

SEQ ID NO: 384507 - RNA, 23 nt, Zaire Ebola virus (ZEBOV)
uaaauacucauauuucuugauaa

SEQ ID NO: 384508 - RNA, 16 nt, Zaire Ebola virus (ZEBOV)
uaaauccucacuguaa

SEQ ID NO: 384509 - RNA, 13 nt, Zaire Ebola virus (ZEBOV)
uaaaucuauuucu

SEQ ID NO: 384510 - RNA, 16 nt, Zaire Ebola virus (ZEBOV)
uaaauugcucucauac

SEQ ID NO: 384511 - RNA, 13 nt, Zaire Ebola virus (ZEBOV)
uaacagugaucaa

SEQ ID NO: 384512 - RNA, 17 nt, Zaire Ebola virus (ZEBOV)
uaacauuaaguagucaa

SEQ ID NO: 384513 - RNA, 22 nt, Zaire Ebola virus (ZEBOV)
uaacgaaaggucugggcucaua

SEQ ID NO: 384514 - RNA, 19 nt, Zaire Ebola virus (ZEBOV)
uaacuaauaacauuacaaa

SEQ ID NO: 384515 - RNA, 16 nt, Zaire Ebola virus (ZEBOV)
uaacuagcgauuuauc

SEQ ID NO: 384516 - RNA, 14 nt, Zaire Ebola virus (ZEBOV)
uaagaaaaaagccu

SEQ ID NO: 384517 - RNA, 15 nt, Zaire Ebola virus (ZEBOV)
uaagccagcuuccaa

SEQ ID NO: 384518 - RNA, 15 nt, Zaire Ebola virus (ZEBOV)
uaagcuacuauuuca

SEQ ID NO: 384519 - RNA, 17 nt, Zaire Ebola virus (ZEBOV)
uaaguauuucaugacuu

SEQ ID NO: 384520 - RNA, 14 nt, Zaire Ebola virus (ZEBOV)
uaauaaacucugca

SEQ ID NO: 384521 - RNA, 23 nt, Zaire Ebola virus (ZEBOV)
uaauauacuuguuuuuaaaggau

SEQ ID NO: 384522 - RNA, 15 nt, Zaire Ebola virus (ZEBOV)
uaaucuucguguuaa

SEQ ID NO: 384523 - RNA, 17 nt, Zaire Ebola virus (ZEBOV)
uaaucuuuguguaaaau

SEQ ID NO: 384524 - RNA, 18 nt, Zaire Ebola virus (ZEBOV)
uaauguuguaucaauauc

SEQ ID NO: 384525 - RNA, 20 nt, Zaire Ebola virus (ZEBOV)
uaauguuguaucaauauccu

SEQ ID NO: 384526 - RNA, 20 nt, Zaire Ebola virus (ZEBOV)
uaauuaagaaaaaacuaaug

SEQ ID NO: 384527 - RNA, 20 nt, Zaire Ebola virus (ZEBOV)
uaauugacucagauccaguu

SEQ ID NO: 384528 - RNA, 16 nt, Zaire Ebola virus (ZEBOV)
uacaaucaugacaguu

SEQ ID NO: 384529 - RNA, 23 nt, Zaire Ebola virus (ZEBOV)
uacauuaugcuuuuauaacuuac

SEQ ID NO: 384530 - RNA, 13 nt, Zaire Ebola virus (ZEBOV)
uaccuacuagccu

SEQ ID NO: 384531 - RNA, 19 nt, Zaire Ebola virus (ZEBOV)
uacuaaaggugcuuuacac

SEQ ID NO: 384532 - RNA, 15 nt, Zaire Ebola virus (ZEBOV)
uacuauaaucacucu

SEQ ID NO: 384533 - RNA, 22 nt, Zaire Ebola virus (ZEBOV)
uacuugacaaaugauaauauaa

SEQ ID NO: 384534 - RNA, 14 nt, Zaire Ebola virus (ZEBOV)
uagaauacuucaua

SEQ ID NO: 384535 - RNA, 17 nt, Zaire Ebola virus (ZEBOV)
uagaaucuucucaggga

SEQ ID NO: 384536 - RNA, 17 nt, Zaire Ebola virus (ZEBOV)
uagccaaugugauucua

SEQ ID NO: 384537 - RNA, 18 nt, Zaire Ebola virus (ZEBOV)
uagccaaugugauucuaa

SEQ ID NO: 384538 - RNA, 22 nt, Zaire Ebola virus (ZEBOV)
uagccauaauuguaacucaaua

SEQ ID NO: 384539 - RNA, 18 nt, Zaire Ebola virus (ZEBOV)
uagccugcccaacauuua

SEQ ID NO: 384540 - RNA, 15 nt, Zaire Ebola virus (ZEBOV)
uagcgauuuaucuaa

SEQ ID NO: 384541 - RNA, 12 nt, Zaire Ebola virus (ZEBOV)
uagcuaacauua

SEQ ID NO: 384542 - RNA, 20 nt, Zaire Ebola virus (ZEBOV)
uagcuaacauuaaguaguca

SEQ ID NO: 384543 - RNA, 22 nt, Zaire Ebola virus (ZEBOV)
uuuaaucuucauccuugauucu

SEQ ID NO: 384544 - RNA, 20 nt, Zaire Ebola virus (ZEBOV)
uuuaguugcaaccuaacaca

SEQ ID NO: 384545 - RNA, 22 nt, Zaire Ebola virus (ZEBOV)
uuucuucagauugcuucaugga

SEQ ID NO: 384546 - RNA, 22 nt, Zaire Ebola virus (ZEBOV)
uuuuaaaggauugauugaugaa

SEQ ID NO: 384547 - RNA, 14 nt, Zaire Ebola virus (ZEBOV)
uauuauuacuagcc

SEQ ID NO: 384548 - RNA, 15 nt, Zaire Ebola virus (ZEBOV)
uauucaguacuauaa

SEQ ID NO: 384549 - RNA, 16 nt, Zaire Ebola virus (ZEBOV)
uauucaguacuauaau

SEQ ID NO: 384550 - RNA, 19 nt, Zaire Ebola virus (ZEBOV)
uauucaguacuauaaucac

SEQ ID NO: 384551 - RNA, 16 nt, Zaire Ebola virus (ZEBOV)
uauugagcuaacucau

SEQ ID NO: 384552 - RNA, 15 nt, Zaire Ebola virus (ZEBOV)
ucaaacggagccaaa

SEQ ID NO: 384553 - RNA, 20 nt, Zaire Ebola virus (ZEBOV)
ucaaagaaaaucauaaucuc

SEQ ID NO: 384554 - RNA, 13 nt, Zaire Ebola virus (ZEBOV)
ucaauacggugau

SEQ ID NO: 384555 - RNA, 18 nt, Zaire Ebola virus (ZEBOV)
ucaauacggugauucaaa

SEQ ID NO: 384556 - RNA, 19 nt, Zaire Ebola virus (ZEBOV)
ucaauuaaacgaccaagau

SEQ ID NO: 384557 - RNA, 12 nt, Zaire Ebola virus (ZEBOV)
ucaccaagauac

SEQ ID NO: 384558 - RNA, 18 nt, Zaire Ebola virus (ZEBOV)
ucaccgcagaacagacaa

SEQ ID NO: 384559 - RNA, 17 nt, Zaire Ebola virus (ZEBOV)
ucagcccuggauaauau

SEQ ID NO: 384560 - RNA, 19 nt, Zaire Ebola virus (ZEBOV)
ucagcccuggauaauauaa

SEQ ID NO: 384561 - RNA, 15 nt, Zaire Ebola virus (ZEBOV)
ucagccucaaaucaa

SEQ ID NO: 384562 - RNA, 15 nt, Zaire Ebola virus (ZEBOV)
ucaggucaaauucaa

SEQ ID NO: 384563 - RNA, 15 nt, Zaire Ebola virus (ZEBOV)
ucaguacuauaauca

SEQ ID NO: 384564 - RNA, 20 nt, Zaire Ebola virus (ZEBOV)
ucauaacuaauaacauuaca

SEQ ID NO: 384565 - RNA, 15 nt, Zaire Ebola virus (ZEBOV)
ucauccuugauucua

SEQ ID NO: 384566 - RNA, 23 nt, Zaire Ebola virus (ZEBOV)
uccaguuuuauagaaucuucuca

SEQ ID NO: 384567 - RNA, 22 nt, Zaire Ebola virus (ZEBOV)
uccguccauuagaggagacacu

SEQ ID NO: 384568 - RNA, 15 nt, Zaire Ebola virus (ZEBOV)
ucgcucguaauauaa

SEQ ID NO: 384569 - RNA, 20 nt, Zaire Ebola virus (ZEBOV)
ucuaaauuaaauuacauuau

SEQ ID NO: 384570 - RNA, 14 nt, Zaire Ebola virus (ZEBOV)
ucuaacaacccuug

SEQ ID NO: 384571 - RNA, 16 nt, Zaire Ebola virus (ZEBOV)
ucuaagauuacuugac

SEQ ID NO: 384572 - RNA, 22 nt, Zaire Ebola virus (ZEBOV)
ucuaaggugugaauuauuauca

SEQ ID NO: 384573 - RNA, 20 nt, Zaire Ebola virus (ZEBOV)
ucucauacaucauauugauc

SEQ ID NO: 384574 - RNA, 18 nt, Zaire Ebola virus (ZEBOV)
ucucucccugcgugauaa

SEQ ID NO: 384575 - RNA, 21 nt, Zaire Ebola virus (ZEBOV)
ucucucccugcgugauaauca

SEQ ID NO: 384576 - RNA, 16 nt, Zaire Ebola virus (ZEBOV)
ucucugacaguauuau

SEQ ID NO: 384577 - RNA, 16 nt, Zaire Ebola virus (ZEBOV)
ucucuuaaaauauuaa

SEQ ID NO: 384578 - RNA, 19 nt, Zaire Ebola virus (ZEBOV)
ucucuuugagaaugauaaa

SEQ ID NO: 384579 - RNA, 21 nt, Zaire Ebola virus (ZEBOV)
ucuuaaaacaaaauugaucuu

SEQ ID NO: 384580 - RNA, 23 nt, Zaire Ebola virus (ZEBOV)
ucuucucagggauagugauaaca

SEQ ID NO: 384581 - RNA, 16 nt, Zaire Ebola virus (ZEBOV)
ucuuucucauugcaca

SEQ ID NO: 384582 - RNA, 16 nt, Zaire Ebola virus (ZEBOV)
ugaauaagcauuuuau

SEQ ID NO: 384583 - RNA, 19 nt, Zaire Ebola virus (ZEBOV)
ugaauaagcauuuuaucac

SEQ ID NO: 384584 - RNA, 23 nt, Zaire Ebola virus (ZEBOV)
ugacaucucugaggcaacucaag

SEQ ID NO: 384585 - RNA, 18 nt, Zaire Ebola virus (ZEBOV)
ugacuuacuaaugaucuc

SEQ ID NO: 384586 - RNA, 16 nt, Zaire Ebola virus (ZEBOV)
ugauagccuuaaucuu

SEQ ID NO: 384587 - RNA, 22 nt, Zaire Ebola virus (ZEBOV)
ugauauaauaauguuguaucaa

SEQ ID NO: 384588 - RNA, 14 nt, Zaire Ebola virus (ZEBOV)
ugaucaauauacua

SEQ ID NO: 384589 - RNA, 18 nt, Zaire Ebola virus (ZEBOV)
ugaucaauauacuaaagg

SEQ ID NO: 384590 - RNA, 22 nt, Zaire Ebola virus (ZEBOV)
ugauucaaccgacaaauagcua

SEQ ID NO: 384591 - RNA, 19 nt, Zaire Ebola virus (ZEBOV)
ugauucuacaaucaugaca

SEQ ID NO: 384592 - RNA, 22 nt, Zaire Ebola virus (ZEBOV)
ugcaauaauugacucagaucca

SEQ ID NO: 384593 - RNA, 13 nt, Zaire Ebola virus (ZEBOV)
ugccacaaucucc

SEQ ID NO: 384594 - RNA, 13 nt, Zaire Ebola virus (ZEBOV)
ugcuuacaucuga

SEQ ID NO: 384595 - RNA, 20 nt, Zaire Ebola virus (ZEBOV)
uggcaacaacaacacucauc

SEQ ID NO: 384596 - RNA, 15 nt, Zaire Ebola virus (ZEBOV)
ugggaugauucaacc

SEQ ID NO: 384597 - RNA, 17 nt, Zaire Ebola virus (ZEBOV)
ugucuuucacaguugua

SEQ ID NO: 384598 - RNA, 18 nt, Zaire Ebola virus (ZEBOV)
ugugaauuauuaucacaa

SEQ ID NO: 384599 - RNA, 18 nt, Zaire Ebola virus (ZEBOV)
uguuagguuucacagauu

SEQ ID NO: 384600 - RNA, 13 nt, Zaire Ebola virus (ZEBOV)
uguuuuacucuac

SEQ ID NO: 384601 - RNA, 22 nt, Zaire Ebola virus (ZEBOV)
uuaaaacuuauucaguacuaua

SEQ ID NO: 384602 - RNA, 14 nt, Zaire Ebola virus (ZEBOV)
uuaaacgaccaaga

SEQ ID NO: 384603 - RNA, 20 nt, Zaire Ebola virus (ZEBOV)
uuaacaaaagacucauaaua

SEQ ID NO: 384604 - RNA, 16 nt, Zaire Ebola virus (ZEBOV)
uuaagaaaaagguaau

SEQ ID NO: 384605 - RNA, 20 nt, Zaire Ebola virus (ZEBOV)
uuaaguaacccaaaccaaaa

SEQ ID NO: 384606 - RNA, 19 nt, Zaire Ebola virus (ZEBOV)
uuacgucaauugaauucuc

SEQ ID NO: 384607 - RNA, 16 nt, Zaire Ebola virus (ZEBOV)
uuagguguaauaaccu

SEQ ID NO: 384608 - RNA, 15 nt, Zaire Ebola virus (ZEBOV)
uuauucaguacuaua

SEQ ID NO: 384609 - RNA, 17 nt, Zaire Ebola virus (ZEBOV)
uuauucaguacuauaau

SEQ ID NO: 384610 - RNA, 21 nt, Zaire Ebola virus (ZEBOV)
uucaaauguuaaucuuucuca

SEQ ID NO: 384611 - RNA, 20 nt, Zaire Ebola virus (ZEBOV)
uucauauugagcuaacucau

SEQ ID NO: 384612 - RNA, 17 nt, Zaire Ebola virus (ZEBOV)
uucauccuugauucuac

SEQ ID NO: 384613 - RNA, 18 nt, Zaire Ebola virus (ZEBOV)
uucaugacuuacuaauga

SEQ ID NO: 384614 - RNA, 22 nt, Zaire Ebola virus (ZEBOV)
uuccuggaccccgccaccacaa

SEQ ID NO: 384615 - RNA, 18 nt, Zaire Ebola virus (ZEBOV)
uucuaacuagcgauuuau

SEQ ID NO: 384616 - RNA, 20 nt, Zaire Ebola virus (ZEBOV)
uucuaacuccuuuaaacuca

SEQ ID NO: 384617 - RNA, 21 nt, Zaire Ebola virus (ZEBOV)
uucuaacuccuuuaaacucac

SEQ ID NO: 384618 - RNA, 15 nt, Zaire Ebola virus (ZEBOV)
uucuacuugaucaca

SEQ ID NO: 384619 - RNA, 20 nt, Zaire Ebola virus (ZEBOV)
uucuuaaaacaaaauugauc

SEQ ID NO: 384620 - RNA, 21 nt, Zaire Ebola virus (ZEBOV)
uucuuaaaacaaaauugaucu

SEQ ID NO: 384621 - RNA, 23 nt, Zaire Ebola virus (ZEBOV)
uugaaucuaagauuacuugacaa

SEQ ID NO: 384622 - RNA, 13 nt, Zaire Ebola virus (ZEBOV)
uugagcuaacuca

SEQ ID NO: 384623 - RNA, 20 nt, Zaire Ebola virus (ZEBOV)
uugauaauuuguuuaaccac

SEQ ID NO: 384624 - RNA, 21 nt, Zaire Ebola virus (ZEBOV)
uugaugucuaaggugugaauu

SEQ ID NO: 384625 - RNA, 16 nt, Zaire Ebola virus (ZEBOV)
uugcaaccuaacacac

SEQ ID NO: 384626 - RNA, 16 nt, Zaire Ebola virus (ZEBOV)
uugccacaaucuccac

SEQ ID NO: 384627 - RNA, 15 nt, Zaire Ebola virus (ZEBOV)
uuguacacaaauaau

SEQ ID NO: 384628 - RNA, 13 nt, Zaire Ebola virus (ZEBOV)
uugugaguaucag

SEQ ID NO: 384629 - RNA, 21 nt, Zaire Ebola virus (ZEBOV)
uuuaacgcaacauaauaaacu

SEQ ID NO: 384630 - RNA, 23 nt, Zaire Ebola virus (ZEBOV)
uuuaauuauauggauuacuugaa

SEQ ID NO: 384631 - RNA, 16 nt, Zaire Ebola virus (ZEBOV)
uuuagugacaagggaa

SEQ ID NO: 384632 - RNA, 14 nt, Zaire Ebola virus (ZEBOV)
uuucacaguuguau

SEQ ID NO: 384633 - RNA, 16 nt, Zaire Ebola virus (ZEBOV)
uuucaugacuuacuaa

SEQ ID NO: 384634 - RNA, 16 nt, Zaire Ebola virus (ZEBOV)
uuugacaucaaucuag

SEQ ID NO: 384635 - RNA, 13 nt, Zaire Ebola virus (ZEBOV)
uuuuaauugauca

SEQ ID NO: 384636 - RNA, 23 nt, Zaire Ebola virus (ZEBOV)
uuuuauagaaucuucucagggau

SEQ ID NO: 384637 - RNA, 64 nt, Dobrava virus
uaguaguagacuccgcaagaaauagcaguuaaauaacagcaugaucaugugggguuuacuauug

SEQ ID NO: 384638 - RNA, 91 nt, Eastern equine encephalitis virus
cuauccaaaauggagaaaguucauguugacuuagacgcagacagcccauucgucaagucacugcaaagaugcuuuccacauuuugagauag

SEQ ID NO: 384639 - RNA, 76 nt, Hepatitis E virus
cccgcgccaccgcccggucagccgucuggccgccgccgugggcggcgcagcggcgguuccggcggugguuucuggg

SEQ ID NO: 384640 - RNA, 74 nt, Homo sapiens
ucuguuuaaacgaaauugcucagaagcccuauauguaaaauagguauaaauggagcagcuuugguugaagcaga

SEQ ID NO: 384641 - RNA, 59 nt, Homo sapiens
gagaucugggguuggcaaaguuuggcccuugggccgagucuggccugcugccaguuuuc

SEQ ID NO: 384642 - RNA, 73 nt, Homo sapiens
guggcagaacagguaggguucugggacccccuuccucauuuccuaagagcaaccucacuuguaucuacucuau

SEQ ID NO: 384643 - RNA, 95 nt, Homo sapiens
cugagcugggacuugagauccuuuugcucaucagagauuuuccgcagacaccuggagcgcuggagcaaagaggagcucagcagugccuggcucgg

SEQ ID NO: 384644 - RNA, 97 nt, Homo sapiens
gaggcaggagaaucgcuugaaccugggaggcagagguugcggugagccaagauggcgccauugcacuccagucucaccagggagauucccuuuccuc

SEQ ID NO: 384645 - RNA, 71 nt, Homo sapiens
ucacuucuuuugugauucuucaguuacuucaggccaucuggauguauaugugcaggucacaggggauauga

SEQ ID NO: 384646 - RNA, 75 nt, Homo sapiens
gcugggaaacguucaugcagacacacauggaacucaauuagacugggucagugugauaucugcaggggcucuagu

SEQ ID NO: 384647 - RNA, 67 nt, Homo sapiens
cacccucgcuccauuucggugaucaauucauccacugaauggacauuuggggguggagcgaguggug

SEQ ID NO: 384648 - RNA, 62 nt, Homo sapiens
gccuguaauuccagugaugggaggcugagacuggaagauccuugagccugggaguuauaggc

SEQ ID NO: 384649 - RNA, 90 nt, Homo sapiens
uuuauugggguauuaaaugcauuuugacuuacuguggguuuauugagauguaacuucaucauaagucaagaaacaucuauaauugaugaa

SEQ ID NO: 384650 - RNA, 82 nt, Homo sapiens
aguuuuaggguacaugugcacaaugugcagguuuguuacauauguauacacgugccauguuggugugcugcacccauuaacu

SEQ ID NO: 384651 - RNA, 58 nt, Homo sapiens
cuuuccuaguccugagucucugcgucccacuggugacgcuggggcggggcuaggagag

SEQ ID NO: 384652 - RNA, 79 nt, Homo sapiens
ucuaaguaaaaaucuaguaugauuuuaagugcagaaaaaauaugguaauugcauggucaagcuagauuuuaaugauaga

SEQ ID NO: 384653 - RNA, 82 nt, Homo sapiens
ggucaagugguauuucugguucuagauccuugaggaaucaccagugucuuccacaaugguugaacuaauucacacucugacc

SEQ ID NO: 384654 - RNA, 69 nt, Homo sapiens
augaaacuauuccuuuaugcaugugccacaaaauauuuuucuggcuuuagcaugugggaagcauuucau

SEQ ID NO: 384655 - RNA, 129 nt, Homo sapiens
uuuauuacuguaaaugguauuguguuuauagcaaagguauuuuucuuuguggauauagaaauacaauuaauuauugcauguugagcaguaccuugcaaauauauuuacuuauucuuauaguuuuuuaaa

SEQ ID NO: 384656 - RNA, 85 nt, Homo sapiens
aguuacuuucuggagcucauuguugcuaaagagauacguuauaaaaaacucaggucuuuuaaguugacaauuucaaaaagccacu

SEQ ID NO: 384657 - RNA, 72 nt, Homo sapiens
uggagaagugauuugagggugaaaauaggguaagcguauuuacucuuuagcuccuuaaggaaugcuucuuca

SEQ ID NO: 384658 - RNA, 68 nt, Homo sapiens
ggguacaugugcacaaugugcagguuuguuacauauguauacaugcgccauguuggugugcugcaccc

SEQ ID NO: 384659 - RNA, 92 nt, Homo sapiens
uuauuauuacucauuccauaauaacaaugccagaugccuaucagccgcaaacuaugagauaugcacuguuguuauuggauaaguugugauaa

SEQ ID NO: 384660 - RNA, 56 nt, Homo sapiens
ccugggcaguggagguugcaguaagccgagaucacuccacugcacuccauccuagg

SEQ ID NO: 384661 - RNA, 77 nt, Homo sapiens
aggagguaagggcaugcugcaugagaguaaugccgugaugagugucuuacucugguaaaaugccauuuacaaugccu

SEQ ID NO: 384662 - RNA, 97 nt, Homo sapiens
gugauucuccugccucagccucucaaguacaugggauuacaggugcgcgccaccaagcccaucuaauuuuuguauuuuaguagagacgggguuucac

SEQ ID NO: 384663 - RNA, 66 nt, Homo sapiens
gaguugaaaguguucacaaugguauuuacauuucaaaaacuauuuguaugagcauuuuaccagcuu

SEQ ID NO: 384664 - RNA, 67 nt, Homo sapiens
gugcaguuuacaguuacccaguaguaguucuuuguccagccucguggaguaucacugaagcaugcgc

SEQ ID NO: 384665 - RNA, 77 nt, Homo sapiens
gugcaugaaugugaguguugagugucuauacauuuucucucugaauuuuggaauaguauaaauaccacaaaauguac

SEQ ID NO: 384666 - RNA, 63 nt, Homo sapiens
ugacuugaacuucuaugucaccuuuugggcaagaacaccugagugcuuagaguuucaagauca

SEQ ID NO: 384667 - RNA, 92 nt, Homo sapiens
gcacagagagagaaaagucagaauccuggcuaguaagaaauucuugcucuuuuucuggcaugucagguuucuggguuaucuuucucugcagc

SEQ ID NO: 384668 - RNA, 57 nt, Homo sapiens
uauugcuuuugauucaaggcagauuucuguuaucucucuuuggagaaagaugcaaua

SEQ ID NO: 384669 - RNA, 81 nt, Homo sapiens
cacugauuuuguuucauccacagugucaauguugugaugcauuucaauugugugacacaggcagacuguggaucaaaagug

SEQ ID NO: 384670 - RNA, 86 nt, Homo sapiens
gguguuggccacagaagugcuuauauauauauaucucauauauauaugagauauauauauuugagacagagucuggcugugucacc

SEQ ID NO: 384671 - RNA, 61 nt, Homo sapiens
gaaaauccauccccagggaguagaguaauacaguaauaucuuacuuuggggaucuauuuuc

SEQ ID NO: 384672 - RNA, 71 nt, Homo sapiens
aggcaugagccacugugccuggccugaauuuuuaaaugacacauuuaagccaggugugguggcacaugccu

SEQ ID NO: 384673 - RNA, 62 nt, Homo sapiens
auugugguugacuaaauuuguaauucacagggagucucguugcagaagcagacgaccauaau

SEQ ID NO: 384674 - RNA, 78 nt, Homo sapiens
ugcuuuugugaauagugcugcaagaaacauacgugugcaugugucuuuauagcagcaugauuuauaguccuuugagua

SEQ ID NO: 384675 - RNA, 130 nt, Homo sapiens
uauguguacauacaugcaugcauacacauaugcguacauguaugcaugcaugcaugcauguaaaugcauguauguaugcacacaugcauauguauaugugcaugcauacauacauguauaugcacacaug

SEQ ID NO: 384676 - RNA, 56 nt, Homo sapiens
guguggcuacuggcgugugugggagaagggacauuucucacgugcagcagccacac

SEQ ID NO: 384677 - RNA, 89 nt, Homo sapiens
ugagguggcugggucagaugaucugguaagaacuuccaguccuaacauuccaaguuucuaugauacacugaaguaacccagccuucuca

SEQ ID NO: 384678 - RNA, 92 nt, Homo sapiens
ugccuacagggagagaauguguuggucaggaugaagccaacaucugguccacuugacacuuauauuacucacuguaaauuaaugaacuggca

SEQ ID NO: 384679 - RNA, 109 nt, Homo sapiens
guuuugcacagcacaacucuagagggugcuauuuauguugugauuugcugcaccuuucccacauugcauauggcacccucuucaauugagcaguugugaucugcagagc

SEQ ID NO: 384680 - RNA, 66 nt, Homo sapiens
uccugcauucugacuugcuuucacugagaacaauggagaggcuggaguuauagucagaauucagga

SEQ ID NO: 384681 - RNA, 86 nt, Homo sapiens
gagaaucgcuugaacccgggaaguggagguugcagugagccaagauugcacuguugcacuccagccugggcaacagggcgaggcuc

SEQ ID NO: 384682 - RNA, 103 nt, Homo sapiens
uuaauuucauuguuuacccaaaagucuuucaggaacagauaguuuaauuuccacauaauuguaugcuuuugagagauauuuuuggaguugauuucuauuuuaa

SEQ ID NO: 384683 - RNA, 59 nt, Homo sapiens
ugaaacacaccuccucuccauccuuagugaccccuucauggugaugucgguguguuuua

SEQ ID NO: 384684 - RNA, 58 nt, Homo sapiens
ugagauaggaucuugcucuguuguccaugcuggaguacaguggugugaucauaucuca

SEQ ID NO: 384685 - RNA, 129 nt, Homo sapiens
uuucccuugggauauuauaacauaaccugcuuguaaauuugagauuaaucuuuaaguaagaucugucuguaaaucaaaccacaccaguguuacuaagaugaguuucuugcagguuuguccuaggagaga

SEQ ID NO: 384686 - RNA, 115 nt, Homo sapiens
agcccgcggcuucccuccugcucgcuacuugacacuuugguucaccugaguuucccucgcagagccuggagcugguggccagagagcagaggugggugggcugccacugugggcu

SEQ ID NO: 384687 - RNA, 56 nt, Homo sapiens
uugagauggagucucacucuucuugcccagacuggagugcaauggcucaaucucgg

SEQ ID NO: 384688 - RNA, 63 nt, Homo sapiens
gcaggcaccaugagcaucauggguacaaaaggaguccaauuucaagugcaucguugugucugc

SEQ ID NO: 384689 - RNA, 65 nt, Homo sapiens
aguaggcuuagcugucaagggcauucccaucaacaaagcccuguugacagaaaauugaguuugcu

SEQ ID NO: 384690 - RNA, 67 nt, Homo sapiens
aggaaucucaggugaggagccccggggaaacaagacuuuucaccuugggucccacuugcuuuuuccu

SEQ ID NO: 384691 - RNA, 70 nt, Homo sapiens
uagugaaguaguaaaauuuauugcagcaguccuaucuguuuauucugcagaaguuuuauuauggacauua

SEQ ID NO: 384692 - RNA, 92 nt, Homo sapiens
agugcccuuagacucccaaauagcaccauugacaagaaauaggugagguuuauauuucaaguuucaagaaucgagguguuaugggcggcacu

SEQ ID NO: 384693 - RNA, 109 nt, Homo sapiens
acuaguagugggauugcugggucaaaugguaguucuauuuuaaguucuuugagcaaucuucaaacugcuuuccaugguggcugaauugauuuacguucccaccaacagu

SEQ ID NO: 384694 - RNA, 58 nt, Homo sapiens
uauuagguuggugcaaaaguaauugcagguuugccauuauuuuugcaccagccuaaua

SEQ ID NO: 384695 - RNA, 129 nt, Homo sapiens
uguuuuuagaccaacuccaaaaucuagugcuuuggauaaaugucaguuuaagcauguugggcuagauuuugauucuuaagauucugcauauacucuagaagcuggauuagaguuccagguaaauagaca

SEQ ID NO: 384696 - RNA, 56 nt, Homo sapiens
ugaguguauagagggcauuuguccugacuggaucaaaaugugcuuuaguacccuca

SEQ ID NO: 384697 - RNA, 55 nt, Homo sapiens
cucagucuaugauacuuugcuaugguagcuugagcaaaguaaugcaugggcugag

SEQ ID NO: 384698 - RNA, 56 nt, Homo sapiens
cccaggcuggaaugcagugacaugaucucagcucacugcacucuccgccuugcggg

SEQ ID NO: 384699 - RNA, 76 nt, Homo sapiens
aguuuaguggguuuguuuuauucaauagauuacaaacaaaauguuucuuugcguugaacaaagccauaauuaaauu

SEQ ID NO: 384700 - RNA, 67 nt, Homo sapiens
ugccuccaggaaugacacugauucugcaccuuuggcagugugcacaaucgugcauuccuugucugca

SEQ ID NO: 384701 - RNA, 61 nt, Homo sapiens
guagcagaaugaguguucaaacccagacuguuuggcuuuggagugugcucauaacugcuac

SEQ ID NO: 384702 - RNA, 89 nt, Homo sapiens
augcaguuuuaaaugggccuauuuacuaaccaagaaguuauuuuaauagcuaauaucuauugguugaaauugcuuuuuaaauauggcau

SEQ ID NO: 384703 - RNA, 66 nt, Homo sapiens
uagccuccagggaucacuaaggcagaagcgauuuguguguuuguacuugguguucuggaaagguug

SEQ ID NO: 384704 - RNA, 80 nt, Homo sapiens
agggaauaaagcagauguguugaaaguacuaugacuuuauugaguguuuaguguguaucaagcaucaugcuaaguuccuu

SEQ ID NO: 384705 - RNA, 55 nt, Homo sapiens
ucuccuacacaucaguaagucaaagauaagcaacuuugacacuguuggugggagg

SEQ ID NO: 384706 - RNA, 61 nt, Homo sapiens
ccaagucuauguguucucauuguucaacucccacuuaagagugagaacaugugguauuugg

SEQ ID NO: 384707 - RNA, 56 nt, Homo sapiens
uaauacauucaaggugguaguuuuacgagcccuaggugccacacugagugauguua

SEQ ID NO: 384708 - RNA, 56 nt, Homo sapiens
gggugucuucagcuacauuggguugcccuugacccucauugugauugaagucaucc

SEQ ID NO: 384709 - RNA, 59 nt, Homo sapiens
cggggacacacuggcagcuccuaccaauuagugaccuaacccugccagugugcucuccg

SEQ ID NO: 384710 - RNA, 94 nt, Homo sapiens
caaagaggccauggauuacugugauauaucuacuucagggaaacuuuacaauucugaaagagcauguaacacaguaacccacaguuuuucuuug

SEQ ID NO: 384711 - RNA, 79 nt, Homo sapiens
gagggucauggcacagacugagugaagauuugccgagaauauucuggaagaugggaccucaguuuugucucaaccacuc

SEQ ID NO: 384712 - RNA, 65 nt, Homo sapiens
cugagauuaagauauugggaguugaugguuucuauacauuuuacuuaaaugguucuuuaucucag

SEQ ID NO: 384713 - RNA, 104 nt, Homo sapiens
gguuaggacauauaguauuauuugauagacacauauccaugugaaaaaucaguugacacgugagagggcgaugugucuauuucauaugucuagguuugucaacc

SEQ ID NO: 384714 - RNA, 93 nt, Homo sapiens
cuccagugccagcagggugcacggcuggguaagggaaaacaggcuguaccucugcuugugccccuucucagucgggcauuuuugugcagggag

SEQ ID NO: 384715 - RNA, 66 nt, Homo sapiens
uagaaagaagguuuuugagacacugugaugugugcuuucaucucacaguguuaaaccuuucuuuug

SEQ ID NO: 384716 - RNA, 77 nt, Homo sapiens
gggguagcccauguggcugaggcuucuagacacauuucaccucucaugggucagagacagacacaucgggcugcucu

SEQ ID NO: 384717 - RNA, 61 nt, Homo sapiens
uggaaauaaaugugccaagaucaagguuagggaaugaucucaggcaugguuuguucaucua

SEQ ID NO: 384718 - RNA, 86 nt, Homo sapiens
gucaacuaaggauuguuauuaucauggcugccuggaugcugcuguuagggcauuuagcauggaggcggccauaguguccaguugac

SEQ ID NO: 384719 - RNA, 100 nt, Homo sapiens
gaggcaggagaaucgcuugaccccaggaggcaaagguugcggugagccaagaucacgccaucgcacuccauccugggcaacaagagcgaaacuccgucuc

SEQ ID NO: 384720 - RNA, 63 nt, Homo sapiens
guauggcauguguuugaaugaguauacauuuauauguguaggguguucguauauguguuguau

SEQ ID NO: 384721 - RNA, 61 nt, Homo sapiens
ugagacucuuagauuggaaaucugaauuuauuuacacgauugagauugaucuagaguuuua

SEQ ID NO: 384722 - RNA, 74 nt, Homo sapiens
gcccaccaaggcagacuguggaguucuuucucaguggugagacaaaggcccauagcugcuuggcuggccugggc

SEQ ID NO: 384723 - RNA, 58 nt, Homo sapiens
uuuuuuuuggaacaauucagguuuaauugcugugaccuagaugguguucuagagagaa

SEQ ID NO: 384724 - RNA, 93 nt, Homo sapiens
guggugcauaccuguaaucucagauacuugggagguugaggugguaggauugcuugagcucaggaguuugaggcugcaguaagcuaugaucac

SEQ ID NO: 384725 - RNA, 98 nt, Homo sapiens
aguaagugcucgaagagugugaaucauuauuaaauuacucccccaaaucauuuuggaaguuaaauuaguugaugaaaucuaaucuuggagucacugcu

SEQ ID NO: 384726 - RNA, 55 nt, Homo sapiens
gagggaaaaaaggaugggugugucugaacuaaacauguauagacuuuuuuuccuu

SEQ ID NO: 384727 - RNA, 84 nt, Homo sapiens
gugcagguuuauuacuuagguauaugugugccauggugguuugcugcaccuaugaacucaucaucuagguuuuaagccccgcau

SEQ ID NO: 384728 - RNA, 112 nt, Homo sapiens
auauauugcuuuacaaggauuaugugaggauaaaugcaaugguauuuuugacauauuauaguacucaagaaauuguaguuauuucugcauugaauuuuuggauguuuugugu

SEQ ID NO: 384729 - RNA, 103 nt, Homo sapiens
uugagacagagucuagcugugucacccaggcuggagugcaguggcgcaaucuuggcucacugcgacguccgccucccggguucaagcaauucuccuguuucag

SEQ ID NO: 384730 - RNA, 78 nt, Homo sapiens
ugggaaaaaggugcagcugcuuuggaaaauauuuugguaguuccucaaaauguucaacacagaguuacauaugaccca

SEQ ID NO: 384731 - RNA, 68 nt, Homo sapiens
uaaauaguagcugaaugagggaacagaguugcaaauguuuucccuguuugucauuuaucuuuuguuua

SEQ ID NO: 384732 - RNA, 69 nt, Homo sapiens
gcuaaucuagccuuauaaguauuugaaggcaauaaucagaccuuaagaauaaguaggaguuagguuagc

SEQ ID NO: 384733 - RNA, 76 nt, Homo sapiens
uugcuugaauccgggaggcagagguugcagugagcugagauugcgccacugcacucuagccuuggcaacagagcaa

SEQ ID NO: 384734 - RNA, 57 nt, Homo sapiens
uuccagacaaaacuguaaaugcuaagccaaauagagcucuucaguuuguaucugggg

SEQ ID NO: 384735 - RNA, 67 nt, Homo sapiens
cuaaaguaaguaucacuggacagaaauaaagguguuggcaagaccaugcuccuuccaguggcuuuag

SEQ ID NO: 384736 - RNA, 59 nt, Homo sapiens
acaugggagugugguuagagaccugggcacuuugcccagcucuguaacccauucccugu

SEQ ID NO: 384737 - RNA, 81 nt, Homo sapiens
agccagaauuacugcaguaaccacuguaggugugugugguguggcuuuagacacuuauuugugguaguguuuauuuugguu

SEQ ID NO: 384738 - RNA, 85 nt, Homo sapiens
auggaaaugauuuaccuuuuguuuuaaguaaucagagaagagaacugcaaaugcaguuuguguacucaggaaguaaauuaucugu

SEQ ID NO: 384739 - RNA, 76 nt, Homo sapiens
cuaaaguauggacaagcuuuucuggauccgucauuuucaugcuauagaacuucccaggagauguuuguccuuuuag

SEQ ID NO: 384740 - RNA, 67 nt, Homo sapiens
gaguaaggggaaauaggccucuauuccucuuguugccugugaagccagguuguguuuccucuuacuu

SEQ ID NO: 384741 - RNA, 55 nt, Homo sapiens
gcagucccuaccagagucaguauacuucuuguucauauuacuguuagaggacugc

SEQ ID NO: 384742 - RNA, 109 nt, Homo sapiens
uucaaugaguagaagaguuucagguagaaagacccugggaccuggauucuggucacaggccugucucuuucuaacuuaagaccuuggaacaguacuuaaccucucugaa

SEQ ID NO: 384743 - RNA, 68 nt, Homo sapiens
ugagauuuuggggggaccagggacagaaugcuauaguuuggauggauguuuguccccucuaaaucuca

SEQ ID NO: 384744 - RNA, 78 nt, Homo sapiens
ugguuuuugucguugguucuguuuauaugcuggauuacguuuauugauuugcauauguugaaccagccuugcauucca

SEQ ID NO: 384745 - RNA, 87 nt, Homo sapiens
guggaaauagaaaaaccaagggaaugcgcugccuguguucuugcucgaguccugagagcacgagucggucugcuuuccccuuuccac

SEQ ID NO: 384746 - RNA, 61 nt, Homo sapiens
gaagaguaauuaagcuagaaagcaaggaagagauucuguguaaagcuaugaauuauucuuu

SEQ ID NO: 384747 - RNA, 76 nt, Homo sapiens
uugcuugaacccaauagguggagguugcagugagcugagaucacaccauuguacuccagccugggugacagagcaa

SEQ ID NO: 384748 - RNA, 62 nt, Homo sapiens
aucugguauuauuugccuuuuacugaaggacuuccuuuacuaugugcaaugaugcucaugau

SEQ ID NO: 384749 - RNA, 69 nt, Homo sapiens
ugaguacugauuuaagauacacacaugugaaucauucucucuguggcugugucucaagucagagcauca

SEQ ID NO: 384750 - RNA, 94 nt, Homo sapiens
cuucauucgggugcaauuguaacagaauuugcuaaacuccgcauuugauuucugaaguggauuuuaauuauucugucauaaacuugcaauggag

SEQ ID NO: 384751 - RNA, 77 nt, Homo sapiens
gcuggggugggaguugggcccaagaccuuaggcagucccucuccuaaggcuuugcuggacucaguccacccaguagc

SEQ ID NO: 384752 - RNA, 91 nt, Homo sapiens
gacuaagucucauaucgucugcauauucuagggcaccaacaugauuaaagcuagacaaauuuggguucugaaauauguuuugagucuaguc

SEQ ID NO: 384753 - RNA, 73 nt, Homo sapiens
ucugaauggagcuguuuggaugacuuggaggucuuuugugagaaaaggucguccauacagcauuucauaugga

SEQ ID NO: 384754 - RNA, 62 nt, Homo sapiens
guuuauucuucaagaaccuagcugaccaagugguacacaugauaagugcuugaugaaugaac

SEQ ID NO: 384755 - RNA, 113 nt, Homo sapiens
uuucucuaacaacccaagaauuguuagcaauuguuaguaguugggucuaacaacccaagaguuguuagcagcucuaauaacugcuacaagcacuuaaaauuuuuaaggagaaa

SEQ ID NO: 384756 - RNA, 55 nt, Homo sapiens
ugucucucuuucugucguuacuuuaaagagguucugauaugguagaagagagaca

SEQ ID NO: 384757 - RNA, 128 nt, Homo sapiens
cacuucagcccaggaaucugagaccagcuuaggcaauguggcgaaacucuguuucuacagaaaauacaaaaaguagcggggugugguggcacgugccuguagucccagccacuugggaggcugaggug

SEQ ID NO: 384758 - RNA, 84 nt, Homo sapiens
uuaggcuaugaaaccaaagguggggaaagcaccguuuaucaaaagugaucauacggaacugcuccauucuuugcuuauacuuaa

SEQ ID NO: 384759 - RNA, 87 nt, Homo sapiens
ugcacggguguguguacugcaugggugcaugcugcuugggugugugugggcagcauugccuuugcagugagugcagaccucugugua

SEQ ID NO: 384760 - RNA, 58 nt, Homo sapiens
uccccuuagucauguaacacuaguuuccauauggaaacuauuacagaguaauggugga

SEQ ID NO: 384761 - RNA, 60 nt, Homo sapiens
uucaucuagccaagacucagguaucuucuuuacaaauugcacuggguucaggcuugugga

SEQ ID NO: 384762 - RNA, 83 nt, Homo sapiens
uagggcuguuuugaagacuaauuuagauaauguaacuaggguaggcaguuccaugucugagucaugguacuucugaaccccua

SEQ ID NO: 384763 - RNA, 66 nt, Homo sapiens
gugguguuauccugucuuuacauacaauguuaaggauguuguugcaaagcacagagacaauauuau

SEQ ID NO: 384764 - RNA, 69 nt, Homo sapiens
acagaauuaagccucugacaacuacaagaacuuagaaaggacuuugaugucaagaugguuugauguugu

SEQ ID NO: 384765 - RNA, 64 nt, Homo sapiens
guuuuuuuaauuuacugaaauucuauauuuuguuuauagggauuccaguggcaauuggagaaac

SEQ ID NO: 384766 - RNA, 93 nt, Homo sapiens
guuguuguuuaauggguagggaguuuuaguuuugcaaagaugaaaaacacuuuugcaagaugaaaaaguucuagagaucuguugcacaacgau

SEQ ID NO: 384767 - RNA, 62 nt, Homo sapiens
agaggcuuuggaauauucuucuggauuaccauguaauauccugacguguuuuccagaccuuu

SEQ ID NO: 384768 - RNA, 79 nt, Homo sapiens
uucugagguaagauguucauuuuucucuuucuauuuccaauuaauuaugaaacugggccuaacauacuuaucuacagaa

SEQ ID NO: 384769 - RNA, 61 nt, Homo sapiens
agcacggugggaugagcaucuauaaagauauacauauguagaucaucaaguuuacugugcu

SEQ ID NO: 384770 - RNA, 69 nt, Homo sapiens
gcuugaacccaggaggagguugcagugagcagagaucacgccauugcacuccagccugggugacagagc

SEQ ID NO: 384771 - RNA, 64 nt, Homo sapiens
gccuuuguucuucguuccugagccaucugguugcaaaguaugguaggagcacagugcagcaggc

SEQ ID NO: 384772 - RNA, 80 nt, Homo sapiens
uucuagcaccugcgguguuggcguugucaugggaauucugcaggcuuuagacaacugaaacacugugcaacugugcagaa

SEQ ID NO: 384773 - RNA, 62 nt, Homo sapiens
ucuggaguugagagugugcgagugaaaaccagcuucaucgcauuucccucuguagcuucaga

SEQ ID NO: 384774 - RNA, 102 nt, Homo sapiens
agggagcucuggcuuagauucuguauuauuuuguguuauacugauuuuuagaaaauggaauguagcguugacacgagcacaaaucucagcaagggccuaccu

SEQ ID NO: 384775 - RNA, 61 nt, Homo sapiens
cugcaggaaucuguauguuaggacauuaagguaaaucuugacauguaauucaguccagcag

SEQ ID NO: 384776 - RNA, 91 nt, Homo sapiens
uuuauuagcuuugugcaaaaacaauugcgguuuuugccgcaaguacaaguaauggcaaaaaccgcaauugcuuuugcaccaaucuaauaaa

SEQ ID NO: 384777 - RNA, 67 nt, Homo sapiens
ucugugguuacguucuuugugcugucuuugucuggacuugguaucagaguaacgcuggccucacaga

SEQ ID NO: 384778 - RNA, 98 nt, Homo sapiens
agcauauggucaauuuuggagaauauucuauguggaggugaaaagagaauauauucuacugucauuggauggaaugcucuguaaaugucuaauauguu

SEQ ID NO: 384779 - RNA, 65 nt, Homo sapiens
gaauuuguuuaguuaguagacucugauuauucuuggaauguuagaucuuauuaacagauaaguuc

SEQ ID NO: 384780 - RNA, 62 nt, Homo sapiens
uugcucagauuauuuugaagcaaacaucucccuauuccccugcucagauuauucugaagcaa

SEQ ID NO: 384781 - RNA, 71 nt, Homo sapiens
caggaaugacccaugaugguugcauuuggauaugucaguacaaaccuaaaugcacugucaaaggaagccug

SEQ ID NO: 384782 - RNA, 92 nt, Homo sapiens
cuggaauugugucuguccguuagaucacaguaccguaaggcugucacuuucugauuuuuauaauuguacugugauccagagauucuucuuag

SEQ ID NO: 384783 - RNA, 73 nt, Homo sapiens
uguucucauuguccaacuucuuucaguuagcuguauaaauuguaacugauuaagucugggacaugaguugaca

SEQ ID NO: 384784 - RNA, 56 nt, Homo sapiens
uagggcuuuuccaagcugccacuggucggccaguacagccuccggaagcagcccua

SEQ ID NO: 384785 - RNA, 120 nt, Homo sapiens
ggauguuacuccuaaugucacagggauguacacccugugauauuauucauaguguaccagagggauauuagcacuaaugucacgauguguguacacccugugauauuauuugucauaucc

SEQ ID NO: 384786 - RNA, 99 nt, Homo sapiens
cagaaauccaagcacacuugucuuauauucuuucugcaacccauauuuuuccucuacugguuccagcauaaagcuaauaagacgaagcuugcaauucug

SEQ ID NO: 384787 - RNA, 64 nt, Homo sapiens
ugacaaauucuaugcccauucaagacuggaacucacagucacuaaagggcaggaauuaauguca

SEQ ID NO: 384788 - RNA, 60 nt, Homo sapiens
uucauuacugauaugauucugcaguuuuuaaugauuguacuauuuuuaucagugauagaa

SEQ ID NO: 384789 - RNA, 64 nt, Homo sapiens
gaugcugagagauuggagacuaguuucauucuucuguauguggauauccaguuuucccagcauc

SEQ ID NO: 384790 - RNA, 64 nt, Homo sapiens
uagguaaguaugugugauggggauuuguugcacagauuauuucaucacucaggcauuaacccua

SEQ ID NO: 384791 - RNA, 71 nt, Homo sapiens
uagggaugagguaucauuauguugcccaggcuggucuugaacuccugggcucaagugauccucucgccuug

SEQ ID NO: 384792 - RNA, 88 nt, Homo sapiens
guuuuugacuucccuguucuuuucaguuuaaugccgaguguuuaguagguacucagugacuggguauuaaaucagaggaagcagaaac

SEQ ID NO: 384793 - RNA, 62 nt, Homo sapiens
cauucuuuguguaggugccucuggcuuugagaaacgaggccagagucuauaugcagacagug

SEQ ID NO: 384794 - RNA, 62 nt, Homo sapiens
uuucuggcaagauauccauugcuuuuauuuggucuucaaagcaucuaggauguuuccaggaa

SEQ ID NO: 384795 - RNA, 77 nt, Homo sapiens
cuucccagcuacuuugagacuauaaguuacacaaaucugggcuugagugucagauuugccacuuauuagcugggagg

SEQ ID NO: 384796 - RNA, 67 nt, Homo sapiens
uucucuacgugucaaggagaagcuaaaggaagcaauugcuauuaccuuuuuaagacagguuagagga

SEQ ID NO: 384797 - RNA, 79 nt, Homo sapiens
uacccaguauagcacaauuugcaguuaugucuuaauaugugauuccugaucaugacuggaaacaguguuauuuguggua

SEQ ID NO: 384798 - RNA, 64 nt, Homo sapiens
uuucuucaaagacagcuuggccuggaaucucuagacaagacaggccagaugaucuaugaaggaa

SEQ ID NO: 384799 - RNA, 103 nt, Homo sapiens
uugagauggagucuugcucuguugccuaggcuggagugcaguggcgugaucucggcucacugcaaccucugccucccggguucacacaauucuccuaccucag

SEQ ID NO: 384800 - RNA, 55 nt, Homo sapiens
uagggaguguccuuucgggaaagguaucuuagccuuuggaauagucuacucccug

SEQ ID NO: 384801 - RNA, 57 nt, Homo sapiens
ugagacgaagucuugcucuguugccaagcuggagugcaguggcacgauuucggcuca

SEQ ID NO: 384802 - RNA, 129 nt, Homo sapiens
auuuauuuuuauucagucuuauuucucauaaaugaaguuaagaauguuauugcuuuagagcuucuuuugggguauuccugaaguaauaaauggauucuuaacauuugggguauuccugaaguaauaaau

SEQ ID NO: 384803 - RNA, 76 nt, Homo sapiens
ggaguugauugagguaaagcgaggucuccuacaagaugaugcacauccuacucuuguaaccuaugcugaccauucc

SEQ ID NO: 384804 - RNA, 102 nt, Homo sapiens
ugaggcaggagaauagcuugaacucggaagguggagguugcagugaggugagaucgcaccauugcacuccagccugggugacaagcgcgagacuccgucuca

SEQ ID NO: 384805 - RNA, 92 nt, Homo sapiens
uuguucuucuuuuggucuuuuuuccauuggauuugauaaacucuaucagacuuagucaaaucugaaggaaauuuccaaauuauggggaacaa

SEQ ID NO: 384806 - RNA, 55 nt, Homo sapiens
gcauuugcugaagaguguauuacuuccaauuaugugaucaguuuggaguaagugc

SEQ ID NO: 384807 - RNA, 69 nt, Homo sapiens
acagaaguuugacauguuuagcucuuccaaauauagaguuaaucuagcagcuaaauuggaaauuucugu

SEQ ID NO: 384808 - RNA, 63 nt, Homo sapiens
augagauuuggguggggacagagagccaaaccucauucagccucuggcccccucaaaucucau

SEQ ID NO: 384809 - RNA, 103 nt, Homo sapiens
gaggugggaggaucgcuugagcccaggagguggagguugcagugaccuauggucgcaccacugcacuccagccuuggccacagagcaagaacucccccgccuc

SEQ ID NO: 384810 - RNA, 89 nt, Homo sapiens
aguuaccuggggaacgcaguacacuguugguaggaauguaaauuagugcaacugcuauggaaaauaguguggagguuccucaaaaaacu

SEQ ID NO: 384811 - RNA, 76 nt, Homo sapiens
acuacaaaaggcugaguaaaacagagaacccugaaaaaagaguuauuguccauuuauuuagcacaguuucuguggu

SEQ ID NO: 384812 - RNA, 65 nt, Homo sapiens
ugauauugaggaaugugauuucaaauacuucacagugauguauuaauuauuucacucgacuguca

SEQ ID NO: 384813 - RNA, 67 nt, Homo sapiens
cggugaggcaaugaggcggaccagcagguucccggggaucucugcagccccguugccauaacaaccg

SEQ ID NO: 384814 - RNA, 71 nt, Homo sapiens
uguuccugguucucauuagcuucccauuagaauacaguaaggcuagcaagaugagaauaaucuuuggagca

SEQ ID NO: 384815 - RNA, 95 nt, Homo sapiens
ccuuguacuugugugcuguagcuguaauuuuauuugccauuuuauauaacaaaugcagagaaaucuaaaauauggagaugaacaacaggauaagg

SEQ ID NO: 384816 - RNA, 102 nt, Homo sapiens
uaaagugauuauuaucagacauacuguauugggaugugaagcuuucuguuuauaauuggagcccuaaacuucuaauauaguaugucugcuaauaauacuuua

SEQ ID NO: 384817 - RNA, 82 nt, Homo sapiens
gcuggagugcaauggcaugaucucggcucaccgcccccuccaccuucuggguuaaagcgacucucaugccucagccuccggc

SEQ ID NO: 384818 - RNA, 76 nt, Homo sapiens
guagcaggaguucuguaaauguuacuucuucccuucuugcuuggaaugacugucuugcagaggcuauaucugcuac

SEQ ID NO: 384819 - RNA, 60 nt, Homo sapiens
guauuaguuaucuacugcuguguaacaaacuaucccaaaccuaguaguagaaaacaauac

SEQ ID NO: 384820 - RNA, 84 nt, Homo sapiens
uucuagaaggcaaugauggagguagauuguccauaauaaagggugugaugggcccucucuacuuuuaucagagcacagcuggaa

SEQ ID NO: 384821 - RNA, 65 nt, Homo sapiens
ucauugcuaaaagucauauauaauugugugaauauaccacaguuuguuugaaccuuggcaauuga

SEQ ID NO: 384822 - RNA, 66 nt, Homo sapiens
uuuuguguaaaaugagcuacugaauuaauaaaaaugaaguuaaaauuagugcucaguuugacaaaa

SEQ ID NO: 384823 - RNA, 96 nt, Homo sapiens
gcuuugccucacugggccuggcuccuucucucuaccagcuggaaggaucccuggagcaagagaagaaggugcgcauggaccuggagcgagcgaagc

SEQ ID NO: 384824 - RNA, 55 nt, Homo sapiens
ucaguuuuuaagaguuaugcgacuugaauagugauuugcaaauucuaaaaacuga

SEQ ID NO: 384825 - RNA, 58 nt, Homo sapiens
gauguugaauuguucuuaaagacgaaacagaguucuugauguugaauuguucagcguc

SEQ ID NO: 384826 - RNA, 129 nt, Homo sapiens
gcagaguguaauucccagcuccuugacuuagacuuggccauaugacuugcuuuggccaaugguauguggccgaaguaaaagugugcuaguucugagccacaucauucauuucuacuugcugucuugugc

SEQ ID NO: 384827 - RNA, 62 nt, Homo sapiens
aauguaggguguacauauuuaggauuguuaaguguuguuguuggauuguacacccuaucauu

SEQ ID NO: 384828 - RNA, 61 nt, Homo sapiens
ggggugggagugccauccuugaugccugcacgcuggccugucauugggugcagcccacccu

SEQ ID NO: 384829 - RNA, 60 nt, Homo sapiens
acauauugaugacaggaaucgccugacaaucacuaagcugauggccuguucuccauaugu

SEQ ID NO: 384830 - RNA, 86 nt, Homo sapiens
gcugggggugcaaagauaaaaauguucauccauucgauugcuaacaauauuuauugaguaacaauuuuguucaaugcacucuaagu

SEQ ID NO: 384831 - RNA, 71 nt, Homo sapiens
gccacauguucucccucaugugugggagccaaacaaguggaucucaugaagauagagaauagaucgguggu

SEQ ID NO: 384832 - RNA, 73 nt, Homo sapiens
gggggcucgugccagcccugaaggugguuggaaggucuuuuuguagcagccaggaagggcuggcucugcuucu

SEQ ID NO: 384833 - RNA, 57 nt, Homo sapiens
cuagggguugaggucuccauuuuggcacuugcuaacacuaugagagccgauuccugg

SEQ ID NO: 384834 - RNA, 77 nt, Homo sapiens
auuuggggcaugagagagaagauuaaaauauaguuuacuugucuccauauuugagucauuuccuuaugcuacuaaau

SEQ ID NO: 384835 - RNA, 59 nt, Homo sapiens
auaguuuaauauucuguugagagcuuuuucagcuauuuucaucaggaauauugaccugu

SEQ ID NO: 384836 - RNA, 120 nt, Homo sapiens
guccugagcagcggcugaaugggcucuaccugugacucaccguuccucuccugguaggcagcaacaauaugggugaggucguagucauaggcaaaggggcuggucccguugaucacggau

SEQ ID NO: 384837 - RNA, 80 nt, Homo sapiens
ggauuucaaucugucuuuuagggggccacgacuaaaaguacuauaguagccauggccaauuucuugaagacagaaaaucc

SEQ ID NO: 384838 - RNA, 55 nt, Homo sapiens
ccaauacauagugaugaaaggcagauaaguggcugucuuugguugagcguguugg

SEQ ID NO: 384839 - RNA, 73 nt, Homo sapiens
ugugaaggugaacuucucuaauuuagugguauagaaacuagguacaaaaacucauggagauauccccuucaca

SEQ ID NO: 384840 - RNA, 82 nt, Homo sapiens
ucacuaguagcaccucucaugagcuucuugugaccaagaacugaguaaauucacgugaagcucuuggaaagguggcugguga

SEQ ID NO: 384841 - RNA, 55 nt, Homo sapiens
uugagauggagucucacucugucacccaagcuggagugcaguagugccaucucag

SEQ ID NO: 384842 - RNA, 56 nt, Homo sapiens
uucuccauaucugugcugauucaccucacacuagaucagugcaauucuauggggaa

SEQ ID NO: 384843 - RNA, 121 nt, Homo sapiens
uuguaaguuuagcuaaaacucgccuguaaaaucaucuaggucugaugacucuuggagaucuuugauuucuaugguuaccaggcuagucauaauuuuaaguuuucuugagucaaauuuacag

SEQ ID NO: 384844 - RNA, 62 nt, Homo sapiens
ucaguuugccaguauuuuauugagaauuuuugcaucaauguucaucagggauauuggccuga

SEQ ID NO: 384845 - RNA, 66 nt, Homo sapiens
gugugguggcacgugcuuguaaucucagccacucgggaggcugaggcaggagaacggcuugaacac

SEQ ID NO: 384846 - RNA, 60 nt, Homo sapiens
ccauggccauuuuauuguagagugcauuauuaaguguauagcuugaaggaauggucaugg

SEQ ID NO: 384847 - RNA, 103 nt, Homo sapiens
gcccugacaggugaccaccuguggcuugaagguucuuucuuggcauuguccuaaaaccacugaggugagaacugcuggggccacaggcaggcuccugaggggc

SEQ ID NO: 384848 - RNA, 79 nt, Homo sapiens
gucagaugguggauuauuucgauuccugauuaaaaucuuuacagcuccucaauaucuauggaauagucuacacucugac

SEQ ID NO: 384849 - RNA, 67 nt, Homo sapiens
aguaccuggguaucacugcuggcuauucaggacccaagggcucuguaguuagcagaugaugaaugcu

SEQ ID NO: 384850 - RNA, 85 nt, Homo sapiens
gagaaucgcuugaacccaggaggagagguugcagugagucgagauugugccauugcacuccagccugggugacagagugagacuu

SEQ ID NO: 384851 - RNA, 71 nt, Homo sapiens
uucucuaugucuuucauauuuuggggauggugcuuuguccugugaccucaauuuucugaaggauguaagaa

SEQ ID NO: 384852 - RNA, 63 nt, Homo sapiens
auuuucacuguauuguggaagaauacagaaagaagaaacacuuuucuacagucacaggaagau

SEQ ID NO: 384853 - RNA, 85 nt, Homo sapiens
cugcuugcccuccuccaggcucuccccagcuggcaucccccaagaggaaugacugucuagauagagcuugggaagggcacggugg

SEQ ID NO: 384854 - RNA, 67 nt, Homo sapiens
uugaagagaguaguggaucuuccauaacggaguuugagaucugagaauggaaagacugccucuucaa

SEQ ID NO: 384855 - RNA, 61 nt, Homo sapiens
uaaguguccauguguucucaccuuuuagcuuccacuuauaagugagaacaugugguauuug

SEQ ID NO: 384856 - RNA, 72 nt, Homo sapiens
gccuuugguaaaaugaccacagacauccagaguauuuggauguuggaggaagucauuuuacccuacagaggu

SEQ ID NO: 384857 - RNA, 99 nt, Homo sapiens
guuaucccagugauuguauggugaagguagggacugcuaaaacaaaauccaaauauaguacucaaaacucacuuuagcuaacaauccugauggcauaac

SEQ ID NO: 384858 - RNA, 57 nt, Homo sapiens
auuccuggauuccucaccuggacauuauuaaguaggucugugguagggaccaggaau

SEQ ID NO: 384859 - RNA, 130 nt, Homo sapiens
auuugauaaaauuaagcccuuuauauauaaagaagguucuuggcaagucuuuuaaguuugaugaaaaaguuuauugaacuuaaaagacuugccaagaaccuacuuuauaaagggcuuaauuguaucaaau

SEQ ID NO: 384860 - RNA, 83 nt, Homo sapiens
cucuggccuagaaaugaauuaacuaaaauucacuuuaugccgaaaggauaaagguaauaauaguugcauuuucuaggccaggg

SEQ ID NO: 384861 - RNA, 57 nt, Homo sapiens
ucuggcucauagguugaacuagauaccacauggguaucucauuacugaugagccaga

SEQ ID NO: 384862 - RNA, 56 nt, Homo sapiens
guaaaauagaauaacguggcuauccuuaaagaugucacguugcuuuucuguuguac

SEQ ID NO: 384863 - RNA, 117 nt, Homo sapiens
uuguuuaaaauuguguuuuagcaugucuuggucuuacuuuguccucuuacugucugcucuccuccauuagccaugugcaaaguuaagaucccaggaucugcuaccuuucaguuacga

SEQ ID NO: 384864 - RNA, 76 nt, Homo sapiens
ucacuauuacuguacugcucuuaaccugaacaguggaacucagucuagguuaaagcaaguggaguacgagaaguga

SEQ ID NO: 384865 - RNA, 84 nt, Homo sapiens
cuucgcagucagguauuucugaggaagagacauaugaaacgcaugugguuuuucacauuuagagaaagugacgacuguaagaag

SEQ ID NO: 384866 - RNA, 61 nt, Homo sapiens
acccaggaggcagagguugcagugagccaagaucacgccacugcacuccagccuccugggu

SEQ ID NO: 384867 - RNA, 76 nt, Homo sapiens
gagaaguacacauuucuuccaaguaccagaaagauauaaaguguuuaucaggccuuuggaaaaaugaagugcucuu

SEQ ID NO: 384868 - RNA, 64 nt, Homo sapiens
cugcuguaguaagucauuauguuuguagaucuugcaaugcagaaauagaagacuagugcagcag

SEQ ID NO: 384869 - RNA, 66 nt, Homo sapiens
uuugugacuugcuucucagaauacaacaaagguaauggaauaucacuucugagauuagguuacaaa

SEQ ID NO: 384870 - RNA, 85 nt, Homo sapiens
uggggaaagcauaaucuuuucaacaaaggguauugggaauacuggguauccacgugaaaaagauugaaauuggaugcuuaucuua

SEQ ID NO: 384871 - RNA, 80 nt, Homo sapiens
gugucucuguugccuaggcuggagugcaguggcgccaucucgguucacugcaaccucugccucccggguucaagcgauuc

SEQ ID NO: 384872 - RNA, 63 nt, Homo sapiens
gagguaugagcugagaaauccuccuccuuugagacaacugcucacuuucucaguucugaucuc

SEQ ID NO: 384873 - RNA, 70 nt, Homo sapiens
gacagcuguuguuccagucuuuuaauggguauuuguauagcaaacaaccuuggaagcuggagauacuguc

SEQ ID NO: 384874 - RNA, 93 nt, Homo sapiens
gugagcuguaagaauugugcaaauguuaaacuaacuucagauuccagaaaugaguccaaguuggucaugauauuuagcauucuuauaaauugc

SEQ ID NO: 384875 - RNA, 130 nt, Homo sapiens
cugcagaccuucgcggugaguguuacagcucuuaaggcagugcaucuggaguuguuuguuccucccggugggcucguggugucacuggcuucaggagugaagcugcagaucuucauggugaguguuacag

SEQ ID NO: 384876 - RNA, 63 nt, Homo sapiens
ggucucuugguuuagagcauuuagggccaaacugcuggcaugguugacccuaagcuggagauu

SEQ ID NO: 384877 - RNA, 64 nt, Homo sapiens
auugugaauagugcugcaagaaacauaugugugcaugugucuuuauagcagcaugauuuauaau

SEQ ID NO: 384878 - RNA, 63 nt, Homo sapiens
uccaaguguaugcaugugugugugugugugugugugugugcgugucaugugcauacauuuggg

SEQ ID NO: 384879 - RNA, 106 nt, Homo sapiens
gaagacauguaaagaaauaagaaagugugaccaauacuugggaggaaaaagcaguaaauagaaacuuuugaguaggcuuauauuuugguuuuauuagauagacuuc

SEQ ID NO: 384880 - RNA, 57 nt, Homo sapiens
ucuagaugaaguauaaaguaguucccagugcugguugcacaucuacuucaucucaga

SEQ ID NO: 384881 - RNA, 87 nt, Homo sapiens
cugggaaauuuaaguuugcagaucccacacucacccugaauccucacucaggguggggucaggaaucugcauuuuaacuagucgcgg

SEQ ID NO: 384882 - RNA, 92 nt, Homo sapiens
uuguuuuaccacuagcuuugcagagacuuguuaggaauuuacagcuugugauugcuucacuuuuuuggaaauggcucuaugguuucaaacaa

SEQ ID NO: 384883 - RNA, 69 nt, Homo sapiens
ggcuuuugagaagguuaauuagauuugaaggcggaggaagcagaagucaaggaggccuuucagauggcu

SEQ ID NO: 384884 - RNA, 115 nt, Homo sapiens
uguaaguuguauuccuagguauuuuauuuucuuuauagcaauuaugaaugggaguccacucauaauuugguucucuguuuauuuuugguguauaagaaugcuugugauuuuugca

SEQ ID NO: 384885 - RNA, 67 nt, Homo sapiens
ucaaguugggaaacugggggcuuaugggaacccuuucccauacugucaaauagauuuccuggauuga

SEQ ID NO: 384886 - RNA, 77 nt, Homo sapiens
uccagaaccugugacuauguuaccuuacacaucaaaauaauuuuucugaugugauuaguuaagaugcuuauaaugga

SEQ ID NO: 384887 - RNA, 65 nt, Homo sapiens
agucacaugccagcacacccagcuacuucauuuuuuauauagagauggggucuggcuauguugcu

SEQ ID NO: 384888 - RNA, 93 nt, Homo sapiens
ugcugagucuaaugguaauuauguuuugcauucuuugaaaaauugccacacugcuuuucacagcggucgaacuaauuugcauuuccaccagca

SEQ ID NO: 384889 - RNA, 95 nt, Homo sapiens
gaggcgggaggaucauuugaacucgggaggcggagaucgcagugagccaagguggcaccacugcacuccagccucguggacagaaacucuaucuc

SEQ ID NO: 384890 - RNA, 60 nt, Homo sapiens
auuuucugccagugggaauguaaaggcuucauccuuuguauguaaccauuuggcaaaagu

SEQ ID NO: 384891 - RNA, 69 nt, Homo sapiens
ggaaggccuugccgaaggaugccacccaaccagcaucuaacggacauggcauuuuuggcaaugccuucu

SEQ ID NO: 384892 - RNA, 85 nt, Homo sapiens
agagcaauauuuuuggugcaggagcugacucaucagauuagcagccucucaagauugaugauguuucugccuugccuauuccucu

SEQ ID NO: 384893 - RNA, 63 nt, Homo sapiens
guuucuuuuggguugacuuuuagggcuguuuugauucugcaaucuaaucaucccagaagaaau

SEQ ID NO: 384894 - RNA, 105 nt, Homo sapiens
gggaaaagugcaguauuugagugggagugucccguuuuuccagguacagucugucauggcuucccuggcuaggaaagggaaauuccccgaccccuugcacuuccc

SEQ ID NO: 384895 - RNA, 56 nt, Homo sapiens
guuuaauuauagcagggucauugauaguucguggugaucauuguuguggguugaau

SEQ ID NO: 384896 - RNA, 63 nt, Homo sapiens
ccuaaggcaguagccugaauaauuucaauguauuggauuguuugguuucugucuuuaccaagg

SEQ ID NO: 384897 - RNA, 83 nt, Homo sapiens
cugcucuugaacccuguuuucuguuguuuaagauguuuaucaagacaacaccugcacagccgaacauagacccuuauuaguag

SEQ ID NO: 384898 - RNA, 59 nt, Homo sapiens
ugagacggaguuucacucuuguugcccaggcuggagugcaauggugcaaucuccgcuca

SEQ ID NO: 384899 - RNA, 97 nt, Homo sapiens
cuuaggacuuggggagugugugggacccagugugagcaacuucucuagagcaaugccaucgcauggucuccaggcagcuccccaugcuagucuuagg

SEQ ID NO: 384900 - RNA, 61 nt, Homo sapiens
guuuuuaguccucugaaaaucuauaauauucuauaauugagagaucggagggauuaaaaau

SEQ ID NO: 384901 - RNA, 107 nt, Homo sapiens
gauaacuuucaacuguuaauucaaauaccuuuuaggggaacguucugaaguuuagacuuuagaaucuccccagaauagguuuuguguguuuuguucuucuuguuguu

SEQ ID NO: 384902 - RNA, 107 nt, Homo sapiens
uuuuugauuguccauacuuaggcugccgcuaugcauguauaguggguagaagccagggaugcuucuaaacaucuuacaaugcauaggguagucuccugcaacaaaga

SEQ ID NO: 384903 - RNA, 101 nt, Homo sapiens
aaugcuuugcuuucaaugcauugguuuucuauauaaguauuagauucuaaauucagguguuauggagccaaacuacuagcaaucucugaaagcuucucauu

SEQ ID NO: 384904 - RNA, 66 nt, Homo sapiens
guauuucuaguucuagauccuugaggaaucaccacacugucuuccacaaugguugaacuagauuac

SEQ ID NO: 384905 - RNA, 56 nt, Homo sapiens
gagaggucguauaugauuucugguuucaaauaccugaagaagucauuagacuuuuc

SEQ ID NO: 384906 - RNA, 82 nt, Homo sapiens
auauauauauauguacacauacauauauguguguguauauauauauauacacacguaugugugugugugugugugugugugu

SEQ ID NO: 384907 - RNA, 55 nt, Homo sapiens
agaguaguaggaugaauggacuccagaauaaauaguuuuccucuccuucuacucu

SEQ ID NO: 384908 - RNA, 88 nt, Homo sapiens
uccuuucacuggaauuuucuugguuaggggaaauaggcaguguaaucauuuuuccugucugaccucaaccagggguaaacuaaaagga

SEQ ID NO: 384909 - RNA, 72 nt, Homo sapiens
gucagccugucggcuccuucauucuggccacacaucacaacaguccaugaaugcagcagugacagggcuggc

SEQ ID NO: 384910 - RNA, 55 nt, Homo sapiens
cuucaccucuaggcuauuaugagucuuugaagcuuugauauuucuggaaguggag

SEQ ID NO: 384911 - RNA, 108 nt, Homo sapiens
gguggagcuuaacucucaugaauguauuuugagggccucauaccugauucuggccuaaccuuagagucacaugaggcccuucauuaaaacgugauagaugcuuccacc

SEQ ID NO: 384912 - RNA, 98 nt, Homo sapiens
ugacaugguggcacaugcguguaguucagcuaccugggaugcugaagugggaggaucacuugagcccaggaguuugagguugcagugagcuaugauca

SEQ ID NO: 384913 - RNA, 65 nt, Homo sapiens
gaaggaucuggagucuugaugauuuucaaaugaacucaucugaauucucagggucuucuuccuuc

SEQ ID NO: 384914 - RNA, 64 nt, Homo sapiens
gaguuacacaguugguaggggcagagccaggugacaggcagucugaccccugugcuguggacuc

SEQ ID NO: 384915 - RNA, 92 nt, Homo sapiens
ggagugcgagugcucagcccauguuagcaugcauacuuauuuuuaaagguguauguuguccauggaugcguaacagauuuccucagugcuuc

SEQ ID NO: 384916 - RNA, 99 nt, Homo sapiens
gaggcaggagaaucgcuugaacccaggaggcggagguugcagugagccgagaucacgccauugcacuccagcccugcugacagugugagacucugucuc

SEQ ID NO: 384917 - RNA, 84 nt, Homo sapiens
ucagguaucuuuauagcaaugccccacuccugauaccaauuuucuguguuaggcauucuggcacugcuauaaggaaauaccuga

SEQ ID NO: 384918 - RNA, 78 nt, Homo sapiens
aagagaagggauuucauuuccaagacuagucuauaaaaagacuguggccucaucuuggguggauucauucuuucucuu

SEQ ID NO: 384919 - RNA, 63 nt, Homo sapiens
uuauugcagagccugcuuuguaagaccugcuuacuaccuugcagcacaguagguuugcaauaa

SEQ ID NO: 384920 - RNA, 56 nt, Homo sapiens
gucauuuccugucaguuucuacguuucguauucuggagucugaacuggacaaugac

SEQ ID NO: 384921 - RNA, 114 nt, Homo sapiens
cugaccaugucuucaggcaggucaugaagaguuagugugagguugaaaauaauggaaauggggaccauuugaccacaacccucucugguucuucauaguccucugaggccucag

SEQ ID NO: 384922 - RNA, 73 nt, Homo sapiens
guuggguaagaucugaggcuaggauaggcugauucuuggagucaguaaacuucagcuucuaauagugcuuagc

SEQ ID NO: 384923 - RNA, 62 nt, Homo sapiens
cagacuaugccucaaucacuugucaucaugguagugaugacaagugauuaaggcauauucug

SEQ ID NO: 384924 - RNA, 76 nt, Homo sapiens
aguggcaaggggaggguguuuaagagcagaggaguggcaggucugauuuguaguuugaaagcucccucuggguacu

SEQ ID NO: 384925 - RNA, 62 nt, Homo sapiens
acuucauagcaaagagcauaaaagucaucagucagugacuagguaugcuauuuauuagaagu

SEQ ID NO: 384926 - RNA, 86 nt, Homo sapiens
accucacagggcugguaucucacauauucaguagguuuuggggggaaagcuauacuauuuaugaggggagccaagcacaugcaggu

SEQ ID NO: 384927 - RNA, 56 nt, Homo sapiens
ccuggcaaauugcauucagauuuuaaaugaaauauuugagcaugcagauugccagg

SEQ ID NO: 384928 - RNA, 97 nt, Homo sapiens
cugcgaacugaacuggucuuuggaggaggaggguucagcaaaauuuuaauuacagguugucuguccugcuuuuaauggcuaggcucugcaaacguag

SEQ ID NO: 384929 - RNA, 63 nt, Homo sapiens
guuguuuguuuauucuaaggccugauucucagaaaggaaauggucauagagcaagcaaacagc

SEQ ID NO: 384930 - RNA, 59 nt, Homo sapiens
aaugaccuaauuuggaaagaggaucuuugcagauguaaucaaauugaaauuaggucauu

SEQ ID NO: 384931 - RNA, 65 nt, Homo sapiens
gcuuaagggaaugugguagcugguuugaucgucuauccagaccacuuaaauuuuccuauaucagc

SEQ ID NO: 384932 - RNA, 56 nt, Homo sapiens
gagauggaguuucacuucgcucuuucgccaaggcuauagugaaguggcucgaucuu

SEQ ID NO: 384933 - RNA, 56 nt, Homo sapiens
gcuagguuggggaaguucuccuggauaauaucuuggaguguguuuuccaacuuggu

SEQ ID NO: 384934 - RNA, 62 nt, Homo sapiens
ggagugggcgggaggccugcacguggggacagucccucagugcacaaccucacccccgcucu

SEQ ID NO: 384935 - RNA, 62 nt, Homo sapiens
auuuuugguugucagcacuaggggcagguauuacuggaagcuauuggguugacaccaaggau

SEQ ID NO: 384936 - RNA, 66 nt, Homo sapiens
aaaaggcuagcuaguaacagaaauaggaugaagacgugucucuugcucugaguacagcugucuuuu

SEQ ID NO: 384937 - RNA, 78 nt, Homo sapiens
gggcacugccaagaagugucuaagcaggaggugcugugguccagucugcacuucggagacauucucuuggcauagccu

SEQ ID NO: 384938 - RNA, 55 nt, Homo sapiens
cucacuaggaaguaaaguuuguaagcccaaggccaauaugcuaauuuuuaguggg

SEQ ID NO: 384939 - RNA, 59 nt, Homo sapiens
gugauguguuucaacagcuccuuuccuuaaacauuguuaggugcuauuuaacauaucau

SEQ ID NO: 384940 - RNA, 62 nt, Homo sapiens
cuauuugguuggugaaaaaaguaguggcaaaacccgcaaugacuuuugcaccaaccuaauag

SEQ ID NO: 384941 - RNA, 57 nt, Homo sapiens
uuauaacuggggaguuccuugaauggaaauauguucacaguggcugcuuaauuguga

SEQ ID NO: 384942 - RNA, 95 nt, Homo sapiens
guuccaaccagagggcugugacuagacuugcaagguugcagggcgaugccauugcuaccacagucaguacacauggaggccacacugagcgggac

SEQ ID NO: 384943 - RNA, 57 nt, Homo sapiens
ggaacaguucucucuucuucaaauuucugaaauaguuugagaagaauuagcucuucc

SEQ ID NO: 384944 - RNA, 78 nt, Homo sapiens
ugguuuuuauuguugguucuguuuaugugauagauuacauuuauugacuugcauaaguugaaccagccuugcaggcca

SEQ ID NO: 384945 - RNA, 78 nt, Homo sapiens
cugagauaauuucuaggugucauaucauggagggucuuguagauacacucuacuaaggacacuggacuuuuaucuuag

SEQ ID NO: 384946 - RNA, 65 nt, Homo sapiens
ccuguugugcuagguuuuauccuuugucaggugggucuguuuccaucuugaacuuagucaacagg

SEQ ID NO: 384947 - RNA, 79 nt, Homo sapiens
gagucuuggauuauaauggaauauuuggagagggaguucagacucagaucuaagaauuucuacaguaauuuaacaucuc

SEQ ID NO: 384948 - RNA, 67 nt, Homo sapiens
aagcuucuggcauuuucucugcuugcacucacuuucuccuguugccuugugaagaaggugccugcuu

SEQ ID NO: 384949 - RNA, 97 nt, Homo sapiens
uuuugcgauggagucucgcucuguugccuaggcuggagugcaguguggcaaucuaagcucacugccugggcaacaagagugaaauuccaucucaaaa

SEQ ID NO: 384950 - RNA, 67 nt, Homo sapiens
caggguggauuuuauuuuaauuaauuaauuuauuuauuuauuuauuuugagacggagucucacucug

SEQ ID NO: 384951 - RNA, 85 nt, Homo sapiens
uuuuccaagaauuagccagaaauuccaugucacccauucuggucaguaggauggaagaaacgauuuucuggaaguuucuggaaaa

SEQ ID NO: 384952 - RNA, 89 nt, Homo sapiens
ggagucuugcucuguugccuaggcuggagugcaguggcaugaucucggcucacugcaaccuccgccucacaggguucaagagauucucc

SEQ ID NO: 384953 - RNA, 89 nt, Homo sapiens
ggagaauugcuuaaacccaggaggcagaaguuguggugagccgagauuguaccaucgcacuccagccuggguaauaagagcaaaacucc

SEQ ID NO: 384954 - RNA, 83 nt, Homo sapiens
gguguauaccuucccuguguuaugguuucuaauguccagggcggaagaggauauuacucccaauaucgcagggggcguacacc

SEQ ID NO: 384955 - RNA, 123 nt, Homo sapiens
cucccaugcaugcaggcccugacuggggcuggcugagucagucuguccugugcugagcugugggccagccagcgagagggcagagcugggguccugggagaggguguccaugcagaaugggag

SEQ ID NO: 384956 - RNA, 65 nt, Homo sapiens
aucagaaucucuugagaguguuccaagugucuucauuuuaaacaaucuuucuagaauauuuuggu

SEQ ID NO: 384957 - RNA, 74 nt, Homo sapiens
gcagcuuaaaguguuguaucuccauuugcauauaaccugaauacaaaugcaauucaaugcauauuuuaaguugu

SEQ ID NO: 384958 - RNA, 66 nt, Homo sapiens
ccugagcaauauagugagaucuugucucuuaaaagaaagaaaaguuguuauacuuuauuguuuagg

SEQ ID NO: 384959 - RNA, 66 nt, Homo sapiens
aagggucagcuugagaccuugaggaguuuuuuacaccgacuuuggagcucguuuuugcugacucuu

SEQ ID NO: 384960 - RNA, 66 nt, Homo sapiens
uagaaugccugguguuggccagaaaucucucccauuagagugacuggcaccauccaggugucucua

SEQ ID NO: 384961 - RNA, 60 nt, Homo sapiens
augaugaacugucuuacuacucacugaaggcuuucagagaaagagcaagacagucaucau

SEQ ID NO: 384962 - RNA, 59 nt, Homo sapiens
uuggguuggcuguuucccccaagugaagaucauugacucucuaaagcuggccaacucaa

SEQ ID NO: 384963 - RNA, 90 nt, Homo sapiens
caggcaagaaggggcugggugaggaaugaccccgugugguccuauggccauguccccauuccuucacucccuaagaccguucuugcucug

SEQ ID NO: 384964 - RNA, 84 nt, Homo sapiens
ggagaaucacuugaacccgggagguggagguugcagugagccgagauugcaccauugucaccugggugacaagagugaaacucc

SEQ ID NO: 384965 - RNA, 56 nt, Homo sapiens
ggaucauguacaacggugacacgugccaaucucauugcaugguagucacaugauuc

SEQ ID NO: 384966 - RNA, 75 nt, Homo sapiens
agaugaguugugcuugcuguguucuaugccagguguuaaguggacaggaacugagcaagcacugaggauucgucu

SEQ ID NO: 384967 - RNA, 59 nt, Homo sapiens
aaguuccuuguagaugcuggauauuagaccccugucagaugugcaguuugcaaaaacuu

SEQ ID NO: 384968 - RNA, 55 nt, Homo sapiens
ugaguauuuaccaugugccaggaacuguuucaagcaucuugcacaugugaacuca

SEQ ID NO: 384969 - RNA, 67 nt, Homo sapiens
ucucuagagagccugguguucacgcccaggacaagcccuggggaaaugagagccaagcuccugggga

SEQ ID NO: 384970 - RNA, 63 nt, Homo sapiens
gugcugcuggaacauauuauuuuuguucuuaaaauggacaagacuucuuguauucuaguucac

SEQ ID NO: 384971 - RNA, 90 nt, Homo sapiens
cuuggauaugucuuuaucagcagugugaaaauggacuaauagaguaaauuuguauuaguagaguggggcgcugcugaaaagacauccaag

SEQ ID NO: 384972 - RNA, 67 nt, Homo sapiens
aagugggaggaucucuugaggccaggaguucaagacgagccuuggcaacauagugagacccccauuu

SEQ ID NO: 384973 - RNA, 58 nt, Homo sapiens
ugagaugaggucucacucuguugcccagguuggaauacagugguguagucucagcuca

SEQ ID NO: 384974 - RNA, 83 nt, Homo sapiens
uguuggcuauggauuuguaguacaugguugauuaacauaaaugcaaaaauugucaccaaaauacuaucaaaccaaauacaaca

SEQ ID NO: 384975 - RNA, 95 nt, Homo sapiens
uggggaaacagaggcuggggcugggugagggggugggaagcagggagccuuccacugcuauguuuucccuccuuaucuagggcucuguccuccca

SEQ ID NO: 384976 - RNA, 76 nt, Homo sapiens
uacagguacaaugugcacuauuagggugauaguuacacuaaaagcccagacuucaccacugcacaauguaccugug

SEQ ID NO: 384977 - RNA, 74 nt, Homo sapiens
ucuuuuggcuuacaguucugguggagagguaagugaaguuuaccaaagcagugaauugucauuaagcuagagga

SEQ ID NO: 384978 - RNA, 70 nt, Homo sapiens
accuugucacggagauauggauucggauguguucccacggucuccaaucucuaguuccaugauagaaggu

SEQ ID NO: 384979 - RNA, 122 nt, Homo sapiens
gaaguuuccucagcugggaggggaaggacauggaguguaauauugagagcugcagcuguguguuuggcuagggcuuccacuugcagcuccauaucaacuuuggcugccugugaggaaauuuu

SEQ ID NO: 384980 - RNA, 66 nt, Homo sapiens
ggggccuaguggaagguaauuggguaaugagagcaaaguuuucauuaauggguuagcuucagcccc

SEQ ID NO: 384981 - RNA, 81 nt, Homo sapiens
gguccuuuguguggccuuggccuggcauugaccccugcuccugacccugguccugccauggcccuggcccugccaaugacc

SEQ ID NO: 384982 - RNA, 55 nt, Homo sapiens
ccuagaauguauaaaaccaagcuguagccugacaccuuggucacauguucucagg

SEQ ID NO: 384983 - RNA, 70 nt, Homo sapiens
ucccccuucccagcuguguugucugaagucagaggcucuacuccugaguagucauuacagccaaggggga

SEQ ID NO: 384984 - RNA, 63 nt, Homo sapiens
ucuuuaucuuccuccuuuaguuuacuugaaaauuuaaugugaacuguuugaggaagagaagga

SEQ ID NO: 384985 - RNA, 80 nt, Homo sapiens
gugguaaaugcagaugcaugaccuuuaagcaacuugcuuuuucuguuguugcccauuaaggaugcuaucauuauuuaccc

SEQ ID NO: 384986 - RNA, 56 nt, Homo sapiens
aagcaggugugggaggaaauggccauguccuugggauuuccagccuuaccuugcuu

SEQ ID NO: 384987 - RNA, 62 nt, Homo sapiens
ggucuuugguucuguuuauguaauggauuacguuuauugauuugcauauguugaaccagacu

SEQ ID NO: 384988 - RNA, 125 nt, Homo sapiens
ucaguaucuaaucaaauggggagcaaauuacucaucuauggcucugucuuuuaaguuguuuaggagaauaaugaacuuuuagauagaguauagguaggaaauacugaaagcccugaaaauauuga

SEQ ID NO: 384989 - RNA, 97 nt, Homo sapiens
ucucauuuuucgccuuuuauugcaagugccguaacuaccaagaucccaauuuuagaagaucuaguccauagcauuugauaacaggccaaagaagaga

SEQ ID NO: 384990 - RNA, 69 nt, Homo sapiens
cagucacuucaugguuucuuggacaggcagauccuggccauguucauguaauuccauaagguaaggcug

SEQ ID NO: 384991 - RNA, 64 nt, Homo sapiens
guaaucucagcuacuugggagucagaggcaggagaaucacuagaacccaggaggcagagguugc

SEQ ID NO: 384992 - RNA, 108 nt, Homo sapiens
ccugcuagagcugccuuaaaugacuacaaacuugcuggcuuaaaacaauagaaauguaucaucucacuguuuuggaggccagaaguccaaagucaaggcauuagcagg

SEQ ID NO: 384993 - RNA, 64 nt, Homo sapiens
auugugaauagugcugcaauaaacauacgugugcaugugucuuuacaucagcaugauuuauaau

SEQ ID NO: 384994 - RNA, 89 nt, Homo sapiens
aucauaugguuuuugucguugguucuguuuauaugcuggauuauguuuauugauuugcauauguugaaccagccuugcaucccagggau

SEQ ID NO: 384995 - RNA, 78 nt, Homo sapiens
guaucuuuauggcagcaccccacucuacugguaccaauuuacuauauuaguuuguucucacacugcugauaaagaugc

SEQ ID NO: 384996 - RNA, 83 nt, Homo sapiens
ucagcauguauugugugcucaaugaguauuuauuuguugaacgggugaaugaaugggugaauacaugaaugaauaccuguuga

SEQ ID NO: 384997 - RNA, 76 nt, Homo sapiens
caucuugcauaucauguuaugaggcucuagauguuauuuaaucauuuuaucuggcuccuuuugacaaugcuccaug

SEQ ID NO: 384998 - RNA, 69 nt, Homo sapiens
gagccauguagaaugaaccucaaaaauguccaccugcgggacaaaagaaaggagcauuuacauuggcuc

SEQ ID NO: 384999 - RNA, 79 nt, Homo sapiens
uuucaugucaagugacuagaauaugaauuuuaauaauauacuaugaaauuagaaaaugugauagucacagauuauggaa

SEQ ID NO: 385000 - RNA, 63 nt, Homo sapiens
guaggcacuggcucagcuuaucacuuugguauugugagagggaagagcauggccauguccuac

SEQ ID NO: 385001 - RNA, 64 nt, Homo sapiens
uggacugcagugcagcuguuaggcugaaauuaaacuugugagccuggagaaaagcugcaguuca

SEQ ID NO: 385002 - RNA, 68 nt, Homo sapiens
cuguugccuaggcuggagugcaguggcaugaucucggcucacugcaaccucugccucccagguucaag

SEQ ID NO: 385003 - RNA, 72 nt, Homo sapiens
uuuuuaucagcagcaugaaaacggacuacuacaguaaauugguaccaguaaaguggggugcugcuauaaaga

SEQ ID NO: 385004 - RNA, 73 nt, Homo sapiens
ccagacuaagaagcccuuuuuacuuuuuacuucuguuucaguaaguauuaagacuaagaggcuuguggucugg

SEQ ID NO: 385005 - RNA, 95 nt, Homo sapiens
gggcagggcauuuucacuucuuuugugauucuucaguuacuuuaggccaccugggcguauaugugcaagucacaggggacgugauggcuuggcuc

SEQ ID NO: 385006 - RNA, 64 nt, Homo sapiens
augugguaggcccaugagucauucaucuuguaaccuucauggcuuagcacagugccugccacau

SEQ ID NO: 385007 - RNA, 101 nt, Homo sapiens
gggaacagggcaggccaacccugagucaugagucuagaaagcugugucuuugaaaaucuagcaacaaguggccaggcgugguggcucaugccuguaauccc

SEQ ID NO: 385008 - RNA, 62 nt, Homo sapiens
gccuuuuguccuggguuccugaagcagcucaagacagcuucagagcacuaaagguaaaaggc

SEQ ID NO: 385009 - RNA, 73 nt, Homo sapiens
cuucuucguggauggcuguuccugggaguucuagcuccucacuagaugcucaugagucagccaguaugagagg

SEQ ID NO: 385010 - RNA, 62 nt, Homo sapiens
gccuggagugcuggaaggaguuuucuagguuuucuuguucuacccucuaguuuucaacaggc

SEQ ID NO: 385011 - RNA, 113 nt, Homo sapiens
uccuaauugugucaggaagaaagaagagcuacggagugguacaagguaccugcuuuaacuucagaaacagguacuuucccaaccauacugggcucccacugucuacucaagga

SEQ ID NO: 385012 - RNA, 75 nt, Homo sapiens
uaagguugaaagcuacaggaaaguauuuucacuaacaaagggugaaaauaauguaaguauuuuuaaaaacccuug

SEQ ID NO: 385013 - RNA, 85 nt, Homo sapiens
gggaagaguaaaguaauggaguuauuuuaugagauuaaaguuuacuuguuaucagcuuaaauagccuauuaaaauuacauuuccu

SEQ ID NO: 385014 - RNA, 108 nt, Homo sapiens
caaaaauagcgagguagagcagaugggagaaaauauuaucaguuguuacaucuaaguggagggacuagagcugaucauguuacuguuauuucuacuuuucuguguuug

SEQ ID NO: 385015 - RNA, 92 nt, Homo sapiens
uuuggagcagaguguggaguaggaaggaaauguuaaaaaguauuaagaugugaaguuuaauccuuuuuuucuacaaacuuuucuguuucaaa

SEQ ID NO: 385016 - RNA, 60 nt, Homo sapiens
cuuaccuuugagauagaggccugaggggacagccgggccuuaggcagugucagaggugag

SEQ ID NO: 385017 - RNA, 68 nt, Homo sapiens
gucauuauaucauugccauggaaagggguggugacucuccgguguugccauggcaaugguaaacugac

SEQ ID NO: 385018 - RNA, 55 nt, Homo sapiens
acucaaggugaauguuacucaguaaucaauguugagcaauauucuacuauugagu

SEQ ID NO: 385019 - RNA, 78 nt, Homo sapiens
uacaugcauccaugugaagagaccaccaaacaggcuuugugugagcaaugaggcuguuuauucacuugggugcaagug

SEQ ID NO: 385020 - RNA, 107 nt, Homo sapiens
gauaguugagaaaauggaaugucaauguagucuuuaauuaugagugaaauugugcuuuuguuucagguauuuaagggccguuuacauuucauuuucuuuggucuauu

SEQ ID NO: 385021 - RNA, 73 nt, Homo sapiens
aauaacuugaagaucucuuccaaaccugaaauuguguguaucacagacauugauggaaggcaucugcauuauu

SEQ ID NO: 385022 - RNA, 87 nt, Homo sapiens
ggagaaucgcuugaaccuggaggcagagguugcaguaagcugagaucaugccauugcacuccagccugggugacagagugagacucc

SEQ ID NO: 385023 - RNA, 57 nt, Homo sapiens
aggcuauugauauaauucagguaaaagaaaaugugaccucaauucugucaauggcuu

SEQ ID NO: 385024 - RNA, 83 nt, Homo sapiens
uugucaucagcuuaagagcuuaaucugauguuaucagcuuaagagcuuaaucugauguuaucagcuuaagagcugucagacgg

SEQ ID NO: 385025 - RNA, 61 nt, Homo sapiens
guggcaugaaagcagauaccaccuugccuuuuuugcaaguugaguucuuccuaucauccac

SEQ ID NO: 385026 - RNA, 65 nt, Homo sapiens
augauuaacaccauuuuucugcagccuucauacuuauguagaugguuauauggaugguugauuau

SEQ ID NO: 385027 - RNA, 55 nt, Homo sapiens
gaugcugaauggcacuuagggcacagcuuccguucaagugcauugauucaguauu

SEQ ID NO: 385028 - RNA, 111 nt, Homo sapiens
gaacuuucccacagaacauaaauaaaaugcacgcuacccagcuagauuuugguguuagaaaucugugcugcaggagucugcauggcuuuuugaaaugaucugagaaaguuc

SEQ ID NO: 385029 - RNA, 107 nt, Homo sapiens
ugcuggagauuuuauaggaugguucuuggguugauugauaaugccaaagcagcagagagcuuaaauggcauucuucugucagccgaggcauuugauaaauugaggca

SEQ ID NO: 385030 - RNA, 84 nt, Homo sapiens
gcugacacuccugaucacuacaccaaaauguguuaccaucauuacagcaugugcuuuuggugagagauuucaauagccuucagc

SEQ ID NO: 385031 - RNA, 77 nt, Homo sapiens
augaacaccagcaggugugguuuucuggggccaagggaggcaucuuugaagacuaccuaccauacuuguuaauucau

SEQ ID NO: 385032 - RNA, 57 nt, Homo sapiens
aucugagcauauugugauaccuaaaagcaaaagcauuuguuaucuuguaugccagau

SEQ ID NO: 385033 - RNA, 89 nt, Homo sapiens
guguuaauuaugguaaauugaugaugauagacauuuguuuagcugacagagccacugagcaaaguucuauuuauggucagggaagauac

SEQ ID NO: 385034 - RNA, 59 nt, Homo sapiens
ugagaucgaguuucgcucuuguugcccaggugggagugcaauggcgcaaucucggcuca

SEQ ID NO: 385035 - RNA, 69 nt, Homo sapiens
cccacauaaauguucuggcucuuccaaggaccccagcaggcaucuuucauagcagaacaaauguguggg

SEQ ID NO: 385036 - RNA, 108 nt, Homo sapiens
caccugcauugcccugaaccagcuggcucguguuuucuguccaguuccugcugguaggcaaggcugggcugggcagggcuaaugcuggggcagaaggcuuuccaggug

SEQ ID NO: 385037 - RNA, 106 nt, Homo sapiens
uuugcuaauguuaaggaugugugcuugugacacagccucaggagguacuaaugaccugugcccaagguggucaggacacaacuucguuucauacauuugaggcaga

SEQ ID NO: 385038 - RNA, 67 nt, Homo sapiens
cuguagcagccacacuugauaacuucgacagguucccaguugucaucucauuggcugcucuccacag

SEQ ID NO: 385039 - RNA, 58 nt, Homo sapiens
agugugaccuuauugaaaauaauguugcagauguaauaaguugagaugaggucauacu

SEQ ID NO: 385040 - RNA, 116 nt, Homo sapiens
ucccauuuuauagauaaggaagcugagguucaagaagguuaaacagcucugccaaggucauacagauggcauuugaccucuggacccucugaagcuuucucucugcuacaugagga

SEQ ID NO: 385041 - RNA, 78 nt, Homo sapiens
ccaaaggguguggauguuuccuuauugauaucaucaaagaucuaguguaucaagaugacaaacuuugcucccuguugg

SEQ ID NO: 385042 - RNA, 72 nt, Homo sapiens
uaauauucacagggggagaaggguauaauacucccgauaucgcaggggguguacacucccccugugaaguug

SEQ ID NO: 385043 - RNA, 67 nt, Homo sapiens
cauaaaugaguagguguuuuauguuuauccuuucccaugggauucccauaaugcuacuuauuuuaug

SEQ ID NO: 385044 - RNA, 76 nt, Homo sapiens
cugagagggaguuauucacaguguguacaccagggggcaucuuagaauucucccuaccacaaugugucuucauuag

SEQ ID NO: 385045 - RNA, 70 nt, Homo sapiens
ucaaucaauugaagaaacaaaagcuuccaguauuuuuauauggaguguguuaacuuuacaaguugauuga

SEQ ID NO: 385046 - RNA, 91 nt, Homo sapiens
uggcugggucaaaugguauuucuaguucuagauccuugaggaaucaccagacugucuuccacaaugguugaacuaguuuauggucccacca

SEQ ID NO: 385047 - RNA, 129 nt, Homo sapiens
ugccacaacaauugcaccaggcacuggauaggaaaaaauaagaccaagauuuggccucugcucucaagaugcaauuuugagaguggaggcuauaucuuacgcuucuuugcuaauccauggugcuuggca

SEQ ID NO: 385048 - RNA, 63 nt, Homo sapiens
ucagaggcagaguacauuuauucucugaugaagaucagaaguauugguaugcucuguuguuga

SEQ ID NO: 385049 - RNA, 93 nt, Homo sapiens
aaguauuaguagaugguauuauagguuucuguuccucuacacaguccauuuaaggaggaaaaauaguuuuucuaauaccaucuuaagugacuu

SEQ ID NO: 385050 - RNA, 111 nt, Homo sapiens
uucgugugugcauaugugcaugugagugcacagaugugcaugugugagugcaugugugugugcaucagguacaugcaugugugugcauaugugugcgugugugcaugugaa

SEQ ID NO: 385051 - RNA, 129 nt, Homo sapiens
ugcuuuuguuuuuuuuugagacagaguuuuugcucuuguuguggaggggagugcaguggggcgaucucagcucacugcaaccucugccucccagccugaagugauucuccugccucagccucccaagua

SEQ ID NO: 385052 - RNA, 66 nt, Homo sapiens
guauuucuaguucuagauccuugaggaaucgccacaccgucuuccacaaugguugaacuaguuuac

SEQ ID NO: 385053 - RNA, 88 nt, Homo sapiens
ggagaauugcuugaacacgggaggcagagguugcagugagcugaggucccgccacugcacuccagccucggugacagagcaagacucu

SEQ ID NO: 385054 - RNA, 96 nt, Homo sapiens
aaugcaaguauagagaaauaacugucagguucuggaaaacuguuguucuuaccuuaacucuucuacuucuuuauaguguuuuagaaugcuuggauu

SEQ ID NO: 385055 - RNA, 58 nt, Homo sapiens
gggguuccugugauuguuagaaagugacauucuuuacuuaucacaguucaggaacucu

SEQ ID NO: 385056 - RNA, 64 nt, Homo sapiens
uucaguuugccaguauuuuauugaggauuuuggcaucgauguucaucagggauaguggccugaa

SEQ ID NO: 385057 - RNA, 57 nt, Homo sapiens
uaugguuaggcacauggacuuuggagcuaccuucuccagguucaaaucccaaucaug

SEQ ID NO: 385058 - RNA, 76 nt, Homo sapiens
gguuuuuguuguugguucuguuuauaugcuggauuacauuuauugauuugcauauguugaaccagccuugcauccc

SEQ ID NO: 385059 - RNA, 91 nt, Homo sapiens
cuaagaauguuguaggagaugaugacaaccucauugucaccagguaaggugacuuuugaugguguuaccaucuuuacuagaaugcccuugg

SEQ ID NO: 385060 - RNA, 57 nt, Homo sapiens
augagauuaauacacaucaaaugcuggcaacaauauuggcggcaguuuuauucucau

SEQ ID NO: 385061 - RNA, 64 nt, Homo sapiens
cuccacuccuuucaugaagucuuccucacaagaguagaauaauauuuucaauguaaggauggag

SEQ ID NO: 385062 - RNA, 75 nt, Homo sapiens
ugaucaauuuggaggagguugguaccaucuguuugggguucuuuaaaucaaguacuaaucucucugaauuuguca

SEQ ID NO: 385063 - RNA, 57 nt, Homo sapiens
cauagaaggcagauuugcucacaucucuuccuagagugagcuaguuucuuugcugug

SEQ ID NO: 385064 - RNA, 63 nt, Homo sapiens
uauauggcucuuauuauuuugagguauguuccuucaauaccuaguuuauugagaguuaauaua

SEQ ID NO: 385065 - RNA, 64 nt, Homo sapiens
caccauacauucucuauaagugcauguguguuuacauaaaugcacagaaaggauguggaaggug

SEQ ID NO: 385066 - RNA, 104 nt, Homo sapiens
gaggcaggagaaucgcuugaacccuggagguggaggcuguggugagcugagauugccccauugcacuccagccugccugggcaacaagagugaaacucugucuc

SEQ ID NO: 385067 - RNA, 56 nt, Homo sapiens
acuucugccuagauuucagaggauguauggaaaugccugaaugucaaggcagaggu

SEQ ID NO: 385068 - RNA, 55 nt, Homo sapiens
gucuccgagccguguggagccgggcucuaguccugagcgccuucugcuuggagau

SEQ ID NO: 385069 - RNA, 78 nt, Homo sapiens
ccucagccuuccaaaguacugggauuggccgggugugguggcucacgccuguaaucccagcacuuugggaggccgagg

SEQ ID NO: 385070 - RNA, 82 nt, Homo sapiens
accaaacgcaagugaugacagcugacucccuugcuauaguaaacucugaguaaauauuuuggguuguuuucauuuguguggu

SEQ ID NO: 385071 - RNA, 78 nt, Homo sapiens
ugguucuugucguugguucuguuuauaugguggauuauguuuauugauuugcauauguugaaccagccuugcauccca

SEQ ID NO: 385072 - RNA, 130 nt, Homo sapiens
cuucacauauguuuucauuuuuuucaucccaauucuaugaggcauuauucccaucuuacaccuagguauagcuguguagaugauaauguuauaaaaugcuaacugggaaaaaaagucuugcuuauugaag

SEQ ID NO: 385073 - RNA, 130 nt, Homo sapiens
uguaaauuuaauguauuagguacacauuacacaguuuuaguacguaguaagaauucuuuuagucauuuugauuguacuaaaauuguacuauaauugaaguacuuaagaaaucaaguguguuaaguuuaca

SEQ ID NO: 385074 - RNA, 69 nt, Homo sapiens
uccagaguuaugguuuccuguguaauaacuagugagauuacuggucacauuggacuaucaaguuuugga

SEQ ID NO: 385075 - RNA, 75 nt, Homo sapiens
ccagagucugugccucaagcuaaagaagugaaagcuccuuucauucauucauccagcuugaggaagagacccugg

SEQ ID NO: 385076 - RNA, 72 nt, Homo sapiens
cgugaauuaugguaucucauuuuggauuugaaauguauuucugaaucacagauuaugaguaucuguuucaug

SEQ ID NO: 385077 - RNA, 67 nt, Homo sapiens
ggaaaggggcaguggagagggagugugugcuguagaggcuaagaccccauuugcacugagcccuucc

SEQ ID NO: 385078 - RNA, 91 nt, Homo sapiens
cugcuguuuucuucugaaauguaaguugucuagucuuccguucacagggcuuuaagaaagcacagcuuagguuucaaugauuuucaguuag

SEQ ID NO: 385079 - RNA, 80 nt, Homo sapiens
uuucagauuuuagauuuguggauuaaggaugcuuaaccuguaaguauaaugcacauucccaaaucugagaaaaucugaga

SEQ ID NO: 385080 - RNA, 72 nt, Homo sapiens
augguauuucuaguucuagauccuugaggaaucaccacacugucuuccacaaugguugaacuaguuuaccgu

SEQ ID NO: 385081 - RNA, 91 nt, Homo sapiens
ucucccugacaagacuauacacuuuuugaaaauagagacacuguauuuugugucuucuguacuccuugaguagugcuagucccaagggaga

SEQ ID NO: 385082 - RNA, 66 nt, Homo sapiens
aguuauucagugaauuucaggucaagagucagucaugauuuuugcccugcaguacauaaauuggcu

SEQ ID NO: 385083 - RNA, 78 nt, Homo sapiens
uauccacaagauggcugcugcaugucuacaguucucuucuuccugugaagauguaagcagcagagacuauccugggug

SEQ ID NO: 385084 - RNA, 73 nt, Homo sapiens
aagguaaauauugacucucgcuuugggucaauaaauucugauccauugcucaagagaagucaauaucuacuuu

SEQ ID NO: 385085 - RNA, 80 nt, Homo sapiens
guucucuggaggcagggaccauguugaguuucuucacugucauauauccaugacauagcauggugccugcuacaugggau

SEQ ID NO: 385086 - RNA, 65 nt, Homo sapiens
gaacaucaucaggaauccaggacucaagcuugucccugcaaggucacuggagguuccugaaguuc

SEQ ID NO: 385087 - RNA, 57 nt, Homo sapiens
gugggguaggcaauuccuaguggcugugaagaaguagauaggagccugcuaccccac

SEQ ID NO: 385088 - RNA, 85 nt, Homo sapiens
gugguugaaugcucagugaauguuggccacuacuguuuauauuaguagcaguguggacaucauuuauuuugauacaugcgacugc

SEQ ID NO: 385089 - RNA, 84 nt, Homo sapiens
uccaagaagcauaggguguucuaguuacuauggcugcaaaucaaaauauaguagcaugaaacagccauuuguuaugcucaugga

SEQ ID NO: 385090 - RNA, 88 nt, Homo sapiens
aagcucccuaggugguuuugaugagcagguaggcuuaagaacuguuaccuuaucucaagaccauuuuuuuuccugaacagcggagcuu

SEQ ID NO: 385091 - RNA, 58 nt, Homo sapiens
gcccaggauggagugcagugauacgaucuuggcucacugaaaccacugccuccugggu

SEQ ID NO: 385092 - RNA, 62 nt, Homo sapiens
ugagaaugaugauuuccaauuucauccaugucccuacaaaggacaugaagucaucacuuuua

SEQ ID NO: 385093 - RNA, 94 nt, Homo sapiens
uuaugguuauugacucugccaucaguaauucucucacguugugauuccacaguguuccuuuguugugacuggcaaagccacauaauagcuauaa

SEQ ID NO: 385094 - RNA, 61 nt, Homo sapiens
cugugucuccucaacucaugcucgaggucagaaauggucucgguacuugagagagacacag

SEQ ID NO: 385095 - RNA, 77 nt, Homo sapiens
uggggcauguauugaggcauguaccaauggucugcagcaugcugggccacuuacacacaugccucaguuauuccuca

SEQ ID NO: 385096 - RNA, 55 nt, Homo sapiens
gcgggcagagcucaaggcaaggcccucaguuccuaugacuuguuuucuggucugc

SEQ ID NO: 385097 - RNA, 56 nt, Homo sapiens
acguguaacuucaaaugggaagaucccuuguccuuccugagaauagaguugcaugu

SEQ ID NO: 385098 - RNA, 72 nt, Homo sapiens
cucuaaguagcagaauaucagauaauuuuaauuuuuuuugagacaggucuuacucuguuacccagguuagag

SEQ ID NO: 385099 - RNA, 73 nt, Homo sapiens
aauguacuuauuugauuuaauaauaaccaggauauugaugucuuuggugagggauaaauuucauugguacauu

SEQ ID NO: 385100 - RNA, 59 nt, Homo sapiens
ugccaagauuucaggaauuaagauauuaacuagccucauagauccugacuuuuugagca

SEQ ID NO: 385101 - RNA, 67 nt, Homo sapiens
cccgaguaccugagauuacaggugcuggccacaccuggcuaauuuuuguaguuuuaguagagauggg

SEQ ID NO: 385102 - RNA, 123 nt, Homo sapiens
cggcauggcuagcccugggaggcuccugggcuccugugggacaacccagacuguguccaguggguaacacugucaugucucacaggcauccagagaacccuugggcugagguaggugaugcug

SEQ ID NO: 385103 - RNA, 56 nt, Homo sapiens
uugagauggagucuugcucuuguugcccaggcuggagugcaauggcacuaucucgg

SEQ ID NO: 385104 - RNA, 62 nt, Homo sapiens
ggucagaaaagacacuugauaugauuucaauguuuaaauuuguuaagauguguuuuguggcu

SEQ ID NO: 385105 - RNA, 56 nt, Homo sapiens
uccguuguuauccaguguuacgauaaagugugaugguaacauguuguggcagggga

SEQ ID NO: 385106 - RNA, 102 nt, Homo sapiens
ugaaaaaauaugugcauauaucaguguaugcuucuauuuuugguauguguguuuauaaauuagaucauaguguauauacugcuuugcaacuugcuuuuuuca

SEQ ID NO: 385107 - RNA, 120 nt, Homo sapiens
guaacaucugugucaucucagcaaucguaucuguugauuguuuuucuuguucaaguugagaccuuccugguucuuggcaugaagaauaauuuuugguugaaaggugaacaucuugguuau

SEQ ID NO: 385108 - RNA, 69 nt, Homo sapiens
augccuuuguugaccacuauaauugaguuccauuucaugcucacaaaucuaguuggugauacagugcau

SEQ ID NO: 385109 - RNA, 129 nt, Homo sapiens
gagaagggauucuugauaauagaguacuaggugauuuuuggcauguaaugcagaaguugcaagaagugguaacaaugaugcaauuguuuuaccugccauuuauuuacuuuuaugugagccauucuucuu

SEQ ID NO: 385110 - RNA, 68 nt, Homo sapiens
ugcaaguuuccguccagccccacugcccugugagugcagcaggcaccauggaaggacgggagcaugca

SEQ ID NO: 385111 - RNA, 62 nt, Homo sapiens
ugagauuugaggggccaggggcagaaugauauaguuuggauguuucuccccuauaaaucuca

SEQ ID NO: 385112 - RNA, 130 nt, Homo sapiens
auuacucccaauaucaacaguggguguacacuccuccugugauauuguuuguuauaucuaagaaagaagaggaugauauuacugucaauaucacagaagguguacagccccuugugauguuguuucuaau

SEQ ID NO: 385113 - RNA, 82 nt, Homo sapiens
auguaaguaguuuauauucaaugauuaguaucaguuggccaagccagucugugcuugauuauaugagugugugugugugcgu

SEQ ID NO: 385114 - RNA, 80 nt, Homo sapiens
ggguguuucuauaagacuagcagcugaauugguugauuaaguaaaguaguuugcauugcuagucuggauggggaucaucc

SEQ ID NO: 385115 - RNA, 57 nt, Homo sapiens
aucaccuuacuugcuucugaacugguuguagugccagggauauaaauuuaaggugau

SEQ ID NO: 385116 - RNA, 55 nt, Homo sapiens
gcggccugggggagcagccuuagugucuuccugcugaugcaauccgcuaggucgc

SEQ ID NO: 385117 - RNA, 129 nt, Homo sapiens
ccuccccaaaugcugggauuacaggugcgaggcacugugacuggccuauaauggcgaauuuuaacauaaaaccugguaaguuaggccaggcgcgguggcucacuccuguaaucccagcacuuugggagg

SEQ ID NO: 385118 - RNA, 62 nt, Homo sapiens
ccucucagguccuuacugugcucccuccgcagaugagaaggagacgccagggccuggggagg

SEQ ID NO: 385119 - RNA, 103 nt, Homo sapiens
agguuuguuacauggguauauugcaugaugcugagguuugggcuucuaaugauucuauugcccaaguggcaaauguaguacccaauagguaguuuuucaaccu

SEQ ID NO: 385120 - RNA, 79 nt, Homo sapiens
uuuuaauguaacugcaguaggacucauggggaugggauuauagcauaagccuugugaguucaauuguauuuuauuaaaa

SEQ ID NO: 385121 - RNA, 95 nt, Homo sapiens
ugcacauucugugauuuccaagggucccaguggaaccuccaagcuguaaaacauggaguuuggagucauggaggcagagggaguuucuuggugca

SEQ ID NO: 385122 - RNA, 74 nt, Homo sapiens
ggcaaguaauacaggauuauuuuagaguaguuacuggaaaggucuccuaagugaauucauuguguuauauugcc

SEQ ID NO: 385123 - RNA, 77 nt, Homo sapiens
uuuaucaauggcuaugccuguagcaggacuucccacuaaucuuuccaagugcauauucaaggcaggccauuuauaaa

SEQ ID NO: 385124 - RNA, 77 nt, Homo sapiens
ucgcuugaaucugggaggcagagguugcagugagccgagaucgugccauugcacucuagccugagcagcaagaguga

SEQ ID NO: 385125 - RNA, 99 nt, Homo sapiens
gaggcaggaguaucgcuugaaccuggaggcggagguugcaaugggcugagaucacgccauuguacuccagccugggcaaaaagagcaaaacucugucuc

SEQ ID NO: 385126 - RNA, 68 nt, Homo sapiens
aauucuaugagguugguauuacugucucuauuuuaagaucaggggcuuuaagaaacuucccuaggauu

SEQ ID NO: 385127 - RNA, 76 nt, Homo sapiens
uaaugucuguuucuacagugggucuguaguccuugucaugacaaaguccuaccaccuacugugcaaaagagaguua

SEQ ID NO: 385128 - RNA, 61 nt, Homo sapiens
cccagcuuguuucucuaccucacugugguugaggugguaucuaagaugcacguugucuggg

SEQ ID NO: 385129 - RNA, 70 nt, Homo sapiens
guauuucuaguucuagauccuugaggaaucaccacacugucuuccacaaugguugaacuagcuuuuaugc

SEQ ID NO: 385130 - RNA, 103 nt, Homo sapiens
agggagccuaacaguguugugauuaagagcacauguucuggguuucaguuugaggugggaacuuguuugcuguguguucuugagcccacaaccuaaccucucu

SEQ ID NO: 385131 - RNA, 91 nt, Homo sapiens
ucuauguucaugguaaccuugaccaauggcuucacuuuuuuggugauaauuuugucagguuuuggaaucaagguguugcuagcuguauaga

SEQ ID NO: 385132 - RNA, 76 nt, Homo sapiens
auuguaagucauugagucagggaguaucuguuaauauuuacccuuuaugauauguauuccaacucaugaucauaau

SEQ ID NO: 385133 - RNA, 79 nt, Homo sapiens
acaucuuuuugcaauuugugaauauugugauccagccauguucacaggccauuugggauaaucacaaaguaaaacaugu

SEQ ID NO: 385134 - RNA, 56 nt, Homo sapiens
uaaagcuacaguauaugguauugcuauaaugcaauauugaagauaaugugguauua

SEQ ID NO: 385135 - RNA, 88 nt, Homo sapiens
aacagaacuugaaauuccaggaugcucacggucuacaguguaaaaugcugcacuuuaaggcauccccugagagcgauuucuuucuguu

SEQ ID NO: 385136 - RNA, 83 nt, Homo sapiens
gggacacgggcaucugggacuuugguauccauggggaguccuggaaucgauucaccauggcuaccaagggucaacuguauucu

SEQ ID NO: 385137 - RNA, 80 nt, Homo sapiens
ggaucacuugagcccaggucaaggcugcagugaguuaugauuacaccacuguacuccagccugggugacacagugagacc

SEQ ID NO: 385138 - RNA, 63 nt, Homo sapiens
uucacuuaauugucuucugugccauaugacaggcagaucacuuuaggagcaaugagaguagaa

SEQ ID NO: 385139 - RNA, 63 nt, Homo sapiens
auugagccuaggaggcagaaguugcagugagcugagauugcaccacugcacuccaggcuggau

SEQ ID NO: 385140 - RNA, 56 nt, Homo sapiens
ucuuugguaauggaugucugauuucuaguuggagacaaggcaacccauaguaaaga

SEQ ID NO: 385141 - RNA, 61 nt, Homo sapiens
uucaggauuuuauuucuccuucgcuuaugaagcuuaauuuggcuggauaugaaauucugga

SEQ ID NO: 385142 - RNA, 69 nt, Homo sapiens
cagggcuacagauagcacuaagggaucugcgcauggcugugcagcucauucauggcauuucugguccug

SEQ ID NO: 385143 - RNA, 67 nt, Homo sapiens
uugaggagguagucugucccuuagcagagguggagcgcugugcugggugauccacugcccuuuucag

SEQ ID NO: 385144 - RNA, 88 nt, Homo sapiens
cugacaggugugagauaaugucucauugugguuuugauuugaauuucucuaauaaucagugaugagcuuuguuucacaugcuuguugg

SEQ ID NO: 385145 - RNA, 84 nt, Homo sapiens
gccauuuucggagaagaagguucgagagcacacguugcacuuguaauucccuuuaaugagcucagcuuucuuuuucacgauggc

SEQ ID NO: 385146 - RNA, 57 nt, Homo sapiens
auauagacugcacguaagucacagguuauugguccuggaaaguacuugaguuuguau

SEQ ID NO: 385147 - RNA, 60 nt, Homo sapiens
gaagucauucagcagcagguuguuuuauuuccauguaauuauaugguugugagugauuuu

SEQ ID NO: 385148 - RNA, 99 nt, Homo sapiens
gagguggguggauugcuugagcccaggaguuagaggcugcaaugagcucugacugggccacugcacucuagcuugggugacagagcaagacccugucuc

SEQ ID NO: 385149 - RNA, 71 nt, Homo sapiens
auauaauguacuucuuuugguuauaaugguaaaauacaaaacugauuagggcaggagcaaguacggugugu

SEQ ID NO: 385150 - RNA, 100 nt, Homo sapiens
gucauugaauacagguaucccuugcuaucugaaucuacuugguuucugagucagggagcuugaguucagguagaaagggauaccuguacuucucuguggc

SEQ ID NO: 385151 - RNA, 73 nt, Homo sapiens
guagucaccgagggcucgggucagguccucgcccacaugcuccgggcuuccuggcacugggccccguggcugc

SEQ ID NO: 385152 - RNA, 81 nt, Homo sapiens
augguggagagcagagaagggaaauaagcucucuugugacucuuauaagggcacuaaucccauuuaugagggcuccaccau

SEQ ID NO: 385153 - RNA, 56 nt, Homo sapiens
uuacccaccuugcucaauggcuaaaacaagcagugccuuuugggcaagguagguga

SEQ ID NO: 385154 - RNA, 59 nt, Homo sapiens
ggcuucuguccagggucucgggaauuuggcuuccaugucagggacgcuugacacaagcc

SEQ ID NO: 385155 - RNA, 62 nt, Homo sapiens
uccccccagguuucaauaaagcccagguuauugaagcuggguccuggaagagccugggagga

SEQ ID NO: 385156 - RNA, 62 nt, Homo sapiens
uggcuggcuacauucacuuguaauaauguuucugagauucauacaagcuguagcacaugcca

SEQ ID NO: 385157 - RNA, 99 nt, Homo sapiens
gaggcaggaucuugcccuguugcccaggcuggagugcagugucacaaccauagcucacugcauucuugaacuccuggguaacagugauccucccgccuc

SEQ ID NO: 385158 - RNA, 81 nt, Homo sapiens
uuccuuuccuauauguguauauccuauuaguucuguccuucuggagaacccuaauauagaauguacagagaagaaaaggaa

SEQ ID NO: 385159 - RNA, 55 nt, Homo sapiens
auguaugucuaaaacggggaggcaugaauaauccaccccguguuuagcauaucau

SEQ ID NO: 385160 - RNA, 90 nt, Homo sapiens
ucucacagcacaacaccuucuugcacuuggcccucauuagcccauaccucuggaggagcuagagggucagguucaggaaaaacugugaga

SEQ ID NO: 385161 - RNA, 59 nt, Homo sapiens
cugguuuguaaaguuccugagauuucaauaaugggcucucacaaaccaguauaggccag

SEQ ID NO: 385162 - RNA, 109 nt, Homo sapiens
aguaggcuuacuuuuuugauccuccaguuuucaagauaaugguuuuauuucuugaagcuguaaucagaugaaaauguccaaaggacuaaagaaacugaguagggcuauu

SEQ ID NO: 385163 - RNA, 73 nt, Homo sapiens
uacuuuaaucuuuuuucaguuuuccagguagccggucacuaugagccaccaaggaaauugagaccauaaagug

SEQ ID NO: 385164 - RNA, 64 nt, Homo sapiens
auugugaguggugccgcaauaaacauacgugugcaugugucuuuauagcagcaugauuuauagu

SEQ ID NO: 385165 - RNA, 62 nt, Homo sapiens
uguccauuuuuaugcuuauggucaacaaaguauggacagccauguagaaauaugaguggaca

SEQ ID NO: 385166 - RNA, 70 nt, Homo sapiens
gguuaugauagguuaugauccaucuuggcuggcuuugaacagucuagaccagucuugaccaguuaugacu

SEQ ID NO: 385167 - RNA, 63 nt, Homo sapiens
uuuauauuuaucuauuuugccuuguuucagaaauggauuuaagguaagcuagaaagauguaga

SEQ ID NO: 385168 - RNA, 69 nt, Homo sapiens
gcugucuuugguucaggcaaggagcgcaaaucugagacugcaguguuccuuguggaaacuauggacggc

SEQ ID NO: 385169 - RNA, 91 nt, Homo sapiens
gggaguccuggugcaaguaauuggcgaggaguuuagacaauugugcaaccuggaugucuuugccaugcaugugucaggguugaacacuucc

SEQ ID NO: 385170 - RNA, 82 nt, Homo sapiens
caucuccuagucaaauaguuaaugaucuguuuuaaaaacaacaaugggagaucauuuccuauuugaagggaauuuagaggug

SEQ ID NO: 385171 - RNA, 82 nt, Homo sapiens
uuugcagaaugcuuuuaucuguuuuucucuggagaaaacuaaucuucggugaguagauggguuaaagucuaaaauauguaag

SEQ ID NO: 385172 - RNA, 60 nt, Homo sapiens
uuauauauagagggaguaugggagcccccaaaagggacauuugcuuaguuuuauguguaa

SEQ ID NO: 385173 - RNA, 77 nt, Homo sapiens
ggccauguuuaugugcuugcaaagcuuggcugcggggagagaucccaggcacgcuugggagacacacugcauuugcc

SEQ ID NO: 385174 - RNA, 107 nt, Homo sapiens
uguccuggagccccugcaccugucuccaaaugguauccgcugugccgccaggacgcgcuucacuggcagcaugggugccuuugugaagauugugaggcgcuaggaua

SEQ ID NO: 385175 - RNA, 63 nt, Homo sapiens
cuguguauccauguguucucaucauuuagcucccacuuacaagugagaacaugugguauuugg

SEQ ID NO: 385176 - RNA, 56 nt, Homo sapiens
ugccugcuaucuauuucuuuuaggcuucuccugccagugaagaaguaggcauggca

SEQ ID NO: 385177 - RNA, 111 nt, Homo sapiens
cagggccgcucuccagcugugcucccuagacuccugccuuucagggccagcuuucaggaccuugagggcagggugcuaggcauaagccagugaucuuacuaguggauucug

SEQ ID NO: 385178 - RNA, 59 nt, Homo sapiens
augaaggcuuucacagcuuuaagggauuauuuaacauugacagcuguugaggcauuuau

SEQ ID NO: 385179 - RNA, 65 nt, Homo sapiens
gagagaugguagucacauaugagcugugaagcugguuuacaguguagugacugccaacuucuuuc

SEQ ID NO: 385180 - RNA, 59 nt, Homo sapiens
gagugaucugcaugucaauucagugguacccaaucacugggcaagauaucaugacacuc

SEQ ID NO: 385181 - RNA, 75 nt, Homo sapiens
uccccacugucuggaggccugcaaauaagcaaacaaaaugaacagucuuguuucauggcuugagacccuggagga

SEQ ID NO: 385182 - RNA, 75 nt, Homo sapiens
ucuacguagaugguuuuucuccgauuuauaggguucucuguuguguaugauggaaaaaaccguaucccaguuaga

SEQ ID NO: 385183 - RNA, 64 nt, Homo sapiens
ugacccaguuauucaacuuccucaguuaacagcaaagaggcaugagaggugaauggcaggcuca

SEQ ID NO: 385184 - RNA, 109 nt, Homo sapiens
agaucaucagguauuagauucuuauaaugagcaugcaaccuaaucccucacaugcacaguucacaauaggguuugugcuccuaugagaaucuaaugcuacugcugaucu

SEQ ID NO: 385185 - RNA, 59 nt, Homo sapiens
ugacaccuggcugaggucaccaguagcugagagacuccuuagcuagugcucagcuguca

SEQ ID NO: 385186 - RNA, 119 nt, Homo sapiens
ucugcagcaggagcuugggcccucagagguuuauaaacuggauggugaguuuagaaucuccacugauaucccaguucagccucugacacaugaagcaccauaggcccugcuaacccaga

SEQ ID NO: 385187 - RNA, 60 nt, Homo sapiens
uguagaaauaucuuauuggucuggaagugaucacuuguacuaguaagcguguucuuugca

SEQ ID NO: 385188 - RNA, 74 nt, Homo sapiens
uguagguguuugaugcauuuugaguuaauguguguauauggcaugcauuguggaucuaaaugcaucuuuuugca

SEQ ID NO: 385189 - RNA, 79 nt, Homo sapiens
ucaagccaguauucaagccaaauucaagccaguauuaauaauauaauggcuuuaaaaugguuugguauuccuggcaugg

SEQ ID NO: 385190 - RNA, 85 nt, Homo sapiens
ggauuaucugagaucacuuggucauacugcuuugaaaacugggaaacuccucaaagugcuauggcucagguucagggaaggaucc

SEQ ID NO: 385191 - RNA, 79 nt, Homo sapiens
gaagcucagagaagggugugauuugccugagaccacacagccgguaacaggcaaggucacaccuugaacccgugucuuc

SEQ ID NO: 385192 - RNA, 75 nt, Homo sapiens
gcaggaguggaaggcagaagcagucaguacucugugaguuggaaugugugucaugcuuuugcaaaccugcccugc

SEQ ID NO: 385193 - RNA, 72 nt, Homo sapiens
agugcucaugaggcuuaauuaucagugaaaugucuugcuuuagauuucacagcuuaauaaggcucagagacu

SEQ ID NO: 385194 - RNA, 122 nt, Homo sapiens
aaaagauguuaaugaauuuuuaguaaucauacaauaggaucucaguuuugccuuguuuaagggagagcaucucuuaaccaguuuagaauuguguuagaaucugaaaauuuugcauuucuuuu

SEQ ID NO: 385195 - RNA, 82 nt, Homo sapiens
aguucuaggguacaugugcacaaugugcagguuuguuacauauguauacacgugccauguuggugugcugcacccauuaacu

SEQ ID NO: 385196 - RNA, 77 nt, Homo sapiens
gguugaauuaauaaaucuggagcuguagaauguuagaauaguguaacuucucaguaauuccagauuuuugaaaagcc

SEQ ID NO: 385197 - RNA, 98 nt, Homo sapiens
caucagggcaguaguggcuugcaagaugauuucaauugauagguggaagcacauuuuuuaaaacuguguaaucauuuugauauauuauuguuuugaug

SEQ ID NO: 385198 - RNA, 70 nt, Homo sapiens
ggcuauguaagaacaaagugcuggccgggcgcaguggcucacaccuguaauccuagcacuuugggaggcc

SEQ ID NO: 385199 - RNA, 75 nt, Homo sapiens
uuuauuuaaaacauauuuauuaagugccuacuauguuucaacuauuguguuaggcacugagaauaugaggaugaa

SEQ ID NO: 385200 - RNA, 120 nt, Homo sapiens
auugagccuugaagugugaguaggaguucaucaggugagggguaaauguaacacuuacauuuugccagagucuaccucucucccagauugacuuccuuuucauagcuuuaugaaaucagu

SEQ ID NO: 385201 - RNA, 57 nt, Homo sapiens
agaggaugucuggcagguggcagcuuccuuucugcacucuugccccauucauccucu

SEQ ID NO: 385202 - RNA, 78 nt, Homo sapiens
ggggcgacgaugauaucacucccaauaucgcagggguugcacacaccacuugcgauguggggagugagagccagcccc

SEQ ID NO: 385203 - RNA, 101 nt, Homo sapiens
uuucauuuggugacauuuccaaaguaguguguaggaaaguuguucaugugaugcuuauaaaggucacagggcuaacauuuuugcccacuucaucugugaga

SEQ ID NO: 385204 - RNA, 63 nt, Homo sapiens
caugcaaauagcacaugugcaaauggcugugugugucuccauacacacacauguguauguaug

SEQ ID NO: 385205 - RNA, 56 nt, Homo sapiens
cggugcaauucuccugucucagucucccaaguagcugggacuacaggugugcaccg

SEQ ID NO: 385206 - RNA, 72 nt, Homo sapiens
gguuauucauugugcuaaaguaauaagucagcucauccuuugauuuuaucuguuguuuuaguacaauugacc

SEQ ID NO: 385207 - RNA, 66 nt, Homo sapiens
cugggguaaaggucacucaugcuaugcuuuaggaaagagacugauggcauugugcccuugcucuag

SEQ ID NO: 385208 - RNA, 121 nt, Homo sapiens
ccccuaauaucacaguggguguacacccugugauguuauuccuuauaucccaagaagauauuauuauaacuaauaucacaguggguguacacccuaugauauuaucuguuauauacugggg

SEQ ID NO: 385209 - RNA, 57 nt, Homo sapiens
auuagguuggugcaaaaguaauuacaguuuuugcaauuacuuuugcaccaaccuaau

SEQ ID NO: 385210 - RNA, 78 nt, Homo sapiens
ccgguaugaggaaugaucauauguuucagguuaaauguagcaagcaguuugacuuuuagaauaugaguuuccagccgg

SEQ ID NO: 385211 - RNA, 58 nt, Homo sapiens
ccccagugguugcaacagcagaggcuuauugcuugcugugcugugugucuacuguggg

SEQ ID NO: 385212 - RNA, 64 nt, Homo sapiens
gacaggugagcuuucucauccgacuucauacccuuuuguuguugagauagggucucacucuguc

SEQ ID NO: 385213 - RNA, 85 nt, Homo sapiens
gcggcggccguggccaccgggauguacuuggcggguuugaggcgcgucccggggcugcggggcauccugggcgccgcgccgccgc

SEQ ID NO: 385214 - RNA, 60 nt, Homo sapiens
ccaaaaucugaaacuuucuguauauaaacaugauguucuagugugcauuucagauuuugg

SEQ ID NO: 385215 - RNA, 118 nt, Homo sapiens
uucaaauauguuucugcuacaaacauuguccuuuagaugguuccuuugcugccauuaugacuauggcguaaucuguaguaaagcaccauuaagauguuaauacagauguaugugugaa

SEQ ID NO: 385216 - RNA, 57 nt, Homo sapiens
ugggcugagaguaccuuauaaacagggacagugugucuuaaaaagugcucaggccua

SEQ ID NO: 385217 - RNA, 81 nt, Homo sapiens
uccaaggaguuuugauguagaaagagugggcuggaguggaggcaccaacacucugugaccaauucucagaagauuccugga

SEQ ID NO: 385218 - RNA, 100 nt, Homo sapiens
gaggcaggagaaucuuuugaacccaggaggcggagguugcagugagcugagaucaugccauugcacuccagccuagguaacaagagcgaaacuccgccuc

SEQ ID NO: 385219 - RNA, 58 nt, Homo sapiens
gccauauagcaaacugugcauugcugggaaccaagccagcuucacauugcugcauggc

SEQ ID NO: 385220 - RNA, 118 nt, Homo sapiens
gauacauaauauuguagauauuaaugggguaugcauaauauuguuacaugcauagaauguuaaugaucaaguaacaguauaugugguaucuaucuaucuaucuaucuaucuauguauu

SEQ ID NO: 385221 - RNA, 61 nt, Homo sapiens
aucccugugauccaaucacuuccuacaggucccucccucaacauguggggaucauggggau

SEQ ID NO: 385222 - RNA, 82 nt, Homo sapiens
uggaacuggcccuggcucaggucauuccaggagggccacagcagcuguccuucaacccaggacccagacagggccagcucca

SEQ ID NO: 385223 - RNA, 55 nt, Homo sapiens
uuuugcaaauuccaguggccauaugacagcauugccauauauuggaaaugcaaga

SEQ ID NO: 385224 - RNA, 92 nt, Homo sapiens
caaguaagccaaauuaugucauuuuuggauguuaaggaauccaauauuuugaaggauuaguuagaucagaaaaaggcauaauuuaucauuug

SEQ ID NO: 385225 - RNA, 57 nt, Homo sapiens
gguaggguauaauuuuacuaucaguuauucugccaugauaagugaaagugcucuauc

SEQ ID NO: 385226 - RNA, 63 nt, Homo sapiens
aggaguaaugguucaguaguuguuauuucaguguuuguggcagcuucauugaacauaacuccu

SEQ ID NO: 385227 - RNA, 129 nt, Homo sapiens
ugucgagagcagugccgggcacggaguuggcgcucuguaagugcuugcugaauaaaugacgggugugugugucauucauucagcaagcacugagugcuuacuguugugucaccgggaccgauguggagg

SEQ ID NO: 385228 - RNA, 94 nt, Homo sapiens
gguccuuccucagguccgaaucagaaacuuuggagaauggcacuacuguuuaacgagaccuucaaguaauucugauggcuagaguuugaggacc

SEQ ID NO: 385229 - RNA, 71 nt, Homo sapiens
ucacuucgagccauagccaguauuuugaguuggucuagugagaucaccuguaauagugguugcuaauguga

SEQ ID NO: 385230 - RNA, 64 nt, Homo sapiens
ccagaggaggaaggaauguuaaugaauguuuccauugguuaucacuuuccuuccaucugccugg

SEQ ID NO: 385231 - RNA, 62 nt, Homo sapiens
guaauggugaaagagucauucacgcagagcuggcuguguggaagauggaguuuuaucauuac

SEQ ID NO: 385232 - RNA, 68 nt, Homo sapiens
uucugcuguuguuuuuguugaagguguuuucugauccaaauaaagugucacaaugaacagcagcagaa

SEQ ID NO: 385233 - RNA, 74 nt, Homo sapiens
acacugcuauaauaaccugggcuugaacagugccuauuagacuagcaccguucaaacccagguuauaguagugu

SEQ ID NO: 385234 - RNA, 59 nt, Homo sapiens
aaugcauggagucuuucacaaguagcaagcaguauagguaacuggacucucuaugcauu

SEQ ID NO: 385235 - RNA, 69 nt, Homo sapiens
cuacuagcaacauuucagugaguuugcaauuguuucagaauucaaaaacucauaauugaaauggagugg

SEQ ID NO: 385236 - RNA, 67 nt, Homo sapiens
acauagaugcuggcaaucauguucaagauggcggcuccauuuucccuuugcuuugucagccaugugu

SEQ ID NO: 385237 - RNA, 63 nt, Homo sapiens
gcagacuagagggaaaugaguugguccugaugacaaaacaacccuuucuuuucucuagucugu

SEQ ID NO: 385238 - RNA, 65 nt, Homo sapiens
auaccaucacuagaggaagcugcuuccuucagagcacagugcuuuuguuccucuccuggugguau

SEQ ID NO: 385239 - RNA, 61 nt, Homo sapiens
uuucuaugagcacuuguugcuuuuaaauuguuuaaauugaaguauagcaugcacauggaaa

SEQ ID NO: 385240 - RNA, 120 nt, Homo sapiens
uuuguuuguuuguuuguuuuaagugauuucuaguaaagaaguacuuuuucugccauuuugaaacagguaagucucuaauuaugaauuuaaaacuugaagacauugauagauaugaacaaa

SEQ ID NO: 385241 - RNA, 55 nt, Homo sapiens
ucuuuguucaggagccaacuccuucaucugagggccuuggagccccagacaaaga

SEQ ID NO: 385242 - RNA, 70 nt, Homo sapiens
aagucuuugcuauugugaacagugcugcaauaaacauacgugugcaugugucuuuacaguagaaggacuu

SEQ ID NO: 385243 - RNA, 74 nt, Homo sapiens
agugggauauguagauuuuuaucuugaaccaauuuuuaaagcuuuauuaagguauaauuuacauguuauaaacu

SEQ ID NO: 385244 - RNA, 78 nt, Homo sapiens
cugaauucuauguuguuagacccaccagagaaggaaggcgauagauucucuaaaggucgaaagcauggaaaaauucag

SEQ ID NO: 385245 - RNA, 68 nt, Homo sapiens
caagacgaugauacccuauucccaaauggaugguucauacuccaauuuggcauagaguaucauucuug

SEQ ID NO: 385246 - RNA, 88 nt, Homo sapiens
cacgccugcggggggcaugugugugcacacacaugugcacuuuugugugugugugcauguacacaguugugccccugcacuucgcgug

SEQ ID NO: 385247 - RNA, 66 nt, Homo sapiens
uauuugucuugagugugcaaguaauugcauaaauuguauacauuuguacacuaagaaucgcagaug

SEQ ID NO: 385248 - RNA, 84 nt, Homo sapiens
agagcacuccuucaacaggucaauugcauagaaucccugucuugggcucugcuucuagggcaguugaucugaaacaguagcuuu

SEQ ID NO: 385249 - RNA, 82 nt, Homo sapiens
gacaggauuccaguacaggucucucauuuccuucaugauuaggaauacuacuuugaaaugagagaccuguacuguaucuguu

SEQ ID NO: 385250 - RNA, 120 nt, Homo sapiens
ggauguuacuccuaaugucacagggauguacacccugugauauuauucauagugugccagagggauauuagcacuaaugucacgaugcguguacaccuugugauauuauuugucauaucc

SEQ ID NO: 385251 - RNA, 68 nt, Homo sapiens
ucgcuugaacccuggaggcggagguugcagugagcugagaucgcgccauugcacuccagccugagcga

SEQ ID NO: 385252 - RNA, 98 nt, Homo sapiens
agggauguaugguauuuauggcuggguaggaccagaaaugcacuuuguauuacagaguguuaaggcugguugcuauaguauggaacagaaacaccucu

SEQ ID NO: 385253 - RNA, 60 nt, Homo sapiens
ucaccaauacuuauuaucuuuugucuuuuugauaacagccaucugauaagugugagguga

SEQ ID NO: 385254 - RNA, 80 nt, Homo sapiens
gcgggguuuaauaccuaggugauggguucauaggugcagcaaaccacuauggcacacguuuaccuauguaacaaaccugc

SEQ ID NO: 385255 - RNA, 59 nt, Homo sapiens
uuauagcacuaagaagguaauaauuacucuauguguuaguuaccucuuggcugcuguaa

SEQ ID NO: 385256 - RNA, 76 nt, Homo sapiens
cagaguuuaagcauagguuauucauucaucauuuacuccuucaauaaauguuuacugaaugcuuagcaugacucug

SEQ ID NO: 385257 - RNA, 130 nt, Homo sapiens
ggcugagugcugggagagaagccgaggugggcuuggaacauguccgggguccgggguccggggucuaaaaccucucauggccuuuggaaugugucuagacuugcuggcuccuugcuucuagcacucccau

SEQ ID NO: 385258 - RNA, 81 nt, Homo sapiens
uaaauuuauauauguuuucugggaagaaaagcuauuuuacaauauuaagucuuucuaucugagaagauaucuauuuguuua

SEQ ID NO: 385259 - RNA, 89 nt, Homo sapiens
ggagaaucacuugaacccaggaaguggagguugggaugagccaagaucaugccauugcacuccagccugggcaacaacagugaaacucc

SEQ ID NO: 385260 - RNA, 64 nt, Homo sapiens
uucugcuaccuuucuguaccuuaaggaacaaucauucaaggcauuuuacagaacuggaguagaa

SEQ ID NO: 385261 - RNA, 93 nt, Homo sapiens
uuuuaaggacguaugaauauggaguuuacuuaguguaauauuuguguuacacccacaaaaaauuccaaauugcagauguuuuauaccuuaaag

SEQ ID NO: 385262 - RNA, 62 nt, Homo sapiens
caggaaugcagguguuuugcacugaguugucacagcuacuguaugacugaccuguaaaccug

SEQ ID NO: 385263 - RNA, 74 nt, Homo sapiens
ugagaugaagugauguaaaacauggggcuacuguuuucucuccaucuccccucgccuugccucgccucaccuca

SEQ ID NO: 385264 - RNA, 64 nt, Homo sapiens
gcagaacugaaguuucucugaagaagaagaaauucuaccuguagacuacagcuucagcuugugc

SEQ ID NO: 385265 - RNA, 59 nt, Homo sapiens
ugagucagaauuuugcucuuguugcccaggcuggagugcaauggcacaaucucugcuca

SEQ ID NO: 385266 - RNA, 58 nt, Homo sapiens
auuuaggcuuaagagcacuaggucuugcacagcuaggugcauugucuugaguuuaaau

SEQ ID NO: 385267 - RNA, 58 nt, Homo sapiens
gaccuuuaguccguucuacuuuuccugaagauggaggacuguaagggauauaaagguu

SEQ ID NO: 385268 - RNA, 90 nt, Homo sapiens
aggagguguucugugcacgucuuaggaggucacggugggacugcaccccgugccccagcagcgacgucaaucgcacagccugcuccuccu

SEQ ID NO: 385269 - RNA, 55 nt, Homo sapiens
ggcaugauguauuugagguuuguccacauucaacaugugucaauuacuucaugcc

SEQ ID NO: 385270 - RNA, 77 nt, Homo sapiens
aggguucaauaaauaguaguugugguggccauucuuacuagguuugguugcaggcaagugcuauucugcuggucccu

SEQ ID NO: 385271 - RNA, 62 nt, Homo sapiens
aaaugucuucuuuugagaagugucuguucauaucccucacccacuuuuugaugaggucguuu

SEQ ID NO: 385272 - RNA, 73 nt, Homo sapiens
ggucucugcucgucuaauauugguguguaggaaugcuugcaauuuuugcacauugauuuuguauccugagacu

SEQ ID NO: 385273 - RNA, 78 nt, Homo sapiens
agggguccauuuuuauauguuacucccucuagcaagguugaauaaauaugccagugaaacauggaagaauggauuuuu

SEQ ID NO: 385274 - RNA, 59 nt, Homo sapiens
uagauucuauguggaauuccaaaggaguaaguguuccuuuggcagaaaacaagaaucug

SEQ ID NO: 385275 - RNA, 79 nt, Homo sapiens
aauugaaggugauuaggcagaagaaauuuuaucguauuuugggaagaaucagucuuuuguucuauucaggccuucaguu

SEQ ID NO: 385276 - RNA, 58 nt, Homo sapiens
uagaccaauuggcauauaguaaucagaguuacccugaaauauuuuggccaauuguuua

SEQ ID NO: 385277 - RNA, 89 nt, Homo sapiens
caggacccuggacuggguagagcacugggggcgagggcuggcagagugcagcccugcuugcaaaguaucugcacauaauguggguucug

SEQ ID NO: 385278 - RNA, 65 nt, Homo sapiens
agccccugagacuugccucgggcugggacagccauucgccugggccggcagccagucugggggcu

SEQ ID NO: 385279 - RNA, 84 nt, Homo sapiens
uuaauuuauuucauuuuuuaaaggacaaaaaaccaaacaccgcauguugguuuuuugguaauugaacaaugagaugggaauuga

SEQ ID NO: 385280 - RNA, 82 nt, Homo sapiens
uuauucagucucggguaugucuuuauagcaguguggaaauguacuaauucaccagcuaaaaagaguauguuuggacuaguag

SEQ ID NO: 385281 - RNA, 67 nt, Homo sapiens
cuuuucuucuagucauuuauauuaucucugcaaacuaggagauaagaucauuugcuaagagggaagg

SEQ ID NO: 385282 - RNA, 59 nt, Homo sapiens
ucucugauuaaacaagauagugaauuucaugaaacacuaaauuuguuuagaaucagaga

SEQ ID NO: 385283 - RNA, 110 nt, Homo sapiens
cugggaagaccuuuccgucggucugucagucugucccugccuggcgggcuuucucugggaaccgcugcagacgcgcuggcgaaagcaccaccgccaagagucaugcucag

SEQ ID NO: 385284 - RNA, 80 nt, Homo sapiens
ggaguucuguuguuuggauaauuuaaacacugugaaugucuuugaaauuuuguuuaagugaauuaucuaacauguacucc

SEQ ID NO: 385285 - RNA, 94 nt, Homo sapiens
gaggacagccugugcuuaacagugaccccugguggccaugagaccugauggcuuuaguguagguuucuguuguuuggaaauaggacugauccuc

SEQ ID NO: 385286 - RNA, 61 nt, Homo sapiens
cuuauuagaaagaaaagacaugguggguuuuuuccccuuuauucuuugcuuuucuaagagg

SEQ ID NO: 385287 - RNA, 72 nt, Homo sapiens
auauaaaagcuucuuggagugucucuguuucaacucucucauuuugcacaggguuacauucuaagguugugu

SEQ ID NO: 385288 - RNA, 61 nt, Homo sapiens
cuauuagguuggugcaaaaguaauagcggcuuuugccauuacuuuugcaccaaccuaauag

SEQ ID NO: 385289 - RNA, 75 nt, Homo sapiens
uuguuuuguuugagauggaguuuuacucuuguugcccagacuggagugcaauggugccaucucggcucaccgcaa

SEQ ID NO: 385290 - RNA, 61 nt, Homo sapiens
uauuauugcuggcucugucuucauucuggaacccagacagauagaaaagccaucaguagug

SEQ ID NO: 385291 - RNA, 102 nt, Homo sapiens
cauagaacuagacuucucauggauggucuggcagccagcaguaguuuucuggcuacaaugcuagacaugucacaucuccagaugagggguauaagaauuaug

SEQ ID NO: 385292 - RNA, 58 nt, Homo sapiens
ugggaagggucaacagcuggaaauucuuuaugcagaguugcagcacgggcccuuucca

SEQ ID NO: 385293 - RNA, 66 nt, Homo sapiens
agucauaggagagauaucacugugugauugauuaucacaaauuguauagaugauaauuccuagacu

SEQ ID NO: 385294 - RNA, 77 nt, Homo sapiens
gugucuccuguggagcuauguaacaguuuccuugggucauaacauuagcagugggauugcugggucugaggagacac

SEQ ID NO: 385295 - RNA, 64 nt, Homo sapiens
auugugaauggugccgcaguaaacauacaugugcaugugucuuuauagcagcaugauuuauaau

SEQ ID NO: 385296 - RNA, 87 nt, Homo sapiens
agggaagauugugcauauagcucuggcuggaugacucgguguauuuauggauucaaagucaguagcaugaacaagucaauuuuccuu

SEQ ID NO: 385297 - RNA, 86 nt, Homo sapiens
ggagaaucgcuugaacccaggguggagguugcagugagccaagaucgcaccauugcacuccggccugggugacagggugagauucc

SEQ ID NO: 385298 - RNA, 78 nt, Homo sapiens
guuauggguuuuucauaaauagguuuuauuauuuugagauauguuccaucaauaccuaguuuauggagagcuuuuagc

SEQ ID NO: 385299 - RNA, 97 nt, Homo sapiens
cccuuuauuugaaagaacuagaauguuuucauuauccuaacuguauccugacagauaucagagguauugcaaaagccuagauuccaaguacaaaggg

SEQ ID NO: 385300 - RNA, 66 nt, Homo sapiens
cucuacagugacagaaagcugauuauuuccagggucagggugugaugagcauugucuacaaaggag

SEQ ID NO: 385301 - RNA, 97 nt, Homo sapiens
ggaagcagugaauucacaaggaagagugaauuaucuugacuggaaucaauacauacauugcagacauagauuuccuuuuccugucagugcugcuuuc

SEQ ID NO: 385302 - RNA, 57 nt, Homo sapiens
caagcagauauuuuagucaagaauuccagagaaggcugcuccuaaaaugucuacuug

SEQ ID NO: 385303 - RNA, 72 nt, Homo sapiens
ugcauagggaagugugcuaugcauuuaagacacaagaauaaaugugauggaugugauggcugcuuccaggca

SEQ ID NO: 385304 - RNA, 70 nt, Homo sapiens
gagaucagauaguuguagauaugcagcauuauuucugagggcuguguucuguuacaaugaucuauaucuc

SEQ ID NO: 385305 - RNA, 65 nt, Homo sapiens
guuuagcuuauaucugcagugugaccccagucagguuccaccuauauuugcaauuuaagcuagau

SEQ ID NO: 385306 - RNA, 80 nt, Homo sapiens
ggggcugauccuguagagaugaggguggacacgucagauuuacucaugcaucucagcccagucuuugcaagaacaguucc

SEQ ID NO: 385307 - RNA, 74 nt, Homo sapiens
uguuacuguacugaauacuguagacaguuguaacacaauuguuacacaaugguaaguguuuguguauugaaaca

SEQ ID NO: 385308 - RNA, 122 nt, Homo sapiens
uauuuuuugcuuugucuuuuagagguggauauuauuaaacaguauguuauugaauugggagcugaguucaaguacuuauuugauaauuagguuuauuuuuaaggaguaguuuaaacaaaaua

SEQ ID NO: 385309 - RNA, 87 nt, Homo sapiens
ggagaaucgcuugaacucggaggcagagguugcagugagccgagaucgcaccacugcacuccagccugugagacagagcgagacucu

SEQ ID NO: 385310 - RNA, 83 nt, Homo sapiens
ccacugcaccagaacuuucuacauuaccucuuuugcuucauuccacagcaauggaccuguaggaaguuucucaacaccagugg

SEQ ID NO: 385311 - RNA, 91 nt, Homo sapiens
gaaucuauggcccauuacccagaggaacguuuggauugauuaucagaaguacacuucaaggaauucaaauuuucucuggagucauagauuc

SEQ ID NO: 385312 - RNA, 76 nt, Homo sapiens
uuaggcuagcccuuaaauucuuaaugcccucauuuauaaagugagcauaacaacagaguuuagcucguugggcuga

SEQ ID NO: 385313 - RNA, 60 nt, Homo sapiens
uuugacuccucaaaaucuuaacuacuauccuguaaucucaguaguugaguuugagucaag

SEQ ID NO: 385314 - RNA, 73 nt, Homo sapiens
uuccuguuucugaagauaucauuucagccaaaaguuacagauugagcucugucugauauuuucugagcaggaa

SEQ ID NO: 385315 - RNA, 78 nt, Homo sapiens
gcaucugaauauagaaucaucugugcacuaguaaauuaagcuguauacuagucauuuaggugauauuauaacagaugu

SEQ ID NO: 385316 - RNA, 62 nt, Homo sapiens
uuuuccuguaugcacgucuugucuuauccccuccugggaauuuucagugcaauacaggagag

SEQ ID NO: 385317 - RNA, 73 nt, Homo sapiens
ugagagcucucauuguauugaaaaagaagaggcucugacugucuuguucuccuaagaugaaugcaaguacuca

SEQ ID NO: 385318 - RNA, 74 nt, Homo sapiens
uuucauagauggcucuuauuauuuugagguaugcuccuuugaugccuagucuauugagagucuuuauuaugaaa

SEQ ID NO: 385319 - RNA, 80 nt, Homo sapiens
agugugagccaguuuggcuaauuuuggcuaauuuuuguagaaacggggucucgccauguuggccaggcuggucuccaacu

SEQ ID NO: 385320 - RNA, 78 nt, Homo sapiens
cccgaacuugagaaucuuucgaauguucucucaaacauaagcaccaggagaggauaugauagagucucaacaccuggg

SEQ ID NO: 385321 - RNA, 76 nt, Homo sapiens
cagaugauuuucucuuaagugcuuuuuagauaugguuuugucaaaugguaaaauagaauguauuaaagagaaucug

SEQ ID NO: 385322 - RNA, 129 nt, Homo sapiens
gauacccaguuaaaugggaauuucagauaauagacaaugguuuuuuaguauaaguacaucccaaguauuguacaagauguacuaaaaauuauucuguguuuaugugaaauucaaauuuaacuggguguc

SEQ ID NO: 385323 - RNA, 61 nt, Homo sapiens
uggaaucaugugcucuguggcauuuugugacuagcuuccuucacugagcaucaugguuuca

SEQ ID NO: 385324 - RNA, 63 nt, Homo sapiens
uuucauuguaauacaguuuccauuuuuaauuaaaugaauaaaauagcuguguugccugugaga

SEQ ID NO: 385325 - RNA, 57 nt, Homo sapiens
gggggccugaccugugguaagugaaaaaugucacuuuaugacaggcucaggagcccc

SEQ ID NO: 385326 - RNA, 76 nt, Homo sapiens
auguaggaagugccuuggucuuugaugauuuuucagagcccuugagugaacgcugagaccaaaugcuuccagacau

SEQ ID NO: 385327 - RNA, 77 nt, Homo sapiens
uucagguuagaaacagggguauaauagaguuugagauuuguagccuaacuauuccuugcuccauuuucuagccugaa

SEQ ID NO: 385328 - RNA, 67 nt, Homo sapiens
auguuuacaguauugcaaggacuaggaaaucccucauugauaccaguccugccagucuugucaauau

SEQ ID NO: 385329 - RNA, 80 nt, Homo sapiens
uuuaucaagaaaagagguuuaauugauucacaguuccaaggagcuggggagacgucaguaaacuuaacaaucaugguaga

SEQ ID NO: 385330 - RNA, 83 nt, Homo sapiens
ggaggugcccacuugguaaagcacaauuucaccuucuuguaaaccacagggcagagugaaaugcuaugaaugugggcacaucc

SEQ ID NO: 385331 - RNA, 76 nt, Homo sapiens
aagccagugugacaggaaacuuugugucuucugugugacauaaaaccauccauuguuucuuaaauuccauuuguuu

SEQ ID NO: 385332 - RNA, 63 nt, Homo sapiens
ugagaaugaugauuuccaguuucauccaugucccuacaaaggacaugaacucaucauuucuca

SEQ ID NO: 385333 - RNA, 130 nt, Homo sapiens
caggcuggagugcgauggugcgaucucggcucacugaaaccuccgccuucuggguugggagagaggaucacuuggguccgggagguggagguugcagugagcugagauugcaccacugcacuccagccug

SEQ ID NO: 385334 - RNA, 56 nt, Homo sapiens
guugguucuauuuauaugcuggauuacauuuauugauuugcauauguugaaccagc

SEQ ID NO: 385335 - RNA, 55 nt, Homo sapiens
auaaggcuaguguaggagccagcaaauuauguuuccuccauaauuagagucuuau

SEQ ID NO: 385336 - RNA, 59 nt, Homo sapiens
uggggauuugaggaaaacacagauuauguuacaugagcuuugcacuuugcaaaucccua

SEQ ID NO: 385337 - RNA, 61 nt, Homo sapiens
ggcuucagacaucaaacuggaaguuuucugaauuuaggauaucagguagaucuuugagguc

SEQ ID NO: 385338 - RNA, 61 nt, Homo sapiens
gcaucugugguucuagcuacuuuggagacugagcuuggaggauugcuugaacccagaaggc

SEQ ID NO: 385339 - RNA, 74 nt, Homo sapiens
aagaugaaagguauguuuucugugacauuuuucaauacucaguucugucacaacaaggaaaauauuuuucacuu

SEQ ID NO: 385340 - RNA, 67 nt, Homo sapiens
accuaaggaugguuuuuuaagaagagccucaggugcuggugugggucuuugaaagcacaucaaaggu

SEQ ID NO: 385341 - RNA, 130 nt, Homo sapiens
ggagacagucucucucuguucccaugcuggagugcaguggcacgaucucagcucacugcaaccuccgccucccuagacaagaucgugccacugcacuccagccugggcaacagagcaagacucuaucucc

SEQ ID NO: 385342 - RNA, 76 nt, Homo sapiens
ccagcaucuggaacuuugcacaguagcuauuccugauuugcacaguguuccuacugugcaaaguugcaaauguugg

SEQ ID NO: 385343 - RNA, 85 nt, Homo sapiens
agagauaaugagggcauggaccagggaagagauagcaggaacgcugucuccuaacugucucccuugguccugaaaucuauucucu

SEQ ID NO: 385344 - RNA, 61 nt, Homo sapiens
gcaucuguuuauaggcucuccacaaggguagcauuccauucccagagcuaugaacauaugc

SEQ ID NO: 385345 - RNA, 68 nt, Homo sapiens
ugcaggcaugacauuucacucuuagauaugccaggauauaccuucuaagaaugugaacauucucugca

SEQ ID NO: 385346 - RNA, 58 nt, Homo sapiens
gacaauguuguuuuagauggaauuuacuacauagugaauucuguccaaaauaacuguc

SEQ ID NO: 385347 - RNA, 55 nt, Homo sapiens
gaagcaaggauauagaauuuagggcuucuuauucccaaaauucugucccuucuuc

SEQ ID NO: 385348 - RNA, 59 nt, Homo sapiens
gcaaauacuguguguacaaaguugugcaguaauuugagcaauaaaguuacacaguuugu

SEQ ID NO: 385349 - RNA, 57 nt, Homo sapiens
agucagaugaggucaucuaccugcaguaugugaaggugaauguaaagucaugugacu

SEQ ID NO: 385350 - RNA, 84 nt, Homo sapiens
cacaaagggccuccuauucuaugauuccgcuuaugugaaauguccagaauaugcaaauccauagagacagaaaggagauuugug

SEQ ID NO: 385351 - RNA, 86 nt, Homo sapiens
uguccucuggaguaaugguuggcuauucuacuugauagugguugaacaucaucauuaaucaggcaaugcuugcuacccacagggca

SEQ ID NO: 385352 - RNA, 70 nt, Homo sapiens
caucacacuuggauguaagacacuuugagccaauuccaaaaauccaaucugucuaaaccaaugugugaug

SEQ ID NO: 385353 - RNA, 88 nt, Homo sapiens
cacacacaaaaagcucagagucaagcucuuguuccaucucuuacugccugaaugacugggauuuuucuugacucuguuucagucugug

SEQ ID NO: 385354 - RNA, 55 nt, Homo sapiens
ggagaguaguggaaaacaugcuuccaaagaaaguaagaaauuucuacugcacuuc

SEQ ID NO: 385355 - RNA, 87 nt, Homo sapiens
gcugagcauguggauaggagugugcacagaguaggucugcaauaaauguccucuaagugaauacagucuuucucccccaucaucagc

SEQ ID NO: 385356 - RNA, 80 nt, Homo sapiens
ugguacauguguggguaagucuaaacaaauguuguauuaacauuaauaacaaugucuuaugggcuuaaaaacacaggcca

SEQ ID NO: 385357 - RNA, 58 nt, Homo sapiens
acccgguaggcggagcuugcagugagcugagauagcacuacugcacuccagccugggu

SEQ ID NO: 385358 - RNA, 105 nt, Homo sapiens
uuguuuucaggaggacuuucgacugcauuuuagaaauauuucaagaauuauggauuguguugguuguuuuaaaugucgucuguggggaaagcuucagguaagcaa

SEQ ID NO: 385359 - RNA, 65 nt, Homo sapiens
cugucagacacugagcaaacgacuagcucgagcgaguucagucucaaccuuaguuucugccacag

SEQ ID NO: 385360 - RNA, 70 nt, Homo sapiens
gguauaauauugucucugugcuuugcaacaacauccuuaacauuguauguaaagacaggauaacaccacc

SEQ ID NO: 385361 - RNA, 78 nt, Homo sapiens
gaguuuuuguacuucauacaauaacuccaugauuucucuuuguuauuuaaugggguuucccuaagagguuaagaacuc

SEQ ID NO: 385362 - RNA, 86 nt, Homo sapiens
acuagugaguuuguuuaccugauuuguggccaauuugagucugauuaagaaucuuaaaguguuugcagacaggugguaaaauuggu

SEQ ID NO: 385363 - RNA, 113 nt, Homo sapiens
auauucuaggccuucaacauaacucugugauuacuuuagucaucaguugcuggguuuuuaaaaauagcagcuuuauugagguaaaucucacauacuauaggagaccagaauau

SEQ ID NO: 385364 - RNA, 55 nt, Homo sapiens
caauaucacaggggguguacaccaccccuguuuguaaauguccccugugauauug

SEQ ID NO: 385365 - RNA, 55 nt, Homo sapiens
uugagauggagucucacucugccgcccaggcucgagugcaguggcacuaucuuag

SEQ ID NO: 385366 - RNA, 63 nt, Homo sapiens
uauuagguuggugcaaaaguaauugcaguuuuuaauggcaauuacuuuugccccaaccuaaua

SEQ ID NO: 385367 - RNA, 95 nt, Homo sapiens
guauccaaaccagccugugcacuggaccuugucuucuuuuagucauuaugaagaagccaaccuguccaguaugcaccaggcuuaguuuuaaguac

SEQ ID NO: 385368 - RNA, 77 nt, Homo sapiens
cuaaaguucuucugagagaacaauuaugcaugugacuccuuuucuugcgucugauuucucauuagaaaggaccuugg

SEQ ID NO: 385369 - RNA, 59 nt, Homo sapiens
aggaagacuggcuuguuuacccaaccaaccaguuguugaaggaaaacaucagucuuuuu

SEQ ID NO: 385370 - RNA, 77 nt, Homo sapiens
ucgauacauugucauuguacauaaguauggaguacaauuugguguuucaauaaauaucuacguuguauaaugaucga

SEQ ID NO: 385371 - RNA, 57 nt, Homo sapiens
gaggaggauuugagaggagacaaaagagaaaucuguuagcuugucaaaucuuuccuc

SEQ ID NO: 385372 - RNA, 56 nt, Homo sapiens
gaguagcuguacuaucuuacauuccugccagcaauguaugagagacauggcugcuu

SEQ ID NO: 385373 - RNA, 75 nt, Homo sapiens
ugucuuuauuagcagugugagcacagacuaauacaguaaauuggugcugguuagugaggcacugcuguaaagaca

SEQ ID NO: 385374 - RNA, 91 nt, Homo sapiens
aaguaaaaguaggguuccauggaaaaagcagcuaguucaacucacaacucagagucacaagugcuuuuccuggagacagcccauuguacuu

SEQ ID NO: 385375 - RNA, 130 nt, Homo sapiens
accucucaaaaguuugcaaaagucuuaacucauuccaaauguaaaaaauucagucucaucugagacaaggccacagucccuucugucuaugagucccugaauuuaaaacggaguucuuuucuuucaaggu

SEQ ID NO: 385376 - RNA, 123 nt, Homo sapiens
gaugacauuggcacuaugacagccuaucaaaaaugucaugaguccaaccagaaaauauuugauuugguuucuggagacucagacgccacugauuaggauuugcucauugguguuuuauucauc

SEQ ID NO: 385377 - RNA, 60 nt, Homo sapiens
ggguuaggaagaacagcugcgaauggccuaauggugcccuaaaguuguuuuauccugccc

SEQ ID NO: 385378 - RNA, 71 nt, Homo sapiens
ggagaagagaugacugauggcugauuauuaaugcucuuucacaggugauaugaaucaaucacucuucaucu

SEQ ID NO: 385379 - RNA, 93 nt, Homo sapiens
uuucaccuauggcuguuugguuaauuucacuaggaaucacucucuaccuacaauguguauuccacaguuaacacagaccgaguccuggugggg

SEQ ID NO: 385380 - RNA, 116 nt, Homo sapiens
gagcaucauaaguuaagaugguagacauucuaaaucucuauaaaugucaacacagauuuauuuaugguuaauauaggaaguuaaaaaucuaugcccagucuugacagauggagcuu

SEQ ID NO: 385381 - RNA, 88 nt, Homo sapiens
ggaggauugcuugaccccaggaguuggagguugcagugaacuaugauaauaccauugcacucuagucugggugacagagcaagacucu

SEQ ID NO: 385382 - RNA, 85 nt, Homo sapiens
agaauucagaaauaauucuacugaguguuauuuguucaauaguaauaaaacuguuuguauaggcucaguaagaaucuguccuucu

SEQ ID NO: 385383 - RNA, 83 nt, Homo sapiens
guuuuauucauaugauuuggauaguucuucuacuagagugugauagcacucauagaacaggggaauuaucucauaucuggaac

SEQ ID NO: 385384 - RNA, 79 nt, Homo sapiens
ucacuugagcccuggaguuugaggcugcagugagcucaaguaauugugucacuguacuccaaccuaggugacagaguga

SEQ ID NO: 385385 - RNA, 69 nt, Homo sapiens
uucucagauggggccaaguccuucugugaagccaaaaaucuuucauggaggauuugcuucuuuugagga

SEQ ID NO: 385386 - RNA, 77 nt, Homo sapiens
ccuauuuccugcaaauuggcagauggauccagaaguuggaucacacucaccuucuguccuuuuggcaggaccagagg

SEQ ID NO: 385387 - RNA, 67 nt, Homo sapiens
gcauggaugugaaaucauaguuucuaguaagacacagaaacguguaugugauauucacauagguugc

SEQ ID NO: 385388 - RNA, 58 nt, Homo sapiens
uugaauagacagccagcuuuaauuucugaggaaacacugggguuggcuuucuauuugg

SEQ ID NO: 385389 - RNA, 82 nt, Homo sapiens
cagcaaggggcaguggguuccucagagauacccucuggccccuccacagcuggcuccuugaaggaacgcuguucccuugcug

SEQ ID NO: 385390 - RNA, 55 nt, Homo sapiens
acccagaauucagucuuaggccacaaugauaaagggcuuauuucugguuuugggu

SEQ ID NO: 385391 - RNA, 74 nt, Homo sapiens
uagaugucccacaguauuccaauguuuagauauuccguagcucauuuaaacagucuucuccugagggacauuug

SEQ ID NO: 385392 - RNA, 72 nt, Homo sapiens
uuagaucuaccugucauacaaggccuuaacaaagauacaauuuauggcccauauguuuggcuauaggucuaa

SEQ ID NO: 385393 - RNA, 92 nt, Homo sapiens
ugaggucuuuuuuucauggaauauagucauuuuuauaacauggcagucuuucccugcauuuaaaaugauuuuguucuggaaaugagagcuua

SEQ ID NO: 385394 - RNA, 129 nt, Homo sapiens
ccuauucuguaggcugucuguuuacucuguugguaauuucuuuuggugugaagaagcucuuuaguuuaauuagcuucuucacaccaaaagaaauuaccaacagaguaaacagacagccuacagaauggg

SEQ ID NO: 385395 - RNA, 61 nt, Homo sapiens
guggguaaaucucuguucagggcuuucagcucugaaggcugugagaccccagauuucccac

SEQ ID NO: 385396 - RNA, 97 nt, Homo sapiens
gagcuggauggaugauguguuuuaggaucucagcauaguaugggccaaauaccugcugauuaugaugcaucagauugagaaacuuccagcccaguuc

SEQ ID NO: 385397 - RNA, 71 nt, Homo sapiens
ucauguccucaguggauuggauggugcccacccacuuuggggagggccauguacuuuacugaguccacuga

SEQ ID NO: 385398 - RNA, 74 nt, Homo sapiens
uauacaguagguacucaguaagugcuggcugcuauuggaauggugaccggcacuuacugagcacuuacugugug

SEQ ID NO: 385399 - RNA, 127 nt, Homo sapiens
cauuugcuugguaaaucuuucuccaucccuuuauuuugagccuaugugugucacugcacgucagaugggucuccugaauacagcacacugaugggucuugacucuuuauccaauuugccagucugug

SEQ ID NO: 385400 - RNA, 113 nt, Homo sapiens
ucuggguauccagcucuuuacugaucuacauggcacagaguagaugcucaauaauauuuuguuacauauuuguucuguccagagaaggggauuagcaaagugggcacagcaga

SEQ ID NO: 385401 - RNA, 76 nt, Homo sapiens
auacuauuggcaugguugucgcuugugggaauguaagcaauacauuccacauguaggacaauuuugaaagaaguau

SEQ ID NO: 385402 - RNA, 82 nt, Homo sapiens
caugguaagagcauguaguggcucuaccuagaacuugcuuuucuuauagaccuacuaugugcuuucuuguaaaccuacuaug

SEQ ID NO: 385403 - RNA, 66 nt, Homo sapiens
gggaauuucuuucaaguuuugacuuaaccccaguauugagccaaugauuugaauagagcagguccu

SEQ ID NO: 385404 - RNA, 94 nt, Homo sapiens
cugccagcguuccugagccuuguaucuaguagaagucuguuucuccuaacggccacuuagauuacagguaaaauguagucaggaauuucugcag

SEQ ID NO: 385405 - RNA, 89 nt, Homo sapiens
ggagaaucacuugagcccgggaggugaagguugcagugagccaagaucgcaccauugcacuccagccugggcagcaagagugaaacucc

SEQ ID NO: 385406 - RNA, 76 nt, Homo sapiens
gcaguagguguguggugggagagcaaguaaagcuucaccuguguuuacagcugcuccccaucacucgcauuaccgc

SEQ ID NO: 385407 - RNA, 80 nt, Homo sapiens
gaaguaaaucuaaggccauugagggagaggcugugaccuugguccugaagcuguuguucucagaggcuuugaaucacuuc

SEQ ID NO: 385408 - RNA, 71 nt, Homo sapiens
ucaaaaauauucccaggaagucuaacuagcugugucauccuuauucuaagacuuuuugggaauauagauga

SEQ ID NO: 385409 - RNA, 101 nt, Homo sapiens
ugagacagagucuuguucugucacccaggcuggagugcaguggugggaucucggcuuacugcauucuccgccuccgggguucaagcgauuuuccugccuca

SEQ ID NO: 385410 - RNA, 70 nt, Homo sapiens
ucacacuugauuuugaaccuuucuacuaaggugcucugguuugguggaaagaacacaaaauuaggaauga

SEQ ID NO: 385411 - RNA, 80 nt, Homo sapiens
gcaauugcacucuuagguguacacccaaaggcauugaaaacagacacucaggcagauacuuguacaccaguguauauugc

SEQ ID NO: 385412 - RNA, 66 nt, Homo sapiens
ugugagaugauagauauguuaauuugcuuuaaaguagcaaugauuuuacugucuguguaucucaua

SEQ ID NO: 385413 - RNA, 129 nt, Homo sapiens
acuccuggacucaagcaguccucccgccucagccuccuaaagugcugagaugaggcugggcgcgguggcucacacuuguaaucccagcacuucgggaggccgaggcggguggauaacgaggucaggagu

SEQ ID NO: 385414 - RNA, 60 nt, Homo sapiens
acgggaagaaguaaugaaggucuucccacauucaacacauucauaaggcuucucuccugu

SEQ ID NO: 385415 - RNA, 64 nt, Homo sapiens
ggguugaagucuauuccuuuuuaacugcguguuugucuugcauuuuuggaaugaauuccagccc

SEQ ID NO: 385416 - RNA, 89 nt, Homo sapiens
uaauuuuggggggugaguuuguaauuguauuuaguuguuaugggaauaacaguauauuuaccaaaccuuucaccuucuaauuagaguua

SEQ ID NO: 385417 - RNA, 63 nt, Homo sapiens
ugaaaguagaguuuaugcauguugugaauuuuuuuuccauagaauguauaauauuuuacuuca

SEQ ID NO: 385418 - RNA, 79 nt, Homo sapiens
ggaggccgcuccuauggcggugugggcggugcagcucauucccccggggcucccagccucccacccccauccggccucc

SEQ ID NO: 385419 - RNA, 82 nt, Homo sapiens
gguaucuuuacagcagugccccacucuacugguaccaauuuacuguauuaguccauuucugcgcugcugauaaagacauacc

SEQ ID NO: 385420 - RNA, 107 nt, Homo sapiens
cuaaggccauaggguucuguagggucacuugccuaaucugcaugauuuuucagugggaaggguaauguuggguuagguguuauuacuggcagcagcucuauacuuag

SEQ ID NO: 385421 - RNA, 112 nt, Homo sapiens
ugcagcacgagcccucucccccuucuccccuuuaguuucuuaauaagcacaauaaagacauaugugcuuauuaagaaacuaaagaggcccggcgugguggcucaugccugua

SEQ ID NO: 385422 - RNA, 59 nt, Homo sapiens
ucaugaagaucucugccuuguguccaagauucuuggacaaagcagcaguaucuuuauga

SEQ ID NO: 385423 - RNA, 58 nt, Homo sapiens
gugagcgauacagaggaacugggaggcaauguuucccacaguggccucauauccuuac

SEQ ID NO: 385424 - RNA, 63 nt, Homo sapiens
ggcccaggguugcuuuagauucugaagcaacuucaggguuuaaaggcaucccugaaauggguc

SEQ ID NO: 385425 - RNA, 104 nt, Homo sapiens
gaggcugaggcaggaaaaucgcuugaacccaggauggagguugcggugagccgagauugagccauugcacuccagccugggcaacaagagugaaacucaguuuc

SEQ ID NO: 385426 - RNA, 82 nt, Homo sapiens
gggguaugguuuuuguacaacagcucuggggagucccggacuccucugagaguggucuacgaacuagcagcaucacuauccc

SEQ ID NO: 385427 - RNA, 56 nt, Homo sapiens
gagauggggucucgcucuguugcccagauuggaguacaguggugugaucucagcuc

SEQ ID NO: 385428 - RNA, 59 nt, Homo sapiens
gugcaugcuagugguugccaguuauguugguaguggaguaauggcaaguuuaguagcac

SEQ ID NO: 385429 - RNA, 55 nt, Homo sapiens
uugagauggugccacuguacuccagccuggguuacagaaugagacucuaucucaa

SEQ ID NO: 385430 - RNA, 63 nt, Homo sapiens
gaguuuagagugggaucuggaguacuggaugacuuuucucaguguucccauucuaccuugcuu

SEQ ID NO: 385431 - RNA, 64 nt, Homo sapiens
aaggcugaauagcuuugaaauggccauaaauuugcauaauggcuugcauaaagcuaaucacuuu

SEQ ID NO: 385432 - RNA, 78 nt, Homo sapiens
uggcuagaauaaagcaggcagaagaaggaggaaugagcagacuugcugaguucuggccuccauuuuucuccugugcua

SEQ ID NO: 385433 - RNA, 80 nt, Homo sapiens
cugcuggauucuguuugcuaguauucuauuaagaauuuuugcauugauguucaucagggauauuggccuggauugagcag

SEQ ID NO: 385434 - RNA, 71 nt, Homo sapiens
aaggcagggaccuugucacauuugcccgguauucccaaugccuagcacaaugccugacgaguccuggccuu

SEQ ID NO: 385435 - RNA, 62 nt, Homo sapiens
gguuguccaagucccauuuguugaaaagacuguucuucucccacugaauggucuuggcaacc

SEQ ID NO: 385436 - RNA, 86 nt, Homo sapiens
uuuuuccucuuguaucacuguucauguguagucaccauguguauuagguacucaugcaaugagucaggaggcauuuccaggaagaa

SEQ ID NO: 385437 - RNA, 88 nt, Homo sapiens
ggauuacagaccuaaaugugaaacacgaaagucuaaaacucaaaaaauaauauaggagucugggcacagugguucacaccuguaaucc

SEQ ID NO: 385438 - RNA, 77 nt, Homo sapiens
uuagcuuccuuucauugggugagaacaugcuccuuuagcucagaggaguuugucauuacccaccuucugaggccuaa

SEQ ID NO: 385439 - RNA, 69 nt, Homo sapiens
uuuuuucugagguuauauucucucaaguguaucaacuuacuuggccaguaauauguaccuaagggaaag

SEQ ID NO: 385440 - RNA, 73 nt, Homo sapiens
cuacacagagguauggcaauuucagagucauuccuucggccagaaaacucauugcucauaccuuaucuuguag

SEQ ID NO: 385441 - RNA, 59 nt, Homo sapiens
gguuuuuguucugcuuugccuugugauauuuuucuugagugugaggaagaauuagaauc

SEQ ID NO: 385442 - RNA, 60 nt, Homo sapiens
aguuguagcaagacuggauggcugaugaccuagauucuggccccaguuuuucuauuagcu

SEQ ID NO: 385443 - RNA, 77 nt, Homo sapiens
gccucuucucaagaaagugcuguagacugggcgcaguagcuacugccuguaauuccagcacuuugggaagcugaggc

SEQ ID NO: 385444 - RNA, 63 nt, Homo sapiens
gguagaggaugaggagguuggacguggugguggcuuugccuuggauauuccucuuccucuauc

SEQ ID NO: 385445 - RNA, 100 nt, Homo sapiens
ugcaucacuguagaagacugcauuugacagagaaaagugugacuuauaaauuucugaaaguugucaucuuuucuguugaugguauuuauucacaaaugca

SEQ ID NO: 385446 - RNA, 60 nt, Homo sapiens
uuuauccauucaccaguugaacauuugggcuauuugcaguuuuugguggucauggauaga

SEQ ID NO: 385447 - RNA, 66 nt, Homo sapiens
uucaugacuugaucacccccuaagggcccaacuccuuacguuggagauuaaguuucaacauaugaa

SEQ ID NO: 385448 - RNA, 76 nt, Homo sapiens
uuaaaaaaauguauagaugcugcagucaggcauuacauaaaucaucugcugaaaugugcacauaacauuuuuuuag

SEQ ID NO: 385449 - RNA, 64 nt, Homo sapiens
ugcuaugagcaaaaugaggguuaguggaaaucuuggugcacuguaacuaguuugcuuauaugua

SEQ ID NO: 385450 - RNA, 58 nt, Homo sapiens
uuuugaaagacaucaccuacugcucaauaccugguugaggcagauugucucuucagaa

SEQ ID NO: 385451 - RNA, 72 nt, Homo sapiens
uuuaccuacuguuuucuuuauaguacagcagauuuuuaaauuaguuuguaauggagcaaacagguuggugaa

SEQ ID NO: 385452 - RNA, 66 nt, Homo sapiens
uguuucuaguucuagauccuugaggaauccccacacuggcuuccacaaugguugaacuaguuuaca

SEQ ID NO: 385453 - RNA, 62 nt, Homo sapiens
cugaucuauguaagacucccuaguuugauguuuaucuaacugggcaagcauuacaugguugg

SEQ ID NO: 385454 - RNA, 101 nt, Homo sapiens
gaguagcugggauuaaagcgugugccaccauguccggcuaauuucuuuguauuuuuaguagagauggguuuucacauguuggccaggcuggucucgaacuc

SEQ ID NO: 385455 - RNA, 78 nt, Homo sapiens
uuagagcagugauaaauguagggacaaguagagaaaauacuuucuuuaguuaagggacauuuuauaucacagcucuaa

SEQ ID NO: 385456 - RNA, 84 nt, Homo sapiens
gaguuaauaggugcagcacaccaacauggcacauguuuacauauggaacaaaccugcauguugugcacauguacccuaaaacuu

SEQ ID NO: 385457 - RNA, 57 nt, Homo sapiens
uucagggacuuuagacaagagaggacacaggauugcuucucccucuggggcccuggg

SEQ ID NO: 385458 - RNA, 56 nt, Homo sapiens
guugguucuguuuauaugacggauuauguuuauugauuugcauauguugaaccagc

SEQ ID NO: 385459 - RNA, 96 nt, Homo sapiens
gacaggagaaucgcuugaaccccggaggcggagguuguggugagccgagaucgcaccauugcacuccagccugggcaacaagagcgaaacuccguc

SEQ ID NO: 385460 - RNA, 70 nt, Homo sapiens
auuauuuuggcucugucuguaucuuugcucuauuccuauuugagcaaagacagagagaagccagaacaau

SEQ ID NO: 385461 - RNA, 81 nt, Homo sapiens
ugguauggcuucuuuaaauugagguucagagaauuugacagcuuguucaaaguuaaauauccaguuaagagacaguuacca

SEQ ID NO: 385462 - RNA, 130 nt, Homo sapiens
acugcccaugagggcuguggugugagucugcuagccgugagagacagaugcauuacaaagggauggauuuagugcacucuuuccucucuuacugugaguagaugcugcacuucuugaaccuggugggagu

SEQ ID NO: 385463 - RNA, 61 nt, Homo sapiens
ucaguaguuuuuuuacuaggugcuagucccuaauggaaucaggguagaauaaaacuauuga

SEQ ID NO: 385464 - RNA, 85 nt, Homo sapiens
ucucaggcagugacccucuagauggaagcacugucuguugucuaagaaaagaucgugcauccuuuuagaguguuacuguuugaga

SEQ ID NO: 385465 - RNA, 76 nt, Homo sapiens
ugcugagucauguaauaaugcugcuaaugaugcugacaaugagcagaaacacagagcccuuauuacaugaugagca

SEQ ID NO: 385466 - RNA, 84 nt, Homo sapiens
ucugcugcagcauccaaugaaagccuucuuccuuggaaauacuaauugucucagugauuggcuuucugugcaguaagcagcaga

SEQ ID NO: 385467 - RNA, 64 nt, Homo sapiens
agcuauuugaaguugcagagaugaucagggaagccuuccuucucacuguggaacucaaaaagcu

SEQ ID NO: 385468 - RNA, 76 nt, Homo sapiens
gcaaagacagcaggcccgugagacuggaagcaagauggagucagccaugcuaaacuucucucacugucaucuuugc

SEQ ID NO: 385469 - RNA, 63 nt, Homo sapiens
aucagugcagugggaacuagaaauaagcaucacauuguauguucugaaaaccauugaacugau

SEQ ID NO: 385470 - RNA, 55 nt, Homo sapiens
ugucacugugaguuugacugcucuggguaccuguuguagguggagucauauggca

SEQ ID NO: 385471 - RNA, 86 nt, Homo sapiens
uauucuacugucuaugucuuggaaaguuguuguaguuauuauuuuugauuaguacaugauugaaucuuucuaugaagauaagagua

SEQ ID NO: 385472 - RNA, 58 nt, Homo sapiens
uaccucuuuccccaggccagagaucugcacccuuucuuuguacugagccaagauggua

SEQ ID NO: 385473 - RNA, 56 nt, Homo sapiens
cuauucacaauggugaagauauguaaucaacugcaguguccauuaauugugaaugg

SEQ ID NO: 385474 - RNA, 67 nt, Homo sapiens
uuaagaaauaaaugguaucggcauuuguguauaguucuuuguaugcaaaugcugcuauuucucuugg

SEQ ID NO: 385475 - RNA, 76 nt, Homo sapiens
ucacuugaacccaggagcuggaaguugcagugagcugagaucacaccacugcacuccaguuuggaugauagaguga

SEQ ID NO: 385476 - RNA, 59 nt, Homo sapiens
cugauauuuuucuggcuugugugcuguuuguuuucaguuuauccccaugagaaugucag

SEQ ID NO: 385477 - RNA, 91 nt, Homo sapiens
caggaaccggccauuuucacuucuuuugugauucuucaucugcuucaggauguauacgugcaggucacaggggauaugauggcuuagcuug

SEQ ID NO: 385478 - RNA, 129 nt, Homo sapiens
agggucaggcaagcaagguaccuaguguacacaauuuaaggaggcacucacucucagguucacgugcagccuggagagugagggccuccuuaaauuuuacacccccuggucuuucucuugccuaguccu

SEQ ID NO: 385479 - RNA, 57 nt, Homo sapiens
augcacuguaauagcucagaaggagcuuucagagcauuuaugagcuaugacaugcau

SEQ ID NO: 385480 - RNA, 78 nt, Homo sapiens
gugagaaaugagacauuaaaguguguuuggagccuuuuauauauuucaacuuuaaaaacaauuuggugucuccaucau

SEQ ID NO: 385481 - RNA, 71 nt, Homo sapiens
ggaucaucugugagacugguccugaacccagugacuuccaucucugggggcaguuccaucuccagugguuu

SEQ ID NO: 385482 - RNA, 68 nt, Homo sapiens
gacaaugggacuauauuuuucaagguaaaaguguagugugaacucugaagauaucuaguaccauuguc

SEQ ID NO: 385483 - RNA, 74 nt, Homo sapiens
gggaggaguggaguaugaaaacugacuuuggcauguugaaaaccaaauucgguauuucggugccuuuucuuucu

SEQ ID NO: 385484 - RNA, 55 nt, Homo sapiens
uaacuccauuuggacucaguauugugucuuugacucugagaccaaguggcaguug

SEQ ID NO: 385485 - RNA, 57 nt, Homo sapiens
cuggagacaaagauagaaaagcagccaaggugcuuaacaaaggaucuuuuucucuag

SEQ ID NO: 385486 - RNA, 59 nt, Homo sapiens
ugaaggagggugaauucuguuuguuauaugacuaugacauguagagaacuucucauuca

SEQ ID NO: 385487 - RNA, 85 nt, Homo sapiens
ugugaggacaugagauuugggaggggccaggaguagaaugauaugguuuggcuguguccucucccaaaucucauuuugaauuaua

SEQ ID NO: 385488 - RNA, 98 nt, Homo sapiens
uugccuuuuacuuauauuucuaaagcaucacuuuuccuacuuuuagagcauuguauugaagguagauaagaacaaggaugcuauugagugcuagguaa

SEQ ID NO: 385489 - RNA, 55 nt, Homo sapiens
cuggcagauagaaaugugguuaagaacuuccucuuauaccaggauauuugcucag

SEQ ID NO: 385490 - RNA, 66 nt, Homo sapiens
augcaagaaauaucucuuuuucucugacguucuccuuuagugguagucaaaagagauuucuggcau

SEQ ID NO: 385491 - RNA, 84 nt, Homo sapiens
ccaacaauauauaagcugaugagccacaaugauauauaaaaccugucaaccaaguauuugugaaucagcuguauagauuguugg

SEQ ID NO: 385492 - RNA, 79 nt, Homo sapiens
ucacucuguugccuaggguggagugugguggcaugaccuugguucacugaaaccgccuccaccucccagguucaaguga

SEQ ID NO: 385493 - RNA, 84 nt, Homo sapiens
ucguacccuagacuguugguaacugggauaacuguagugaccuaugaccugugguaaccuauaguuaccaauagugaccuauga

SEQ ID NO: 385494 - RNA, 69 nt, Homo sapiens
ugugucagugauugcuuucauggaaacuuuucuccagucaauuccaggaagaguuacauacaagacaca

SEQ ID NO: 385495 - RNA, 71 nt, Homo sapiens
uuuauuaagcuguguggacuaugccucugacucagaaggguagguaggcccugguuacacacugacauaga

SEQ ID NO: 385496 - RNA, 103 nt, Homo sapiens
uguaugaguauaucacuggcagugcuuguuauccuggcuuucaaacaagucuggaaagacuccaggguaaagcacagcauaccaggaucuuuugcucaauaca

SEQ ID NO: 385497 - RNA, 76 nt, Homo sapiens
aaacuuucagagaaagugcuuugugauguuugcauucauaucacagaguuaaaacuuucuuuugauugagcaguuu

SEQ ID NO: 385498 - RNA, 67 nt, Homo sapiens
uuuagagucagugucuugcucugucacucaggcuggagugcaguggcaagaucacugcagcccugaa

SEQ ID NO: 385499 - RNA, 89 nt, Homo sapiens
gcuguauacuguaacucagggauucugucagaugagugcaaacauuaccgugcuguaaccauccagagucccagggucacauuggcagc

SEQ ID NO: 385500 - RNA, 96 nt, Homo sapiens
gaacauguaaacuugcaagaaauauuuggugaaugaaugcauguuaaucugaauuuaguauugcagucuucauuaccagaaagcauuuacauguuu

SEQ ID NO: 385501 - RNA, 58 nt, Homo sapiens
ggcuugaguccaggaguuugaggaucuaguaagaugaucaugccacugcacuuuagcc

SEQ ID NO: 385502 - RNA, 63 nt, Homo sapiens
guuggaguguugauugcugccuuucacuuaacagugaauaagcaaaugcucuagcacuccaac

SEQ ID NO: 385503 - RNA, 96 nt, Homo sapiens
ugugacuuuggcuucucauuacaagguaaaaguaaagcuuuuauucagagaacagugagagcuuuuuugccuggugaucaaaaagucaguauuaua

SEQ ID NO: 385504 - RNA, 84 nt, Homo sapiens
auaaauucucagugguugauuuauuuaucuuugccucuauugcaauaugagcagguagauggaccauuuuacaccuaaauuuau

SEQ ID NO: 385505 - RNA, 85 nt, Homo sapiens
ggccaguaaguaugaucaaccuauaacaaaauagaaauaaacuaaauauuaucauuucuugguguaguaguugaaaacauuggcu

SEQ ID NO: 385506 - RNA, 67 nt, Homo sapiens
gagucaucugauucaauucccucauuuuccagaggaggaaacugaggcuagucagaucagaugacuu

SEQ ID NO: 385507 - RNA, 87 nt, Homo sapiens
cauuuuuuucuaauacuuuaauaauauuacacuaacacugaaaucuuugaucuugguuuauugugguaugaagugugguuucaagug

SEQ ID NO: 385508 - RNA, 88 nt, Homo sapiens
cccaguacuuuagaaugugaccuuauuuggagauaggguuguugcagauguaauucauuaagaugaggucauacuagaauacgcuggg

SEQ ID NO: 385509 - RNA, 59 nt, Homo sapiens
ccacugcccuagagcaauggugcuagccuaacuucuacaucacagcaaguagggagugg

SEQ ID NO: 385510 - RNA, 83 nt, Homo sapiens
gauuguggauugugaagaccaugggaaaaguguaguaugugggccagaaugcaccauuccucauggcacagucccucacgguu

SEQ ID NO: 385511 - RNA, 99 nt, Homo sapiens
agcuaucuucuaagcuaagcuaagaagauagcuaagcuucuucuaagcuaagcuaagaagauagcuaagcuucuucuaagcuaagcuaagaagauagcu

SEQ ID NO: 385512 - RNA, 76 nt, Homo sapiens
caugcacaggcacacaucauuuauugaaucuuguuaaaaaggcaugauguaaacagaugugcagcuuguccccaug

SEQ ID NO: 385513 - RNA, 76 nt, Homo sapiens
ucuaaacaacagacaguguuuacagaacgugagcaaagacuaauucuuuguuauguuaaacuacugaaauuuuaga

SEQ ID NO: 385514 - RNA, 67 nt, Homo sapiens
gaugaugaucugagagcuuguuacauaaugcuuucaauccugugaggcaaguacuaucaucauuauc

SEQ ID NO: 385515 - RNA, 56 nt, Homo sapiens
gaacacauguucaugacuggcugugauguauaggucuugucauagaaugaugguuc

SEQ ID NO: 385516 - RNA, 58 nt, Homo sapiens
gugaauagugcugcaauaaacauacgugugcaugugucuucauaguagcaugauuuau

SEQ ID NO: 385517 - RNA, 63 nt, Homo sapiens
ucuuggaaacauggugcugccacccugcaccuuacauacggcggcagcaccauauuucuaaga

SEQ ID NO: 385518 - RNA, 74 nt, Homo sapiens
accaauagcugucaguuuuaacuagggaauaucagucuauugauguuuauagauggcugaaggcaguauauggu

SEQ ID NO: 385519 - RNA, 101 nt, Homo sapiens
guggaaacugaaguccagguuuaccucucaacuucuauugucguacuacaggagucguucuuuuuacucuuugguaggaguaggaggccuggcuuccccac

SEQ ID NO: 385520 - RNA, 62 nt, Homo sapiens
uggguaagugcacaaaucuuaaauguacaucggcgauguauuuuuacaugugcauccaccca

SEQ ID NO: 385521 - RNA, 86 nt, Homo sapiens
gcagauaacacguucucuuccugaguccugggcucacagaacauguagcccucauaggcucagggguugauucuggaggacucugc

SEQ ID NO: 385522 - RNA, 73 nt, Homo sapiens
uuacccaaaugccacuguuuaugucacuuaauguugagugcuuucauuaagauauugagugguaauuugguag

SEQ ID NO: 385523 - RNA, 62 nt, Homo sapiens
gguauuuuguuagggugugguauuuguuacagcacagcauauugaacccuacagacuguacc

SEQ ID NO: 385524 - RNA, 65 nt, Homo sapiens
gaugggucccagugaaaccccaccuucaggccauggacggccugagggcugggcacugggcuguc

SEQ ID NO: 385525 - RNA, 76 nt, Homo sapiens
ccacuguggucuccugucuuggccuucccaaacgggacagguugugucugaaggcaagaagagaaccaucgguugg

SEQ ID NO: 385526 - RNA, 83 nt, Homo sapiens
gaguuucugcaagucuugacaaugcuucaggcugaaggaacaaugcaucacuucagaaguauuugucaggugaauagaaauuu

SEQ ID NO: 385527 - RNA, 76 nt, Homo sapiens
uccucguccuuuugucugucugauuguggcaguugagauugaauagagguagacagaggggaaaaaagaaugagga

SEQ ID NO: 385528 - RNA, 93 nt, Homo sapiens
aguucuuaaaugaaagaaugauauagauggcuuucaaaaacgaguugaguucucuugauaguccuguaucuauuuuuucaaguugauugagcu

SEQ ID NO: 385529 - RNA, 56 nt, Homo sapiens
agaacucagguuauagucuacaggauggaccuugagaucugauaggccuggguucu

SEQ ID NO: 385530 - RNA, 78 nt, Homo sapiens
ucagaauacucaugaguaggccccacucuagaaauuguuucagaaagccugggguaggccugguuaugugcauuuuga

SEQ ID NO: 385531 - RNA, 57 nt, Homo sapiens
aaaaauuggcuauuuggugagugauucacuugaguuccuuuucaguggucaauguuu

SEQ ID NO: 385532 - RNA, 68 nt, Homo sapiens
caaagugcugagaugacacacgggagccaccaggccgggacucaccguguaucauuucauccgcuuug

SEQ ID NO: 385533 - RNA, 85 nt, Homo sapiens
guauuagguuggugcucaaguaauggcaguuuugccauuacuuucaauggcagaaacugcaauuacuuuggcaccaguuuaguau

SEQ ID NO: 385534 - RNA, 64 nt, Homo sapiens
auugugaauagugcugcaauaaacauacgugugcaugugucuuuauagcagcaugauuuguagu

SEQ ID NO: 385535 - RNA, 88 nt, Homo sapiens
ugcagggugauuccaugaugguaguucagucaauguauucugcuacuguauuacaaguuugauuggauuauauccaaguccccuugca

SEQ ID NO: 385536 - RNA, 60 nt, Homo sapiens
uugguuccauauuaauuuuaggauuauuuguucuaguucuaugaagaauuauggugccaa

SEQ ID NO: 385537 - RNA, 55 nt, Homo sapiens
gauguuggggcaagagcgggcagacauguauguuuaagcuucauguccuaacauc

SEQ ID NO: 385538 - RNA, 61 nt, Homo sapiens
auaccuguagcagacuuaauauuugugacuauaagcauguagguagcucuguuauaggugu

SEQ ID NO: 385539 - RNA, 58 nt, Homo sapiens
ugagaucgaguuucgcucuuguugcccaggcuggagugcaauggcggaucucggcuca

SEQ ID NO: 385540 - RNA, 55 nt, Homo sapiens
cgcugugguauuauuagaaauauccaagggagauauuacuccuaauaucacagug

SEQ ID NO: 385541 - RNA, 56 nt, Homo sapiens
uugccauggaguagaauugaagaauuacugggaaauucaugcaauuccauggacaa

SEQ ID NO: 385542 - RNA, 64 nt, Homo sapiens
uuuucuggauugccuuuucaguguuaagucuaagaacuuuuugcugagaccuagauccuaaaga

SEQ ID NO: 385543 - RNA, 80 nt, Homo sapiens
acuaaacccccaaaaaaguuauuagguguuugacaguuucauuucuuugacugguaaacaacaggagaacuuggucuagu

SEQ ID NO: 385544 - RNA, 80 nt, Homo sapiens
uuggagaguuuguacuucauugguucuacuuugucugagagcagauggagcccuaaagugaagcuauuauuauuuuucaa

SEQ ID NO: 385545 - RNA, 101 nt, Homo sapiens
ugagucaggagaaucacuugaacacaggagguggagguugcagugagcugagauggcgccacugcacuucaaccucauugacagagcaagacuccaucuca

SEQ ID NO: 385546 - RNA, 59 nt, Homo sapiens
agauauuauuuucuauuuaucaacugcauucaggcagugcuaaguagaugacugaugcu

SEQ ID NO: 385547 - RNA, 87 nt, Homo sapiens
ggagaauugcuugaaccugggaggcggagguugcagugagcugagaucgugccacugcacuccagcuuugggugacagcaagacucc

SEQ ID NO: 385548 - RNA, 94 nt, Homo sapiens
uaugaggacaugaaauuugggaggggccaaggcuggaaagauaugguuuggcuuuguccccacccaaaugucaucuugaauuguaguucccaua

SEQ ID NO: 385549 - RNA, 57 nt, Homo sapiens
uuugcuucuuucgucuggccccaggccugguucccugggggacagggaagaagcaag

SEQ ID NO: 385550 - RNA, 57 nt, Homo sapiens
ggcaaggauguuuuucuggcaaggauugaaaaggaugcuggcaagaggguuuuuguc

SEQ ID NO: 385551 - RNA, 84 nt, Homo sapiens
gaaggcugugagaaggggcauugugucuggguuccuccuuaaagcagaucugaggaaaaccuaagccaguagcucccacccuuu

SEQ ID NO: 385552 - RNA, 129 nt, Homo sapiens
gucaucaguuaaggcaggaacaggccauuuucacuucuuuugugauucuucaguuacuucaggccaucuggauguauacgugcaggucacaggggauaugauggcuuagccuggacucugaggccugac

SEQ ID NO: 385553 - RNA, 68 nt, Homo sapiens
uuuauaauugaaugauaugggacauuuugucuaaugagaaaagaugugcugcuucauacaagcuuaga

SEQ ID NO: 385554 - RNA, 60 nt, Homo sapiens
ugugaauagugcugcaauaaacauacauguucaugugucuuuauaguagcaugauuuaua

SEQ ID NO: 385555 - RNA, 67 nt, Homo sapiens
auguuccugugauaguuucuguuuugaagaugaaugccuguuaucacagaggguauccuagagauau

SEQ ID NO: 385556 - RNA, 72 nt, Homo sapiens
uaagaauacacauuguauguuucugugcacaugacagugugugugugugcacguacauacuguauagucuua

SEQ ID NO: 385557 - RNA, 58 nt, Homo sapiens
ugcacgugcacccacaugcacgugcacccacaugcacgcgcacccaugugcacgugca

SEQ ID NO: 385558 - RNA, 75 nt, Homo sapiens
uaguuuucuccucuauuucuguauguauuuccuuaauauguaguuucagaaguggaauuuauuagagauaaacua

SEQ ID NO: 385559 - RNA, 61 nt, Homo sapiens
aguuuuaggguacaugugcacaaugugcagguuaguugcauauguauacaugugccaugcu

SEQ ID NO: 385560 - RNA, 56 nt, Homo sapiens
uugagauggaguuuugcucuuguagcccaggcuggaguacaauggcgccaucucag

SEQ ID NO: 385561 - RNA, 60 nt, Homo sapiens
cuggaaugugagccccaaaaaggcagacgcugucaguuuuguucauugccacaucucuag

SEQ ID NO: 385562 - RNA, 76 nt, Homo sapiens
guauuuaucagcaguguaaaaacggacuaauaccguaaguugguaccaguagaguagggcacuguugaaaagauac

SEQ ID NO: 385563 - RNA, 58 nt, Homo sapiens
aauuuauuucuaugcuagggacaaaugggauaauuucauuugguguuagaaauaaauu

SEQ ID NO: 385564 - RNA, 79 nt, Homo sapiens
cuucucuucaaguggccuguaacccucucauaggcaaaacucagggcugucugauggcagugguucagguggauagaag

SEQ ID NO: 385565 - RNA, 112 nt, Homo sapiens
gaggcucacaaaaguuaggcaguugcccagguuuauugccgagccaagauuuaaacucaugcuaaucccaaagcuuguguauuaaaccuugcagcugugaccuugaggcuuc

SEQ ID NO: 385566 - RNA, 56 nt, Homo sapiens
ugcagggaggagaaagaugguaugguggauacaggucauugguuggcugcccugua

SEQ ID NO: 385567 - RNA, 69 nt, Homo sapiens
agacagcuaauuaugagacuucucagccuccauaauugcaugagcaagaucuuuauaauuagucuaucu

SEQ ID NO: 385568 - RNA, 62 nt, Homo sapiens
uauugcagugagauccaucuggugaaguaagaaaacauuuggugaaaaugucaccugcaaua

SEQ ID NO: 385569 - RNA, 61 nt, Homo sapiens
aacuggcauaugaacuuguucuucuuguauacagcucugagcaaagcaccauauggcaguu

SEQ ID NO: 385570 - RNA, 82 nt, Homo sapiens
acagucugggcauauuagaaauguuuacucacccccuuccauuccuggaagcagggagaaauuuuucuucagucuucacugu

SEQ ID NO: 385571 - RNA, 77 nt, Homo sapiens
ggaauagcaacuuuuaauuaugauugggauuugcacggaaauacugguacaccaauuuaaucaaaagcagauguucc

SEQ ID NO: 385572 - RNA, 79 nt, Homo sapiens
cagcagcuugacaaguuguccaguaugagugaaaaauacauuucuacuguucggacuugcucauuaaaucccacugcug

SEQ ID NO: 385573 - RNA, 119 nt, Homo sapiens
uaauuuuaggcuucugaucuccagaauuguaauaaaacaaauguauauauuuuuugagccacugaguuuguacuaauuuguuguagcagcaauaggaaauuaacauagccucaaaauua

SEQ ID NO: 385574 - RNA, 60 nt, Homo sapiens
ucauaguuguauacauuuacgggguauaauguaauguuuugauauguguauagcaugugg

SEQ ID NO: 385575 - RNA, 57 nt, Homo sapiens
cuuucacucauggugaaaggcaaaggggaacugugcacaucaccuugugagagagag

SEQ ID NO: 385576 - RNA, 67 nt, Homo sapiens
ucacgugcucuuguguguucugcaaaugacacagcaaugccacuuagacgcacgagagucuauguga

SEQ ID NO: 385577 - RNA, 72 nt, Homo sapiens
gaagcaauuaguuaagcaacuauaaaauggaagauuauuccauuguuaugggguggcuugaaagaaggcuuu

SEQ ID NO: 385578 - RNA, 55 nt, Homo sapiens
uaugcauuguuuuugguucccaggaguggaauuccugagucauaaacaaugcaug

SEQ ID NO: 385579 - RNA, 105 nt, Homo sapiens
uccagaguugagggguagaaggcaaaaugagggaaaucugggcugugcacucaggucacgguggaaucccagaucccucucucacuacccacuuaaacuauuggg

SEQ ID NO: 385580 - RNA, 58 nt, Homo sapiens
ggaaaaugccagagguauugucagguugugaaacuguagcugcguuuaggcauuuucc

SEQ ID NO: 385581 - RNA, 82 nt, Homo sapiens
uggauuuuguaguagaucuggcaucucaguggaaucuugaaaaacugagcauuccauaggcuagaucaaccaguagauucca

SEQ ID NO: 385582 - RNA, 81 nt, Homo sapiens
ggguccugcuguugcucaggcuggagugcaguguugugaucauggcucacugcagccuugagcucucagaucaaggugccc

SEQ ID NO: 385583 - RNA, 77 nt, Homo sapiens
cguuagccuuccucugauuuacauucaacucugaucccugggccuuagguuugacauggagguggaggaagauagcg

SEQ ID NO: 385584 - RNA, 73 nt, Homo sapiens
gccuggcggguuuugcuaccugcugauugcugagcccuagggggacuugagcaaacaaaggugguagccaggc

SEQ ID NO: 385585 - RNA, 66 nt, Homo sapiens
gauuuugguuagggaaggauacauuucucagagaaaaaaaccugaauuuccccuuaacgcgagguu

SEQ ID NO: 385586 - RNA, 77 nt, Homo sapiens
uuucccucgaggaacaaaugcacuucucuuacauaugaaagaugauguguucuguguucccauagaaucuagggaaa

SEQ ID NO: 385587 - RNA, 57 nt, Homo sapiens
aggcuguaguguguagugauugcaccuguaaauagcuacuacugcacucuccagccu

SEQ ID NO: 385588 - RNA, 99 nt, Homo sapiens
gaggcagaagaauugcuugaagcugggaggcggagauugcagugagcugagaucaugucacugcacuccugccugggugacagagcaagacucugucuc

SEQ ID NO: 385589 - RNA, 68 nt, Homo sapiens
ggguacacgugcacaacgugcacguuuguuacauauguauacaugugccauguugguaugcugcaccc

SEQ ID NO: 385590 - RNA, 60 nt, Homo sapiens
uguaccaauuugagagccucaagcaucaccuuuguaugagucuguucucacauugcuaua

SEQ ID NO: 385591 - RNA, 60 nt, Homo sapiens
ggccagggcugcugggggaguugaagguaccuuggaccccugcucgggagcccugcugcc

SEQ ID NO: 385592 - RNA, 63 nt, Homo sapiens
gcucaugaaugucuguggucuuuagugcuaccaauaugcuaaugacuucagaagcuucagagu

SEQ ID NO: 385593 - RNA, 61 nt, Homo sapiens
uagugguauuagcgauacuacuaaaguauuauuauguaaaguaguauuagcaaugcuacua

SEQ ID NO: 385594 - RNA, 86 nt, Homo sapiens
agucagagaggagcugagagaugacugauguugaggucaagucauccuucuguucucacagccauuucucccucucuuuccugacu

SEQ ID NO: 385595 - RNA, 102 nt, Homo sapiens
gcguguggcugaccuugagguuauuggggugcuuguguguccacgccaggagcauggcagcaaacagguccccagugcccacaaagacggcguccacuuugc

SEQ ID NO: 385596 - RNA, 85 nt, Homo sapiens
auguaauuuaucaaguacuguacugaaagugaaaaacagaaugguuguauguguacucaaaguacaguuuuuauugaauguauau

SEQ ID NO: 385597 - RNA, 75 nt, Homo sapiens
cuggcuauuuggaaugaaacagcagagccccaaagagaaaaauuuugaaagggcuccauguucauuuaauaccgg

SEQ ID NO: 385598 - RNA, 87 nt, Homo sapiens
ggagaaucacuugaaaucaggaggcggagguugcagugagcugagaucgcaccacugcacuccagccuguugacacagugagacucc

SEQ ID NO: 385599 - RNA, 74 nt, Homo sapiens
aaacagugucaguagugucugugauuuccucaguugcuuagggugaguuauuaguagaggcuauggugaaguuu

SEQ ID NO: 385600 - RNA, 64 nt, Homo sapiens
gaucaggaguugauuuuggauauauuauaccugauguuuugauaugucccucgacaucaggguc

SEQ ID NO: 385601 - RNA, 68 nt, Homo sapiens
gucauuuggaagguagggacuagaaugaggaccucaggacucugcauggugcccuguccuucuguggc

SEQ ID NO: 385602 - RNA, 59 nt, Homo sapiens
gacuggguuaguuugaaagacuuucagcucugaaauuauuucuucuacuugaucuaguc

SEQ ID NO: 385603 - RNA, 72 nt, Homo sapiens
ccugggcaacacagugagaucccaucucucuuuuuuccuuuuuugagacagagucuugcuccguugcccagg

SEQ ID NO: 385604 - RNA, 109 nt, Homo sapiens
gccucauccccugcaaaagcuggcacagagaaggugcuuggugaaugcauuucuugaagugaguuaaagccaccauucuugcagccuagauuuuguuucuaggaagggc

SEQ ID NO: 385605 - RNA, 82 nt, Homo sapiens
ucccagacacaagagauaccugcuguugcuauuugugaccaaauaccauauuugucaauaacuaccaacaggggcucuggga

SEQ ID NO: 385606 - RNA, 66 nt, Homo sapiens
ucccggcugugugacugugggcagucccugagaugggggauuuguuuguucaucugcacaguggga

SEQ ID NO: 385607 - RNA, 84 nt, Homo sapiens
gugccuguaucuccuucuugggugaaagugggaguuuuuagagauuucuuucuuuucuacuucauuaggaggauugacaaguac

SEQ ID NO: 385608 - RNA, 76 nt, Homo sapiens
cguuucucucuuugguuaucuagcuguaugagugccacagagccgucauaaagcuagauaaccgaaaguagaaaug

SEQ ID NO: 385609 - RNA, 70 nt, Homo sapiens
gcuucaaaacuucaaagaacaggcugauuauuguuagggucuacugcagcuggugacuuuaaguugaagc

SEQ ID NO: 385610 - RNA, 91 nt, Homo sapiens
ggagucuagcagaaauagacaaauuaaaaaugacagcucuggggagaaaagggcuccauuuuccauuucucuaaucugugguuuugacuuc

SEQ ID NO: 385611 - RNA, 58 nt, Homo sapiens
uuuuaugcagagcacagagaguuaggagagagaacagcacuuugugcuccacaaagga

SEQ ID NO: 385612 - RNA, 79 nt, Homo sapiens
ggaguucggaauuuaugcuacauguguuggaaaaaccaaugaaggguuuucagcuagguaacaugauccgauuuacucc

SEQ ID NO: 385613 - RNA, 67 nt, Homo sapiens
cuuccugggcaaugcggcuggauagaccugagcaugucaguucuuuccacacuguaugcccaugagg

SEQ ID NO: 385614 - RNA, 86 nt, Homo sapiens
uccaagucuuugcuauugugaguagugcugcaguaaacacauguguacaugugucuuuagagcagcaugauuuauauuccuuuggg

SEQ ID NO: 385615 - RNA, 74 nt, Homo sapiens
gaagaaaauuuugguuacauaguugagcuuuguucaaaaggugaauaucagcucugauuggccaaggucucuuu

SEQ ID NO: 385616 - RNA, 79 nt, Homo sapiens
caagacagugggggcagaaggcuggcaaccuagcaacaauacucccuugccacuucucuugccccauucuacucuuuug

SEQ ID NO: 385617 - RNA, 88 nt, Homo sapiens
cuuuccugaggcuccgcuccuugccccaccaugugacugccaugugagcagugaccacagaaagugagggagcaagugaucagggagg

SEQ ID NO: 385618 - RNA, 80 nt, Homo sapiens
ccaagaauagggcacgagaugugagccugccaaggguacucccaggucuggcaucuugguucuuuccgcugcguucuugg

SEQ ID NO: 385619 - RNA, 57 nt, Homo sapiens
guguugggauuacaggcaugagccacugcaccuggcccuauguaguuuucucaauau

SEQ ID NO: 385620 - RNA, 77 nt, Homo sapiens
guuuggaaaccuguagccacagguggcgaggaaauuaaagagugcuuggguggcuugauggcacaagguuucugaac

SEQ ID NO: 385621 - RNA, 61 nt, Homo sapiens
augacuaaaggguuuauguugaagcuacuuaauguguauguguaguaggcccuuuguuuau

SEQ ID NO: 385622 - RNA, 55 nt, Homo sapiens
caaaggcuguuauaggccaggagugguggcucacgccuguaaucccagcacuuug

SEQ ID NO: 385623 - RNA, 108 nt, Homo sapiens
gaaguauugaggauagcauuucaaaaaugguauuuugauuauuuuuuaaagacuucuuuuugagauacauaauuaugaaugaaaugaugugcugucuguguuugcuuc

SEQ ID NO: 385624 - RNA, 60 nt, Homo sapiens
auaccauguauguuucuccauuguuuggcaaaagacaugugugugcacauacaugugugu

SEQ ID NO: 385625 - RNA, 69 nt, Homo sapiens
uccaaguuagugacauugcugggaaugcuguaauucaucacagcagggcuauagaaugucauggcugga

SEQ ID NO: 385626 - RNA, 93 nt, Homo sapiens
cucacccguucuacuggcaacuggaguuuguucaagaaauaccugaguugguucuuuaacugucgaguucgauuguccaaguggaaggguggg

SEQ ID NO: 385627 - RNA, 81 nt, Homo sapiens
ucaggaggacaauauggagacugaucccucuuuccucuccucugaggaggucgaggaagcucucagcucucuuuccccuga

SEQ ID NO: 385628 - RNA, 62 nt, Homo sapiens
gcaggcagaaaaaugugaaaagagagauuggccuagucucccagccuacaucuuucuccugu

SEQ ID NO: 385629 - RNA, 98 nt, Homo sapiens
gaggcaggagaauugcuugaacccagaggcagagguugcagugagccgagaucaugccauugcacucuagccuuggcgacagaaugagacuccgucuc

SEQ ID NO: 385630 - RNA, 76 nt, Homo sapiens
ggcaugaguucugggaagguugguucugccaaacauucauaugcguagagcacauuaucauuuccaaagcuuggcc

SEQ ID NO: 385631 - RNA, 71 nt, Homo sapiens
aauugugauaggaaauuuagcagcgauauaguauucuuaucaaauauacagucuguuagauuuccucaauu

SEQ ID NO: 385632 - RNA, 59 nt, Homo sapiens
aguaauacuagcuagcagggauaauuuagaaaaaugcuuugugcuaaugcuagauuacu

SEQ ID NO: 385633 - RNA, 56 nt, Homo sapiens
uugagauggaguuucacucuugucacccaggcuggagugcaauggcccaaucucga

SEQ ID NO: 385634 - RNA, 57 nt, Homo sapiens
acuggcaugagaugguaucucauugugguuuugauuugcauaucucuaaugaccagu

SEQ ID NO: 385635 - RNA, 56 nt, Homo sapiens
gguuguccaguguuacacaggauuucuaaaauucuugguaaugggcugguauaacc

SEQ ID NO: 385636 - RNA, 71 nt, Homo sapiens
gccuuagcaguucauuguugugugaaagugaaugagcuucaugguuuacucaaccgugagccugcuuuggc

SEQ ID NO: 385637 - RNA, 76 nt, Homo sapiens
cucucuggcagaguuaguagccuuugacaauccugagcccuagaaauauugugaaggccuuaacauuuccagaggg

SEQ ID NO: 385638 - RNA, 90 nt, Homo sapiens
gaauuuuguauccugaagcuuuauuuaaguaaucuguuaguucuagaagcacuuugauggagucuuuaggguuuuccaaguaucgaauuc

SEQ ID NO: 385639 - RNA, 57 nt, Homo sapiens
gggaucccaagaugagcagggccucgaaaucuccagucaguaugcuccuuggauccc

SEQ ID NO: 385640 - RNA, 63 nt, Homo sapiens
gguccaugaauuccuuggcaaaacacccaaguugaaaaccucacuugacuguccagguggacc

SEQ ID NO: 385641 - RNA, 76 nt, Homo sapiens
uccugaaaaucccagguguccuggaguugguacugucagcaucuucaaacauccccaccagggacuuucuauaggg

SEQ ID NO: 385642 - RNA, 88 nt, Homo sapiens
guaauuaagaucugaguccugaagaccuuccucuggagccucggugaauugacuuaaucuagauggguccaggugcuggggugauuac

SEQ ID NO: 385643 - RNA, 70 nt, Homo sapiens
caguuugucuugccaaugccauuugauuugcggggacauggugugucuuugaguggagcgaggcagauug

SEQ ID NO: 385644 - RNA, 87 nt, Homo sapiens
ucucaggcagugacccucuagauggaagcacugucuguuguauaaaagaaaagaucgugcaucccuuuagaguguuacuguuugaga

SEQ ID NO: 385645 - RNA, 71 nt, Homo sapiens
ggugagcauguuuaggcuuuauuacagggucucagaugaagguuugaccuguaauaagucacaugucugcc

SEQ ID NO: 385646 - RNA, 66 nt, Homo sapiens
aucaaaucuccagaaccugucugugaauauuaccuuauuugcaaaauggguguuugcagaugugau

SEQ ID NO: 385647 - RNA, 66 nt, Homo sapiens
guauuucuaguucuagaucuuugaggaauugccacacugucuuccacaauggcugaacuaguuuac

SEQ ID NO: 385648 - RNA, 95 nt, Homo sapiens
aaucuugccuacuacuguuguuuuggggcagauggaauaaaaaauggugaguggaaacguccauuuguuuccagagcacuucauuggaggagauu

SEQ ID NO: 385649 - RNA, 81 nt, Homo sapiens
gggcugauuacaagguacacuuaaacugcuaaaaugauaguucauguuauucauagugcuaagguguaucugguaaugccc

SEQ ID NO: 385650 - RNA, 86 nt, Homo sapiens
gggcuggauugaaugguacaguuuagugcuuugagaaaacuucauaugguuuuccauagagauuguacuaauucaccuucccaccc

SEQ ID NO: 385651 - RNA, 60 nt, Homo sapiens
guccaggaguuugaggcugcagugagcuaugauuauaucacugcacuccagcuugugggc

SEQ ID NO: 385652 - RNA, 128 nt, Homo sapiens
gaguugauuuuuguagauaauggaaaggaagggauucaguuucaauauucugcauauggcuagacaguuuuaccagcaccauuuguugaauagggaguccuuuccccauugcuuguuucugucaauuu

SEQ ID NO: 385653 - RNA, 58 nt, Homo sapiens
uugauauuaaguacugaagugggagaguucccugaccccuucacaggacuugugucag

SEQ ID NO: 385654 - RNA, 57 nt, Homo sapiens
guuggaauuaaaaggcaaguauggccaggcacaguggcucaugccuguaauuccagc

SEQ ID NO: 385655 - RNA, 64 nt, Homo sapiens
ugggcaagugacuuggcuucucuguauugccucaucuguaaaaugaagcuaguacuugaaccua

SEQ ID NO: 385656 - RNA, 89 nt, Homo sapiens
ggagaaucgcuugaaccugggaggcggagguugcagugagcugagauagcaccauuguacuccagccuggacaacaggagcgaaacucc

SEQ ID NO: 385657 - RNA, 69 nt, Homo sapiens
cacuugaaccuggguggagguugcagugagcagagauagcgccacugcacuccagcccaggugacagug

SEQ ID NO: 385658 - RNA, 70 nt, Homo sapiens
aguuuagagaaauggcauuuuauuuccuaguuuuuuaaguaggaaauguuggucccauuucuuauagacu

SEQ ID NO: 385659 - RNA, 71 nt, Homo sapiens
caaagaagagacccagagccagcaaaugagacaugaguuuguuuguuuguuugagauggagucucacuuug

SEQ ID NO: 385660 - RNA, 74 nt, Homo sapiens
ccugcacuucuuucucuguguuauucauaagauaugagagucuugagucugagaugaugggauaagagggcagg

SEQ ID NO: 385661 - RNA, 99 nt, Homo sapiens
gaggcagaagaaucgcuugaacccgggagguggagguugcagugagccgagaucgcgccacugcacuccagcuugggugacagagugagacuuugucuc

SEQ ID NO: 385662 - RNA, 64 nt, Homo sapiens
acaucucaguucaggcuggccacauuucuucaaguugaaauguggcuaacccaaauugagaugu

SEQ ID NO: 385663 - RNA, 71 nt, Homo sapiens
uuacugucugagggcuccauuaaaucaccucagguuccuugagaugauuuaauggagcccacagacacuaa

SEQ ID NO: 385664 - RNA, 57 nt, Homo sapiens
ccuguugauguuggcuuugguugugugacuugcauuggccaaugggacgucagcagg

SEQ ID NO: 385665 - RNA, 98 nt, Homo sapiens
gaggcaggagaaucacuugaaccugcgaggcggagguugcaguaagccgagacugugccacugcacuccggccuggcaacagagugagacuccgucuc

SEQ ID NO: 385666 - RNA, 66 nt, Homo sapiens
auuuuucuuuaauuuaugagaugaaaaaucacaacauaugugaugaaucucugggcaaaggaaaau

SEQ ID NO: 385667 - RNA, 76 nt, Homo sapiens
ucuguaaccuagcagacacuuccagagaguucuccagcaaauuuucugccagugugaugcuaacaguggaagcaga

SEQ ID NO: 385668 - RNA, 71 nt, Homo sapiens
gggauaagaauaucauucagaaagacccuuaacaaaacuuacaguuauggguuucagagggugauaguccc

SEQ ID NO: 385669 - RNA, 78 nt, Homo sapiens
gcgggaccaucugugagacugguccugaacccaguggccuccaucucugggggcaguuccaucuucaguggucucugc

SEQ ID NO: 385670 - RNA, 87 nt, Homo sapiens
ucucaagcugugggucugcaaagggaagcccuuucuguugucuaaaagaagagaaagcgcuucccuuugcuggauuacgguuugaga

SEQ ID NO: 385671 - RNA, 56 nt, Homo sapiens
uagcuuucaggaaucagguugcagacucagaucaaaagcuccauuccugaaggcug

SEQ ID NO: 385672 - RNA, 62 nt, Homo sapiens
ucaguagagacaggauuucaccauguuggccaugcuggucuugaacuccuguccucaauuga

SEQ ID NO: 385673 - RNA, 66 nt, Homo sapiens
uucuaugcuaugcuauuacucagaaguuaauauugauauuaacaucuagaguuuuggugcuaagaa

SEQ ID NO: 385674 - RNA, 55 nt, Homo sapiens
caguggccugacgacuggucacuggcugagccgucaccaccuuccaggaccacug

SEQ ID NO: 385675 - RNA, 74 nt, Homo sapiens
caaagucuucaguugauucugauauauccaguuuuuggacuuacuguuugccuugagagucaauaggggcuuug

SEQ ID NO: 385676 - RNA, 101 nt, Homo sapiens
ugaggcaggaggaucgcuugaacccaggauggggagguugcagugagcugagaucaugccacuguacuccagccugggugacagagcaagacuccaucuca

SEQ ID NO: 385677 - RNA, 121 nt, Homo sapiens
gaguggaaguacugggaaaaaggguauauauauuuugaauuuugauugauauuacugaacuccccuuucaaagagguuauagaguguauacuaccaugacauuaucuccgauuaucuauuu

SEQ ID NO: 385678 - RNA, 60 nt, Homo sapiens
aauggauauaucauuuaguuaaccauggguauauucuguuaagugaauguguacucuauu

SEQ ID NO: 385679 - RNA, 55 nt, Homo sapiens
gaaggccauugcguccugggauucuauuuuuugaccugauguucacuuggccuuc

SEQ ID NO: 385680 - RNA, 61 nt, Homo sapiens
aucuuguuaguuaugugcggguuugguuauuaacagaccuuguagcaaaccuaacauaggu

SEQ ID NO: 385681 - RNA, 73 nt, Homo sapiens
gggucuaggcauggcacuguguccuggggucagccuggcaggcugaaccccagcagaggccaggcgaugaccu

SEQ ID NO: 385682 - RNA, 58 nt, Homo sapiens
acaguacucagauguuguagggagugucauacaauggccagcacgcacaugagacugu

SEQ ID NO: 385683 - RNA, 55 nt, Homo sapiens
uuggugugucuccuguugcacuaucuuccuaagaaccugcagcaucaguacccag

SEQ ID NO: 385684 - RNA, 59 nt, Homo sapiens
ccgugguaacucagaguacacagcucuugguauguggguuagguacucagugaccaugg

SEQ ID NO: 385685 - RNA, 119 nt, Homo sapiens
ucugucugcuguguuaacucagcaaggguugugguaggaaagugcaaauguagagguccuauuacuauaugaacauguccuacugaacaaugccaggcgacagaguuacauagugaaga

SEQ ID NO: 385686 - RNA, 81 nt, Homo sapiens
uguucucugcuauguuucuaaucaguacagugaccauauauuguuaaguaaacauugagagacaagaucuggcagaggaca

SEQ ID NO: 385687 - RNA, 77 nt, Homo sapiens
gugagauuguccugucauagauguugugccucuucccauagaaugccauagucauagauggcagggucuguccucau

SEQ ID NO: 385688 - RNA, 55 nt, Homo sapiens
gcuacugcauccagccuauuuuuuuaucuuuuaaagacuagucaggugcaguggu

SEQ ID NO: 385689 - RNA, 65 nt, Homo sapiens
ggggaccggcagggaguaaggguuaggugcuuguagucuugcuacccuucgucucucugguucuc

SEQ ID NO: 385690 - RNA, 83 nt, Homo sapiens
uuuuauaaaaacaugaaaucacaauaaucccacuauauaccagcauaaccggguucagcuagaauuucauguuuuuggugaga

SEQ ID NO: 385691 - RNA, 85 nt, Homo sapiens
uauuuagauagucauaugguuuuauguucuucauucuacugauaugaugauauaugacauggaaccaugcuugcuuucuuggaua

SEQ ID NO: 385692 - RNA, 70 nt, Homo sapiens
uugaggcugcagggaucaugauugcgccacagcacuguagccugggcaagagagcaugacccugucucaa

SEQ ID NO: 385693 - RNA, 68 nt, Homo sapiens
agguggguggaucacuugagguuagaaguuggagaccagccuggccaacauggugaauccacauaucu

SEQ ID NO: 385694 - RNA, 73 nt, Homo sapiens
gcugaagucacuucuuaggaaaggagucaauaaaguuugaauuguucccagucaaacgaaggacuuccuuagu

SEQ ID NO: 385695 - RNA, 84 nt, Homo sapiens
uuugagaccagguuaugaaacuggcuaauuuuuguauuuuuguuaaauaccgaaauucacuguguugccaaggcuggucucgaa

SEQ ID NO: 385696 - RNA, 100 nt, Homo sapiens
ugaccauguggagaagagcugcccuguugcccugaauacauauccaggccugacaaacucauauguuguucggcuguaacaugccugucucugcugguca

SEQ ID NO: 385697 - RNA, 73 nt, Homo sapiens
gagcucagaucuuucaguuuucugccaaaaacguuuauacuuuuuggcagaaaacuaaaagguauaaaaguuu

SEQ ID NO: 385698 - RNA, 97 nt, Homo sapiens
ugauugcguaauuauuugguuacuugaauagcuaugcuuucaugauccuuuuaauguguuguaaguaguuauucaaggaaucaaaaaugaagcauca

SEQ ID NO: 385699 - RNA, 60 nt, Homo sapiens
aacugcguuuucacucaacagcauuuguuuaccagaugcuauguagaugagggcccaguu

SEQ ID NO: 385700 - RNA, 63 nt, Homo sapiens
auccauucugacugguguccuuauaagaagaugagguuaggauacagacacagucagaggggu

SEQ ID NO: 385701 - RNA, 84 nt, Homo sapiens
cgcauggcucuccacucaaggugcugagacaggagcccugggaacuacgggcucuuccccgcagggccucaaguggacugugug

SEQ ID NO: 385702 - RNA, 112 nt, Homo sapiens
cugcuuaccccuaauuucuuacuuuucuacagugaacgauuucuaaauuacuuauuuucuaacuuuuaggagucuuagcugugaagggaagaaaaaaaacaugggauggcag

SEQ ID NO: 385703 - RNA, 70 nt, Homo sapiens
guuucacuaaaacauagccagucaguguauguugaauacccacugggugccauauguuugcuggugaaac

SEQ ID NO: 385704 - RNA, 60 nt, Homo sapiens
acugugaucaugauccugaagcauuucuucaaagaauuguaauaggagaugaaucauggu

SEQ ID NO: 385705 - RNA, 56 nt, Homo sapiens
ugaaugcaucauguagggcucacaguagaucuuacagcccagacaugaagcauuca

SEQ ID NO: 385706 - RNA, 106 nt, Homo sapiens
ucccaccaaaggggcaauugaugcugaugccugccagaagcacugcuucaaguuccaguguuuacccauauuagcaucaagucugccacuauucauuuuggaggga

SEQ ID NO: 385707 - RNA, 66 nt, Homo sapiens
auauucucccauccguacacggauuguauagaggccuucaucuucuuuguugagaugggaaaaugu

SEQ ID NO: 385708 - RNA, 75 nt, Homo sapiens
uucaguacuagauggcaccuuaaacacagguuugccucuauucuagcaaacaaucagagugcugucuguccugag

SEQ ID NO: 385709 - RNA, 81 nt, Homo sapiens
accccgcccaacuagucacaggaguugaaggaugacacaguagagaacugggauucuggaguccuguggcuggucuggggu

SEQ ID NO: 385710 - RNA, 69 nt, Homo sapiens
gcuggcaugagguaagugcuuuauuaggaucucuuaaauuauuuccuugaaucuacuugcccauuuagc

SEQ ID NO: 385711 - RNA, 69 nt, Homo sapiens
ggcauugucuacauuaggguuauaugaguucacucgcaagggguugcuguaugguugaagugacaagcc

SEQ ID NO: 385712 - RNA, 64 nt, Homo sapiens
uguguguguguggacaggcaggguggggagggauaaacacauuaaaaauguccaaauaaauaca

SEQ ID NO: 385713 - RNA, 59 nt, Homo sapiens
gucggggaauuccugucagaguuccagaguuccauggugcuuuuucggaagucuuuggc

SEQ ID NO: 385714 - RNA, 87 nt, Homo sapiens
guugaaagugccaacugguuucuuuuaguuguguaugaucauuaauaggguaaaauaaacuaaagaaggaacuguucaauuuucaac

SEQ ID NO: 385715 - RNA, 69 nt, Homo sapiens
gggcaacaugccgaaaccacgucucuacuuaaaauccaaaaaauuagccaggcgugguggugugugccu

SEQ ID NO: 385716 - RNA, 75 nt, Homo sapiens
gcuauugugaguagugcugcaauaaacauacgugugcauguguguuuauagcagcaugauuuauaauccuuuggc

SEQ ID NO: 385717 - RNA, 56 nt, Homo sapiens
guuucaggcaccauugucauugauaacaucuuaucaggagacaggguuuuugagau

SEQ ID NO: 385718 - RNA, 76 nt, Homo sapiens
auggaccauagcauagucagcuucgcugauucagcucuuuucacuagucaccguggcugaacuauuuugucaccau

SEQ ID NO: 385719 - RNA, 67 nt, Homo sapiens
ucuccacuuuggccagagggcaauuagcugugauguucucaagcguugaauccuguggccuauaaga

SEQ ID NO: 385720 - RNA, 57 nt, Homo sapiens
uuaggaucacagaaaauccucuacugaagaacacauagguaggaucugugaaucuga

SEQ ID NO: 385721 - RNA, 74 nt, Homo sapiens
cacuuuucuaacagaugacaagaguguucagggagagguguuucuucaccuuuuuuuuacucuucucaaaagug

SEQ ID NO: 385722 - RNA, 81 nt, Homo sapiens
gaacucuccacauuggaaaggauccccccagaccagagaggcguaaggagggggcuggugcuuuccaguguugaacuguuc

SEQ ID NO: 385723 - RNA, 75 nt, Homo sapiens
gcuucuuaagagaaaaaugcugacuaacccagugugaagaauucauucacauggaaaaguccaguaaaaagaagu

SEQ ID NO: 385724 - RNA, 71 nt, Homo sapiens
guggauugcuuaagucccuguauuaguccguucucaugcugcuaauacauauuggagacuggguaauuuau

SEQ ID NO: 385725 - RNA, 80 nt, Homo sapiens
uucccacucuuggaucucgaagacuaagcaucucugaucaagcaucucugaucaagcaucuuggucuacgauccugggag

SEQ ID NO: 385726 - RNA, 79 nt, Homo sapiens
guuguuacaaugaauauguacucauguguugcuuguagaaauucuggagugcaguggcauggucauaacucauagcagc

SEQ ID NO: 385727 - RNA, 57 nt, Homo sapiens
uguguccauguguucucauguucaacucccacuuaugagugagaacauguguacaca

SEQ ID NO: 385728 - RNA, 57 nt, Homo sapiens
aggcuucaccauguuggccaggcuggucuccaacuccugaucacaggugagcugccu

SEQ ID NO: 385729 - RNA, 60 nt, Homo sapiens
uagugaaggucaugaugcaaaagcaaugcuaggcuuuugcaauaguccuggccuguacua

SEQ ID NO: 385730 - RNA, 108 nt, Homo sapiens
gggcuaggcugagcagcagaggagagauuggcuguggagaguauagaugacacaugaggccaggugaucucugagaaaaguuucucccaucuguugcuuagauugccc

SEQ ID NO: 385731 - RNA, 58 nt, Homo sapiens
aacuucugccuggacauccaguuguuucuauacauccugugaaaucuaggcagagguu

SEQ ID NO: 385732 - RNA, 64 nt, Homo sapiens
uauagauauauauaggugauuguauguacacacuauauauagcacaucuguguguacauuugug

SEQ ID NO: 385733 - RNA, 62 nt, Homo sapiens
guuccuauucuagacguuccauauauggaauuccacagauggaaugccauuuauaauggaau

SEQ ID NO: 385734 - RNA, 129 nt, Homo sapiens
gagaaaacugaggcacaggaaagaaaguaccuuauccaagaucauacagcuaguaaguguaagagauccaucgucuccuguacuuucuaaguuguuucaucaguuagguuccuucucucuuauuuucuu

SEQ ID NO: 385735 - RNA, 129 nt, Homo sapiens
uaaagaauaaugaguucauaccuuuugaggcuuugugauugauuaaugugugcuaacuuggccaaguuccugguauguauucaauaaauggaaagugacgaaauguuuagaaugauggcaaguuuuuua

SEQ ID NO: 385736 - RNA, 55 nt, Homo sapiens
cagcuggugggagcuggguucccaagggcaggggaaccaccagcucucccagcug

SEQ ID NO: 385737 - RNA, 79 nt, Homo sapiens
gugcauuuagaagcauugauccacaggcgugcuauuacucagcacuccuguggauacaaugauaaacuucacucagcac

SEQ ID NO: 385738 - RNA, 119 nt, Homo sapiens
ggagacuaaaugugauuacaucaccaccuuacaugccucccugguccgcuguggggaacauugcucuaaagcgcucaaagaggcguuguuggaugggacugucauugcuuuuauccuuc

SEQ ID NO: 385739 - RNA, 81 nt, Homo sapiens
ggguaaguagcuuuagauauaaauacugaaauaauuaaaaaucaaauuaauuuaugucugggguuugcuuuaaaauaaccc

SEQ ID NO: 385740 - RNA, 59 nt, Homo sapiens
cugauaguucucuuuagaguuuaggguaggaugauacugaaggacuguagaacuauuag

SEQ ID NO: 385741 - RNA, 69 nt, Homo sapiens
auuucugcagcuaaggacccccugguugccucuguggcccagcaaucacaggucuuggcugcaugaaau

SEQ ID NO: 385742 - RNA, 65 nt, Homo sapiens
uuuacaacauaggccccaagaagaaggcuuuguuggacuugacucugugcggucuguguuaugaa

SEQ ID NO: 385743 - RNA, 78 nt, Homo sapiens
uccuauuucacagagagaacucaaaccauuggcuagaaacuucuucaaaaucuggucugauuuuucaucuguugggga

SEQ ID NO: 385744 - RNA, 101 nt, Homo sapiens
auccauacgcauuaucucauuuuucuucacaccugccuaguggcacaguuacugucaauugucaccauuuguaggugaggagacugaggcuuagagggggu

SEQ ID NO: 385745 - RNA, 79 nt, Homo sapiens
aaggaauugcuuaucccacugcauagcuggcuugaucugcuagugauaacaggaaugcaauggaaaggacaauuaccuu

SEQ ID NO: 385746 - RNA, 59 nt, Homo sapiens
cucacccuguguuuugcguuugccccaccucauggugcacacgcgccacccagggugag

SEQ ID NO: 385747 - RNA, 62 nt, Homo sapiens
cuuuuggugguucugaugcaggcuaaacuuagagaaccccuaguauaaagagaagccaggag

SEQ ID NO: 385748 - RNA, 64 nt, Homo sapiens
guugauuauuuugacuaccaggaauguucuuuucuugaaagaaucucuguuggucagagucaac

SEQ ID NO: 385749 - RNA, 90 nt, Homo sapiens
gugggcauuugagaacugguagcacuugugauuaugaguaauaauguucaccuccccugcuccucacugucugccaggucucugccucac

SEQ ID NO: 385750 - RNA, 99 nt, Homo sapiens
gggaucagaagccagggaacuuugcaauguugugauggugaaauauggguuaauuauauuugcuucaauauauuuucagaauuccacgugcugauaccc

SEQ ID NO: 385751 - RNA, 91 nt, Homo sapiens
caguaugcugcucaauuuuuauuccacuuccacuaguuucucuucaaagagggcucugucuggaagggaacccuggguuggugcauuucug

SEQ ID NO: 385752 - RNA, 61 nt, Homo sapiens
ucauuucuccuaagugaaauauacuguuuguuuuccugugugugcauggagggggcaguga

SEQ ID NO: 385753 - RNA, 79 nt, Homo sapiens
cuuuuugggaacuggagcaaaggugacucuuguuauguuuuagcaaacagacugguggcauuuugcuccugcccuagag

SEQ ID NO: 385754 - RNA, 84 nt, Homo sapiens
auccugucucagcguccuaaguagcugggaguacaggcaugcaucacuaugccugccuuuucauauuuuuaguagagacagggu

SEQ ID NO: 385755 - RNA, 68 nt, Homo sapiens
ugugccagugcugucuucuccaggguuaucucugcuacuuuuuuuccuggagugcaacacuagguaua

SEQ ID NO: 385756 - RNA, 57 nt, Homo sapiens
ugugagucuaacuuuuggaugaggaaaagaguaguuccuguccuagaggaguucaca

SEQ ID NO: 385757 - RNA, 70 nt, Homo sapiens
aggagagggcaagagaccugagugucauucuguuauucaggagacaaaacucugguccuuucuuuuuccu

SEQ ID NO: 385758 - RNA, 109 nt, Homo sapiens
ucccuggugugaaacacacuucaucaugguggauuaucuuuuugauaugcuguuggauucagucagcuaguaauuuauugaagauuuuugcaucuguguucaucaggga

SEQ ID NO: 385759 - RNA, 64 nt, Homo sapiens
uuugcaggugguuuaugcaagacaauccauguuggaaaucgagucagcagaccaacucugcaaa

SEQ ID NO: 385760 - RNA, 66 nt, Homo sapiens
cacaguuauuccuauacuggauuuuaggucucugaagaacugcugguguuuaggaauaagaaugug

SEQ ID NO: 385761 - RNA, 88 nt, Homo sapiens
cccaggugauuccagugugcaggcaaguuugacagucagugcucuagaagagcuucuuaaacuucaccgugcacagcaguuaccuggg

SEQ ID NO: 385762 - RNA, 83 nt, Homo sapiens
auaauaucacagggagugugcacacaugguauacagucccugcgacaugguguacacaugguguacacucccugugauauugu

SEQ ID NO: 385763 - RNA, 78 nt, Homo sapiens
aaauggaaaugaaguauuaggacacauuuaugcuuuucacuugagauaaauguggaagucauacauaauuuacuauuu

SEQ ID NO: 385764 - RNA, 61 nt, Homo sapiens
gaguuacaggaaugucagguugcugucugucuacauaugcgcacucuggauuucuggacuc

SEQ ID NO: 385765 - RNA, 80 nt, Homo sapiens
ugcaggaauaaaaagauucauauucugaucaucuugguguugcacgcucugucaugguguuaauuuuccugauuuuugca

SEQ ID NO: 385766 - RNA, 72 nt, Homo sapiens
guuucaacucacagagucagaugagccaccaagguccaagugagcucaccuuaccucuggagcuaaggaaac

SEQ ID NO: 385767 - RNA, 70 nt, Homo sapiens
acaagcuugauauguguuuuagucaggguuuuccagagagacacaccccacugaacauauauacaguugu

SEQ ID NO: 385768 - RNA, 92 nt, Homo sapiens
uagaaaugugcaaaagucauaacugcauuuucugauugugugugcgauggcauagcaaucaaaugaagauguaaaagcuuuuauuguuuuua

SEQ ID NO: 385769 - RNA, 76 nt, Homo sapiens
uccaaauuacuguauacuucugaaaauagcuauuaaacugaccagaauaaggcuauagagaugugcauuaaaugga

SEQ ID NO: 385770 - RNA, 114 nt, Homo sapiens
acaaaguucccucaguguguggguuuuucugugagcgguaaaggucuugggggaggcugugguguccaggucucaguacuugcacagaagaacuugcuauacugcagauuuugu

SEQ ID NO: 385771 - RNA, 87 nt, Homo sapiens
ccccaguguccucguauccuguuuagcucucccacgaucuaacccaguccucuguggaccaggcuuauaggauauggucaacugggg

SEQ ID NO: 385772 - RNA, 55 nt, Homo sapiens
ugagccucaguaaagcaaggugaauauaauuguuuagcuguuguuaugagguuua

SEQ ID NO: 385773 - RNA, 78 nt, Homo sapiens
gcagaugcucaguggguguaauuuucucucucuuccuauuugugagucgacaugaaaacugcuucucuggguuucugc

SEQ ID NO: 385774 - RNA, 115 nt, Homo sapiens
gaaagaaaugaagaaacagaugccugaagcauuugggaaaguaacuccacugcagcugaaauacuggauguugcaggguccauugucccaaguuaguauagguugcauugauuuc

SEQ ID NO: 385775 - RNA, 90 nt, Homo sapiens
uugacuggaauggacccaaggaauacccucccuuuuugccuauugaagaggcuaagcaggagaugggugcuuuucauguuagccagucaa

SEQ ID NO: 385776 - RNA, 73 nt, Homo sapiens
ccgagggaaaagugcaguauuugggcagaaguguaccacuccuccagguacagucacucacggcuucccuugg

SEQ ID NO: 385777 - RNA, 62 nt, Homo sapiens
gucauugcaaugggaaacuaugaaaccuuuagaaaacaugguuuuauggaacauuuaaugac

SEQ ID NO: 385778 - RNA, 58 nt, Homo sapiens
agaggagacuuggauuuccacuagugccaugaaugacagugggcaaauccuuuccucu

SEQ ID NO: 385779 - RNA, 58 nt, Homo sapiens
ugagaugaaaucuugcucugucacccaaucuggagugcaguggcaugauuucagcuca

SEQ ID NO: 385780 - RNA, 70 nt, Homo sapiens
uaugcaccaauucuauaauuuauccucacucucugucgguaggguaguaggcuugggauugguccgcgua

SEQ ID NO: 385781 - RNA, 85 nt, Homo sapiens
gccugauuggaaugcacacugagccugccuagggaaauuaggcuuaauucuggcucaguuuccuguauucuccuguaauacuggc

SEQ ID NO: 385782 - RNA, 72 nt, Homo sapiens
uuucccugcugaucauaugacaacuaugcauguauauacauacaagcacaaaugcauagauggguagagaga

SEQ ID NO: 385783 - RNA, 56 nt, Homo sapiens
guguguuuguguguguauaugaguguguccauauacauaugcagacacauacauac

SEQ ID NO: 385784 - RNA, 81 nt, Homo sapiens
cagagaucuaauuuaccauuuacuuuuuaaugacaaugguaaguuuuucugucauguaaagaguaaauggugacuuuucug

SEQ ID NO: 385785 - RNA, 101 nt, Homo sapiens
gaagaagguggcgccauaacaggggauugauuggaagucucuugaguucaauugcaagauccuacaguccauucuuuguggccaggcaaucaucuuucuuc

SEQ ID NO: 385786 - RNA, 94 nt, Homo sapiens
aaaggguaauggggaaagcaacuguuacauaguaaacauugacuauuuguucaaaauccauggcuauucuguaaggguuaagucauugcucuuu

SEQ ID NO: 385787 - RNA, 89 nt, Homo sapiens
cauauuuugagaucagguagugugaugcuccuguuuucucuuuauaccuugaagucucaagacagugggcgucacauacaaaaauuaug

SEQ ID NO: 385788 - RNA, 69 nt, Homo sapiens
ccuguaguuuaacuucaauggaaagaauucaagaaauggucucuacgcuguugcaguuauggcugcagg

SEQ ID NO: 385789 - RNA, 57 nt, Homo sapiens
gauguuacuucaugcucuucuguugcugcauaguauuggagguuguauaaguacauc

SEQ ID NO: 385790 - RNA, 55 nt, Homo sapiens
uuagggaggcucaggacaagaggcugaggcacaacuuuccuccaagccucccuaa

SEQ ID NO: 385791 - RNA, 64 nt, Homo sapiens
ugggcaguauggucauuuucacaauauugcuucuuccaaucugugagaaugguauauauuucca

SEQ ID NO: 385792 - RNA, 58 nt, Homo sapiens
ucacaguucagcauggcugaggaguccucaggaaacuuacaaucauggcugaacguga

SEQ ID NO: 385793 - RNA, 96 nt, Homo sapiens
cuuuuuuaaaaauucuaacgacuuccauaauuugcaucucaucuauucaggugagguaggaaaaguuaggaaugguuuguuauuauuuauaaaagg

SEQ ID NO: 385794 - RNA, 60 nt, Homo sapiens
agggagaaacaaaggccuccagaauugcaaguaaccgguaggagguguugauuuuucuuu

SEQ ID NO: 385795 - RNA, 103 nt, Homo sapiens
gucugguggggacuuggagaaccuuuaugucuagcucagggauuguaaacacaccaaucagcacccuguguuuagcugaagguuugugagugcaccaaucgac

SEQ ID NO: 385796 - RNA, 58 nt, Homo sapiens
ugagacggagucucgcucugucgcccaggccggagugcaguggcgcgaucuccgcuca

SEQ ID NO: 385797 - RNA, 80 nt, Homo sapiens
ugacuauugucuuaagugaggucagucuugugaaggauuguguuuuuaaucacaaagcuuggccugcuucugaauaguca

SEQ ID NO: 385798 - RNA, 64 nt, Homo sapiens
uuucugcaccagagaaggcugauguuugaugccagccauggaguucagcagucuggagcagagg

SEQ ID NO: 385799 - RNA, 59 nt, Homo sapiens
uucucaauggcaacuuguugcuuggauucucaucagaagcaaauaauugucuuugaggg

SEQ ID NO: 385800 - RNA, 82 nt, Homo sapiens
ccaucugcuuuguuaaaacacagccacacucauucacuuaugucuugucuguggcuguauuuuaacuggaagggcggaaugg

SEQ ID NO: 385801 - RNA, 104 nt, Homo sapiens
gauuguauuuugcaaugugagaagaacgugauauuuagggggccgggauggaauaauaugguuuggaugucuguuuccuccaaaugucaugucaaaauguaauc

SEQ ID NO: 385802 - RNA, 68 nt, Homo sapiens
gaaccucuauacuguuuucuauaguggcuguaccaagcuacauugccacuaacaguauacaagaguuc

SEQ ID NO: 385803 - RNA, 82 nt, Homo sapiens
ucaaaaaucaguuggcuauagauacauggauuaauuuuugcauucccuguuccacuaguuugugucuauugugcuguuuugg

SEQ ID NO: 385804 - RNA, 82 nt, Homo sapiens
gaaucaaggaguuggacuaagaacuuaaaauaauucuuccacacugagagugguuuguucuggucuagcaauccucucauuc

SEQ ID NO: 385805 - RNA, 65 nt, Homo sapiens
gaaccaugcaguauuugccccucugugacugguuuauuucacauagcauaaugucugcaagguuc

SEQ ID NO: 385806 - RNA, 62 nt, Homo sapiens
agcaaauuguugaucuacaguaagggcugagcagagcagauccuugagaacaucaauuugcu

SEQ ID NO: 385807 - RNA, 61 nt, Homo sapiens
ggugaugguuaccacaaauuauaagauaggaaaccucucuuuuggguauggagccaucauu

SEQ ID NO: 385808 - RNA, 57 nt, Homo sapiens
caguucagggguaccucuauauaccuguguguguaugugguuuuagguguugaacug

SEQ ID NO: 385809 - RNA, 62 nt, Homo sapiens
ggagaaugaugauuuccaauuucauccaugucccuacaaaggacaugaacucaucauuuuuu

SEQ ID NO: 385810 - RNA, 75 nt, Homo sapiens
gcugccuuuuccccgauuuaaaccuuaucacaguccuuggagggugagauaaggaaauugaggcucagggacagc

SEQ ID NO: 385811 - RNA, 77 nt, Homo sapiens
caucacauauucucacuuauuucuggguuccaaaaaucacaauaauuuaacucauggagauagagaauagaagggug

SEQ ID NO: 385812 - RNA, 55 nt, Homo sapiens
uugagaugaagucuugcucucucacccaagauggagugcaauggcgugaucucag

SEQ ID NO: 385813 - RNA, 83 nt, Homo sapiens
uuguauaauaaauugcucagaagcugaaauuugaccucagaugacauugaguucaaaucucagcucuguuauuuauggagcag

SEQ ID NO: 385814 - RNA, 71 nt, Homo sapiens
uagggauguaauuucagaguuuuggaaaaacuuguaucccguaguccuugagccuuaaauuauaaacccua

SEQ ID NO: 385815 - RNA, 58 nt, Homo sapiens
guaccugagaaguuccaggggagcaggcuggagaggcaccccuggggguuucugguac

SEQ ID NO: 385816 - RNA, 100 nt, Homo sapiens
acucuuuucuugcuuggucuuugugcuuuuuaaauagcuuccuuacaaagaaagaaagacuaaaggaaagagcagggaaagaaagcuaaagaagcagagu

SEQ ID NO: 385817 - RNA, 96 nt, Homo sapiens
ccauccggaucaguuaucauucuuuucuggcaggccuuauuauauugaucuccuuauuuaugagacuagaagagaauaauaaucgaugcuuugugg

SEQ ID NO: 385818 - RNA, 84 nt, Homo sapiens
ugugauuucccggagcaucucauucccauuacuucaaaaauagcacagaacuguucugauggcacagugaguuccagggauaca

SEQ ID NO: 385819 - RNA, 99 nt, Homo sapiens
aggaauuuuuaaaacauuaguuacagaauguacagagguuuaugguuuauuucccagauagcuuguguuuuucuaaguaucugauuuuuauuuauuucu

SEQ ID NO: 385820 - RNA, 93 nt, Homo sapiens
gcgauucuacuguuuggaggggaguaaagccugcuuuuaaugcgcagcagaaugaaccagggcuuugguucaaccaggcaauuggaaggucgc

SEQ ID NO: 385821 - RNA, 83 nt, Homo sapiens
ugggaacaaagucuguuacagcuauuucuguaggaaacugcuacacuccuuaccagaacggguguaacauuuuguaaguccca

SEQ ID NO: 385822 - RNA, 72 nt, Homo sapiens
cugggugugguggugccugccuguagucccagcuacuugggaggcuaaggcagggcaaucauuugagcccag

SEQ ID NO: 385823 - RNA, 62 nt, Homo sapiens
uagaucgcugagaaagggacuuucacuucuuccugccucgguggcucccuuuccagugucua

SEQ ID NO: 385824 - RNA, 69 nt, Homo sapiens
agaugaugauggcgcuuuaucuucuucagucuucccacgaugucugugaaguaggugcuguuauuaucu

SEQ ID NO: 385825 - RNA, 62 nt, Homo sapiens
gauaaaguauuggguacuaugcacaccugggugacgggaucaguuguacuccaaaccuuauc

SEQ ID NO: 385826 - RNA, 60 nt, Homo sapiens
acagguugauuguuucuuuugcuguguuaaagacuuuguaguuugaugcaauccacuugu

SEQ ID NO: 385827 - RNA, 55 nt, Homo sapiens
uugagauggaguguugcucugucacccaggcuagagugcagugcugccaucucgg

SEQ ID NO: 385828 - RNA, 75 nt, Homo sapiens
uaggacacagaccuggauggaagaccacccuccaccccacccacaggggcucuuccaaggccaggcucuguccua

SEQ ID NO: 385829 - RNA, 128 nt, Homo sapiens
cucaggugauccacccaccuuggccucccaaagugcugggauuacaggcgugagccaccgugccugacugguaguucacacuugcaaccccagcacuuugggagguggaggugggaggauaccuugag

SEQ ID NO: 385830 - RNA, 60 nt, Homo sapiens
ccacacugucuuggugggaaacucagucaaguuauuuccacucucaccuggacagagugg

SEQ ID NO: 385831 - RNA, 69 nt, Homo sapiens
gcuacaguuaugugagggccaccagguauaaauagaaucugauggcagaauacguaagugugaacaagc

SEQ ID NO: 385832 - RNA, 67 nt, Homo sapiens
ucugagugguaguacaggagauaccggggaggguucccuggcuuuuguugguaccaccuuauccaga

SEQ ID NO: 385833 - RNA, 61 nt, Homo sapiens
uuaggagcugaaguccuugaugccccucucagcagguguauccugaaguucucagcacuaa

SEQ ID NO: 385834 - RNA, 67 nt, Homo sapiens
agcagagcccagugaaugacucuggccagagccaccucugcacuuaggagcaucacaggccucugcu

SEQ ID NO: 385835 - RNA, 58 nt, Homo sapiens
cuguuagggucaaccucaaagcugcccuuuucuuucugcugagguuagguucugacag

SEQ ID NO: 385836 - RNA, 118 nt, Homo sapiens
uuagaaacuuuaaaaaauuuauaauuuagugagcauaaaaugguaguuuuaagucuauaguucuuuuaaguauuagcuaauugugcuuauuugauaauuucauuguuggagccuuuga

SEQ ID NO: 385837 - RNA, 89 nt, Homo sapiens
gucuugugauuccuaaggagcagagagcccuguuucaauacugggugagucuggaauggcucucuguccuuugcauucuccuacaagau

SEQ ID NO: 385838 - RNA, 64 nt, Homo sapiens
acugugaauagugucacaauaaacauacgugugcaugugucuuuauaacagcaugauuuauagu

SEQ ID NO: 385839 - RNA, 94 nt, Homo sapiens
gauaaaaggcuuuuaaauuuuaccuauucaguaugauaauagcugugggucuguccuauaugucuuuguuauguugagguauguuccuucuauc

SEQ ID NO: 385840 - RNA, 78 nt, Homo sapiens
ggaaagcggcaggugauucagcaauuuuuguagcacgacagguugugcacaaaguguuuucugaaggccugcacuucu

SEQ ID NO: 385841 - RNA, 105 nt, Homo sapiens
accagaaugcaguaucccuaaagccucugcagucccugcgauugugggauccugacuaugucaggauuuuggcuuugcaggguguggcaaggugaagggucuggu

SEQ ID NO: 385842 - RNA, 93 nt, Homo sapiens
auuugagucacuguggaaagaguaggggacccacaugucgcaagcauaugccauggcaaaugggaccccuacucuuuccacaaugacucaaau

SEQ ID NO: 385843 - RNA, 55 nt, Homo sapiens
cccagaaguugaggcugcagugagccgugaucaugcuacugcaccucaaccuggg

SEQ ID NO: 385844 - RNA, 129 nt, Homo sapiens
agaaaauaacuuucuguuguuuaaaccacucagucuuagguauuuuguuaugucagcuugucuuagucaguuggggugcuauaaaaaugaucuuacacuggguggcuuaaacaauacaaauguauuucu

SEQ ID NO: 385845 - RNA, 97 nt, Homo sapiens
guuaucaugauugacugagauucuucaauauuuauucucgagguggaauaaaccuugagaugggauaaagggggaucuccuuugaugaaugcauagc

SEQ ID NO: 385846 - RNA, 84 nt, Homo sapiens
ccugggagcuuguugaaaugcagaacuuuaggucucaucgcagagcuauugaaucagaaucugcauuuuaaugagauucccagg

SEQ ID NO: 385847 - RNA, 80 nt, Homo sapiens
ucagguuuuauguucaguacuuaugggcauguuuuuauguuuccccaaaauaugucuggaguuacugagcugaagccuga

SEQ ID NO: 385848 - RNA, 58 nt, Homo sapiens
uaguguccacagauggauuagugaacgagauguggcauauccguacaguggaauauua

SEQ ID NO: 385849 - RNA, 72 nt, Homo sapiens
gccagcccccuuagagcagcuauggaaggagacuacacagcuacaucuugcucugggaugccuggggcuggc

SEQ ID NO: 385850 - RNA, 79 nt, Homo sapiens
uaaaugcuuaauugaauguggaacucaacugugcauuaucuaugcagauguaauauuguucacguuuguugaguauuua

SEQ ID NO: 385851 - RNA, 84 nt, Homo sapiens
uuucuucacuugucuaaagaauggcagacucagaagcaaaacugcaagccugguuccucguucuuuagggaugguguuaugaga

SEQ ID NO: 385852 - RNA, 70 nt, Homo sapiens
auauccucuccagcaccaguuguuuccugacuuuuuauugaucgccauucuaacuggugugagaugauau

SEQ ID NO: 385853 - RNA, 67 nt, Homo sapiens
uugaggaggcagucuguccguuaacagagcuggagugcugugcuaggagaucugcugcucucuucag

SEQ ID NO: 385854 - RNA, 76 nt, Homo sapiens
ucgcucuguugcccaggcuguagugcaguggugcagucacagcucacugcauccuccauauccugggcucaagcga

SEQ ID NO: 385855 - RNA, 65 nt, Homo sapiens
uuuauaacucugcagccugguauuucacauuugcagauggggagaccgaggcucagagaggugaa

SEQ ID NO: 385856 - RNA, 89 nt, Homo sapiens
ccuagccaaaggaaugguguuggggcacggccucuguugcccucuuuggggucccagccugugucucaagcccacacgccgcggcuggg

SEQ ID NO: 385857 - RNA, 74 nt, Homo sapiens
ggauauuuaggacuucaacugagcacuggaacagguucaugugauccagugcucaguuggaguccugaauaucu

SEQ ID NO: 385858 - RNA, 60 nt, Homo sapiens
agauucuuaauugguuuucacccaguugcaauugucacauuggugagaaauuaugggucu

SEQ ID NO: 385859 - RNA, 57 nt, Homo sapiens
guaggcacugaguguuuuacagggacccucauugagugagaccuuaugugcccuuac

SEQ ID NO: 385860 - RNA, 89 nt, Homo sapiens
gaagaucaaugauacuagguuggugcaaaaguaauugugguuuuugccauuuuuuuaaucacuuuggcaccaaccuaauaauuguuuuc

SEQ ID NO: 385861 - RNA, 78 nt, Homo sapiens
uaaauggugugcuuaggucauuuacauuuuagguaauuacuuauauguuuguacuuaggccuauuauuucaucauuug

SEQ ID NO: 385862 - RNA, 92 nt, Homo sapiens
acacuauuaaauauuuggaaaauuagcaagaugaauuugugcaaacaguuauauauaguucuguuuguucuuauuuuuuauauauguggugu

SEQ ID NO: 385863 - RNA, 55 nt, Homo sapiens
uuauaguuuuucaccuggagaaacacauuuguucugcagcuguggaaagcaauga

SEQ ID NO: 385864 - RNA, 62 nt, Homo sapiens
ggguacuaguuaacaauucaaagaccaguguaccuauacacuggaaguguacaauuauaccc

SEQ ID NO: 385865 - RNA, 116 nt, Homo sapiens
auggagguguaaagauauccagcuuuauuaucuuugcauaacaauguauguguguauaucuguaaguauaugcauacauguaugcaggaauguuaauuguuguauuacacuucuau

SEQ ID NO: 385866 - RNA, 81 nt, Homo sapiens
gccuguuguuugaugacucuguggccccaggcccagcccuguggaagccuggaguauacggccgggguuuguggcacaggc

SEQ ID NO: 385867 - RNA, 87 nt, Homo sapiens
gaaggcuuaagaagugagauauucugguuuacuaaaucucuuuauggauucaguauuaaccagaaauuucuuuuuguugagacuuuu

SEQ ID NO: 385868 - RNA, 70 nt, Homo sapiens
guuggaauauggguauuaagaaucaaaaccaaaacugaguuuuauucugugcucauguuauauguacaac

SEQ ID NO: 385869 - RNA, 62 nt, Homo sapiens
uuguagacagcacguaguugagucauguuuuuaaaucgacuuugcuaaucucugucuuacag

SEQ ID NO: 385870 - RNA, 77 nt, Homo sapiens
ucacuugaacccagcaggcagagguugcagugagcugagaucacaccauugcacuccagccugggggacaagaguga

SEQ ID NO: 385871 - RNA, 72 nt, Homo sapiens
ugcuaccauucaucauuaguuguggaauucuugaaacucaaaaacuucagaguaucuaacugauggguagca

SEQ ID NO: 385872 - RNA, 71 nt, Homo sapiens
aggucauagguagauuuaaagauuuucugauuagcaauugguugaaagaguuaagcuuugccuaaagacuu

SEQ ID NO: 385873 - RNA, 57 nt, Homo sapiens
gguaggagaauggcuugaacucagcaagcagaggcugcagugagccaagauccuacc

SEQ ID NO: 385874 - RNA, 62 nt, Homo sapiens
uugacagaccuuggucauauccucugacucaccaucuucucugugacccucagguuugucaa

SEQ ID NO: 385875 - RNA, 87 nt, Homo sapiens
ugcugauuuuuguggcuggauguuucaauacaaauaaagaugucuauguguggucauauuggauugaauauucaugucacugcagua

SEQ ID NO: 385876 - RNA, 56 nt, Homo sapiens
gggagaagaugguuaucuacaagcuaagacuaguggcgugaaacacauuuuuuccu

SEQ ID NO: 385877 - RNA, 95 nt, Homo sapiens
gcuuuucccuguuuccuacuuuacuguacuguucuggaaguauaaggggaaaacaggaagaugguacuggguaaaaguggggaucagggaaaagc

SEQ ID NO: 385878 - RNA, 70 nt, Homo sapiens
uuuagcauuuccacagggauuugcauugaucaagugugacagugagacccaguucccuuggacauuuaaa

SEQ ID NO: 385879 - RNA, 62 nt, Homo sapiens
guggagcgcccaucuggcaaucccagcuccagagcccuagugggaucagcugggcucucugu

SEQ ID NO: 385880 - RNA, 75 nt, Homo sapiens
agugcugcguggaauacuaugaugguggauaagacauucuguaaauccacagaugguaguuuuggcagaagcauu

SEQ ID NO: 385881 - RNA, 79 nt, Homo sapiens
ggaguccuuugggcuucggcagggguuccuguucgcguucacaucaucugcuggccccugaagaaagccuaggacaucu

SEQ ID NO: 385882 - RNA, 81 nt, Homo sapiens
guaguggcaauaauuagaucaacuuugguaagagaaagcuuauguuuuugggcuaaaacauggucucaccccugccacuau

SEQ ID NO: 385883 - RNA, 70 nt, Homo sapiens
guugcucaggccggagugcaguggcacgaucuugguucauugcaaccuccaccuccuggauuugagcgau

SEQ ID NO: 385884 - RNA, 116 nt, Homo sapiens
aagacucauucaauacgagcucaaaugaaaacauugauagugaaccaagggguaauuagcuugaguuaauucugcugacauuauccugaugcuauuugaaggguugagagagucuu

SEQ ID NO: 385885 - RNA, 58 nt, Homo sapiens
ggugucucagugcgaaucucaaagaauugcauuucuuugacuggugauauugagcauu

SEQ ID NO: 385886 - RNA, 92 nt, Homo sapiens
cacugagccgccugcauggaggaggggcgccugcacucugugucuuuggccggauguggcacuugacuuucucgcaccuguggcacucagug

SEQ ID NO: 385887 - RNA, 109 nt, Homo sapiens
guaacaaauggccuaugugaacugaacugagcuggugaauaucaguuaagaaaaggcagucacuguguguuugucuagcacaggcagcauguaggacccuguagguuau

SEQ ID NO: 385888 - RNA, 87 nt, Homo sapiens
cucugguguuguggguggggauggcggaaggagugaugcaugauacguucauggcuauuucgucaugcuccccugcuuucaucagag

SEQ ID NO: 385889 - RNA, 113 nt, Homo sapiens
auguaaauccuugcauauggcuuaacacacgugggcaaugugcacauuuacacauaguccagccuauacaugugcacaugcuuacaugugauuugauauguauggguguauau

SEQ ID NO: 385890 - RNA, 75 nt, Homo sapiens
ugugagccaguuuggcuaauuuuggcuaauuuuuguagaaacggggucucgccauguuggccaggcuggucucca

SEQ ID NO: 385891 - RNA, 86 nt, Homo sapiens
uuuguuaaugugucuguuugauccagaucaaaacauagaucaagagaucuuguuuuuggguggaauaaguagagauuguuaacaaa

SEQ ID NO: 385892 - RNA, 80 nt, Homo sapiens
aagaguuauuggaaauauaguagagagggcaaaaugcuuaaugaacauuagcaaugcugcugcugcugguauuugcucuu

SEQ ID NO: 385893 - RNA, 82 nt, Homo sapiens
gacugcuccaaugcacuccagccugggcgacagagcaagacuccgucugggucggggcggggugugggggaagccaguaguu

SEQ ID NO: 385894 - RNA, 67 nt, Homo sapiens
ugaaaggagcaagacguaaaguagauggcgagagacaaugcuguuuagcgaaugcuugcuccuguca

SEQ ID NO: 385895 - RNA, 77 nt, Homo sapiens
acauguuauagccuacuccacaccugggcuauaugguauagcccauuguuccuaggcuacaaaccuguauagcaugu

SEQ ID NO: 385896 - RNA, 65 nt, Homo sapiens
gugcugagaugaauauacucgugcauguaucuuuaugguggcaugauauauauucguuuggguau

SEQ ID NO: 385897 - RNA, 113 nt, Homo sapiens
uuuuuauaaguuuggcaaauuauuaccaacacugauaugaaguuagcuggcuguguuucagugaauauaauuuuugggaacuuuauauuaugguauuuugauacauauaaaga

SEQ ID NO: 385898 - RNA, 81 nt, Homo sapiens
ucaccguugucccaaaacuugaagcaagccucguauccaaggggccaggcauguugcuucgggcuuugugcaaacaggugg

SEQ ID NO: 385899 - RNA, 58 nt, Homo sapiens
cuguauguuucuaugaaugugacuauuuuagauaccucauguaaguggaagcaugcag

SEQ ID NO: 385900 - RNA, 59 nt, Homo sapiens
ggguuuuccuucugcauuggagugcuuuagaaagaaggaagccagugcaaggaaagccc

SEQ ID NO: 385901 - RNA, 67 nt, Homo sapiens
cugcauuaauuaaacuauuucccuacugcaauacugcugucucagugaauugguuuuaucugugcag

SEQ ID NO: 385902 - RNA, 87 nt, Homo sapiens
gggcauguccuggaccaugaagaaaggcaagacagacucauagccuaucugcuuucucuuuuugcuuuuccucggucccaccagccu

SEQ ID NO: 385903 - RNA, 101 nt, Homo sapiens
ugagaugggagaaucgcuugaaccugggagguggaguugcagugaccugagaucgugccauugcacuccagcuugggugacaagagugagacucugucuca

SEQ ID NO: 385904 - RNA, 130 nt, Homo sapiens
ucuuggccaaugugaauaguacuucuaucaacaugagagugcagacaugucucaaacauaagaaaaucaguaugucaaagagacaucugcacucccauguugauugcggcacuauucacaguagccaaga

SEQ ID NO: 385905 - RNA, 67 nt, Homo sapiens
ugagagauaauuugaaucaugggggcgguuucccccauacuguucucgugguaaugaauuagucuca

SEQ ID NO: 385906 - RNA, 86 nt, Homo sapiens
ucuagcuacuaugauaagacaucauuaaacagcaauaagaggaaaaacuuaucagcauucccaaaugaugugcuuguuuggcugga

SEQ ID NO: 385907 - RNA, 62 nt, Homo sapiens
gguguacugagagacaguuacuguuaguauuuuugcaagcaguaaagggaucuuagaacacu

SEQ ID NO: 385908 - RNA, 68 nt, Homo sapiens
auugcuuaaaccugggacguggagguugcagugagccgagauugcaccacuacacuccaggcuguaau

SEQ ID NO: 385909 - RNA, 90 nt, Homo sapiens
ugcuccacaccuggcucacccuuggcagcuguggaaucugggcugguaacgcaagcugagcacagccugccaagcugagugaguggagua

SEQ ID NO: 385910 - RNA, 74 nt, Homo sapiens
gacugauaguugugagaacucuuacucggcuugauacaagcaccuuggaaaggugggacuuacguacuaaaguu

SEQ ID NO: 385911 - RNA, 69 nt, Homo sapiens
guggaaaaugucugugugcuguuuuccaugaaucuggauguagagguauagcugcagauauaaauccgc

SEQ ID NO: 385912 - RNA, 75 nt, Homo sapiens
uauguggcaaauagcaauaggaggguaggugaaauaacuucaaugauaccuuaauuauugauuguucacugugua

SEQ ID NO: 385913 - RNA, 81 nt, Homo sapiens
auuuagaugacagagguaagcaagucagcauuaaaaucauuuaugguguuucuaaagcauuguccuguguuuaagcuaaau

SEQ ID NO: 385914 - RNA, 61 nt, Homo sapiens
ccuguuuuauagauggaaaguaagcuuggguaauuuaagcucauuuccauucuacaacagg

SEQ ID NO: 385915 - RNA, 57 nt, Homo sapiens
uuauuugguugcugacuuggaagaguacagaauuuuaaguuuuaagcaaucugauaa

SEQ ID NO: 385916 - RNA, 79 nt, Homo sapiens
uucugaagaagauaauuaugccucuuccugggguuauggggagcuucgcuaggcaagagguaucuuauuuuccccggga

SEQ ID NO: 385917 - RNA, 95 nt, Homo sapiens
uuugagcauugugauucugcacucuuuuagcgaaguggugcugagugcucacugugguuugggaaagugcuggaaaggauccaagaugauucaga

SEQ ID NO: 385918 - RNA, 56 nt, Homo sapiens
uuuccuggcugugagucguacguaccguaguuacgugagaugcaaucaccagggag

SEQ ID NO: 385919 - RNA, 66 nt, Homo sapiens
ucgcacaucaaaugcuggcagagugccuggugcuuaguaggugcuuagugaguguuuguugaguga

SEQ ID NO: 385920 - RNA, 98 nt, Homo sapiens
acuguauuauagcaaguugaucuuuaggacacacauuaaggagaaugaacauuuucagaguggccucucuugaagaacaaccauuugcuuggaacagu

SEQ ID NO: 385921 - RNA, 68 nt, Homo sapiens
uugcucaggcuggaguacaauggggcaaucacagcucacugcagccuugaccucccagacuugagcaa

SEQ ID NO: 385922 - RNA, 60 nt, Homo sapiens
ugcugcuguuguuguuacuagcaaagccagcuggggauguuagagaccaaccacagagca

SEQ ID NO: 385923 - RNA, 77 nt, Homo sapiens
gucugacuggguuaauuugaagguugaguguuugagcucugaaauucuuucuucugcuugaccuagucuguuuaggc

SEQ ID NO: 385924 - RNA, 61 nt, Homo sapiens
gucccugugucuuuauguggccauuuuccucuaaggacaccagucacaccagauuaggggc

SEQ ID NO: 385925 - RNA, 55 nt, Homo sapiens
uugagauggaguuucacucugucacucaggcuggagugcaauggcaccaucucgg

SEQ ID NO: 385926 - RNA, 67 nt, Homo sapiens
uggauuuuacccaaagaacuauauuagcgcaggauuuuaaaugugggauaugacauggguaaaacca

SEQ ID NO: 385927 - RNA, 83 nt, Homo sapiens
agaacagagagguucagucacgugcccaaguucacccaggcugguugugaacuucagcagcguggcuccaaaguccauguucu

SEQ ID NO: 385928 - RNA, 56 nt, Homo sapiens
cuauuaaacacacugcccauguagaacauaaguaagugcacaguaguguuuaauag

SEQ ID NO: 385929 - RNA, 108 nt, Homo sapiens
ccagcuuuccaucucugcugugacugcagggcauauuugucacauucuucucugcuuauuuuguguuuuacagcaagauucucugcagucauugccauggggagcugg

SEQ ID NO: 385930 - RNA, 70 nt, Homo sapiens
cagcuuugugauuuccaugagaacaugccuggcuugcuugcuguaagaugaggcacauggagcagagcug

SEQ ID NO: 385931 - RNA, 90 nt, Homo sapiens
gcaccaucaaggcaggcaacacugagugcuaugaacaaagauaaagugggcaauggaauggcauguuggguguugacuccgagaaggugu

SEQ ID NO: 385932 - RNA, 122 nt, Homo sapiens
augauucuuuaucauuaugccaaccauuaaaauauucagggccaagcgaaacauuucaacuaaaaacagcuaguugaaugcguuguguggcccguuuccugagagcacuugaggggagucgu

SEQ ID NO: 385933 - RNA, 79 nt, Homo sapiens
gcuaguaaauguaugcuacugaccccuacuuacauaaaauauauucauguuagguauauaguuagaggugcauuuuggc

SEQ ID NO: 385934 - RNA, 95 nt, Homo sapiens
uuagaauuuauauuuagcuguuguuuauaauaugagagacuuaaaaccuagaauauuuucuucauauugguuaaaauagugggauagaauuuuaa

SEQ ID NO: 385935 - RNA, 64 nt, Homo sapiens
agcacacauaacacucuucucuagugagcagucucuggugcugacugaguauauguuuggugcu

SEQ ID NO: 385936 - RNA, 112 nt, Homo sapiens
aaaaucauaaaaaauaacacucuacugucagucuuuuuuuggcaagcauuaaggguaaguggucuuggggauguauugucaggugaagaauggcauaauuuauuaugauuuu

SEQ ID NO: 385937 - RNA, 129 nt, Homo sapiens
gaggugggggcccucauggagaacaucugcuagggcaguguggaagggaaauguggggucagagcccccaaacagagucccuacugggguacugccuaguggagcuaugagaagaaggccaucauccuc

SEQ ID NO: 385938 - RNA, 92 nt, Homo sapiens
gggggguacggguguaggauuguuacauggguauguuggauccggguagugagccuaguacccaguagauaguuuuucauccuguacccucc

SEQ ID NO: 385939 - RNA, 78 nt, Homo sapiens
uaauuuaaugucaggcaccgauacaguuuuuugugguuguucagaaacgagaaaggugugugguucugaagugaauua

SEQ ID NO: 385940 - RNA, 102 nt, Homo sapiens
augaggaaacaccagcuagaggggauguaggaagguuuuucucaauccuagaaaggguuacaaaaugaagacauuugcugcacguccuuugagugguuucau

SEQ ID NO: 385941 - RNA, 63 nt, Homo sapiens
auugaaucagguaguuucagucauaguacgcuuacuucaggaaaugacuauagccugaucagu

SEQ ID NO: 385942 - RNA, 67 nt, Homo sapiens
cgucaguuuacuguugccauggcaacacugggacguuacagucccuuuccauggcaaugaucugaug

SEQ ID NO: 385943 - RNA, 83 nt, Homo sapiens
aagauuuaagagaaucaagguacguugccucagauugaaaaucugcacagaaauguauuuuaucccaaauucucaugagucuu

SEQ ID NO: 385944 - RNA, 58 nt, Homo sapiens
agggcaguguuaggacugucuggcucugaaguccaaauuccuucuaaaacgcugcccu

SEQ ID NO: 385945 - RNA, 86 nt, Homo sapiens
gagaauugcuugagcccaggagguggagguugcugugagccaagaucgcaccauugcacuccaaccugggcaacagagcgagacuc

SEQ ID NO: 385946 - RNA, 64 nt, Homo sapiens
uuauuuuuauggcauuuggugugacuacccucccauccuggagacaucagaguugugaagguag

SEQ ID NO: 385947 - RNA, 55 nt, Homo sapiens
aucagugcauguuuguugagcuaaacuuuuaucucaccgacgaggcugcacuggu

SEQ ID NO: 385948 - RNA, 109 nt, Homo sapiens
uagauuauguuucauauauauccguguagaagucucugagcuguuguucuuucagcagaucuaauaagcugagagaauucuacacaggacgacuacaaaacauaaucua

SEQ ID NO: 385949 - RNA, 98 nt, Homo sapiens
acucgaaauuaaacauggugcuugccuuucaagaggcuuucaggccaacaagguuuggacuucucaaggcaauaaaugcauugucuuuaaucaagagu

SEQ ID NO: 385950 - RNA, 88 nt, Homo sapiens
uaucugccacgagcacggugacaguaggguggcacaugagccacuuauuugccacugcaggcuguuuaaccucgcuauucugcagaua

SEQ ID NO: 385951 - RNA, 79 nt, Homo sapiens
gucucagguaugucuuuaacagcagcaugaaaacagacuaauacacaauuuucuucugcugggaggcauacuuuaagac

SEQ ID NO: 385952 - RNA, 128 nt, Homo sapiens
cuuggccucccaaagugcugggauuacaggcuugagcaccaugccuggccauguacauuucaaaaauaauuaccauagccagccacgguggcucaugccuguaaucccagcacuuugggaggaccagg

SEQ ID NO: 385953 - RNA, 68 nt, Homo sapiens
guggaaugauaucucauuguggcuuugccuugcauuucacuaauggcucaagaugaauaucuuuucac

SEQ ID NO: 385954 - RNA, 130 nt, Homo sapiens
uuuuuuuucuauuaugaauaaagcuguuaugagccuuuuuguagauauucuuucaguuuuuuugagcaagaaaaaauagauaguauaauugcuuggccauaagguagguuuauuuucaauguauaaaaaa

SEQ ID NO: 385955 - RNA, 94 nt, Homo sapiens
uggaaguguauauuuguuuggaaucccagaucucagagucuucagcuaacaccuacugacacugcaacuauucacaggcaauauguacauucua

SEQ ID NO: 385956 - RNA, 71 nt, Homo sapiens
gcacuguccuaguugaagaggcugucaucacuuggguuaagugugacagcacgguucaacugcugcugugc

SEQ ID NO: 385957 - RNA, 70 nt, Homo sapiens
gaauguauggcaccauguuaugauaauauaauuguucuuguauuuuauuaagagugguagucaaucauuc

SEQ ID NO: 385958 - RNA, 99 nt, Homo sapiens
cuguccgcucuagcugcgggucugauuggacggcucuuagucaagcaucccugaauggaugccguuuaaggccccgcccauucaggccuggagugacag

SEQ ID NO: 385959 - RNA, 72 nt, Homo sapiens
ucuuuucagcagugccccacucuacugguaccaauuuacucuauuagucuguuuucacacuguugauaaaga

SEQ ID NO: 385960 - RNA, 65 nt, Homo sapiens
auuggugaccugcggcaguauguacuucagugcaccuacugcuuacuguugcuuuagucacuaau

SEQ ID NO: 385961 - RNA, 61 nt, Homo sapiens
aggccaaaaggaacuuuuugaaggucacaggguuccaucugcaaccuucauuccuuugccu

SEQ ID NO: 385962 - RNA, 77 nt, Homo sapiens
gaaugugaaggccuaggacauuacuguauacuucuguggacuuuagaaacacuguccaguuaggcuacauugcauuu

SEQ ID NO: 385963 - RNA, 57 nt, Homo sapiens
ucacaaugucugguaggccacuuuggguucuagagguagcauauuccagacuuguga

SEQ ID NO: 385964 - RNA, 55 nt, Homo sapiens
gagauguuguucaucugauuguucugagucagguacauggguugagccacguuuu

SEQ ID NO: 385965 - RNA, 69 nt, Homo sapiens
cagaucuagcaaguggauucugguugauuuuaagaaaauaaauaugacaagagaacacugcuauauuug

SEQ ID NO: 385966 - RNA, 105 nt, Homo sapiens
auccacauuuuuagguaucuuuauggcaaugccccacuccuacauaccaauuuuuuguguuaguccguucucacguugcuaguaaagaacuaccugagacugggu

SEQ ID NO: 385967 - RNA, 109 nt, Homo sapiens
uguuauagaagucucucaauagugcuuuuuagaaccuggauguuaagugagaucuuuggucaacuuucagguuuuaugaaguucauggaaaugagacacuucuuugaua

SEQ ID NO: 385968 - RNA, 80 nt, Homo sapiens
uuuugcuuaguaaauguagaaaaaugagggaaauaaggaaucaucauuaaaacucuacauuagaauugguacaggcaaga

SEQ ID NO: 385969 - RNA, 89 nt, Homo sapiens
ggagaauugcuggaaccuaggagguggaguuuguggugagcugagaucaugccaucgcacuccagcuugggcaacaacagcaaaacucc

SEQ ID NO: 385970 - RNA, 67 nt, Homo sapiens
ucucucgagccuggaggcagaggcugcagugagucaagauugugucacugcacuccagccugggaga

SEQ ID NO: 385971 - RNA, 129 nt, Homo sapiens
gucucauuuaauccucaaaccacucugggagguagguauuagcuuuucaaagaugagaaaacagaggcuuugagagguuaguuuaugugcucaagaucccacagcaaguagguaaaauggagaagagau

SEQ ID NO: 385972 - RNA, 57 nt, Homo sapiens
cuuccauaguuacacccagggagggugagugcucucccuuucuuugucacaugggag

SEQ ID NO: 385973 - RNA, 57 nt, Homo sapiens
gaggcacauagauggaauuaugggaauggaaacaaaucauauguaucuuugugccuc

SEQ ID NO: 385974 - RNA, 60 nt, Homo sapiens
aguagauuccagugauaguuaaauaagaagugauuucuucuaaugaccacugauucuacu

SEQ ID NO: 385975 - RNA, 74 nt, Homo sapiens
uggugguguguaaauuacuuaucucuaguacagucauaccucagagauauugcagguuuaguuccacaccacca

SEQ ID NO: 385976 - RNA, 68 nt, Homo sapiens
ucacuugagcugaggaguuugagacugcagugagcuaugaucacaccacuguauuccagccugaguga

SEQ ID NO: 385977 - RNA, 78 nt, Homo sapiens
uuuuggcuauuguuaacagugcuguuauaaauguacaugugcauguauuuguuugaguacuuguuuucauuucuagaa

SEQ ID NO: 385978 - RNA, 97 nt, Homo sapiens
gaggaggagaaucgcuugaacccgggaggcggagguugcagugagccgagaucgcgccacugcacuccagucugacgacagagcgagacucggucuc

SEQ ID NO: 385979 - RNA, 64 nt, Homo sapiens
aaacugcugguugcuggccagccaauguauuaauuguccuuggucaaaugccaaucuguaguuu

SEQ ID NO: 385980 - RNA, 56 nt, Homo sapiens
uucagaaaauggagaggcuagacaagaaaaugaugcuaaucucacccuuuucuggg

SEQ ID NO: 385981 - RNA, 57 nt, Homo sapiens
uguaacaggaggaaaaugugaacuccccagcagggugguucucagucuuucugugca

SEQ ID NO: 385982 - RNA, 96 nt, Homo sapiens
ggagagaauuuuaaguugacaguaguagccccuuagauggaggauguuauuucauugucuuuugaggucaguuauugcugguuagaaauuuucucu

SEQ ID NO: 385983 - RNA, 81 nt, Homo sapiens
gaauuguaucucccaaaaagguauguucguagguuccaaccccgguaccugugaauguaaccuuauuuggaaauaggauuu

SEQ ID NO: 385984 - RNA, 73 nt, Homo sapiens
aagacaugagauuugggaggggccagaggcagaaugauaugguuuugcuugguccccacccaaaucgcaucuu

SEQ ID NO: 385985 - RNA, 57 nt, Homo sapiens
cauacuuacuguguaccaggugcuauguuugacaccgaagauacaacagugaguaug

SEQ ID NO: 385986 - RNA, 94 nt, Homo sapiens
cagccugggaccacuuaggaaaaacaggaaagaugccacagacuuuucuguuugggaagauucuguguuuuuccacauggaaccccaagaguug

SEQ ID NO: 385987 - RNA, 59 nt, Homo sapiens
ugagacugaguuucacuuuugucgcccaggcuggagugcaacggagugaucucagcuca

SEQ ID NO: 385988 - RNA, 56 nt, Homo sapiens
uggauacguucacucucuugauugcggugaugguuucaaggaguauacguaugcca

SEQ ID NO: 385989 - RNA, 97 nt, Homo sapiens
ggagauaacaguucaccaacuaugugcacaugcccuggugacuguaucccacuauguggcaccagguuguguguuuauuugccgaggcucuuucucc

SEQ ID NO: 385990 - RNA, 81 nt, Homo sapiens
auuugucuuugaaucauuggguugauucaagauucuggcucuaucuucaguagcucccaugaugcacuaaaaaaggcaaau

SEQ ID NO: 385991 - RNA, 128 nt, Homo sapiens
auauuuauaccugugccucgaggcaguauuuuaaauaauggagguagacauugggaagagccucguggcuucuuuaaaaacgucgccucgguguuugaggucuccggcacgacacuguggguaaaugu

SEQ ID NO: 385992 - RNA, 91 nt, Homo sapiens
ggagaaucgcucgaacccgagagguggagguugcagugagccgagauuaugccacugcacuccaaccuguugggcgacagagcgaaacucc

SEQ ID NO: 385993 - RNA, 100 nt, Homo sapiens
gcucuucuuuugaaucucccagugacccaggaacaggcugaugugaagcacaacccggacuucauccugugccagguguucugggaauugagaggagggu

SEQ ID NO: 385994 - RNA, 70 nt, Homo sapiens
uccagaaaccaugacugcucugggcucccaugacaucucauggguuuucucaaguagucaccuuuuugga

SEQ ID NO: 385995 - RNA, 64 nt, Homo sapiens
auugugaguagugcugcaguaaacauaugugugcaugugucuuuauagcagcaugauuuauaau

SEQ ID NO: 385996 - RNA, 128 nt, Homo sapiens
auuuugugccacuucuuaugcuaccauugugggcauauggaaucauccuccugggagcuguaauucguuucaucuuaucuugcaggcaggggacccugauuucauuaccaagguuguaggcacaaaau

SEQ ID NO: 385997 - RNA, 66 nt, Homo sapiens
uuuugagacauaauuggugggauggaugcuuacuuucauaauucauuucuacuccuguguccagaa

SEQ ID NO: 385998 - RNA, 79 nt, Homo sapiens
ggaagcugcgugaccagaugggcagggguguggccagcugaguggcugugacacacuucuugcacaucgucugucuucc

SEQ ID NO: 385999 - RNA, 74 nt, Homo sapiens
ucuuucccuuuuuucugugcccugcuagcuggaaaucuuccauuugguuauguaucgaaacuaccagcggaaga

SEQ ID NO: 386000 - RNA, 67 nt, Homo sapiens
agaauuuuucagggccucagaguaggguggugugggcuacccuggauucguggccuugaauuguuuu

SEQ ID NO: 386001 - RNA, 89 nt, Homo sapiens
uuauuagguuggugcaaaagugagugaggguuuuuuuugccauuaaaguaauggcaagaacuucacucacuuuugcaccaaccuaauag

SEQ ID NO: 386002 - RNA, 86 nt, Homo sapiens
ggggauggagugggaagguggucuuccccuggaguucggccaucugcggcugaacuccuccgaagucgcacugucaagccaucccu

SEQ ID NO: 386003 - RNA, 82 nt, Homo sapiens
ucuccugucucccuuucuacugcagguggugaagguggcacagcguucauccauacaguuagcaaagguggggaacuggggg

SEQ ID NO: 386004 - RNA, 62 nt, Homo sapiens
cagcaggaauguguaaugcuaggagugagugaaguuacucagagauuagcacauguuuguug

SEQ ID NO: 386005 - RNA, 61 nt, Homo sapiens
guuaccugaaugucuuauugcucguuguaucuagcauacaaacaauagauauucaguaagc

SEQ ID NO: 386006 - RNA, 109 nt, Homo sapiens
cuauauccuaauacagaacacaguauaugacaaugcuuucuucuaaauugaauuucagcuucaagugauauagaaguauuucaugucugugguguuuguguggguguag

SEQ ID NO: 386007 - RNA, 56 nt, Homo sapiens
uaucuguucuuuaaaacuuugauagacgucuaugaaauuguuugcaaggauaggug

SEQ ID NO: 386008 - RNA, 69 nt, Homo sapiens
gggccgcugcaccguggaguauggggaggaccugcccgagugcguccagguguacuccaugggcggccc

SEQ ID NO: 386009 - RNA, 58 nt, Homo sapiens
caacucuagaaugcaccguucacaaagacuaaaaugugaacagcaccuccuagaguug

SEQ ID NO: 386010 - RNA, 56 nt, Homo sapiens
ggcuguuuuuggaaggugucuaauggaaaaaaguugaauacuucaaaaaaauagcu

SEQ ID NO: 386011 - RNA, 80 nt, Homo sapiens
aguucuggacuggcaaauucuuuaaguaucucuuguuuuauggaauaauacagugaauacuuacaguguuugcaagaacu

SEQ ID NO: 386012 - RNA, 90 nt, Homo sapiens
ucagcggauaggugcuauuuaaggccaugcuauuagaugaggccacucagagaucuagaaagcaugaccuucagauaacacagucucuga

SEQ ID NO: 386013 - RNA, 62 nt, Homo sapiens
guuugcauaagugcauucugugauguucacacgaugaaaucacgugaugcauuugucagaac

SEQ ID NO: 386014 - RNA, 71 nt, Homo sapiens
guauauggaaaaauguaucuugucauggcucaaaagacacaacauuguuaagaugucaauuuuccacauau

SEQ ID NO: 386015 - RNA, 65 nt, Homo sapiens
aaaaccacuuccuugcuauugggcuguugcaaaagauaauagauaauaguuucagaaguuguuuu

SEQ ID NO: 386016 - RNA, 55 nt, Homo sapiens
agaaugaaacgacaggguuauucagauagcuauuggcuuuguaagguuucauuuu

SEQ ID NO: 386017 - RNA, 78 nt, Homo sapiens
cccccuugaggaggcagucuaucucuuaguagagcucaagcgcugugcuaggagauccacugcucucuucagagccgg

SEQ ID NO: 386018 - RNA, 73 nt, Homo sapiens
gcuaauuaguaaccuaauuccaucuguaaugucugaucacaucagcaccuggauuaguguuugacugaauagc

SEQ ID NO: 386019 - RNA, 57 nt, Homo sapiens
ugacuaaggaaggauuaugugcagagacuuguucucgcauagauguuucuucaguca

SEQ ID NO: 386020 - RNA, 60 nt, Homo sapiens
gagagauuagguaacugccuaaacucucacauauugagauuaaguaauuacccaacucuc

SEQ ID NO: 386021 - RNA, 88 nt, Homo sapiens
aaggugggucaauuuugagguguagucaugccaagaucuuccugugggaucaggcuauggcuagaucucaacuuuucacacucauuuu

SEQ ID NO: 386022 - RNA, 70 nt, Homo sapiens
uuuuucuggaugugcagcauagauaagguggcaacaggacgccauguauacaugugggcaucaggagaga

SEQ ID NO: 386023 - RNA, 76 nt, Homo sapiens
ggggggauggggcuugggggagaacaguggccaagggcuuccccgcagcugauugucucuccugccccaucucccc

SEQ ID NO: 386024 - RNA, 74 nt, Homo sapiens
ugguuuuguuauguaguugcucugccuguuuuuauguagagauuaauagagacuagccaacuauguuccugcca

SEQ ID NO: 386025 - RNA, 58 nt, Homo sapiens
aacuucugccuggagauccaggcauuuccauacauccucugagaucuaggcagagguu

SEQ ID NO: 386026 - RNA, 56 nt, Homo sapiens
accaaugggaaggugcucugcacaugaccaaguauacagugcacuuucccacuggu

SEQ ID NO: 386027 - RNA, 63 nt, Homo sapiens
ugcaugucccguugugacuuacaauggggcaaugcuugaugugacuuacaauggggcaaugca

SEQ ID NO: 386028 - RNA, 88 nt, Homo sapiens
ggagaauugcuugaagccgggaggcggagguugcagugagccgagauugugcuacugcacuccagccucggugacagagcgagacucc

SEQ ID NO: 386029 - RNA, 118 nt, Homo sapiens
cagcuuucuauuccuaugugcucacugugccuacugugggagcgucaguugguaggagagaguuccaguuagaggcuuucagcgguaggucccaggaagcaaugaaagagauacguug

SEQ ID NO: 386030 - RNA, 78 nt, Homo sapiens
gggauauuaaaacugguauugaauuuaggaagauagugccuauguaacuuucccuucagaacucaguuugcaaaucuc

SEQ ID NO: 386031 - RNA, 80 nt, Homo sapiens
ggcuggggggcagugauguggaguuuggauggaggggcuuaccugauccgagccuagagcccacaccugcacuccaugcu

SEQ ID NO: 386032 - RNA, 59 nt, Homo sapiens
uguauguccaugagcacauguaucaguccuccaugcugagcuguuauuuugggcaugca

SEQ ID NO: 386033 - RNA, 72 nt, Homo sapiens
gcuugaaaccucagggcaaagguugcaguaagccgagaucgugccacuguacuccagccugggugacagagc

SEQ ID NO: 386034 - RNA, 69 nt, Homo sapiens
ggcaggaggaugugggaggcgaaugacuacuggacaugagagccaguucccuuagccaaauccccagcc

SEQ ID NO: 386035 - RNA, 58 nt, Homo sapiens
ugagcugaggucucauucuguuucccaguuuggagugcaguagugcgaucucagcuca

SEQ ID NO: 386036 - RNA, 84 nt, Homo sapiens
gcuaguguaggcagccagcuguggauugaagaguuugcugagucaauugguauaaauuuggauccaaggcuggccuaugauagc

SEQ ID NO: 386037 - RNA, 68 nt, Homo sapiens
gacacagcguggguugguguugcauugcauuagagguggccaagaugcacaguccagcccaugugguc

SEQ ID NO: 386038 - RNA, 93 nt, Homo sapiens
gguaucguugcugcagcugguguugugaaucaggccgacgagcagcgcauccucuuacccggcuauuucacgacaccaggguugcaucauacc

SEQ ID NO: 386039 - RNA, 66 nt, Homo sapiens
ugaacagagaaacacuggccaugaccacuugugcacugugggcaugaguuuuauguuuuuguauca

SEQ ID NO: 386040 - RNA, 85 nt, Homo sapiens
uuccucaagauugcuuuggcaauucagauucuuuuauaguuccauaugaauugugugaaaaaugccuuuggaguuuugauaggaa

SEQ ID NO: 386041 - RNA, 62 nt, Homo sapiens
cuggaaugucagcuacaagagggcagggacuguggcuauuuuguucucugcuacauucucag

SEQ ID NO: 386042 - RNA, 59 nt, Homo sapiens
ugagguguauugggggaaauucagccagauaucgggcgaaauucaccccugauauuuca

SEQ ID NO: 386043 - RNA, 56 nt, Homo sapiens
uguagucaugugccaccgcauagcaacauauaugcugguggucccauaugauuaua

SEQ ID NO: 386044 - RNA, 63 nt, Homo sapiens
gcaggguucuuugucuacauccuguuaaaucaugguuuaaacugcccagacugaagacccugc

SEQ ID NO: 386045 - RNA, 71 nt, Homo sapiens
ucacuccucaggcuagcaucaucugggggccgcauacacaucugguaaauugauguugaccuaaguaguga

SEQ ID NO: 386046 - RNA, 60 nt, Homo sapiens
gguggaaccauauggaauugccaauacuuugacguacaaaaauggcaauaugguucuacc

SEQ ID NO: 386047 - RNA, 60 nt, Homo sapiens
aucagcagcgguggcugcagaacagcggauauuggugaacugcaaaugcugcugccugau

SEQ ID NO: 386048 - RNA, 71 nt, Homo sapiens
auuuaauccucugccguagcuacucuucuccccauuuuaccgaugaggacacugagguacgaggguuaaau

SEQ ID NO: 386049 - RNA, 79 nt, Homo sapiens
acaggucugcaucaccauggugggcuaauuuuuaaauuuuuuucuagagguagggucccacuauguugcccaggcuugu

SEQ ID NO: 386050 - RNA, 69 nt, Homo sapiens
gcuuucugaggccucaccagaagcagauggcaacacuacgcuucuuguaaagccugcagaaccauuagc

SEQ ID NO: 386051 - RNA, 88 nt, Homo sapiens
acaaggacuaaggaagcuagcaggaauuggugacccuuauaacaggagaauaagaaagacucuuucucuguggccuucuuaaccuugu

SEQ ID NO: 386052 - RNA, 129 nt, Homo sapiens
aauacuuuccuacaggaucauaauguagcucccaaugaugcccccgcuuggcaggauuuuaacaccaauuccaaaaaugucaaggaaugucauugguuugaauuuacauaauugauagaguaggguauu

SEQ ID NO: 386053 - RNA, 82 nt, Homo sapiens
aguuuuagggcacaugugcacaacgugcagguuuguuacauauguaugcauaugccauguuggugugcuguacccauuaacu

SEQ ID NO: 386054 - RNA, 57 nt, Homo sapiens
aauuccuaagagucuauaugguacauuucaucagugaucugugagaccuuggggguu

SEQ ID NO: 386055 - RNA, 95 nt, Homo sapiens
uguaaagacauguuuuggauaaaguuugugagaaaaaaauucaagcugcuucuauuuucauacaagcuacaaucacaaagaguuuugccuuugca

SEQ ID NO: 386056 - RNA, 80 nt, Homo sapiens
agccacauuuuuuggugaccaaaacuuauucucaacuaaaaauccuuuagguuugucacccugaauguaagauuuagguu

SEQ ID NO: 386057 - RNA, 94 nt, Homo sapiens
agccuuugguuuggaaaccuuguagccacagguggcaaggagauuuaagagugcuuggguggcuugauggcacaagguuucugaacaggaggcu

SEQ ID NO: 386058 - RNA, 86 nt, Homo sapiens
ugucagaguaaguauauggaauaauguugguccugaaugcucugugacauucauggguuaauuuguucgauaaaaguacugugaua

SEQ ID NO: 386059 - RNA, 96 nt, Homo sapiens
acauucacccugcacacucauucucagguuagaacuuagggcacaaaaugucaguugugcaaggcucucaaccuguguguguauggaagugggugu

SEQ ID NO: 386060 - RNA, 62 nt, Homo sapiens
ucucugauacucuccuuuuagagaguuggagcccaauuccuacccuauugaguauugagaga

SEQ ID NO: 386061 - RNA, 101 nt, Homo sapiens
gugugcauguguggugugaguguaugugcacauauggugcauaagugccuguguggggugguguacugugaugugugauguaugaaucuauguaugugcau

SEQ ID NO: 386062 - RNA, 57 nt, Homo sapiens
uugugcuuguaacuacauucagaagcuaaugggcaaugaaguagucaauaaguauaa

SEQ ID NO: 386063 - RNA, 129 nt, Homo sapiens
ugggaccugcucuggggcucuggucuuugguggcuggggagggagaaguaggcggcauaguggaaaaacaucugcccguaauccucuccccaguacacaggcaggccacguuuuaguagcagcaucuca

SEQ ID NO: 386064 - RNA, 71 nt, Homo sapiens
auauuugggaaauagguuauaggccacaaaaauauuaucugcuugacaacuuaugaccauuuccauaguau

SEQ ID NO: 386065 - RNA, 80 nt, Homo sapiens
aaauuacugucagacacuguggccuuuggaccagcuagaagcuugucacgaaaggugacaguguauguugguggaaauuu

SEQ ID NO: 386066 - RNA, 55 nt, Homo sapiens
ccagauccaguuuucuuuccuagggcuuugacccgaagcuugaaauugagucugg

SEQ ID NO: 386067 - RNA, 103 nt, Homo sapiens
uugagauggaguuuugcucucuugccgaggcuggagugcaguggugcagucuuggcucacugaaaccuccaccucucggguucaagcgauucuccuaccucag

SEQ ID NO: 386068 - RNA, 69 nt, Homo sapiens
uuuuagcuaaaucuguaaaaugaggaggguaccauuauccaccuuuagaguuuugagguuuaaaugaga

SEQ ID NO: 386069 - RNA, 58 nt, Homo sapiens
ugggaugaugaaaaggcuuucuguuuguuuuugagauggggucuugcucugucaccca

SEQ ID NO: 386070 - RNA, 117 nt, Homo sapiens
ccugccccuguucucccccauuccccuagagcuacagcccucacugucccgugaggggaaaaggcauggugacaaugggggcuguagcccuaggagaacggggggaagaugggcagg

SEQ ID NO: 386071 - RNA, 64 nt, Homo sapiens
ugggggcccagauguuuggggucauggggacccugcuccguccuuguuggcacuggugccccca

SEQ ID NO: 386072 - RNA, 65 nt, Homo sapiens
acucacgauuggaguuaguacaacucauuuuuuauaaaaucagcacacugugcuuuccagugagu

SEQ ID NO: 386073 - RNA, 64 nt, Homo sapiens
uagggcuaucaacuuuccucuuagcaccaccuuugcuguauuccagagguuuugauagguucug

SEQ ID NO: 386074 - RNA, 62 nt, Homo sapiens
cugaagcugaaggaaagaauauguacauuaaaauguacaccauuugauucuuuaagcuacag

SEQ ID NO: 386075 - RNA, 76 nt, Homo sapiens
uucagcaaaaguguaagacuuauuuucuuuaucaggaauucauuguuuacugaaaguuuaagacuuguaugcugaa

SEQ ID NO: 386076 - RNA, 86 nt, Homo sapiens
acucauugcuucaaucaauguaaugguaauauaaauauccaguagauuuugauucauauauggcccuuaaguauugguugaugagu

SEQ ID NO: 386077 - RNA, 57 nt, Homo sapiens
uuugcagagucuuucgcugggcugucuccccaucagcaagagaaagagcucuccaaa

SEQ ID NO: 386078 - RNA, 76 nt, Homo sapiens
gagggauagacagcugguagcacuuccuguguuuggcgauccauggagcaggacaucuacccaguguuucucccuc

SEQ ID NO: 386079 - RNA, 125 nt, Homo sapiens
ucaauaggucuuggggaacaagugauguuugguuacauguauaaguaccauaauuucauuccuuuuuauggcugaguaguauucuaugguauguauauaccagcauuucuucauccacuuguuga

SEQ ID NO: 386080 - RNA, 79 nt, Homo sapiens
cucuuugguuucugucucuguaaaaaaaagugucuaauugcauuugggcaaaaaacuugcagugaagagagaaaaagag

SEQ ID NO: 386081 - RNA, 78 nt, Homo sapiens
uaauccuucauguugaaagcuccugugguuuauagcaaaauagggcuuuggacugucagggcuauuagucaaggguua

SEQ ID NO: 386082 - RNA, 64 nt, Homo sapiens
cucugauucauauuaaacacucaagaaaugauuguuguucuugcugguuuucauaugagcagag

SEQ ID NO: 386083 - RNA, 112 nt, Homo sapiens
gggauugcuggguuggaugguaauucuguuuuuaguucuuugaggaauugccacauugcuuuccacaauggcugaacuaguuuacucucaccagcaguguauaagugauccc

SEQ ID NO: 386084 - RNA, 68 nt, Homo sapiens
ucauaauaggaauuccauagcuugcaauuuauuucgugaauaucaagugacuggaguuccauuuuuga

SEQ ID NO: 386085 - RNA, 78 nt, Homo sapiens
cagaggcaaguggccaccgagucugugauugggauccuccuguggagaccuguggagacucguggcucacuaccuuug

SEQ ID NO: 386086 - RNA, 75 nt, Homo sapiens
ccugacuggccuuuuugugcauggcccagugguaagagacagcccuugcccuggaaccaucuacaguccagcagg

SEQ ID NO: 386087 - RNA, 65 nt, Homo sapiens
uuucacuagggagaaacugaggcuuaggggccaccaugaucgagucucagccuuccuggcagaaa

SEQ ID NO: 386088 - RNA, 99 nt, Homo sapiens
gagguggagucucacucuguugcguaggcuagagugcagugguaugaucccagcucauugcaaccucugccucccggguucaagugauucuccugccuu

SEQ ID NO: 386089 - RNA, 85 nt, Homo sapiens
guaacucaaugaaagaagcugguuaaaggaugugauuaucaaguuugagugacuaguuuugcuguuguuauuucauugauguuau

SEQ ID NO: 386090 - RNA, 78 nt, Homo sapiens
uguuagccuguuuuaaguggcgugugguaaacuugcccacagauguuaguauacccgucuacuuugaacaaaauaaua

SEQ ID NO: 386091 - RNA, 81 nt, Homo sapiens
ucaagauuugaagacauaucuuugcagaaauguuagaacagcaaucugggguuagucaaagguauguaauaaaaaauuuga

SEQ ID NO: 386092 - RNA, 61 nt, Homo sapiens
agggcagguucucaagcaauccuuagccuguggcuaggauaguccuccugagaccugccuu

SEQ ID NO: 386093 - RNA, 70 nt, Homo sapiens
accuggggaggaucaugauuggcaucuuuaacauuuuuugaccagaucaauugcugauucgcucuauggu

SEQ ID NO: 386094 - RNA, 70 nt, Homo sapiens
uaguuguaugccacagaaauaaccaaaauuuccuugucaauugugguuuuaaucguggcuguccuaacua

SEQ ID NO: 386095 - RNA, 65 nt, Homo sapiens
ugucuuuaacauuggcuacauacagaacuuuguuaaacaugugcacugcagcaauguaaaagaca

SEQ ID NO: 386096 - RNA, 68 nt, Homo sapiens
ccuauaaaaugccauguggagcaccccagaugaagcagcugguaugcuucauaugcaaaccauguggg

SEQ ID NO: 386097 - RNA, 63 nt, Homo sapiens
caguugcuuguggcuagugcauagaaauaaguggauuuucugcacaucgaucacaagauucug

SEQ ID NO: 386098 - RNA, 60 nt, Homo sapiens
cuccugaccuggugguccacccgccuuggccucccaaggugcugggauuacaggcaugag

SEQ ID NO: 386099 - RNA, 74 nt, Homo sapiens
ggguuuguuaugguacuccagagaagcagaagaaauuccuucugcuucucuggaguacccuaauuuuaguaccc

SEQ ID NO: 386100 - RNA, 123 nt, Homo sapiens
uauucagaaccacguuuagaggugaggaagauugguuuugcuuguguaaaaaucuggacagcuucauuugccaucugugaaauuuaucgagugagggccaaaccucugaaacacaucugaaua

SEQ ID NO: 386101 - RNA, 66 nt, Homo sapiens
cagcuguguuauaaacuaccaugggguaaauaugcuaacaauccauuaguacagcagcaccagcug

SEQ ID NO: 386102 - RNA, 82 nt, Homo sapiens
uguagccuuguaguauaguuugaagucagguagcgugaugccuccagcuuuguucuuuuggcuuagaauugucuuggcuaua

SEQ ID NO: 386103 - RNA, 75 nt, Homo sapiens
guguuucucauuauaggacguaguuuaaaaauauaucuguaauauuguucaauucccaccuaugagugagaacau

SEQ ID NO: 386104 - RNA, 112 nt, Homo sapiens
ggaggcugaggcaggagaauugcuugaaccagggaguuggagguugcagugagccgagauugcgccauugcacuccagccuagcgacagagcgagacuccaucucucucucu

SEQ ID NO: 386105 - RNA, 71 nt, Homo sapiens
gaauucaguuugcuaguauuuuauugagaauuuuugcaugaauauucaucagggauauuggucuguaguuc

SEQ ID NO: 386106 - RNA, 55 nt, Homo sapiens
uugagauggagucucguucugucacccaggcuggagcgcaguggcaccaucucag

SEQ ID NO: 386107 - RNA, 73 nt, Homo sapiens
ccuccuaggaacuuuuauaaucaccaguaugauccaauauaaauacugcacauaugaagguucccaguugagg

SEQ ID NO: 386108 - RNA, 73 nt, Homo sapiens
gucuauaauggcacccaugcacuuucagucuugaagguucuuucuuuaaugcugcccagucaugggccaagac

SEQ ID NO: 386109 - RNA, 71 nt, Homo sapiens
uaagaugggcucaaacuggagguuguuugaaaauuuaaaaucaaacugcucuuaccagaugggucagcuug

SEQ ID NO: 386110 - RNA, 58 nt, Homo sapiens
gguuggaaugguacuaugaaggugaaaucuuaccuucauuguugccauguccacugcc

SEQ ID NO: 386111 - RNA, 64 nt, Homo sapiens
uugcuugaugauuaauguuaaaugugagaguugggggcucuaaaauuuggcauaguuuaagcaa

SEQ ID NO: 386112 - RNA, 113 nt, Homo sapiens
agcuuuuugaugugcugcuggauucgguuugccaguauuuuauugagcauuuuugcaccaauguucaucagggaucuuggcccaaaauucaacagcccuucaugcuaaaagcu

SEQ ID NO: 386113 - RNA, 60 nt, Homo sapiens
gcugccguagcaugcauucuccuuacccucaagcguauucaugugcauagccauggcagc

SEQ ID NO: 386114 - RNA, 59 nt, Homo sapiens
gaauugcacaaaaacugcuuguucugcaaauuuaguuuacaacaauuugagugcaguuc

SEQ ID NO: 386115 - RNA, 73 nt, Homo sapiens
ggguaaugaguauguucuguauuuucacugugauauuaauuucacugguauauacauaugucaaaauuuaccc

SEQ ID NO: 386116 - RNA, 63 nt, Homo sapiens
gcauaaaggacuauaaggaucaaaaagcaagcagaaaugaauccacauucuaguccuuuaugc

SEQ ID NO: 386117 - RNA, 58 nt, Homo sapiens
uuaaaguggugggauuccaggcaugagccaccaagcucagucuucucuacuauuuuaa

SEQ ID NO: 386118 - RNA, 61 nt, Homo sapiens
ucuuuugugauucuucaguuacuucaggccaucuggauguauaugugcaggucacaggaga

SEQ ID NO: 386119 - RNA, 97 nt, Homo sapiens
ggcuugacaacuugugaaggggauucaaggacuggauugcgggauagcacgaauguccucaauaagguuacuuggguccuauaaaguugggggaguc

SEQ ID NO: 386120 - RNA, 56 nt, Homo sapiens
gagcuggacuucuuaccuuuucaaagaccaagaaaagucugagaugauuccagcuc

SEQ ID NO: 386121 - RNA, 59 nt, Homo sapiens
uuauugaugugcuuuugucuugcuuugguaucagggcaauacugaccucacguuaauag

SEQ ID NO: 386122 - RNA, 55 nt, Homo sapiens
aacaguuaaggggcuaguaaguggcagaaguaggaaucagccccauuagcuaguu

SEQ ID NO: 386123 - RNA, 81 nt, Homo sapiens
ggauagaguugucgugaaaguuuaaugaaauugcaugcaccccagcauguaacaguaguuacuauucuuacagcuguauuu

SEQ ID NO: 386124 - RNA, 82 nt, Homo sapiens
gugggagagaaaggcgaguacuaggagaugaaguugaagaauuaagcagagaccagaucaaguacugccuugcucuggccau

SEQ ID NO: 386125 - RNA, 78 nt, Homo sapiens
ugguuuuugucauugguucuguuuauaugcuggauuacauuuauugauuugcauauguugaaccagccuugcauccca

SEQ ID NO: 386126 - RNA, 55 nt, Homo sapiens
agugguagagggguuugcacugcagccuacaguagcugcaaagucuuuuccuauu

SEQ ID NO: 386127 - RNA, 65 nt, Homo sapiens
ucucugaggaagaggcuguaauuugcaugcuuaaucucaugucuauuccacuuuuccuucaggga

SEQ ID NO: 386128 - RNA, 62 nt, Homo sapiens
uugugaauagugcugcaauaaacauacgugugcaugugucuuuagagcagcaugauuuauaa

SEQ ID NO: 386129 - RNA, 75 nt, Homo sapiens
cacuaucuagcacauaguuauucacucaacauguauuuauugacucauugaugugaaauuguguuggcuaaagug

SEQ ID NO: 386130 - RNA, 55 nt, Homo sapiens
cuucuuguuguggggggugcaacagguugagauuuauccacuugcaacagagaag

SEQ ID NO: 386131 - RNA, 79 nt, Homo sapiens
ccuuuuuuaaaguuuguauuaaauauaacccugagauaauucuucauaaaguuguuuuaaugggaacaucacuggaagg

SEQ ID NO: 386132 - RNA, 87 nt, Homo sapiens
gauaaacaggaaugcuuuuacacuguugaugggaguguaaauuaguucaaccauugcagaagacaguguggcgauuccucaagaauc

SEQ ID NO: 386133 - RNA, 87 nt, Homo sapiens
guagucaagagaucauaugcaguaaugaacucuauggaagaggauuaaauaugacauucauuugguaaaugauuucuguaugauuau

SEQ ID NO: 386134 - RNA, 68 nt, Homo sapiens
cagcacucaguuacacggccacuucuaacuacaagggagguugggaaauguagccuagcugugugcug

SEQ ID NO: 386135 - RNA, 62 nt, Homo sapiens
ucuuucacuuggguacuuaaauuuagcauggaucugaagacucgugcaguacuuaguaagga

SEQ ID NO: 386136 - RNA, 114 nt, Homo sapiens
acaccugcugguuuuuuuuuucaaaggaagagcauugaguuaaugguucaauguuaaugugaguugauuuuauugauuuugugcuggaaguugauuaauuauaaugguaggugu

SEQ ID NO: 386137 - RNA, 64 nt, Homo sapiens
uucaguuugccaguauuuuauugaggauuuucgcaucaauguucauuagggauauuggccugaa

SEQ ID NO: 386138 - RNA, 81 nt, Homo sapiens
uaugaggcauuccagaaauuuuagcagucagggaccaucuuaauccaaguucaaggacuaaggauuuuuggaaccuucaua

SEQ ID NO: 386139 - RNA, 65 nt, Homo sapiens
gcuuugaggaguguauuucauucgcucuauuagcuuuagagccaaggacaugcacuucuuagagc

SEQ ID NO: 386140 - RNA, 78 nt, Homo sapiens
acucuaucuuagcagaaauauuugucuguuuuauucacucuuugaauuaauuuggcaaaauauugucugguauagagu

SEQ ID NO: 386141 - RNA, 59 nt, Homo sapiens
uuucuaauuucauuuccaggaauaaugauauaaaucaguuuggaaaugugaauugggag

SEQ ID NO: 386142 - RNA, 64 nt, Homo sapiens
ugccuuuuggucacugccgccgccagcagcccaggcugacugguuugacaguggccauugugca

SEQ ID NO: 386143 - RNA, 92 nt, Homo sapiens
aauguugaauagaagugguaugagaagacaucuuugcuuuguuccauaucuuagggaaaagcauucagucuuuuaccauuuuuuguaauguu

SEQ ID NO: 386144 - RNA, 60 nt, Homo sapiens
ugauaggacuuuagcuucuacucauguuauaugggaauuuugaguagaggaguucuauca

SEQ ID NO: 386145 - RNA, 75 nt, Homo sapiens
gcucauccaugugaagagaccaccaaacaggcuuugugugagcaacauggcuguuuauuucaccugggugcaggc

SEQ ID NO: 386146 - RNA, 103 nt, Homo sapiens
uugugaaaauaugacaaggcaaagcggcuuuggcuagguuaguuauuuggguagagaagugacuggauagauaaaguuaguuuaaccagguuuguuuguacag

SEQ ID NO: 386147 - RNA, 68 nt, Homo sapiens
cuguaaccuccaccuccuggguucaaaugauuauccugccucagccacccauguaggugggauuacag

SEQ ID NO: 386148 - RNA, 61 nt, Homo sapiens
agcaacuucucuggucaagguuacaaaaguagugagugggauugacagagggaaaguugcu

SEQ ID NO: 386149 - RNA, 57 nt, Homo sapiens
gcuucauggaggcugggcgcaguggcucacgccuguaaccccagcacuuuaggaggc

SEQ ID NO: 386150 - RNA, 86 nt, Homo sapiens
gguugguuccaagucuuugcuauugugaauagugccacaauaaacauacgugugcauaugucuuuauagcagcaugauuucuaauc

SEQ ID NO: 386151 - RNA, 129 nt, Homo sapiens
agagagccuauaaauggacaugcaaguaggagagauauugcuaaauucuuuuccuagcaaggaauauuaauauuaagacccugggaaaagaauugcaauccuggggggcggucuauaaaugggcgcucu

SEQ ID NO: 386152 - RNA, 130 nt, Homo sapiens
auccgcccgccucggccucccaaagugcugggauuacaggcaugagccaccaugccuggcguacaaaaaggccaggcacggugucucaugccuguaaucccagcacuuugggaggccgaggcagguggau

SEQ ID NO: 386153 - RNA, 85 nt, Homo sapiens
cacacaauauucuugcuugaacuuggugcauucuguugggacacauaaaaaguauuauuaaguuuaagaagacuggccaggugug

SEQ ID NO: 386154 - RNA, 67 nt, Homo sapiens
caguccccauccagcccagugggauugcaggggcccagcugaggaucccaagaugagaugggggcug

SEQ ID NO: 386155 - RNA, 58 nt, Homo sapiens
gacaugaggaagucaggcccaggggcaccguccagccucaccugccuuccucaugguc

SEQ ID NO: 386156 - RNA, 106 nt, Homo sapiens
caggauguagaucauugaucccuaccauugcugagacauugcuaaucugauauuuauccagagcgcacugucugcaggcaaauuaggguuuuaauucaccaucuug

SEQ ID NO: 386157 - RNA, 87 nt, Homo sapiens
guuaggaugguacaucccagugaagagaaccuuacgaugugauuugguauguuguuguuucaacuuuucugcauguccuuuccuagc

SEQ ID NO: 386158 - RNA, 77 nt, Homo sapiens
gggugccaggccacucauucauuccuugacauccauggcacagccagggcaguuaagagugggaguuggccacaccc

SEQ ID NO: 386159 - RNA, 67 nt, Homo sapiens
gaccuuguagaaucucaugauuaucuguauugcaaaugaccuucucaugggauaucuuacugagguu

SEQ ID NO: 386160 - RNA, 60 nt, Homo sapiens
aggaaaaaagaucagaaagaaauaaaccaaaauguuaacgugauugugaucuuuuuucuu

SEQ ID NO: 386161 - RNA, 77 nt, Homo sapiens
augguauugguaugguauugguaugcucugaaaaaaccaaugcuuuuucagagcaaagacacuuuaucaaauacuau

SEQ ID NO: 386162 - RNA, 56 nt, Homo sapiens
guauaacuauagagaauguugaguagaguuguuuggcuuugcuucuauagcuguau

SEQ ID NO: 386163 - RNA, 77 nt, Homo sapiens
gauaugguggcuuaucuuuucgauaugcuguugguuugguuagcuaguauuuuguuaaggauuuuugcaucuauguu

SEQ ID NO: 386164 - RNA, 64 nt, Homo sapiens
ugacuuugggacccaacugugguucuagccccuccuugaguccccacacugggucccuugguca

SEQ ID NO: 386165 - RNA, 62 nt, Homo sapiens
gugaugugaggaaagagucuaauuuuauucuuuuggaauuggauauucaguuuuuccaucac

SEQ ID NO: 386166 - RNA, 75 nt, Homo sapiens
gcaauaauugcaucuguucuuugccaggaaauauuuaaauauuguuauugguugaaacaaaaugcaaaccuuugu

SEQ ID NO: 386167 - RNA, 86 nt, Homo sapiens
ugaauauuauuuggcuguauggauguacuauguuuccuuuauucuuuugcaaguaaauauccgguagucccagcaccauuuauuca

SEQ ID NO: 386168 - RNA, 61 nt, Homo sapiens
gcuuucaagcuacaguggcaggguugugucauugcaacagcaacuguauggcuugcaaagc

SEQ ID NO: 386169 - RNA, 104 nt, Homo sapiens
cgaguuagcugaccucaaucaagguuucaaaaugaacucauucuuauggggucuaaucagaugagagcugcauucuugaaagcuugauuagacuguuagacuug

SEQ ID NO: 386170 - RNA, 74 nt, Homo sapiens
aagcuucaggagaugaagugucaauaaggauuaauacgaagguagaucaaucacgcugucauuucauagggcuu

SEQ ID NO: 386171 - RNA, 86 nt, Homo sapiens
augucuuugcuaaugugaauagugcuguaaugaacauaagcauacaugugucuuuaugacagaacgauuuauauuccuuuggacau

SEQ ID NO: 386172 - RNA, 80 nt, Homo sapiens
ggagacuguucaggaggcauuuggugggucaugcaaucaggcaucauaugucagguuuagcagaugccucugaacucuuc

SEQ ID NO: 386173 - RNA, 120 nt, Homo sapiens
gaaguauguuuuuaaaugucuugcaagaaauagguuggaaacuuuaacaaagaucucuagacuugaauuuagagcuaguuuuuaaucuaacuuguagaaacuaaguuaauaacuuacuuu

SEQ ID NO: 386174 - RNA, 62 nt, Homo sapiens
uugugaauagugcugcaauaaacauacguaugcauguaucuuuagaguagcaugauuuauaa

SEQ ID NO: 386175 - RNA, 56 nt, Homo sapiens
aaaauagaggcuuccuuuaaaaagcauuccuuauuagguaggauagucuuuauuuu

SEQ ID NO: 386176 - RNA, 60 nt, Homo sapiens
cccuucauucaaggguugugagucuguaaacuggcucaagccugggaauugauugaaggg

SEQ ID NO: 386177 - RNA, 61 nt, Homo sapiens
aaugugucagaaucuagaggcugcuagaaggaaauuagcauggacuaauuuugacuacguu

SEQ ID NO: 386178 - RNA, 65 nt, Homo sapiens
guauuuuacaagugcuuuucuguuugaggucauuucacucagaguauagcaacuuaguaaaauau

SEQ ID NO: 386179 - RNA, 59 nt, Homo sapiens
augucugcgaaggcaagggcauguauagcuugaaaaauauccuuugguuuccaugacau

SEQ ID NO: 386180 - RNA, 88 nt, Homo sapiens
cacuucaagguguuccuugaaacagucaagagaaguccuuuaugccuccccggguuuucucgacuguuucaagguacaccucagagug

SEQ ID NO: 386181 - RNA, 78 nt, Homo sapiens
aaaguuuggauuagauaauugagaucacuguuccuaauauagcucuuguugagaucaguuguuauaauucuugauuuu

SEQ ID NO: 386182 - RNA, 108 nt, Homo sapiens
gauauuucacauaaauggaaucauacguauguaguucuuuugugacuggcuucuuccgcuuagccagauacagccacauaauguaugauuccauuuuuaugaaauguc

SEQ ID NO: 386183 - RNA, 60 nt, Homo sapiens
uucacccugguuguagauggacucacaggcuucagcuggccaccuaagcucagggaugga

SEQ ID NO: 386184 - RNA, 119 nt, Homo sapiens
aaauguagacaugcuaagagcaggaauuaaacucaaguuucuuaaugucagaucugauacucuugacacuugcccuuagaaacauguaguugauuauuuuuguuuuucauguuauauuu

SEQ ID NO: 386185 - RNA, 102 nt, Homo sapiens
uguuacuggaaggcccauaaaaagggcuguuucuugacuuggugggucugagugggccagggucggguuaagaugcuagccucguggggugccauccugaca

SEQ ID NO: 386186 - RNA, 56 nt, Homo sapiens
gcugguucuguuuauaugauggauuauguuuauugauuugcauauguugaaccagc

SEQ ID NO: 386187 - RNA, 98 nt, Homo sapiens
gaggaaggagaaucgcuugaacccgggaggcagaacuugcagugagccgagauggcgcuacugcacuucagccuugugacagagcgagacuccgucuc

SEQ ID NO: 386188 - RNA, 59 nt, Homo sapiens
gggaguagagaguuucucugaccccaugugaugggaaaggacacagcuuuuuuacuucc

SEQ ID NO: 386189 - RNA, 77 nt, Homo sapiens
ccagaaagugaccucacucacacuugggauugauaugguccuccacauuccagauggaguugaggguuucuuucagg

SEQ ID NO: 386190 - RNA, 117 nt, Homo sapiens
caagagggaaagugugagauuuuggaaaauauaugcucugggauccugaaagccaaaccuucucuuuucacaaacucagggugugugacaucuucagaaucaaaugaguucuuuuug

SEQ ID NO: 386191 - RNA, 58 nt, Homo sapiens
ucauguguugcacugaggaccugccaccuuaugugguguuuuugccaaaaaugcauga

SEQ ID NO: 386192 - RNA, 83 nt, Homo sapiens
ucaaguacaacaaaugcugagccagaaauauuccaauauucuccuuguuggcaaguuucugucagcaaaguugcauaacuugg

SEQ ID NO: 386193 - RNA, 77 nt, Homo sapiens
caucccacaaaagugacuuagugccccauuuacaacacaguugguaaaaagggugaagaucacuuugaacuggggug

SEQ ID NO: 386194 - RNA, 116 nt, Homo sapiens
gacugugggaaaaaugcaguauuugggugggagugucccguuuuuccagguacagucugucacggcuucccuuggcuaggaaagggaaauucccugaccccuugcacuucccaguu

SEQ ID NO: 386195 - RNA, 56 nt, Homo sapiens
gggaaggcaugauguuuuggaggccauaggauggagccuaagaugcagccuauucc

SEQ ID NO: 386196 - RNA, 64 nt, Homo sapiens
auugugaauagugcugcaauaaacacacgugugcaugugucuuucuagcagcaugauuuauaau

SEQ ID NO: 386197 - RNA, 124 nt, Homo sapiens
cuauacuuuggagcugagugacuuugggccaguugcuugacuuuugugcuaaauuuucccaucugcaagauuuagguaauauuaaguagcuggcaaggcuguugugaggauuguuaaacuguag

SEQ ID NO: 386198 - RNA, 71 nt, Homo sapiens
auggggcuguuauggcugaggggcugaauuucuaauuuuaaccaauuucaguuuagguguaacggccacau

SEQ ID NO: 386199 - RNA, 110 nt, Homo sapiens
ucugggggccaguggcaugcaccucuuuaucauugugcaucuucauuccacuaaaccugcaguaguggcugaauaccacaauuagagcugcauggagccugggcccagga

SEQ ID NO: 386200 - RNA, 75 nt, Homo sapiens
gcauauuguugugguuuuaauauucagucuagauaucuuuuccuuuuauuuagaguauuuuaagccauuauaugu

SEQ ID NO: 386201 - RNA, 64 nt, Homo sapiens
uggugagaaaugagaugcuuuuuuucaaagacugagaaaaacccagagacgucuauucucacua

SEQ ID NO: 386202 - RNA, 125 nt, Homo sapiens
gcauggagaauggugcaguaccuguguagacauggcccuugggcagugugcauguguaugcuauagagagugggaaugcuguguacacugaaugagugggcuuggacaucuguggugacaugugc

SEQ ID NO: 386203 - RNA, 68 nt, Homo sapiens
ggcacuagauucucacaggagcgugaacccuauuguggguugcacacucuguaugagaaucuaaugcu

SEQ ID NO: 386204 - RNA, 59 nt, Homo sapiens
uccuuaauucucaaggcauaugaaauggucacguuaucaaguuggaagagaaguaagga

SEQ ID NO: 386205 - RNA, 59 nt, Homo sapiens
cuuuaucauagugcaguuuucugacuccugugucagggucaccugccgcuguggaaggg

SEQ ID NO: 386206 - RNA, 88 nt, Homo sapiens
uacauauuagucauuuaaacacucacuucauagccauuauugucaaaacaacaugugugcuuuggguguggguguguacagguaugua

SEQ ID NO: 386207 - RNA, 78 nt, Homo sapiens
agauucucauaggagcacaaaccccauugugaacuucacaugugagggauauagguugagugcuucuuuugagaaucu

SEQ ID NO: 386208 - RNA, 64 nt, Homo sapiens
uuuguuguuuguuugugauacgguacauuaguuuuuuauugcugcuguaacaaauuaccacaaa

SEQ ID NO: 386209 - RNA, 63 nt, Homo sapiens
uggccuauaaggguucugcugagaagucugccguuaggcuuauuaagauucccuuauauguua

SEQ ID NO: 386210 - RNA, 59 nt, Homo sapiens
acugccugggcaggguagaagucauuguugaagaugaggucuuucgguuaccaggcagu

SEQ ID NO: 386211 - RNA, 59 nt, Homo sapiens
uacguuuuucucaaggacauucuuuugguaucaaaaacugucaagugggaaaacaugua

SEQ ID NO: 386212 - RNA, 60 nt, Homo sapiens
aagugaccuguaguuuaguugccuguaguuuaccugccgccacuauuacacagggaacuu

SEQ ID NO: 386213 - RNA, 73 nt, Homo sapiens
gggaccuaacauagugcuauggcagaccuugaggcugagucuucagaguccaguguggcacuauggugguccu

SEQ ID NO: 386214 - RNA, 75 nt, Homo sapiens
cagaaauuuggauuuucaggaaguucuuggaacaaaguuauuugcaucuuuugcuuccuggaugagaauguucug

SEQ ID NO: 386215 - RNA, 70 nt, Homo sapiens
auauccucucuagcaccuguuguuuccugacuuuuuaaugaucaccauucuaacuggugugagaugguau

SEQ ID NO: 386216 - RNA, 67 nt, Homo sapiens
uggaauuauaggcaugagccaccacgcccggcggaugauggcauuucauguuuguaaaauuguucca

SEQ ID NO: 386217 - RNA, 75 nt, Homo sapiens
cagugccaaucacagacugagccaaauagaggugaaauuuucaaugugcucaucauguggaccauggcuuugcug

SEQ ID NO: 386218 - RNA, 100 nt, Homo sapiens
gaggcagauguuuagguaauauauugcugcuuugcauuucuauaacaccuuccauguaagagcugcagaguguaacacaaacauuaauaaauuaagccuc

SEQ ID NO: 386219 - RNA, 58 nt, Homo sapiens
aauggcaguagauggauggguaggucucuggacacacaauaaaguccguccugucauu

SEQ ID NO: 386220 - RNA, 75 nt, Homo sapiens
cucccugagguggugguggaggcauagcugacucauccagauuuguucugcuggccucaucacugacuucuggag

SEQ ID NO: 386221 - RNA, 68 nt, Homo sapiens
ugacucuagcuggagugacaaggaugacuuggcucugcuuuagguauuuuuuauccuccagcagguua

SEQ ID NO: 386222 - RNA, 119 nt, Homo sapiens
auuagggcaauguuuaauuuacugucucauggcuuuuugaguaaauauaaauugucauacuaaagugacagguguaaaacccaggauggcuguguuagagagguuaaucugcuguuaau

SEQ ID NO: 386223 - RNA, 60 nt, Homo sapiens
ggagauguuuaaccuuuuaucuguagcuaucugcuuaggaaugaaaggaaaggcaucuuc

SEQ ID NO: 386224 - RNA, 71 nt, Homo sapiens
ucaguuuuaagggugauuccugcuaagucaagaacuccuauuguugauaucugaucauccuugauaucuga

SEQ ID NO: 386225 - RNA, 110 nt, Homo sapiens
aacuuucuagccagagcagcagcacagugaaugguuuacucacagcuccuuugucugcugaugggagauuuggcacugugcuugccucuugggcuuaccugagcaaaguu

SEQ ID NO: 386226 - RNA, 56 nt, Homo sapiens
ccauuuggcugccauaauccacaaagcuggcuuguuggaaugaauggccaacaugg

SEQ ID NO: 386227 - RNA, 65 nt, Homo sapiens
uauggcagugccugucuacauugguggagggaaugugccuaccacauuguagagggcauuccaua

SEQ ID NO: 386228 - RNA, 88 nt, Homo sapiens
ggagucuugcucuguugccuaggcuggagugugguggucuggucucaguucacuacaacuucugccuccgaggcucaagcgauucucc

SEQ ID NO: 386229 - RNA, 55 nt, Homo sapiens
aaagugcugagucuaggcggggcgcgguggcucacgccuguaaucccagcacuuu

SEQ ID NO: 386230 - RNA, 127 nt, Homo sapiens
gcuuucuucugucuuaauguuagcucugucuuucaaaaggguguuugccugacaugugguugagcugcuggucagcagcacaucccuuucuggccuaggguaggggagcaaagaggcagaggaaagc

SEQ ID NO: 386231 - RNA, 78 nt, Homo sapiens
ucacugacauuacucguucaugagcacaauagauucauguguuucccacaagguacaugcucaugaguaaugcaguga

SEQ ID NO: 386232 - RNA, 57 nt, Homo sapiens
gaacaggagaggcacccauggcgcagcucacagcauuccaucaguccucucuuguuc

SEQ ID NO: 386233 - RNA, 68 nt, Homo sapiens
ugcaguuuaggaacugguaacauugauuucuacucuauuuaccagcguuucuaauuggaaaagcugca

SEQ ID NO: 386234 - RNA, 70 nt, Homo sapiens
auacacuacaguucuuaauuaaguaguaacauaguagauacuugauuauuugacuugagaacagguguau

SEQ ID NO: 386235 - RNA, 63 nt, Homo sapiens
caauguuaggugcauauauauguaggauaguuaagucuucuugcugaauugugcccuucauug

SEQ ID NO: 386236 - RNA, 57 nt, Homo sapiens
uucuugguuggcaaccaacagugucggccucacgacacuuugauucuugaucaagag

SEQ ID NO: 386237 - RNA, 97 nt, Homo sapiens
gcugugguggccauggagccaagacucuguuccccuugauaaaaguggaagaaaaauuaaagggaauuuugucuuguaccugaggugccaguucagc

SEQ ID NO: 386238 - RNA, 129 nt, Homo sapiens
ucuacuauuggcuccauacuaauguuccuugugauuuaaugcgucucugaguuuugcaugucuaagguuauuuacagcuuaaaagaugcauuuauauuaugauuagucaccggugagcuaugaaguaga

SEQ ID NO: 386239 - RNA, 61 nt, Homo sapiens
gguuaaucuggggaauaucacaaaucccuaagaagggaacugacuagauuccagauuggcc

SEQ ID NO: 386240 - RNA, 116 nt, Homo sapiens
aauccucauauacuaugauucuuugggugugaaaaggcauggaaaauggaaugccuggaacucuagguuuucagccccagccuaggcaacacucauuggguuuacaccuuaggauu

SEQ ID NO: 386241 - RNA, 104 nt, Homo sapiens
gucucuccuauuucuguguauguuauaaauagagacacuggcugcauuuauucuuaauuguuuuuucaacguauuuauauagcagagccauggaagcuagagac

SEQ ID NO: 386242 - RNA, 96 nt, Homo sapiens
aacaccaguuaguucuuuuacaucuuaagauugccuuaauuagauaaugguauuuuaguuauggaguaauuuuaagcaguuuuaaauagcuguguu

SEQ ID NO: 386243 - RNA, 75 nt, Homo sapiens
cgagaaguugaaugaaauugguguggggauaucuguggagucagauuuccuuuggauuuuucauuuaaccccuug

SEQ ID NO: 386244 - RNA, 55 nt, Homo sapiens
caucaggaaggggagugggccgacaacacagcuggcuagacguccuuuccugaug

SEQ ID NO: 386245 - RNA, 68 nt, Homo sapiens
acacacugcccaguggacagaaagucaucauucuugagugaugcuguaucucaugcaugggcgugugu

SEQ ID NO: 386246 - RNA, 69 nt, Homo sapiens
gucaauaucugugauuuggaugaguuguaauuguuuuaauauugcauaucuucagccgggcacgguggc

SEQ ID NO: 386247 - RNA, 64 nt, Homo sapiens
uucaguuugccaguauuuuauugaggauuuuugcauugauguucaucaggaauauuggccugaa

SEQ ID NO: 386248 - RNA, 90 nt, Homo sapiens
aggcauuguacuuugcacuggagauucaaugggaagcaacaauggauaaggcuguugcccuaugaauuuaugguguaauggauaaggcuu

SEQ ID NO: 386249 - RNA, 85 nt, Homo sapiens
ugccaguuuuccaagggaaugcuuccaguuuguguccauucaguaugauauuggcuguggguuucucuagaagaaaaccuaggca

SEQ ID NO: 386250 - RNA, 60 nt, Homo sapiens
auugagcaauuccuaugugcuuggcuuuauuauaagguuuuuacauggcauugucucaau

SEQ ID NO: 386251 - RNA, 63 nt, Homo sapiens
cuauguguccauguguucucaugauuuagcuuccacuuauaagugagaacaugugguauuugg

SEQ ID NO: 386252 - RNA, 61 nt, Homo sapiens
guuuucgugucuggucugugaugggaggauaauauauucauuuacuuucagauaugaaggc

SEQ ID NO: 386253 - RNA, 63 nt, Homo sapiens
cuggagauuaaccaauugccauugccaaauuauuguaacagcauggaaacuggcuguuuccag

SEQ ID NO: 386254 - RNA, 55 nt, Homo sapiens
uuucccugaaggcucugaagucccauacgggaaaccaugagggccuuccgggaag

SEQ ID NO: 386255 - RNA, 79 nt, Homo sapiens
ugcuuuacgugaggugguacaauauuaacucaaaauagaccacgaugaguuaagaauacacaucauaauuccuagagca

SEQ ID NO: 386256 - RNA, 61 nt, Homo sapiens
gcacuuuguccaaggucaacuggcagaaacauguuuaaauucagugcugugggcaaggugc

SEQ ID NO: 386257 - RNA, 58 nt, Homo sapiens
ugacauuuuucuuggauuuuguguaauuguccuaucaauugccgagagaaagguguua

SEQ ID NO: 386258 - RNA, 114 nt, Homo sapiens
auguagaaauaagcauuguuaauauuauguuguauuuccuugcagucuuuguucuaaaugcucauaguugcacagaaugacaauauguacauguuuuuaauguuguauuuauau

SEQ ID NO: 386259 - RNA, 55 nt, Homo sapiens
caaggcacagccccuacuuccugaauuccuggaggucgaguagguccuuguuuug

SEQ ID NO: 386260 - RNA, 94 nt, Homo sapiens
guacucuucgggauuagaauuucagaaaggggaagucaugccaccaacuuuuguaacucucccauccaugaacuucuguucuugacaguugugc

SEQ ID NO: 386261 - RNA, 68 nt, Homo sapiens
gaggaaucauauggauuuuaggauacaguugaaaguuuacuuuaaauuuccuggguuccaugcuccuu

SEQ ID NO: 386262 - RNA, 80 nt, Homo sapiens
gacaaucagaauaugcaucuaucuagugagcagagggaugacuuugaauagaauggaaggcauguuugcccugagcaguu

SEQ ID NO: 386263 - RNA, 90 nt, Homo sapiens
gcacugcaggauucgguuugccaguauuuuauugaggauuuccgcaucaauguucaucagggauauuggccugaaaguuuuuguuguugu

SEQ ID NO: 386264 - RNA, 82 nt, Homo sapiens
acucauuccuacuuauagucagugucuuugcagcucagaagggauuucugggcaugcauagggccuguaugguagggugggu

SEQ ID NO: 386265 - RNA, 87 nt, Homo sapiens
caguugauuguuuuucaugacguguguuagcuggguaguuccucuacuggucucaccuagacucgaucauguagcuacauucagcug

SEQ ID NO: 386266 - RNA, 55 nt, Homo sapiens
uugagauggagucucgcucugucauccaggcuggagugcgguggcuccaucucgg

SEQ ID NO: 386267 - RNA, 129 nt, Homo sapiens
caggugugagccacggagcccagcccaaggccuggcuuuugauuuugcagaucuaaaaucuugauuugguucaugcaucuguagugguuaaguuugcuuguaacuuggcugggccguggcacacggcug

SEQ ID NO: 386268 - RNA, 97 nt, Homo sapiens
guagaauuuuacuguggaauuucaguguuuuccuuuaacucuuugugcuagaauaaacaggagcuuuggggaaaacagaucuauuuugaaguucugc

SEQ ID NO: 386269 - RNA, 84 nt, Homo sapiens
uuuagguuuuuuuaguuuugcagaugauacgauaucugagaucauaucuaaaaucauaucaucugcaaacaaagauaauuugga

SEQ ID NO: 386270 - RNA, 90 nt, Homo sapiens
ucucauucauguccacccagaacaucaguauguggcuuuaucuggaaauagggccuuuguagauguacucaguuaaggacugugaggaga

SEQ ID NO: 386271 - RNA, 56 nt, Homo sapiens
auuuggaagguuuacaaagagagauuacuacuuuucucagugcagauuguccaagu

SEQ ID NO: 386272 - RNA, 58 nt, Homo sapiens
ggcuguuagcccagcaauugggcgugacuguuccugcccagugugcugggugacagcu

SEQ ID NO: 386273 - RNA, 118 nt, Homo sapiens
guuucuacuuaagugaaucagaucaaaaauguaauuauugacucauagaaaggauguacuacaaagaagaaauacacuugauuuauaaagaguuaauuuugaagugauuuuuagaaac

SEQ ID NO: 386274 - RNA, 106 nt, Homo sapiens
uccaucuguaaucuuaagagagaacugauuggaugugggcacguuccucagauucuaugcccaacuccaaucaguucucucucucuucccucggauuauagaugga

SEQ ID NO: 386275 - RNA, 73 nt, Homo sapiens
cuuggccuauuccagcagcuguggacuccuaacaguuuuccccacucacuuacagcugcagaaucaggcuaag

SEQ ID NO: 386276 - RNA, 67 nt, Homo sapiens
uuguacuccauguucuuaauggcuggaauuagccacauggccauagcuagagaggcuggggauacag

SEQ ID NO: 386277 - RNA, 106 nt, Homo sapiens
guuucagaucagcugaauagaaauuagcagguggugaccacauuuuauaauaugauuuuugaagaaguauaacuauuugcuuucuucaauuuaguuuuuuaaaaac

SEQ ID NO: 386278 - RNA, 77 nt, Homo sapiens
gagaagugguuguuuccagguuugaaaaauuucacaguauuauuuuaagcuacaagagacauaugccuaacuuccuc

SEQ ID NO: 386279 - RNA, 76 nt, Homo sapiens
ucgcuugaaccccgguugcgaacguugcagugagucgagaucagccauugcacuccagccuggggaacaagagcga

SEQ ID NO: 386280 - RNA, 60 nt, Homo sapiens
gucacugagaagguuaguuugucuuucacagcagggcuauuaguaaaaauucucagugau

SEQ ID NO: 386281 - RNA, 78 nt, Homo sapiens
cccagacugucccagugagacaugugaacuguaguucagcagaagugugggcaggggacacaugcucaggacccuggg

SEQ ID NO: 386282 - RNA, 77 nt, Homo sapiens
gcugggcacacacuggccagugcaagacuuuccagagcucucuuuccuucugucacaguggccagugauguuccagc

SEQ ID NO: 386283 - RNA, 90 nt, Homo sapiens
auuuuguuaggacacauugcaggaaaguucauuauucuaggccuucaacagaauaaucuuagcaaccuccagugugauagagaacagagu

SEQ ID NO: 386284 - RNA, 81 nt, Homo sapiens
cuguugaugagaauguaaguuaaugaaaucauuuauauauauguauuuuuuuagggacuugcuccuuauugccaccuacag

SEQ ID NO: 386285 - RNA, 86 nt, Homo sapiens
gagucucacucuguugccuaggcuggaaugcaguggcacgaugucggcucacugcaaucuccgucucccagguucgagugauucuc

SEQ ID NO: 386286 - RNA, 64 nt, Homo sapiens
guaaucucagcuacgcgggaggcugaggcaggagaaucgcuugaacccgcgagguggagguugc

SEQ ID NO: 386287 - RNA, 130 nt, Homo sapiens
aacccaugugaucuucaaaggguagacuguagaucuauacuguagaucuauacuguaggucuauccagucuacccuuugaagaucacacuguagaucuauccagucuacccuuugaagaucacacugguu

SEQ ID NO: 386288 - RNA, 65 nt, Homo sapiens
ugugauguguuuuguaguucaacucauuucccuuuaggaccucaguagacacuaaauacauuaca

SEQ ID NO: 386289 - RNA, 97 nt, Homo sapiens
ggacucuuccuuucaugaaagguuucucuguagcauaugaugcuguuugaaagcauuuuacucacaguagagcuucuuucagaaauggagucagucc

SEQ ID NO: 386290 - RNA, 55 nt, Homo sapiens
uuauaugcuaaacaagggguggauuauucauacuuccccuuuuuagaucauauag

SEQ ID NO: 386291 - RNA, 66 nt, Homo sapiens
gucucuagccaaagcacaauccauugaauauuauuuauuguuuauuagagauauuugguuagggac

SEQ ID NO: 386292 - RNA, 96 nt, Homo sapiens
cuagaaggcagucccucucaugcaagacuacuugucagaugaucaaucugucugguuggaguaguuuucagaacagaaggcucucugcuugauuag

SEQ ID NO: 386293 - RNA, 70 nt, Homo sapiens
gaaagaaagugaagaucauacugguggagggugucaggaccaggcccuccauuaaggucugcacuguuuc

SEQ ID NO: 386294 - RNA, 69 nt, Homo sapiens
ugacuaguuggauaaccuaggagaaaugaacagauuccuaguaacaugcaaguuaccaagacuaaguca

SEQ ID NO: 386295 - RNA, 62 nt, Homo sapiens
uugugaauagugcugcaaugaacauacaugugcaugugucuuuguagcagcauaauuuauaa

SEQ ID NO: 386296 - RNA, 85 nt, Homo sapiens
cuccaacuuugaaagaaguucuacuguggguaaaaugcuauccaguagcaucacacacuacagggaaaucuuucaugaaagggag

SEQ ID NO: 386297 - RNA, 60 nt, Homo sapiens
uucuauuuucaucauauaugggauauccuugcauuucuccuuuuuguaguggaaguagga

SEQ ID NO: 386298 - RNA, 94 nt, Homo sapiens
cauuucccacgcugcagagacggugcuaaguuuuucacguauauuuucuugucgaaucagagcaauguuaucagucucugccacgugggaaaug

SEQ ID NO: 386299 - RNA, 92 nt, Homo sapiens
aggaauacucauggcaguggugaucaccgcuaucauagcuacaauuaaauuacucguugugacugguugucccacuuuccucagguuuucuu

SEQ ID NO: 386300 - RNA, 109 nt, Homo sapiens
ggccugugguaggaagcuuuggagcaguuagggcaaugggaccauuuguucacacaaacaucccugaguaucuaauguguuucugaguuuccuagcagaaauccaggcc

SEQ ID NO: 386301 - RNA, 71 nt, Homo sapiens
uuucuuaaaagucauugaaaaauguauagcuagaguuaugucucuaugugcaaauuaauugcuagaagaaa

SEQ ID NO: 386302 - RNA, 77 nt, Homo sapiens
gaucugucuaaugcugagagugguauguuuaagugccauacuauuauaguauuagaauauaucucucucucuagauc

SEQ ID NO: 386303 - RNA, 89 nt, Homo sapiens
uaucuacagcugaguaucuuuaaggugguuugguagcaaauaauaaacaaguguuccaagcauuuuuccagagauacguagaggagaug

SEQ ID NO: 386304 - RNA, 61 nt, Homo sapiens
ugcaagaaucuuucaggcuagcaugaaacaugagaaacacauagaugagagauucuuugua

SEQ ID NO: 386305 - RNA, 71 nt, Homo sapiens
gguuucugcgugucucuuccugucaggguuugccacuagccaggcuuuggcccugagggauggcauaaacu

SEQ ID NO: 386306 - RNA, 61 nt, Homo sapiens
gaagaguuuaauucuuaagguaauauggcucucuagggcagaaacuggaauuaaacuuuuu

SEQ ID NO: 386307 - RNA, 57 nt, Homo sapiens
uucaguaugauacuagccauauauaggucugucauauauggcuuuuauuauguugag

SEQ ID NO: 386308 - RNA, 94 nt, Homo sapiens
cuuaaauaauaccugaguauuaguauaguagcauaccuaaguauacuauauaguaguauacaguaguaguagcauaccuaagguauuauuugag

SEQ ID NO: 386309 - RNA, 71 nt, Homo sapiens
ccuucucugcuucaggguacuuguggccaaaguuagauguuuaacuaaccacuuuacaccuggugagaagg

SEQ ID NO: 386310 - RNA, 117 nt, Homo sapiens
ggugacugucucagcguguuuuucccucauuucauguacagggaaaugcaaaccugcauccuugguuccuuguagcaaaugcgaugaggaaauugcuuaacugaagaaugugucacu

SEQ ID NO: 386311 - RNA, 70 nt, Homo sapiens
aagacaucacuggucauggggcagcugacacuuccauagagaagugagcaucucuuggccacuuugucuu

SEQ ID NO: 386312 - RNA, 68 nt, Homo sapiens
guucuucauucacucccuugaaguuaggcaugucuauuugaccuaacuccagccagugaaauuugagc

SEQ ID NO: 386313 - RNA, 84 nt, Homo sapiens
ggguuccaagucuuugcuauuguggauagugcugcaguaaauacacguaugcauaugucuuuauaguggcaugauuuauaaucc

SEQ ID NO: 386314 - RNA, 73 nt, Homo sapiens
ugggaggugacccuguugucagaauguggaugggugauagccaaugcacaggcucacacacagcucaagccca

SEQ ID NO: 386315 - RNA, 130 nt, Homo sapiens
acaguaauauaaaaguaaauuuucuuuuuuucccuuugaauaagauuuuauguaguauuaaugagagauaagauuuguuuaccucuugaguaaacuacagaaaaaaagggaagaguuuauuucaugcugu

SEQ ID NO: 386316 - RNA, 59 nt, Homo sapiens
ucugugccgagucuccauggugaaaugcucagaaagcucacaauggagacucgggcgga

SEQ ID NO: 386317 - RNA, 70 nt, Homo sapiens
ccuauuucaugagagaccuacagcuuauuaccuugcuguguggaaugaaaacucucucacaaagaauagg

SEQ ID NO: 386318 - RNA, 68 nt, Homo sapiens
gauuaaguguaaugucugaaguuugagacagauauuucuacugugaauucucugauauuuacuuaauu

SEQ ID NO: 386319 - RNA, 77 nt, Homo sapiens
gcauuuaccacagugccugucuaaugccccaaguauucaauaaauauaaacuauuggccgggcgcgguggcucaugc

SEQ ID NO: 386320 - RNA, 117 nt, Homo sapiens
uaucugcagcaggaacauguccuuaaggcacugaucgcucaugcuauuguuuguggcuuaggaacaccuugcgugggcgucaauggccaucaggaacaugucacagugcugcagaua

SEQ ID NO: 386321 - RNA, 57 nt, Homo sapiens
auuuggaaaaauccaccuugaucucauagcaaaccugagaugguggcuguuucaagu

SEQ ID NO: 386322 - RNA, 58 nt, Homo sapiens
ggucacuuuaccccuuggagccucagcuguggggaggauucaugggagcaaagaggcc

SEQ ID NO: 386323 - RNA, 82 nt, Homo sapiens
gaagggcauagugacuagggaaaauuauuuuguuuucuucagugauugagaaucuucuaauuuccuuaguacauuuuccuuu

SEQ ID NO: 386324 - RNA, 106 nt, Homo sapiens
cuuauggagaacauauguguguuagauaagcuucgcuuaggccugaguuauagcgcuguagacugugaguucaauguuaaugaagcaacaauguauguuaaauaag

SEQ ID NO: 386325 - RNA, 96 nt, Homo sapiens
caagguuuucagaagcccagagacuguguaaauuugagccagagaugggggagccuggagagagacaugguccugggcugugucuguggggccuug

SEQ ID NO: 386326 - RNA, 56 nt, Homo sapiens
uaccucaagcugaacucugccagaaacccauggccccuugggucaccuugcaggua

SEQ ID NO: 386327 - RNA, 58 nt, Homo sapiens
ugagacggagucucgcucuguuguccagccuggaaugcagcagcgcgaucucugcuca

SEQ ID NO: 386328 - RNA, 58 nt, Homo sapiens
guguauaucacaguacccucugaaaauacaguuuugagaacuaaaaugugguauauau

SEQ ID NO: 386329 - RNA, 86 nt, Homo sapiens
aggccauuuucacuucuuuugugauucuucaguuacuucaggccaucuggauguauaugugcaggucacaggggauacgauggcuu

SEQ ID NO: 386330 - RNA, 61 nt, Homo sapiens
gauguggagggcuggcccgagugugagagugugcuacucauucaagucaucucuccgcauu

SEQ ID NO: 386331 - RNA, 59 nt, Homo sapiens
caggacaguuggcaucugcugcuucaugaauuguuuguagcagaguggcagcucuuuug

SEQ ID NO: 386332 - RNA, 56 nt, Homo sapiens
guaucauacuguuuugauuacuguaucccugugguauaguuugaguagugugaugc

SEQ ID NO: 386333 - RNA, 59 nt, Homo sapiens
uauggaaguuagggaugaauaaagugucaaggaugacucuuugguuucugacuugcaua

SEQ ID NO: 386334 - RNA, 91 nt, Homo sapiens
uugauccgguauuuucaguuucaaauccuggaugcacuagcagcaugaugauguguucauggaauuugcaauugagauaaugaggaaucaa

SEQ ID NO: 386335 - RNA, 68 nt, Homo sapiens
gaccguggcuaggugguuugaaauacucaagacgaaguuugaaauuggagcuuacuucagccgggguc

SEQ ID NO: 386336 - RNA, 94 nt, Homo sapiens
augugcugguuuagaguguuagaaauggauauuguauuaguucucuaugcuucauaaugaguuaucacaaacuuagcaguuuaaaacaacacau

SEQ ID NO: 386337 - RNA, 79 nt, Homo sapiens
uuuagggacugcauaacugauuaaaaauuaccuuauuuuacauuauugggugguuuuauuaucagugacuauuccuaaa

SEQ ID NO: 386338 - RNA, 60 nt, Homo sapiens
uguuuuuuuaagugaaagaaaaggacccuucuggguuuugguaaugaacuuaggaagaca

SEQ ID NO: 386339 - RNA, 78 nt, Homo sapiens
ggcucaauaguauuuaauaguuagcucaaaaggacgaauaaaguucuacaugggaagcugcugaacuacagucaggcc

SEQ ID NO: 386340 - RNA, 83 nt, Homo sapiens
gagaaucacuugaacccaggaggagguugcagugagccgagaucaugccauugcacuccagccugggugacacagcgauacuc

SEQ ID NO: 386341 - RNA, 80 nt, Homo sapiens
gaauaucacagaagugauguuauguucuucucuguauaucacauaucagacaucaacauggcuuauuacuggugcuguuc

SEQ ID NO: 386342 - RNA, 79 nt, Homo sapiens
caggcaaucuuccuaaauuucuuccucugugagauaguauaucauuucacugaggucugagcuuuaugaauggguccug

SEQ ID NO: 386343 - RNA, 74 nt, Homo sapiens
uuccauaucguuaaaguucugacauucuaaucggaaaagaaaugaaccagcagacuuugacagguuuugugggg

SEQ ID NO: 386344 - RNA, 62 nt, Homo sapiens
gcacagguugcaaaaguucacauuuuagcuaacauguuuugugaugcuuuucuuaaccuugc

SEQ ID NO: 386345 - RNA, 59 nt, Homo sapiens
uguauuuucaacuuacaauggguuuaucaggauguaagcccauuguaaguugaggagca

SEQ ID NO: 386346 - RNA, 75 nt, Homo sapiens
cgugaccuucuaggugcaugagccguacaguuuguuacauucacaggcugacugccaguacuuagauuuauuaug

SEQ ID NO: 386347 - RNA, 127 nt, Homo sapiens
agggcggggcccucauggagaaacucugcuaggguagugcagaagggaaauguggggucagagccuccacagagagucccuacugggguacugccuaguggagcugugagaagagggccacuguccu

SEQ ID NO: 386348 - RNA, 73 nt, Homo sapiens
gagguucuacuggcauuuaguggguagaggacaaggauggcacuaaauauccuacaaugcacaggagagccuc

SEQ ID NO: 386349 - RNA, 56 nt, Homo sapiens
accucugccuaguuuucagaggauguauggaaauaccuggaugucgaggcagaggu

SEQ ID NO: 386350 - RNA, 55 nt, Homo sapiens
auaccugguagucuugcuacacucuucaaagagggauuaagaccaugcuagguau

SEQ ID NO: 386351 - RNA, 73 nt, Homo sapiens
auuuaucuucauagcaguuagcaggcaagugucacugacgcuauggcuguaugacgugcaugaaagacugaau

SEQ ID NO: 386352 - RNA, 75 nt, Homo sapiens
acuauuaacaucuugcauuagugugguacauuuguucaaacagaugaacugauauugauacauuguuaauuaagu

SEQ ID NO: 386353 - RNA, 59 nt, Homo sapiens
ugccuccaaguggaaauauuugucaucugccuugguagagcuugacacuuuccauggca

SEQ ID NO: 386354 - RNA, 75 nt, Homo sapiens
gugagauuguaucauaacuuuccuuucucauacugucuuugccagguuuugagaucaagguuaauauaaucucau

SEQ ID NO: 386355 - RNA, 86 nt, Homo sapiens
cauugcagcuuuugaugcaucucauugaauugcugagcauacuucucagauguaacgguuucgcugggauucauaaagcuguagug

SEQ ID NO: 386356 - RNA, 121 nt, Homo sapiens
gucccugguacaacucgaaugaagugagugaaaugaaacgcuaugucuuucucuuuacaccgcaagagauguuaaagaaacgugugucauuugcugcacugaauauacggauuccaaggau

SEQ ID NO: 386357 - RNA, 101 nt, Homo sapiens
uaucuguaccaccauauuuguugcagcauuauucacaauugccaagauauaaaaaaccuaaauguuaguggaugcugaauaaagaaaagcugguauaaaua

SEQ ID NO: 386358 - RNA, 77 nt, Homo sapiens
ccggggcuucagagcauugguuuuuugaauguaauuuuucuaauccuugccauccaaagagauguguuuugcccugg

SEQ ID NO: 386359 - RNA, 60 nt, Homo sapiens
auguaauguuaaauugcuaauuugagaucuuucuuucugaaauaggcuuuagcauuauau

SEQ ID NO: 386360 - RNA, 70 nt, Homo sapiens
uggcaaaauggaauauguugggguaaaauauuucgauuuucuucuuuaucccucaugugauguuaugcca

SEQ ID NO: 386361 - RNA, 79 nt, Homo sapiens
ucucaaugcuuugacaugggaagugcuugauugaugucuauuaaaaugaaucaacauuguuuuaagucaagcaaugagg

SEQ ID NO: 386362 - RNA, 58 nt, Homo sapiens
uucuguccuuuugaauuccaaaaguguguuggccugugagauagcauaagggacagaa

SEQ ID NO: 386363 - RNA, 66 nt, Homo sapiens
acucuuugugaggagugaacuauuucugauucccuuuuagucaaagguauagcuuuucaagagggu

SEQ ID NO: 386364 - RNA, 81 nt, Homo sapiens
cucuguuaagucuuaugaccacugucuaagauaggugagccaucuuaccuguuuuacagauguggaaggagaagcucagag

SEQ ID NO: 386365 - RNA, 77 nt, Homo sapiens
aucugaaaguuguauugacaagaaagcgucuucuuuuucagccaguuuggcugaauuuuuugucuuuguaacuagau

SEQ ID NO: 386366 - RNA, 58 nt, Homo sapiens
uuucugugaggauuuuaacaugagagucugcucaucacacgugaacucaucacagaga

SEQ ID NO: 386367 - RNA, 58 nt, Homo sapiens
gcccaggguagagugcagugguguaaucacagcucaccacaaccuccauauccugggu

SEQ ID NO: 386368 - RNA, 56 nt, Homo sapiens
uugagaugaaguuuugcucuuuuugccaaggcuggagugcaguggcgccaucucaa

SEQ ID NO: 386369 - RNA, 56 nt, Homo sapiens
auaauucaaaugccucaagagacgguuaacuuucuuugguaggaaauuugaauuau

SEQ ID NO: 386370 - RNA, 81 nt, Homo sapiens
gauggugggcacuagauauuauuugacuccauguuaccguguuaccagcauggagaugaauaucaucuguugccugccauc

SEQ ID NO: 386371 - RNA, 63 nt, Homo sapiens
uggugauuuuggugauuaaagacauuuguaucuaaaaugucuuugccuaacccaaggucauua

SEQ ID NO: 386372 - RNA, 59 nt, Homo sapiens
ugugaacagaauuagucaccuaaucacaggagugacuucgaucccagguucuguucaca

SEQ ID NO: 386373 - RNA, 129 nt, Homo sapiens
ccagucuugggguaauaucuuuauagcagugugaaaauggacugauacacuaaggaaaaacucaauccuugaaauagacuguugcauuagucuguucucacacugcuauaaagaaauacccaauacugg

SEQ ID NO: 386374 - RNA, 57 nt, Homo sapiens
gcagccugggguuaagggagguauggcacaaauauucccuuagcugccucagccugc

SEQ ID NO: 386375 - RNA, 64 nt, Homo sapiens
uucaguuugccaguauuuuauugaggauuuucacauugauguucaucagggauauuggccugaa

SEQ ID NO: 386376 - RNA, 55 nt, Homo sapiens
gagcuguauuuucuuuacaugcaguggucagcuacugccaagaugacuauagcuc

SEQ ID NO: 386377 - RNA, 61 nt, Homo sapiens
gucaggcagugggagacaaaacugagaggccagacuuucagcuuguccucauucccuaggc

SEQ ID NO: 386378 - RNA, 79 nt, Homo sapiens
aauuauccagucucagguaguuccuuauagcaaugcaauaauggauuaauacagguacuaucuucgaaguuugaugauu

SEQ ID NO: 386379 - RNA, 103 nt, Homo sapiens
uugagacaggguuucaugcuguugccuaggcuggagugcaguggcacaaccuuggcucacugcaaucuccgccucccagguucaagugacucucaugccucag

SEQ ID NO: 386380 - RNA, 72 nt, Homo sapiens
augaauuuuggagggggcauucaaaacauuuuaucacucccaaaagauuucuugugucccuuugcuguucau

SEQ ID NO: 386381 - RNA, 92 nt, Homo sapiens
cuagucuuguauuguacaguggguguagucuuccuccugaguuuccuugagaugagggcugcacucaaaaacaaagaggaaaacaaggcugg

SEQ ID NO: 386382 - RNA, 78 nt, Homo sapiens
cucugugggcucaagcuguuuaauguuuuauuaaagaaaugacaaauugguaaacauaagagagcugacuccauaggg

SEQ ID NO: 386383 - RNA, 60 nt, Homo sapiens
ggcagcuuucuguuuagucuggcagugaccaaacgggccugcaagaaucaggaagcugcc

SEQ ID NO: 386384 - RNA, 71 nt, Homo sapiens
gacccacuggccauuuugcccaggaccgagguacuuucagagcugacaucuggcaaaaugggcaguggguu

SEQ ID NO: 386385 - RNA, 99 nt, Homo sapiens
gacauaguugaguuugggguccugagauauuauuucccuuucacaguaguauauaguguguggguaguagauuucauuuugcagauuauaauuacuguc

SEQ ID NO: 386386 - RNA, 113 nt, Homo sapiens
gauuguguuuugaaaugugaggacaugagauuugggaggggccgggggcagaaugaugugauuuggcuuuguguccccacccaaaucucaucguaaauuuuaaucccauaauc

SEQ ID NO: 386387 - RNA, 84 nt, Homo sapiens
cacuuuuucugcagggccaaugggaaguugaaaguaccugugacugguacuuuuugcaaccauuuggaccuuugcguaggagug

SEQ ID NO: 386388 - RNA, 65 nt, Homo sapiens
uggaguauuauguaauuucaauuugacaugaaagcgauugguuuuggauuuuacaaaguacucca

SEQ ID NO: 386389 - RNA, 129 nt, Homo sapiens
ugacauugugagaguuaaaugcaguuuauugaaaccugaaauaguuaaguugccuagucuaguaauggaguuaaggucacuuuauuugaagguacuaagcuuacugcauaaguaaagcuggcagaguua

SEQ ID NO: 386390 - RNA, 79 nt, Homo sapiens
augcucaggugccuuggcuaauuguuaucugguuauuaucuaucaaggaacaauuacuaccaaggccuguaggaggcau

SEQ ID NO: 386391 - RNA, 82 nt, Homo sapiens
aaggaagcaugggggaagauucaucccacuuucacuucauucaaguugagaacucaugaaucuuuccaacuucauccuccuu

SEQ ID NO: 386392 - RNA, 69 nt, Homo sapiens
ugggucuggggagccuguuccugggcagcagcaucucucccacugcuggaguaggcuguccggcaccca

SEQ ID NO: 386393 - RNA, 79 nt, Homo sapiens
cuuaaaggaauggcauggugaagucuuuggaacacgcauacuuuugcuuccuucacaccacuauguuauucuaucuaag

SEQ ID NO: 386394 - RNA, 66 nt, Homo sapiens
guuuguuauggcucgagcugagcuuuggcugacaguccaccacugcuguuugccgccaucgcagac

SEQ ID NO: 386395 - RNA, 79 nt, Homo sapiens
uuguggcccaagaaagauauuuaccccagggcauucuauaggcuucacuggugagaugucuuuccucuuaggccaucaa

SEQ ID NO: 386396 - RNA, 79 nt, Homo sapiens
gguuccuggggcuuggcacgugguggggcucggaagcuccugcucccagcuccccacuguccgguccccagggaggacc

SEQ ID NO: 386397 - RNA, 105 nt, Homo sapiens
ucagaagucgaauggcccuuggcaaugcucuuuaaccuauucugaagaaguucccuuuaaguuaugaaguagguuaagagcaguagaccaauauuuuguuucuga

SEQ ID NO: 386398 - RNA, 56 nt, Homo sapiens
cugaaaucagccaguuaguuucuguugcgugcaacuaagaaugcuggcugauucag

SEQ ID NO: 386399 - RNA, 85 nt, Homo sapiens
agucuuacugaaaugcucauuuuggauccuugccaaacuuuuugagacagauggcagcuauaauauuuaguauuuuaguaagauu

SEQ ID NO: 386400 - RNA, 58 nt, Homo sapiens
caaguucauaaguucucaucauuuaguucccauuauaagugagaacaugugguauuug

SEQ ID NO: 386401 - RNA, 62 nt, Homo sapiens
auuccagaggaguccucucuuacaggcucagaggaccguguaauggcagacuccgguggagu

SEQ ID NO: 386402 - RNA, 83 nt, Homo sapiens
gggaaccgggugucugagcauggggccggcaggaccgacagcaucggggcuugaaacccagugcucgggagcccgccccuccc

SEQ ID NO: 386403 - RNA, 100 nt, Homo sapiens
cugguaagggaguguuguuaccaguuauuggaguuguacgcacgcucacuucaugccucaagugagcaugcgcacaacuccaguaaacacacugcgccag

SEQ ID NO: 386404 - RNA, 96 nt, Homo sapiens
ggagugagggaaagagaggagcucagggugacuccuggguuuggggcuuggccgaugcucucccugagcagccugaguuucccucugauucauuuc

SEQ ID NO: 386405 - RNA, 76 nt, Homo sapiens
ggcgagugggauugugggauuagcgcugccaugaaagggcuugagggagccuguuagucccgcuugccuguccgcc

SEQ ID NO: 386406 - RNA, 69 nt, Homo sapiens
ugugugucuugaccaggaucggauauaaauucuauuauuggaaguuuccaggacccugguagacacaca

SEQ ID NO: 386407 - RNA, 81 nt, Homo sapiens
ugcuaaguaagugauccaagcuuugcagagagaugucuuuaguguuuucagcacaguguggaucauucauacugcuaggca

SEQ ID NO: 386408 - RNA, 72 nt, Homo sapiens
uagacccguuuucacuaaauagaaacugaguuaucacuuuuugagaauuggugaaacacgauuuuggguuua

SEQ ID NO: 386409 - RNA, 86 nt, Homo sapiens
gucacuacauuuuauuuugaugcuagauggauguguaggaauaucuuaucauugccucaaucuguauuuuucugaaauguagugau

SEQ ID NO: 386410 - RNA, 73 nt, Homo sapiens
caggagacucauggcucuuguuuacucccagucaacagcuuuggggaugacgaagagcuguccacaucuucug

SEQ ID NO: 386411 - RNA, 80 nt, Homo sapiens
ucuuaaucucuguuucuguuauaauaggaagacugcagcuuuguuuacuuucugaggagaauagagaacagggagaaaga

SEQ ID NO: 386412 - RNA, 63 nt, Homo sapiens
gaacuauggauguucuagggaugugaugauggaaaauauuacaaaugcccauacaucuaguuc

SEQ ID NO: 386413 - RNA, 55 nt, Homo sapiens
uccaguacaugcucuugggaacuugucaaaaaugaguucccuguaggugugcgga

SEQ ID NO: 386414 - RNA, 72 nt, Homo sapiens
ucugauccugauuuguccccagccucauguuuccccauggaaaucugauauugugggacaguaucuauuaga

SEQ ID NO: 386415 - RNA, 60 nt, Homo sapiens
gccaaagagguuuaguuuguugagguuuuguaaaaccuggcacuuagcaaaucugauggc

SEQ ID NO: 386416 - RNA, 58 nt, Homo sapiens
ugccuguccuuugguuguccacaaggaauuuccuuaugggcaaauugugagggaggua

SEQ ID NO: 386417 - RNA, 79 nt, Homo sapiens
gcagggucuugggcauccugugugcugaggacagagcugagcuuauagucacugugcaugaaggaugcugugauucugc

SEQ ID NO: 386418 - RNA, 104 nt, Homo sapiens
cucugccccuagcaacaacuuuggaguuccaaagacccuagcauuacuuuuaaauacagucaucucucagggugguggacucuaauagcuguugagguacaggg

SEQ ID NO: 386419 - RNA, 69 nt, Homo sapiens
cucuauugacuauaaauaagcaagggcugggauuauggccuauuugcccuuuuuaaagucuccauagag

SEQ ID NO: 386420 - RNA, 75 nt, Homo sapiens
guguauggaggugguuuugguuuggcuacaacagagaacugcugacucauucagaguagaaacacuuccauaugc

SEQ ID NO: 386421 - RNA, 63 nt, Homo sapiens
cuauguguccauguguucuuaggauuuagcucccacuuauaaaugagaacaugugguauuugg

SEQ ID NO: 386422 - RNA, 107 nt, Homo sapiens
uaagcacucauuuugguugaguucauaugcaggagcggaauuucuucgucauagaaugaaauguauguuuggcuuuuguaauaacugccaaagugauuauguguuua

SEQ ID NO: 386423 - RNA, 79 nt, Homo sapiens
uccauuugguccaguguucagguccugaauaucuuuguuaauuuucugacuuaaggaucugucuaauacugucaguggg

SEQ ID NO: 386424 - RNA, 127 nt, Homo sapiens
ucuccucuuuuuuccuuuuuucuacccuuaaguuucuguggggccuuaaauucugugagcugcagaaggacucucuccacagcuguaaauauaggggacgugggagagagaaagaaaaaaggagaga

SEQ ID NO: 386425 - RNA, 87 nt, Homo sapiens
gauagauauuuuaaaaaauuaggaaccacagaauugucaaugagaaucucaugauugugaauaugugguuuuggaaaaauauucauc

SEQ ID NO: 386426 - RNA, 90 nt, Homo sapiens
caggcuuggggcagaguaaguguaaguuaauguuuaggugaguauguucauuuacugucaugaaaaguuguacuuuucucucuaagcuug

SEQ ID NO: 386427 - RNA, 72 nt, Homo sapiens
ggaugagaugaauaccgacgauguagaaaaacugggcuaaacaauuuauauaaguacugcuucaucucaucc

SEQ ID NO: 386428 - RNA, 63 nt, Homo sapiens
uaguucuagggcaucaucccagacauuauuuugagaaucucuguggugaggcccuagaaucug

SEQ ID NO: 386429 - RNA, 77 nt, Homo sapiens
cuugcucuaucaccagguuggagugcaguggugagaucuuggucggcucacugcaaccuccgccucccggguucaag

SEQ ID NO: 386430 - RNA, 58 nt, Homo sapiens
uuguaguaagcaccacaagucagaacuggggauuucugcaucaggcugcuuauuacaa

SEQ ID NO: 386431 - RNA, 78 nt, Homo sapiens
cuuuugauugguguaccugaaagugacagagagaauggaaccaaguuagaacacacucuucaggauaucauccaagag

SEQ ID NO: 386432 - RNA, 100 nt, Homo sapiens
ggaguguucagauuucggauuuuuucagauuguggaauauuuguauuguaguuaucaguugaguauuugcagucugaacaucugaaauccaaaacacucc

SEQ ID NO: 386433 - RNA, 74 nt, Homo sapiens
acaagcgaauaugaauagaaguuuacuccuuuuugucauauaaaagguagcguuuuuguuugauuuuuguuugu

SEQ ID NO: 386434 - RNA, 96 nt, Homo sapiens
acuuugauuaucauagauuuguaauauguuuugaaaucaggaaauguaaguccuccaacuuuguucuuuuucaaaauuguuuugacuauucggagu

SEQ ID NO: 386435 - RNA, 62 nt, Homo sapiens
ccuucauacaaagaaaaaucaggugagcgaucacaguaccugguuuuaacauuguauuaagg

SEQ ID NO: 386436 - RNA, 80 nt, Homo sapiens
ucuguuucuugaaaagucuugucaagguucccagucugaagacaaauaugugguccucugaaggcuuuucacuuaauaga

SEQ ID NO: 386437 - RNA, 126 nt, Homo sapiens
gcuucagcccaggaguucgagaccagacuaggcaacauggugaaacucugucucuauaaaaaauauaaaaauuagcuaggcauagugccgugugccuacaguccuagcuacuugggaggcugaggu

SEQ ID NO: 386438 - RNA, 63 nt, Homo sapiens
ggguacgagaaauagagaugaagaaggacugauuaccuccuuucaucacagucuccgaugccc

SEQ ID NO: 386439 - RNA, 77 nt, Homo sapiens
ggcuggagugcaauggcaugaucugggcucacugcaaccugugccuuccagguucaagcgauuguccugccucagcc

SEQ ID NO: 386440 - RNA, 68 nt, Homo sapiens
uuccuacaaaguacuguuuaaauugcagaacaauuuccaguuccacuguagcaaaaaguacuuaggaa

SEQ ID NO: 386441 - RNA, 91 nt, Homo sapiens
gauugacucuuucaugaaagauuucucuguagcauaugaugcuguuugacagcauauuacaguagaaugucuuucaaaauugggguuaauc

SEQ ID NO: 386442 - RNA, 83 nt, Homo sapiens
gccugggcaacauagugagaccccgucucuacaaaaauuuaaaaauuaaccagucacggugguuugcacuuguaaucccaggu

SEQ ID NO: 386443 - RNA, 66 nt, Homo sapiens
ugucauugguucuguuuaugugauggaguauguuuauugauuuacauauguugaaccagucuggca

SEQ ID NO: 386444 - RNA, 65 nt, Homo sapiens
aaaauaauggucuuuuuguuaugagagaggcuuagcuuuucucuuucaaaggaaaccaucauuuu

SEQ ID NO: 386445 - RNA, 63 nt, Homo sapiens
uuuggcuauguuguaucuuuccaaacauucucacgguagagagaaauagccuuauuagccaga

SEQ ID NO: 386446 - RNA, 92 nt, Homo sapiens
ugaagaauuggucucgagagaaaaugcuucacugaaauaauucaggaaacugcccuuauggcaaguggggcagauucucuuccuguccuuca

SEQ ID NO: 386447 - RNA, 57 nt, Homo sapiens
agcuucuccaucagcaccugcugcuucaccuugcacuuuuauguuauggagacagcu

SEQ ID NO: 386448 - RNA, 74 nt, Homo sapiens
augcuuguuuagagacuggaauuaaacaugcacuucuccuccaagcuuugcuuuaucagucucugaaaaagcau

SEQ ID NO: 386449 - RNA, 99 nt, Homo sapiens
auucagcuuauaauccauuauuaucacuguuuugaugcucggacgcucugagacgauccgggcaucaaaacagugauaguaaugcauuauaagcugaau

SEQ ID NO: 386450 - RNA, 67 nt, Homo sapiens
uaauuuugucauuuucagaguguuacgugaaucuuucaguauguaaccuuuuggaauuggcguguua

SEQ ID NO: 386451 - RNA, 75 nt, Homo sapiens
ugacuguauagugucuauacauauaguguauagucaugauacauacaguguauguauaguacauauguauaguua

SEQ ID NO: 386452 - RNA, 62 nt, Homo sapiens
gguauucugcaaaucauccagagggcucauucaauagaucugggaugaugcuugagaauauc

SEQ ID NO: 386453 - RNA, 64 nt, Homo sapiens
aguaucaugcuauuuugauuacuauaacuuuguaguauauuuuaaaguuagguaguaugaugcu

SEQ ID NO: 386454 - RNA, 89 nt, Homo sapiens
ugaacugaggucacugguagaugcuuaagguguacauaugugugugugacucaguacaguuuucaguguucacugaacacuucaguuua

SEQ ID NO: 386455 - RNA, 69 nt, Homo sapiens
ugcuucagacugcagauuuugaugaauguggaaaaauuuucuuggagcucuuagggucguuuuggagca

SEQ ID NO: 386456 - RNA, 55 nt, Homo sapiens
uugagauggagucucgcucuuuugcccaggcuggagugcaauggcaccaucucag

SEQ ID NO: 386457 - RNA, 58 nt, Homo sapiens
ugaggugaggguaucaaaugcugaacacuccuguaacccauuuauaucccacagcuca

SEQ ID NO: 386458 - RNA, 68 nt, Homo sapiens
ucgcaugagccugggaggcagagguuguaguuagccaagaugacaccauugcauuccagccuggguga

SEQ ID NO: 386459 - RNA, 75 nt, Homo sapiens
ugggggcaggcaaggugaaguguacugggaugaggugccucucccagacccuggugcuuuccuggcucuccccca

SEQ ID NO: 386460 - RNA, 89 nt, Homo sapiens
ggcugggucaaaugguauuucuaguucuagaucguugaggaaccaccacacuguguuccacaaugguugaacuaguuuacagucccacc

SEQ ID NO: 386461 - RNA, 59 nt, Homo sapiens
gaggagaagcagcauucugguuuuuggaauuuucagccuuuaugugcuguuuauuccuc

SEQ ID NO: 386462 - RNA, 85 nt, Homo sapiens
auacccaguaaugagauuguuagaucaaaugguauuucuggugcuagauccuucaaccauugucuaaauaguuuuuuaauggugu

SEQ ID NO: 386463 - RNA, 89 nt, Homo sapiens
ggagaaucgcuugaaccugggaggaggagguugcagugaggugagaucgccccauugcacuccaccuuggguaacaagaacaaaacucc

SEQ ID NO: 386464 - RNA, 61 nt, Homo sapiens
cuccuggcuuggaggaaugugagggcuuugcucaaagccccaagcacuucaggcucagggg

SEQ ID NO: 386465 - RNA, 106 nt, Homo sapiens
gcauacacauugccucugaagaccuuccagugggacgagauguggagguggaagacagugacauucaugaucgugacccuggguaggccuaggcuaauguguaugu

SEQ ID NO: 386466 - RNA, 57 nt, Homo sapiens
agggaccuugagugugguuuacuguccucuuugcagaaaugucuauucagggucccu

SEQ ID NO: 386467 - RNA, 59 nt, Homo sapiens
gagcugcaauguuuaguauaauauauguacggcauauguugcuggaguaguugcagcuu

SEQ ID NO: 386468 - RNA, 56 nt, Homo sapiens
agucacuguagagaaacagguuuccucugagguaaagcugguuuccacagugugcu

SEQ ID NO: 386469 - RNA, 70 nt, Homo sapiens
cugacccauguaagugugcucaaauguuauuaauaauguugaauaaugcccugaaacacugcugggucag

SEQ ID NO: 386470 - RNA, 79 nt, Homo sapiens
aaugggcauaauuuucauguaaucaaggcagcuaaugaacauauggguaucuggugauaugugaaaaauuaugucuauu

SEQ ID NO: 386471 - RNA, 62 nt, Homo sapiens
auaggguuugaucucacaauagccugacaucucuacaaguuagguagaacuuuagacccugu

SEQ ID NO: 386472 - RNA, 56 nt, Homo sapiens
uguuucacuacucagcauggaaacaagaugaaauuccauuuguagguagugagaca

SEQ ID NO: 386473 - RNA, 63 nt, Homo sapiens
ccuuuuaaaauauugguggccaggugugguggcuuacgccuguaauaucagcauuuugggagg

SEQ ID NO: 386474 - RNA, 96 nt, Homo sapiens
gugcugcuggcuuugguuugccaauauuuuacugaggauuucugcauugauguucaucaaggauauuggucuaaaguauucuuucuuuuguuguau

SEQ ID NO: 386475 - RNA, 59 nt, Homo sapiens
cucaucccuguguccagcaccuguguuccucagggagccacaggggccaccagggagag

SEQ ID NO: 386476 - RNA, 66 nt, Homo sapiens
aacuugcacuugauugagagcucauaguucaaugugcgauaaaugaaacucacucaggaccaaguu

SEQ ID NO: 386477 - RNA, 69 nt, Homo sapiens
gagaaugugguuuuaguaaaacuauguuagcaguuaagguuagagcaaaguucaggaaagccauaucuu

SEQ ID NO: 386478 - RNA, 97 nt, Homo sapiens
cauuacagagaccuuaauacugcauuucacuguuaaagaaugaagcaacucuuaggucuugaggauaagugcaguauuuauaggcucuuaucuaaug

SEQ ID NO: 386479 - RNA, 77 nt, Homo sapiens
uauguucagcuaaggauggcucccagauaucuaguuuugauacccugauaugugauaagaguuaucuuuugggcaug

SEQ ID NO: 386480 - RNA, 129 nt, Homo sapiens
ggagucacugugucuaaaacuaauacuaagauaaagaugguggaaggucaugaauguucuuuuucuaaauaaagaccuguuuuugaucuccacccuuggacuuuuccaguuuuguuuucauagcucuuc

SEQ ID NO: 386481 - RNA, 60 nt, Homo sapiens
gaacuucugccuggauauccugguguuuccacacaucuucugauaucuagggggagguuc

SEQ ID NO: 386482 - RNA, 102 nt, Homo sapiens
ugaggcaggagaaucacuugaaccugugaggcagagguuguagugagccaagauugugccauugcacuccagccuaggcaacaagagugaaauucugucuca

SEQ ID NO: 386483 - RNA, 80 nt, Homo sapiens
ggaacaagggaagcaguuuaggucagggggaaucuaagccaggauucagucuccccuguaaacuggcuucccuguguucc

SEQ ID NO: 386484 - RNA, 110 nt, Homo sapiens
agcaaguuagaauggcauauucauagaguuagaaagaaauguuuguagaaguuacacaaacaaccuuuuuuuaauuugggaaaucuuuuuauaagcuucucuccacugcu

SEQ ID NO: 386485 - RNA, 62 nt, Homo sapiens
ccagggucugucaggagcugguuccaacuaacaaggugaccacauuccacacaggcuuuugg

SEQ ID NO: 386486 - RNA, 91 nt, Homo sapiens
uaugaaccaggaauuggucucucaccagacaccaaaucugccagcaccuagaucuuggacuuuugugagaaaucuauuucuguuguuuaua

SEQ ID NO: 386487 - RNA, 56 nt, Homo sapiens
ucugagauuuuuagauccuggcgcugcuauauagugauggacuuugagauuuuaga

SEQ ID NO: 386488 - RNA, 80 nt, Homo sapiens
auuuauuugcauguaagucgcuuaguauaucugcaucuguauuucuauuugugggguaggugacuugaugagggaugagu

SEQ ID NO: 386489 - RNA, 59 nt, Homo sapiens
ucccaucgucuccuggaugauaugcaauguccugcagucacagggagauggugacagga

SEQ ID NO: 386490 - RNA, 63 nt, Homo sapiens
guuuuuggggucacuauuaccgaaaggguuugacgggccccugaggugauguaccuuaaaaac

SEQ ID NO: 386491 - RNA, 92 nt, Homo sapiens
ccuguaguacacagaguaggcuagguguguuuucagaaguccuagaugcuuuggaauguacucuagccuaugcuuugguuugguaaugcagg

SEQ ID NO: 386492 - RNA, 58 nt, Homo sapiens
ucagauggcaucugagaguguuagauuuugcucaucugaugcugaggauggugucuga

SEQ ID NO: 386493 - RNA, 71 nt, Homo sapiens
gugcuauggccugaauguuuguguccccaaaaaauacauacacugaagacuaaccaccaaggugauagcau

SEQ ID NO: 386494 - RNA, 72 nt, Homo sapiens
caucuggaugcauuuuugguugucacauuguggagaaguguuacaggcacugaaugcguacaaaucaggaug

SEQ ID NO: 386495 - RNA, 81 nt, Homo sapiens
uaggaaguccuuuccccauugcuuauuuucaucagucuuauugaagauuagaugguuauaggugugaggcuuuauuucuua

SEQ ID NO: 386496 - RNA, 88 nt, Homo sapiens
gugagguacaggaugagauuuugguagggacacagagccaaacuauaucauucugccccuggcccccucccaaaucucauaucuucac

SEQ ID NO: 386497 - RNA, 62 nt, Homo sapiens
gccugacuucuacaugguucauugugucaaccugagaccugauguccacuuagggucuaggu

SEQ ID NO: 386498 - RNA, 90 nt, Homo sapiens
gggaggcuggaucccugcagaaacggcuuugaggguaguucuuucagcaaguacaccaugucuguuucugguuuggcuuuucaguuuccu

SEQ ID NO: 386499 - RNA, 96 nt, Homo sapiens
gugggaggauugcuuaagcccaagagagcaaggcugcagugagccaugaucacaucacugcacuccaguuugggcagcagagcaagacccucucuc

SEQ ID NO: 386500 - RNA, 69 nt, Homo sapiens
uauaccacugauuuuauucugacuuguauuauaguuacuuauaauuugaggaugcaaaaugguggugua

SEQ ID NO: 386501 - RNA, 55 nt, Homo sapiens
uguucuuacucauaugugggagcuaaagauauuguucucauggagggaaagagca

SEQ ID NO: 386502 - RNA, 67 nt, Homo sapiens
guuaagaauggggaauagccacagacagcaaggagcuaccacguuugugcuaacuuuaacucuuaac

SEQ ID NO: 386503 - RNA, 65 nt, Homo sapiens
caucuguguucaggguauuaccuuaucacaugccauguagugucuguaaacucucagcauagaug

SEQ ID NO: 386504 - RNA, 58 nt, Homo sapiens
aagcacguggcccaaaauuguaggaaaaaaauguauuacaguggcaugucaggugcuu

SEQ ID NO: 386505 - RNA, 67 nt, Homo sapiens
ccuuggucucaucaagagcagcuuuguaguucucugagcuguggggucucuaggcugagaacugagg

SEQ ID NO: 386506 - RNA, 65 nt, Homo sapiens
uguaugcacacguguccaugugcacccauguccaagucaccucucugcacggcugugugugugca

SEQ ID NO: 386507 - RNA, 55 nt, Homo sapiens
gugauaucuuacaauucucuuuuaggacagaguccagacaggagagaagagucac

SEQ ID NO: 386508 - RNA, 100 nt, Homo sapiens
ggaugcagucagugagcauuucugguuaauuucuaagagcucucagaagaagaaggcucuuaaaauuguaucagcuuuagguaucacaaaaccuggaucc

SEQ ID NO: 386509 - RNA, 63 nt, Homo sapiens
uugcugauuugaguuuccuguagauucuggauaugagcacuuuacuggagauacagucugcaa

SEQ ID NO: 386510 - RNA, 59 nt, Homo sapiens
aauguguauauauguauggguguguauaaacuguaugugcuuauagguguauguuuauu

SEQ ID NO: 386511 - RNA, 75 nt, Homo sapiens
gaggcauaugguaucaguuugguuagguuuguuauuaacuuugaguacuugguuaaggugaugucuuugugccuc

SEQ ID NO: 386512 - RNA, 73 nt, Homo sapiens
uuggaauuaaaauggguaauuggcaaauagaaaguauugaaaccaauuuucacagcaauugccuauuguccaa

SEQ ID NO: 386513 - RNA, 108 nt, Homo sapiens
ucaucugagaacuuguuagaaauacacauuccugggccucaccccgaucuacugaaucagaaacugguggggcccagcaaucugcgauuuaacaagucuucuggauga

SEQ ID NO: 386514 - RNA, 57 nt, Homo sapiens
uaacaagagagucagucaguccuuugaagacaggcauugaccucuccucucuaguua

SEQ ID NO: 386515 - RNA, 69 nt, Homo sapiens
ggugagaacagauggcuuuauuaugccgaauuguccaauucaucaacaugguaugccucuguauuuauu

SEQ ID NO: 386516 - RNA, 66 nt, Homo sapiens
ggauacauucugagaaaugcaucauuaggcaauuuugucauugugugaacaucauagaguguauuu

SEQ ID NO: 386517 - RNA, 107 nt, Homo sapiens
uuuaaaucugcauguggggacuacuuuaucucaguguacaggaugauaaaauggaaauuggugucacauucugaugugaggugagaaaccauaauguggaauuugaa

SEQ ID NO: 386518 - RNA, 75 nt, Homo sapiens
uuguuuuucuuugagaugaagucuugcucuguugcccagguuguagugcaguggcuccaucucagcucgcugcaa

SEQ ID NO: 386519 - RNA, 87 nt, Homo sapiens
gcuggagguugcacaguaagugauagaauuaggauucaauccugggccauuugacuccaaacccuauacuuuuggugaaccccuagc

SEQ ID NO: 386520 - RNA, 69 nt, Homo sapiens
agaacguugaagagaaccgcggcuuauugucaaagggaaaaguaaccgcagaguuuucuuucugcuucu

SEQ ID NO: 386521 - RNA, 78 nt, Homo sapiens
ggagaaaagcccccaugauucaauuaucucccacugggucccucccaugacagguuggaauuaugggagcugcaauuu

SEQ ID NO: 386522 - RNA, 71 nt, Homo sapiens
uggguacaugagcacaacgugcagguuuguuacauagguuauacaugugccauguugguuugcugcgccca

SEQ ID NO: 386523 - RNA, 59 nt, Homo sapiens
gggcuaagaagagaaggggguagaccauaagcugauggccuccauuuguauucuugccc

SEQ ID NO: 386524 - RNA, 71 nt, Homo sapiens
ucacuucuuuugugaauccucaguugcuucaggccaucuggauguauacgugcaggucacaggggauauga

SEQ ID NO: 386525 - RNA, 61 nt, Homo sapiens
uuggucucuaucugcuacauacuauuggcaccccaacacccaugugcaguguggcaaccaa

SEQ ID NO: 386526 - RNA, 74 nt, Homo sapiens
cuggucccuacagcuaugugcaugcaugcugccaguuuugucccugcagcugugcacaugcauguaguuuccag

SEQ ID NO: 386527 - RNA, 57 nt, Homo sapiens
gggcugggaggugagucuggggugaaggccccaaucacccccacaccuccuuaguuc

SEQ ID NO: 386528 - RNA, 76 nt, Homo sapiens
ggccuaaccaagcaaacuuucauuguuaugugguuucuaggucuccuacagggcaaaaaguagugcugguuaggcc

SEQ ID NO: 386529 - RNA, 69 nt, Homo sapiens
ugggggcacugaguauguuuagaaguaaaggaagaaguucugaacuguaugaacaauuuauauucccca

SEQ ID NO: 386530 - RNA, 119 nt, Homo sapiens
guagguacugauauaauuuuuuuaauguacuaaauguuuaacauuugaguuacaguuuuggacagaugguuacauuuuuaaaaagaaggaaaaguuuauaacauauucaguugcucuac

SEQ ID NO: 386531 - RNA, 57 nt, Homo sapiens
uuuccaacguaugguuucaagcuaccgugauaaagccacugaauacagcguugggaa

SEQ ID NO: 386532 - RNA, 103 nt, Homo sapiens
guuguaacuccacuucugccucuuuggucaauugcuguggggaauuuaaggaagaaucuccuugcaggguuugauaaagauguguaaguugauaaguugcaau

SEQ ID NO: 386533 - RNA, 74 nt, Homo sapiens
ggaauaaaaaauggcuauuccauaggcagagcaauggcuugagcugcucaacuaaggauacuuauuauuauuuc

SEQ ID NO: 386534 - RNA, 67 nt, Homo sapiens
cugagcuagaccacuuggcucccuggcuucagccuccuuuccaggggagugaaugguucugucucag

SEQ ID NO: 386535 - RNA, 55 nt, Homo sapiens
cugagaauguaaaugaagcuuuccggcuccugggaaguuauagacuuguucuugg

SEQ ID NO: 386536 - RNA, 68 nt, Homo sapiens
gccacuuccaggaguuuuuauuucauccuaggaagcccuugaugcaaauuaagcuugggacagguggc

SEQ ID NO: 386537 - RNA, 86 nt, Homo sapiens
uccuaauccuggacccugugaauauuaccuuauuuggaaaaagggucuucccagguaugguaaugucaaggauuuuaggaugggga

SEQ ID NO: 386538 - RNA, 122 nt, Homo sapiens
ccuggcuaacuuuuuaaauuguuuguagagauggggucuugcuaugauucccaggcuggucuugaauuccugggcucaaguaauacucccaucuuggccucccaaagugcugaguuuacagg

SEQ ID NO: 386539 - RNA, 75 nt, Homo sapiens
accuaggccagccucagcugggaugauuagguucugcccaguggguccuucauccuccagcaggcuagccugggu

SEQ ID NO: 386540 - RNA, 83 nt, Homo sapiens
gcaucuuguagcauuuugggcacuuugcuucugguuucaauuauuugcugcaguagcaugccucagaaugaggcagcagaugc

SEQ ID NO: 386541 - RNA, 85 nt, Homo sapiens
gggcugaucacauuaagcuguuauuucuuaucuucaucucauuuccccuuagauaagaaaaacauuuuguaugcuuggucaaccu

SEQ ID NO: 386542 - RNA, 73 nt, Homo sapiens
auuguuuucugacuagacaagcaguguacaguaauuguuuuguacaacuuuuugcuuuuuuggcacugacaau

SEQ ID NO: 386543 - RNA, 61 nt, Homo sapiens
augaauccauuccugccacagaauuugauugcgggccuacugugugcucggauggacucgu

SEQ ID NO: 386544 - RNA, 104 nt, Homo sapiens
gcuaguaaaauaaacaccccgauucucauuugugugcaauucagaauauuacccagauguugggaugaauacaaugggaucaucugugggaaaagcacauuagc

SEQ ID NO: 386545 - RNA, 130 nt, Homo sapiens
uugaaccaagagaaauggcuuucccuaggaguuuguuagaaaugcagagucucaggcucccggaccugcugccugggaagcugcauuuuaacaagauacucgggugauuugugcacaccuuagaguucaa

SEQ ID NO: 386546 - RNA, 76 nt, Homo sapiens
aaccuuuccuaugaggcacuucauuagcuggcuccauuuucuggguguuaugaagaugccugguacauggaagguu

SEQ ID NO: 386547 - RNA, 96 nt, Homo sapiens
gacaugaacuuccaguauaauguuuaauguuagugguaaugaaaagcauccuuguauugcuucugauuuuaaaugagugcuuuaagauuuuauguu

SEQ ID NO: 386548 - RNA, 73 nt, Homo sapiens
uugacuucagagcugauucaagccuuggaguaauuucaucccuccuuacucacuugaaucuaguggaagucaa

SEQ ID NO: 386549 - RNA, 62 nt, Homo sapiens
ggaaaaggggauuaagggaaaguuuacgugcugcauggugagacacuucccagaucccuucc

SEQ ID NO: 386550 - RNA, 81 nt, Homo sapiens
uugcaggauucuuugagguaugacuuauuauucuucauuuauaaauuaggaaauugugucucauauuagagaauuaugcag

SEQ ID NO: 386551 - RNA, 63 nt, Homo sapiens
agggcccuucucagagcauggcccuuugccgcugcauaggucauguguccaggagguagcccu

SEQ ID NO: 386552 - RNA, 57 nt, Homo sapiens
cuuggacaccucaugcccaccugcucuccccugugcagaggguaccugaaguccagg

SEQ ID NO: 386553 - RNA, 55 nt, Homo sapiens
uagcaguauugaaagaugagggagcuacaucuuccuugacaucguugugcugcua

SEQ ID NO: 386554 - RNA, 60 nt, Homo sapiens
aucucaacauuaggcauaauaauuagagucuaagcucuuaaaauauggcuauguuuagau

SEQ ID NO: 386555 - RNA, 57 nt, Homo sapiens
aaguuucauggaucacagguacaccgcuagggacccuguagaaugucugugauacuu

SEQ ID NO: 386556 - RNA, 55 nt, Homo sapiens
cauguuaguuaccuguuucacguuaguuaccuguuucagguagugugcugacaug

SEQ ID NO: 386557 - RNA, 76 nt, Homo sapiens
aaaaugggagcauggcuuucacaguaaagccuuuuguuagugcugagggcuuacacaaaggcacaguuccccuuuu

SEQ ID NO: 386558 - RNA, 62 nt, Homo sapiens
uagagcgaaguugcuaugauaguacagagacucucuuuguacuccuuggccagcuucuucug

SEQ ID NO: 386559 - RNA, 56 nt, Homo sapiens
uugauagaucagggauuugauuuuuuaaaagagagaaucuaacaccuuucuaucag

SEQ ID NO: 386560 - RNA, 69 nt, Homo sapiens
gggggugaguggguucucucuuuauuaguucccaugagagcugguuguuacaaagagccuggcaccucc

SEQ ID NO: 386561 - RNA, 63 nt, Homo sapiens
ucucugugguuuuccagaaauuuauuacugacauuauaaggcuuucugggggagcauggcagg

SEQ ID NO: 386562 - RNA, 71 nt, Homo sapiens
cugauuucuuucacugucacaauuuccucaguuauaauuuugcaaaggcaguuucagugagaggugaucag

SEQ ID NO: 386563 - RNA, 55 nt, Homo sapiens
gguugugguuccauuuguauucagucaauauggaggcaaauggaucccacaagcc

SEQ ID NO: 386564 - RNA, 80 nt, Homo sapiens
uucuccucguggcugcagcggcuguggagaaaccagguguggccagugucuuagugcggcugcugcagccacaaggagaa

SEQ ID NO: 386565 - RNA, 79 nt, Homo sapiens
aguuuaggcucaauaaagcuuugagcuuugcugaguucaauacuuagcuucaaggccuuauuuuagucccuugugaacu

SEQ ID NO: 386566 - RNA, 58 nt, Homo sapiens
cacaggagguggagguuguagugagccaagauggugcuacugcacuccaaccuuugug

SEQ ID NO: 386567 - RNA, 82 nt, Homo sapiens
uaagacgaguuagcaaauguaaaaugccuacaacaaugccuggaacgcuguaagcauuauauaauuguugauuauuuccuug

SEQ ID NO: 386568 - RNA, 57 nt, Homo sapiens
gucagaauaaaaggucauugaaugaaacaauguuguucagggaccugcuguacugau

SEQ ID NO: 386569 - RNA, 59 nt, Homo sapiens
auucagaacuugcaggauugugggaguagauggccuggcuucucuugugguucuugaau

SEQ ID NO: 386570 - RNA, 101 nt, Homo sapiens
ugaggcaggagaauugcuugaacccggaagguggagguugcagugaguggaaaucacaccacuguacuccagccugggugacagagcaagacccuaucuca

SEQ ID NO: 386571 - RNA, 56 nt, Homo sapiens
gcagggcaguguggguuggagggggucuuccucucucugagccauggcugcccugu

SEQ ID NO: 386572 - RNA, 68 nt, Homo sapiens
ucgcuugaacccaggaggcggagguugcagugagccgauauugugccauugcacuccagccucaguga

SEQ ID NO: 386573 - RNA, 70 nt, Homo sapiens
uauauguggcuuuucaacugugugagggguuggcacacuuaucugucacaauguuaaagggucaacugua

SEQ ID NO: 386574 - RNA, 64 nt, Homo sapiens
ggaaccauggggcagcuagguggcaccuaggcugcagcccugaucaccuguagcugcauguucu

SEQ ID NO: 386575 - RNA, 92 nt, Homo sapiens
agacuggagacccagggaagagcugauuuuguugcaguucaaguaugaaguuaaucuuccaacagaauccucuuuuccugggaguauagucu

SEQ ID NO: 386576 - RNA, 77 nt, Homo sapiens
ugguauuuguugcagcagcacuaucauuucuuaguaccaaauucugucuuagauaauguugcuauaacaaauuacua

SEQ ID NO: 386577 - RNA, 109 nt, Homo sapiens
cugcugguucccccuuuucagcggcacccccucuccaugcacaaauuguaccccucuccaagccauuugugcaugaagagggggugccgcugaaaaggggggccagcag

SEQ ID NO: 386578 - RNA, 67 nt, Homo sapiens
gcuuuucucccucuaccaacagucaggccaggagaguuuugggaaaugaaguugguagauaaaaggc

SEQ ID NO: 386579 - RNA, 73 nt, Homo sapiens
ucaaucauuuuaaagugcacacgggucaggcgcgguggcucacgccuauaauccuggcacuuugggaggcuga

SEQ ID NO: 386580 - RNA, 97 nt, Homo sapiens
gaggcaggagaaucgcuugaacccgggcagagguuguggugagcaaagauugcgccauugcacuccagccugggcaacaagagugaaacuucgucuc

SEQ ID NO: 386581 - RNA, 98 nt, Homo sapiens
gaaaucaucuuaagugcauaucuucuuccucauuuauacauacaaagagcuguauggcaaugcauaggaaggaaauggcacaggaaaugaacauuuuc

SEQ ID NO: 386582 - RNA, 83 nt, Homo sapiens
ugcacccagccugauuuugauaauuauaucacuuguuuuugaaaauacacaaggaaauauguagauaucaagaggcauaugua

SEQ ID NO: 386583 - RNA, 74 nt, Homo sapiens
gcccucacugauuaaacaaggagaccaaguagugacuuggucucuuugcuuuagucaucacauagcguaugggc

SEQ ID NO: 386584 - RNA, 69 nt, Homo sapiens
ucccuguguuccuuuugaauugcugcugucaaauuaccacaaaugccguggcuuaaaaugacacaggga

SEQ ID NO: 386585 - RNA, 56 nt, Homo sapiens
uugagauggaguuucgcucuuuuugcccaggcugaagugcaacgacucaaucucaa

SEQ ID NO: 386586 - RNA, 75 nt, Homo sapiens
uuguuuuguuuugagauggagucucacucugccacccaggcuggaaugcaguggugccaucucagcucaccacaa

SEQ ID NO: 386587 - RNA, 102 nt, Homo sapiens
uugccuugucaucuuaguguuucuguaucaugcugucgguuuuucuuaaaugucuggugacuggccauugauacagaggucuagauugcuauauuuugguaa

SEQ ID NO: 386588 - RNA, 58 nt, Homo sapiens
ccaccacugaggcacaggagccaaaggcugggcaacagcuuugugccugagaaggugg

SEQ ID NO: 386589 - RNA, 75 nt, Homo sapiens
uccuaaauagcagguuggguuuuuugucuucaauauuguucucaauauugacuugagaagggauuagccuuggga

SEQ ID NO: 386590 - RNA, 65 nt, Homo sapiens
ucagaaguuuucacugugacaacccaccucauucagacaccacgggauacuaguaaggcuucuga

SEQ ID NO: 386591 - RNA, 85 nt, Homo sapiens
ggguagcaaauagacggaacaccauuuuuccugccuuuaaaaaguauauaagggccaggcguggugguucacgccuguaauaccc

SEQ ID NO: 386592 - RNA, 57 nt, Homo sapiens
augagaucugugaacaccugucaaaagccuaaggagaggugagaauuuagauuucau

SEQ ID NO: 386593 - RNA, 62 nt, Homo sapiens
gguuucuuugccaccaguggucuuggggagcccauccuuccaagacuagggagcagaaagcc

SEQ ID NO: 386594 - RNA, 81 nt, Homo sapiens
aguacacaagucgguguuuccugagaacgaacccugcauguuuagcagcuuuugucucuuagaaacacuagguuuuuugcu

SEQ ID NO: 386595 - RNA, 89 nt, Homo sapiens
ggagaaucgcuugaacccggggggcagagguugcagugagccaugaucgcucuauugcacuccagccugggugacaagagugaaacucc

SEQ ID NO: 386596 - RNA, 61 nt, Homo sapiens
ggggauaucuaagagucuuugugagucucuacgaaugaauuuuaugacucuggguguuccu

SEQ ID NO: 386597 - RNA, 70 nt, Homo sapiens
ggaacccuuguacacuguuggugggaauguaaauuaguacagccauuauggaaaacaguguggagguucc

SEQ ID NO: 386598 - RNA, 63 nt, Homo sapiens
guguaguuugagguaugggggcaggauuugaaucaguaagaugacugaugccugaaauuacau

SEQ ID NO: 386599 - RNA, 70 nt, Homo sapiens
ugugauuaaguuaggauuuugagauagagaaauuauccuauauuaucuuggugggcuuaauauaauuaca

SEQ ID NO: 386600 - RNA, 59 nt, Homo sapiens
uuccugaugcaguaagaaugcauagcguugcggacguuaucacgugacuguuucgggag

SEQ ID NO: 386601 - RNA, 64 nt, Homo sapiens
guguguguguguguguguguguguguguguguguguguguguggaugugugcacgcgcacaugc

SEQ ID NO: 386602 - RNA, 64 nt, Homo sapiens
cauucuuguauagguuuuuguaacacaaauuuuuauuucucugugauaaaugccuacaagggug

SEQ ID NO: 386603 - RNA, 67 nt, Homo sapiens
aaaucagugcuuuaucaaguccuccaggugauucugauucauggugaaguuugaaaagcacugauuu

SEQ ID NO: 386604 - RNA, 63 nt, Homo sapiens
cuggauucaccaccugcugauuguagagcccuugggccuagggugaacauaggugguaaccag

SEQ ID NO: 386605 - RNA, 100 nt, Homo sapiens
ucuaccccuucuagugauuauguggaaauaaaagaaagguuauucuguuuuaaaguaaaauuuuaucauuauauccaucagguucgcuagacaaauuaga

SEQ ID NO: 386606 - RNA, 56 nt, Homo sapiens
gccuguuuggauuccuggucaguuuuucucacaacaaugccaacauguaaacaggu

SEQ ID NO: 386607 - RNA, 102 nt, Homo sapiens
ccccucucucggggacgcgguccucucgcugccuccgggucuugcagccccgucugggacacccggagagcaggcgagaaggaaauccacgaaacagagggg

SEQ ID NO: 386608 - RNA, 88 nt, Homo sapiens
gugggcuuaaaaccuugaugacagguugauaggugcagcaaaccaccacggcacguguauaccuauguaaccugcacguucagcacau

SEQ ID NO: 386609 - RNA, 101 nt, Homo sapiens
auguaguugagcgguuuugagugaguuucuuaauccugaguuguaguuugauugcacuguggucugagagacaguuuguuauaauuucuguucuuuuacau

SEQ ID NO: 386610 - RNA, 101 nt, Homo sapiens
aggggaguuggggacagucagcagugagagaccucacccagcucccaugcaguuguugaggucagucucacuucugcagugccccacucagaccauacccu

SEQ ID NO: 386611 - RNA, 70 nt, Homo sapiens
uuuaacacuguguauuuaauuacauauuaugggaauaccaugaucuguguuuguaugcauaagaauuaga

SEQ ID NO: 386612 - RNA, 105 nt, Homo sapiens
ucccagucucagguacgucuuuaucagcagcaugaaaacggacuaauacaguaaaucgguaacaguagagugggguguuguugaaaagauaccuaaaacugugga

SEQ ID NO: 386613 - RNA, 67 nt, Homo sapiens
gggugggaugggaggaaggaggcccuugaagacauuuugcaagacuaaaccuuccccucagcuaucc

SEQ ID NO: 386614 - RNA, 68 nt, Homo sapiens
uuugccaaucagaggcaucuuggagaggcuuagcaucaaaauguacucgauguccuuagauugguaaa

SEQ ID NO: 386615 - RNA, 71 nt, Homo sapiens
gguagaggugggagucuugcuauguugcccaucucaaacuccugggcucaaguaauccucccgccuuggcc

SEQ ID NO: 386616 - RNA, 64 nt, Homo sapiens
guagagcuagggacucgcaauguuucuuuggcuggucuugaacuugugagcucaagcaaucuac

SEQ ID NO: 386617 - RNA, 106 nt, Homo sapiens
uuagauuugacugccuuuuaguuuacaggugaaugcucacauucuaaucagagaagaugauugggauauaaagcauucucagaaaccaggaaguaugcauuucuga

SEQ ID NO: 386618 - RNA, 72 nt, Homo sapiens
ggccccauuguccuuucuucuaagccacauugugcucucaaauguccuuggucauggaagagacaggggguc

SEQ ID NO: 386619 - RNA, 57 nt, Homo sapiens
caagugacugagccgccucggcugguugcuguugccugggguccugcuugucacuug

SEQ ID NO: 386620 - RNA, 82 nt, Homo sapiens
ggagaagaguuguggaaguguaaaagcucuuggacauuaauauugugggccaaaaguuaggcauucaccauggaaucucucc

SEQ ID NO: 386621 - RNA, 68 nt, Homo sapiens
ggguacaugugcacaacgugcagguuuguuacauauguauacauaugacauguuggugugcugcaccc

SEQ ID NO: 386622 - RNA, 79 nt, Homo sapiens
ugggguacaggugcaggaugggcagguguauuacauagauaaacauaugucauggucauuuacugcaccuaucaaccca

SEQ ID NO: 386623 - RNA, 70 nt, Homo sapiens
gccucugagauacacuaauagucucuggagauaaacacuguugagaggccuaaugcguguggcuccaggc

SEQ ID NO: 386624 - RNA, 77 nt, Homo sapiens
aggaggaugaguucauuugggagaucauuuauagagguucuauauugacuugauucccucaagugccuuauguuuuu

SEQ ID NO: 386625 - RNA, 71 nt, Homo sapiens
ggauuugguuugccaguauuuuauugaggauuuuugcaucgauguucaucagggauauuggccucaaauuu

SEQ ID NO: 386626 - RNA, 56 nt, Homo sapiens
guuaauguucucaccacagaaccauaauaauuuggugaugugauggauauguuaau

SEQ ID NO: 386627 - RNA, 59 nt, Homo sapiens
uaaguccacguguucucaucauuuagcucccacuuauaagugagaacaugugguauuug

SEQ ID NO: 386628 - RNA, 64 nt, Homo sapiens
guauauauagcuagugauuguguguauauauguacauaaacacacauagcuaguguguauauac

SEQ ID NO: 386629 - RNA, 70 nt, Homo sapiens
guugcuguguagagaaaaguaccauuuucagaauuuuuugaaaauugugaguccuuuacaaguuggcaac

SEQ ID NO: 386630 - RNA, 78 nt, Homo sapiens
gccacaauagugugugauuucaagucuuaaaaaccagaaucacuuucuucucuggacuggaagcauauuuauuuuggc

SEQ ID NO: 386631 - RNA, 129 nt, Homo sapiens
cuucccaaagugcugggauuacaggugugagccacugcacugggccaucacuuaauauuuuuauuaaaaaauauaugaauucuggccaagugcaguggcucacaccuguaaucccagcacuuuaggagg

SEQ ID NO: 386632 - RNA, 65 nt, Homo sapiens
ccugagccacugugguccucccaugauaugaacagagucugucguggagcucacagugugccagg

SEQ ID NO: 386633 - RNA, 89 nt, Homo sapiens
aaggcaaagaggcauugaaauauugcuuaucauuaauaucauuauuauuuaauagaggaaaaugagggauauacauguccucuuuccuu

SEQ ID NO: 386634 - RNA, 109 nt, Homo sapiens
gcagagagaagaagagagggagagaugcagguuuacacugugcugagggaagcaggagaguacagguauagauguguguucugguuccucuguuggucucaguuucugc

SEQ ID NO: 386635 - RNA, 60 nt, Homo sapiens
gguuaaaagugucacagucaugaaagucaaagaaaggcuuucauggaggcauuuuagauu

SEQ ID NO: 386636 - RNA, 97 nt, Homo sapiens
aaugacaugucuggauccagagaacugauucagggaaaauuacuuauugauaauauuuuguuuauuuugaauuauguuuuagaauucggaacacauu

SEQ ID NO: 386637 - RNA, 76 nt, Homo sapiens
aucucuauuaagcuuggugugcaagugguacuaaggcauggguuagauagugccucuaacagccaagaauagaggu

SEQ ID NO: 386638 - RNA, 82 nt, Homo sapiens
ggccggcgcuuaccucugcuacaggguauguuuccacugacagacgcgcuggcgagaugcucgugugcagagagcacuggcc

SEQ ID NO: 386639 - RNA, 75 nt, Homo sapiens
gaggacuuugaaacuuuaauaagagucagagaauuuuuggaacugaugacuaaaacugaguuucauuaaguucuc

SEQ ID NO: 386640 - RNA, 84 nt, Homo sapiens
uucuguuuucccucuacauaaauguaugccugucagaugggucaagacguacaauguauauuuuacuguaggcugaagucagag

SEQ ID NO: 386641 - RNA, 74 nt, Homo sapiens
gaagaugcauuaagggccuggagauacacuggucaacaagacaaguauggugucuccugccuucaugcagcuuc

SEQ ID NO: 386642 - RNA, 64 nt, Homo sapiens
gguguuccccuuaccucuuggccccccaaaacagggacagacauagauggugggcuggaacacc

SEQ ID NO: 386643 - RNA, 100 nt, Homo sapiens
aaauguauuugauugguuagaauggaaaugcgagguuaguugguggcuucugauuggcuaagccucuacauucauuuuacuguuuauguugguaccauuu

SEQ ID NO: 386644 - RNA, 63 nt, Homo sapiens
ggguugcaugggagcugggugaagccuguaacugcuggcuuucccccacuucccugacaaucu

SEQ ID NO: 386645 - RNA, 77 nt, Homo sapiens
gcugccagagacagaguguuuuuuaagguacuguacugcucuuugcucuguacucagagaacauucccagucuuagc

SEQ ID NO: 386646 - RNA, 70 nt, Homo sapiens
uguagggagagggaguugcaccucagaccuaaaacuccaguggcuccuugggcaccccucccuccccaca

SEQ ID NO: 386647 - RNA, 102 nt, Homo sapiens
cauuagaagaauugcugcuugcuuaucuccuuuuaaggggccaucaguaugaaagguuaauauuuucaauacuguugauccuuaugugauaguaaucugaug

SEQ ID NO: 386648 - RNA, 70 nt, Homo sapiens
guggcuccuuggaguauugugaccuaaugcaggccuguauauguguuaaucucaaguacucucagcucac

SEQ ID NO: 386649 - RNA, 64 nt, Homo sapiens
agucuugaaugaaauccaaauuuuagguugcuuccaguaaaaugaaauuuuuuauucguuggcu

SEQ ID NO: 386650 - RNA, 130 nt, Homo sapiens
acugcaaccuuccccuccugguucaagcacgucuucugucucagccucuccaguagcugugacuacucagaggcuacucagaaggcugaggcaggagaauugcuugaaucugggagguggagguugcagu

SEQ ID NO: 386651 - RNA, 82 nt, Homo sapiens
caaagaugaauaaagcaggguccuugcacuagaggaaaccuugaggauucagaagugaaggcacucauuuuaucuaucuuug

SEQ ID NO: 386652 - RNA, 69 nt, Homo sapiens
uggucaaauuuccuuagagaaagguccuuugguggauacauggaucauauucuugaggaggaugggcua

SEQ ID NO: 386653 - RNA, 57 nt, Homo sapiens
caggagagguggagcucaggugguaaugcuugcucaccugcugcucaccuccugcug

SEQ ID NO: 386654 - RNA, 63 nt, Homo sapiens
caugagcacccuuuguugauugcaauaagauccagguuuugggagaggcaaggggaugccaug

SEQ ID NO: 386655 - RNA, 71 nt, Homo sapiens
agugcugguauuucaggugugagccaccauggcugaccacagcuaugucugaugccugauuacuaaucauu

SEQ ID NO: 386656 - RNA, 118 nt, Homo sapiens
ucagaucagcagcggcauuagauucucauaggagcagaaaccguauuuugaaauguucaggggagggauguagguugugugcuccuuaugagaauccgacuaacgccugaugaucuga

SEQ ID NO: 386657 - RNA, 70 nt, Homo sapiens
ccccaggaaugaaucuuguuagagaauauggaauuccaccaauccucugagagaguuucauaaacugggg

SEQ ID NO: 386658 - RNA, 109 nt, Homo sapiens
aacucuuaacaccaauuguuuacuuaucauuuauuuauuuuaagcaauuuuaguaggaacuauuggauagugauaagguagaugaugcaauauuuguuuuuuauggguu

SEQ ID NO: 386659 - RNA, 122 nt, Homo sapiens
cccaauucacucuuuucuuuuugauuuuagaugggaaauguaaagucauaagaucgauagguugacugugacaacuauguuuacuuacagagagaacaggaaaugagaaugggugauauggg

SEQ ID NO: 386660 - RNA, 72 nt, Homo sapiens
agcugucaagagaacuuucuaucacuuccagauucgaucuuccaggcaguguggacuugaguuuuuacagcu

SEQ ID NO: 386661 - RNA, 61 nt, Homo sapiens
uucauaguguaccugaaggcacaggauaugaaugcaugaacuacauuuaggacauuaugaa

SEQ ID NO: 386662 - RNA, 73 nt, Homo sapiens
uugcuauguaauuguguauauuucaguuuguauacuucauaucuccaugaaauugcacauuccuugcuggcag

SEQ ID NO: 386663 - RNA, 76 nt, Homo sapiens
ucacuugagccugaaaagcagagguugcagugagcugagaucaugccacugcacuucagcuugggggacagaguga

SEQ ID NO: 386664 - RNA, 72 nt, Homo sapiens
gguggaauuauguuaagggucuugagguagggggaucaccuuggauucuccugguggacccuaaacgccauc

SEQ ID NO: 386665 - RNA, 60 nt, Homo sapiens
caaagcuaaaguuagaaauccgacucuuggaagauuuuaagacacuaacuuuaugcuuug

SEQ ID NO: 386666 - RNA, 55 nt, Homo sapiens
uucaucagcuguagaugucauguuuauacauacacgacaucacuacgguugagag

SEQ ID NO: 386667 - RNA, 58 nt, Homo sapiens
uccuuaaugcaucccaggaacaauuaacuaaagcgggguuucacugggugcaagagga

SEQ ID NO: 386668 - RNA, 82 nt, Homo sapiens
caguggcaucaucacaacucaaugcugcaaccugaagacccacccuuuugagguggguuuucaguauugaaugauggcgcug

SEQ ID NO: 386669 - RNA, 86 nt, Homo sapiens
cuuuauaaauuacccagucuuggguaugccuuuauuagcagugugagaacagacuaauacguaguauauccaugaaauuuauggag

SEQ ID NO: 386670 - RNA, 72 nt, Homo sapiens
ugcucuuuucuauagcuuacuuuucuuuaaaaguuggucuuuaugagguagagugguuuauuuggaagagca

SEQ ID NO: 386671 - RNA, 57 nt, Homo sapiens
cgagcucguccgggucgcgcaggggccgggggucuuugugcuccagagacgggcucg

SEQ ID NO: 386672 - RNA, 79 nt, Homo sapiens
gaucagaguagcugucguuuuuuccuuuacugcagaauuauuauuuuaaguaaaugaaagguugauuuauaucugcauu

SEQ ID NO: 386673 - RNA, 99 nt, Homo sapiens
ggucccagcugccuaugcugcugcauuggggauuaaguuuccaacacaugagcuuugagagacacauucaaaguguagcagggagcagugggaaagacc

SEQ ID NO: 386674 - RNA, 97 nt, Homo sapiens
guggcauagugcgcauggugagaagaugucaaauuuucaauaaaauuugaagguggaguugacaauuuucaacagaucagaugugagguauagcuac

SEQ ID NO: 386675 - RNA, 62 nt, Homo sapiens
ucaguuugccaguauuuuauggaggauuuucguauugauguucaucaguuauauuggccuga

SEQ ID NO: 386676 - RNA, 126 nt, Homo sapiens
uauucccuugggucuguggugguggucaugaggugaggcuucucuggcuuuagaaagaggagggaagagugggaaggacuacaucuuaugauuuaagagccaucucagccacagugcaagagaaua

SEQ ID NO: 386677 - RNA, 57 nt, Homo sapiens
ugagcuaggucuugcucugucacccagacugggaugcaguggcuugaucauagcuca

SEQ ID NO: 386678 - RNA, 73 nt, Homo sapiens
cuguuaaaaucaaggagcuggacgggcacgauggcucaugcccguaauuccagcacuuugggagaccgagcag

SEQ ID NO: 386679 - RNA, 78 nt, Homo sapiens
ugcugacucugcaauggagaaagugagacugguuugucuccagcucugcuuacacuuuucauucguagagggaaagca

SEQ ID NO: 386680 - RNA, 62 nt, Homo sapiens
ugagaaugaugguuuccaguuucauccaugucccuacaaaggacauaaacucaucauuuuua

SEQ ID NO: 386681 - RNA, 112 nt, Homo sapiens
ugucucaaaagguucugauuuaauucaccugguguagguccuaagcaucaggguuuuaaaaugcuuccuugguaaguuuaacaugcaucccagguuaagaaccacugagaua

SEQ ID NO: 386682 - RNA, 57 nt, Homo sapiens
ccccacagguccucaggugaaagucacaaaguugcuccucugccaggaccugugggg

SEQ ID NO: 386683 - RNA, 61 nt, Homo sapiens
uagguaucuauguguucucaucauuuagcucucacuuacaagugagaacaugugguauuug

SEQ ID NO: 386684 - RNA, 76 nt, Homo sapiens
accaccaggaacguuuugaugccaugacucaaauacguauuuuggugcugcaugacucagaucuguuccugguggu

SEQ ID NO: 386685 - RNA, 85 nt, Homo sapiens
ucucaagcugugacugcaaagggaagcccuuucuguugucugaaagaagagaaagcgcuucccuuugcuggauuacgguuugaga

SEQ ID NO: 386686 - RNA, 64 nt, Homo sapiens
uuggugaauggcugcauccugucuuugccagcugaagauaauuaagagaucaguaauucaucaa

SEQ ID NO: 386687 - RNA, 113 nt, Homo sapiens
acagaggacauuaaaagccaugcuaagaaguuuggcauuuauucuaaggucaaagggaagccaauugaaauuuaguaugaagccauuuuaagcacggguguaguguuuuuugu

SEQ ID NO: 386688 - RNA, 67 nt, Homo sapiens
agucaugugucuacugaugauguaguuaaggcugugucuagaucuaucucucagcagggacgugguu

SEQ ID NO: 386689 - RNA, 55 nt, Homo sapiens
uauucacagcuuuaaaaggcgugacuccaaggguuaaugccuuagugguagaaug

SEQ ID NO: 386690 - RNA, 74 nt, Homo sapiens
agggaacacuuuuacacuguuggugggaauguaaacuaauacaaccacuauggaaaacaguguggcgauuccuu

SEQ ID NO: 386691 - RNA, 91 nt, Homo sapiens
gcucuuccaggauacugggcuccucucacaauauucuuucucaugaucgucgugaggaguauguucuguagacccuccagugugagugagc

SEQ ID NO: 386692 - RNA, 70 nt, Homo sapiens
uuuguacuugaaacccagggcccugguggucuaggcacccaagggaaucuccuggucuucagguugcaaa

SEQ ID NO: 386693 - RNA, 62 nt, Homo sapiens
guguuccagucaucaucaauccgccagccagcgugugcagagcuugauaugauuaggagcac

SEQ ID NO: 386694 - RNA, 56 nt, Homo sapiens
cuguguggccuaaguggagacacaggcccugcccucuccacugagcgucacggcag

SEQ ID NO: 386695 - RNA, 70 nt, Homo sapiens
ucucgauuggacuuuaagauagagauguugaguaggcagcuggauaugcuaguugagaguucagaggaga

SEQ ID NO: 386696 - RNA, 58 nt, Homo sapiens
gaguaacaugaacuuucaaauauggacuuuucuuaagcccuuuggcuguucaugacuc

SEQ ID NO: 386697 - RNA, 58 nt, Homo sapiens
gugugacuagucaugccugaauuccaccaagaaagcaccaggccugucuagcucacau

SEQ ID NO: 386698 - RNA, 55 nt, Homo sapiens
cuacugauuaaaagaacaggucuagaaguaaccggccugaguuuaauuucaguag

SEQ ID NO: 386699 - RNA, 66 nt, Homo sapiens
gcuauaggaagagaaguagacugaucagagacuagcuuuggagauagaagcuacucuucuuguggc

SEQ ID NO: 386700 - RNA, 62 nt, Homo sapiens
gaguaaaugucaaguacuuagguacagaauucaaucguauaauuauaguauuacauuuacuu

SEQ ID NO: 386701 - RNA, 66 nt, Homo sapiens
gugaaauacauaaucccaagugcuggacuuguuauaggaugucaaguguuuggcuuaugguuucau

SEQ ID NO: 386702 - RNA, 78 nt, Homo sapiens
uucucugacccuguaaauguccugcuacagagugcauacgaaaggauguacuuaggugagauauuuucuugcagagaa

SEQ ID NO: 386703 - RNA, 76 nt, Homo sapiens
gggggccauaggcaggugaaagauaguuuuauucagcggcagcucucauuaacagcuuucuuacacuagcucucuu

SEQ ID NO: 386704 - RNA, 55 nt, Homo sapiens
uugaaguauagaguuuaagaaccaguaaauuuagguuugcaauuugauacuucag

SEQ ID NO: 386705 - RNA, 83 nt, Homo sapiens
auaaguaugggggaacugugaauauuccaacuuuggccacaacauuggguagauaucauaguugcccaguaaugaaaacuugu

SEQ ID NO: 386706 - RNA, 59 nt, Homo sapiens
ggugagguaucauugcccaggcuggucuugaacuccugggcucaagugauccucuugcc

SEQ ID NO: 386707 - RNA, 107 nt, Homo sapiens
guuauggagacuggaaauuucaugaucugggggcacaucuggugggagccuuccugaugguggggacucacugugguguccuuagguaguggcaggcaucacauggc

SEQ ID NO: 386708 - RNA, 83 nt, Homo sapiens
cugacucugagccgauguugacaccaggggacccaaaacaucauugucauccuccaguuaaaauaggggcuuauggaggucag

SEQ ID NO: 386709 - RNA, 82 nt, Homo sapiens
guccuguaagugaucaguggaugaacaagaagugauauuuacauguaaucauauaauggauuauucagugauaaaacaggau

SEQ ID NO: 386710 - RNA, 124 nt, Homo sapiens
guuuauaugcugauaucaacucugcccugguugauuuuuauucuaggguauuugcagaguucccacuuucaaaugcacguagagaaaauaauccccaucaggacaucuggcauuguuuuuaaac

SEQ ID NO: 386711 - RNA, 57 nt, Homo sapiens
ucuucuagcggaacccucuuguagcuacugagauauacacagaaguuuccuggaagg

SEQ ID NO: 386712 - RNA, 61 nt, Homo sapiens
gaaggcauggugacuauuuaggcagcuguuagcagcagucuggacaagguaugaugguuuc

SEQ ID NO: 386713 - RNA, 79 nt, Homo sapiens
gagacccaucacaaggcaggaaugaaaggggaaauaucuucauucuccuuucuccuguuuucugaucuagcaggaucuc

SEQ ID NO: 386714 - RNA, 65 nt, Homo sapiens
acagcagcaccaaacagacuaagacauauaugcauaguuguguucuuagauuuuguuguuguugu

SEQ ID NO: 386715 - RNA, 76 nt, Homo sapiens
agguucgugcaaacguaauugugguuuuugcaucugaaaguaauggcaacgaccgcaaauacuuuuguaugaaccu

SEQ ID NO: 386716 - RNA, 105 nt, Homo sapiens
uauuacuuguaauguuaucugugauuauauaguuaagguagugucugccauuuuuuucacuguaaaguuacuguuuuucccuuuguaauauacuaauaaguaaua

SEQ ID NO: 386717 - RNA, 56 nt, Homo sapiens
gugauuguucuguccccaggggcuacuuagccuggccuugugggcacgaacagcau

SEQ ID NO: 386718 - RNA, 83 nt, Homo sapiens
cagaugaucucaugugcuguuagaggaaguguaaauuagucaacacuuucuggagcugcacauauucugauuuauccaaucug

SEQ ID NO: 386719 - RNA, 68 nt, Homo sapiens
caagcaaauaguaagggcucuguaaaugggugcaaauuugcauugccgugauuacugucuuguucuug

SEQ ID NO: 386720 - RNA, 95 nt, Homo sapiens
aaacacugcaauauauuucagauguuaauuuuggugcuguuuguuggaaaguaggcauggagacuaaaauuauauuuguguguggugcuauguuu

SEQ ID NO: 386721 - RNA, 70 nt, Homo sapiens
guggaagacaguggcuuuuuaguggcagauguucacucaucucacuucugaaaggcccuccauugaccac

SEQ ID NO: 386722 - RNA, 130 nt, Homo sapiens
ccucccaaagugcugggauuauaggcaugagccaucaugcccagccuugcaguuuauuuauucuuaaaaaauguaacacagugcggcugggcgagguggcccaugccuguaaucccagcacuuugggagg

SEQ ID NO: 386723 - RNA, 64 nt, Homo sapiens
ccugcuucagggaugauggcacugugucaaaaaugucaugauuugcauuguugcugagagcagg

SEQ ID NO: 386724 - RNA, 78 nt, Homo sapiens
uguugaggcugaugcccauuacuaagcugcucaaaaggaaguguuugagaaacuaaguaaugaguaagaggcuaaaua

SEQ ID NO: 386725 - RNA, 61 nt, Homo sapiens
cuugugggaggugauuagaucaugggggcuguucucaugauagugagugauuucucacaag

SEQ ID NO: 386726 - RNA, 66 nt, Homo sapiens
gggaagugugcagaguucucuuagaacacccagucacaugguguagagacugcucuuacacuuccu

SEQ ID NO: 386727 - RNA, 55 nt, Homo sapiens
cuccuuugguucuugucaccccauguugcagcauggggcuaguggccagugggag

SEQ ID NO: 386728 - RNA, 77 nt, Homo sapiens
guuggcugucuaugagccaggaagccagcccucaccagacacaaaucugcuggcucccugaucuuggacuucccagc

SEQ ID NO: 386729 - RNA, 58 nt, Homo sapiens
uguggcagaguggacauuuaaauguaggaaaaccacauuuuuaaacuacccugucaua

SEQ ID NO: 386730 - RNA, 68 nt, Homo sapiens
gguauugcuuuguugguuguauagccuuucuagaacucaauagguaauaagaugaaggaagccauauc

SEQ ID NO: 386731 - RNA, 55 nt, Homo sapiens
acagggaguauuuauaccuagggaaaaauguuucuuuggcucuaauauaccuugu

SEQ ID NO: 386732 - RNA, 77 nt, Homo sapiens
gaggaacuagagagaagcugugugaccuucccuaacuucaccugagaaguuacacagugucacuucuaccacacuuc

SEQ ID NO: 386733 - RNA, 68 nt, Homo sapiens
cuguuucucaggccugggacucgggcacacagcugcucaguuguauguuucuuaggccugagacaugg

SEQ ID NO: 386734 - RNA, 105 nt, Homo sapiens
cuuggagagacuggcccugugccuuccguaugcaguuucuuuacagauuuucugaucugugguaagaaacgcaugucacuuucugacaggccuaggaacuccaag

SEQ ID NO: 386735 - RNA, 67 nt, Homo sapiens
acuggcucucaaugucuagcagagaauuggacauguaaagcccuuugcaaaacauugagaccucggu

SEQ ID NO: 386736 - RNA, 56 nt, Homo sapiens
uuugguucuguuuauaugcuggauuauguuuauugauuuucauauguugaaccaga

SEQ ID NO: 386737 - RNA, 87 nt, Homo sapiens
ggggaaucacuugaaccugggaggcggagguugcagugagccgagaucgcaucacugcacuccagccucgcaacagagcgagacucc

SEQ ID NO: 386738 - RNA, 66 nt, Homo sapiens
gcauacggagcacagugcagcucagcagugauuuuucuaacuuugauaacauucugcauccuaugc

SEQ ID NO: 386739 - RNA, 98 nt, Homo sapiens
gaagucauuuuuuuaacuuugugauugcacacucaagaucauggcuaauugaaccagaugggaaagcuugaucacaauuacuuaaauaagaauauuuc

SEQ ID NO: 386740 - RNA, 87 nt, Homo sapiens
gaggaucacuugaacccuggagguugaggcugcagugagcagugauugugccauugcacuccagccugagugacagagugagacuuc

SEQ ID NO: 386741 - RNA, 124 nt, Homo sapiens
cucaguggggcagcaaguagcucaggacaccaggcaacuuuuaagcucucauaaugcugugcuggaguuggagcagaagcuugugcuguaugaagggccuugguugggguuucuggaccaugag

SEQ ID NO: 386742 - RNA, 69 nt, Homo sapiens
uaggcaaguugcccaaucucucugagccuuguucuuccaucauuaguaaaaaagagaggguuuugccua

SEQ ID NO: 386743 - RNA, 92 nt, Homo sapiens
gaggucauucaaugcucucucugaguuucagggaacuuagcaauucuuaaguucauucaugaaacuuaguucugaggguaccagcaggcuuc

SEQ ID NO: 386744 - RNA, 64 nt, Homo sapiens
uucaguuugccaguauuuuauugagaauuuuugcaucaauguucaucagggauauuggccugaa

SEQ ID NO: 386745 - RNA, 66 nt, Homo sapiens
aucgucuccagcaccuguuguucccugacuuuuuaaugaucaccauucuaacuggugugagauggu

SEQ ID NO: 386746 - RNA, 73 nt, Homo sapiens
gcuguuguguuauggaagcuaugccagcuggcaccuuucuugguucagugccucaguuuuuaaagaugacagc

SEQ ID NO: 386747 - RNA, 76 nt, Homo sapiens
uuggcaccagagagcauguuccugacuaugacaccauggccaccucacaccaggcaacgugcauuucuggugucaa

SEQ ID NO: 386748 - RNA, 93 nt, Homo sapiens
aaguagauaggcgguuuaguuugguuuuuguuaucacucaugucauuuagcagcaagaguggcuaggaccaggaaaauaugccauuuuagcuu

SEQ ID NO: 386749 - RNA, 70 nt, Homo sapiens
ugcggccuacugucaugugaugugaguuccuggagggcaggaguucugaccuacaugcagcaggcacgca

SEQ ID NO: 386750 - RNA, 69 nt, Homo sapiens
ggggucuucgucuaugguucaggguggagugcaguggcacgaucauagcuaacuguagccucgaacccc

SEQ ID NO: 386751 - RNA, 68 nt, Homo sapiens
aauauauggcuacuacgaauaaugcuccugugaacauuuccaugcaagucuuuguguagucauauguu

SEQ ID NO: 386752 - RNA, 55 nt, Homo sapiens
ugagcuuuuauuaugugcaaggcauugcucuaagcacauuacaaguauuagcuca

SEQ ID NO: 386753 - RNA, 67 nt, Homo sapiens
ccauaaaaugcacaagugcuuuaaguugaaaucaguauguuguuuucuaaggcacugugcuuuuagg

SEQ ID NO: 386754 - RNA, 60 nt, Homo sapiens
gagaaugaugguuucuagcuucauccaugucccuacaaaggacauaaacucaucauuuuu

SEQ ID NO: 386755 - RNA, 78 nt, Homo sapiens
auuagucauucaggaguagguuguucaguuuccauguaguugugcuguuuagugagauucuuacuccugaguucuaau

SEQ ID NO: 386756 - RNA, 88 nt, Homo sapiens
ggagaauugcuugaaccugggaggcggagguugcggugagccgagaucgugccauugcacuccagccucggggacagagcaagacucc

SEQ ID NO: 386757 - RNA, 83 nt, Homo sapiens
uuaaagaaaaccuuguauagguggcaaaacugaaauuuaaaguacugcaauuguuucaguagcauugcuuauacagucuuuaa

SEQ ID NO: 386758 - RNA, 73 nt, Homo sapiens
cuggauuuugguugccucuaugagccuguccccagggaaacacagagccacuagaggcggaucaggaucacag

SEQ ID NO: 386759 - RNA, 81 nt, Homo sapiens
uugauuuuguuugggagaauuuuauguuaguccuuuuuauuaucucaagaaggguccuggaaucuacuaaagcaaaaucaa

SEQ ID NO: 386760 - RNA, 67 nt, Homo sapiens
uagguucuaagccacagccauuuuuccuuauuuauuucuggcaaaauuugguguuguuuggagccua

SEQ ID NO: 386761 - RNA, 81 nt, Homo sapiens
uuacaugauuaucucagugaacugaguggaugcugaaguuuuuccaaugcuuuuuccacauucacugagauaaucauguaa

SEQ ID NO: 386762 - RNA, 67 nt, Homo sapiens
cccaguuaggcuuuucagacacuucauuuugcaaauaaguguuuuuuaaagggcuuugugggcuggg

SEQ ID NO: 386763 - RNA, 82 nt, Homo sapiens
auuugucacaaaaauguacauucaaccauuuccugaauuucuggagauucugaguggcagaaugagcugaggugugauagau

SEQ ID NO: 386764 - RNA, 76 nt, Homo sapiens
aguuccuugagucuuuuuccugaguacccaaaguuggggugaagagcacucuaggaaauuuaagucuuaagcaacu

SEQ ID NO: 386765 - RNA, 75 nt, Homo sapiens
cuuguauugcaauuggggaaacuggguaaguccuuucuccucucuggaccucaguuuccccaauuacacugcaag

SEQ ID NO: 386766 - RNA, 58 nt, Homo sapiens
uuugcuauugugaacagugccgcaauaaacauaugugugcaugagucuuuauaguaga

SEQ ID NO: 386767 - RNA, 88 nt, Homo sapiens
gauagcccaugaauacuuauaggauaagaacaagccuaacugacuuuauuucuuuguuuguauugucuugaugaguugaaugauuauc

SEQ ID NO: 386768 - RNA, 66 nt, Homo sapiens
gcagaucaccaggauuuuucagccuugcagcucugauuugcauaggcuaaaauccuggccaagugc

SEQ ID NO: 386769 - RNA, 61 nt, Homo sapiens
guucaaacugcuugaggccauuuagagccaaagcugcuaguggcugcagggcuguuugaau

SEQ ID NO: 386770 - RNA, 102 nt, Homo sapiens
ucacagaaggguguacacuuccugagauauucggaguaauaucauccucuuuucaccuggauauuaugaacacuaucacagcgggguguacacccucuguga

SEQ ID NO: 386771 - RNA, 77 nt, Homo sapiens
aaaggguagagguuugauauguggaauauuuaucucagauuauugagauggagaaugacaauuaagguuuuccuuuu

SEQ ID NO: 386772 - RNA, 108 nt, Homo sapiens
acuuccacuggacuugagccauuguccuccuggggcuauuuaucauagcaguuuagucuagaauaaucccagaggauagauagccagcaaguauuuuuagugggaagu

SEQ ID NO: 386773 - RNA, 64 nt, Homo sapiens
auggggguaaacuccuuuggaauguauuaaauccaacuucauucuauggauaaaaugcccucau

SEQ ID NO: 386774 - RNA, 55 nt, Homo sapiens
aagcuggagugcaguggugcgaucuugguucacugcaaucucugccucccaguuu

SEQ ID NO: 386775 - RNA, 86 nt, Homo sapiens
ggcacaagguaggcacccgguuagggggcaguggauauucuuauuaaagaacauugcaaaugcucccuguggaugugaauugugcc

SEQ ID NO: 386776 - RNA, 69 nt, Homo sapiens
agggugucaucacaguuaagaggugaugaaaauccuguuucuucacuauucuuccuuugaauacacccu

SEQ ID NO: 386777 - RNA, 88 nt, Homo sapiens
agacuguaggcuccuuaagagcaagaacucuggcaaguuucuuuucugacuagcaaauugaucuugcuuuugcagagcuucucagucu

SEQ ID NO: 386778 - RNA, 79 nt, Homo sapiens
cucagguagguaaugcagggccaguuaaaaaggggacuguaacaggcuacucuugcauugcuauaaagaaauaccugag

SEQ ID NO: 386779 - RNA, 59 nt, Homo sapiens
uucauuguauauuaggguaaggguuuugcauauaauccuguaggcuaguagacagugga

SEQ ID NO: 386780 - RNA, 78 nt, Homo sapiens
uggguaucucugacacuucugcagaauugaauguccaucuggacaaauuaaugaccccaugaguguuugaccugccua

SEQ ID NO: 386781 - RNA, 57 nt, Homo sapiens
caguuauacuaguccuguuucuaguguucaauauccauauagggcuagcauauacug

SEQ ID NO: 386782 - RNA, 57 nt, Homo sapiens
gugucaguggggagugaucuucugauuuuaagguuuuaaguuguuucucacuugcac

SEQ ID NO: 386783 - RNA, 60 nt, Homo sapiens
ugugaauagugcugcgauaaacauaugugugcaugugucuuuauagcagcaugauuuaua

SEQ ID NO: 386784 - RNA, 76 nt, Homo sapiens
uucuaauuuucaauuguuauuaguauuuauuauguacccagaguacguaaggaguaguguaacagugcacguagaa

SEQ ID NO: 386785 - RNA, 83 nt, Homo sapiens
uguagcuuuguaguauguuuugaaaccaagaaguuugagugguccaaguuacauucuucuuuaucaagauuauuuuggcuaca

SEQ ID NO: 386786 - RNA, 59 nt, Homo sapiens
ugcaccaucuugcuucuguggucaggugaagaagugaacagggagguggugguggugua

SEQ ID NO: 386787 - RNA, 60 nt, Homo sapiens
guauuagguuggugcaaaauaaugguaaaagccucaauuacuuuugcaccaagcuaauac

SEQ ID NO: 386788 - RNA, 82 nt, Homo sapiens
aaaggcagguggauauaaaacacuggaguucagcaaagguaugagcuagagaguuuagugucaauaaauuacaccuuccuuu

SEQ ID NO: 386789 - RNA, 56 nt, Homo sapiens
caguuacuaaguacuguggcaauccauuuggucagucacuaguaaaaggugaacug

SEQ ID NO: 386790 - RNA, 79 nt, Homo sapiens
aggcugaaaugcaguggugugaucuuggcccacuccaaccuccaccucccggguucaagugauucuacugccucagccu

SEQ ID NO: 386791 - RNA, 78 nt, Homo sapiens
uaaucacuucuagcuuuugauguaaagugagagacaugcaacucuucacuugaaugcuuagaggccacuguaggauua

SEQ ID NO: 386792 - RNA, 76 nt, Homo sapiens
guuacaucacagguacuauggcugacaauucucuaaacuuggcagcucugucagccuuggacauagugaugauagc

SEQ ID NO: 386793 - RNA, 66 nt, Homo sapiens
uuucaucacagacauuuuuaagugggacuagcuuuuccucucuccaugagguguacuguggugaaa

SEQ ID NO: 386794 - RNA, 91 nt, Homo sapiens
uggcggugguugugguggugggguguguaugugcacgugugcucacaugugcaauguguacguagcccacgugugcacuaguuuccugcug

SEQ ID NO: 386795 - RNA, 115 nt, Homo sapiens
caaugucgcugggcguguacacacacccucugugauguuguuccuaguauccaaagguagagacgaugauauuacuggccauaucgcagggggcguacacccuucugugauauug

SEQ ID NO: 386796 - RNA, 114 nt, Homo sapiens
gcugaacauaagcuuucuuugguuuuguuugaagucgagacaacugggguuuuauccuucgguaccagucagucauugacuauagaccacccagggugauacguauuuucaagc

SEQ ID NO: 386797 - RNA, 67 nt, Homo sapiens
ugggugaguaucuauuauucagcugcauuagaaguggcugguuaggucgguaguaguggcucacuca

SEQ ID NO: 386798 - RNA, 63 nt, Homo sapiens
acauggauuuuggggccagaggcagaaugcuaugguuugaauguguccucccaaaguucaugu

SEQ ID NO: 386799 - RNA, 100 nt, Homo sapiens
ugaggcaugagaaucacuugaaaccaggaggcggagguugcagugagcugagaucacaccacugcacuccagccucaugacagggugagacuuugucuca

SEQ ID NO: 386800 - RNA, 96 nt, Homo sapiens
augaagagguaggagguaagguaguuguccuaauaacagcccauaguucaaguguauugcagugugacgacuauauuuauuauugcugaacuucgu

SEQ ID NO: 386801 - RNA, 60 nt, Homo sapiens
ugugaauagugcugcaauaaacauauguguacaugugucuuuauagcagcaugauuuaua

SEQ ID NO: 386802 - RNA, 95 nt, Homo sapiens
guuuaagauuugagaaauuaacucuuuccaguuuggaggaugcauuuguggggaguguuccauacuagagagacgcaauuacuaugagugaagac

SEQ ID NO: 386803 - RNA, 72 nt, Homo sapiens
accaacugaaauguccaucgacugaugaauggauaaacaaauauuuaucaauauaaugagauauuuucuggu

SEQ ID NO: 386804 - RNA, 58 nt, Homo sapiens
cauuuaauagaugcuguuucaggcuacugaggaaagacagaacagugucuaugaaaug

SEQ ID NO: 386805 - RNA, 70 nt, Homo sapiens
aaaaugaugaugguguuuugauaggaauugcauugaaucuguagauugcuuugaacaguauggucauuuu

SEQ ID NO: 386806 - RNA, 64 nt, Homo sapiens
uagggcaaacuauauuauuuacucauuacaaaaacuccugugagauugauaugguuuggcucug

SEQ ID NO: 386807 - RNA, 56 nt, Homo sapiens
ugcagugcaugacuguguuauguuaaaucaacacaacaggguaaucugcaguugua

SEQ ID NO: 386808 - RNA, 89 nt, Homo sapiens
ggagaaucacuugaacccaggaggaggagguugcagugagcagagaucaugccauugcacuccaucuugggcaacaagagugaaacucc

SEQ ID NO: 386809 - RNA, 80 nt, Homo sapiens
ccggcuggacuccagaguggagccuuugcgaggggccagucaugguucucucugaaaaauucauucacuggguccccugg

SEQ ID NO: 386810 - RNA, 82 nt, Homo sapiens
gguuuuacuaggccuugggcuuuuagguccuuaacaguuuuuuggaguccuuguugggccuugggucuaaggggguacugcc

SEQ ID NO: 386811 - RNA, 63 nt, Homo sapiens
acuugccaauauauauuugcuacaaaugcuacaaauauuuguagcaaauauauuuuggaaggu

SEQ ID NO: 386812 - RNA, 64 nt, Homo sapiens
uguucauuaguugaagugcagggagaacacuuuguacaucuuccuaaucucagcuaauucugca

SEQ ID NO: 386813 - RNA, 81 nt, Homo sapiens
uccaggagaguucaguggagaggcugagugguacaauaauugaaugauacuuuugguuugcuucauggaaugcaaguuggg

SEQ ID NO: 386814 - RNA, 62 nt, Homo sapiens
gccuaugaugcuguuuagaaucucucuauauagcaggaaagauggcugucaguauccuaggc

SEQ ID NO: 386815 - RNA, 79 nt, Homo sapiens
guguguguuuauuagagguaggauuucaccauguuggccaggcuggucuagaacuccugaccucaaaugauccacccac

SEQ ID NO: 386816 - RNA, 88 nt, Homo sapiens
acuuggucaucaauuacugagagaggaauauugaaaucuguuacuguaauuguggauuugucuguuucuccuuguaguucuaucaggu

SEQ ID NO: 386817 - RNA, 99 nt, Homo sapiens
aggauugacuguugucuguugccuuuuucuggaaugcagugagcauuagauauggucauuucaagccucacugcguuuuguaucaguuuagucuguucu

SEQ ID NO: 386818 - RNA, 90 nt, Homo sapiens
cugucuuagaugugaguccuggagugucaguuuccagaguuuauacccuuagacuuugcugugggcacuucuacucacuaacugggauag

SEQ ID NO: 386819 - RNA, 62 nt, Homo sapiens
ccucaguuucccuuuugcagugaggauaggaauaacacccaucucacaggguugacuugagg

SEQ ID NO: 386820 - RNA, 57 nt, Homo sapiens
ggugggcauuccaaugguuaaaacucucauaaguagugacuagggauaugugccacu

SEQ ID NO: 386821 - RNA, 77 nt, Homo sapiens
aucaccacccuaucagauguccagagauccauuugccuuuuugcggucuuaugaacaguuguauggggaguggugau

SEQ ID NO: 386822 - RNA, 72 nt, Homo sapiens
agaggucauuauugcuucuggacuuuuuuggaauaacaaauaccagugaauuccaggggcuaacugacuuuu

SEQ ID NO: 386823 - RNA, 106 nt, Homo sapiens
acaggaguucaugaacuaucugagcuacauggauagucugcaugaguucaaggccacugcagacaccaugucucagacaggcgugucauagugucaaagcuccugu

SEQ ID NO: 386824 - RNA, 58 nt, Homo sapiens
gggauuugugguuauagagucucccugugucuccaaucacaguauagccagccauccc

SEQ ID NO: 386825 - RNA, 74 nt, Homo sapiens
ugaauuugguuggcuaguauuuuguugaggauuuuugcaucaauguucaucagggguauuggccaauacguuua

SEQ ID NO: 386826 - RNA, 60 nt, Homo sapiens
cugagaugcuagaagggggcacagugugguagaagaauuguggccuuuggagcaugucag

SEQ ID NO: 386827 - RNA, 86 nt, Homo sapiens
uugcaggugggaagcaguuucucauaugaagugacccaguaagaaugugccucugccuucaaagugagcuccuucucacucugcaa

SEQ ID NO: 386828 - RNA, 72 nt, Homo sapiens
gcuugaacccaggaggcagaaguugcagugagucgagauagugccauugcacuccagccugggugacagagc

SEQ ID NO: 386829 - RNA, 104 nt, Homo sapiens
guguauuugacauacuggucccuuaaggaguagugucugguauuugaguaggcgguuauuugagagucacacacuuuuuuuaguauuuaauaugucguuuacau

SEQ ID NO: 386830 - RNA, 75 nt, Homo sapiens
gucucuaaugcuaaggauuuguuaaggaaucacuaaacacgguuagugcuuaauagauguccagcaucaugggac

SEQ ID NO: 386831 - RNA, 59 nt, Homo sapiens
guuugagcaggcagcauggcagcaaagacccaaauguagaaugcugguguugcucaaac

SEQ ID NO: 386832 - RNA, 87 nt, Homo sapiens
ggagaaucgcuugaaccuggaggcagagguugcagugagcugagaucgcgccauuguacuccagccugggugacagggugagacucc

SEQ ID NO: 386833 - RNA, 56 nt, Homo sapiens
gucuugggauauguguuacucuguucucaugcugcuaacaaagacauauccaagac

SEQ ID NO: 386834 - RNA, 95 nt, Homo sapiens
cgcaguaacccaucaauucagugaaacaacuacuauugauuucuggggguuuuccaccccacugguuguuuaacugaauugauggguguucugug

SEQ ID NO: 386835 - RNA, 72 nt, Homo sapiens
uaggugagugacucuugcucaggucucuuauggaguugcagucagaaucuuggcaagagcugcauucaucug

SEQ ID NO: 386836 - RNA, 70 nt, Homo sapiens
cuuccugagcuuccaguuccuccaggaugccuccagugcaaggcccuggcaagagacugaagauaggaag

SEQ ID NO: 386837 - RNA, 115 nt, Homo sapiens
aaaauggcuuuuauauuuaauuuaugauugggaauaugauacaggucuuuuuucuguuugauugaaaugaccagcauuuucccuagucguuaaauauucuacaaaaguacauuuu

SEQ ID NO: 386838 - RNA, 70 nt, Homo sapiens
gcuuccuugcacuggguuagaacaugcuccuuuagcuuggaggaguuuguucucacccaccuucugaagc

SEQ ID NO: 386839 - RNA, 59 nt, Homo sapiens
ugagauuaucguaauguaucuccagcccccauuuguggaugucauuuaugaagaucuca

SEQ ID NO: 386840 - RNA, 84 nt, Homo sapiens
aucauuauccccugagaacuugcuagaaaugcaaauuuuaugucucaccccagguuuuuaacaaguccuuuaggugauucugau

SEQ ID NO: 386841 - RNA, 125 nt, Homo sapiens
ugacuuuuauaugcacugagauaccaaaaaaauucguaugaccucgcuuuauugcagucauacgaaguauucugcaauacuucgagguaugccuguauguuggucauuucaauaugauucaguca

SEQ ID NO: 386842 - RNA, 66 nt, Homo sapiens
guauuucuaguucuagaucccugaggaauugccacacugacuuccacagugguugaacuaguuuac

SEQ ID NO: 386843 - RNA, 102 nt, Homo sapiens
aaauacaugagguugaagcagaugaaauucauguuucggcaagcucaaaaauaucaaauagccgaauacugacuauuucaucugguucgaccuaauauauuu

SEQ ID NO: 386844 - RNA, 80 nt, Homo sapiens
cuguauuggaucauuucauagaggacauuacuggagcagucacugaaacuccaauagggcuucuaggugaaucaaaacgg

SEQ ID NO: 386845 - RNA, 104 nt, Homo sapiens
gaaauacuacuuagugguuacguugugguuuuuaaaacuagguggauuuuuuuaauugucuaccuuuaauuuagaugccacgucuuuccaauuaagaauauuuc

SEQ ID NO: 386846 - RNA, 64 nt, Homo sapiens
uggugaggaaaguugaguuucuauacuugagcauaaggagucuugggaauucuuuccuuggcca

SEQ ID NO: 386847 - RNA, 70 nt, Homo sapiens
auguguccuugccugguuuugguauuagaguaauacuaauacugguaucauggaaugagguuggacauau

SEQ ID NO: 386848 - RNA, 78 nt, Homo sapiens
ugcccauuauaguaauaucuucuuugaggaguccacauccuuugcuuuuauuucuucauguauucccuguaaugggua

SEQ ID NO: 386849 - RNA, 81 nt, Homo sapiens
gugcauaagagcaaauaguugcaucuuaggucugugaguacgcuaacuggaccaagaagcgacuugaauguuaguaugugu

SEQ ID NO: 386850 - RNA, 63 nt, Homo sapiens
gcacaccuaguuaauuucugcauaaugaaaauuucauauugcgguucauugacuuuugugugu

SEQ ID NO: 386851 - RNA, 78 nt, Homo sapiens
gcagcaucuuacguaguuuuggagaucauaaacaacauuuuguguucuguauuauguaacgacuaauuuccaugcugc

SEQ ID NO: 386852 - RNA, 85 nt, Homo sapiens
ucucaagcugugacugcaaagggaagcccuuucuguugucuaaaagaaaagaaagugcuucccuuuggugaauuacgguuugaga

SEQ ID NO: 386853 - RNA, 73 nt, Homo sapiens
guugcuuuugcuugaggucuagcuacccuguauagccauguagaacgggaaguacccucaggcaaaaagcagc

SEQ ID NO: 386854 - RNA, 72 nt, Homo sapiens
guuguuguuagugguaguuauggauuugcuauaagaauacagcaauugcuaauauauugccaucaaaacaau

SEQ ID NO: 386855 - RNA, 85 nt, Homo sapiens
gugauuaugacauguauuuccaggauuuuagcauuucaaauagaaugugcauuuuuaaauacugaaauauacggucauccaucac

SEQ ID NO: 386856 - RNA, 100 nt, Homo sapiens
gugcauguuuguuacauggguauauucauggguauauugcaacccaacuggucagguuggucuucuaauguaccuguuacccaaauagugaacauuguac

SEQ ID NO: 386857 - RNA, 60 nt, Homo sapiens
caauuaggucccacaugacaauuuucacuuuuguuacaauugcuuuugaggacuuaguug

SEQ ID NO: 386858 - RNA, 68 nt, Homo sapiens
uguauuuuuguaagaaucuagcucuuuauuuaauugaauaaaaugcaaacguucugacaggaacugca

SEQ ID NO: 386859 - RNA, 56 nt, Homo sapiens
gugaaagcaucugacugugccaguucugauuuugguacauaaauggauguuuucau

SEQ ID NO: 386860 - RNA, 66 nt, Homo sapiens
cauagguagcauagcaggaauauuagugguagguuguugcugucuguguuguugcuguggccuaug

SEQ ID NO: 386861 - RNA, 69 nt, Homo sapiens
ugggguuuuuaaagucauaauacuuuguccaguagaugcagaguugcugguaguuuaugacuaauucca

SEQ ID NO: 386862 - RNA, 59 nt, Homo sapiens
gggccucuucucagggauacucacaaaauggcagacugcuuuccugagaacaagggcuu

SEQ ID NO: 386863 - RNA, 102 nt, Homo sapiens
guccaauauguaccucccauuacagcgguguuaggaaggugagggcugccgcugaaaggguccccuucauaaucaucacuagauuugggguauauuauggau

SEQ ID NO: 386864 - RNA, 91 nt, Homo sapiens
cuugaugcuagaugacagcgaaaaaauauuuaccaaguucagagggaaagacuugugacuuuagaauuuuauccagauuaucaguaugaag

SEQ ID NO: 386865 - RNA, 82 nt, Homo sapiens
gugguuuuugucuuugguucuguuuauaugcuggauuacauuuauugauuuguguguguugaaccagcaggaugaagcccac

SEQ ID NO: 386866 - RNA, 72 nt, Homo sapiens
caccccuggggcucacgcugcgccaggaugccgcugcuggcauccaccgugggcugcggggcucccgcggug

SEQ ID NO: 386867 - RNA, 65 nt, Homo sapiens
uucucaaccauucucagucccauccucaagagcugaugcaccuuauguaacugggaaugugagag

SEQ ID NO: 386868 - RNA, 78 nt, Homo sapiens
ccuuuggauacugucucuugcuccugcccuccaggccuaacgccgguauagugcagcagggggaagacaguguggggg

SEQ ID NO: 386869 - RNA, 75 nt, Homo sapiens
agugugugacaguuuggugaggaagacgauauuuauauagucuugucucuccaucuauuagucuguucacacacu

SEQ ID NO: 386870 - RNA, 73 nt, Homo sapiens
aguauauccaugaucuagaguaggaaacagagguccagggacuuguggcacccaucuagacagggguagaacu

SEQ ID NO: 386871 - RNA, 76 nt, Homo sapiens
ggaggggaagaggagguguucccugauaauuauaagguuucauggagaaucuucuuacuaguauuauuucuucuuu

SEQ ID NO: 386872 - RNA, 70 nt, Homo sapiens
caucacacuuggauguaagacacuuugagccaauuccaaaaacccaaucugucuaaaccaaugugugaug

SEQ ID NO: 386873 - RNA, 55 nt, Homo sapiens
ucauugguuuuucaggaguauauuauuuaauuuugauguacuuaagaauuaguga

SEQ ID NO: 386874 - RNA, 73 nt, Homo sapiens
agguacuuagugaauguuggcuauuaauacuauuacuauauaugcaguguuacuaauaauucauucaguacuu

SEQ ID NO: 386875 - RNA, 123 nt, Homo sapiens
uuuucaauuuauauaaaaagcaaucuaauucauuauucuccaacgaguguuuguauguauaauacuguugcagauaugagagacauuuguuguagagucugccuuuuacuaaaaguaugaaaa

SEQ ID NO: 386876 - RNA, 118 nt, Homo sapiens
ugggggaccugcaggggcaaaggcaucugcucggcucccucagugaggacaaacaugaaguggagagagaggugccugcgcucacugucccuccuaacagcaaacccaaggucuccca

SEQ ID NO: 386877 - RNA, 74 nt, Homo sapiens
auuuauugacaucaaaucaacauuugaguaugguuaacuucacauaauaguguuuagauuugggauuggugaau

SEQ ID NO: 386878 - RNA, 65 nt, Homo sapiens
uaucauagcgggcccacaccucuaaguugaugcuaacaaggugacucagagugggccccuagaua

SEQ ID NO: 386879 - RNA, 122 nt, Homo sapiens
aagagccagcugaugucauuccugcagguuacagugaauguuggaaaguuauuucaacuagaccaaaguuucagaaaaaaauuuccaagauuuagagcuuuaggaacauuagauggacuuuu

SEQ ID NO: 386880 - RNA, 86 nt, Homo sapiens
ucuggccauuuaaagccauugucaaguuuguacuggggccaagcgguguugcagaagaagauaaggcauuuagguuuuaggucggg

SEQ ID NO: 386881 - RNA, 83 nt, Homo sapiens
acacagcuacugaaugguagagucaagauuucaggcuaguucuagaauccaugugcuuuaccauuuugcuauaucaauggugu

SEQ ID NO: 386882 - RNA, 68 nt, Homo sapiens
gagacaguugagcucaucuucaggggugaguuggaauucaccugauggagaaugaaguuuggcauuuc

SEQ ID NO: 386883 - RNA, 70 nt, Homo sapiens
uuucuacuuucgguuaucuagcuuuaugacggcucuguggcacucauacagcuagauaaccaaagagaga

SEQ ID NO: 386884 - RNA, 86 nt, Homo sapiens
uauucauuaaauuccuuccaguugugagcuauccgggcuuuaagggaccugaagcucaaaugacuuggggaggcuuuuaaggaaua

SEQ ID NO: 386885 - RNA, 78 nt, Homo sapiens
guuaauagccucauucuucagaugagacaacugagaugcagcaauguuaaguaacuuaucugagauugaccuauugau

SEQ ID NO: 386886 - RNA, 62 nt, Homo sapiens
gcccgggaggcagagguugcagugagcugagauugcgccauugcacuccagccuaccugggc

SEQ ID NO: 386887 - RNA, 66 nt, Homo sapiens
agaggagggguugacuagauuacagauguuaaaccaggggucugugguucaaaccagcaacucucu

SEQ ID NO: 386888 - RNA, 106 nt, Homo sapiens
gaugugaaauucugaacaagagcuuguguuugucugccuggggagagcucaugugcccuuugcuuuuccaggagcauauacaacgcagcuguuugguacuaucauc

SEQ ID NO: 386889 - RNA, 80 nt, Homo sapiens
ucuuguuaguaaucaucugagggcagaaauccuguguuuacauucgcuugcuguuucccuucagguaauuacuucuuaga

SEQ ID NO: 386890 - RNA, 58 nt, Homo sapiens
guaaauagugcugcaauaaacauacaugugcaugugucuuuauagcagcaugauuuau

SEQ ID NO: 386891 - RNA, 55 nt, Homo sapiens
accuuuuacggugugacuagcaaaugccgugguuuuugcaaagucagugaagggu

SEQ ID NO: 386892 - RNA, 86 nt, Homo sapiens
uaaguucuaggguacaugugcacaacgugcagguuuguuacauauguauacaugcgccauguuggugugcugcacccauuaacuug

SEQ ID NO: 386893 - RNA, 69 nt, Homo sapiens
auuauuggucuaugcaagauuucuaugucucccugauucaagcuugggaguuuguauguuuccaguaau

SEQ ID NO: 386894 - RNA, 95 nt, Homo sapiens
uguuugauucuucuuuguagcuacaaagugagaugugggccauuagguacuauggccacuauauucaaauuguauguuuaaaauagauuaaaaca

SEQ ID NO: 386895 - RNA, 83 nt, Homo sapiens
auguaaaugggaaacuugguuacaagccagaccaugaggacaccucauacgucuccuugugccaccccuucccacucucacau

SEQ ID NO: 386896 - RNA, 109 nt, Homo sapiens
uaaaaggauuuuggaaaccuuucuccuucaugcaucaauguauccauggagccaaagaugagauauuuaggaugguggagggcaagagaggaaaggacaucaccuuuua

SEQ ID NO: 386897 - RNA, 64 nt, Homo sapiens
auugugaauagugccacaauaaacauaugugugcaugugccuuaauugcagcaugauuuauaau

SEQ ID NO: 386898 - RNA, 57 nt, Homo sapiens
uucccaguuggggaaagcgacccauaguuuuggcuuugcuaccaccaacaugaggag

SEQ ID NO: 386899 - RNA, 91 nt, Homo sapiens
uuaccuuuacaccuuuaugccagugauuauaagggccugaaaggaugaauugugccuuuauggcaucuggcaaaauuaagguuggcgguga

SEQ ID NO: 386900 - RNA, 70 nt, Homo sapiens
ucacuucuuuugugauucuucaguugcuucaggccaucugaauguauugugcaggucacaggggauguga

SEQ ID NO: 386901 - RNA, 98 nt, Homo sapiens
uuuggauuggcauuucucugaugaucaaugaaguugagcaccuuuucauaugccugucugccauuuguaugucuucuuuagagaaaugucuauucaaa

SEQ ID NO: 386902 - RNA, 76 nt, Homo sapiens
aaaugucacagacuccauugaagguaauagguuuagaucaccauuacacuuucuauucaaugagcugaggcuguuu

SEQ ID NO: 386903 - RNA, 82 nt, Homo sapiens
uugcucagccuugagagggaguacagaaccgaagggaaaguuuauuguucuuuugguaguaaucccucacaaaauaaagcaa

SEQ ID NO: 386904 - RNA, 81 nt, Homo sapiens
uauggauuuugagcauggaaauggcaugauuagggcugcacuucaguaaauucacuuaucacuuuuagcuuagggucuaug

SEQ ID NO: 386905 - RNA, 63 nt, Homo sapiens
cuauguguccauguguucucaucauuuagcucccacuuauaagugagaacaugugguauuugg

SEQ ID NO: 386906 - RNA, 79 nt, Homo sapiens
agauccauaagcuggaauuuaagguagauagguaggguggaaacauauugucgcuagucucaaauaucagcauagaucu

SEQ ID NO: 386907 - RNA, 71 nt, Homo sapiens
ucucugucuuugccuaaguuugucaaugucacuaccaucccuuacagaggcuaauuuccccaaagcagaga

SEQ ID NO: 386908 - RNA, 75 nt, Homo sapiens
gcgcauccaugugaagagaccaccaaacaggcuuugugugagcaacauggcuguuuauuucaccugggugcaggc

SEQ ID NO: 386909 - RNA, 92 nt, Homo sapiens
gcaugcaggcuuaauacaugggugauagguucauaggugcagcaaaccaccauugcacacauuuaccuauguaaaaaaccugcacauccugc

SEQ ID NO: 386910 - RNA, 58 nt, Homo sapiens
uccugagaacauguacccaaggcaguugaguuacaacugguuuuauacaguuuaggga

SEQ ID NO: 386911 - RNA, 56 nt, Homo sapiens
ccaggcuguaguucagugguuauucaaaggcacaaucaucaugcacuacagccugg

SEQ ID NO: 386912 - RNA, 101 nt, Homo sapiens
uggguccuuugaaucugaagagucuacuuaguauugcagaaucuugguuacauuguuuagcaauggagggugacuuuaauuguagauaaggagaaauucca

SEQ ID NO: 386913 - RNA, 63 nt, Homo sapiens
ccucagugcaggaauuuccuuagaaacauuacaaauggcucuaaauucuuuccuggguugagg

SEQ ID NO: 386914 - RNA, 65 nt, Homo sapiens
uucucuugggugugcuuuugggguguuagucauaaauucuuuaccucagccaaugcccagaagag

SEQ ID NO: 386915 - RNA, 87 nt, Homo sapiens
aggaagacuuucaguuauuccccauucaauaugauauuagcugugggucugucauucauggcuuuuauuauguugagauaucuuccu

SEQ ID NO: 386916 - RNA, 78 nt, Homo sapiens
ccccugagagcaugaggacgaugagucuggagggugaagucugcgauuucaguacacguguucucauuuaucaagggg

SEQ ID NO: 386917 - RNA, 58 nt, Homo sapiens
uagcauccuucucuaaacaggaggucaugaguagcuuucugccagagggaggguguua

SEQ ID NO: 386918 - RNA, 78 nt, Homo sapiens
gaaccaucucuucucaggcuuuucccagagugaugucaacaagacaauucaugugaagggcuugaaucucugugguuc

SEQ ID NO: 386919 - RNA, 79 nt, Homo sapiens
gaacaucuuuuacugugacugcauauaaguguauguuuacauaaacauacauagagguguauuacaucaaugaauguuu

SEQ ID NO: 386920 - RNA, 66 nt, Homo sapiens
ggucuuacaguaugaguaagaguucucugaacagacagagggaacuugaauguacuggcuaggacc

SEQ ID NO: 386921 - RNA, 103 nt, Homo sapiens
ggcugaggugggaggauugcuugagccaaggaauuugaggcugcagugagcuaugauagugucacugcacuucaggcuuucucuuggggucucucgcguggcu

SEQ ID NO: 386922 - RNA, 59 nt, Homo sapiens
cagcugugggauaggugagugagaguacuugcccuucaacauucaucaguccucagcug

SEQ ID NO: 386923 - RNA, 109 nt, Homo sapiens
accccaaggucucaggucagaauugaggugaagggcagagcagcugcaaucccuugggcaagcugcccuaccucuuugggccucgguuuucucaccugcaaaauggggu

SEQ ID NO: 386924 - RNA, 96 nt, Homo sapiens
gaaccacacagagugcaauuaugugugauacuaauggaaaaggaaaaagcaaucuuuugggggugauucacacagugaguaauugacucuggguuu

SEQ ID NO: 386925 - RNA, 65 nt, Homo sapiens
ugaggaugcagucugucucuuagcagagcuacagcgcugugcuaggagaucugcugcucucuuca

SEQ ID NO: 386926 - RNA, 76 nt, Homo sapiens
ucacucaggcguccaggcuggaguguaguggugcgaucacagcucauugcagucucgaccucucaagcucaaguga

SEQ ID NO: 386927 - RNA, 77 nt, Homo sapiens
gucccaaauuggaaugggauuugaagucuggcagcacaugaagguagaugaccagauucccauuccgacagugggau

SEQ ID NO: 386928 - RNA, 82 nt, Homo sapiens
caguuuccauguaguugugcaguuuuaagugaguuucuuaauacugaguucucauuugauugcacuguggucugagagacug

SEQ ID NO: 386929 - RNA, 61 nt, Homo sapiens
ccaugcucgcuuaggcagcacauauacuaaaacuggaauaauacugggaagaugagcaugg

SEQ ID NO: 386930 - RNA, 81 nt, Homo sapiens
ucccaggagaaauggcuguuuaagaguuucauuucauugaguauguaguuagagcacucaauaugccaucauucuguggga

SEQ ID NO: 386931 - RNA, 90 nt, Homo sapiens
uuuugguuagaauucuuguucacaaugccuuguugaugguauugcggaagcagccaucaaaucagagcauuaaucuuuucuaugccagaa

SEQ ID NO: 386932 - RNA, 95 nt, Homo sapiens
uuaaggauguagauggaauuaaaguugcuagccggcugacuuuaagauuaucuuagauuauccggcugggacaauguaaugacaaaacuccuuaa

SEQ ID NO: 386933 - RNA, 97 nt, Homo sapiens
ccaauauuaaugagaaaugagucacuuauuauuggggugcaaauagagagauaaaugacaucaguaauuaagucucaagcccucuuugguauaaugg

SEQ ID NO: 386934 - RNA, 60 nt, Homo sapiens
auuauugcagggauguuguucagaauguuguuuacagucacacagugucucuauaaugau

SEQ ID NO: 386935 - RNA, 72 nt, Homo sapiens
acaggugccaguguguguuguucuccgccaugugucccuguguggaaaauauaauaugcauucuuaaccugu

SEQ ID NO: 386936 - RNA, 79 nt, Homo sapiens
aaaccuuaucagucuguuggaauaucgcugcaaaaccauguuuugaacggguguguucugucagacugauuggagguuu

SEQ ID NO: 386937 - RNA, 55 nt, Homo sapiens
gaaaugcagguaucagcucuaaccauuucuugggguuugcugauguuugcauuuu

SEQ ID NO: 386938 - RNA, 72 nt, Homo sapiens
ggacaugaguauuugggggaccagagaauggacuguuauggguauaauuuugucucuccaaaauucaugucc

SEQ ID NO: 386939 - RNA, 79 nt, Homo sapiens
caugugcauccgugugaagagaccaccaaacaggcuuugugugagcaacauggcuguuuauuucaccugggugcaggug

SEQ ID NO: 386940 - RNA, 84 nt, Homo sapiens
cugccaugucuggcaguugauguugacuguaggcagagagcacaguaggcugcugaccgauguguagcaucgccagcauggcag

SEQ ID NO: 386941 - RNA, 55 nt, Homo sapiens
ccccaggcauuugaaacaacacaauuguccagagauugucaaaugucuccugggg

SEQ ID NO: 386942 - RNA, 61 nt, Homo sapiens
uugagauggaguuucgcucuuguugcccagacuggaguacaguggcgcgaucuccacucag

SEQ ID NO: 386943 - RNA, 63 nt, Homo sapiens
guuugguucagguaguuuuggaguggcagugaguuaguccacuucaucagccagaaaucaagc

SEQ ID NO: 386944 - RNA, 83 nt, Homo sapiens
gaaaaguucaaguggauggagaaguacaguccuuacagaaaugacaggacuggcuguuuucuuuauuauuauuauuauuuuuu

SEQ ID NO: 386945 - RNA, 77 nt, Homo sapiens
auguucuguguaauaaucguggacuauguucugugugcagaugagaaugcauguucuaugguugauggguggaauau

SEQ ID NO: 386946 - RNA, 98 nt, Homo sapiens
aaacaaaaauggcauuugaauggaaguuuugugaaaucuguugauucaaagauguuaaucauuuuuaccaugacuuguuuauuuauagccuuuuguuu

SEQ ID NO: 386947 - RNA, 76 nt, Homo sapiens
agaggaaucaucacacugucuuucagaaugguugaacuaguuuacauucccaccaacaguguaaagguguuccuuu

SEQ ID NO: 386948 - RNA, 77 nt, Homo sapiens
ggguuguagugaggguuacgugaacauucauauaaaacaacuacaacaguguucaguaaauguucuuacuauagcuc

SEQ ID NO: 386949 - RNA, 66 nt, Homo sapiens
uagcuucuccauagcuccauguugucauccaaacugaaccuacuugauauggagccuccuaagcua

SEQ ID NO: 386950 - RNA, 80 nt, Homo sapiens
uuagguugagucauuugaaauugccaauauucuaccauuucuggucuacaacaauggcaguuucacauggcucaaccuaa

SEQ ID NO: 386951 - RNA, 77 nt, Homo sapiens
gcucuaagccuagaccagucauuacucaugcccugggacaauucaggcuguguggauaauauugggguuuaguuagc

SEQ ID NO: 386952 - RNA, 57 nt, Homo sapiens
aaagggaagcuccuuuugagcauguacucauucuuguucacuggucuauuucccuuu

SEQ ID NO: 386953 - RNA, 76 nt, Homo sapiens
uaaucuagauguugcuugaaggcauuuuguagaugugauuugucuauaauuaguuuacuucaaguaagggagauua

SEQ ID NO: 386954 - RNA, 77 nt, Homo sapiens
uauuagguuggugcaaaaguaauugugguuuuugccauuauuuucaaagcugcauuuacuuuugcacaaaccugaua

SEQ ID NO: 386955 - RNA, 71 nt, Homo sapiens
aaggucugcuagcuuguagugauuugugguaaaucacaauuuucaugauccauuuacaaaaugguaaucuu

SEQ ID NO: 386956 - RNA, 57 nt, Homo sapiens
uugagcaucauguuagcacucauaaaguucccgacuuuggguguuucagauacucaa

SEQ ID NO: 386957 - RNA, 75 nt, Homo sapiens
guuuuagacuauuuuguuuccuugucauuucaauggaauuuggaagagaagggagauaaacauauauguuuaggc

SEQ ID NO: 386958 - RNA, 59 nt, Homo sapiens
uucuggccauggcuucuuucacaguagacaaugccucuuaagaagugcauggucuagag

SEQ ID NO: 386959 - RNA, 120 nt, Homo sapiens
uguuagucauguuguauugaguucuuauuaaguaucaggcauuguauuguaauccccacaacaguccugugagguaauuaucauuaguccuguuuuacaaaugagaaaagauggccaaca

SEQ ID NO: 386960 - RNA, 82 nt, Homo sapiens
uaagagacuuaagcauccguggauuuugguaacugaggguggauccuagaaccaaucccacauggauacuuaucauuucuua

SEQ ID NO: 386961 - RNA, 63 nt, Homo sapiens
cagcuggaaagagguuuuuuuggguaaaaucccuagaaacauucucuugccuccuuccagcug

SEQ ID NO: 386962 - RNA, 59 nt, Homo sapiens
ugagacugaguuucucucuuguuacccaggcuggaguacaauggcguuaucucggcuca

SEQ ID NO: 386963 - RNA, 71 nt, Homo sapiens
ggcccaauuuuuuuccuguccaauacuuuuauagcagagaugauagaauguaacaguuaaaagcaugggcu

SEQ ID NO: 386964 - RNA, 97 nt, Homo sapiens
auauguuuuuagugcauaucugugguuggcugaauaagggcccccaaaagauagucaugcccuaaucugcagagccgauggauguuacuuuauaugu

SEQ ID NO: 386965 - RNA, 60 nt, Homo sapiens
ggauaaaagucaucacaacuggagugagaugguaucucauuguaguuuugacuuuuauuu

SEQ ID NO: 386966 - RNA, 88 nt, Homo sapiens
uagauuugugauuuuuaaaauccaucucuuggggcauugguccauauaauccaaugcacccagaugaauggauaaaaucaaguaucug

SEQ ID NO: 386967 - RNA, 59 nt, Homo sapiens
ccccaucugugugguuuuaucuaccuuuggucuuugaugaucaugaccuacagaugggg

SEQ ID NO: 386968 - RNA, 73 nt, Homo sapiens
ggcaccacugcacuccagccugggugacagagugaucgcacuacugcacuccagccugggugagagugagacc

SEQ ID NO: 386969 - RNA, 86 nt, Homo sapiens
uuagcgcuuggcugccagcuuuuagugggcuuauuacuuccuuaaagagaaauagagagcuguuugaaagcaggcacaggaacuag

SEQ ID NO: 386970 - RNA, 109 nt, Homo sapiens
agaggcaacuaggggaagggcggugaagugcaaugauccggugcugggcuggacagaagugugugcccagcgacaaggcacuucucugugagcuccagcuucugccucu

SEQ ID NO: 386971 - RNA, 87 nt, Homo sapiens
ccaagccuguuucccggcaguggguaagccaagcuugaaaacuugcccaggcuaccugacucccacuugcgaaagaaaagugcuugg

SEQ ID NO: 386972 - RNA, 62 nt, Homo sapiens
guguuugaaggauaacucugcuaaacauuauauuuuugguuggcaguuuuugccuucaauac

SEQ ID NO: 386973 - RNA, 87 nt, Homo sapiens
guaguaaugguuguauaauauuuugggugugcuuaaugccacugaauuacacacuuaagacacuuaaaauguuacauuuuauucuau

SEQ ID NO: 386974 - RNA, 94 nt, Homo sapiens
cgcgcaggugaguccgcuggugcuugaugaggguggagcuguggccgaagcucuugccgcacucuaggcacucguagggcuucucgccugugug

SEQ ID NO: 386975 - RNA, 57 nt, Homo sapiens
guggcuguuaagugcaauugcuaacuaaauguguagccuguugccuaggcagcucau

SEQ ID NO: 386976 - RNA, 68 nt, Homo sapiens
ggcaauuccaaggcgugagguugcacuucuaguugucuugagaugcaccuugucacguuucuccugcc

SEQ ID NO: 386977 - RNA, 64 nt, Homo sapiens
uuugguuugccaguauuuuauugaggauuuuugcauugguguucaucaggaauauuggccugaa

SEQ ID NO: 386978 - RNA, 66 nt, Homo sapiens
cagagagcuuuugguugcccuaaugauagggaugggggagucauuacggugugggguaguuuuuug

SEQ ID NO: 386979 - RNA, 72 nt, Homo sapiens
aucuuagagcaaugggugaauauuaaauaauaaaacaauuuauuucuuauuuauucaauguuaagugaaggu

SEQ ID NO: 386980 - RNA, 127 nt, Homo sapiens
ucccaaagugcugggauuacaggugugagccaccucgcccagccucuagagcaguuuagaaaauguauuaaaagcauucagagugcugggcacaguggcuuaugccuguaaucccagcacuuuggga

SEQ ID NO: 386981 - RNA, 84 nt, Homo sapiens
cuuaauccucaaaguuggaauguauggcaucuugcguuuuuaggacugaauuugccuagaauauauuucuaauuacagauuagg

SEQ ID NO: 386982 - RNA, 82 nt, Homo sapiens
gguguuagucugagugaugacuggauaauggacacacauccuggaaggugguuugcauuguucaguuucuuacauuaauauc

SEQ ID NO: 386983 - RNA, 62 nt, Homo sapiens
acaucuggcugcacugugagcuugggaacuucuucgguaaauagcaucacagagccgggugu

SEQ ID NO: 386984 - RNA, 93 nt, Homo sapiens
auguuuuaagguuaagguuaggaaguaauaaguuugguucuaauccaaauauuggugccugauucuguguuauuuauaacugccuuguaacau

SEQ ID NO: 386985 - RNA, 89 nt, Homo sapiens
auucugaccacucuggucaugauguacuucacaucacuuuuuauaauaaaaaguguuucugcaguagguuugccaauauuguuuagaau

SEQ ID NO: 386986 - RNA, 72 nt, Homo sapiens
uauacuagucaagaauguaugaggaaacagaauucauucuucugggcauuuauaacauuucuuaccugugua

SEQ ID NO: 386987 - RNA, 84 nt, Homo sapiens
gccaucugcgucugugcagugcuggagcccccgugugugccaggcaccacagggucgcugccagcacuccgcacccugcuuggc

SEQ ID NO: 386988 - RNA, 82 nt, Homo sapiens
ggcugggauaagugagugauucaguguuagcuuuagugucaauagaacuugcacugaaauauucaacuuuuuucccacagcc

SEQ ID NO: 386989 - RNA, 62 nt, Homo sapiens
cugcuagaagaucacacacaucacacacgcacugaggugugagcugugguuauuucuggcag

SEQ ID NO: 386990 - RNA, 64 nt, Homo sapiens
gacuaggagagcagcugcccauggcucgaagccuuccaacucgugggcaguggcccaccugguc

SEQ ID NO: 386991 - RNA, 125 nt, Homo sapiens
ccugguucaugucauucuccuuccucagccucccaguuagcugagacuacaguaggugccagccacgcugccuggcuaauuuuuuguauucuuaguagggacgagguuucacuguguuugccagg

SEQ ID NO: 386992 - RNA, 62 nt, Homo sapiens
uggaaucuuaggugaaggcuuuaaaaaauacaagugcucaggccucaccccuugagaaucua

SEQ ID NO: 386993 - RNA, 57 nt, Homo sapiens
gaccuuagauuaucuguaugugcucuuucagauuuacugaaguagguauuuaagguu

SEQ ID NO: 386994 - RNA, 75 nt, Homo sapiens
ccgggagaccucuggcucuagcugucggugaacacggaaagugguguuugcuuaacguggagccagacuacccgg

SEQ ID NO: 386995 - RNA, 64 nt, Homo sapiens
aggaugggauguaugauauauguugguguguaccacgcuacuugucauccuugcaucauuuccu

SEQ ID NO: 386996 - RNA, 60 nt, Homo sapiens
gguaugcucauuuucaagguugauaggcauugccaguuggugaccugaagagaguaaacc

SEQ ID NO: 386997 - RNA, 59 nt, Homo sapiens
ugagauggaguuucgcuuuugucgcccaggcuggagugcaauggcacgaucucuacuca

SEQ ID NO: 386998 - RNA, 74 nt, Homo sapiens
ugucgggcuugcaccuugaagccaauagcagaauucuaggugcugcaauugggaauaaggagcugugcucgaca

SEQ ID NO: 386999 - RNA, 89 nt, Homo sapiens
ucauauaacucuguuuuuuucaugcauuuaauaauuguucuugcugcugugucuuuaucuucuuguaugaaaaggaauagauugaauga

SEQ ID NO: 387000 - RNA, 72 nt, Homo sapiens
uagaaucuacuagaggaauugcuauaacuuccuugaaauuggcaaguagcaguuccauuugaugugauucua

SEQ ID NO: 387001 - RNA, 84 nt, Homo sapiens
cagauaucuuuauagcaaugccccacuccuugguuccaauuuucuguauuaggcuguucuuguguuguuauaaagaaauaucug

SEQ ID NO: 387002 - RNA, 73 nt, Homo sapiens
ucaugcuaugugccauucaauucuacaaguauagagagcgaucugucuuguagacugaaggcuucaggcagga

SEQ ID NO: 387003 - RNA, 78 nt, Homo sapiens
guggggacuggcccaggcucuuucuagcugcuuuaggguaggcaaagcagcuuugcauggccuguggccaguccucac

SEQ ID NO: 387004 - RNA, 59 nt, Homo sapiens
uaguagugugcgguggauauccuuugcuagguuuaccuaauuucccugcagaccuacua

SEQ ID NO: 387005 - RNA, 70 nt, Homo sapiens
agugacuaugacugcaagaucacugugugcagaaaucucuagaaaugugugucuuguagcucaaguuauu

SEQ ID NO: 387006 - RNA, 69 nt, Homo sapiens
augucuucuuuauuuuuaguauauucuuacuuagaaguuuggagaauguaaacagaauagaggagauau

SEQ ID NO: 387007 - RNA, 107 nt, Homo sapiens
gaguagaaggcauaauucacuaggucauacuguuaaaugguuuaguuuuugaaacaagauuacaauugagccuuaacagcauggauuugagcugcacaggucuacuu

SEQ ID NO: 387008 - RNA, 77 nt, Homo sapiens
gaguuauuuauuuuggucuuuuauuuaaagcagcccuaauuuuuagauuguuugaauaacagacaaauuagaagcuc

SEQ ID NO: 387009 - RNA, 94 nt, Homo sapiens
gccugcuccuagaaaacaaaggaaacggagauacucuauuucaguuaaucucuugcugaaaugaauuauuuucuuuccuguuuuagaaguaggu

SEQ ID NO: 387010 - RNA, 56 nt, Homo sapiens
uccugagggcgucugugcaguacuugcacaguguugacugcauuuaguccucagga

SEQ ID NO: 387011 - RNA, 72 nt, Homo sapiens
uauuagguuguugcaaaaguaauugugguuuuacuuuugcaccaaccugauuacuuuugcaccaaccuaaua

SEQ ID NO: 387012 - RNA, 65 nt, Homo sapiens
ugugcccuuugugucuggcugggguggaaagccaugcugccauccacagucagaacgggccuaca

SEQ ID NO: 387013 - RNA, 81 nt, Homo sapiens
gaucagagcucaaauuucucauugaucaucaccuucucaguuuggggagaaaauucaugugagcaaguugggcucaagauc

SEQ ID NO: 387014 - RNA, 85 nt, Homo sapiens
gggaaggugguuucuaugucacuggacauaaguucugagagucaauuugagaacucauucgugaacgugcuuugcucccucuccc

SEQ ID NO: 387015 - RNA, 58 nt, Homo sapiens
agagucuaguauuaaaaucacacuguguaguuuaauuccacuuuaaugcuaggacucu

SEQ ID NO: 387016 - RNA, 56 nt, Homo sapiens
gcuagguuggggaaguucugcuggauaauauccugcaaaguguuuuccaacuuggu

SEQ ID NO: 387017 - RNA, 76 nt, Homo sapiens
gucaugaauugcuuaaugauggagauaccuucuggaaaauguguccuuagguaauuuuaucauuaugugacaugau

SEQ ID NO: 387018 - RNA, 70 nt, Homo sapiens
auugaaauaugacucaguacaguugccaugacauacuuaccaaaauguugcaugcuuagucauuuucaau

SEQ ID NO: 387019 - RNA, 64 nt, Homo sapiens
auugugaauagugcugcaauaaacauacgugugcaugugucuuuacagcagcaugauuuauagu

SEQ ID NO: 387020 - RNA, 79 nt, Homo sapiens
gcccucgcuuucagagucaucugcccaaguacaguaaacagauccagcuacuacuuagauacuuugagaaguuuagggu

SEQ ID NO: 387021 - RNA, 58 nt, Homo sapiens
caaugugauugaaucugcucaaauugcuuugggcaguauggccuuuuuaaugauauug

SEQ ID NO: 387022 - RNA, 71 nt, Homo sapiens
ucaucucuuuugugauucuucaguuacuucaggccaucuggauguauacgugcaggucacaggggauauga

SEQ ID NO: 387023 - RNA, 60 nt, Homo sapiens
guugggcugaagugugugcuuauaaauguguuuaguuuuuaagcuaaacauucaguuaac

SEQ ID NO: 387024 - RNA, 115 nt, Homo sapiens
cuuccauuuagaacuauuagguuggugcaaaaguaauugcaguuuugccacuuuuguuggcaauauccacaauuacuuuugcaccaaccuaauacuauuuuguucaauauagaag

SEQ ID NO: 387025 - RNA, 60 nt, Homo sapiens
ugacagugcggguacaucauaggacacuggaggaaaguccuuugaauguaaagcauguca

SEQ ID NO: 387026 - RNA, 129 nt, Homo sapiens
gucaugccaugaaacacuugaccaagcaugggucaaagccaccaacacaucccauuuuguagugccuugcaaaucuuguguaguugugagcuaugauuuauuucauguaaguguauuguggugcguggc

SEQ ID NO: 387027 - RNA, 72 nt, Homo sapiens
gaagagaccauucuauguagagggaacagccugagcaagagggcuggaggccugaacauaaaugguguuuuc

SEQ ID NO: 387028 - RNA, 57 nt, Homo sapiens
cugucuggcuggcuggcuggcuggauggauggacagauagacagcuagauuagauag

SEQ ID NO: 387029 - RNA, 64 nt, Homo sapiens
caugugcaugcuguucugccagaaagauggagccacaccaaacuuucugcagaaggcauacaug

SEQ ID NO: 387030 - RNA, 76 nt, Homo sapiens
uauuuagggguauacuuguuugcauguaauuacuaauuuaaugugauaagugagauagcaagugaacuuccaagug

SEQ ID NO: 387031 - RNA, 57 nt, Homo sapiens
acauucaggccaccaggcuagaagugaaacagagcuuuggccuggaggccugaaugu

SEQ ID NO: 387032 - RNA, 68 nt, Homo sapiens
uuaaaguuguacagauaauuagaggccauggaucaaaugccucauggcccccuguuugugaacauuaa

SEQ ID NO: 387033 - RNA, 72 nt, Homo sapiens
guccaugauuuucugcacuauggaaguauuauuuaacaaauuuguguccacaguggauuaaaguuacuggac

SEQ ID NO: 387034 - RNA, 87 nt, Homo sapiens
agguaaacuguguggauaguuuuuuaguaugagucucaugcaauauuugggacauauuuguacuagaaaauuauucuuuguucaccu

SEQ ID NO: 387035 - RNA, 62 nt, Homo sapiens
caggccuugggccuucgaccuggggagagucccugucuccuccaugagccguccagggccug

SEQ ID NO: 387036 - RNA, 98 nt, Homo sapiens
cagaaagcaugcuguugauucugaauuguuugugcucuguuuuuggucuuagauuuagcacgaaaccaaauucugugauucaaagcaacaugucacug

SEQ ID NO: 387037 - RNA, 64 nt, Homo sapiens
uuugguuugccaguauucuacugaggauuuucacauugacguucaucagggauauuggccugaa

SEQ ID NO: 387038 - RNA, 79 nt, Homo sapiens
uccugucucuaacugaagugcuugccacauaaaaugaaugcaauauaauuuuauucagagagauuuuaagagauagaga

SEQ ID NO: 387039 - RNA, 73 nt, Homo sapiens
aguagugauugguugaaaguagaauacuauauuaacauuuuagucaauucuuuucaacucaagcaaaacuacu

SEQ ID NO: 387040 - RNA, 72 nt, Homo sapiens
ugcaagauaggcaguuugcacuagauucauuugcauguauauaacauugcaguguaagcuuucuucuaagca

SEQ ID NO: 387041 - RNA, 71 nt, Homo sapiens
gccggaaaugagcuauggagacagggccacgcaaggucaaagugagccuugagcuguagcuuggggccggc

SEQ ID NO: 387042 - RNA, 83 nt, Homo sapiens
gccggaaaaccuacuagaugauuauguuccauuggagggccuggaagagacauaauuuaucuaacaauaaagaauuuucuggu

SEQ ID NO: 387043 - RNA, 79 nt, Homo sapiens
gcucccugugguugggagaucuuuaggaguuggacuaucuuaaagauagacuaucuuaaaguuuucugaucauuugagc

SEQ ID NO: 387044 - RNA, 82 nt, Homo sapiens
gucccugcuucuuccuuaguuauuugguccccuccuccucccagcaggauuaggguaggaacugaguggaagggcaggagac

SEQ ID NO: 387045 - RNA, 64 nt, Homo sapiens
uuuagauagaugguuuuguucacagcucuuucuccuggcagggcuguucauaaaugauccugaa

SEQ ID NO: 387046 - RNA, 62 nt, Homo sapiens
uuccuguuuuggcucaugacacaugaaggaauuuccagugucaugguagcaaggacgaggag

SEQ ID NO: 387047 - RNA, 129 nt, Homo sapiens
uaaggacaguuuuauuucuuccuuuccagucucuaggccuuucugguuuucuugucuuauuucacugacgaagacuauucaaaagguuaaauagcgguguuaagaaagaagauccuuguguuguucuua

SEQ ID NO: 387048 - RNA, 82 nt, Homo sapiens
aaggcaccuagcccagugcuccuggaucauaucacaggcacuuuaucacuugucaguugaauccaagcauuggguuggccuu

SEQ ID NO: 387049 - RNA, 76 nt, Homo sapiens
gauuccaugguauuguccagaauguuuuuuagauuuuuguuucuagaauguuuuagaccaauacaagcauugaauu

SEQ ID NO: 387050 - RNA, 91 nt, Homo sapiens
uaaauugugaacacucucuuaauuaguaaacauuuuucuaucauuguguaaauguacaaaguguuucauuguguggaagggucaccauuua

SEQ ID NO: 387051 - RNA, 63 nt, Homo sapiens
cuuauaagugcaaugaguguggcaaagccuuuagugggcagucaucacuuauucaucaucaag

SEQ ID NO: 387052 - RNA, 62 nt, Homo sapiens
accauuguuccccggucauuuuuguccucaaaaguaggggaacaaaaauggggaacaauggu

SEQ ID NO: 387053 - RNA, 107 nt, Homo sapiens
ucuaguuauagucuaacaaaaagagcugagagguauucuuaagccaaauauuguggggaaaugguuaaaaaaaacuucucagcucuuuuuguuugacuauaaguaga

SEQ ID NO: 387054 - RNA, 55 nt, Homo sapiens
ccauuaggcuaucauuuaguaaauuacuacauuguucuaaaugggucccuagugg

SEQ ID NO: 387055 - RNA, 71 nt, Homo sapiens
ugguggcuuuugucaugaaacaccuacugugcacuggcuccgugcugggauguuuuauacugagccugccg

SEQ ID NO: 387056 - RNA, 119 nt, Homo sapiens
gagauagaguauguuaaaaugucuagcucagugucuggcacacagaaacaaugaguuacauauauugaauacuuucuauguucuagggacugugcuaagcacucuacauguauuaucuc

SEQ ID NO: 387057 - RNA, 89 nt, Homo sapiens
agaggggggacuuuggaaauguaaacaauggggcuaccuuauagcuuuugauggcccuaggcauuuuacuuucaugggccccucccucu

SEQ ID NO: 387058 - RNA, 59 nt, Homo sapiens
uucuucaggcauucccagaagcugaugucagagcuaugcuucuugaacagccuguagaa

SEQ ID NO: 387059 - RNA, 56 nt, Homo sapiens
uuuagcagcaaagagccaugcucuguaaaagagacaguggcucucagcuugcuaag

SEQ ID NO: 387060 - RNA, 83 nt, Homo sapiens
uauuagguuggugcaaaaguaacugugguucuugccauuacuuucaauggcaaaucugcaauuacuuuugcuccaaccuaaua

SEQ ID NO: 387061 - RNA, 88 nt, Homo sapiens
cccuuuagugagguuggaaaaguuuucuuggacaauauucugagauauguuuuccaagaugcuuacuuucuccgcaucucuuccgggg

SEQ ID NO: 387062 - RNA, 59 nt, Homo sapiens
guauccugcacauuuggagagcucuaacacauuccucuugaggugaauuugcaggaugc

SEQ ID NO: 387063 - RNA, 65 nt, Homo sapiens
cuggagaaggagaaaugaaucaagguauggaaggauugaaauuuugugacacucuccaucuccag

SEQ ID NO: 387064 - RNA, 103 nt, Homo sapiens
uuuguucaccagugcauccccagugcuuagaacuugguaaaugcucaauaaguaucuguugagugaaggcuguguucuuggaggggaguauucuuugaauaaa

SEQ ID NO: 387065 - RNA, 90 nt, Homo sapiens
ggagaagcagcauucuauaguccuaggauugggucucagccuuuucgugagccuguguccccagccugugaccuucaugggugcuucucc

SEQ ID NO: 387066 - RNA, 87 nt, Homo sapiens
uucuuuucugugccuggcaauggucccugcacuuuacaaaacaaaguuaugagguagguacaauugccaccacauuacagaugagaa

SEQ ID NO: 387067 - RNA, 62 nt, Homo sapiens
guugguucuguuuauaugcuggauuauguuuauguuuauugauuugcauauguugaaccagc

SEQ ID NO: 387068 - RNA, 88 nt, Homo sapiens
ggagaaucucuugaaaccguaaggcggagguugcagugagccgaaauugcgccacugcacuccagccuggacgaaagagcaaaacucc

SEQ ID NO: 387069 - RNA, 58 nt, Homo sapiens
uuuuggcaaagaggaaugccacuuucuucacuuagaagggcaugacuuuuuuuuaaga

SEQ ID NO: 387070 - RNA, 83 nt, Homo sapiens
ucccgcgccugaucacuaacggugggaggccugggccuucuggagaaaagaggcuagaaucuuccaucuuggguugugcggga

SEQ ID NO: 387071 - RNA, 71 nt, Homo sapiens
ggcagaugcugcaaucucggcacuuugggaggccaaggcaggcggcugggagguggagguuguagcgagcc

SEQ ID NO: 387072 - RNA, 72 nt, Homo sapiens
guagucagguaucaggcacacauuggaguuugcugugcagacucagugagugugcuuggaaucaaugacuac

SEQ ID NO: 387073 - RNA, 65 nt, Homo sapiens
gucaguagaaagugcuggaaacacugaaggaaauucucuucuuaguuucaguacuuucuacuggc

SEQ ID NO: 387074 - RNA, 58 nt, Homo sapiens
uuggagcacuggggcacugacagccucugcuauggguugugagacuucagugcugcga

SEQ ID NO: 387075 - RNA, 111 nt, Homo sapiens
acuuccuuuuaauauaguacaguauagcacaauuugcaguuaugucuuaauaugugaucaggaaugaucaugacuggaaacaguguuauuugugguagcuauaggguaggu

SEQ ID NO: 387076 - RNA, 57 nt, Homo sapiens
gcuuaggaugaucauggaaguuuuccuguuggagcaguagcuagccauggucaaggc

SEQ ID NO: 387077 - RNA, 59 nt, Homo sapiens
ccguuugguacuuagagauucucuuuaugcacuuaaaaggcaucauuaguaccaagugg

SEQ ID NO: 387078 - RNA, 64 nt, Homo sapiens
ucaugugggcuauuguuguaucaaccauuuguuccauuuuuauuggugaauaguguccccauga

SEQ ID NO: 387079 - RNA, 130 nt, Homo sapiens
gagaacaguaaagugcuauguagguauaaaguaucauugugugaguugaugggacuugcuuaaauuuuauuauuuuuagcuguucaauuccaucaucugucauaaauacuuuuaaaauggacagcaucuc

SEQ ID NO: 387080 - RNA, 56 nt, Homo sapiens
guugguucuguuuaugugacggauuacauuuauugauuugcauauguugaaccagc

SEQ ID NO: 387081 - RNA, 62 nt, Homo sapiens
ugggggaaguuaguaaauuguaagcauuugugcuggcaagcuuuaauugacucuuuucccca

SEQ ID NO: 387082 - RNA, 63 nt, Homo sapiens
ccugugguuaaccagcuagauggacagaggaugaccagcaggguguggcuggcuggcuacagg

SEQ ID NO: 387083 - RNA, 83 nt, Homo sapiens
aacuggacccaucacaggccucagugggaaacuccagaacaguucugccauucuccacauggugugcugugaguggucuaguu

SEQ ID NO: 387084 - RNA, 57 nt, Homo sapiens
uuaucccacuuucuguuccuguggucuucuuucucccaugaagcagaaacuggauaa

SEQ ID NO: 387085 - RNA, 127 nt, Homo sapiens
cuuaggcuuaggguuaaggguuaggguuagguguaggguuagguuugggcuaaagauuaauguuaggauuaggguuuggguuuuauguaacagcuagguuuagguuugggguagauguaggcuuagg

SEQ ID NO: 387086 - RNA, 105 nt, Homo sapiens
aggagcauguuaaaauguacaucccugagccugacucucagagaaucuaucugauuuggaagaucuggggugaggccuaggaauuuaaauuuucaacaugugccu

SEQ ID NO: 387087 - RNA, 75 nt, Homo sapiens
ugagccaccaugcacagcugagaaaauucauuaaaagaaaaucuuuucaguaaucuuagcugugcagaggccuca

SEQ ID NO: 387088 - RNA, 114 nt, Homo sapiens
accuuucuauuguagugauaaggguuaaagacauccacauaggaggagacucagcaaguccuuuucuguuuuuuugucuuuuggucucucuuguccuuaggagucugacaaggu

SEQ ID NO: 387089 - RNA, 66 nt, Homo sapiens
gguauuucuaguucuagauccuugaggaauccacacugucuuccacaaugguugaacuaauuuacu

SEQ ID NO: 387090 - RNA, 63 nt, Homo sapiens
agagaucacugaaucacgggggcaguuucccccauacuguucuagugauuguaagugaguucu

SEQ ID NO: 387091 - RNA, 58 nt, Homo sapiens
gacagcuggggagcagaauacauucccuuucuaaagagugugcuugaauucagcuguc

SEQ ID NO: 387092 - RNA, 74 nt, Homo sapiens
uugaguaggucaccucaggaaauacugagcuucucaacauugaagcuucaaguguauaugagaugaccacuugg

SEQ ID NO: 387093 - RNA, 82 nt, Homo sapiens
aauccgugcuccuuaaguaguuguggaaugaaugaacagaaaacaagauucauagucacugcuacuuacauauggagggguu

SEQ ID NO: 387094 - RNA, 72 nt, Homo sapiens
aggucacccuguaggugcuggcagagaaagaaacagaaacuugucucucccagugccucacggaggugaccu

SEQ ID NO: 387095 - RNA, 74 nt, Homo sapiens
ggguguacaggaccugugauucacgaguaacauuucuauagaauauuacacguaauaucacgguguguacaccc

SEQ ID NO: 387096 - RNA, 88 nt, Homo sapiens
caaaacaucuccuggauucauggauuuuuugaaggguuuuucaugucucuaucuccuucaguucugcucugaucuuagguguuucuug

SEQ ID NO: 387097 - RNA, 85 nt, Homo sapiens
gcuggugagcgugcccagggcuucagcggaggcagagaaacuuccagguacuuucucagcccccugacagucaggcuuuacuagu

SEQ ID NO: 387098 - RNA, 125 nt, Homo sapiens
uauagcacucaaaacugucaagcuguaacagcaucacugugauuucuacugugcugagcagcagugugaagcaaggagagcaucacauauggucgcuguuguagcuacucagcuuagguguugua

SEQ ID NO: 387099 - RNA, 63 nt, Homo sapiens
cauuaccaacacauggucucagacuucuggccuccagaacugugagauaauauguuucugaug

SEQ ID NO: 387100 - RNA, 130 nt, Homo sapiens
uugaguaucauggaugaagcauauuaugacucccugaggauggcagaaggaaaggauuguauugaaaaguugguuauaaccauuucuucucucuucaaggggauaagaugcaucaauaaaguguucucag

SEQ ID NO: 387101 - RNA, 60 nt, Homo sapiens
guauuagguuggugcaaaauugacaauggcaaaauacacaauuuugcaccaaccuaauau

SEQ ID NO: 387102 - RNA, 71 nt, Homo sapiens
uguccaugagaugaauccacacaucacaaggcaauuucagauggcuucuuuguaguuuuuaucuugggaua

SEQ ID NO: 387103 - RNA, 58 nt, Homo sapiens
guggacugggagagauaguuccacuuuuaaccugggugggcaccauccccuaggccgc

SEQ ID NO: 387104 - RNA, 76 nt, Homo sapiens
ugucauuuggauacaaguuauuugaacugcggugauaugauaucucauuguaguuuugauuugaauuucucugaua

SEQ ID NO: 387105 - RNA, 63 nt, Homo sapiens
gcgggggcugugcauuccucucuucccgacaugcucugagauguggaaugcaccaguccuugc

SEQ ID NO: 387106 - RNA, 55 nt, Homo sapiens
uugagauggagucucacucugucucgcaggcuggagugcaguggcucaaucucag

SEQ ID NO: 387107 - RNA, 57 nt, Homo sapiens
cucaccuugugauccaccggccucggccuccuaaagugcugggauuacaggugugag

SEQ ID NO: 387108 - RNA, 62 nt, Homo sapiens
ugguauguuuagaccauuuacauuuaauguaauuauugaugugcuugaauuuaagccuacca

SEQ ID NO: 387109 - RNA, 56 nt, Homo sapiens
gcuuugggucccaggaagggggcacugaagcgauccucuuuuuguggccccagagu

SEQ ID NO: 387110 - RNA, 68 nt, Homo sapiens
cuguagucucagcuacuugggaagcugaggugggaggaucacuucagcccaggagguugaggcugcag

SEQ ID NO: 387111 - RNA, 55 nt, Homo sapiens
aacucacuuuguggcuucugaagaagggaccuuuguggacugucauggaguaguu

SEQ ID NO: 387112 - RNA, 98 nt, Homo sapiens
gauggauauuagagaaugacaguguggauuauuguaagucuaaucagguggagauuucaaugguagcugcuguucuuuucuuuuguugaauggcuauc

SEQ ID NO: 387113 - RNA, 62 nt, Homo sapiens
gcagguacauuuuaaagggcucagcagagugaaacaaagcugaacucaaccagauguccugc

SEQ ID NO: 387114 - RNA, 67 nt, Homo sapiens
cauaaauuuuagagguccacaggcaaaauauuaugguuugaauauuugugucccucuagaauucaug

SEQ ID NO: 387115 - RNA, 70 nt, Homo sapiens
acguguuuaacaaccagcagacagaaacccuaacuuguagaacuugccgcuuucugugguguaaauacgu

SEQ ID NO: 387116 - RNA, 56 nt, Homo sapiens
ccugagcccaggaaugcacuucagcuccugguugagcaaugucacugaggcuuggg

SEQ ID NO: 387117 - RNA, 107 nt, Homo sapiens
uuggguugguuccaagucuuugcuauuaugaauagugcugcaauaaacauacaugugcaugugucuuuacagcagcaugauuuauagucauuuggguauaugcccag

SEQ ID NO: 387118 - RNA, 55 nt, Homo sapiens
uacuaguaagggugguuuggcuccccaggcuguccugccaucacccuaacuagug

SEQ ID NO: 387119 - RNA, 84 nt, Homo sapiens
gaguucuaggguacaugugcacaacgugcagguuuguuacauauguauacaugcgccauguuggugugcugcacccauuaacuc

SEQ ID NO: 387120 - RNA, 66 nt, Homo sapiens
guggccaagucaagggguaccagggacauuauaccuuagaaccucccauagcucuuguugguccau

SEQ ID NO: 387121 - RNA, 72 nt, Homo sapiens
agagaugauguugaauguucucaccacaaagaaaugauaaauguuugaggugauggauuugcaaauuacucu

SEQ ID NO: 387122 - RNA, 61 nt, Homo sapiens
cuccuagagcacaaaaggccauugugaaucaucccagugcugcacuuauggcucugaggag

SEQ ID NO: 387123 - RNA, 68 nt, Homo sapiens
aaccuguacugcaguugcagcuugaggagaggacuccuguccuccguaucacuguaggacaccagguu

SEQ ID NO: 387124 - RNA, 71 nt, Homo sapiens
gauaguuuacugagaaugaugauuuccagggacauggaugaaauuggaaaucaucauucucgguauauauu

SEQ ID NO: 387125 - RNA, 56 nt, Homo sapiens
uuucauaaccagcucuagccaguuguagucacagcauggagugcuguguugagaag

SEQ ID NO: 387126 - RNA, 92 nt, Homo sapiens
cuggagacuucuagguugcagcauucugguuccugguccaguuuccugauggacuugaaaccuaggucugagaaaugcugcagcugauccag

SEQ ID NO: 387127 - RNA, 92 nt, Homo sapiens
gcaggagaauugcuugaacccaggaggcagaaguugcagugagccaaagaucgcaucauugcacuccagccugggugacagagcgagacugc

SEQ ID NO: 387128 - RNA, 103 nt, Homo sapiens
aaggccuuuucugcaucuauugagauaaucaugugguuuuugucauugguucuguuuaugugauggauuacauuuauugauucguguauguugaaccagccuu

SEQ ID NO: 387129 - RNA, 62 nt, Homo sapiens
gaggcgggcggaucacgaguucaggagaucgagaccauccuaacacggugaaaucccgucuc

SEQ ID NO: 387130 - RNA, 57 nt, Homo sapiens
ugauguaggacauuauuauuucaaaugugcaucacuuuuaugauaauguuugcauca

SEQ ID NO: 387131 - RNA, 58 nt, Homo sapiens
uuacuguuccucucucaaagaggcuuucucuggaagccucucugcuuaugaauaguga

SEQ ID NO: 387132 - RNA, 61 nt, Homo sapiens
uuaugcauagcaucugcaaauguuaggauagcuguaugcccaagaugcuaugguagcauga

SEQ ID NO: 387133 - RNA, 69 nt, Homo sapiens
ucuccucacauguuuuagcauggcuguuaucaaagacacaaaagauaacaaguguugagaauguggaga

SEQ ID NO: 387134 - RNA, 119 nt, Homo sapiens
ucagucucucucacuaaauucucucccuaauguagguagggucuguuuuugaucacuguguaccucccgcaccugucaagggucuaggccuggcccaccguagggauaauagggacuga

SEQ ID NO: 387135 - RNA, 72 nt, Homo sapiens
augauuaaguaaugguuccaauaauauaaccgcaguagcaaccaguguaguaucaggaaccgugcuaaucau

SEQ ID NO: 387136 - RNA, 88 nt, Homo sapiens
aggaccaaccuuccccucuuuaugauugacacuggcuuguuucagauaggucagugcauucuaaaggcaaaugaacaacggcaguccu

SEQ ID NO: 387137 - RNA, 78 nt, Homo sapiens
ugguuuuuguuguugguucuguuuauaugcuggauuacauuuauugauuugcauauguugaaccagccuugcauccca

SEQ ID NO: 387138 - RNA, 86 nt, Homo sapiens
aaggcaguuccuggauuaucaacaauuaauuuucacacaucccuuccacagaaacagucaauugcugaugaccugcagagcuccuu

SEQ ID NO: 387139 - RNA, 55 nt, Homo sapiens
aggccacggugcuuuggaugcgggacuucucugccauccccugccauuguggucu

SEQ ID NO: 387140 - RNA, 78 nt, Homo sapiens
ugguuuuugucguugguucuguuuauaugcuggauuacauuuauugauuugcauauguugaaccagccuugcauucca

SEQ ID NO: 387141 - RNA, 65 nt, Homo sapiens
ugagaugccuggguguucccagagucagugagacaauuaaucugauuuacauccauugcauuuca

SEQ ID NO: 387142 - RNA, 101 nt, Homo sapiens
ugcauguuuuuaaguaaguuggaugucagagguaacaauuuggauugguuaauuucuucaacagugauggccuuuguauuuaauagcuaugacaauaugca

SEQ ID NO: 387143 - RNA, 81 nt, Homo sapiens
gaggcaaguccuuuucuagggcuccaguaucagaacaagacuuucagauacuggaguccugaaguuuugcacacuucccuc

SEQ ID NO: 387144 - RNA, 97 nt, Homo sapiens
aauauccuaggggaauauuacuccugaugacacgggagauguacaccaugugugucaaccgccugugucauuauucguaauauccuagggggauguu

SEQ ID NO: 387145 - RNA, 67 nt, Homo sapiens
guuuugagcagggcagugaugugggauuuaugcuuugcaaggaucccauuggcugccauguggggac

SEQ ID NO: 387146 - RNA, 60 nt, Homo sapiens
auagguccugugagauucaugcucaaagagguucuguuuugauguguuuccaggauuugu

SEQ ID NO: 387147 - RNA, 99 nt, Homo sapiens
uuugggccuaggucuguuacacucuaguguucuuaaucaggcaugacccugccugagccaucugaggacacuggggaccagguagacugugggcugaaa

SEQ ID NO: 387148 - RNA, 58 nt, Homo sapiens
ucucuucccuuccaaggauaauaugauuguacuucuugguuccuuuugggguaggaga

SEQ ID NO: 387149 - RNA, 64 nt, Homo sapiens
guaaucucagcuacuugggaggcugaggcacaggaaucucaugaacccaggagguggagguugc

SEQ ID NO: 387150 - RNA, 73 nt, Homo sapiens
guccucuggugcccuaguccgggggcggcgagucagagguucucccgugucuuggucuagggccuggcaggac

SEQ ID NO: 387151 - RNA, 74 nt, Homo sapiens
uuuuagcauuucuucacucaaggcacucauuuuuaauauugaacuggcaguuuugauguggagagaagcuaaaa

SEQ ID NO: 387152 - RNA, 104 nt, Homo sapiens
aagaauuuuaugguuuuagcucuuauguuuaugucuauaauccauuuuuauuacuaguuguuuuggugcaugaugugaauguaagaaaauccaacuucauucuu

SEQ ID NO: 387153 - RNA, 79 nt, Homo sapiens
uagaccuuuaauaccuuugguuacauuuuaccuaugugcuucuuuuuggggugguaauguaacugguauucuguuucua

SEQ ID NO: 387154 - RNA, 58 nt, Homo sapiens
uuguauccugagacuuuucugaaguugcuuaucagcuuaaggagauuuuaggcugcga

SEQ ID NO: 387155 - RNA, 64 nt, Homo sapiens
cuucccucuccaggagcccugagcucugguucagguaguuuaacuguuccacuggagagagaag

SEQ ID NO: 387156 - RNA, 77 nt, Homo sapiens
cuuucaguucuaggguacaugugcacaaugugcagguuuguugcauauguauacaugugccauguuggucugacaag

SEQ ID NO: 387157 - RNA, 59 nt, Homo sapiens
ggauccaggauccaaucaaaucuagcuguggcguuaccccauggcaggauccaggaucc

SEQ ID NO: 387158 - RNA, 72 nt, Homo sapiens
gggcaucuagguugauuccaugucuuuucuauuaugaauagugcagugaugaaccuaggaguggaugugucu

SEQ ID NO: 387159 - RNA, 102 nt, Homo sapiens
gcacgugaaccugcucugaccccaugccaguguccagaguggguugagcccucccuggaguagacaccgcuuaaggacaaagcaggagacaggcuggcgugc

SEQ ID NO: 387160 - RNA, 80 nt, Homo sapiens
cucacaguugcacauggcuggggaggccucacaaucauggcagaaggcuaaaggcacuuccuacauggcggcugcaagag

SEQ ID NO: 387161 - RNA, 58 nt, Homo sapiens
ugugucugggcaggguaauuuugaaugacaucauucaaagugcauguucccacuugca

SEQ ID NO: 387162 - RNA, 94 nt, Homo sapiens
gaagcauggcuggguuauuauauuuuucaggguuaucauggaaacugaccauaccguccuucugguuaauacuugcaaaaaucucaccaucuuc

SEQ ID NO: 387163 - RNA, 55 nt, Homo sapiens
cacauuuagaguucuuuacuccaguaugguaccguauggaauggauuuaaaugug

SEQ ID NO: 387164 - RNA, 84 nt, Homo sapiens
ucucuuucuacccccauucaccauggaccaggggccuccauuuccugggggcucuugcggcaugugauuugggggucccuggga

SEQ ID NO: 387165 - RNA, 88 nt, Homo sapiens
aguguguccauguuaaaugcagauuccuaggccccauugacuagcccaggauguggguggaccugggaaucugcauccuuagcacgcu

SEQ ID NO: 387166 - RNA, 67 nt, Homo sapiens
accugagguuggguaauuuaugaagagaaaagauuuauuuggcucauaauuacgcuagcugaaaggu

SEQ ID NO: 387167 - RNA, 55 nt, Homo sapiens
uugccuuccuucugccucucucagcugaaacugaagugagucauuuggaaagcaa

SEQ ID NO: 387168 - RNA, 66 nt, Homo sapiens
acccaggcagucuggcucccaagugcauauucuagagagucacuaugcccaggcugcucugaaggu

SEQ ID NO: 387169 - RNA, 70 nt, Homo sapiens
gugggacggauaugccuaguauuaauuacagcaauguaggaaugcuaaaauaggaugcugcagaaccuac

SEQ ID NO: 387170 - RNA, 73 nt, Homo sapiens
cugucaaggaauuuauccauuucuucuagauuuucuaguuuauuuacauagagguguuuguauucucugaugg

SEQ ID NO: 387171 - RNA, 86 nt, Homo sapiens
ucugccucucaaagugcugggauuuuaggcaugagccacugaacccggccaagucucaaaaacucagauaguuuacccaaaguaga

SEQ ID NO: 387172 - RNA, 70 nt, Homo sapiens
ggugaccucuacacuguugacauuuuguaguguggaacuguuuaugcauuguaagaugucuagcagcacc

SEQ ID NO: 387173 - RNA, 107 nt, Homo sapiens
gaucagcggcagcauucgauucucauaggagcaugaacccuacugugaacugcacacacagggaucuagguugcaugcuccuuaugagaaucuaaugccugaugauc

SEQ ID NO: 387174 - RNA, 56 nt, Homo sapiens
guguguguauauauguguauauguguauauauauauguauauguuuauacacacac

SEQ ID NO: 387175 - RNA, 63 nt, Homo sapiens
guuagcaguauggagcgaggcccagauccagacuucugucggccuaauuuuauaucuguggac

SEQ ID NO: 387176 - RNA, 57 nt, Homo sapiens
ggucuuggagaauuguccuggggaaugagagccacccacacagcagcccuccagacc

SEQ ID NO: 387177 - RNA, 76 nt, Homo sapiens
aaggaaugagugugaccugccaagagauaccggacaguggccuccacuuucucugccuaggucggccagucuccuu

SEQ ID NO: 387178 - RNA, 87 nt, Homo sapiens
gggcccccagggucuuggucaggagccucccucuuucgcuugugcaaggaagggcucuccucacccagccgacccucagggaggccc

SEQ ID NO: 387179 - RNA, 77 nt, Homo sapiens
uucauguaacuguugugagcauucaaggaaggagcugggaaaugguuuagucuucauagaugcucaacagaugugag

SEQ ID NO: 387180 - RNA, 65 nt, Homo sapiens
gaaagaaagaaagaaaugagguuucccugacugagucugggaagcuggcauucauucguucuuuc

SEQ ID NO: 387181 - RNA, 76 nt, Homo sapiens
guaguugugaugguuauguaagaagaauccauguuguacucuaagcauuaugucuugcacaaauuauuuuaacugc

SEQ ID NO: 387182 - RNA, 84 nt, Homo sapiens
uuguaggcuguuuguaauaccugaggcuggguaacuuauaaggaagacagguuuauuuggcucgcgguuuugcaagcuguacaa

SEQ ID NO: 387183 - RNA, 69 nt, Homo sapiens
gacuuugcugagucauuccaugcugugucaugaaacucugugcugcugcaggagacucagaagaagcuc

SEQ ID NO: 387184 - RNA, 67 nt, Homo sapiens
cauuuguucagucugaauacaaaucaaggguaaaaaccacauggcagugucacagacaugacagaug

SEQ ID NO: 387185 - RNA, 60 nt, Homo sapiens
cgcuugaguacaguggcacgaucauagcccacugcagccuugagccccuggacucaagcg

SEQ ID NO: 387186 - RNA, 55 nt, Homo sapiens
uuuucaagaauggcucauugcugcuacguuccuugagcucaugcauucuugagga

SEQ ID NO: 387187 - RNA, 73 nt, Homo sapiens
augagagcaacaccuucacuugaaaacugguaagaguuuggugauaguguguugggggagguauuguuuucau

SEQ ID NO: 387188 - RNA, 75 nt, Homo sapiens
ugauguugaguaauguugaucuuugauauacauaaucucauggauaaacauuacucuagaaacuaaaagacauca

SEQ ID NO: 387189 - RNA, 56 nt, Homo sapiens
gaaugcauuuuuuaaaagcauauugcuauaaaaagccaugcacgugaaaugcauuu

SEQ ID NO: 387190 - RNA, 55 nt, Homo sapiens
uugagauggagucuuguucuuucgcccaggcuggagugcaguggcaccaucucag

SEQ ID NO: 387191 - RNA, 68 nt, Homo sapiens
aggaggaacucagauacuggugacaugaauguguugugcuuauucugugcuccaugucucaaccuccu

SEQ ID NO: 387192 - RNA, 121 nt, Homo sapiens
cuuucugagccuuaauagucaauuuuggucucuuugguuuacuuggugcuagugggccuccugaaauucucuuugugcuggccaccagguuaggccaccuagagucuuuaagcaaggagag

SEQ ID NO: 387193 - RNA, 70 nt, Homo sapiens
gcuugauacuuauggcugugaaaugguaggugguuaauucagccacaucauggauacaguuauguuaagc

SEQ ID NO: 387194 - RNA, 79 nt, Homo sapiens
uccacauuuauugugauugcugcuaggccuacuugauguuaagacuuggugggucuaacaggacacagcucauaguggg

SEQ ID NO: 387195 - RNA, 90 nt, Homo sapiens
ucucaaaccguaacccucugaaaggaagcacuuucuuuucuuucagacaacagaaagugcuucuuuccucgagaaggucacagccugaga

SEQ ID NO: 387196 - RNA, 99 nt, Homo sapiens
ggggcagagcccagcaagcaguguuuuuaacaggugcccggaugugucugcagcucacacuuggagaaacacuagccucuguuaggaguuaacuguccc

SEQ ID NO: 387197 - RNA, 68 nt, Homo sapiens
cauucugacuggugugagaugguaucucauugugguuuugauuugcauuucucuaauggucagugaug

SEQ ID NO: 387198 - RNA, 57 nt, Homo sapiens
agauagacgguaaacucccugauuagcagugagcugaucuguuauacuuuucuaucu

SEQ ID NO: 387199 - RNA, 89 nt, Homo sapiens
ugaguaagaaugagugauuagaggaaugguagauuaugguaauauagaagcuagugauuuauaggcuauuagguauucaaaaaagcuca

SEQ ID NO: 387200 - RNA, 57 nt, Homo sapiens
ugucaucccuaaaguugaggugauaauuacaguacuugccuuaacauugggaugaua

SEQ ID NO: 387201 - RNA, 57 nt, Homo sapiens
ggguuucugcagagggauccacuguuacucugaugggcuucccuuuguagaugaccc

SEQ ID NO: 387202 - RNA, 74 nt, Homo sapiens
cagaaugagacuaagugacauugugcccauuugagcuuacaccuuaagaggccuugugugcauuuucucuuuug

SEQ ID NO: 387203 - RNA, 90 nt, Homo sapiens
aaaugagaaugucuuccauuuggcacuucacugaggcaucccaagguaccuuagggcacuuccaguggaguaaauggacaauuaguauuu

SEQ ID NO: 387204 - RNA, 101 nt, Homo sapiens
cacaguugagcacuuuuagacacuagcugcaaagggagagaugauugauucauuauuaaucucuuccaaccuuugucuauggcgggaacgugcuaccugug

SEQ ID NO: 387205 - RNA, 65 nt, Homo sapiens
uaagugagcccauuguccugguuuauuguaugcgagcaaaaaugggacuagcaugggcuuguuua

SEQ ID NO: 387206 - RNA, 72 nt, Homo sapiens
agccuuuccaaauacuaaagugcuuaaaaucucauuuauucucugauaaaagaauuugcacuuugggaggcu

SEQ ID NO: 387207 - RNA, 79 nt, Homo sapiens
guagacagcucacugggcugucaugagcaacacaugaauucacacauuuaaagugcuuaugacagugcauggcgcauac

SEQ ID NO: 387208 - RNA, 58 nt, Homo sapiens
augaauagugcugcaauaaacauacaugugcaugugucuuuacagcagcaugauuuau

SEQ ID NO: 387209 - RNA, 85 nt, Homo sapiens
uaaccaaagcaucaugauuagaacagaagucagauuacuugggagugguuugauaaaucuguguuaaauugaaaaguuuugguua

SEQ ID NO: 387210 - RNA, 72 nt, Homo sapiens
ggggguggcccuuucucuuccaacaguuacccagcucugguaauaguuggcacuggagaaaguugcacuccc

SEQ ID NO: 387211 - RNA, 91 nt, Homo sapiens
agcaguugauggaucucuggauuuuugaggcaauauauagaacauuugugugugugucugauggauuuacugguuacaucauaagauugcu

SEQ ID NO: 387212 - RNA, 95 nt, Homo sapiens
aaggcagagaccugauucguacaguaguaaaagugaaugaacauuggcaacauuuauucaccauuuauuaugugaaguccugaaaauccugccuu

SEQ ID NO: 387213 - RNA, 88 nt, Homo sapiens
acccccuaccagaugucaugcacguuuauagaagcugcuguaaaaagcuaaaagugacaugaagugcaugauaguugguucaaugggu

SEQ ID NO: 387214 - RNA, 71 nt, Homo sapiens
guuccagcuuauagguagauuuaaaauuugucugguuggcaauugguugaguuuaucuaaagaccugggau

SEQ ID NO: 387215 - RNA, 62 nt, Homo sapiens
cugguguuugagaagcugaugucaggacaugauggagcuuggcugcagcauccgaggaccag

SEQ ID NO: 387216 - RNA, 75 nt, Homo sapiens
uucaccagaguuggaauaauuuugaccaaagcauuuuuacuuauaaacauagggucaaaguguucuuuuguugaa

SEQ ID NO: 387217 - RNA, 66 nt, Homo sapiens
aucagaaucucuagaggacuguccagggaauguuuauuuuucaaaccuccuccaggggauacugau

SEQ ID NO: 387218 - RNA, 77 nt, Homo sapiens
auguggcuuuugucuuugguucuguuuauaugcuggauuacguuuauugauuugcauauguugaaccagccuuacau

SEQ ID NO: 387219 - RNA, 78 nt, Homo sapiens
ccuuucucccacucugucuuugucaggaccagaggauguuuggcauuuccccuggucaccaagacaagggagauaagg

SEQ ID NO: 387220 - RNA, 88 nt, Homo sapiens
uucacagccugagucuuaguuuuucauccaaaaagggugguuaacacuuauuucauggaguugagaaggcuaagaugacagaggugaa

SEQ ID NO: 387221 - RNA, 68 nt, Homo sapiens
guguaucuuacagaguucuaucuaaaaugcccuacccaggcucagagaugcauucuuguaggauauau

SEQ ID NO: 387222 - RNA, 79 nt, Homo sapiens
guggcacaacaaugugcauguacuuagugcuauuugaaccauacacuucaaaugacuaagaugguacauuuuauguuac

SEQ ID NO: 387223 - RNA, 82 nt, Homo sapiens
gccuuuuacgcacacugcaguaaauugcgucgguucauuuacucacagaacaagcacagacaaugcugcaguuuagaaaggu

SEQ ID NO: 387224 - RNA, 62 nt, Homo sapiens
uuucuugacaguggcuuaaauugguuacgaucuuaaaucagagccaacauugaaucaaggaa

SEQ ID NO: 387225 - RNA, 65 nt, Homo sapiens
aggauucuuguaaagucugucucagucaguuuagaacauugggacaaauucuacacucagaucuu

SEQ ID NO: 387226 - RNA, 69 nt, Homo sapiens
ucauguauggcucuuauuauuugagguauauuccuucaauaccuaguuuauugagaguuuuuaacauga

SEQ ID NO: 387227 - RNA, 66 nt, Homo sapiens
guggggauuaagugagaguuggguggggcuccuugcuccucuucccaguuaauccuuaaucuccac

SEQ ID NO: 387228 - RNA, 64 nt, Homo sapiens
ggucuuuguugucuuucguauggaacacuacaaguugguccuuuccauuggagacacucagacc

SEQ ID NO: 387229 - RNA, 77 nt, Homo sapiens
uaaaauuauugcuuuauguggcugauacucauucuguugggucagugccauugccauaugaguugcuaaauauuuug

SEQ ID NO: 387230 - RNA, 81 nt, Homo sapiens
acagaaccuucccaauauuccauuugggucaggaugauaucacaaugauuuugauuuaauggauaauguagaguguucugu

SEQ ID NO: 387231 - RNA, 88 nt, Homo sapiens
agggggauggagugggaaggugguuuucucuuggagucggguguucaguggccugacucuucucugaccgccccagccauauuccccu

SEQ ID NO: 387232 - RNA, 72 nt, Homo sapiens
gaguuguugcuuaaggcuuguacuuguuuucuauugccguguaacaaacgaccagaagcuuaaagacagcuc

SEQ ID NO: 387233 - RNA, 64 nt, Homo sapiens
acaggaagaaagugcaguagauucucauuauucacaaguucuaaauuugcaaauucuucccugu

SEQ ID NO: 387234 - RNA, 63 nt, Homo sapiens
aggaaguuagcaugacuuuccuugguuuaaaagacagacucaggaagguaaacuaacuugccu

SEQ ID NO: 387235 - RNA, 92 nt, Homo sapiens
ggaucccuugagucuagaaguuggaggcaucagugaaguuauuuaauaugaucacaccacugcacuccagccugggcaauagagcaagauuc

SEQ ID NO: 387236 - RNA, 61 nt, Homo sapiens
ggugugcugaccccaggccaucuugccccaaggagguuuaagcugugucuugucagcuacc

SEQ ID NO: 387237 - RNA, 72 nt, Homo sapiens
guauagacaugcacauggcuaacuuuuuucuguauuuuuuguagagacaggguuucgccauguugcucauac

SEQ ID NO: 387238 - RNA, 71 nt, Homo sapiens
aaaacuagugaaaucugaagaaggucaugccugaguuaacaguaucaugcugaugucaauuuccugguuuu

SEQ ID NO: 387239 - RNA, 70 nt, Homo sapiens
aggaauacguuucggcuuaguacaguuuacacagaguccuggaacuggccugagaugaaaagugcccccu

SEQ ID NO: 387240 - RNA, 98 nt, Homo sapiens
gaggcaggagaaucacuuggaacagggaggcguagguugcagugagccaagauugcuccauugcacuccauccuuggcaacgagugaaacuccaacuc

SEQ ID NO: 387241 - RNA, 56 nt, Homo sapiens
gccuuguuucucaccucgaauaccguaauuacuuccucguugguagagagcagggc

SEQ ID NO: 387242 - RNA, 105 nt, Homo sapiens
ucaaggugaagaguggggaguugggagcagggauggaguacccaggauaaaucugagaaacagguuacugcaucgaaaugcuuuuauccuuccucaucccuaugg

SEQ ID NO: 387243 - RNA, 79 nt, Homo sapiens
ggagggugcuaacguggucaccugaauuaugcaugucuauuguguucaaauaucauaaaucggugcaugaauacccucc

SEQ ID NO: 387244 - RNA, 85 nt, Homo sapiens
ggcuguggggguugaaaggaagugguguaucaagcaaaugagcuacagcugugaugguuuagcauuuucuuugaaacauauggcu

SEQ ID NO: 387245 - RNA, 60 nt, Homo sapiens
uugagacaggaucucacucugucacccaggcuggaguacaguggugugaucuuggcucag

SEQ ID NO: 387246 - RNA, 83 nt, Homo sapiens
uuggugaaaugagcaaaguggcauugaggaaaaaaauauauauauauacuuuucauucucacugcacugaugccaucaacuaa

SEQ ID NO: 387247 - RNA, 69 nt, Homo sapiens
caugagacuugggaggggccaggagcggaaugauaugguuuggauuuguguccccacccaaaucucaug

SEQ ID NO: 387248 - RNA, 76 nt, Homo sapiens
cacacuagaagaauuuucauaaugcagucacauggugauugugugugauugcauuaugaauauuauuguaugugug

SEQ ID NO: 387249 - RNA, 74 nt, Homo sapiens
uggggucauuauaguacuuaccucacaccuuugaacuuugagguuuaagugagauaaugcaugugaagauccua

SEQ ID NO: 387250 - RNA, 58 nt, Homo sapiens
ugagacggagucuugcccugucacucaggcuggagugcaguggcacaaucucugcuca

SEQ ID NO: 387251 - RNA, 61 nt, Homo sapiens
uauuaauacuuccaaaucuagucauuucugcagggcaaugaaauagauuuggaaguuggua

SEQ ID NO: 387252 - RNA, 65 nt, Homo sapiens
uaugagcuguuuggaagacacuugaugguuaaugcaaaucaggguggauccuuaaauaguuuaug

SEQ ID NO: 387253 - RNA, 74 nt, Homo sapiens
ugguagcuauuagguuguugccauugaaaguaauggcaaaaccgcaauuacuuuuucaccaaccuaauauacca

SEQ ID NO: 387254 - RNA, 71 nt, Homo sapiens
uccuguuuuccuuuggguagcuguucagaugcaauucaacugacacugauagaacacccaugaggccagga

SEQ ID NO: 387255 - RNA, 61 nt, Homo sapiens
aaaugcugucugugagccucaugacccaagaugucaucuccuguagcgucacauagcauuu

SEQ ID NO: 387256 - RNA, 78 nt, Homo sapiens
uuugaacccaggagcuugaggcugccgugugcugugaucgugccugucauagcacugcacuucagccugggaaacaaa

SEQ ID NO: 387257 - RNA, 75 nt, Homo sapiens
cuaaaaaugcuguaaaguucucauuguagccuagcagucuugggcuuaaugggucacuuuaacuguagacuuuag

SEQ ID NO: 387258 - RNA, 57 nt, Homo sapiens
gagggcuuacuuugugccagaagcgucgcagccagaacugauacagccugagcucuc

SEQ ID NO: 387259 - RNA, 91 nt, Homo sapiens
ucccuagauuaguugauuaaguauuaugaguccuuguuuucauaccuguaaaauagggaucauaauaccaaucucauggaauuacugggga

SEQ ID NO: 387260 - RNA, 73 nt, Homo sapiens
gaugggaguucaccuugcccacagcagucugcagagcuaaugggggugcugaauguguagggggcaucucauc

SEQ ID NO: 387261 - RNA, 61 nt, Homo sapiens
auguauggagauauuuuugguugucaaaauaggcaaauagaugccagagaugcuccuacau

SEQ ID NO: 387262 - RNA, 122 nt, Homo sapiens
ugggaggaacaaggugaggcugugaaggaccuacugauaucuuagcagggggcacagccuccuucuagcaauggcagagugucugugcacaccaggccucaccuguuggacaggaaccccca

SEQ ID NO: 387263 - RNA, 64 nt, Homo sapiens
uuugguauguaauuuauauuguagguuguuagcgcauuaaaccuaugugaauuauuugcucaga

SEQ ID NO: 387264 - RNA, 100 nt, Homo sapiens
cuuugacguggauccccuggagaucuuguuaaaguacagauuaugauucaguagggucugaaauucugcauuucuaauaagcuccaaggucauauugaag

SEQ ID NO: 387265 - RNA, 119 nt, Homo sapiens
gcucugcaauaaagaagugacugaaaacuauagcacugguuuuucuugguuggaugaauuaaugcacauucugaaaaacaguguuuuagauuucaaguuccaggucuuccagaaggagc

SEQ ID NO: 387266 - RNA, 68 nt, Homo sapiens
gugggaugcaaguaaaauugucuucagaaaaccucaacugaaauacacaguaaaaauuugcuucucau

SEQ ID NO: 387267 - RNA, 81 nt, Homo sapiens
ucugcuucagcuugggagucuucacuaaguggugaaaugauggagucaucacucggugaugauucuuaaaauaagaacaga

SEQ ID NO: 387268 - RNA, 57 nt, Homo sapiens
aaucugaguguggccugugcagauaguaguauugugacaguguuacauuucaugauu

SEQ ID NO: 387269 - RNA, 79 nt, Homo sapiens
uucccuacagcuggugaaucugaauugaauccuuaguaaaguuucauauuaggugauuuaguagaugcuaguuaaggaa

SEQ ID NO: 387270 - RNA, 56 nt, Homo sapiens
ccccauuguugugguuuuaucuaccuuuggccucugauggugaccuacagaugggg

SEQ ID NO: 387271 - RNA, 60 nt, Homo sapiens
gaagacuuuucccugggacaguuguggucugugguuacaaguaauaagggaagaauuuuc

SEQ ID NO: 387272 - RNA, 126 nt, Homo sapiens
ggcucuuuuuugguuccaaauggguuuagaauuguuuuuuccucuuuugcuaauucugugaaaaauguaguuaguaguuugauaggaauagcauugaaucugucaauuguuuugccaggcaaggcc

SEQ ID NO: 387273 - RNA, 80 nt, Homo sapiens
ggaggccgaaauccaaggucaaggcguggcagggccaguuccucugagcuccuccccuuggcuuucaggugaccgucuuc

SEQ ID NO: 387274 - RNA, 74 nt, Homo sapiens
agggaacacuucuacacugcuggguugaauguaaacuuguacagucacuauagaaaacaguguggagauuccuu

SEQ ID NO: 387275 - RNA, 60 nt, Homo sapiens
gacaccuugauugcagccuugugaaucagaagauucacuguuaagcaguuaaacuguguc

SEQ ID NO: 387276 - RNA, 72 nt, Homo sapiens
gucauugguuuauagauggggaaacagagacacagaauaguuuaguaccuuuuccuaccuagaaucaaagac

SEQ ID NO: 387277 - RNA, 80 nt, Homo sapiens
uuuguaugugcauuguaaauuuugaugucauuaaauaacaaaacuaagauauuucagauagugauaauagcauguauaga

SEQ ID NO: 387278 - RNA, 76 nt, Homo sapiens
uacauaagugcaugauuacaugcauaugcauauaaacaugcagccaugcauauguaugaaugaaugcauaggugug

SEQ ID NO: 387279 - RNA, 61 nt, Homo sapiens
uugagauauccauaaaugggaagccaggugagcaagccuucuuuccagaaugguguuuuaa

SEQ ID NO: 387280 - RNA, 83 nt, Homo sapiens
uggcuuucaauauguccagauaauuucccuuuauuuguaguuuguuaagagguuuuaucauggaaagauguugaaauuuguca

SEQ ID NO: 387281 - RNA, 68 nt, Homo sapiens
uguggguuauuuauucaacugaagccagcacugguaacauggugauuaguaaacucaaugacaccaca

SEQ ID NO: 387282 - RNA, 68 nt, Homo sapiens
ggaaggccacacaugauuuuuaaagagauaauagcagcacuauugucacuuaaaagugcauguuuucc

SEQ ID NO: 387283 - RNA, 67 nt, Homo sapiens
gggugaguggggucugucugagauggcuucuagguggaagcugccuugugaaggcauucauucauuc

SEQ ID NO: 387284 - RNA, 58 nt, Homo sapiens
ugauagugcuuauccaggagaacugacaggacaguuuugagugugauaaacacuguca

SEQ ID NO: 387285 - RNA, 62 nt, Homo sapiens
cucuucugggucaaaacgaaagcucagcuacagugagagcuccuuugcuuuuuccaggagag

SEQ ID NO: 387286 - RNA, 59 nt, Homo sapiens
ugucuugggaacgaguuacuccuggacacauuuggugguuugacucaguuucuaaggca

SEQ ID NO: 387287 - RNA, 73 nt, Homo sapiens
aggcucuuuuguuuagcugagagggcagugagccacccccuuccuucucucugaggucuggacaagagcgcuu

SEQ ID NO: 387288 - RNA, 65 nt, Homo sapiens
aacccugugagagaguuaauauucaccccacuuuauggaugaggagacugaagcuuacaggaguu

SEQ ID NO: 387289 - RNA, 130 nt, Homo sapiens
auuaauaauugcuagaggcucccugagcacauuaacaauuuccauguccaaaaauuaguuuuaaccuguaacaguacuuuuggauuugugaaagauugugugugguagaagcauugagguuuguuauuuu

SEQ ID NO: 387290 - RNA, 56 nt, Homo sapiens
uuuagcagcaaagagcuguguucugucaaagacagagcagcucucagcuugcuaag

SEQ ID NO: 387291 - RNA, 89 nt, Homo sapiens
ggagaaucacuugaaccccagaggcggagguugcagugagcugagaucgcgccauugcacuccagccugggggacaagagcgagacuuc

SEQ ID NO: 387292 - RNA, 80 nt, Homo sapiens
gagccacacgccugucgcacaucuugagagggagaugagagaacccucccauuucacugagacaugugcccagugugcuc

SEQ ID NO: 387293 - RNA, 65 nt, Homo sapiens
gaaugccugagaggauaugauccccuugaagcugauuacaggguagacauacaucucagccauuc

SEQ ID NO: 387294 - RNA, 82 nt, Homo sapiens
agcucuaguaguaaugguuaaaggcauguacacuagagucagccacacuugagucugauguuugucucuaacaacuagaguu

SEQ ID NO: 387295 - RNA, 89 nt, Homo sapiens
uaauauuucuucuguuaguucugauaacuuaugguuucaaguugcugucuauuuuauugaguuugucaaauuuauaggcagaaauauua

SEQ ID NO: 387296 - RNA, 69 nt, Homo sapiens
uacacacugagguauuuaggugaaagaaggauauuuguaccuuacucuuaaacgauggcucagugugug

SEQ ID NO: 387297 - RNA, 63 nt, Homo sapiens
uugagaagugucuguucaugucuuuugcucacuuuuuaugagguuuuggggggaccuuuucag

SEQ ID NO: 387298 - RNA, 79 nt, Homo sapiens
guuugugguuaaagccuuucauuugaccuugucacuauaguuuccaugacauuuuuugguaggcuucuaacauacaaau

SEQ ID NO: 387299 - RNA, 60 nt, Homo sapiens
ugaauugucucucacuggguuccucccacaacacauggggauuaugagaacuacaauuca

SEQ ID NO: 387300 - RNA, 90 nt, Homo sapiens
auggcacagagguauuggaaggagugucagaugcucagguagaaugaaucuaucaacucuggcacuucuguguacuucugagucugccau

SEQ ID NO: 387301 - RNA, 55 nt, Homo sapiens
cauuguggucaaggauggaccacauauaugaugguggucccauaagauuacaaug

SEQ ID NO: 387302 - RNA, 77 nt, Homo sapiens
gauuaagauuuauuagaugcuuaccugcgccaaugggagauauacuggcccaaguaagcauccaauaaauguugauu

SEQ ID NO: 387303 - RNA, 66 nt, Homo sapiens
cugaccuaugauuuggcucaaagucauucaagacuggggcauggcacugacuaagcuauggguuag

SEQ ID NO: 387304 - RNA, 67 nt, Homo sapiens
gugacccucuagauggaagcacugucuguugucuaagaaaagaucgugcaucccuuuagaguguuac

SEQ ID NO: 387305 - RNA, 61 nt, Homo sapiens
cucuaauuccagcacuuugggugaccgaugagagaggaucacuagaguccuggaguuugag

SEQ ID NO: 387306 - RNA, 122 nt, Homo sapiens
cucucuguucaaaggaacuaaaaauacauuauuguacauauccucccuucagcuacccacccaccauuacaagaggaacugacagagggaaauguaaaagcuguguaaaguucagcugagag

SEQ ID NO: 387307 - RNA, 81 nt, Homo sapiens
gagggugagagcuccgauccuuccauauuuuccaggggaggggaucaggaauguauuaaggcauugggccucucuucucuc

SEQ ID NO: 387308 - RNA, 101 nt, Homo sapiens
ugagacggagucucacucugucgcccaggcuggagugcagugacgugaccucagcucacugcgaccuccaccucccggguucuagcgauucuccugucuca

SEQ ID NO: 387309 - RNA, 73 nt, Homo sapiens
accaguaacagucucaacaguggucugaauccauucaugagaacaacaaucccacuugugaugcuguacuggu

SEQ ID NO: 387310 - RNA, 101 nt, Homo sapiens
auaucugugcuaaucuguccuaacaauuagcacagauauuagugaucugugcuaauugguuaauaugucugcuaauuguuucucagaauuagcacagauau

SEQ ID NO: 387311 - RNA, 74 nt, Homo sapiens
gcccccuuugcuggugauuaaauccugaagguacacgaaguauuucagugaaugaauggcuaacagaaaagggc

SEQ ID NO: 387312 - RNA, 81 nt, Homo sapiens
ggguauugauaguuaauugucugugaguaccugacagcaacggguuauggcuauugaugacaauugguaccuucagugccc

SEQ ID NO: 387313 - RNA, 64 nt, Homo sapiens
ugagcacauuuacaucaguucccugugucccccaagucugaugauggugauauggaugugcuca

SEQ ID NO: 387314 - RNA, 58 nt, Homo sapiens
uuuucuaaaauauccaggacagucuuuggugaauaggucuugguauguauuuaggagg

SEQ ID NO: 387315 - RNA, 55 nt, Homo sapiens
agggccucuuuguuagugucaugauuucauguauaagaaauuggcaagaugccuu

SEQ ID NO: 387316 - RNA, 107 nt, Homo sapiens
cuagauugagaggaaggagagaauaucaacaugguaggguuggucacuugaguggugaccaagcucgaaauguggguauuauccuugucuccuuccccccagucuag

SEQ ID NO: 387317 - RNA, 124 nt, Homo sapiens
gccaccaccaucagccauacuauguguagugccuuauucaggaagguguuacuuaauagauuaauauuuguaaggcacccuucugaguagaguaaugugcaacauggacaacauuugugguggc

SEQ ID NO: 387318 - RNA, 76 nt, Homo sapiens
uggcuauaauauuuggccauaauuuuaauuggccauuaaauuuggccaaguaauauggccaaauaauaauuagcca

SEQ ID NO: 387319 - RNA, 58 nt, Homo sapiens
uauguaacaccguggucauagcauuuauaagauuguacugugauuauuuaguugcaug

SEQ ID NO: 387320 - RNA, 63 nt, Homo sapiens
ccagugaugcugggggcagcccucuagagccucggguucucaguggcacccccaacaccuugg

SEQ ID NO: 387321 - RNA, 68 nt, Homo sapiens
cugguauuacaggcaccuggcuaauuuuuguauuuuuaguagagauggaguuuugccauguuggccag

SEQ ID NO: 387322 - RNA, 87 nt, Homo sapiens
ggagaaucacuugaaccugggaggcggauguggcagugagccgagaucacgccacugcacuccagccuugcgacagagugagacucc

SEQ ID NO: 387323 - RNA, 55 nt, Homo sapiens
aggacaagagacugggacacugaacaaaggauguugguggguccucacuuguccu

SEQ ID NO: 387324 - RNA, 56 nt, Homo sapiens
uucacagugugaucuaugggcaaugugcugcuacaccaccauguuucaccugugaa

SEQ ID NO: 387325 - RNA, 58 nt, Homo sapiens
ugaguggagaucgcaccauugcacuccagccuaggugacagugugagacuccaucuca

SEQ ID NO: 387326 - RNA, 60 nt, Homo sapiens
uauaaaucaugcugcuauaaagacacaugcacacguauguuuauugcggcaucauucaug

SEQ ID NO: 387327 - RNA, 72 nt, Homo sapiens
aguuugaagucagguagucugaugccuccagcuguguucuuuuugcaugggacugucuuggcuauacaggcu

SEQ ID NO: 387328 - RNA, 84 nt, Homo sapiens
uuucaguucuuuugcacuugcugaggagugauuuacuuccaauuaugugaucaauuuuagaguaagugucaugugacacugaga

SEQ ID NO: 387329 - RNA, 98 nt, Homo sapiens
ggcaggagaaucgcuugaacccgggaggcagagguugcggugagccaagauagcgccauugcacuccggccuggguaacaaaagcgaaacuccauguc

SEQ ID NO: 387330 - RNA, 85 nt, Homo sapiens
gaagcaauugugaugaaugaagggacugggguaucauuguuuagaugugaugauccagugaguuucaguucuuuguuaauucuuu

SEQ ID NO: 387331 - RNA, 82 nt, Homo sapiens
cagucacguccccuuaucacuuuuccagcccagcuuugugacuguaaguguuggacggagaacugauaaggguaggugauug

SEQ ID NO: 387332 - RNA, 73 nt, Homo sapiens
gcacuaacguucuuuccuuugaggccaaaaguauuuaaacagaugcuuuugcaggaaaggaagaauguagugc

SEQ ID NO: 387333 - RNA, 64 nt, Homo sapiens
agaaccuucuauugguaauauuuucugugaugaaaaucaaagauauauuuuaguagaguguuuu

SEQ ID NO: 387334 - RNA, 83 nt, Homo sapiens
cagacucccaggcccacuagaacuagaacugcugggguaggaccugcccacaagcaucuuuuuagccuucucuggugauucug

SEQ ID NO: 387335 - RNA, 68 nt, Homo sapiens
guagggguaaauucuggacuuugccauugcauuuguaaaugucauggcacugaugagaguuuccuuac

SEQ ID NO: 387336 - RNA, 91 nt, Homo sapiens
agucaccagaguccauuguauuagucuuauuuucaucaccgugggcguacccugugggaugauguuaaacguacucuagacucuguuggcu

SEQ ID NO: 387337 - RNA, 78 nt, Homo sapiens
gaaaggaguccaguuucaauuuucugcauauggcuagccaguucugccagcaccauuuauuaaauagggaauccuuuc

SEQ ID NO: 387338 - RNA, 86 nt, Homo sapiens
cacacuaagcuuaccaugaagguggagagagaaagcuagcacauguggcuucuuccuugaguucuucauggaaaagauggggugug

SEQ ID NO: 387339 - RNA, 85 nt, Homo sapiens
gaaacagagggaugcucuaugucaaaggauacaguagagcugcucuuuuuuguaccacagggcaugaagugcucuccuuuguuuc

SEQ ID NO: 387340 - RNA, 60 nt, Homo sapiens
ggucuagauagcauuucucuucagcugauacccuagucugagauccaugcuauuugggcu

SEQ ID NO: 387341 - RNA, 71 nt, Homo sapiens
agucagauuuccuccuacgcuuaucacuuuauauguggaaaauggaguaaaagaguaggaggaauaaggcu

SEQ ID NO: 387342 - RNA, 56 nt, Homo sapiens
ugauaugacagcucugcugccauggucagaaaccaaucuggcuugcugucauguca

SEQ ID NO: 387343 - RNA, 67 nt, Homo sapiens
ggccaaucuuuccugagugcauuguucugugguuaaaacaagacuuuguauacauggaagaaugguc

SEQ ID NO: 387344 - RNA, 75 nt, Homo sapiens
uggaacuuuucaaggugcuuccagacaggucaaauaaugacaguuuacuuaguauggggcuuuugagaagaucua

SEQ ID NO: 387345 - RNA, 72 nt, Homo sapiens
cuggccccagcagguauuagagagccugaaagauuaccucuguuucucuccccuacucuaaaucugcacuag

SEQ ID NO: 387346 - RNA, 78 nt, Homo sapiens
gaacuaggguagcggauguugugauucucaguccaaggccaaaggccugagaacucaugggucugcugguguaaguuc

SEQ ID NO: 387347 - RNA, 67 nt, Homo sapiens
gaaggguuuuuguaacguauacuguuauggugccuaauucuuggcagugguguuagagaaaucuuuu

SEQ ID NO: 387348 - RNA, 83 nt, Homo sapiens
gcugcuuggaaggcugaggcagugaggcagaguuugcaaugagccgagaucgcaccauugcacuccagccaaacuacaagagc

SEQ ID NO: 387349 - RNA, 58 nt, Homo sapiens
ucagauguuucuuuaacgcaugguugcaaaacgugcuguuaguaaggaacaugacuga

SEQ ID NO: 387350 - RNA, 72 nt, Homo sapiens
cccugcuagcagaguauagagggcugggcccuggauuaggaguccagagcccuuuauauauccaugggaggg

SEQ ID NO: 387351 - RNA, 76 nt, Homo sapiens
ccaaguaaaugguguuuccguuaagcugaacuauaaaauguggguuacuuaaacagaaaugcagaaaggcacuugg

SEQ ID NO: 387352 - RNA, 122 nt, Homo sapiens
gggaacaucgacuuguauguuaucagugaccaaagaggcaggcauuagagggccaaaagcuuucaaaccacuuugagugugguucuuaggcgcacugguggagcuacacccaagauguaccc

SEQ ID NO: 387353 - RNA, 62 nt, Homo sapiens
gucauuguauuuaacucgaaagggauuguagaaggcacaucucauuccuugaaaauaaugac

SEQ ID NO: 387354 - RNA, 56 nt, Homo sapiens
guugguucuguuuauaugauggauuauguuuauugauuugcauauguugaaccagc

SEQ ID NO: 387355 - RNA, 57 nt, Homo sapiens
ucagaguuuuggaagcuggaagucugacaucagggugccagcaucauuagauucugg

SEQ ID NO: 387356 - RNA, 74 nt, Homo sapiens
uucuggccuaagguacagaauucugucccuugaguggacacugggaagagagaauucugucacuauccccagag

SEQ ID NO: 387357 - RNA, 113 nt, Homo sapiens
aacuuacaguuuacuuuggcuuuccaauaaggcuaggaauucucugaagucauauagagcuuauucuucacagagucccugauuguuggcagaauugcugaacaauguaaguu

SEQ ID NO: 387358 - RNA, 84 nt, Homo sapiens
aauguacacagucaaaaauuuccaggcacaucugcucucuccucuccuauuugacauugcacuggagauucuggcaaguauauu

SEQ ID NO: 387359 - RNA, 68 nt, Homo sapiens
uaacaucuguucacaguguuucuuugagauaggaacuauaauugucuuaccagcugagaagaggguua

SEQ ID NO: 387360 - RNA, 61 nt, Homo sapiens
ggugauggcuuggcaauuaucacauugucucucuaaaagugauaaguuggcagccagcacc

SEQ ID NO: 387361 - RNA, 62 nt, Homo sapiens
agguaaacauggggacugcuaccaaccccaggagcuagggagguacacuucauguuucaccu

SEQ ID NO: 387362 - RNA, 60 nt, Homo sapiens
ccaaaugccuaagacccugugggggaguaguaauauaauccccaacagguucuuaguugg

SEQ ID NO: 387363 - RNA, 76 nt, Homo sapiens
uugcucuguugccuaggcuggcgugcaguugugcaaucucagcucacugcaaccucugccuccuggguucgagcga

SEQ ID NO: 387364 - RNA, 74 nt, Homo sapiens
gaauucuguuuugcacuagaaccagagguuuuaacaagugugucaaaccuccuuaauguuguaaaacagaauuc

SEQ ID NO: 387365 - RNA, 57 nt, Homo sapiens
gaaccaugaccuugggagaauagaauguuucucuucucugggacauaggucggguuc

SEQ ID NO: 387366 - RNA, 112 nt, Homo sapiens
cagaucaucaggcauuagauucucaacaggagcacaaaacuuagaucccucgugugugcaguucacaauaggguuugugcuccugugagaaucuaaugccgccgcugaucug

SEQ ID NO: 387367 - RNA, 55 nt, Homo sapiens
ugaguugagaggagccugaagauagaucuggauggucaggcuccgcauuaacuua

SEQ ID NO: 387368 - RNA, 65 nt, Homo sapiens
ggugcaaaaguaauugcaguuuuugcaauuacuuuuaauggcaaaaaucacaauacuuuugcacc

SEQ ID NO: 387369 - RNA, 55 nt, Homo sapiens
ccuggcagccuuguuuguuggcuuuuucagguguaacagucaagguuugaccagg

SEQ ID NO: 387370 - RNA, 79 nt, Homo sapiens
aggcuggagugcaaaugggaugauuaugguucacuacagccuuuuucuuuggagaucagcaaucaucacacuucagccu

SEQ ID NO: 387371 - RNA, 63 nt, Homo sapiens
ugguaguggauguucagagauuugaacccaggugucuggcuucagagucugugcauucugcua

SEQ ID NO: 387372 - RNA, 77 nt, Homo sapiens
ugguuuugucuuugguucuguuuauaugcuggauuacauuuauugauuugcauauguugaaccagccuugcauccca

SEQ ID NO: 387373 - RNA, 82 nt, Homo sapiens
gucuuuguuauugugaauagugcugcaaugaacauacaugugcaugugucuuuauagcagcauaauuuguaauccuuuggau

SEQ ID NO: 387374 - RNA, 55 nt, Homo sapiens
cuuguaaucaugguggaaagggaagcaaacauauccuucuucacauggcagcagg

SEQ ID NO: 387375 - RNA, 59 nt, Homo sapiens
uuaguucauugugacuggacucagagcuagagguacaguucaguaagagaugaggcugg

SEQ ID NO: 387376 - RNA, 58 nt, Homo sapiens
ugaggcggggucgcgcucugucacccaggcuggaguacaguggugcgaucucggcuca

SEQ ID NO: 387377 - RNA, 69 nt, Homo sapiens
cuuucugggggugcugauggaaacuccuacccaggcaaaucuuguuucccaggcauucccccagugaag

SEQ ID NO: 387378 - RNA, 65 nt, Homo sapiens
auggaaagcuguuccuacacaaggcaacaagcccagaacaggcugugugaggacaguuuaucuau

SEQ ID NO: 387379 - RNA, 67 nt, Homo sapiens
aagcaauauaagugcaacauaaguguuaaacacaguuuaagcauagauguuguacucuaaaauguuu

SEQ ID NO: 387380 - RNA, 71 nt, Homo sapiens
ucugcccagagaucuuagcaaucuuacuaggaugccaugacuaugauuuggauugaagacuccggggcaga

SEQ ID NO: 387381 - RNA, 65 nt, Homo sapiens
gauucaagucucaauguauuauggugagcaaaagagggccagcaagaugaaguugagcuaggauc

SEQ ID NO: 387382 - RNA, 76 nt, Homo sapiens
ucgccugagccccagagguugagucugcagugagcugugaacaugccacugcacuucagccugggugacagagcga

SEQ ID NO: 387383 - RNA, 96 nt, Homo sapiens
agguuagcucagccccaguccagguuagcucagcccagcucagccuugcccagguuagcucagcccagcuaagcucaacuuggcucagcucagccu

SEQ ID NO: 387384 - RNA, 88 nt, Homo sapiens
aaggguggucuacuacuuaaagauaaggcucgcuuggauuaaagaucauagguuuuguuuuguuuuguuuugagauagucucacucuu

SEQ ID NO: 387385 - RNA, 124 nt, Homo sapiens
ccaaagucacauggguugguccccuugguugguaccccugguguacuaauacgaccccaaaacucguguuagcugcuuuggggacccuccaccaggggacauacgaccuccaggugaaucaugg

SEQ ID NO: 387386 - RNA, 59 nt, Homo sapiens
gaucaaguguuuccuuaaauacuuggcauaacgccuggugaauaagaaauacuucaauc

SEQ ID NO: 387387 - RNA, 62 nt, Homo sapiens
aacccguuuccuggaguucaguaagcugcucuaacaaguuuaucaaacccaaggaggggguu

SEQ ID NO: 387388 - RNA, 58 nt, Homo sapiens
ugugguguaugugugugcuugaauacaaagagaaacguucagaugcaugcucacuaca

SEQ ID NO: 387389 - RNA, 67 nt, Homo sapiens
ugauaguugucagugggggaccgcucugagcuccuagaggcugcucuucuccacagauaauuaauca

SEQ ID NO: 387390 - RNA, 74 nt, Homo sapiens
ccaacgagaucauugugggccaagcuguugugauaaaucacgcaaucuagcauggauauauugaucugcauugg

SEQ ID NO: 387391 - RNA, 76 nt, Homo sapiens
cguugggaguuugcauagacaauauuaaucuucacaaaccuucuguaagguagauguugucaugcccauuuuaaug

SEQ ID NO: 387392 - RNA, 103 nt, Homo sapiens
ucacagggccuagugcccaggugauaugacuuuccucuacuuccuaggcuuuuccuaagaagggauuguaauauauugcugggucagaaccuaggucguguga

SEQ ID NO: 387393 - RNA, 64 nt, Homo sapiens
aacguauguauuuggaggggaugcaaacacucagaccauagcauuccucaaguacuaauauguu

SEQ ID NO: 387394 - RNA, 75 nt, Homo sapiens
ugcaagccuguggccccuagcuacuagagagacugaggugggaggaucacuugagccugggaggccaaggcugca

SEQ ID NO: 387395 - RNA, 118 nt, Homo sapiens
aauucccuauccaucuuccuacacacuuucauagccuuugucgucugagggaaaaagaaagguuuucaucaugccaguuaaaggcugugaaugugaccuagauaauucuuggggaauu

SEQ ID NO: 387396 - RNA, 112 nt, Homo sapiens
gccccuguucucccccauuccccuagagcuacagcccucacugucccgugaggggaaaaggcauggugacaaugggggcuguagcccuaggagaacgggggagaagaugggc

SEQ ID NO: 387397 - RNA, 97 nt, Homo sapiens
cacggauccccaccccuggcuuuuagaaggcugacugacacauugcgugucaguuaaugcugccugcuggaagccuggggcuuugccggggacugug

SEQ ID NO: 387398 - RNA, 64 nt, Homo sapiens
guuguucaggagguuggggaugcagugagccauguuuguaccaccgcacuccagccugggcaac

SEQ ID NO: 387399 - RNA, 60 nt, Homo sapiens
uggcaacuacuaaucauuuaacuuuugguuguaagggcuuagauguuuagaagugggcca

SEQ ID NO: 387400 - RNA, 59 nt, Homo sapiens
uauuugggcuuuuaaucuagagcagagauuagaaaacuuugccuauaaagggccaggua

SEQ ID NO: 387401 - RNA, 81 nt, Homo sapiens
gcuauuuuguuuuauacuguuuuacaucauugccuuuccccucuaauagagugugaucucuaaaacaggaaagacagcagc

SEQ ID NO: 387402 - RNA, 70 nt, Homo sapiens
uguagaagcacaggugaguugguagauggcucuugacauagcaccaccacuaaucucaucgcuaucuaca

SEQ ID NO: 387403 - RNA, 63 nt, Homo sapiens
cuauguguccauguguucucaucauuuagcucccaucuguaagugagaacaugugguauuugg

SEQ ID NO: 387404 - RNA, 98 nt, Homo sapiens
ugugcacuuucucuucuugucucuuuuaugggcuauuugcauuagcauuuaaauuaaaaaguuacaggggcucauaagaacaugaaauucaaggcaca

SEQ ID NO: 387405 - RNA, 84 nt, Homo sapiens
acuacuggguauguagcuaauggaaaggaaaucaguauaucaaagggauaucugcaucccauuuuuaucagcacuauucauggu

SEQ ID NO: 387406 - RNA, 56 nt, Homo sapiens
gacucugucugauuguuucagcacuaugagaugugaaugagaaccucuacagaguc

SEQ ID NO: 387407 - RNA, 62 nt, Homo sapiens
uuggccagugucggaggccaggagggcuggaaggaagaguucuggaagaggacauuggccag

SEQ ID NO: 387408 - RNA, 56 nt, Homo sapiens
auugguucuguuuaugugauggauuauguuuauugauuugcauauguugaaccagu

SEQ ID NO: 387409 - RNA, 64 nt, Homo sapiens
guucuaugagccaaggaugaaaaagaguggagguuccauuauuuaaucaccuugcuuuuagaac

SEQ ID NO: 387410 - RNA, 89 nt, Homo sapiens
guuagagagggguagggcugaaaguuccagacuuuaaaguuauaauucagcuauaaagccuagaacuuucagcccuaucccucucuaac

SEQ ID NO: 387411 - RNA, 57 nt, Homo sapiens
auuguuaugguugugguuuugguuguuacaauuacuagcuccacagcuauauauaau

SEQ ID NO: 387412 - RNA, 96 nt, Homo sapiens
ugugaggacaugagauuugggaggggccagguguggaaugauacauuuaggcuuuguguccccacccaaaucucaucuugaauuauagucuccaua

SEQ ID NO: 387413 - RNA, 97 nt, Homo sapiens
gugcagaaugugcagguuuguuacauagguauacaugugccauaguaguuugcugcaccuaugaaccuguuaucuagguuuuaagaccugcaugcau

SEQ ID NO: 387414 - RNA, 71 nt, Homo sapiens
ggccuucucaauggaugugggaccagugcacacagaugccacccuacaagugaccauugcccuagagggcc

SEQ ID NO: 387415 - RNA, 60 nt, Homo sapiens
cugcaauguuugaaauggcaaacauagugaaugggaugaauggcagauuagacauugcag

SEQ ID NO: 387416 - RNA, 111 nt, Homo sapiens
guaguuauguucuaauaaaacuauuuacaagcacaggcagcaggcuggauuucaucugcagguguaguuugcugaccaugguuuagaguauguguucugggauguggcugc

SEQ ID NO: 387417 - RNA, 78 nt, Homo sapiens
gguuauuuuuaugcagacauuguuccaaccacaacgacuguuuucgaaggugggugguauuuguuugguggaaggauc

SEQ ID NO: 387418 - RNA, 71 nt, Homo sapiens
acauauguuacaaacccauauuauauuguuauuauuuuaguguaaaaaguugauaugguuuggauaugugu

SEQ ID NO: 387419 - RNA, 60 nt, Homo sapiens
aaucugggcugauucuguuuuuuaauauguauguaaauguuaaagagcucagcacagguu

SEQ ID NO: 387420 - RNA, 57 nt, Homo sapiens
ggaggaggagaggcugccauugauucaaaaauaacaugagcagaugcuccugccucu

SEQ ID NO: 387421 - RNA, 60 nt, Homo sapiens
uuuaaaguuagaaggaaagggcuuuuacuucccuuauggccuuccucugaccauuuuaaa

SEQ ID NO: 387422 - RNA, 88 nt, Homo sapiens
ggagaauugcuugaacccggcaggcggaggcugcaguaagccaagaucaugccauugcacuccagucuggggggcaaagcgagacuuc

SEQ ID NO: 387423 - RNA, 59 nt, Homo sapiens
agagauaauuagguuaaaugaggccaugaguggccucauccaauaugacuguuaucucu

SEQ ID NO: 387424 - RNA, 55 nt, Homo sapiens
guuauggcuuugcgguguuagcagcucuuuauuguuacagccucaggguuauagc

SEQ ID NO: 387425 - RNA, 59 nt, Homo sapiens
uagaagcugagaauguccucagguugccagucagcaugaaaguggggaccucaguucua

SEQ ID NO: 387426 - RNA, 67 nt, Homo sapiens
gaugggaaacgauuagucaguggagcauucagaacacacacaaccuuuauugauuaaguuugcuguc

SEQ ID NO: 387427 - RNA, 55 nt, Homo sapiens
gcuuccaaucauggugaaaggcaaguggggagccagagucucacaugguggaagc

SEQ ID NO: 387428 - RNA, 56 nt, Homo sapiens
uugcagaagaguucgaucuggcagugguauaucugucauaagcucaacaucuguag

SEQ ID NO: 387429 - RNA, 101 nt, Homo sapiens
ugaggcaggagaauuguuugagcccaggaguucgaggcugcagugagccaugaucacaccucuguacuacagccugagcgacugagccagacccugucuca

SEQ ID NO: 387430 - RNA, 102 nt, Homo sapiens
aggauugacucuuccaauuuugaaaaaaauucugugaauaaaaugcuauuaaauagcauuacaugguacagagaaguauuuugucaaaggaagagucaaccu

SEQ ID NO: 387431 - RNA, 84 nt, Homo sapiens
uauuagguugguggaaaaguaguugcgguuuuugccauuaaaaguaaugaccaaaaucgcaauuauuuuugcaccaacuuaaua

SEQ ID NO: 387432 - RNA, 77 nt, Homo sapiens
gguggggguguugggggcauuaguagucugccuuauuuccuuguucaguguuacacuugcuugcaauagccuccacc

SEQ ID NO: 387433 - RNA, 61 nt, Homo sapiens
gugccugugugugguuuccuagaaauaguuucagcaguccuggaagagugacacaagguau

SEQ ID NO: 387434 - RNA, 58 nt, Homo sapiens
ucuaagcugaccacauggccaagccaugugucaugauguggaguuguggcaguuugga

SEQ ID NO: 387435 - RNA, 61 nt, Homo sapiens
agucccguagcaggaaaccuguguugagggaggcucuuuucauucuuuucuugcuggggcu

SEQ ID NO: 387436 - RNA, 66 nt, Homo sapiens
accuauggccgaaugugaaguguuggcggaaccccgcuccggcagcgugcacuuucgccacuaggu

SEQ ID NO: 387437 - RNA, 83 nt, Homo sapiens
ggagaaucgcuugaaccugggagguugcagugagccaauaucuggccauugcacucuagccuaggugacaacagcaagacucc

SEQ ID NO: 387438 - RNA, 85 nt, Homo sapiens
uauuaaguuggugcgaaaguaguagcaguuucugccacuuaaaaguaaugguagaaaccacaauuacguuugcaccaaccuaaua

SEQ ID NO: 387439 - RNA, 123 nt, Homo sapiens
aagugagcugggucaaccaucaguuuggcuuucucucuauccugugguuuuuuuccccaucucagcaggaaguagaguuggccagccaugaugauaaacaaagaaggauucagcauuuuacuu

SEQ ID NO: 387440 - RNA, 89 nt, Homo sapiens
ggagaauugcuugaacccaagagguggagguugcagugagccaagauugcgccauugcacuccgcccugggcaaaaagagugaaacucc

SEQ ID NO: 387441 - RNA, 66 nt, Homo sapiens
cuuuugaucucccauugugguuucccauugguucaacccaaucacaguuaguaagggagaaaagag

SEQ ID NO: 387442 - RNA, 93 nt, Homo sapiens
uggaaaugacuaaggacuaaacagugaucucaugcugauuaucuguaguuacaugagacugucgcuaguuucuucuauaggcuuacacuucca

SEQ ID NO: 387443 - RNA, 83 nt, Homo sapiens
uucugguuucucuggugaugaacaggaccauaaugcuccaaagagcuuaugucuuuuguguucagcuaccagggcagguagag

SEQ ID NO: 387444 - RNA, 60 nt, Homo sapiens
gauauuggcaauccauauauuuucuuaauuucucgagagaaaauagacauugcuaguauu

SEQ ID NO: 387445 - RNA, 64 nt, Homo sapiens
guauuaguuuucuguggauuacaagcaagucacacauuuugaauguacucaaggaaaacuaugc

SEQ ID NO: 387446 - RNA, 76 nt, Homo sapiens
cacaguuuagcauggagucaugcacggcugcuuauugugagcuagcuguuucauauguacuccugaugaggcugug

SEQ ID NO: 387447 - RNA, 87 nt, Homo sapiens
ucucaaacaguaacacucuaaagggaugcacgaucuuuucuuuuauacaacagacagugcuuccaucuagagggucacugccugaga

SEQ ID NO: 387448 - RNA, 119 nt, Homo sapiens
auuucaugcuugacuagaacucccacugcaaugucgaauagagaugauaagagugggccucuuuaucuuauuccugaucuugaaggaaaguuucagucuuucacuauugaguaugaaau

SEQ ID NO: 387449 - RNA, 60 nt, Homo sapiens
uuaaggaaggagucuuaaaugggugccuacuuugugcacuuagacucucuuugucuuuaa

SEQ ID NO: 387450 - RNA, 83 nt, Homo sapiens
ucguauggucaugucauguuuaacuucuugaggaacuucuauguugucuuccauagcaguugaaccauuucauccauauacga

SEQ ID NO: 387451 - RNA, 66 nt, Homo sapiens
cuauaauacugaaaguauuuucaaaucuaggaugaccaggauagaggaauuguucaguguucauag

SEQ ID NO: 387452 - RNA, 58 nt, Homo sapiens
ugccuuaauuuuuuauaaucucuguugaccuccaaaagagaccuguaaaguucaggca

SEQ ID NO: 387453 - RNA, 57 nt, Homo sapiens
gugagauuuucuccagguucagaagcaaagaauggacacuacagggagaagacucac

SEQ ID NO: 387454 - RNA, 106 nt, Homo sapiens
gaggcggaggcacaagaauugcuugaacccaggaggcggagguugcagugagcugaaagcacaccacugcacucuagccccugcgacaagacugaaacucugucuc

SEQ ID NO: 387455 - RNA, 89 nt, Homo sapiens
gggaacuuauucaaucauuuaaucuggcucaugagcauuucuuggugcucuggugcuggugauucagauucaaauccaacaagauuccu

SEQ ID NO: 387456 - RNA, 103 nt, Homo sapiens
gucaccagcugcauuaucuccuaacaaagaagucagccuguccuuugaaguuuuaaagccaggaaaugacuucuccugucuagguauauaaguccuagguggc

SEQ ID NO: 387457 - RNA, 82 nt, Homo sapiens
aguuauaggguacauguacacaacaugcagguuuguuacauauguauacuugugccauguuggugugcugcacccauuaacu

SEQ ID NO: 387458 - RNA, 67 nt, Homo sapiens
uuccugugacuguguggcaccccgagucuugccauuacuacucauugaaugucagcaguuucaggaa

SEQ ID NO: 387459 - RNA, 60 nt, Homo sapiens
cauuacacuuguaagguuuuucuccaguaugaacucuccaaugccuugcaaguugugaug

SEQ ID NO: 387460 - RNA, 62 nt, Homo sapiens
ugcagugugcuggggucuccauggcuguguuuuuaaaaucagaucagacaccagcgcacgca

SEQ ID NO: 387461 - RNA, 55 nt, Homo sapiens
aauauccauuacuggucuaaaguaaugggaaacccuauagucaguaguuuguauu

SEQ ID NO: 387462 - RNA, 109 nt, Homo sapiens
cuguucaacacuuuggcuuuuuuguucuuggagugcgugucugaguuuuucuuaaugaauuguaaaaauucuucauguauucaagacacaagaucuuuguugguuauag

SEQ ID NO: 387463 - RNA, 88 nt, Homo sapiens
ggagaauugcuugaacccggcaggcagagguugcagugagucgagaucuugccacuguacuccagccugggugacagagcgagacucc

SEQ ID NO: 387464 - RNA, 70 nt, Homo sapiens
gccauguacauaguagacacugaaaauauauauauauauauauuuauucagugucuaguaucugccuggu

SEQ ID NO: 387465 - RNA, 78 nt, Homo sapiens
gagacugagccagauguuccccuggaggccucuugggagccagcaagauggccuuucuggcacauuuccucucuucuc

SEQ ID NO: 387466 - RNA, 62 nt, Homo sapiens
gaaagugcugagacagacugggaagccuuuggcuaccggcuuccacugucccuggcacuuuu

SEQ ID NO: 387467 - RNA, 59 nt, Homo sapiens
cuggacauguccuuaaccuuggaaaaagaaacuucuaaauuaauugaggcaugucucag

SEQ ID NO: 387468 - RNA, 76 nt, Homo sapiens
uugcuugagcccaagaguuagagguugcaguaagcagugacugcacuacugcacucuagccugggugacagagcga

SEQ ID NO: 387469 - RNA, 109 nt, Homo sapiens
uagaauuagagauacguaagugcuaaagauagugacaugauuugggaucugcuguuuucugggcaaaaacagauccgugucuuguuuuucuuauuuauuuucccuucua

SEQ ID NO: 387470 - RNA, 87 nt, Homo sapiens
ccagcaccguggagcgagacgggguauuucuaauggagcaaugccucacugucuuuggagacaaccccagucucgcuuaggaguugg

SEQ ID NO: 387471 - RNA, 62 nt, Homo sapiens
ccugcuaaaugaaagaagccacaaacaaaaggccauuuuugugguauuauuccauuuauagg

SEQ ID NO: 387472 - RNA, 75 nt, Homo sapiens
agugguacugaggaguagggcacaaagccuugggcauagcugucaaggcuuuagcagcccaccccuuguaccacu

SEQ ID NO: 387473 - RNA, 63 nt, Homo sapiens
gcuuaagggaauguuguggcugguuugaucuguucagaccaccaaaacuuucuccauaucagc

SEQ ID NO: 387474 - RNA, 113 nt, Homo sapiens
uuuuuuguuuauuaagguguuuaaauaagcucagcuaauucaagacacuguagccacuugugcaucagugugcuugaauuuaguagcuuacagcauuauuuaugaaggaaaaa

SEQ ID NO: 387475 - RNA, 78 nt, Homo sapiens
guuuuaaaauuggcauugaguuucaaaucauacuguauaaacugccaaugguaugacacucauuguuuauuuuaaagc

SEQ ID NO: 387476 - RNA, 60 nt, Homo sapiens
cauaauguaugaggauagguuucuauuaggcuguauguuugagaaaguuuuccucuuaug

SEQ ID NO: 387477 - RNA, 78 nt, Homo sapiens
cgcaugcauuagguauuuguccuaaauauucuuuaggaaaaagauauuuagaggcuaaaaucuugucuuguauuugug

SEQ ID NO: 387478 - RNA, 68 nt, Homo sapiens
cccagagagguggguggagcccccaauuccugaaaaauugggggcuccacccaccucuaauguauggg

SEQ ID NO: 387479 - RNA, 59 nt, Homo sapiens
cgaguaucuuacccugcugguaaguggcaccaccgcauacaucagccugaaagagcucg

SEQ ID NO: 387480 - RNA, 111 nt, Homo sapiens
ccuuccuguuauaucuuuuauguucuuccuucaauuuggaaggagagaaaauaucuucuugcauuuucuaggagggcaaauagguaaauaggugauuauaagacaacaagg

SEQ ID NO: 387481 - RNA, 66 nt, Homo sapiens
guauuucuaguucuagaucccugaggaaucaccacacugacuuccacagugguugaacuaguuuac

SEQ ID NO: 387482 - RNA, 95 nt, Homo sapiens
agagaugcaauauaaaauuauuuuuuacuauaggucagggccaagaaguuugaaaaucacugaucuagagacauaguaaagaauaugcauacuuu

SEQ ID NO: 387483 - RNA, 70 nt, Homo sapiens
cuugagucucggagguugaggcugcaguaagcugauaucacgcuacugcacuccaaccugagagagcaag

SEQ ID NO: 387484 - RNA, 76 nt, Homo sapiens
aucaccuggaguagcccgucccuuccugaucugaaauucugugaucugucuagugggauugcugcuccuugguggu

SEQ ID NO: 387485 - RNA, 83 nt, Homo sapiens
ugugcauuaccuccauccuugucaccauggccacuuuauugaugagcucauugggugacuggggaaagaggcugacugauaca

SEQ ID NO: 387486 - RNA, 83 nt, Homo sapiens
gguuaauaauaguggccagugucuauugguuuccugccuuuuggcuaaggacaaaccaauagacacuggccacuacuguaacc

SEQ ID NO: 387487 - RNA, 61 nt, Homo sapiens
agguagaggcuggaaaccucagagcagcuagccucuuuggguguauuucacagccaucccu

SEQ ID NO: 387488 - RNA, 109 nt, Homo sapiens
ugagaaccacuacaguggauaugggaagauauaggcugggcaccaauggcaucugcuaauggugggucuauauauccuauguuuuaccugucaccauccuagguucuua

SEQ ID NO: 387489 - RNA, 74 nt, Homo sapiens
ugcugucuacagcacugccaagugacccauugggcuccaucuugaccaacugggcaucaagcggugcaaaagca

SEQ ID NO: 387490 - RNA, 72 nt, Homo sapiens
cagcuagcuuugcagcaaagagggaggggcauggucugaaagcugugguuccuauuucugcaaggacagcug

SEQ ID NO: 387491 - RNA, 73 nt, Homo sapiens
guaaauuuucagucuguguguacauuuauagaugaacuauguuuauuguaaucaacacaucauugggaauugc

SEQ ID NO: 387492 - RNA, 66 nt, Homo sapiens
gaugugauguguuuaucacccaguccuccauuuuuuuggagggggcaguacagagcacauccuguc

SEQ ID NO: 387493 - RNA, 56 nt, Homo sapiens
aaauauguguaaaauaggcuaagggaaauuccucucugagcuuguaaacacuguuu

SEQ ID NO: 387494 - RNA, 68 nt, Homo sapiens
gggugcagcacaccaacauggcacauguauacauacauaaaaaaccugcacauugugcacauguaccc

SEQ ID NO: 387495 - RNA, 94 nt, Homo sapiens
aaggggccccuuucuuucauaccuguuaaaauggcuauuauaaaaaaagauggaagacaaguguuagcauggcuguggagaaaagggaacccuu

SEQ ID NO: 387496 - RNA, 88 nt, Homo sapiens
ggguugguuccaagucuuugcuauugugaauagugccucaguaaacauacgugugcauacgucuuuauaguagcaugauuuauaaucc

SEQ ID NO: 387497 - RNA, 72 nt, Homo sapiens
ugucuuuaucagcagcaugaaacuggacuacuaugaaagugaucuuccauuuuccugcuuuugacugagaua

SEQ ID NO: 387498 - RNA, 103 nt, Homo sapiens
caaauaugaaaugaaguggguuucaccaaauacaucuugggauaaaaacaaagucugucuuuagucccauaugauuuagugaaauucaugcaccacugguuug

SEQ ID NO: 387499 - RNA, 94 nt, Homo sapiens
gcuguauaguauuccaugguguauaugugcuauacccacaggauuauaaaucauucuacuguaaagacacaugcacacguauguuuauugcggc

SEQ ID NO: 387500 - RNA, 78 nt, Homo sapiens
gaagagauuucuguaauauaagcuauggacauugaaaaggaucaagguuggccuggcacuaugugacaagguuuuuuc

SEQ ID NO: 387501 - RNA, 67 nt, Homo sapiens
uggacaagauagguucuauauuugucaaaaaugugugcuccugacguuuauaccaaaucuuugucca

SEQ ID NO: 387502 - RNA, 85 nt, Homo sapiens
auauuggauaugcguuuuuacugugggguuucuuagaggcuuuuaauuucugaaucucuaaaaauacauauuaaguauucagugu

SEQ ID NO: 387503 - RNA, 83 nt, Homo sapiens
uaaggcaguuugacuguggagucgaugcuuuuaaccaguguaccaugcugcccaagcuuucugaccuacaucacuucuccuua

SEQ ID NO: 387504 - RNA, 84 nt, Homo sapiens
guguauucagcauuuuaugugacuuauuuaauuuuuccauugaccauaugaaaggauuagagauguuauuaagaggcaauacau

SEQ ID NO: 387505 - RNA, 68 nt, Homo sapiens
caaguauuuuucuauguacuuagaaugagcaagcucugguuuaccucuugguuauagaaaaauaguug

SEQ ID NO: 387506 - RNA, 89 nt, Homo sapiens
ugcucuugccauaguuuacugagaugaugaguuccaauuucauccaugucccuacaaaggacaugaacucaucauuuuuuauggcugca

SEQ ID NO: 387507 - RNA, 59 nt, Homo sapiens
uuaauauauuaugugguuucccuauccaaugaacuuggauagggcuuguugauaguuaa

SEQ ID NO: 387508 - RNA, 79 nt, Homo sapiens
gcaguucgcuucaagguuauaucuuaaaauccaagagaaaggggaaaaaaaguuaagaugcauuuugaaguuaagcugc

SEQ ID NO: 387509 - RNA, 60 nt, Homo sapiens
auuaggacaauggucugcaaaucacugacauuugaggauugauagugccuuugugcuaau

SEQ ID NO: 387510 - RNA, 80 nt, Homo sapiens
cuauucaucaaaauguguauccauuauaaacaauggcuaauucacuauaguuuaucuucuggauggacauugauggauag

SEQ ID NO: 387511 - RNA, 57 nt, Homo sapiens
gagcuccauuguaaucaccugguggcuugucuguuuccaccaggagacagugagcuu

SEQ ID NO: 387512 - RNA, 90 nt, Homo sapiens
ugugaaagggacaugagauuugggaggggccaggagcaaaaugauauguuugggcuuuguguccccacccaaaucucaucuugaauugua

SEQ ID NO: 387513 - RNA, 77 nt, Homo sapiens
gaugcugguuuaaaaugcaaauuccuagauucucucuccaaucuagcugagucagaauuguauuuuaaaccagaauc

SEQ ID NO: 387514 - RNA, 76 nt, Homo sapiens
aauuuagauuauuccuuugaauggccaaaaagaccuagcgugaggaauuguggucagucaaaagaaaguuuagauu

SEQ ID NO: 387515 - RNA, 99 nt, Homo sapiens
gauggacccuuccuuggacaaaagagcucucuguagcaugugauucugcuuaauagcauuuuaccuacagcagaacuucuuucaaaguuggaguccauc

SEQ ID NO: 387516 - RNA, 64 nt, Homo sapiens
cuuccuucacuuuuuaugccagauugagacaguuucuucuauuuggguaaugagugcaagggag

SEQ ID NO: 387517 - RNA, 88 nt, Homo sapiens
cuugaagagguccuucacguugcuuauaaguuggauuccuagauauuuuauucucuuugaagcaauugugaaugggaguucacucagg

SEQ ID NO: 387518 - RNA, 64 nt, Homo sapiens
uuagggaugagggagggaagcuagcccugacugccuugggucuggguucccugucuguccuuga

SEQ ID NO: 387519 - RNA, 81 nt, Homo sapiens
gagaucugcuguguaacaauguguauauuaguuaacaauucuguacaguaugcuuuaaacuuuguuaagaagguagauuuc

SEQ ID NO: 387520 - RNA, 77 nt, Homo sapiens
aauaccaugaauaagaauugccagauuugaaaugcuuuguuaagcuuuuuuuaggcaugcaguucuauuuaaguauu

SEQ ID NO: 387521 - RNA, 68 nt, Homo sapiens
uuuaagauuguuauguggugaauuauauugauuuauuuucaaauguuaaaccagauugcauucuugga

SEQ ID NO: 387522 - RNA, 77 nt, Homo sapiens
ucucaaagugaugguauuaggaaguugggcccuuagaaagugacugggcccugaagacuccaccgucaugaaugaga

SEQ ID NO: 387523 - RNA, 65 nt, Homo sapiens
accagaguuguuugguugaguauggaaguuauguaaguuaacuuaugccacaccagaugucuggu

SEQ ID NO: 387524 - RNA, 58 nt, Homo sapiens
uuugcuauugugaauagugccgcaauaaacuuacgugugcauaugucuuuauagcaga

SEQ ID NO: 387525 - RNA, 102 nt, Homo sapiens
aacugaaaacaacgcaugaguaacagacugucacauaaaauuguaagcaacacagcuacuuaauuuagucugaaguauguugcaacgugccaaaauucaguu

SEQ ID NO: 387526 - RNA, 89 nt, Homo sapiens
ugcuucaggaaccauuuaaggguauaaagcccauuuuaaagucuuugcugccaaaaugggcuuuauaccgucagcugauuccugaagua

SEQ ID NO: 387527 - RNA, 68 nt, Homo sapiens
ggguacaugugcacacugugcagguuaguuacauacguauacaugugccaugcuggugugcugcaccc

SEQ ID NO: 387528 - RNA, 97 nt, Homo sapiens
aaaggacaagaagaaagaaaguugccuaagacauggagcugggacuagaacuccauguggcuaacuuuuaaacccagccuuuuaaccucuguccuuu

SEQ ID NO: 387529 - RNA, 66 nt, Homo sapiens
ugucguugguucuguuuauaugcuggauuacguuuauugauuugcauauguugaaccagccuugca

SEQ ID NO: 387530 - RNA, 60 nt, Homo sapiens
gaacuggaagaauagaaugcuguggccagagagugaggauggaaucuauuauuccaguuu

SEQ ID NO: 387531 - RNA, 83 nt, Homo sapiens
agaauuuuaugucaguguuuggaaucucaauuucuuaguaaaaacacuauuagaaauuagagacagauagugaaauauuuuuu

SEQ ID NO: 387532 - RNA, 64 nt, Homo sapiens
ugcucagaucagcagagauggugcuuuuaaaauauuuaguuccuuagcucucugguuuaaagca

SEQ ID NO: 387533 - RNA, 75 nt, Homo sapiens
ucgcucugucgccuggcuggagugcaguggcgugaccucggcucacugcauccucugccuggcggguucaaguga

SEQ ID NO: 387534 - RNA, 98 nt, Homo sapiens
uuugucugucuuuugccucuagauauaagccaauaaguacagagaccuagcugcuuuuucuugguuguauuuagacuuuuucaaagugaaucagcgaa

SEQ ID NO: 387535 - RNA, 68 nt, Homo sapiens
uggguuguuucugcuuuugggcuauuaugagcgaugcugcuguaaaccucugaguacaagcuuuucca

SEQ ID NO: 387536 - RNA, 88 nt, Homo sapiens
ggagaaucgcuugaacccaggauggggagguugcagugagcugagacacgcuauugcacuccagccugggcaacaagggcgaaacucc

SEQ ID NO: 387537 - RNA, 58 nt, Homo sapiens
gaaucacugugguaucccaugcuuggaaugucaguaaagguguggccaauagugauuu

SEQ ID NO: 387538 - RNA, 65 nt, Homo sapiens
cuggcauggggcuuuccaagcuuaauuagcucauguuuguaaaguucuuaggaagcucaggccag

SEQ ID NO: 387539 - RNA, 120 nt, Homo sapiens
caaggcaggacauguuuuugcaacauagcauuaugcccauuuguuuucugaaaguucucuaauuguuucauggcuuuauuaaauagauggucauucuagaugacaggaacaguucccuug

SEQ ID NO: 387540 - RNA, 91 nt, Homo sapiens
cuuucucccaagaagcaaugcugauauaauagaaauugcuacaaaaugccaacacaaacaguaauucuguauguaucagaguuggagaaag

SEQ ID NO: 387541 - RNA, 63 nt, Homo sapiens
gccugggugcacaguggguucugccauccggccucggugcgcagugggcugugccauccaggu

SEQ ID NO: 387542 - RNA, 112 nt, Homo sapiens
guggggaaauaguauugauauucaccugggaaugaaauuacauagcuucugacugaaaccuugguguugagggugaauuaucucccagagguaguuaauguuagguuccuac

SEQ ID NO: 387543 - RNA, 57 nt, Homo sapiens
guugcucucugguuucgcaggaaauagauuguucuaaucuuugaaaucagggucaau

SEQ ID NO: 387544 - RNA, 76 nt, Homo sapiens
cuaugccuacagguaaacauacugcugucuucuuggaagaccgagaaguauaaagaauguuuaugugcaggucuag

SEQ ID NO: 387545 - RNA, 55 nt, Homo sapiens
uuccaguugagugaaaacacagugaaccagggcuuugagcuugacucagcuggag

SEQ ID NO: 387546 - RNA, 78 nt, Homo sapiens
uggcugaguugucccaguuggguauugaauucaugguaugauuuauuugcaggauugggacuggauaaaacucaguca

SEQ ID NO: 387547 - RNA, 71 nt, Homo sapiens
uccccaaauaucacggaguacauguucugugccggcuacucggauggcagcaaggacuccugcaaggggga

SEQ ID NO: 387548 - RNA, 129 nt, Homo sapiens
agguuguucaguuuccaugugguugagcaguuuugagugaguuucuuaauccugaguuguaguuugauugcacuguggucugagagacaguuuguuauaauuucuguucuuucacauuugcugaagagu

SEQ ID NO: 387549 - RNA, 81 nt, Homo sapiens
guggcaguuucuuaguucauuuuucuugcuuagaacaccugaggcugggugauuuauaaggaaaauaaauuuauuuguuac

SEQ ID NO: 387550 - RNA, 62 nt, Homo sapiens
uggccaguguuuuuccugggcuggcauagccuuggucagcuagagcugagaagcacuugcca

SEQ ID NO: 387551 - RNA, 130 nt, Homo sapiens
uacuauccaggacucuccuggauagauacuauccaggacucuccuggauagauacuauccaggacucuccuggauagauacuauccaggacucuccuggauagauacuauccaggacucuccuggauaga

SEQ ID NO: 387552 - RNA, 65 nt, Homo sapiens
gagcacauguggagagucugggcccaguccuugcucugggaucugccucauucucgcguguguuu

SEQ ID NO: 387553 - RNA, 82 nt, Homo sapiens
uacugguuugaguucuuuguagauucuguguauuaguccuuugucagaugcagacuuugcaaagauuuucuccugcucugug

SEQ ID NO: 387554 - RNA, 56 nt, Homo sapiens
caguuuuagggcaaugugaagagugcauuucucucucaccuguugcgaugaagcug

SEQ ID NO: 387555 - RNA, 129 nt, Homo sapiens
aaagauccugccuuugcucugcgcaguuucaaaguguucacugugaacucauauucagacucuagcauuuucuucugaauauccucacuggugauaaaucuuuggccuuugaaaguggaugugauuuuu

SEQ ID NO: 387556 - RNA, 68 nt, Homo sapiens
caagacucuuguggcuucucuguccauacuguaagccaacaguuggacagacaagguuauagaucuug

SEQ ID NO: 387557 - RNA, 90 nt, Homo sapiens
aguagcuauauauaaacacauacacacauguguauaugugugugcacgcauguaugcacauauguguauguauuuguguguauaucuauu

SEQ ID NO: 387558 - RNA, 125 nt, Homo sapiens
cccagaaccccugaauggcagaaaccccaggcauggcguggagauauggucagccuugggguuaaagguacaucgcucccuccacgccccccaggguuugcuguguggcucagauaggacuuggg

SEQ ID NO: 387559 - RNA, 87 nt, Homo sapiens
gaguuuugcucuuuuugcccaggcuggagugcaauggcgugaucucagcucauugcaaccuccgccucccagguucaagcaauucuc

SEQ ID NO: 387560 - RNA, 64 nt, Homo sapiens
guaaucucagcuacuugggaggcugaggcaggagaacugcuugaauccaggaggcagagguugc

SEQ ID NO: 387561 - RNA, 61 nt, Homo sapiens
gagaacagagcagguggaggaguauuaucaccgauggcccugcuaccacuuuucuaauuuu

SEQ ID NO: 387562 - RNA, 87 nt, Homo sapiens
uuuuuugcuuaggauugccuuggcuguuuggggucccuuuugauuccauagacauuuuaagguaguuuuuucuaauuuugugaagaa

SEQ ID NO: 387563 - RNA, 76 nt, Homo sapiens
gagcucuaaaagcuuugagaagaaaaagacacuuaguggcugggugucaucauuccaucagggcuuucagaguguc

SEQ ID NO: 387564 - RNA, 91 nt, Homo sapiens
uagaauccuuuguuuaucuuugaccuaugggaguuugacuacuaaaugccuugagguagucuccuuuggguuaaaucugguugguauucua

SEQ ID NO: 387565 - RNA, 55 nt, Homo sapiens
cuucagcaugacauuagcuauggaucugucauuuauggcuuuuauuauguugagg

SEQ ID NO: 387566 - RNA, 86 nt, Homo sapiens
uaaguucuaggguacaugugcacaacgugcaaguuuguuacauauguauacaugcgccauguuggugugcugcacccguuaacuug

SEQ ID NO: 387567 - RNA, 82 nt, Homo sapiens
guaugguggcaaugguagaauuauguauuggcuuuuaaagcuucuucucaaaagucacaugcauuuucuucaauucacauau

SEQ ID NO: 387568 - RNA, 62 nt, Homo sapiens
cucucugagccccagacaccuuaucuguaauaccagggaaaggauguggaugggcuagaagg

SEQ ID NO: 387569 - RNA, 78 nt, Homo sapiens
uucaguuuccauguaguugaacgguuuugagugaguuucuuaauccugaguucuaguuugauugcaugguggucugag

SEQ ID NO: 387570 - RNA, 57 nt, Homo sapiens
acaguggugucugaguggccagggaagguagcccuccccagcucucagcaccacugu

SEQ ID NO: 387571 - RNA, 68 nt, Homo sapiens
cucaucacauuuauaauuaauuaguuauuuaauuaccacauucccuauuugauuguaagcuuggugag

SEQ ID NO: 387572 - RNA, 78 nt, Homo sapiens
ucccugcuuuuauuuguagcuucccaaagcuuuugcugguaauaaaaggauuguaaaguugacaaauauaagcaggga

SEQ ID NO: 387573 - RNA, 69 nt, Homo sapiens
ucuuuauagcagugugaaaauggacuaauacaauaaauuuguaccaggaguggggcacugcuauaaaga

SEQ ID NO: 387574 - RNA, 82 nt, Homo sapiens
ugugugugugugugugugugugugugugugugggcauguguguguguguuugugacacaaacacauauauuuuauauauaua

SEQ ID NO: 387575 - RNA, 101 nt, Homo sapiens
gucuauuaggaaaauaaaggaauaaagcauggcuacuccauaggcagagcagcuccaaggccugcugguuggcuauuuuuaugguuauuucuugauuagau

SEQ ID NO: 387576 - RNA, 100 nt, Homo sapiens
cuaucugaugaauaucuauuccuaggcuaaauugacagaauuuuauuuauuuauucuuuuucuuucacaagugagaggaauuagauagacagacagauag

SEQ ID NO: 387577 - RNA, 82 nt, Homo sapiens
cccugucagcagucugugccuaguaauguguccagacagacagggcugugggcaugagagcugugguagaacuggggcaggg

SEQ ID NO: 387578 - RNA, 66 nt, Homo sapiens
gaacagugccugucauuuaguagacauucacaaaauguuuguugacugaauauacagcuauugggc

SEQ ID NO: 387579 - RNA, 73 nt, Homo sapiens
ggauucaguuugccaguauuuuauugaggauuuuugcaucgauguucaucggggauauuggccugaaauuucc

SEQ ID NO: 387580 - RNA, 99 nt, Homo sapiens
gagguaguuaggaaagggacugggccauauugauaauggaagauugauaguaaaaucauagaaguguguuaacauggucucagucuguuucuguaucuc

SEQ ID NO: 387581 - RNA, 117 nt, Homo sapiens
cauaaaggacaugaucucauugcuuuuuaucagugcauaguauuuaaugauguauauguaucauauuuucuuuauccagucugucacugaugggcauuccauguauuugcuauugug

SEQ ID NO: 387582 - RNA, 60 nt, Homo sapiens
auuuaccuaugaguuuguguuaguugaaacaauuggcagaaaucuuuauaguaaguaaau

SEQ ID NO: 387583 - RNA, 101 nt, Homo sapiens
ugagauggaguuuuacuuuguugccuaggcuggagugcaguggcgcgaucucggcucacugcaaccucuaccucccagguucaagugauucuccugucuca

SEQ ID NO: 387584 - RNA, 69 nt, Homo sapiens
auggguagggauagagagcagauuuauguuuuaaccauauguuaaucuguucucuguauucuauaccau

SEQ ID NO: 387585 - RNA, 129 nt, Homo sapiens
auagaacuaagaguuacguuaaugaaucuccacuaccauucccaaacgcuucuaaugaaaauucaucacuucauggaugcauuugagggguugguuugucggggcugaaacugacuaagucaauucuau

SEQ ID NO: 387586 - RNA, 79 nt, Homo sapiens
ggagguacguacugcacuggaggccucagauggcccuaggaacuauucuugaggccucuaauguacacugggcuccucc

SEQ ID NO: 387587 - RNA, 56 nt, Homo sapiens
gcagucuaagacuugcaugauaguaagagaauccugcaugcaaugucacaggcugc

SEQ ID NO: 387588 - RNA, 120 nt, Homo sapiens
cuuacuauucacaaacacaucaaggaauuuuucuuuaaucaggucaaaauaaaguauuuucuaacacugauauauugaaugaugaaacagaguccuuugaggauuaaaugaaguaguggg

SEQ ID NO: 387589 - RNA, 80 nt, Homo sapiens
ugaugacucccugcugcauguacauuuccaggguuuuccuugcuguuucugacaagugaucacagcagcaaagaguauua

SEQ ID NO: 387590 - RNA, 59 nt, Homo sapiens
gccucccggguuccagcgauucuccugccucagccuccuggguagcuggaauuacaggc

SEQ ID NO: 387591 - RNA, 79 nt, Homo sapiens
auuucuucugacaggaaacaugcagugauuaauaaaagcgccuccuugagcacugauuuauuuuugucucugaaggaau

SEQ ID NO: 387592 - RNA, 55 nt, Homo sapiens
uauguucaucuugugcucaguaaauuugcacuuugccuaguagaaggugaacaug

SEQ ID NO: 387593 - RNA, 62 nt, Homo sapiens
uguaugugauggaguuucauggacuggcugcaguacagauucaaguuuuuccauuauuuaca

SEQ ID NO: 387594 - RNA, 73 nt, Homo sapiens
ucccagggaucgcuggugucuaagcgacagcuccuugguggacugugguuuaggaaaucgggggagggcggga

SEQ ID NO: 387595 - RNA, 62 nt, Homo sapiens
uucucagccucgauuucguuucuacuuuucaacaugggaggaaauguuuaagggguugggag

SEQ ID NO: 387596 - RNA, 88 nt, Homo sapiens
ucagacucccauguagcuaggauuacagauguccaccuuccaccauacccggcuaauuuuuguauuuuuaguauagaugggguuuuga

SEQ ID NO: 387597 - RNA, 90 nt, Homo sapiens
uuaauacaauuagcuuuagggaggacaguuacaacaggaagcaaauuccuugcagcauccgguccucucuuagccauguuaguugauuaa

SEQ ID NO: 387598 - RNA, 74 nt, Homo sapiens
gaaucuuuggagugauagugacaaauaucuggaucugauuucaccauuuauuaguuguaugauucccaagcuuc

SEQ ID NO: 387599 - RNA, 84 nt, Homo sapiens
acaguccagcuuuagugaguguggagcuagacucugaucuggauuugaauucugguuccugcauucauucaacuguguuacugu

SEQ ID NO: 387600 - RNA, 73 nt, Homo sapiens
cuccuaggguguaauacauuagcaaaccaaagaaucaaagaucuuugcccuuguggaguuuacaugcuagggg

SEQ ID NO: 387601 - RNA, 64 nt, Homo sapiens
gccacguucuuuguuuucugauccugaagccuuugcggccucauuucgagaacaaggugcuggc

SEQ ID NO: 387602 - RNA, 58 nt, Homo sapiens
gggaaggucuagggcugaagguuguuguuuagauucuuuugucccaugggcuguuccc

SEQ ID NO: 387603 - RNA, 89 nt, Homo sapiens
ggagaaucgcuugaacccgggagguggagguugcggugagcugagauugcgccacugcacuccagccucggcaauaagagcgaaacucc

SEQ ID NO: 387604 - RNA, 116 nt, Homo sapiens
aggagccaccaggugguguguggauucugaaucauggacuuaggucacugcuagggcuuagcagguguggcuuauccugaaacagaagucacaacggcauccuggagccaaguccu

SEQ ID NO: 387605 - RNA, 79 nt, Homo sapiens
auuuuuguauuuuuaguagagguggguuucaccauguuggccaggcuggaccccuucuccuauuaaaauaaccaaaaau

SEQ ID NO: 387606 - RNA, 60 nt, Homo sapiens
cugguucuuauugccuuauauauuuuuuugaauggaaugagaacugucaaugagagcuag

SEQ ID NO: 387607 - RNA, 114 nt, Homo sapiens
gcaaaggucuaacagggguauugauaucagaguggguuuuaaaaguguauuaacuauaaucuuacuuuuagccuauuugauucuacuuauuucagaacuauuaaugacguuugu

SEQ ID NO: 387608 - RNA, 88 nt, Homo sapiens
cugcucuuuccauuuuuuagaugauucacuuuacuuccagcuucauagcugaauuagucgggguucucuagagggacagaacuaguag

SEQ ID NO: 387609 - RNA, 68 nt, Homo sapiens
gaggugugagccaugguuagcuucucauuugcuaucaccaaguagacaugaaacaugguucauaccuu

SEQ ID NO: 387610 - RNA, 77 nt, Homo sapiens
uauugguggcagauaaguuuuugaugugcugguagauucguuuugccaguauuuuauuaagaauuuuugcaucaaug

SEQ ID NO: 387611 - RNA, 66 nt, Homo sapiens
gaagcuggucugggccagguccucuccuguacauggucaggugaugacacuguccuugaccauuuc

SEQ ID NO: 387612 - RNA, 57 nt, Homo sapiens
gaaaagccucuccucuccagguagacacagccccauuuggggaauggagagguuuuc

SEQ ID NO: 387613 - RNA, 83 nt, Homo sapiens
gcuggaucauugggaaggugguauuucaaaguggcagggaaauaacuugaaagcucugaaauccauugugaaugugagccagc

SEQ ID NO: 387614 - RNA, 71 nt, Homo sapiens
cacaauugaagggagaaauggacugaagcacaauaauacuaagagauuucaguacuccacuuucaauagug

SEQ ID NO: 387615 - RNA, 79 nt, Homo sapiens
ccucagcugcgugaaaguucuaaaaaauguuaaguuuaugaaucacgugaagcaucauuuggaauuugagaagcagagg

SEQ ID NO: 387616 - RNA, 55 nt, Homo sapiens
gcacucuuugguaugguaaccacuaccauguggucacugagcacaggagaugugc

SEQ ID NO: 387617 - RNA, 74 nt, Homo sapiens
agcauggacuauacuguuauugaauuagauggcaaagcauuagguuuauuaugcaaugacacuguagcugugcu

SEQ ID NO: 387618 - RNA, 62 nt, Homo sapiens
uuaucagcagagucauacuucaaaaauuauaaaguauuuuuguuaggugguuuguugacuga

SEQ ID NO: 387619 - RNA, 74 nt, Homo sapiens
ucuuuauuuuaugaauaccaccauuagguugcauuugcgacagaauuuuccugagguagaguuuauauugaaga

SEQ ID NO: 387620 - RNA, 60 nt, Homo sapiens
gagaaugaugauuucugaauuaauccgugucccuacaaaggacaugaacucaucauuuuu

SEQ ID NO: 387621 - RNA, 90 nt, Homo sapiens
ugaaaccaucaguuagcauaugcacuguaguuauuagcauuacaaugugcuuauuaucacguguguuuaugcuacgcaaugagucuuuca

SEQ ID NO: 387622 - RNA, 69 nt, Homo sapiens
aggcuaccuugugagguugauaugaagauuaaauuaauuaauucacauaaagcacuuagaacaaagccu

SEQ ID NO: 387623 - RNA, 55 nt, Homo sapiens
gacccuguugggguuuagggcuuguaaguauacauuuuauuuuagagacaggguc

SEQ ID NO: 387624 - RNA, 83 nt, Homo sapiens
guaccaaugucaauuuccugguuuugauauuguacuauaguuaugcaagauguuaccauuagggaaaacugacugaaggguac

SEQ ID NO: 387625 - RNA, 62 nt, Homo sapiens
uuacuugagauggggugucacuauguuggccaggcuggucucgaacuccucaccucaaguga

SEQ ID NO: 387626 - RNA, 101 nt, Homo sapiens
agaaggaagaguagugugaauauuugguuauggucauggacaccuggggaccagccuguguccuugcccauauuuccaaaggucacucuuuuuuuuuuuuu

SEQ ID NO: 387627 - RNA, 67 nt, Homo sapiens
aagcugguuuuauaucugugaggucucaaguacucucugccuuuuaggacagauguagauccgguuu

SEQ ID NO: 387628 - RNA, 62 nt, Homo sapiens
gucaccgagugacaguagccaucauggcucacaacagccuugacuuccugcacucaggugau

SEQ ID NO: 387629 - RNA, 62 nt, Homo sapiens
uucugaaucccauuucucuguguuuuuuaggaagggaaaaagggcagaggaaggggguggaa

SEQ ID NO: 387630 - RNA, 64 nt, Homo sapiens
auagugcugcauaucaugcagaacugcauaucugcaugcauaucugcauaucaugcagaacuau

SEQ ID NO: 387631 - RNA, 70 nt, Homo sapiens
gugaguuauuauuuauguaaacauauuaaaacuuaugcguguuugcaauauuaugaauauccuaacucgc

SEQ ID NO: 387632 - RNA, 65 nt, Homo sapiens
ggugaaucugacaauuaugugccuugggguugcucuucucgaggaguaucuuugugguguucucu

SEQ ID NO: 387633 - RNA, 129 nt, Homo sapiens
uaagguuuuucaauaaucuuuuuauuuuugauugcuaaauuguccuucuguuacagaauauagucgcugugauacagacuuugaauuugguaagccuuaauuuauaaccuagauuaugaccaaauuuua

SEQ ID NO: 387634 - RNA, 59 nt, Homo sapiens
uuaggauacggagaccuuaaggaaacaagccuucccccugcaaggugcuucuguucuga

SEQ ID NO: 387635 - RNA, 57 nt, Homo sapiens
ugaucugaaugcaucugguaguuuugcagaagccucaaucagaugcauuagggguua

SEQ ID NO: 387636 - RNA, 58 nt, Homo sapiens
ugugcuuguaaaggccagagcagucuccuggaacguguuuuugcauuuaauaggcaca

SEQ ID NO: 387637 - RNA, 79 nt, Homo sapiens
uuugaacaaguuuuccuuuauugaguaccaacccauguaaugguaaccuggacuuuaauaaaagggaaaugaguuugaa

SEQ ID NO: 387638 - RNA, 57 nt, Homo sapiens
uugcuagucucuguuucaggauaggguauuaacuaucugggcagcagcagcuaguag

SEQ ID NO: 387639 - RNA, 58 nt, Homo sapiens
uggugaacgagauggacaaaaccugucuguuaaccacuuuguccaccuguguucacca

SEQ ID NO: 387640 - RNA, 67 nt, Homo sapiens
aggcuggacuguaguuucccgggcuggagugcagcggcaccaucacggcucacugcaagcuccaccu

SEQ ID NO: 387641 - RNA, 84 nt, Homo sapiens
auuucacaaaggaggaaauagaguuaagaaguuaaaugaccugccaagguacuggccuugaacucugguguucucccugggagu

SEQ ID NO: 387642 - RNA, 77 nt, Homo sapiens
cuccuuaaaguguuuguuauuaaagguucugcaguugggcgugguagcucacaccuguaaucccagcacuuugggag

SEQ ID NO: 387643 - RNA, 74 nt, Homo sapiens
uaggaguugacagaagcgggauuugaacccagaccuucuuguuccagagucaccuuucugucgacuacgcccug

SEQ ID NO: 387644 - RNA, 78 nt, Homo sapiens
uaccauagguaaugaaugcuaccagcaucuaguggguaguagugagagcccagggaugcugcuuagcauccuacggua

SEQ ID NO: 387645 - RNA, 80 nt, Homo sapiens
gguuuuuuguccuugcgauaguuugcugguaaauuuuagucuuuaaaguuugguauucucauugcacgauggagaagacc

SEQ ID NO: 387646 - RNA, 80 nt, Homo sapiens
ggaucccaggaagggugccuucccucauuucccagaugaggacucugagaaugagaggggaaggccacuuguccaugucc

SEQ ID NO: 387647 - RNA, 63 nt, Homo sapiens
gugaugguccagggaaucucuuuugggcacuucuugcucuaagaccugaaagacuuuugucac

SEQ ID NO: 387648 - RNA, 73 nt, Homo sapiens
uuccauaagggucuugacuguuccuugaaaauccaucucuguggaucacauaguuuucgggaccuugguggaa

SEQ ID NO: 387649 - RNA, 55 nt, Homo sapiens
ugauaucucuugccuccaaaugccaagcaaaaauccugggguugggaagauguca

SEQ ID NO: 387650 - RNA, 76 nt, Homo sapiens
cuggauacaggauagacaauuuauuaaggagucuauuuacuugacaaauaacuuacugaguccuguucugugcuag

SEQ ID NO: 387651 - RNA, 84 nt, Homo sapiens
aaguuaagggcuuuauuugaggucacaccgcuaguaagugauagagcugaggucugaauccagguaucauaguccgcagagcuu

SEQ ID NO: 387652 - RNA, 64 nt, Homo sapiens
gcucaggaucacagccagcucccagaagugccucagcaauuucuggcugguuggugaucacagc

SEQ ID NO: 387653 - RNA, 67 nt, Homo sapiens
gaaggggcugcagcuggagucuaccuaccgugacagcacucccugaagcugcagcaacacaccuuuc

SEQ ID NO: 387654 - RNA, 83 nt, Homo sapiens
uauuagguuggugcauaaguaauugugguuuuugccaugacuuuuauggcaaaaccugcaauuacuuuugcaccaacuuaaua

SEQ ID NO: 387655 - RNA, 59 nt, Homo sapiens
uugccuguucuuugagucucugggucacaggauauaucuaugacuagaggacaugguaa

SEQ ID NO: 387656 - RNA, 57 nt, Homo sapiens
uagcagaauaacuugccagccuuaaugaguaccuacuauaggccagguauugugcua

SEQ ID NO: 387657 - RNA, 60 nt, Homo sapiens
ugaaauuauucuuaccaaggugauauccaggaucucugcccuuguucaggaauaguuuca

SEQ ID NO: 387658 - RNA, 81 nt, Homo sapiens
uuguuuuuugagauggagucucgcucuguuguccaggcuguccaggcuggagugcaauggugagaucuuggcucacugcaa

SEQ ID NO: 387659 - RNA, 73 nt, Homo sapiens
agagguaagcaguggcaagugcugggcccagaaccaacacuugguugucagcugcuuaguccaaguauccucu

SEQ ID NO: 387660 - RNA, 95 nt, Homo sapiens
ggccgaggcggguggaucacuugaggucaggaguucgagaucagcauggccaacacagugaaacccgucucuacuaaaaauacaaaaaaauggcu

SEQ ID NO: 387661 - RNA, 64 nt, Homo sapiens
gacaauguuauaaaguaugagaccugaacaaaaauuucaggugcuuacuuaauagccauguguc

SEQ ID NO: 387662 - RNA, 70 nt, Homo sapiens
uuucccagaagcagagccugaggcagggauucagaugcucaugaacuguuugaggguuugcuuucagaag

SEQ ID NO: 387663 - RNA, 64 nt, Homo sapiens
gcauagucuaugaugaguaacacuaagguuguucuucagcuugugauucuccaucauguugugc

SEQ ID NO: 387664 - RNA, 80 nt, Homo sapiens
gggauuaaugaguacccagggaaugugggaugacucuaggcuggagcuggggucauuaaauuccgcuggucauuaauccc

SEQ ID NO: 387665 - RNA, 59 nt, Homo sapiens
ccuccugaauucauauguuaaaauuuuugccccugaagugauaauaugacuuuaggagg

SEQ ID NO: 387666 - RNA, 83 nt, Homo sapiens
ucuuucuaguugucuuuuaaagcuaaaauauguuuauuguaaauugaaaucaugagcagaugaguuuuaguagagcuaaaaga

SEQ ID NO: 387667 - RNA, 105 nt, Homo sapiens
gcucaaagaggugagguaacucucccaggguuccacgccuggcugugugcaugaccugcuacaaccagcaugaaaccuugagcagguuacuucacuucucugagc

SEQ ID NO: 387668 - RNA, 86 nt, Homo sapiens
gucacaaucuccuuguguaagguugguugacagaugaaaaaaccaacucuucaguuauuuacucggggucccagguuuuaagugac

SEQ ID NO: 387669 - RNA, 87 nt, Homo sapiens
cauugagucaucugaaaauuuuguuguucacauuagcauuuuuuauagugcaguguucuuuagaggaaauauuuugaggaccaaaug

SEQ ID NO: 387670 - RNA, 84 nt, Homo sapiens
gaaacaaaggauuauuggaacauugcacaguaacaucuaagcaaagggaauguuacagugacuaauguuuuauguaccaguuuc

SEQ ID NO: 387671 - RNA, 70 nt, Homo sapiens
uugagauugggacagacagggagagugagauugggaaggagccacguucgguccccuuggcugcccucgg

SEQ ID NO: 387672 - RNA, 66 nt, Homo sapiens
ucaaaccauauaaucgguuacacuacaauucaaaacaaauuagggugaaagacauauaugguuuga

SEQ ID NO: 387673 - RNA, 100 nt, Homo sapiens
ugagauggagucucgcucugucacuaggcuggagugcaguggcaugaucucggcucacugcaaccuccgccucccggguucaagcgauucuccugccuca

SEQ ID NO: 387674 - RNA, 62 nt, Homo sapiens
guaaucucagcuacuugggagguugaggcaggagaaucuagaacccaggaggcggagguugc

SEQ ID NO: 387675 - RNA, 98 nt, Homo sapiens
cacauucaagucauagcagucacuaagauugucuuaguguguuggugaguucggccacacgugaagcaucuuuacccaucugcugugguuugaaugug

SEQ ID NO: 387676 - RNA, 64 nt, Homo sapiens
gagagucuccagguauggaucugauuuguaacucggcacuuucagguaggccuagaguauucuu

SEQ ID NO: 387677 - RNA, 63 nt, Homo sapiens
uucucagugaacuccagcuugucuuccaccuucacucugagauugcucuaggccacuagggaa

SEQ ID NO: 387678 - RNA, 77 nt, Homo sapiens
cuauucacagucaaaguaaucauagacauguagcuuacuacuaccauuuugucgauuguuuucugauuguuuuguag

SEQ ID NO: 387679 - RNA, 78 nt, Homo sapiens
gaagggaacgagcuucgguggugacugcaucccucacauccgaggagggugagaugcucgccggccagcauucccuuc

SEQ ID NO: 387680 - RNA, 80 nt, Homo sapiens
gagcuacacaccggccagguuucugcuagucauucggugaauguggaaugucugguagccaccuggagguuuguaugcuu

SEQ ID NO: 387681 - RNA, 79 nt, Homo sapiens
gcguggcaaugugugagcuaagcaaauaugagccaucauacuggcucugcugcacccuuggcuccucacacaugucugc

SEQ ID NO: 387682 - RNA, 64 nt, Homo sapiens
cagcuuuauugagguauaauugcuaugcagaaaacugcacauaauuaaugccuacaacuugcug

SEQ ID NO: 387683 - RNA, 58 nt, Homo sapiens
uauuagguuggugcaaaaguaauggcaaaacuguaaauacuuuugcaccaaccuaaua

SEQ ID NO: 387684 - RNA, 58 nt, Homo sapiens
gaggcggagguugccaccacugcacuccagcuugggugacauggcgauacuccgucuc

SEQ ID NO: 387685 - RNA, 67 nt, Homo sapiens
uugaggaggcagucuguccauucucagagcucaaaugcuaugcugggagaaccacugcucucuucag

SEQ ID NO: 387686 - RNA, 68 nt, Homo sapiens
uggauauauguggucuagaaccuuacuuccccuuuuuucuugggaaugagguuguccacuauaaucca

SEQ ID NO: 387687 - RNA, 66 nt, Homo sapiens
augggaaguauugccaucuuaacgauauuaaauccuccaauucauaagcaugguguaucuuuccau

SEQ ID NO: 387688 - RNA, 64 nt, Homo sapiens
guaaucucagcuacucaggaggcucaggcaggaaaaucacuugaaccugagagguggagguugc

SEQ ID NO: 387689 - RNA, 91 nt, Homo sapiens
ccugcauccagucuguguccuccugucuuucucauccaggucaggcauugacacuuuguaagaaaggggguaggggacacagcugggcagg

SEQ ID NO: 387690 - RNA, 96 nt, Homo sapiens
acuugaguacuuacagcauaucagcaucaaaacacaggcuguuuccaugucauaaaaaugauuugugcuuuugagcugagaugagugaagucaagu

SEQ ID NO: 387691 - RNA, 68 nt, Homo sapiens
guucuucugagaucaugucugugcuguucuucuacaucaugagguacaagcagucagauccagagaau

SEQ ID NO: 387692 - RNA, 102 nt, Homo sapiens
ugaggcaggagaaucacuugaaccccguagguggagguugcagugagcugauaucacgccauugcacuccagccugggcuagaagagcgaaacucugucuca

SEQ ID NO: 387693 - RNA, 71 nt, Homo sapiens
gcucccuaagaauucuguccgguauacuuuucaaacauuugaguaaauuaaagguaauuuuugggcugggc

SEQ ID NO: 387694 - RNA, 57 nt, Homo sapiens
auuuuacccuucuucagcuucugucaauugaauguguaggacuacagaggguaggau

SEQ ID NO: 387695 - RNA, 75 nt, Homo sapiens
uuguuaucuggcuguguguuaaaauaggcuucauaaugaguuagaugucaaacuuauacacagaggggauagcaa

SEQ ID NO: 387696 - RNA, 71 nt, Homo sapiens
gcagcugcuguaccagaugugguuacauugcuugagcaaaauaacacaucuucugguaccugguaugcugc

SEQ ID NO: 387697 - RNA, 116 nt, Homo sapiens
ucucccuauuuuguuccaaaauuggucauacaccuucugauauaugagaaguacacccagucccuggucuagagguagguguaugaacuaguucuggugaaugaacgugugggaga

SEQ ID NO: 387698 - RNA, 70 nt, Homo sapiens
cuuccuacaggugaaguauuacacuaaggguuuuauauaaaaucucauugauccuuauacuuuacggaag

SEQ ID NO: 387699 - RNA, 59 nt, Homo sapiens
gagcuuccuggaugaagcccagcauaaaugucuugugcuuauccccauucuggaggcuu

SEQ ID NO: 387700 - RNA, 80 nt, Homo sapiens
auuucaagggugucuguugcuucaggaaacaguaacggagcaggccuugcuggugguucgagcaacacccaccccgaaau

SEQ ID NO: 387701 - RNA, 82 nt, Homo sapiens
aguucuaggguacaugugcacaacgugcagguuuguuacauauguauaaaugugccauguuggugugcugcacccauuaacu

SEQ ID NO: 387702 - RNA, 75 nt, Homo sapiens
ucugucaguguacuguaagaauuacuuccuaacauugcaauaccaggccguaguucaaugaguacagugauuaga

SEQ ID NO: 387703 - RNA, 67 nt, Homo sapiens
gugugauuguuaauuuuaggugucaacuuuccuggauuaaggaauaccugaagagcuaauaaagcau

SEQ ID NO: 387704 - RNA, 79 nt, Homo sapiens
uacuuugaauacaguaucuucuggcaagcacuggggacugcagucgacaaugcugcugaauauaccugaguacauagua

SEQ ID NO: 387705 - RNA, 72 nt, Homo sapiens
cugcuuggcccugggagauagaggcugcagugagccaugauugcgccacugcacucuucuucugggcagcag

SEQ ID NO: 387706 - RNA, 85 nt, Homo sapiens
agcaccuauuguguauuagguuggugcaaaacuuucaguggcaaaaauugcaauuauuuugcaccaaccuaucagguauugugcu

SEQ ID NO: 387707 - RNA, 69 nt, Homo sapiens
caagcucucuuggugacuuaaaauguucccauuucucauaugaaacacagaagugccaagagccaauug

SEQ ID NO: 387708 - RNA, 71 nt, Homo sapiens
ccuuugacauguccaggugguccuguuguuggcaucccuggcugcacuggaccccaggauauggaaaaagg

SEQ ID NO: 387709 - RNA, 61 nt, Homo sapiens
ugcccauuuuaugguugaugaaacugagaucagguuguaacuugucccagccauagaggca

SEQ ID NO: 387710 - RNA, 92 nt, Homo sapiens
aauggcauggucuugaagcccagggagguuuuaaugugauugucucacuaguaaucacauuaaugcucccucagguucaggaacaugccauu

SEQ ID NO: 387711 - RNA, 105 nt, Homo sapiens
uugagacagggucuugcucugucaccuaggcuggagugcaguggugcaaucucggcucacugugcaaccuccaccucccagguucaagcaauucuccugccucag

SEQ ID NO: 387712 - RNA, 95 nt, Homo sapiens
cauugacucuuuagucucaauuguuggucugcaugucuacugauaagccgguacugugcuguuuuaauuauugaggcuuucuagauguuguagug

SEQ ID NO: 387713 - RNA, 66 nt, Homo sapiens
gcugacuuccacagcacguauaguaaaauuggaguuuuuuuuacuauaugugcuguggaagucagc

SEQ ID NO: 387714 - RNA, 58 nt, Homo sapiens
ugagaccgagucuugcucugucauccaggccagaguacaguagcgcaaucucggcuca

SEQ ID NO: 387715 - RNA, 129 nt, Homo sapiens
cauucaaaucacuuggagaguuccagaaagaaaaccucugucuuguccucacccuagagauucugauucagaugaucuagaguggggcaagggcacugguauuuaaucugaauccaagugauuuuaaug

SEQ ID NO: 387716 - RNA, 95 nt, Homo sapiens
aacagugaaagugcauguaaaauauuaagaaacagaaggugcacaaauuuaucuguuguuaucauaauauugaucaauaugugcauauucauguu

SEQ ID NO: 387717 - RNA, 72 nt, Homo sapiens
guuuaauuuuagguugucaagccagccuuaugcaucacaacuuuuaggccucuugucuugcuuagaauagac

SEQ ID NO: 387718 - RNA, 55 nt, Homo sapiens
ccuggguuccacuuuuaacgaauuaaaucagaauuucuugggaauguagccuagg

SEQ ID NO: 387719 - RNA, 76 nt, Homo sapiens
auccuuuauaauaaaccaguaguucccugaguugugugaaacacuuuagcaaaucaauggaauugaaggagggggu

SEQ ID NO: 387720 - RNA, 55 nt, Homo sapiens
cuugucacuguuggcuuuagaagccaccuggggauuaggagcagcaggugacaag

SEQ ID NO: 387721 - RNA, 70 nt, Homo sapiens
gauguauggcagguuugggguuuuuuaaaauaacagcuuuauugagacauaauucaccugcuguauaauc

SEQ ID NO: 387722 - RNA, 81 nt, Homo sapiens
gaaauaaacagcuuuauugcucacacaaagccuguuugguggucucuucacacggacgugagugaaaaaacuguuuauuuc

SEQ ID NO: 387723 - RNA, 108 nt, Homo sapiens
cauaugggcuuuaauaauaauauaucaacaucgugucauuaguugugagaaauguaccauacuaauggcagauguuaauaacaggggaaauuggguaaggaguauaug

SEQ ID NO: 387724 - RNA, 100 nt, Homo sapiens
gguggcgugugccuguagucucagcuacuugagaggcuuaggugggagguucacuugagccugggagguugagguugcacugagccauguccaugccacc

SEQ ID NO: 387725 - RNA, 66 nt, Homo sapiens
gucacauuccuauuuucaucuuccuugguguuucuagcacuggaaguaaccaugaauggaauugac

SEQ ID NO: 387726 - RNA, 62 nt, Homo sapiens
gcuguaagacuugaauaagucauguaugaaagcaucauaaacuuggcaaaguuuuaaacagc

SEQ ID NO: 387727 - RNA, 128 nt, Homo sapiens
ggagcaaaggauguuguagcuggggcaaaggauguuguagcuggggcagggauccucugagcagccuuuagugcaggguuucucaaccuccacacuacaauauugugggccagauaauucuuuguucc

SEQ ID NO: 387728 - RNA, 56 nt, Homo sapiens
gacuuaaucacacuagauggccuacuucuuaaugcuaucacauuggugauuaaguu

SEQ ID NO: 387729 - RNA, 68 nt, Homo sapiens
cagcaaaucucaucacaguacuaaucgucauacgaggucucguagacgaaggacugaugaagaugcug

SEQ ID NO: 387730 - RNA, 73 nt, Homo sapiens
uaucaucacuucuguucaaccguguacuggaaguccuagccaguaucacaggcaaaacagaauaagaaagaua

SEQ ID NO: 387731 - RNA, 61 nt, Homo sapiens
gcugggaucaguucuagucagaagcuccaaggagagcuuuuggguaacaugaucacucagu

SEQ ID NO: 387732 - RNA, 94 nt, Homo sapiens
uuggaaaagcagaugguuuguauaacucacauugaaguuucuaaaauggcaaaaguucuauuggguuaucguucagcuguuugaaucuuucuaa

SEQ ID NO: 387733 - RNA, 92 nt, Homo sapiens
gagcucugaugauuagguacugugguuuccagaccugugacacacuccucccaucuucgagccccagauaugugacauuuaaacugagacuc

SEQ ID NO: 387734 - RNA, 130 nt, Homo sapiens
ugaaugaauaagauacuaggaaaaugaugaaguacugugauacuguacugaaguacccauuuaguacagcgauacuaaaguacuaaaguaaguauagugauacagaugaaaucagauaucauuucagaaa

SEQ ID NO: 387735 - RNA, 85 nt, Homo sapiens
gugggauucuugcaaggaaaugugacagguagguaauuuuugcucuaaaacagcaacugucugucuuuucuuaagacacucccac

SEQ ID NO: 387736 - RNA, 73 nt, Homo sapiens
gagaaaucuccacacuguuuuccauggggguugaacuaauuuacauucccaccaacaguguacaaguguucuc

SEQ ID NO: 387737 - RNA, 58 nt, Homo sapiens
ggcuguguuucuguuugacauuugcaauuaauuaccgaaaugcaauggagaugcagcc

SEQ ID NO: 387738 - RNA, 94 nt, Homo sapiens
ugagaaucgcuugaauuuggcaggcaaaguuuacagugagccgagauggcaccauugcacuccagccugcacgacacagcgagacaccaucuca

SEQ ID NO: 387739 - RNA, 105 nt, Homo sapiens
gaguugcugggguugaguugugucuccaaaaagauguguucaaguuccaaccccuggcgcugugcauaugacuuuauuggaaacaggaucuucgcauauauauuc

SEQ ID NO: 387740 - RNA, 83 nt, Homo sapiens
ucuauuugugaaaauucaucaaaugguuuguauauaugaaaaaaaugaaauauaccugcaggauguaauauuuugcaaguaga

SEQ ID NO: 387741 - RNA, 68 nt, Homo sapiens
gccaccaggcccgcugcuaugguggcuguucccugcccuuaagucaccggcagacguggccugauggc

SEQ ID NO: 387742 - RNA, 60 nt, Homo sapiens
uugagccaugaucacaccacugcacucaagccugagugacagugugagauccugucucaa

SEQ ID NO: 387743 - RNA, 69 nt, Homo sapiens
cagaguaaacuucagaguucuuccuggcauaaacaagcaagaaggaagacccaucugggguuugcccug

SEQ ID NO: 387744 - RNA, 82 nt, Homo sapiens
aguucuaggguacaugugcacaauaugcagguuuguuacauauguauacacgugccauguuggugugcugcacccauuaacu

SEQ ID NO: 387745 - RNA, 56 nt, Homo sapiens
ggcuauccugaggaaauguuguuuggauugaaaucugacaugacuaggagauagcc

SEQ ID NO: 387746 - RNA, 129 nt, Homo sapiens
gggggugacccacacacguuuaauuugcacugacguuguuuguuuuggugucaugcgugaagccuuacuuguucucagucauguuuaccagacguauuaucaugcauuuuuguuuucugucucuucccc

SEQ ID NO: 387747 - RNA, 58 nt, Homo sapiens
uggaaguggcagaggaagugguauaggaaaauuaaaucacuuugacggccaacuucua

SEQ ID NO: 387748 - RNA, 105 nt, Homo sapiens
auacuggaucuggauaaccugcaauaacccagugucugugauggguuagucuccccuuaaauuaucacagauacuggguuauugcaggucuggauuacauagugu

SEQ ID NO: 387749 - RNA, 71 nt, Homo sapiens
gggaauggaugaggagauauuggucaaaggguacaaaguguccaagcacaguggcucccgucuauaauccc

SEQ ID NO: 387750 - RNA, 77 nt, Homo sapiens
gaauuucaaauauauuucuagucauugucuacuguuaucacaugcuuagaguuuuacuagagaugcauuuguaguuu

SEQ ID NO: 387751 - RNA, 96 nt, Homo sapiens
ccucagccucccaaacuguugggauuacagguguaagccaccaugcccaggugagaugcuggcucauuucuaaacccagcucauuggcaagugagg

SEQ ID NO: 387752 - RNA, 70 nt, Homo sapiens
guucagugguuaaaagauucuagacucagacaaguguuaucuggaauucuaucuugacuauuuccugggc

SEQ ID NO: 387753 - RNA, 58 nt, Homo sapiens
ugagacugagucucacucugucacccaggcuggagugcaguggugcgaucucagcuca

SEQ ID NO: 387754 - RNA, 61 nt, Homo sapiens
cuauuagguuggugcaaaaguaauggcaaaagccgcuauuacuuuugcaccaaccuaauag

SEQ ID NO: 387755 - RNA, 94 nt, Homo sapiens
aauaaagaaaaguaguuauuaauauacuuuuauucuuauaaauaaaccuuugaaggauauaagagugggguguuagggaugcugucucuuuauu

SEQ ID NO: 387756 - RNA, 77 nt, Homo sapiens
uugucaugaaauauguuuuucuaucccuucauuuucagucuaugggugucuucauggguaaaauguguuucugauag

SEQ ID NO: 387757 - RNA, 124 nt, Homo sapiens
uuguuuauaaauuacccaggcucagguaucuucauuauagcagugugaaaauggacuaauauagagaauugguacugguagagagaggcauugcuauaaggauaaccugaaaauguggaagcaa

SEQ ID NO: 387758 - RNA, 58 nt, Homo sapiens
uuaaggggaccugugagaguacaggugaaccaagcaucagauucuacaggccuuuuga

SEQ ID NO: 387759 - RNA, 89 nt, Homo sapiens
ggcugggucaaacgguauuucuaguucuagauccuugaggaaucaccacacugucuuccacaaugguugaacuaguuuacagacccacc

SEQ ID NO: 387760 - RNA, 59 nt, Homo sapiens
uaagcaguaaaugaagucuugcugucaggaacaguauggcaagaacuauuuccugcuua

SEQ ID NO: 387761 - RNA, 92 nt, Homo sapiens
ucugcuacacaugcaggcucccugcccucugaagcacuuuuuagauacaaaggcaggugaccaccuguauguaccccaaagacuguggcaga

SEQ ID NO: 387762 - RNA, 73 nt, Homo sapiens
ggaaagacaccuuacuauguuaauauggguuacuacugggcaaugggauuauacauggcugauggguuuuucu

SEQ ID NO: 387763 - RNA, 56 nt, Homo sapiens
uauugugcauguugaauaacuaauuagcaaguuugguugaauaaauauguauaaua

SEQ ID NO: 387764 - RNA, 62 nt, Homo sapiens
cugaauguuucacucugaaaugggaguccuuggaggguuuugaccagagaagagacauucag

SEQ ID NO: 387765 - RNA, 84 nt, Homo sapiens
caagaucagguaaaggcacuagaaguuaccuuuuuuguggacgcuuaagaaaggugacuggagaggccccaaaaauucaucuug

SEQ ID NO: 387766 - RNA, 93 nt, Homo sapiens
gugauggcucuauucaccagccuuagucuuuaguucuuaaaaacuaauguucuuagugcugagauugagaagcccugggucagaguaauacac

SEQ ID NO: 387767 - RNA, 60 nt, Homo sapiens
ggaguaaaugugugcauuucaaacuuuauguacuacuuuguaacacacacuguuuacucc

SEQ ID NO: 387768 - RNA, 88 nt, Homo sapiens
ggagaauugcuugaagccaguaggcggagguugcagugagccaagauggcgccauuguacuccagccugggcgacagagcaggacucc

SEQ ID NO: 387769 - RNA, 58 nt, Homo sapiens
gguguagguagugucagugaguggcucuugugccugcuguagacauuaggccugcacu

SEQ ID NO: 387770 - RNA, 62 nt, Homo sapiens
caucacaucugcaugguaaguagcaguuguucuggaugguucuugcuaucaugauguagaug

SEQ ID NO: 387771 - RNA, 98 nt, Homo sapiens
ccaauugcucacuauauugcuugaggccaggaggugucaaccuccuggaguuagguaucuggucaaccuccuggccucaagcaauccuccugccuugg

SEQ ID NO: 387772 - RNA, 87 nt, Homo sapiens
gcuauguagcugucaauguaucuagcuguauuaucacuuaggagaguuccugaugcacaauggauacuauugaaagacaaauguagc

SEQ ID NO: 387773 - RNA, 116 nt, Homo sapiens
aacaaugcuuuauuuauuuugauuucacaguguucucccccagaaaagauuuauuuauuuuuaucuugguuuguggaaaggagacuugagguuguuaaagagaaaccgucauuguu

SEQ ID NO: 387774 - RNA, 129 nt, Homo sapiens
uagaaucccgcauguuccuggacagaaaggguucaccaaacucaguccauguguagucaccaaacacaguaccauauguuuggugaguagcuuucuguuuauuuauuuuagggacaaggucuugcucug

SEQ ID NO: 387775 - RNA, 90 nt, Homo sapiens
ggcauuagauucucacaggagcacaaacccuauugugaacugcacacacgagggaucuaaguuuugugcuccuguugagaaucuaaugcc

SEQ ID NO: 387776 - RNA, 102 nt, Homo sapiens
caugaacugggagcucuagcacaugaauaguggguaaugaugggaaguagccacauucccguuauuaaccccugccuucccuguuagcuuccugcuuacaug

SEQ ID NO: 387777 - RNA, 57 nt, Homo sapiens
aaggcagauaugaugugaaagccuugccuuggccuuccacguggucuaucuguccuu

SEQ ID NO: 387778 - RNA, 70 nt, Homo sapiens
uuacugagaaugaugauuuccaauuucauccaugucccuacaaaggacaugaacucaucauuuuuugugg

SEQ ID NO: 387779 - RNA, 130 nt, Homo sapiens
gcucauauccaucugugugaguucauaucugugagugugcauucaugccugugugagcucaugucugugugaguucauaucuaugagugugcauucaugccuguaggaacgcaugucugugugugugagu

SEQ ID NO: 387780 - RNA, 84 nt, Homo sapiens
gcuuguucuaaacgugaauucaccugacucccugaaagaacauucucuuucauggaacaaguggguucaaagcacagaguaagc

SEQ ID NO: 387781 - RNA, 67 nt, Homo sapiens
gcaugguguuaggcacugggaauggaauacugaacaaaucagagacauucuugccuucaccgagugc

SEQ ID NO: 387782 - RNA, 70 nt, Homo sapiens
ggcuggagugcaguggcucaaaaugccucccagagugcugaaauucaggcaugagccgcugcacccgguc

SEQ ID NO: 387783 - RNA, 84 nt, Homo sapiens
aagacaagaguuuagggugugguuuaucacucuuuucauuaaccugagucagauaaauccagauucugauguacuuuauguuuu

SEQ ID NO: 387784 - RNA, 56 nt, Homo sapiens
uugagauggaguuucacucucgucacccaggcuggagugcaauggcaccaucucag

SEQ ID NO: 387785 - RNA, 56 nt, Homo sapiens
uggcuuucuuucaugcaaccucggauuuugugccccagguguauggauggaggcca

SEQ ID NO: 387786 - RNA, 60 nt, Homo sapiens
guggcagagucagagggaaaugucuacgucuaaucucccagcugcccucugacaucccau

SEQ ID NO: 387787 - RNA, 63 nt, Homo sapiens
gaaagugcuggccuacucaaucgagagcaaugcuuucaucgaggagagucgccagcugcuuuc

SEQ ID NO: 387788 - RNA, 66 nt, Homo sapiens
uuuguuugcugcauugauaaauccccaugacuauccagguacaggauggcacuguagcaacacaaa

SEQ ID NO: 387789 - RNA, 129 nt, Homo sapiens
cucccuguuggcccacagcugcuaaaaaacaaggugaguggugcuuaaguucaggcuugauaaaccacaacugagcuggacuuugcaccacuucacccucuacagcagucacugaauuccugcugggag

SEQ ID NO: 387790 - RNA, 129 nt, Homo sapiens
cuacuucagaucaucagucauuagauucucauaagaagcacgcaaccuagauccguugcauacacaguucacaguaggguuugugcuccuaugagaaucuaaugccaccgcugaucugacaggaggugg

SEQ ID NO: 387791 - RNA, 66 nt, Homo sapiens
ucugcuggucuagacagaaaucauuuuuaaaaaaucaauauaaaaaugcucucaggugccaguaga

SEQ ID NO: 387792 - RNA, 86 nt, Homo sapiens
ugcaugugggguuuaaaaccuagaugacugguugaugggugcagcaaaccaccauggcacauauauaucuagguaacaaacaugca

SEQ ID NO: 387793 - RNA, 88 nt, Homo sapiens
aauaucaagagguggcacucacuggugccaucuugaaagcuggcuacuaccuucaagauggccccagugagccccaccuccugauauu

SEQ ID NO: 387794 - RNA, 98 nt, Homo sapiens
uaucuggcaagauuccugacaauuuagcaauugauucucauaagccgguucuaucuggcucuaagaaaucauugcuuauagguacucuagucaaggua

SEQ ID NO: 387795 - RNA, 55 nt, Homo sapiens
uuauggcugaauaaauuaugguauauucguaccaugaacuaguuugcagccauga

SEQ ID NO: 387796 - RNA, 82 nt, Homo sapiens
uaugcuauugugaauagugcugcaaaaaacauacgugugcaugugucuuuauagcagcaugauuuauaauccuuuagguaua

SEQ ID NO: 387797 - RNA, 79 nt, Homo sapiens
ucucugucccuuuugucugaagaccccauuuagcuuucuccagucagcuccaugaguccauuagaaaaaaggacugaga

SEQ ID NO: 387798 - RNA, 78 nt, Homo sapiens
accaagugagcuaguagagugcacccggcuuuccugugucuucugggguguugcuggggcucugcuguuucgucuggu

SEQ ID NO: 387799 - RNA, 68 nt, Homo sapiens
ggaagaugaaaggauagucugaugccauguaaaaaauuuaggauaugagauuauaaucuuuuacuucu

SEQ ID NO: 387800 - RNA, 62 nt, Homo sapiens
uugugaauagugcugcaagaaacauacgugugcaugugucuuuauagcagcaugauuuauaa

SEQ ID NO: 387801 - RNA, 55 nt, Homo sapiens
agguguaaaucugcugugaacauuuuuauuaaaaaugucccccagguuuauaucu

SEQ ID NO: 387802 - RNA, 85 nt, Homo sapiens
aucaguggccucuuugcuucuggcaucauugcuacaacaguaaaauuugcauccagaaguagacauauccaauccauaaucuggu

SEQ ID NO: 387803 - RNA, 82 nt, Homo sapiens
aucaucuuugccucuuugucacaucuugggggcagccuaccugagaaugucacccacacaggagacagggagagaguaugau

SEQ ID NO: 387804 - RNA, 63 nt, Homo sapiens
cuauguguccauguguucucaucauuaagcucccacuuauaagugagaacaugugguauuugg

SEQ ID NO: 387805 - RNA, 76 nt, Homo sapiens
uuccccugguagguucucaggaaugagcuucccacccuugcugggaggaugcagcucgaaaccagcccaaggggaa

SEQ ID NO: 387806 - RNA, 63 nt, Homo sapiens
ggcuggacaaaucuggaaagaaccccucuucacugggguugcucaccuguuaguccauaagcc

SEQ ID NO: 387807 - RNA, 63 nt, Homo sapiens
ucugauccaaucugugggcugucaguuuacaauuucugcuguauagcacuucacuugguuaga

SEQ ID NO: 387808 - RNA, 59 nt, Homo sapiens
uggaguuggccacugauuggaccagagaugaguaucugacucagcaguaaucaacuuca

SEQ ID NO: 387809 - RNA, 62 nt, Homo sapiens
uugcuuugcagccccaagaggcuucucaguaaaugccagagaugcaucuggcugcgaggcaa

SEQ ID NO: 387810 - RNA, 82 nt, Homo sapiens
ugcuccgucuuguagcugcccagcacgaaguuggcaucugaaaaaugggccacacggugccugagcagcgcgacuggaagca

SEQ ID NO: 387811 - RNA, 63 nt, Homo sapiens
uuaauagugacucauuuuccacacuucagccuucagcaguagugaaacaugagucacuguuaa

SEQ ID NO: 387812 - RNA, 86 nt, Homo sapiens
gggagagggaggccaaaagccuaacuaacugguuaaaaaaacuuuacccuuuugccggcauguugggcuucuggguuuccuucccc

SEQ ID NO: 387813 - RNA, 57 nt, Homo sapiens
cuggucaugggggcacccucuggaggggagcuuuacccaggggcaccccgucgccag

SEQ ID NO: 387814 - RNA, 120 nt, Homo sapiens
caugcaucucauuuguaccuuucuccuaucaaguguauggauuuucagauucuuaucuuuuagaaggaugagcugcucaaucuguggucugugauggaaggcagguagggugaguucaug

SEQ ID NO: 387815 - RNA, 63 nt, Homo sapiens
guguuuucagggcauuggaguuucugaacacuucagauugucuccuauguccugcaaagauac

SEQ ID NO: 387816 - RNA, 118 nt, Homo sapiens
uggcuguuaucugaucaagugucaagguaucguauagcuuguguucaagucacccuuauuuuacuuaauaauggccccaaagcgcaagagguaugaugcuggcaauucggauaugcca

SEQ ID NO: 387817 - RNA, 110 nt, Homo sapiens
cuggagaaacuggggcaguugagcaacaucugagaucaaggcaaaacaaaaugcuugguaaacuuccccucaugaaugaguucuuggcugguacuccuuauuuuuuccag

SEQ ID NO: 387818 - RNA, 81 nt, Homo sapiens
gguaaguuagacaacauuugcuuaaagacaaagucugugcuucagaaacagcuggucugccguaguaggugcugacaugcc

SEQ ID NO: 387819 - RNA, 57 nt, Homo sapiens
gucuauuuggggauaacuaggcuucccguaucuggauaucuaaaucucuugauagac

SEQ ID NO: 387820 - RNA, 74 nt, Homo sapiens
guggucucuaaguagaggaaucauuuugugcauuguuuccagagccaccagauuuacuuuacuauuagaaucau

SEQ ID NO: 387821 - RNA, 56 nt, Homo sapiens
uuaguucucauccauucagucauguauucauucauuauggcaugaaugugaacuaa

SEQ ID NO: 387822 - RNA, 66 nt, Homo sapiens
uaucaagauggauaaggauagacuucuaggguuugaaucucaguucuauaccuuacuaucugggug

SEQ ID NO: 387823 - RNA, 85 nt, Homo sapiens
uauuuguaaugugguuauaacagaucuuggcacauaguaaucuauauaucugucuagaucugaauguaauuguacuauacaaaug

SEQ ID NO: 387824 - RNA, 117 nt, Homo sapiens
uguucuuuuaagagggacucagcagucaggggagauggcaaugcgaugaugacugagugucuuagucuuuuuuguauugcuaugcaauaucugaggcuggguaauuuauaaagaaca

SEQ ID NO: 387825 - RNA, 76 nt, Homo sapiens
cauggggaguacuugagauaggagcuguuguucucuucuggccuaaacuaagacccgucuccugucucaccccaug

SEQ ID NO: 387826 - RNA, 56 nt, Homo sapiens
cagacuggauguagggaaaagggagcuuucccuucuugguugcucacacccaucug

SEQ ID NO: 387827 - RNA, 85 nt, Homo sapiens
cagccucacugucugagguguuauccagaguucuuugugucaugaccaagaaaaacaaggagcauauacaccaacagugagguug

SEQ ID NO: 387828 - RNA, 78 nt, Homo sapiens
auagacuggcaagagugaaccagcugucuaauuuuucucuauacccucagacucuggugaagcuuuuagcuauuuuau

SEQ ID NO: 387829 - RNA, 57 nt, Homo sapiens
gugucacuguugagaaguccacugacaguuguauugggacuucuuuuuaugugaugc

SEQ ID NO: 387830 - RNA, 107 nt, Homo sapiens
uuuggagacaagagucuugcucuguucccgggguggaaugcagugaugugaucacagcucccugcaguuucuaccuccugggcucaagcuauccuccugccuccaga

SEQ ID NO: 387831 - RNA, 129 nt, Homo sapiens
uauguauaucaaauaguuauuccuuuuuauuacugacuagcauuccauuguauaacacaguuuguuuauccauucgccuguugauagacaucugaguuguugccuguuucuggcuguuuuaugaacaug

SEQ ID NO: 387832 - RNA, 125 nt, Homo sapiens
gucacuuauuucacaaauaauagcuccauaacaaagugcugucauuguguggacauggagaagaggagcuccucuucuguguucugugcaaugagcacaaagcauugggugugaaucuuccuggc

SEQ ID NO: 387833 - RNA, 64 nt, Homo sapiens
gaguaagugcucuugaaacugucuuagcaaaauuaugacugagacagugaaagagauuuaacuu

SEQ ID NO: 387834 - RNA, 80 nt, Homo sapiens
ugcaaagauuauuuugacuauuaaaccaacagaaucuuaucagagacccauguggcaaauggucaggaagaaagucugca

SEQ ID NO: 387835 - RNA, 59 nt, Homo sapiens
guuugccccaaggaugcacucagcaaaguccagacugugagaaucuuuucagggcaaac

SEQ ID NO: 387836 - RNA, 73 nt, Homo sapiens
ggccaugguaaggcuuagauaagugaggauauguaaauagcaacugucaacauuuaucaaguuauugugugcc

SEQ ID NO: 387837 - RNA, 62 nt, Homo sapiens
ucagauuugucugugguugucaggcauguuaaugacauacagccauuccagccaaauacugg

SEQ ID NO: 387838 - RNA, 58 nt, Homo sapiens
ugagcuaggauccugucacuguacugcagccugggugacacagugagauccuaacuca

SEQ ID NO: 387839 - RNA, 106 nt, Homo sapiens
aaaagcacaagagauagacgucacccuggagagugcuguaguaaucccuaaaugccuuauaggauuacugaacccuacuuuuacagguucuuucuguuguucuuuu

SEQ ID NO: 387840 - RNA, 82 nt, Homo sapiens
uccacguuuaugaaguacaguacugaaugaauguauggugcaguaaugaauauacaaaguacaguacaguaaugaaugugga

SEQ ID NO: 387841 - RNA, 89 nt, Homo sapiens
ggagggcugccuggcuggcaucaggcauccucucugaguuugcaucugcuuaaggcagugucuaugccagucugccaagcagacucucc

SEQ ID NO: 387842 - RNA, 74 nt, Homo sapiens
ggacaguuaucuccagugcaaagucaugaucacauaugauugauguuauuagcuugcugcuugaguuacuguuc

SEQ ID NO: 387843 - RNA, 56 nt, Homo sapiens
cagaacuauuuuuuguguaaaguugagauggccuuugugcaaaguugugguuucug

SEQ ID NO: 387844 - RNA, 91 nt, Homo sapiens
guuucuccuugcaugagguaagagaauaaacaguuuguuuagggguuuaaacaaaagcuguugcuuuuuuacuuugagcgaaaggagaaau

SEQ ID NO: 387845 - RNA, 62 nt, Homo sapiens
cuucuuguuauccuguagcucauccaccgcaauggccccaucgcccggcugcaaacagggag

SEQ ID NO: 387846 - RNA, 75 nt, Homo sapiens
gaaacagauugcugagccccacccucaggaaguccgaucuaggagauuuggguggggcuugagaaucugcauuuc

SEQ ID NO: 387847 - RNA, 126 nt, Homo sapiens
aaagugagccaugcaaaaaauauggaugacuguuauaugcauauugcuaagugaaagaaaccaauccaaaaaggcuauaugcuauaggauuucauuuguaugacauuuugcaaaaggcaaaacuuu

SEQ ID NO: 387848 - RNA, 59 nt, Homo sapiens
auaucacagguguuuaccugaucuugccuacaucauuucauuguaauuaucugugguau

SEQ ID NO: 387849 - RNA, 77 nt, Homo sapiens
ccuggaaauucuccagggguuuccccagaucagcagguagguaacgcugacucgugagguccccaggaggcaacagg

SEQ ID NO: 387850 - RNA, 114 nt, Homo sapiens
gugagggcaaaugguucaguagaguguguugugauagguggcugggcgcagguuagcaauugugaccucuguugcugucacuauugucacugcugucuaaaucauuguccucau

SEQ ID NO: 387851 - RNA, 72 nt, Homo sapiens
uuuuggcucugagguuguucuucucaguggcauaucuacauuugccaugcaauauauauccucaagccaagg

SEQ ID NO: 387852 - RNA, 65 nt, Homo sapiens
agaaagaagcuuuaugagaaacugcuuggugaugugugcauucaucucauagaguuucacuuucu

SEQ ID NO: 387853 - RNA, 71 nt, Homo sapiens
cgcucucuugccuaggcuggagugcaguggugcgaucucggcucacugcaaucuccucccagguucaagcg

SEQ ID NO: 387854 - RNA, 130 nt, Homo sapiens
uauguauacauagauacguguguguauguauacauagauacguguguauguauacauagauacguguguguguauguauacauagauacguguguguguguauguauacauagauacguguguguaugua

SEQ ID NO: 387855 - RNA, 55 nt, Homo sapiens
ggcaacaauuccuacuucuuuuuucucccccgagauggaguacugcuuuguugcc

SEQ ID NO: 387856 - RNA, 76 nt, Homo sapiens
uagauuuugcccaauuauuaagauauuaggguguuucauuaagaauggaagacucuagucucuugagcagagacua

SEQ ID NO: 387857 - RNA, 55 nt, Homo sapiens
guguucauaaguucucaucauuuagcucucgcuuauaagugagaacaugcagcau

SEQ ID NO: 387858 - RNA, 64 nt, Homo sapiens
auuaggaagcuaauaucuguauccucuaugguuaugagauagaugaagauguugccuuuuuaau

SEQ ID NO: 387859 - RNA, 85 nt, Homo sapiens
aggcuauuuucacuucuuuguggaucuucaguugcuucaggccaucuggauguauacgugcaggucacaggggauaugauggcuu

SEQ ID NO: 387860 - RNA, 80 nt, Homo sapiens
ugacaagccacucccagugcaaagccucugcccagaaccucuucuccuaggcucuuggcauggcuuaugccuucuuguca

SEQ ID NO: 387861 - RNA, 78 nt, Homo sapiens
uaaacaauacacacagaugguguuggcugaguguauuagcuuugcuaucauacacucucauauuaucugaauuguuua

SEQ ID NO: 387862 - RNA, 71 nt, Homo sapiens
gccaguauuuuauugaggauuuuugcaucaauguucaucaaggauauuggccuaaaauucucuuuuuuggu

SEQ ID NO: 387863 - RNA, 58 nt, Homo sapiens
ugccaggaugaggucaauguuugguuacugaugagaacaaacaggccucaguccugca

SEQ ID NO: 387864 - RNA, 75 nt, Homo sapiens
ugcuuuugcugcacaguucuuaagauuauuuccuuugucugacuuuagguaacuugaugacuguguaccugggug

SEQ ID NO: 387865 - RNA, 55 nt, Homo sapiens
acuaguaucauugaaacggcuuguaaaaaguacaacuguuaagacugguacuggu

SEQ ID NO: 387866 - RNA, 70 nt, Homo sapiens
guggcuuguacaugggacaggaggagagaagcaggucagagcuucucucacugggaauauguucugccac

SEQ ID NO: 387867 - RNA, 88 nt, Homo sapiens
uguggauuuuuuuuccuuggagauagggacccuguuuuagauacuauauuuuauuuccugucuuccaagagagauuuaaagauuuaua

SEQ ID NO: 387868 - RNA, 64 nt, Homo sapiens
cagacaugggacauagauccuugagguuucuggugaaaucugcacaucuguguuuuuguaucug

SEQ ID NO: 387869 - RNA, 92 nt, Homo sapiens
uuuuggaacuaaaauauuugccaaagugauaccuuaucccuaacuuggaccagcuaaggugcucucuuauguagaaauuaauaguuucagaa

SEQ ID NO: 387870 - RNA, 58 nt, Homo sapiens
acccgggagacggagguugcagugagccaagauugcgcuguugcacucuagccugggu

SEQ ID NO: 387871 - RNA, 81 nt, Homo sapiens
aucaaaugaaagguuuaauucugugagaugaaugcacacauuagaaaguaguuucacagauaaauucuuucuagguuugau

SEQ ID NO: 387872 - RNA, 75 nt, Homo sapiens
gcuguucuuaggugggccaucaccccacccugcuuuuccucacccucuguggguugagucgcccaccuagucagu

SEQ ID NO: 387873 - RNA, 56 nt, Homo sapiens
gcuucccuuggcuaggcgagggaguucuccaaccccuugcacuucccaagugaggc

SEQ ID NO: 387874 - RNA, 98 nt, Homo sapiens
ugaaauauauauuuggucuuugccccccaguuccugacacagaguuccuaaaacucuugcaauuuccuuagugguggggugauaggaguaucuuuuua

SEQ ID NO: 387875 - RNA, 63 nt, Homo sapiens
acaaguguuucaguggguacaugcuuccguuucuuguggguaaauacccagaagcagcauugu

SEQ ID NO: 387876 - RNA, 85 nt, Homo sapiens
uagcuaugugacauuggaagauuacuuaguuuucucuuuuguaagaugaaaauaguaauaucuaccuuagaguguuauagaguua

SEQ ID NO: 387877 - RNA, 112 nt, Homo sapiens
uaguuagaggacacauggcacugaagcguauugacauuucugcuucguuauccuuguuagaacuuagggcugucaggaugccaucagugccccuuucuuggucugauaauua

SEQ ID NO: 387878 - RNA, 68 nt, Homo sapiens
uugcuugagccggggaggcagagguugcagugaccagagauugugccacugcacucuggccugggcaa

SEQ ID NO: 387879 - RNA, 87 nt, Homo sapiens
acucaucacacguuaucucgugguguccuaggugauuuugaauggucguucucgcugggaaccagagguaaagucuguguguugagu

SEQ ID NO: 387880 - RNA, 70 nt, Homo sapiens
ccagaugugaugcugcucaccuguggucucagcuacgugaggcugaggguagaaggaucacuugagcugg

SEQ ID NO: 387881 - RNA, 88 nt, Homo sapiens
acauuucuguucugaguuuuaaacuuuaucauuugagccuuuuucauaucuucaaauguuuguuuaaggcuuauuaggacugagaugu

SEQ ID NO: 387882 - RNA, 73 nt, Homo sapiens
gcauguucuggagagguaagacuuuuaguugauuuuccauuagugagcuaacauuuuuccucuuccaacaagc

SEQ ID NO: 387883 - RNA, 59 nt, Homo sapiens
uaucacuauucauccuagcuccaugugcucuuuagggcaggagaguaugaagagugaug

SEQ ID NO: 387884 - RNA, 64 nt, Homo sapiens
ggccaugugaugguaugguggagccaugacuucaauuccugcaucuaccuacugcucacaggcu

SEQ ID NO: 387885 - RNA, 72 nt, Homo sapiens
cauuccuaugccaagaauccuguucuugaagauaaacuguuaucuuuggugcaugauacuuugucuagaaug

SEQ ID NO: 387886 - RNA, 66 nt, Homo sapiens
gucuagaauaacugcuaucuuucuggccuaaggaacuggguggaagguaaugcagcuuacugagau

SEQ ID NO: 387887 - RNA, 80 nt, Homo sapiens
uaacagcuggaggugcuuaacuuuggcccugcaucaguuuucaaaagugcauaaagguaagcacuauccugaaacuguug

SEQ ID NO: 387888 - RNA, 82 nt, Homo sapiens
caggcacugucauggcauuuguaaacugccauggcacuggugggagugucuuuuagcaugcaaauguaugacaauuagccug

SEQ ID NO: 387889 - RNA, 60 nt, Homo sapiens
ugugaauagugccacaauaaacauacaugugcaugugucuuuguaguagcaugauuuaua

SEQ ID NO: 387890 - RNA, 62 nt, Homo sapiens
gucugggaggacauggcucggggaaguggcuucugaauguaagagcugguguacugccgggc

SEQ ID NO: 387891 - RNA, 73 nt, Homo sapiens
uagaugcauacaauaaaacauuggcuggacauuuacuuuguuccaacuagcuuccaguguuauuuauguucua

SEQ ID NO: 387892 - RNA, 65 nt, Homo sapiens
ucaaacacuuuccugaguuugugacuuguuuuagcgaauuaucaaacccuaggaggugguuguga

SEQ ID NO: 387893 - RNA, 59 nt, Homo sapiens
uguccuggcaggggugugcuucaggggcagagcccucauggagaaccucugcuaggaca

SEQ ID NO: 387894 - RNA, 84 nt, Homo sapiens
cacugccuagucagggaaauuguucagaagccuggcugagaaaaagauuugaaccaucccuuucugagcaguuccuggguagug

SEQ ID NO: 387895 - RNA, 61 nt, Homo sapiens
ggcuggacuuggaggagaucucgcuguggagcgcgaaugaguucuuccaccgggaccagcu

SEQ ID NO: 387896 - RNA, 77 nt, Homo sapiens
auagugcugcaaacaugagaggaagugcagauaccuaucucuuugauacaccaauuuccuuuccuuuggguauauau

SEQ ID NO: 387897 - RNA, 90 nt, Homo sapiens
ugauuucuuugacuuccagaucauguuguguauugugguguaggcauucauaugucauaguaugaucuuuuggggaguuaaagcgaauua

SEQ ID NO: 387898 - RNA, 83 nt, Homo sapiens
augugggacugugguugaugauggugauaaagauacugaaacuuaugcuauucuuauugcuaaaucaugaccacacuuuacau

SEQ ID NO: 387899 - RNA, 55 nt, Homo sapiens
uugagauggagucucacucuguggcccaggccagagugcaguggcaccaucucaa

SEQ ID NO: 387900 - RNA, 129 nt, Homo sapiens
uacucuucucaucucaagcugguaacaaauaguuugcuaaucaacacuggccugauuagcagucagaccaguggccagaccagugcugauuagcaaacuauuuguuaccagucugagaugagacuggua

SEQ ID NO: 387901 - RNA, 58 nt, Homo sapiens
uggccaucugaaaguuccugaugggcauucacccaucaggaaccuuuuugguguguca

SEQ ID NO: 387902 - RNA, 96 nt, Homo sapiens
gaccauaaauacuuaagcaaagguaacaugagaacaaugagaacaaaccacaugaaccuuuucgaaaguugcuuuugucacucaguauuauguguu

SEQ ID NO: 387903 - RNA, 61 nt, Homo sapiens
uauucuccagcagcccaguaagccuagggaaaccuggaguugcuuuguugucuggggaaua

SEQ ID NO: 387904 - RNA, 61 nt, Homo sapiens
gacagaaaagaucuccuuuguuaguugcaaaacaaguaagagagcuccaucuuuuccuguc

SEQ ID NO: 387905 - RNA, 61 nt, Homo sapiens
ugagagauuuccaauaggaguaucagggccagcagaacccuucuugguuggaggucuuuua

SEQ ID NO: 387906 - RNA, 126 nt, Homo sapiens
uaaaguuuauuguuuuuggaaauaguuuuuuggcaaauauuuuguuuuguaaguuuuacauuucuaaaguugaauaaaauuaaauguuuagcaggugcuuguuguaauagaagcuauaauauuuua

SEQ ID NO: 387907 - RNA, 56 nt, Homo sapiens
gagagcaagaugcaaauggaggcuuaauaagagcuugcauauuggaacuuucucuc

SEQ ID NO: 387908 - RNA, 62 nt, Homo sapiens
uucacaguguuucucacgguuaggaugcugacuaaaccccagacugcaagcgaggcugugaa

SEQ ID NO: 387909 - RNA, 67 nt, Homo sapiens
aucucuccuuugugcucauaauugguuaggccuccuauacccugucgugagucagagaauggacgau

SEQ ID NO: 387910 - RNA, 69 nt, Homo sapiens
cucacgggauccuuagggugugacuuugcuagccagaaaccucuguggcugguggcaccuuuuccugag

SEQ ID NO: 387911 - RNA, 97 nt, Homo sapiens
ggaguucuguuguguuugaugcugacacgcacccaggcauaauucuuucugcuagacugcccccugcugucugcaacaguacuacaacuagaauucu

SEQ ID NO: 387912 - RNA, 61 nt, Homo sapiens
uaguggugcuuaaauaaggcuuucagaugauucugaugcacauacaguuugagagccacug

SEQ ID NO: 387913 - RNA, 102 nt, Homo sapiens
acuugagcaagaaaaucaauauuuuugcauuucagcuauuuauuugcaaaacaguauagugaaaugaaucuggaaauauuguaagacuaaugcaaauuaagu

SEQ ID NO: 387914 - RNA, 61 nt, Homo sapiens
caaaggcucaaggaaaauaauggucaaaaucauugacaguguccuccuccugagagauuug

SEQ ID NO: 387915 - RNA, 130 nt, Homo sapiens
cucagccucucaaagugcugggauuacagguaugagacacugaauccggccugauggauuguuuuuaaaacugaaacucagcugggcaugguggcucacgccuguaaucccagcacuuugggaggcugag

SEQ ID NO: 387916 - RNA, 74 nt, Homo sapiens
aguuaccaaacagauaagaacaguuauccauucaaagcaguuucagcuuugaauggauccaauucuuaguagcu

SEQ ID NO: 387917 - RNA, 78 nt, Homo sapiens
gggaucucuuaagagagccagcugguauauuuggaaaaauccuuaaaauggacccgcugugcuuucugcccaguuucc

SEQ ID NO: 387918 - RNA, 89 nt, Homo sapiens
ggccgagagcuuucuucuuuucccuccaaccucaucuuuguguccacgcuccuuaauguucuuggagguaggacgaagaacucuggguu

SEQ ID NO: 387919 - RNA, 78 nt, Homo sapiens
gcucuuagcaagcucuguggggucaagggagcuugaggcaguggcagucuuuggcauuagagagacuugcacuggggc

SEQ ID NO: 387920 - RNA, 71 nt, Homo sapiens
aagagccauggagaaaacagcuaucuaacuccgcucagguaaaaaaaggacuagcugcuuucuuggcucuu

SEQ ID NO: 387921 - RNA, 57 nt, Homo sapiens
cucaccuugugauccacccaccucagccucccaaugugcugggauuacaggcgugag

SEQ ID NO: 387922 - RNA, 95 nt, Homo sapiens
gucaagcauuagauucucauaaggaacgcacaaccuagucccucacaugugcaguucacaauaggguuugugcuccuaugagaaucuaauguggc

SEQ ID NO: 387923 - RNA, 56 nt, Homo sapiens
cugagguacccacuucaucucacuggaauugguuggauagugggugcagccuacag

SEQ ID NO: 387924 - RNA, 130 nt, Homo sapiens
ugaacuacagaggcacauuaaccauggucuguucagagccuaaagagaguagggcaaggauggugcugcccaccaccauugcacugaacuuuccaaggcuccggcacaugucaugucacuccuuagucua

SEQ ID NO: 387925 - RNA, 104 nt, Homo sapiens
gugguggugggugccuguaaucucagcuacucaggaggcugaggcaggagaaucgcuugagccugggaggcagagguugcacugaaccaagaucgcuccaccac

SEQ ID NO: 387926 - RNA, 75 nt, Homo sapiens
aacuuaaaauauuagguuggugcaaaaguaauugcgguuucuugccauuacuuuugcaccaaccuaauaaaaguu

SEQ ID NO: 387927 - RNA, 62 nt, Homo sapiens
ggucauacccuguaaucugaaacaugaaccaauuuauggcuuaaauacuacagggcaagauu

SEQ ID NO: 387928 - RNA, 61 nt, Homo sapiens
gcuggcaugguuagcugaggguucugaaauccucacauagucccugcuaaucuucuccagu

SEQ ID NO: 387929 - RNA, 83 nt, Homo sapiens
agcucacagcugcaggcuguaauagguuuccagagaccacagcccuaugcuuuugaaaucuuccacagcccaagcuccaggcu

SEQ ID NO: 387930 - RNA, 69 nt, Homo sapiens
auggacgaggccaagguuuucauccccuacguaaugggaaugauauuuaaacuggcccaauuguuccau

SEQ ID NO: 387931 - RNA, 64 nt, Homo sapiens
uugcccuauauccagauucugucuacuaaauccacccccacuggccuguuuggguacuggguaa

SEQ ID NO: 387932 - RNA, 99 nt, Homo sapiens
guuuaagauuuaguaagacagucauugcauguuaauuaaacagcaauggaucauuuaccaaccuguuuaaugagguguaacaacuauugaauauaaaac

SEQ ID NO: 387933 - RNA, 58 nt, Homo sapiens
uaucauuguguuauuucuuccaccagggcgcagcagucuggaaauagaaacaauggug

SEQ ID NO: 387934 - RNA, 100 nt, Homo sapiens
gccacaaacauaauauucuuugucaguagauucugucaucagcucugacaccacagaguuugauacuagagucuuucugacagcagucacauuuucuggu

SEQ ID NO: 387935 - RNA, 64 nt, Homo sapiens
uauaugaagccaggauuuauuauugcugucuacauacuaggcaauauaaagugugcuucaugug

SEQ ID NO: 387936 - RNA, 73 nt, Homo sapiens
gcuggccauggcccugggcugggcgaacaugcucuacuauacgcgggguuuccaguccaugggcauguacagc

SEQ ID NO: 387937 - RNA, 76 nt, Homo sapiens
ggcuauaaggagaaauugaacuuacuaucuaaacuaagggugcuugucuuaguuuugaaguuauuuuucuuaagcc

SEQ ID NO: 387938 - RNA, 74 nt, Homo sapiens
gucccagagcuguguuuuaacuuuuuauauuuuacucaaguauccaauuaagaauuaagcauggguuuuggggc

SEQ ID NO: 387939 - RNA, 67 nt, Homo sapiens
uuucauccauaggacuucuucagggcacgcaauccucucaaaugaagugagcuccaauugggugaga

SEQ ID NO: 387940 - RNA, 104 nt, Homo sapiens
uacaugaauaggagagaaacagagaucaguuaaugaagugagcauggguuugguuuuccaguuacacuuaaacuuuucagaauuccaauuccuauuccuaugua

SEQ ID NO: 387941 - RNA, 63 nt, Homo sapiens
gcagugagcagugagugugcugcaggguuaggagcaggcccucagcauccuccugcucagugc

SEQ ID NO: 387942 - RNA, 57 nt, Homo sapiens
uuacuguauagaaucaucuugaaugcuaccagugcuacacgggaugcuauaugguga

SEQ ID NO: 387943 - RNA, 59 nt, Homo sapiens
cucuagguuggccuauguauauaugauaaucccauauauacacuggagcaaaccuggag

SEQ ID NO: 387944 - RNA, 57 nt, Homo sapiens
ugcauggaucuuaaguauacaucuuggugaauucugauagauguauacauccaugua

SEQ ID NO: 387945 - RNA, 65 nt, Homo sapiens
accacgccuggcuaauuuuuguauucuuaguagagauggaguaucaucuuguuggccaggcuggu

SEQ ID NO: 387946 - RNA, 79 nt, Homo sapiens
auaugaaaucguauguuauuuugcugauacccgaugggcucccaaccauuucagcaccauguaacaauugauaguauau

SEQ ID NO: 387947 - RNA, 111 nt, Homo sapiens
agaaggugccauuuaggaauuuuauaacuaaagagaagucaaugucuggguucaaagcuucaaaggacaggcugacucucuuuuuagugguuaaugccgguggugacuuuu

SEQ ID NO: 387948 - RNA, 60 nt, Homo sapiens
ccagggggucuuuuaaacaacuggggcugcguggccccaguguguaaaggccuugccugg

SEQ ID NO: 387949 - RNA, 62 nt, Homo sapiens
ucugugaaucugggaacacaauuaagcuacuaauauuuguuaauuguccuugauuacacaga

SEQ ID NO: 387950 - RNA, 73 nt, Homo sapiens
guugcugucuuugguucuguuuauaugcuggauuacauuuauugauuuguguauauugaaccaggguugcauc

SEQ ID NO: 387951 - RNA, 76 nt, Homo sapiens
gcuuucaagauuuucucuuuauuuaucuauuacauuaauguggcugugguaugucuagauggggaagucuuugagu

SEQ ID NO: 387952 - RNA, 61 nt, Homo sapiens
gggaccagcucagaaccuugcacaacuauagcaaugacgagaugguguuuggcuugguccc

SEQ ID NO: 387953 - RNA, 59 nt, Homo sapiens
cacgguaagaucagugaauuucaugagcaugggcccacugcugcacuucuuuugcugug

SEQ ID NO: 387954 - RNA, 72 nt, Homo sapiens
uugauuauacuggagguuugagaucugugaucaagaauguuucacagaggagaagaccuuuaacauuuuuag

SEQ ID NO: 387955 - RNA, 64 nt, Homo sapiens
ucuuucuuagaugaccuauuuagaguguaauuaucuacucauucuguugguucuuugaggagga

SEQ ID NO: 387956 - RNA, 82 nt, Homo sapiens
gcagacuucaccuguguggcuggcgcgugacaccacuguagaagcucagugcguucauuuggccaguggcgaguguaguugc

SEQ ID NO: 387957 - RNA, 84 nt, Homo sapiens
gaguucuaggguacaugugcacaacgugcagguuuguuauauauguauacaugcgccauguugguguacugcacccauuaacuu

SEQ ID NO: 387958 - RNA, 77 nt, Homo sapiens
ucgcuugaacccaggaggugaagguugcagugagccgagaucaugccauugcacuccagccugggugacaagaguga

SEQ ID NO: 387959 - RNA, 64 nt, Homo sapiens
agcuguaguuugguggauguaaauuaaaacaauuuagugauucggaauccaacaagcuauagcu

SEQ ID NO: 387960 - RNA, 89 nt, Homo sapiens
ggagaaucgcuugaaccugggggucagagguugcagugagccgagauugugccauugcacucuggccuaggugacaagaauaagacucc

SEQ ID NO: 387961 - RNA, 84 nt, Homo sapiens
gaucagcuggaucccuggcaggggcuggggcuggugcuggggcugggugcugagguagcuccaucuucagggguucaguggguc

SEQ ID NO: 387962 - RNA, 109 nt, Homo sapiens
gggagacacuauggcuccugauggcagcggcuguuccccuggucuauagcaggcuauagaugaggguggccagcuggacagcagugaggagcaaagugaaaaucauccc

SEQ ID NO: 387963 - RNA, 72 nt, Homo sapiens
uaaaaugacauugauaguuuaauaggaauugcauuaaaucuguagauugcuuuggacugucuggccauuuug

SEQ ID NO: 387964 - RNA, 88 nt, Homo sapiens
agaaugguauaguauaauauucuuugaacaguuuuccugugcauaguaaaauaccuauggaagaauugucggggaugugcuccauucu

SEQ ID NO: 387965 - RNA, 85 nt, Homo sapiens
uauggaacauagugagagggugugaacacuggcugugcaaccucagaaagggucuaccuaguguugacuucucuucuuucacaua

SEQ ID NO: 387966 - RNA, 100 nt, Homo sapiens
caggugugauuauguucauucuccaggugagguuaagggacuuacugaaauucuguguggucuauggccauaccaugcugaaugugcccuaucuuaucug

SEQ ID NO: 387967 - RNA, 62 nt, Homo sapiens
gaaggagcuuaucugccauuuccuacacaugugacauauggagaagcaugaucagcuacuuc

SEQ ID NO: 387968 - RNA, 57 nt, Homo sapiens
ucuuuaucuaauguuuggccauuaagaaauccaaguggguguuccauuggauaaaga

SEQ ID NO: 387969 - RNA, 66 nt, Homo sapiens
cuguguccuccaaagugugcagagccaauaccuagggguccccaaggugacugagcacgggcacag

SEQ ID NO: 387970 - RNA, 59 nt, Homo sapiens
gcuacuuggaauacuuguuaaaguccagaauucuggcacccucgagauucuaauuuagc

SEQ ID NO: 387971 - RNA, 78 nt, Homo sapiens
gggauauauuaagagcucauccauaguugucacugauuugagacagugacaacuauggaugagcucucaauauauucu

SEQ ID NO: 387972 - RNA, 67 nt, Homo sapiens
caccaugacugguugagagaggcaggaagaaaggaggaaguguucuguuuuagcacuuguuauggug

SEQ ID NO: 387973 - RNA, 73 nt, Homo sapiens
ccugggaucuggagaggaggggcuucacaaggucaugccgaucuaagggacgcccccuucucucuacaccagg

SEQ ID NO: 387974 - RNA, 74 nt, Homo sapiens
gcuggaugcuucuuggcgaucauggcaguagccuccugaaugauagucuugagaagcauuuugacuaacccagu

SEQ ID NO: 387975 - RNA, 71 nt, Homo sapiens
cccacugcuuggccucuccccacuccuggaauccacucugauuuuggagcaaaguugaggccaagccuggg

SEQ ID NO: 387976 - RNA, 58 nt, Homo sapiens
gacaauaucccauggcagagaucgccagcauuaaggccauucauggugguacguuguc

SEQ ID NO: 387977 - RNA, 98 nt, Homo sapiens
ucucaaggcuacucugaagucuuugucuccuaagacucuguggagacaaagacuucaccagagagucuuaggagacauagacuuaucauguaaggaga

SEQ ID NO: 387978 - RNA, 61 nt, Homo sapiens
ugaacaucuuuguuaauuuucugucucagugaucuggcuaauauugacauugggguguuca

SEQ ID NO: 387979 - RNA, 82 nt, Homo sapiens
gaguuaaugggugcagcacaccaacauggcacguauacauauguaacaaaccugcacguugugcacauguacccuaaaacuu

SEQ ID NO: 387980 - RNA, 70 nt, Homo sapiens
ugaaugcauggggccaagaagggaagaugucacagaaaaaauuccuucauuuggugacucaauguauuca

SEQ ID NO: 387981 - RNA, 80 nt, Homo sapiens
uuugaaaguuugguuguugcugggccauugcaauuaaguaauuuucugcuaacacagcaccaguauaauuagcuuuuaaa

SEQ ID NO: 387982 - RNA, 73 nt, Homo sapiens
guuuucacucuguccucucaagcaauaaacuaaaauaugucuuuuuauugcaauuggcagagugcuaugaaau

SEQ ID NO: 387983 - RNA, 56 nt, Homo sapiens
uaagaugaaggcucaccuagaacucaagugaccauucagagguuagcaucaucuua

SEQ ID NO: 387984 - RNA, 88 nt, Homo sapiens
ggaguguugcucugucacccaggcuggagugcaguggcgugaucucagcucauugcaaccuccgccucccaaguucaagcaauucucu

SEQ ID NO: 387985 - RNA, 111 nt, Homo sapiens
guccaaggccuuuucugcaucuauugagauaaucaugugguuuuugucauugguucuguuuaugugauggauuacauuuauugacuugcguauguugaaccagccuuggau

SEQ ID NO: 387986 - RNA, 56 nt, Homo sapiens
guggacggagguugcagugagcugagauugcgagacugugcugcagccugguccac

SEQ ID NO: 387987 - RNA, 66 nt, Homo sapiens
caguuaucaucagcagccauuuugcuuucuugcagcuaaauaaaauaauggcauguuggacaacug

SEQ ID NO: 387988 - RNA, 80 nt, Homo sapiens
ggaggaagggaggaaagauguaauauuaucuaaauaucguagcaacauuuggagauagauacauuuuucuccauuuuucu

SEQ ID NO: 387989 - RNA, 130 nt, Homo sapiens
ccaauuugauucuucugcaugugaauauacaguuuuccucacaaccuuuauugaagagacugcccuuuccccauugucuguucuaguuguaugugauuaguugacuguaaauguguggaauuauuucugg

SEQ ID NO: 387990 - RNA, 63 nt, Homo sapiens
auguacauucugcagcuacuuuuuacaaauugaacauuuuuugagauaguuguagauguacau

SEQ ID NO: 387991 - RNA, 61 nt, Homo sapiens
gaagaggacaacuggaagcucaugccuggucucuccuggccccugcccuuugugccucuuc

SEQ ID NO: 387992 - RNA, 66 nt, Homo sapiens
gugucugucuuuugucuuugaaaugcugcuacugaaguggcacuuucaaaagagaagucaugacac

SEQ ID NO: 387993 - RNA, 68 nt, Homo sapiens
caugcacagaugaggagaggucucaggaagcuuuggcguggucugggaccuuaccucuuuguguaaug

SEQ ID NO: 387994 - RNA, 92 nt, Homo sapiens
auaguauuaaacuaaagugagcuguuuuuacuuucuguuauagauaaaauuucuuuuaggaagugauagguuauuggauuaguuaauacugu

SEQ ID NO: 387995 - RNA, 71 nt, Homo sapiens
ugggaaugaucacugugccuccugugaugugaaggaauuucuuggucauauugggccagucaguuaucuca

SEQ ID NO: 387996 - RNA, 99 nt, Homo sapiens
uucaaagcucucuuucagccgggugagguggcuuguuccuguaaucccagcacuuaugggaggccgaggcaggccaucgcuugagcccaggagcuugag

SEQ ID NO: 387997 - RNA, 88 nt, Homo sapiens
ggagaaucacuugaacccaggagguggaggcugcagugagccaagaucacgucauugcacuccagccugggugacagaguaagacucc

SEQ ID NO: 387998 - RNA, 69 nt, Homo sapiens
guucauucguguauucauucauucacucaaugcguugagugccuacuauguagaugcugcgaauguagc

SEQ ID NO: 387999 - RNA, 59 nt, Homo sapiens
auuucuuuucgugacuuauugcaguggcuaagaccugcaguacaauguggaaaaggagu

SEQ ID NO: 388000 - RNA, 55 nt, Homo sapiens
agguggcaugaagucuuuuugacgcugaagaauguaucaaaguccuuugcuaucu

SEQ ID NO: 388001 - RNA, 86 nt, Homo sapiens
uaaguucuaggguacacgugcacaacaugcagauuuguuacauagguauacaugugccauguugguuugcugcacccaucaacuug

SEQ ID NO: 388002 - RNA, 72 nt, Homo sapiens
cuauggccgaauuuuucuuuaauaagauggcauuuaagcugagaucuuauggagaaaggugguuggccaugg

SEQ ID NO: 388003 - RNA, 70 nt, Homo sapiens
ucucugugacuggagcuguaugugguuacauguggucacaagugcacauucaaguucacauacacagaga

SEQ ID NO: 388004 - RNA, 94 nt, Homo sapiens
uugugcuugcgauaguuuacugagaaugaugauuuccaauuucauccaugucccuacaaaggacaugaacucaucauuuuuuauggcugcauag

SEQ ID NO: 388005 - RNA, 83 nt, Homo sapiens
uacaucuguauauguuuucauaaggcuagaaggacuuuaaaauauuaucugauuuauuguuguggauagcaugugcuugagug

SEQ ID NO: 388006 - RNA, 56 nt, Homo sapiens
uaucuccuucuuccaagguuaugaucuuagaaacauagcugaugauguaggggaug

SEQ ID NO: 388007 - RNA, 72 nt, Homo sapiens
ugagugaaagaagcacuaaggaauguugaaguaaggcaaaauguugauggcuauagugcuugcuguuccuca

SEQ ID NO: 388008 - RNA, 58 nt, Homo sapiens
uuuggaaagggaggacccccuuugaguaccuaaugaaagcuguggguccucucccaaa

SEQ ID NO: 388009 - RNA, 79 nt, Homo sapiens
ggugaaaaugaaggguguaaaaugguacaacccguuuguaaaccaguuggguaguuucuuacaacucugcaauuucacu

SEQ ID NO: 388010 - RNA, 76 nt, Homo sapiens
gcccgccaccaugccuggcuaauuaguagagauggggguuucaccguguuggccaggcuggucucgaacucuuggc

SEQ ID NO: 388011 - RNA, 80 nt, Homo sapiens
gccuuuguccuaaugcagggcauggacuauguugacaaauuagugaacacagccugccucugccacagcgauccagaggu

SEQ ID NO: 388012 - RNA, 67 nt, Homo sapiens
uuugcuguuuggaggauucauuaaugaaauaaaguauaaugacaauaagacugccccagacagcaag

SEQ ID NO: 388013 - RNA, 57 nt, Homo sapiens
uuaguaucauccuucugcauucagcuacuugcugauaaaaaccagaggguguacuga

SEQ ID NO: 388014 - RNA, 76 nt, Homo sapiens
cuauggaugccuuucuaggaauacacuuuccgggguuccuuuuuucccugagaugugaauuucagagcuuccaaag

SEQ ID NO: 388015 - RNA, 57 nt, Homo sapiens
guaagugguagagcugggcuaugaauuuggauguuucuggcucacucauucacuuau

SEQ ID NO: 388016 - RNA, 74 nt, Homo sapiens
guugcagugagcagagaucgcgugauugcacuccagucucagugacaagagugaaacucugucucaaaaacaac

SEQ ID NO: 388017 - RNA, 61 nt, Homo sapiens
uucaguagucuccauagaaccgugacuuacaauuuaccuagguucaauaaagacuacugaa

SEQ ID NO: 388018 - RNA, 99 nt, Homo sapiens
gaggcgggaggaucacuugagccugggagguugagacugcagugagccgugaucacuucacugcauuucagccugggcaacagagugagauccugucuc

SEQ ID NO: 388019 - RNA, 55 nt, Homo sapiens
ucaugaaguaguuaacugguugcuuuguaauguugacuuuguaauugcuuuauga

SEQ ID NO: 388020 - RNA, 58 nt, Homo sapiens
cuuuguggcuccugcaggccauuuggauguauacgggcaggucacagggguuacaagg

SEQ ID NO: 388021 - RNA, 59 nt, Homo sapiens
cuaguaggcuguuuuaaggacuuuggcuauuuauccaaauguaaugaagaagccacugg

SEQ ID NO: 388022 - RNA, 68 nt, Homo sapiens
auauuuugauuuacuuccaugucucauaauauugugccagagucagguuggaaaguaagucaugauau

SEQ ID NO: 388023 - RNA, 55 nt, Homo sapiens
gagccugcagaucuuuuaaguguuaauguaaaacagacauugcauuuguaggcuu

SEQ ID NO: 388024 - RNA, 88 nt, Homo sapiens
ggagucucgcuguguugccuaggcuggagugcaguggcaugaucucggcucacugcaaccucugccucccagguucaagcgauucucc

SEQ ID NO: 388025 - RNA, 97 nt, Homo sapiens
agucauccuuacaucagcugguauuuguuagggaguugucaggugcaacuugcaaaaacaucuugucaaauguccacagcuuuccugugaggugacu

SEQ ID NO: 388026 - RNA, 72 nt, Homo sapiens
ugaaagcaugcuccaaggcauauggaauagggaagaguuaacccuaauuauugcauuggagaauguuucuca

SEQ ID NO: 388027 - RNA, 106 nt, Homo sapiens
guaccuagaguagucaaauuaugucuuucauagagacccagaaaguagaaugaugguuaucaugggcuuaggagauggaagaaugggauuauuuuuuacaggguac

SEQ ID NO: 388028 - RNA, 57 nt, Homo sapiens
uugagauggagucucacgcauugucgcccaggcuggagugccguggugccaucucag

SEQ ID NO: 388029 - RNA, 71 nt, Homo sapiens
cuucacaugaguuucccugcacuguuguucuuacuauugugucuaguggaacacaucuaaggaagcagaag

SEQ ID NO: 388030 - RNA, 90 nt, Homo sapiens
uauagcuaccacaaauaacacuguuuccagucaugaucaggaaucacauauuaagacauaacugcaaauugugcuauacuggguacugua

SEQ ID NO: 388031 - RNA, 122 nt, Homo sapiens
agauauuacuccuauuaucacuguggguguacacucugugauaugauucauaauaucuaaaagaagauauugcuccuaauaccacggugaguguacacacugcgauacuauuuguaauaucu

SEQ ID NO: 388032 - RNA, 57 nt, Homo sapiens
augcaaagugcuccagugaucuaagcaaaguaguuuguuuuggaguggacuuugcau

SEQ ID NO: 388033 - RNA, 123 nt, Homo sapiens
aauaucacaggguguacacacaugggguacacccacugugauacuaggagcuguaucuuucgaagauauuacaaauaauaucccaguggauguaccccauguguguacacccacugugguauu

SEQ ID NO: 388034 - RNA, 60 nt, Homo sapiens
ggcccugaaguguauaagcuaaaaugccuaugcuaauuagcaccacacacuuuagaggcu

SEQ ID NO: 388035 - RNA, 55 nt, Homo sapiens
guuucaggcaccauggucauugauaacaucuuaucaggagacaggguuuugagau

SEQ ID NO: 388036 - RNA, 55 nt, Homo sapiens
ggaauucucauuuugucccugguuugagaaaagguuagagagauauggggguucc

SEQ ID NO: 388037 - RNA, 64 nt, Homo sapiens
ucuguaacauccaccuucuggguuccagcgauucuccugccucccaaguagcugggauuacagg

SEQ ID NO: 388038 - RNA, 63 nt, Homo sapiens
ccuaagcucucaggguucaggaggcuacccaggaacaaugagcccuugugccugaagcuuggg

SEQ ID NO: 388039 - RNA, 79 nt, Homo sapiens
ucuuugagcaagcaaguucacugcuagaaauuuauccuaaggggacgauuuggcaauuuugaagaugccuucucaaaga

SEQ ID NO: 388040 - RNA, 66 nt, Homo sapiens
ucacaggguguuauuagaauuaaaucaaauaaugaauuaucacagugcucuguaacauccuguuga

SEQ ID NO: 388041 - RNA, 75 nt, Homo sapiens
gggugagcacagaaugcccugagugaggagcacaagucacuccaggccucagcuccgggcuccugagugucaccc

SEQ ID NO: 388042 - RNA, 55 nt, Homo sapiens
gugugggcauguguguguauacgcacagcugugcauguacacaguguacccacau

SEQ ID NO: 388043 - RNA, 57 nt, Homo sapiens
ccagauuagguagaaucuugaagccauugaagcaaggacuuuggguuuuaccuuugg

SEQ ID NO: 388044 - RNA, 87 nt, Homo sapiens
aaauuuaaggaggcaccuacucccagggucaugcaaaagccaacuuugcauuugcacaauccugugagugagucccuccuuaaauuu

SEQ ID NO: 388045 - RNA, 57 nt, Homo sapiens
gggucauggaugugaagcuagaacuccuugacaagcaggagcuuuauuuuauggccc

SEQ ID NO: 388046 - RNA, 61 nt, Homo sapiens
ggcaauucugggucaaagauuaugugcucuuaaauguuuuauagguuuucacagaauugcc

SEQ ID NO: 388047 - RNA, 70 nt, Homo sapiens
agacaaauggacugugauauuuacauguacacaguacagggaaacauguaacuaucugagccaugggucu

SEQ ID NO: 388048 - RNA, 104 nt, Homo sapiens
guugcaacucagcuucugccucuuuggucaauugcugcggggaaaucuaaugaagaaucuccuugcaggguuugauaaagauguuugagucgauaaguugcaau

SEQ ID NO: 388049 - RNA, 64 nt, Homo sapiens
uuuuaagagauugguauuuuauuagauugugaccaaauuaacuguaaguacuugucuuuugaag

SEQ ID NO: 388050 - RNA, 64 nt, Homo sapiens
uucaguuugccaguauuuuauugaggacuuuugcaucaauauucuucagucauauuggccugga

SEQ ID NO: 388051 - RNA, 116 nt, Homo sapiens
gggagacugaggcaggagaauugcuugaacccgggaugcggagguugcagugagccgagaucgcgccauugcacugcagccugggcaacaagagcgaaacuccaucucucucucuc

SEQ ID NO: 388052 - RNA, 78 nt, Homo sapiens
ucacugcauuacucaugagcauguaccuugugggaaacacaugaaucuauugugcucaugaacgaguaaugucaguga

SEQ ID NO: 388053 - RNA, 64 nt, Homo sapiens
uucuuugcaugaucucaaagucacugauaugcaggagcucaccaaguugagacugugcagagaa

SEQ ID NO: 388054 - RNA, 88 nt, Homo sapiens
ggagaaucacuugaacccgggaggugaggguugcagugagccgagaucgugccacugcacuccagcuugggugacagagugagacucc

SEQ ID NO: 388055 - RNA, 56 nt, Homo sapiens
cugacauuuuauccugaaggcauguugaggaaguaugagcuaggacagaaugucag

SEQ ID NO: 388056 - RNA, 100 nt, Homo sapiens
cccaacuaaaaaauacagauuguacagguugccagugaacucugauuagggauauuuauuaauuuacuuucauaggucacuguaaccucgugcucuuggg

SEQ ID NO: 388057 - RNA, 90 nt, Homo sapiens
uacucauauuucuggugucaagauuuguaggacagagauauaccaugauauagccuguggucucacaccuucauauuaugaugcugagug

SEQ ID NO: 388058 - RNA, 55 nt, Homo sapiens
ugggugugacugacuguguuucuggaugagauuaacauugaacuuggcacaccca

SEQ ID NO: 388059 - RNA, 129 nt, Homo sapiens
uuuugguuaaauauugauaacuuugcacagcagaaugcagaauguucauuuuguggguagauagcagacaacuaacagguagagugaagcuuuuuauauucugugaaagugcagaagucauauaucaua

SEQ ID NO: 388060 - RNA, 57 nt, Homo sapiens
gaaggucuuugaguuaguccugaaaaaggcacgguucagguacacugacaugccuuc

SEQ ID NO: 388061 - RNA, 82 nt, Homo sapiens
uccgcugcuucuugaggggaggugggcuuggugccuugcuccaagccucaguuucccucuguuaaaugggaaaaguaaugga

SEQ ID NO: 388062 - RNA, 64 nt, Homo sapiens
uuugguuugccaguauuuuauugaggauuuuugcaucaaaguucaucagggauauuggucuaaa

SEQ ID NO: 388063 - RNA, 72 nt, Homo sapiens
cagcucuaaacaauuaaaauaauggcauacuggaaaaaguucuugugcauguauauuaguucaccagggcug

SEQ ID NO: 388064 - RNA, 68 nt, Homo sapiens
gagcugaucuuuauguaaauucccuuaugcaaauaucccugagggaguuugcuuaccgaagucaguuc

SEQ ID NO: 388065 - RNA, 63 nt, Homo sapiens
gagcugagaucaugccacugugcuccagccuccagccugggugacagagcaggacuucaucuc

SEQ ID NO: 388066 - RNA, 76 nt, Homo sapiens
guucugggaagauucagacaugguccuugccccccagaguaaaggggggcaaggacucccugggucauucuaggau

SEQ ID NO: 388067 - RNA, 64 nt, Homo sapiens
ugaguguuuuuaucaugaaaggguauuagauuuuaucgcauccuucuguuuauggagaugcuca

SEQ ID NO: 388068 - RNA, 100 nt, Homo sapiens
ugcucggucacccaggcuggagugcaguggcacaaucuuggcucacagcaaccuccgcugccaggguucaagcuauucuccagccucagccucccgagca

SEQ ID NO: 388069 - RNA, 67 nt, Homo sapiens
uugaggaggcagucugucccuuagcagagcucgagugcugugcuaggagauccacugcucucuucag

SEQ ID NO: 388070 - RNA, 66 nt, Homo sapiens
gguaaauugugucuuguagagagauauuugauaguaaauuacauguuuuuaaaaagacaauuugcu

SEQ ID NO: 388071 - RNA, 64 nt, Homo sapiens
uggagauuucacuuucuggaugugcauguugaauuagcugcacgaaccuggaaugaaaacucua

SEQ ID NO: 388072 - RNA, 65 nt, Homo sapiens
ugaggaggcagccuaucccuuagcagagcucaagcacugugcuaggugauccacugcucucuuca

SEQ ID NO: 388073 - RNA, 56 nt, Homo sapiens
cucaggggacugauucaggggauggggugggguucccugaagaagugaccucugag

SEQ ID NO: 388074 - RNA, 63 nt, Homo sapiens
auaacuaggaaaccacauaacaaguuuuaaaggacacauuugguuaugucguuucuugcuuau

SEQ ID NO: 388075 - RNA, 74 nt, Homo sapiens
uuccacggacaacugcugacaagugaccaguggggauggacaccaccauggcauuugcagaguugaaaauggaa

SEQ ID NO: 388076 - RNA, 78 nt, Homo sapiens
auacuuguugagagaaaaaauuuauugguaaaacuaucucaaagcuuaucaaugaaauuauucuuucauuuugggugu

SEQ ID NO: 388077 - RNA, 82 nt, Homo sapiens
augaagucuuugcccaugcccauguucugaaggguauugccuagguuuucuucuaugguuuuuaugguguuaggucuuacau

SEQ ID NO: 388078 - RNA, 88 nt, Homo sapiens
augaccuuuacaauuuugaggaguauuuugucgaauguccuauauuugggauuuuucugagauuuuuucaugauuaggugaggguuau

SEQ ID NO: 388079 - RNA, 130 nt, Homo sapiens
cucccacaacacaugggaauugugggagcaacaagucaagaugagauuuggguggggacauagccaagccgugucaccacccaaaucucaucuugaauuguacucccauaauucccacauguugugggag

SEQ ID NO: 388080 - RNA, 90 nt, Homo sapiens
ugggcucucacaguuccuggcccaguugcgggugguaccguacauaaguacaguagauaugacugcagcuggaaggaacaagugcgucca

SEQ ID NO: 388081 - RNA, 88 nt, Homo sapiens
ggagaaucacuugaacccgggacugggagguugcagugagccaagaucaugccacuguacuccagccugggugacagagugcaacucc

SEQ ID NO: 388082 - RNA, 63 nt, Homo sapiens
ggcccugagacaggaaaaagcuuggcaggaucuaagaaccaagcauuuuggugcuccagggcc

SEQ ID NO: 388083 - RNA, 66 nt, Homo sapiens
cauagguagcauagcgggaauaucagugguacguuguuccucucuguauuauugcuauggccuaug

SEQ ID NO: 388084 - RNA, 59 nt, Homo sapiens
ugaagugaaugguaaguaugccaaagaugcuucuacaggauacugaucaucacucuuca

SEQ ID NO: 388085 - RNA, 68 nt, Homo sapiens
agaaggaaagggaauucuaucuuguuuaagucucuucuugaaauggaagaagucccuuuuagcuuucu

SEQ ID NO: 388086 - RNA, 57 nt, Homo sapiens
augaucauggaagugcacccauugggguuauauaaggguugugugcuucaugaucau

SEQ ID NO: 388087 - RNA, 78 nt, Homo sapiens
guucucuuuguucccuuuuuauaaugaagcaagaugauaaugaucacugggucaaaguagaaaacuaacaaacagaau

SEQ ID NO: 388088 - RNA, 55 nt, Homo sapiens
uugagauggagucuugcgcuguugcccaggcuguugugcaguggcacuaucucag

SEQ ID NO: 388089 - RNA, 76 nt, Homo sapiens
caauaugcuguuuugaauucucuagaacuuuguugcuccaaaaucaaauaucuucagauaaagggagaguauguug

SEQ ID NO: 388090 - RNA, 70 nt, Homo sapiens
aaugugaguuuuggggggcaauggguggaaugcuaugguuugaauguuuguccccuccaaagcucauguu

SEQ ID NO: 388091 - RNA, 80 nt, Homo sapiens
gaauggcacauggagaauguccaggccacuuauacauagauuuaaguaguuaggaacauucucucuugguuuaucuauuc

SEQ ID NO: 388092 - RNA, 59 nt, Homo sapiens
agggccauugcgguugggaggaggaaaccaucccuagaaucucccaaacagcaggcccu

SEQ ID NO: 388093 - RNA, 76 nt, Homo sapiens
ucagccucccuaaaguagccaggacugcaggcgugcaccaccacacccuggagucucguuauguugcccaggcugg

SEQ ID NO: 388094 - RNA, 96 nt, Homo sapiens
gagaggagaauugcuuaaacccggagucggagguugcagugagccaagaucgcaccauugcacuccagccugggcgacagagcaagacucugucuc

SEQ ID NO: 388095 - RNA, 71 nt, Homo sapiens
uagaagcagaacaagcuguugugaacuauacaucuaaugcuaauuaguauggcuuuagagcagugcuucua

SEQ ID NO: 388096 - RNA, 122 nt, Homo sapiens
aaagacaaauguuguauuauuccacuuuucuaaggcaccuagagucaucaaaucuauagagacagacuggacaaugguggcuaccagguccuggggaggguggugauuggggaguuguuuuu

SEQ ID NO: 388097 - RNA, 80 nt, Homo sapiens
caugguaacauucaccuguagucccagcugaggcaagaggaucacuugagcccagaaauuugaggcugcagugagccaug

SEQ ID NO: 388098 - RNA, 57 nt, Homo sapiens
aaauagagugcuucaucaguaguaagggugaauacugcuuccugaagcucuuuuuuu

SEQ ID NO: 388099 - RNA, 62 nt, Homo sapiens
auuucauaucccgagacuuugcugaaguugcuuaucagcuuaaggagauuuugggcugagau

SEQ ID NO: 388100 - RNA, 122 nt, Homo sapiens
uaaucugcaaaucuguguaucaucaugagauaaagcaaauaggacuauugcauuccaauucuguacagucuucuuaaugcuuuucauccucugugauuuauauuauucaagauuucauauug

SEQ ID NO: 388101 - RNA, 77 nt, Homo sapiens
ucuuccuaccuaaagaccauuaacugaaucucauguuuaucuacagagaucacagucuuugguuuuaggugugaaga

SEQ ID NO: 388102 - RNA, 57 nt, Homo sapiens
ucccuuuagaggaggcacaagggggaaacauuaaauuugugccaaacccuggaggga

SEQ ID NO: 388103 - RNA, 89 nt, Homo sapiens
gaagaaauagcuuauacuggugguucucauaauguggccccuggccuagcagcauaagaaucaccaaggaaucugguuuaaauuuuuuu

SEQ ID NO: 388104 - RNA, 125 nt, Homo sapiens
gguaccugcagugauguauauuuuaaggcuuagauucauuuuagcaaaaguuaguuuucuguaaauugcauucuagcucgcuguaaaaugaauucuaaguucucuuaguguuccacugcuguacu

SEQ ID NO: 388105 - RNA, 83 nt, Homo sapiens
caucuguuuccuucagcaauauauccccugggucuagcacaaaguagaaacccaauguguauuuguugaaugauggauggaug

SEQ ID NO: 388106 - RNA, 64 nt, Homo sapiens
gaauggcuuuaagagugucugaauuauuugaguuaucuuuuauuuugccacuuuugagccauuc

SEQ ID NO: 388107 - RNA, 59 nt, Homo sapiens
uccuagagucucauaacaagucaacugaauguuuauuguguuugaaugaggcuccagga

SEQ ID NO: 388108 - RNA, 57 nt, Homo sapiens
agcuacuguuagucuaguuaggaaaucaaggaauccagcacugagauggcagugguu

SEQ ID NO: 388109 - RNA, 80 nt, Homo sapiens
gacagagugaauauuauauaaggcugaauaauauucuauuguauauauacaucaugucuuguuguauuuauuuaccuguc

SEQ ID NO: 388110 - RNA, 92 nt, Homo sapiens
uucauacuuugguuagcucucuaaauucauuucagcucuggguaagguuaaauccuucucccaugauuuggauuuucagguuccccagugag

SEQ ID NO: 388111 - RNA, 81 nt, Homo sapiens
ucaaugugaauggccugggaugauguaaauaggcuauugguuuucugguagcauguauuuacacauuuaccaacucauuga

SEQ ID NO: 388112 - RNA, 78 nt, Homo sapiens
gugaggcccaagacacucucuucugcugcaacauugauauuuaauguugagggaagccagaggucugcacaaccucac

SEQ ID NO: 388113 - RNA, 60 nt, Homo sapiens
aaacuucugccugaacauccaagcauuuccuuacauccucuggaaucuaggcggagguuu

SEQ ID NO: 388114 - RNA, 90 nt, Homo sapiens
ugugucaggcagaaugcuauuagguuggugcaaaaguaaaaguuauuccacaauuacuuuugcaccaaccuacuauaugcugaggauaca

SEQ ID NO: 388115 - RNA, 77 nt, Homo sapiens
gggcuuguagaaacuugcacauucccaggauuccaaucuuugcgaugagacugguaauguguagggcucuagagucc

SEQ ID NO: 388116 - RNA, 99 nt, Homo sapiens
aaaaaguguuuccaacuuauugaguaaaaagaaugguucaucauuguaucucauggaguuaaaccuuucuuuugauugaacaauuuggaaacacuuuuu

SEQ ID NO: 388117 - RNA, 70 nt, Homo sapiens
uauuuguuagugaaugcaccacuucugacuacugcuccaagggguuagauggauaauucuuuaggaagug

SEQ ID NO: 388118 - RNA, 69 nt, Homo sapiens
cauuguuaagugacucaugacuguauuaggguccaggaggcacccuugguuucauagaucaugacagug

SEQ ID NO: 388119 - RNA, 56 nt, Homo sapiens
uaagguuuuugauaugcugcuggauuugguuugccaguauuuuauugaggauuuua

SEQ ID NO: 388120 - RNA, 66 nt, Homo sapiens
uugaguauuggacugguaucuuugcgacuucacaaaacugugccgacucaucauuucaaugcuuaa

SEQ ID NO: 388121 - RNA, 74 nt, Homo sapiens
ugagucauggagucagaagcuggcugggaccucuccgcucauuguauccaguguuuuugaauuccaggaacuua

SEQ ID NO: 388122 - RNA, 57 nt, Homo sapiens
guggagaaauaggaaugcuuuugcccuauuggugggaguguaaauuauuucaaccau

SEQ ID NO: 388123 - RNA, 67 nt, Homo sapiens
ugggcaaacuauagaauugucaaguugacaacuaaguuguuuucaacuaauuuuuuggugaggccua

SEQ ID NO: 388124 - RNA, 67 nt, Homo sapiens
augccuauguccugaaugguauugccuaggauuucuucuaggguuuuuaugguuuuagguauagcau

SEQ ID NO: 388125 - RNA, 61 nt, Homo sapiens
uggcuacagaaaguacuagugaaauauuagaucuaacucuauacuaauuuuucuguaguua

SEQ ID NO: 388126 - RNA, 77 nt, Homo sapiens
ugcucgggucuuuuuaaagcacaaguaaagaauacuuaaaacuaaauauugacuguacuugucuucaucccgcagua

SEQ ID NO: 388127 - RNA, 61 nt, Homo sapiens
uuguuauacaucugagucauguuugaucuugaauucauaauuaugaaacaguguagagcaa

SEQ ID NO: 388128 - RNA, 70 nt, Homo sapiens
aagucuuugcuauugugaauagugccgcaauaaacauacgugugcauaugucuucauaguagcaugauuu

SEQ ID NO: 388129 - RNA, 93 nt, Homo sapiens
ccuuuuugguuuuagaagagaaugacuuauuuucauauauauucauauaugugguuaauaggaauuugugaacuaaaacuuaaaacaaaaagg

SEQ ID NO: 388130 - RNA, 84 nt, Homo sapiens
ggaaugccagugagagagaaccguuuacucccuuggaaaagaggcugaagccagggagcaaaguggucuuucucaguguauccc

SEQ ID NO: 388131 - RNA, 86 nt, Homo sapiens
guacguuuguuugguaaaagaggacgugcuauuuuuuacaguuaaaucuaauucguaaguuguagaacguuuucuuaacaagguau

SEQ ID NO: 388132 - RNA, 103 nt, Homo sapiens
uucuuugacuauggguuaagagcauuauuuaguaauuuccauaaauugggauuuucuaguuauuguuauugauuucuacuuuaauugcacuaugaucagagaa

SEQ ID NO: 388133 - RNA, 81 nt, Homo sapiens
ucagauuuuaucguauaauugucaaagugccuggaugauauugauucuuugguauugguugagauuaacuuugugaucugg

SEQ ID NO: 388134 - RNA, 79 nt, Homo sapiens
ggaauuuggagcccuucaugggagaaccacagguagauugagucugcuugaaguuuucccaugacaggcuccuaauucu

SEQ ID NO: 388135 - RNA, 70 nt, Homo sapiens
uugggccucacugcauggccacccauguuaucgaucaguugaucacauacuggcacaucaggaccaccaa

SEQ ID NO: 388136 - RNA, 64 nt, Homo sapiens
auugugaauagugcugcaauaaacauacgugugcaugugucuuuagagcagcaugauuuauagu

SEQ ID NO: 388137 - RNA, 68 nt, Homo sapiens
cacaauccauucccagugguuagcucuggucuucaggagacuagaagcagcccucgggaauguucgug

SEQ ID NO: 388138 - RNA, 129 nt, Homo sapiens
uucuuucuaaugggagccaccacauugcguuccuuuaauuacacagugucaugucguguuccccugugaaaugacacggaggaacaugaggugaccugggauaacugugaugaauugcaucccgaagag

SEQ ID NO: 388139 - RNA, 59 nt, Homo sapiens
aggguguggcucugggggagggacccucucacgcacccuucaccauggcuccacacucu

SEQ ID NO: 388140 - RNA, 57 nt, Homo sapiens
ggggagcguauaggagcuuccagucucgcugagcugagcuaugccauauaugccccc

SEQ ID NO: 388141 - RNA, 57 nt, Homo sapiens
augauaucuggcaugaugguuuaucaaucucugaacagauauuaagcuagauauuau

SEQ ID NO: 388142 - RNA, 78 nt, Homo sapiens
gcuuuggcauagaggcucucaagcuuugcugcacauccaaaucaccugcagagcuuuugaaaaucucaauguccaggc

SEQ ID NO: 388143 - RNA, 107 nt, Homo sapiens
ugauggugagucauuuucacagaggccauugcaaaguuugccuccuguagcugauucugcagcacaggagugcugcuauuguuguuucauuuggugucuuaucauca

SEQ ID NO: 388144 - RNA, 59 nt, Homo sapiens
uagaccauucuauuuccuaugcgguggugauauucaaggcaggggauagaaauggucug

SEQ ID NO: 388145 - RNA, 62 nt, Homo sapiens
aggaacacuuacauacuguuagugggaguguaaccauuguggaagacaguguggugauuccu

SEQ ID NO: 388146 - RNA, 107 nt, Homo sapiens
uggauauggauaucuauaucuggauaucuauauguggauaucuauaucuggauaucuauauguggauaucuauaucuggauaucuauauguggauaucuauauauca

SEQ ID NO: 388147 - RNA, 67 nt, Homo sapiens
gaugcccaaacaaaagcauaucaauugaguacugccagcaguugauaugaauggcuguuuguguauu

SEQ ID NO: 388148 - RNA, 96 nt, Homo sapiens
agcuuugaaagucuucccugggcucuagaaacaccaccagguggucuaugcgggguacccuugaguguguuucaggcagggugauggguugagguu

SEQ ID NO: 388149 - RNA, 63 nt, Homo sapiens
augccagugcauggaucccaggggguugagccacuugaucccuggaucccauggaucuggcau

SEQ ID NO: 388150 - RNA, 96 nt, Homo sapiens
acacuuauucugauuuuuuucacuauaguuuugccuguucuaaaauuccucaaacuuugaauaaacugucaguggagaguaaguagaugagauugu

SEQ ID NO: 388151 - RNA, 78 nt, Homo sapiens
guaaacucuuaggaaaugugaacugaauuaauucacaggcaaaaccuuugaguuugugucacauuucuuuuagauugc

SEQ ID NO: 388152 - RNA, 59 nt, Homo sapiens
cucugucuuagcaucuuugcucagggaacucauccugagacaucucuccugagacaggg

SEQ ID NO: 388153 - RNA, 79 nt, Homo sapiens
uaaacuuuguaacucugaauacauccuacuugcaagucucuauguaauguaguauccggaguuugauagaauugguuug

SEQ ID NO: 388154 - RNA, 58 nt, Homo sapiens
guucucacuggacugugaaaauuugauagaauaaggguucaaaggucacaaugaggac

SEQ ID NO: 388155 - RNA, 63 nt, Homo sapiens
cgauaaguauuuggacuuuacugugaguaagaggagccacugagaguguuaaauacuuaauug

SEQ ID NO: 388156 - RNA, 64 nt, Homo sapiens
auugugaauagugcugcacuaaacauacaugugcaugugucuuuauagcagcaugauuuauaau

SEQ ID NO: 388157 - RNA, 70 nt, Homo sapiens
aaaguugagguggauacauuaaauaaugcucacuuuauuugagcaagauuuaagagucagccuugacuuu

SEQ ID NO: 388158 - RNA, 69 nt, Homo sapiens
guggcuuucaagugaccgucuuuugucauugaacuucaaguugacagugagaugucaugugaaaguuau

SEQ ID NO: 388159 - RNA, 60 nt, Homo sapiens
agcugggccccagccagcuaugugauuuugcccaggucauacaguauggagggcccagcu

SEQ ID NO: 388160 - RNA, 65 nt, Homo sapiens
ggguacaugugcacaacaugcagguuaguuacauauguauacauguggcauguugguaugcaccc

SEQ ID NO: 388161 - RNA, 63 nt, Homo sapiens
auuauaaaagaccaaaguggccaccuucaggagguucuuuaaggugcuaucugguuuuauagu

SEQ ID NO: 388162 - RNA, 66 nt, Homo sapiens
gcccaaccuccaaauaccauuauauugaagguuagcauuucaguauaugaaucuggggcagggggc

SEQ ID NO: 388163 - RNA, 113 nt, Homo sapiens
agaaacacagcuaauguauaacaguugagugcaugguugcuggagccaguuuggcugaauucaaauuguaacucugucacuuacuaguuuuaugaauuugccuaaguguuuuu

SEQ ID NO: 388164 - RNA, 70 nt, Homo sapiens
uaugagacuccugugcauaucuuggacugugugggccuccacacagucucacgguagcaucagccucaug

SEQ ID NO: 388165 - RNA, 82 nt, Homo sapiens
aguucuagggugcgugugcacaacgugcagguuuguuacauguguauaaaugugccauguuggugugcugcgcccauuaacu

SEQ ID NO: 388166 - RNA, 71 nt, Homo sapiens
cacagcacuaugcuuguguuggggcaguggauaaugagaaaucucuguaccucccacucaaguuugcugug

SEQ ID NO: 388167 - RNA, 59 nt, Homo sapiens
auauauacuugcauauacaccuaggaguagaauugcuagguuauuugguaaauauaugu

SEQ ID NO: 388168 - RNA, 60 nt, Homo sapiens
ugaguucaugcuuguaguucuagacuuaucccauguugaggaauagccuccuugaacuca

SEQ ID NO: 388169 - RNA, 78 nt, Homo sapiens
cuaacaccagugauaaggaucuccauucucacaaguucuauucaacauuguccuggagguucuugcaagggcaauuag

SEQ ID NO: 388170 - RNA, 60 nt, Homo sapiens
aaggaauggggaacggaugcuuacugagagcuacucugugccaaguacugucccauccuu

SEQ ID NO: 388171 - RNA, 96 nt, Homo sapiens
ggcaggagaaucacuugaacuuuggaggcggagguuguggugagcugagauagcaccauugcacuccagccugggcaacaagaaugaaacucugcc

SEQ ID NO: 388172 - RNA, 60 nt, Homo sapiens
ucuuuucaaguauucaagugauagagaaugugucugucugugaaugaacacuugaaaaga

SEQ ID NO: 388173 - RNA, 59 nt, Homo sapiens
ggcuuuggucacacaggggcaagcuggugcuucauuccagaccucucugaccccaagcc

SEQ ID NO: 388174 - RNA, 64 nt, Homo sapiens
aggauagagagaguuaguggcuuggcugcagccagauccaaggcacugauucuguacucagccu

SEQ ID NO: 388175 - RNA, 116 nt, Homo sapiens
ugucuuuuucuuuauaaauuaccagucucagguaugucuuuaucagaaaugugagaacagacuaauaugagggcauacucagugaggugaagaguuugugcaaaggcagagaggca

SEQ ID NO: 388176 - RNA, 112 nt, Homo sapiens
uaauaaaauauucauggucaaacuguucuugucuugauuagauaacaggaauaugaaaaugugcaucuguuuaguuaagacauagaauuuuuugcagauaaaugauuuauua

SEQ ID NO: 388177 - RNA, 61 nt, Homo sapiens
ggucuuugguucuguuuauaugcuggauuacguuuauugauuugcauauguugaaccagcc

SEQ ID NO: 388178 - RNA, 128 nt, Homo sapiens
auuauccaguuccaaagcuacuuccacauuuucagguaucuuuuuagcagugucccacuccuugguaccaauuuucuguauuaauccauucuugcauugccauaaggaaauaucugagacuggguaau

SEQ ID NO: 388179 - RNA, 82 nt, Homo sapiens
caguacucaaauaugacuuaugcccauuuaaauugaacaaguucaucagggacugaugggcauaagucauauuugaguacug

SEQ ID NO: 388180 - RNA, 80 nt, Homo sapiens
gugugauaaaaaguggauuuuauuugacaacuagcaagaaaaaucuucagugguugcacccagaugaagcuccaaagcac

SEQ ID NO: 388181 - RNA, 60 nt, Homo sapiens
uuaauaggagcaaagagaacgaggucuggaacccaggagauucacugggcucucuguugg

SEQ ID NO: 388182 - RNA, 58 nt, Homo sapiens
acaugcaaauucgugaagcguuccauauuuuuuuggcaaggcauguugguuugcgugu

SEQ ID NO: 388183 - RNA, 87 nt, Homo sapiens
gaguccugaugaggcuugguuguuugaaaguguguagcaccuacuccuuuacacugucucuugcugaccauguaaugugucugauuc

SEQ ID NO: 388184 - RNA, 129 nt, Homo sapiens
cuccugaucucaggugaucagccugccucggccucccaaagugcugggauuaggccaggcgcaguggcucaugccuguaaucccaguacuuugggaggccgaggcgggcagaucaccugaggucaggag

SEQ ID NO: 388185 - RNA, 61 nt, Homo sapiens
uuccuugugcaggguacuugccagcccuuuacaguauggcagcuguguccuucguaaggaa

SEQ ID NO: 388186 - RNA, 70 nt, Homo sapiens
ggaaagaaacuuaggcaauacuuccauugacuauugacaggccaaugauacuguucuaagauuuuuuucc

SEQ ID NO: 388187 - RNA, 103 nt, Homo sapiens
ugguuuacagaaauaacauugauuagugauugguauacauuguuaaccuguaggguaugggugauaguguccugugccacauuguuacguuaauuuauaacca

SEQ ID NO: 388188 - RNA, 83 nt, Homo sapiens
aaggaguuagaaaugcagcauuguuuuauacuuuucaaauuuuaaugucucaguaaaagacagcuggaguaucauagcugcuu

SEQ ID NO: 388189 - RNA, 62 nt, Homo sapiens
ccccaaaggggaugcucagugcaggggugaacacagccugcacugagacccucuuugcuggg

SEQ ID NO: 388190 - RNA, 104 nt, Homo sapiens
guauucuacauucuccauugugaagucuuucuaaaugucagucacauagagagcucaguggcagcgugaaagacuuuuucauuucuugcaggaugaagauaugc

SEQ ID NO: 388191 - RNA, 116 nt, Homo sapiens
uuggaagaagauucuggugaugaugugugggcaguccaguuuccauuccugagaagugucgacuuugaagagacagguucccacaaaauugccuagggaccaaguucucuuuccaa

SEQ ID NO: 388192 - RNA, 73 nt, Homo sapiens
gaucacaauuguacguaggagccaaaaagaacauggauaauacaugaaacagguuuguaugaauagugugauu

SEQ ID NO: 388193 - RNA, 67 nt, Homo sapiens
guuuuuagccaggcuuugguacacgguauuuggggagaucauauacauuaaugcucugguuagaggc

SEQ ID NO: 388194 - RNA, 73 nt, Homo sapiens
agugccgugggauauaaucaguccuguaaauucaucagaauguucuguugccugauuuuuuuuccauugcauu

SEQ ID NO: 388195 - RNA, 60 nt, Homo sapiens
gugagcacaugcuguuggaaaaaaugguacuaacagacuuguucaaugcagcauugccac

SEQ ID NO: 388196 - RNA, 71 nt, Homo sapiens
gguggggauggaguuauacuauuauaagauuuuuaugcuuggagugguauaauauuauuuugaaauacacu

SEQ ID NO: 388197 - RNA, 80 nt, Homo sapiens
guuggaaggcacaguuaaagggucaugugaccaaggagggaaaugccuuugucacaugacuuuuugguggccugauuagc

SEQ ID NO: 388198 - RNA, 102 nt, Homo sapiens
cugaggcagacaauugcuugaacccuggaggcggagguugcagugagccgggaucacgucacuguacuccagccugggugacagagugagacucuaucucag

SEQ ID NO: 388199 - RNA, 76 nt, Homo sapiens
uguaaugaucaaaucagaguaauugagaucuucaucaccucaaagcuuuaucuuuacuuugugugggaacauuaca

SEQ ID NO: 388200 - RNA, 58 nt, Homo sapiens
cauggaauguggaaugguaaguagaggucgaggucagauggcuacccgcauggccaug

SEQ ID NO: 388201 - RNA, 68 nt, Homo sapiens
ggcccaaaaugugcuuucuuucacacaguaccuaugagcuuggacuguggagcuagagaacaucugcc

SEQ ID NO: 388202 - RNA, 72 nt, Homo sapiens
gagcuagugcaauccuuugaugguaucacuacauucauauuuuucaugguaccagaauucuugcccugguuc

SEQ ID NO: 388203 - RNA, 65 nt, Homo sapiens
auugauuuuuacauguggugugaagaagaggucaaacuucauucuuuuacaugugaauauucagu

SEQ ID NO: 388204 - RNA, 83 nt, Homo sapiens
cucaaaccacucuuguuacuugccaagauucauaauugauagacaaugaugagaucuguaaagucugacaugguuauaaagag

SEQ ID NO: 388205 - RNA, 66 nt, Homo sapiens
uauuucuaguucuagauccuugaggaaucaccacacugucuuccacaaugguugaacuaguuuaua

SEQ ID NO: 388206 - RNA, 75 nt, Homo sapiens
gaagguuuuccuacaugcaguacauucaaaggguuucucuccauuuuuaauucucugauguagacuaaggccuuu

SEQ ID NO: 388207 - RNA, 77 nt, Homo sapiens
cagauuuuucaguggguucuuuaggacucugcgaugaaucuucuugcaaggugcucgaagggcucacuggaucucug

SEQ ID NO: 388208 - RNA, 71 nt, Homo sapiens
uauacauguaauugauuuuguguuagccagucaugucauguuugacuaacacugaaaaugaugcaugugua

SEQ ID NO: 388209 - RNA, 73 nt, Homo sapiens
agggaaccuuuguacacuguuggugguuauguuaauugguacaaccauuaugaaaaauaguguggaguuuccu

SEQ ID NO: 388210 - RNA, 69 nt, Homo sapiens
gaggaggaggagggggaggaggaggaagaaucuguauuuucuugcuuguuguucccuucauuuuuccuc

SEQ ID NO: 388211 - RNA, 79 nt, Homo sapiens
aggcuggagugcagugguuugaucacagcucacugcagccucgacuucccaggcucaggugauccucccacuucagccu

SEQ ID NO: 388212 - RNA, 58 nt, Homo sapiens
ugagacugagucucgcucugccgcccaggcuggagugcaauggcgugaucucagcuca

SEQ ID NO: 388213 - RNA, 102 nt, Homo sapiens
ugagacagaguuuuguucuuauugcccaggcuggagugcaauggcgccaucucggcucauugcaaucucugccucccggguucaagcaauucuccugucuca

SEQ ID NO: 388214 - RNA, 76 nt, Homo sapiens
acuuaguaguaucuuaggccuucaguggaaggaaacagcauguuccacgcccuguagcauccaagaagcugcaagu

SEQ ID NO: 388215 - RNA, 65 nt, Homo sapiens
uuaaccgagaugguuaaggaagauuccauaaaggaauuaaaauugaacuuccuuagucugguuaa

SEQ ID NO: 388216 - RNA, 62 nt, Homo sapiens
uagguagguggaaaaguaauugcgguaauggcaaaaaccgcaauuacuuuugcaccaaccua

SEQ ID NO: 388217 - RNA, 126 nt, Homo sapiens
cucacgucucaagauccaagcuucccaaaguaaagacucaugucccuuuuauaagggcuuacaacucuaagggguccaugugaaaaggucgugauacauugcacaagugggggcuaugugacugag

SEQ ID NO: 388218 - RNA, 66 nt, Homo sapiens
uguggcaguuuuaaauaugaaaacacccccuguauguauuggguguauuuauauuuaaacucuaua

SEQ ID NO: 388219 - RNA, 83 nt, Homo sapiens
ucucuugagcccaagaguuugaggcugcagugagcugugacuguacuacugcacuccaggcucaccugggcaacagaacgaga

SEQ ID NO: 388220 - RNA, 80 nt, Homo sapiens
gucucauugagugcugagcccacuuccuugcacacuccuccguggucccaggaaggauucggcauuucuaaacuggagac

SEQ ID NO: 388221 - RNA, 78 nt, Homo sapiens
ccugcagguaguuucugacuuuuacauaacuggcuucuucuaugaaagccaaguagagacucaagaaacuacagcagg

SEQ ID NO: 388222 - RNA, 58 nt, Homo sapiens
guauauggcauuuuguaagggcuugccacguaauaagccucuaacugaugucaaauau

SEQ ID NO: 388223 - RNA, 95 nt, Homo sapiens
gaaggaauacucacggcaguggugauaaccacuaucauagcuaccauuaaauuacucguugugacugguugucccacuuuccucagguuuucuuc

SEQ ID NO: 388224 - RNA, 58 nt, Homo sapiens
uugaggcuuuugaccucauguggccucuuuguucccugcagagguuaaugagcaucaa

SEQ ID NO: 388225 - RNA, 57 nt, Homo sapiens
ugcaugggacauagccaaguacgaggaucgauucugugcauuggaugucucccugca

SEQ ID NO: 388226 - RNA, 108 nt, Homo sapiens
augaucgccauucuaacuggugugagaugguaucucauugugguuuugauuugcauuucucugauggccggugauggugcgcauuuuucauguguuuuuuggcugcau

SEQ ID NO: 388227 - RNA, 66 nt, Homo sapiens
uuccuaagcuuucccaguggaacauguagucauuuauaacagugacuauacacuggggaaaaggaa

SEQ ID NO: 388228 - RNA, 80 nt, Homo sapiens
gggggcgagggauuggagagaaaggcaguuccugaugguccccuccccaggggcuggcuuuccucugguccuucccuccc

SEQ ID NO: 388229 - RNA, 84 nt, Homo sapiens
uggguauuugagauguggcaguuuaugaggucagaugguaacgauuucuggcucucaguugauuugcuauauuuuucugauuca

SEQ ID NO: 388230 - RNA, 88 nt, Homo sapiens
uacacagaaaguguucacagugguugccuuccagaagaacuuugaacuuuuggaaauguuuaaaucaugugcaugaaugaucugugua

SEQ ID NO: 388231 - RNA, 76 nt, Homo sapiens
guugaauacacuugcauuucagguaucccuugucuauaggcacaggugccggcacuuaccuaugcaagcuuuuaac

SEQ ID NO: 388232 - RNA, 107 nt, Homo sapiens
auuucaccaccaucauuaacacugccauugauacugucaucucugccacacgauuaauauugccaaugagacaguuagugcagccauguuaacacugccuuugagau

SEQ ID NO: 388233 - RNA, 74 nt, Homo sapiens
ggaagaugguaaaguagaaaaagacuaccuuugauguauguuaauuaguugaaagucugcuuuucuuuucuuuc

SEQ ID NO: 388234 - RNA, 61 nt, Homo sapiens
uugacuacaccaugccaggaacuuuuauaaguuaguuuucuugguuacuugguauaguuaa

SEQ ID NO: 388235 - RNA, 85 nt, Homo sapiens
gugaaauaagaaauggacauguuugacaagguuucauuuaaaaaaggaugagacccuguauguguuuaguuuucugcuccgucac

SEQ ID NO: 388236 - RNA, 93 nt, Homo sapiens
gucagguagaguguucuguagauauuuguuaggucugucaggucaagugucacauugaggucccaaauaucuuuguuaauauucucccuugau

SEQ ID NO: 388237 - RNA, 99 nt, Homo sapiens
cuuuuacagaugagaugaaguuaaggaucuuuagguaaagagauuaucauggauuaccugaguggauuauugauguuaucucaagcauccuguuaagag

SEQ ID NO: 388238 - RNA, 63 nt, Homo sapiens
auggaauguauagucauguagguuaacuuugugaguauacuguuuaaugucuguacagucuau

SEQ ID NO: 388239 - RNA, 108 nt, Homo sapiens
cagccggauggagcuggucauaguuuuggccucaggauuagugugcugugugcugucacagacaugucuuguggccguggcuuaugguagcagcugauagucugguug

SEQ ID NO: 388240 - RNA, 128 nt, Homo sapiens
ucuuuucugcauguagcgagcaucucauuuacuuuugguuauuugaaacuagcauacuuuugcauauguccaguuacaggaaaccaacuuacgagaguuaugaacugccugcccggagccagauagga

SEQ ID NO: 388241 - RNA, 66 nt, Homo sapiens
guauuucuaguucuagauccuugaggaaucaccacgcugucuuccacaaugguugaacuaguuuac

SEQ ID NO: 388242 - RNA, 104 nt, Homo sapiens
augaagagaaaaagaauguuuaucaaucuagggaaacuccaaaaagggaguuuuacuuaauuuggggauugccuauuaguaaaucaauucuaaaucuugguuau

SEQ ID NO: 388243 - RNA, 65 nt, Homo sapiens
agcccuaggucuuuuucauuucaacaccaaacucuacacuggcuuuugagaugaagacagggguu

SEQ ID NO: 388244 - RNA, 73 nt, Homo sapiens
uggccggccuguguggagcagguggcaugugugaccuugugcgucucugugcaccucuucacacagggagcua

SEQ ID NO: 388245 - RNA, 60 nt, Homo sapiens
gaucaauuggcugaagacacguuaccuuauuucuuggaucucuguuuugugccauugauc

SEQ ID NO: 388246 - RNA, 61 nt, Homo sapiens
aaugcuuauuuuuucagcuuugugggauuuaccaucuuccuaguaaggcacuauaggcauu

SEQ ID NO: 388247 - RNA, 71 nt, Homo sapiens
aguaugcagauuccauaguugcacucuggagccagaccaccuggguuccgauuccagcuaugacacauacu

SEQ ID NO: 388248 - RNA, 59 nt, Homo sapiens
uuugccucuuaaaauguucuggcauuugugcugauguugcagggcaaugaggagguaaa

SEQ ID NO: 388249 - RNA, 83 nt, Homo sapiens
uuugccccauggcuguuucugcaaugucuaguuaccuuucuuuccagagaagcuggacguuugugagagucauguuuugcaaa

SEQ ID NO: 388250 - RNA, 85 nt, Homo sapiens
gggggauaaagcaagucucuggccucaccccagagauucugacucagcagaugaggccuggaaauaugcauuuauaagguccccu

SEQ ID NO: 388251 - RNA, 70 nt, Homo sapiens
guuggugcaaaaguaauugugguuuuugucauuggaaguaaugguacacugcaauuacguuugcaccaac

SEQ ID NO: 388252 - RNA, 102 nt, Homo sapiens
gggcagcaaaaacauccauuccgcugcgcaacaguugucauuuuucuaacaucugaaaacuccagaaggagauggugauaaaugugguaccggauucugccu

SEQ ID NO: 388253 - RNA, 83 nt, Homo sapiens
ucugucuaguacugucagcaggguguugaagucucccacuauuauugugugggaguguuaagucucuuugaagugcucuaaga

SEQ ID NO: 388254 - RNA, 58 nt, Homo sapiens
gcucacuaaugaugauggugucuccaagaauuuaggacaucaaauugucauggugggu

SEQ ID NO: 388255 - RNA, 76 nt, Homo sapiens
aaucagaggaggauugacauguaggcagggaauggguaauauccggccuugagugcuauguuaagggcuuuggauu

SEQ ID NO: 388256 - RNA, 95 nt, Homo sapiens
gacagagucucgcucuauugccuaggcuggagugcaguagcaugaucucaucucacuacaaccucugccucccagguucaagcgauucuucuguc

SEQ ID NO: 388257 - RNA, 87 nt, Homo sapiens
augacugcaucucaacucaucacaucucaaucacccugucuccaaaugaggucacagcugagauccugagaguugggacuucagcau

SEQ ID NO: 388258 - RNA, 57 nt, Homo sapiens
ccagccuggacacugcucaugcucuccccugagggaaguggguaguuuucuggcugg

SEQ ID NO: 388259 - RNA, 64 nt, Homo sapiens
auggcauuuuuggcauuuaaauaugcauggauauauuuauuuauguauaugugguguuggccau

SEQ ID NO: 388260 - RNA, 78 nt, Homo sapiens
ggaaagcugagguaggaggauugcuuaaggccaggaguuugagaccagccugggcaacaucucuacacagaacuuuuu

SEQ ID NO: 388261 - RNA, 63 nt, Homo sapiens
augcagacacaaguuauaguaaguuuuguguggagauggaaagaauugugugugugugugugu

SEQ ID NO: 388262 - RNA, 70 nt, Homo sapiens
ggguaaacuccuaaaacaguaucuugacuuaaaaacauucaguuguauacucuauuuuagcagugagccc

SEQ ID NO: 388263 - RNA, 55 nt, Homo sapiens
caggaguucucucauuuauagauuauuacagcucugugagguagaggguuaccug

SEQ ID NO: 388264 - RNA, 62 nt, Homo sapiens
auuugugccucuggauauuuaaauuauucaaugacaaucuguuuagaugucuuugcauagau

SEQ ID NO: 388265 - RNA, 69 nt, Homo sapiens
ggaacccauucuuuuagcucugcaaggaaagcuagacuugggcuuuccauuguuggagcauaaaguucc

SEQ ID NO: 388266 - RNA, 59 nt, Homo sapiens
gauggcauuucuggaucugacagcucuuaucauaaugaagguuugaaagaaaugucauc

SEQ ID NO: 388267 - RNA, 113 nt, Homo sapiens
uuaauauacuacuuucuuuuagaauucagugucugcauuuggaacucagacaacaagucagaucauuuguguucuguaaugcagauauggagguagagacaguuuuaaguuaa

SEQ ID NO: 388268 - RNA, 71 nt, Homo sapiens
gcuugaacccggaggcagaguuugcagugagcugagaucaugcuacuguacuccagccugggcaacagagc

SEQ ID NO: 388269 - RNA, 76 nt, Homo sapiens
cugagcuuucagugagucauaaucuuuuugcugacggagggucuugcauggauguugauggcugcugacugaucag

SEQ ID NO: 388270 - RNA, 77 nt, Homo sapiens
uucagcaaagguaguuuccuucauguaccuuauuuuauggcagcugagauagaaaacauaggagaaccuuugcugaa

SEQ ID NO: 388271 - RNA, 71 nt, Homo sapiens
uuggacccucaguggauuagauaaugcacccccaccuugaggagggcaaucuacuucacugacucuaccaa

SEQ ID NO: 388272 - RNA, 73 nt, Homo sapiens
cucagugcaauguuaauuacuugacuugcuuguagaaaguccucagucaauauuugacauuguuacugcuggg

SEQ ID NO: 388273 - RNA, 83 nt, Homo sapiens
cagcuuggacagacugaggucucuguggcuuugcugacucugcuuaagcauucccaccgggucccagcucugcucuaggacug

SEQ ID NO: 388274 - RNA, 80 nt, Homo sapiens
ccuuguccucagaaaauggcuuuugcccuaaauggauuuuaaggauggacccaugugccaagagccucagagaggcaagg

SEQ ID NO: 388275 - RNA, 87 nt, Homo sapiens
gggagcuuguuaagaugcagaagcccagauguucugacucucuagguugggggaggauccagggcucugcauuuuaaacaagcaccc

SEQ ID NO: 388276 - RNA, 81 nt, Homo sapiens
agcuuuuccuaugaaagucaauccccaaguguccccuaaaacaugaggacaggggaauuuacugucauuaagcagagagcu

SEQ ID NO: 388277 - RNA, 69 nt, Homo sapiens
auaguuucuauuuuauauguacuauauacuguauucuuagaauaaagugagcuggagaaaagaaacugu

SEQ ID NO: 388278 - RNA, 75 nt, Homo sapiens
aaaaaucugguuuuugcuuggccauugcaauuaagugauuuucugcuuuugcagugucaauaauaauuaguuuuu

SEQ ID NO: 388279 - RNA, 60 nt, Homo sapiens
ggcuuccccucccuuggcucagugaugguaugugagggcugggcaaguaugugggaaguc

SEQ ID NO: 388280 - RNA, 111 nt, Homo sapiens
uucauuucaguucucuucugaugcagaauuauggugcuggcuuccauugaauggcaaaugggaugagaugguacacauacgauucugccucacugaugaauuuggggugga

SEQ ID NO: 388281 - RNA, 57 nt, Homo sapiens
agucuugggaauaauuuugaaaggcuccauguaaaauguagguuauuucccaagacu

SEQ ID NO: 388282 - RNA, 57 nt, Homo sapiens
guacagugcucacaaugagagcaggugaugaugucuguccuguguuaggcacugugc

SEQ ID NO: 388283 - RNA, 101 nt, Homo sapiens
gaugugcugcuggauucgguuugccaguauuuuacugaggauuuuugcaucaaaguucaucagggauauuggucuaaaauucucuuuuuuuguuguguguc

SEQ ID NO: 388284 - RNA, 88 nt, Homo sapiens
aggcaguggguucccuucuggcucaggguguaucuagaaauguuguauaguagcuauggccuagaaugggggccucaugacucugccu

SEQ ID NO: 388285 - RNA, 56 nt, Homo sapiens
guugguucuguuuaugugauggguuauguuuauugauuugcauaugucgaaccagc

SEQ ID NO: 388286 - RNA, 68 nt, Homo sapiens
aucuccugugcuuaauuuauaaauugaacuuuauaauuugucaacauauggauucuagcucaguaggu

SEQ ID NO: 388287 - RNA, 63 nt, Homo sapiens
gggagauauaugguucuaauaauaauuuacauuuaguagcuauguuuuugcuguguaucucuc

SEQ ID NO: 388288 - RNA, 92 nt, Homo sapiens
uuugucacccagacuggaguguagcggcaccuauuagucuuccaucucccuuuugcuaauaguaacugguugcucuucuuguuggucacaga

SEQ ID NO: 388289 - RNA, 74 nt, Homo sapiens
uccaaaacuuagccgcuuaagacaacuucuacuauuucacuucugugguucaagaauuaaaguggcuuuuuggg

SEQ ID NO: 388290 - RNA, 83 nt, Homo sapiens
gugcuuguggguagaauucaguggguggaugaauaugaaugggaaacauuacaucuucauuuccaaugacauccaacugguac

SEQ ID NO: 388291 - RNA, 70 nt, Homo sapiens
gucacuugagccugggaagcagagguugcaaugagccaagauugcaccauggcacuccaggcugggugac

SEQ ID NO: 388292 - RNA, 55 nt, Homo sapiens
acuguuuacauuuguucacuggguucuugugacccuagcacacauguagaauagu

SEQ ID NO: 388293 - RNA, 77 nt, Homo sapiens
aggcuggagugcaauggcgugaucuuggcucacagcaaccucugcuucccggccggguucaagccauucuccugccu

SEQ ID NO: 388294 - RNA, 69 nt, Homo sapiens
aagcaggacucucacucucccacuuagguccucccauuggacaaggugcugagcagagaauccuggcuu

SEQ ID NO: 388295 - RNA, 84 nt, Homo sapiens
guagguaaaugcugaguugaaaagauuaacaaauccagagucuucucuggaucuguucuauuuaucugagcuuuauggauuugc

SEQ ID NO: 388296 - RNA, 91 nt, Homo sapiens
uguguguguguguguguguguuggggcuaggggguugaguauguauggguuuuuaacuccauuuuagacccuagauaccaccacacccaua

SEQ ID NO: 388297 - RNA, 62 nt, Homo sapiens
uucugccacuuggaccauaggacccagcagauucaauggugcuugaggugugaggggcagag

SEQ ID NO: 388298 - RNA, 76 nt, Homo sapiens
uucacugagccagacuaagacaaaagugacucuuccucuacccccucucucacauguaaauucuguauucagugaa

SEQ ID NO: 388299 - RNA, 58 nt, Homo sapiens
uuuuacacuguugguuggaauguaaucuagaacaaucccuauggaaaacaguguggag

SEQ ID NO: 388300 - RNA, 82 nt, Homo sapiens
gucaucugagugguuaguggcuuuaaguacgauugaggaaaaguccugagaagaacaaagaccacuaaaauauaaaggugac

SEQ ID NO: 388301 - RNA, 93 nt, Homo sapiens
cuuugggacuugagugugcauagauuuugguauaugcaggggucuugggacaaauccccuucauauaccaaaggaugacuaguuaacccaagg

SEQ ID NO: 388302 - RNA, 57 nt, Homo sapiens
ugagucgagauugcgccacuguacuccagccugggcgacagagcgagacucgucuca

SEQ ID NO: 388303 - RNA, 82 nt, Homo sapiens
uauuggguucgugcaagagugauugcaguuuuuguaaugaaaauauggcaagaaccucaauuauuuuugcaccauccuaaua

SEQ ID NO: 388304 - RNA, 129 nt, Homo sapiens
cuacuuuuuucuuuaggacuuugacacucuaggaauaugguuaugccuaugcuuuuugugucuaaugcacaauuagcagcauuaugauauaucuuaaguugauuguuuaauauucaaauaucuagguag

SEQ ID NO: 388305 - RNA, 94 nt, Homo sapiens
ggauaagcuguugauagugguuguuggaguggcaauuuccaaaguuuuggagauuugugaaaccuaguaauucuauuuuauaacaagcuuaucc

SEQ ID NO: 388306 - RNA, 57 nt, Homo sapiens
gcccaguuuagagugcaauggugugaacacgggucauugcaguuucaacuccagggc

SEQ ID NO: 388307 - RNA, 84 nt, Homo sapiens
agaagugcuaaaugcaugaggcgaugugcuaauuaccuugauuugaucaccccauauugucuauguguauuggacuaguacucu

SEQ ID NO: 388308 - RNA, 91 nt, Homo sapiens
caugaugcacggucucuguauugccacaucucagaggcagagaccauuucuguuggaggagaugcugggagagcauagacccuucaucaug

SEQ ID NO: 388309 - RNA, 114 nt, Homo sapiens
caccacuggcuggcuggaauuccaagccagcaggucuuaacuugugaggugcuguggaaguggggcccacagaacaagacugcuuggcucccuggauucagcccccuuuaggug

SEQ ID NO: 388310 - RNA, 65 nt, Homo sapiens
uugugugugugugguaagaguaccuaaggucuacucucuuggcaaaucaccaguacacaauacaa

SEQ ID NO: 388311 - RNA, 60 nt, Homo sapiens
uauauucuggcuauagcaaaguaguuuaguugugaauauuauuugcauagugagaauaua

SEQ ID NO: 388312 - RNA, 66 nt, Homo sapiens
ugucauugguucuguuuaugugaugaauuauguuuauugauuugcauauguugaaccagccuugca

SEQ ID NO: 388313 - RNA, 59 nt, Homo sapiens
gagacguguaggaggcagagugaaaggcuuguuguuagagcugugcuuaauacacuuuc

SEQ ID NO: 388314 - RNA, 90 nt, Homo sapiens
gugggugacucaguccugcuggggacccuuugagagacacagagcacgugcuucugaaucguucccaugcaggacgggaggcaggcccac

SEQ ID NO: 388315 - RNA, 66 nt, Homo sapiens
guguagccuaaguguacaguguuuauaaagucuacaguaguauacaguaaugucuuaggcugucac

SEQ ID NO: 388316 - RNA, 97 nt, Homo sapiens
cccaaguguuuugaaugaguggaugagugaauuguucaacaggaggacacccacaaggggucccgauucugcgguccaguucaaccaagagccuggg

SEQ ID NO: 388317 - RNA, 64 nt, Homo sapiens
aaugccucagugguuucuuuaaaagcauacaguaugcugccuacaagagacucauuguagcauu

SEQ ID NO: 388318 - RNA, 60 nt, Homo sapiens
gagagaggaguauagcacugaccauauagccaggaucaguaaaugcuguucucuuuucuc

SEQ ID NO: 388319 - RNA, 62 nt, Homo sapiens
gucacugucuacuguaauagccccauuuaaaaaauguugaugugccuuagagagacggugac

SEQ ID NO: 388320 - RNA, 56 nt, Homo sapiens
cacaguucccauaacccguauucuggagguuagacagauaugggguuugaacugug

SEQ ID NO: 388321 - RNA, 77 nt, Homo sapiens
auaggcuuauugauggaagcacauauagguacauagaaacaugguacguguauuguuuucacaagaagaugcucuau

SEQ ID NO: 388322 - RNA, 58 nt, Homo sapiens
gauuccauugcgaauuuucagaucaacuuuucuaccucugaaauaguccauugggauu

SEQ ID NO: 388323 - RNA, 70 nt, Homo sapiens
aggguaaggaguagaauaguaaggcaguaauuaaugaguauuuugugccuggccaacuucuacuuacccu

SEQ ID NO: 388324 - RNA, 63 nt, Homo sapiens
uggcaagaagagcaugagaccacucuaguguauacccugcuaagucucagcucuccuaugcca

SEQ ID NO: 388325 - RNA, 81 nt, Homo sapiens
ugauuaugugcgugugugguuuuuuucuccaauaggcaauuauuuccagucagagaaggaaaccagugccuggcauucuca

SEQ ID NO: 388326 - RNA, 61 nt, Homo sapiens
guugaaucauuucuugucuucaguuuucucagaagaacugaaacaaugagagauacauaac

SEQ ID NO: 388327 - RNA, 75 nt, Homo sapiens
gcuuggugcucaaggaaauuuguaaaaaagaacaggaggccuuauugcaaacuuccuugggcagcauuuuagagc

SEQ ID NO: 388328 - RNA, 84 nt, Homo sapiens
gaggaaagcaaacauuguuuuaugaagugccugccucagauauguuuuugugugaucuucauggaaggugaaauugcuuuucuc

SEQ ID NO: 388329 - RNA, 64 nt, Homo sapiens
guaaucucaccuacuugggaggcugaggcgggagaaucgcuugaacccaggagguggagauugc

SEQ ID NO: 388330 - RNA, 83 nt, Homo sapiens
aggacagugccuaacauauguaaaggucuuugaguucuucaggaauaaauggcacuuuauaaauguuaaacuacaaguuuccu

SEQ ID NO: 388331 - RNA, 86 nt, Homo sapiens
uucccucugggccuggcacagugucagaaacacagaaggcaugaaaauguguguguuaugaaugacugagcaagugcaugagggga

SEQ ID NO: 388332 - RNA, 58 nt, Homo sapiens
caugugcacaacaugcagguuuguuacauauguauagaugugccauguuggugugcug

SEQ ID NO: 388333 - RNA, 64 nt, Homo sapiens
auugugaauagugccacaauacacauaugcgugcaugugucuuuauaguaguaugauuuacaau

SEQ ID NO: 388334 - RNA, 78 nt, Homo sapiens
ucuguuugaaucacaguuauuagagcagccacaggcagggccacgagcggaggcugcucaacugugaugacagccgga

SEQ ID NO: 388335 - RNA, 86 nt, Homo sapiens
uaaguucuagggugcacgugcacaaugugcagguuuguuacauagguauacaugugccauguugguuugcugcacccauuaacuug

SEQ ID NO: 388336 - RNA, 63 nt, Homo sapiens
auuggacuugaagaccuggcucuauggagagaggaaaaauuaucaggcuuuuugagugccaau

SEQ ID NO: 388337 - RNA, 56 nt, Homo sapiens
ugccaguguugccuuucacuagagauuacaucuaugacaaaaguacagcacuggca

SEQ ID NO: 388338 - RNA, 70 nt, Homo sapiens
ucuuuaaugagauuguuuguacuccacaguugacugacugucagaguauugaacagcucaucauaaaaga

SEQ ID NO: 388339 - RNA, 85 nt, Homo sapiens
uauuaaguuggugcaaaaguaaucacgguuuuugccauuacuuucaauggcaagaaaaugcaauuacuguugcaccaaucuaaua

SEQ ID NO: 388340 - RNA, 74 nt, Homo sapiens
ugauacugucuaccuggaguuagcacagaugccauggauugagaucuguguuuagacccaggguaggcccauca

SEQ ID NO: 388341 - RNA, 63 nt, Homo sapiens
gauauggucaaagucacaaucucacuuggcugaacucucaagcugugugacauugagcauguc

SEQ ID NO: 388342 - RNA, 121 nt, Homo sapiens
guuacuuuuuuuuuucauuuuuaggaaguacaucucagaaucuugauucuggaacagauuugucuuucccauggauucugaaugugcuuaauuuaaaagccuuugauuuuuacaaagugau

SEQ ID NO: 388343 - RNA, 59 nt, Homo sapiens
uauauuucauaacucaauccaggugucaaaauguacuuccuggguagugaugagacaua

SEQ ID NO: 388344 - RNA, 99 nt, Homo sapiens
ggccuuuggacccugggacucacacuggugcaaccacuccccgcagguucuuggccuuggacugagaguuccaccauugguuucccugguucugaggcc

SEQ ID NO: 388345 - RNA, 60 nt, Homo sapiens
ggagcugguaugaaaaucuccccaaagccagggcauugguggauugauauuaccauuucu

SEQ ID NO: 388346 - RNA, 62 nt, Homo sapiens
cucuuuugaugauuacguauuucuucuuccacuacugauaguguauguaguugucaagggag

SEQ ID NO: 388347 - RNA, 57 nt, Homo sapiens
aaguucuaucucuagacacagccagaaaggccuggcuagugcagugggguaugacuu

SEQ ID NO: 388348 - RNA, 56 nt, Homo sapiens
cccgggaggaaaaaguugcagugagcugagaucaugucauugcacuccugccuggg

SEQ ID NO: 388349 - RNA, 92 nt, Homo sapiens
uugauguauaaguuuauggcauuguuggugaugauauuugaugguuuuacaaguguguccuuaucuccaaacaaucaaguuuuauauauuaa

SEQ ID NO: 388350 - RNA, 58 nt, Homo sapiens
cuuugguguauuuucagagaccaaauuuuaggucaguggucucccagaaucacuaaag

SEQ ID NO: 388351 - RNA, 58 nt, Homo sapiens
cuuugcuucucaaauagugucaauuauuugccuuauugucauuuucugagaaguaagg

SEQ ID NO: 388352 - RNA, 98 nt, Homo sapiens
gguaaguucgaucuuuucuuggugucuuccagucuuuucuguuaugcacuagaugugcuugacuaggaggcuggaggaugaggcuggagagcucuauc

SEQ ID NO: 388353 - RNA, 62 nt, Homo sapiens
agcugccuggagucauuuccugcaggaauuccaugucuucccauugaaguguuucagcagcu

SEQ ID NO: 388354 - RNA, 100 nt, Homo sapiens
ugaggcuggagaaucgcuugaacccuggagguggagguugcagugagcgagaucaugccauugcacuccagccugggugacagagcgagacuccaucuca

SEQ ID NO: 388355 - RNA, 76 nt, Homo sapiens
uuuuucagcuacguuuuuagaaagacauuuuaaaauuauuuaugcuguuuucuggagauuucuguggguugaaaga

SEQ ID NO: 388356 - RNA, 66 nt, Homo sapiens
ucagagacuucccuagaacacauggagggauaucgucucuuacuuaauucaggggaaguauuuuga

SEQ ID NO: 388357 - RNA, 110 nt, Homo sapiens
acccaaucccaaaguuaacauacuguaugauuccauuucuauaacauucacgaaauagcaaaauuauaggaaugaacgauuuauugguugccaggcauuaaggaaggggu

SEQ ID NO: 388358 - RNA, 61 nt, Homo sapiens
ugauggcagugagucucuaguauuagugcacuacaccagaaauacagcccucacuccauca

SEQ ID NO: 388359 - RNA, 129 nt, Homo sapiens
gggaaguauuugucaaugguaaggacaucuuuuuggggugauaaaaauguucuaaaguugauaguguuaaugacuguacaacaguuuuaucaccccagaaagauguccauaccauugacaaauacuccc

SEQ ID NO: 388360 - RNA, 59 nt, Homo sapiens
uaagacuguguaauuuaugaagaaaagagguuuauuugauucauaguuauacaggcuua

SEQ ID NO: 388361 - RNA, 103 nt, Homo sapiens
cuccucagcccuuggguggucgaugggacugggcgcccuggagcaggggguggcgcuugucagggaggcucggccgcacaggagcccauggagggggugggag

SEQ ID NO: 388362 - RNA, 63 nt, Homo sapiens
ugagauuuggguggggacagaggcaaaccauaucauucuaccucugcuccccuacaaaucuca

SEQ ID NO: 388363 - RNA, 58 nt, Homo sapiens
cucuuuuguuccuaguuugauccuaauaauagaauacagauauaagguaacaaaaggg

SEQ ID NO: 388364 - RNA, 98 nt, Homo sapiens
gucaagagguuuucuuacuuuuuguuuguuugauaugggauaaaugagcauguucauaugcugaugggaauaaaccaguaagagaauaaaauguugac

SEQ ID NO: 388365 - RNA, 64 nt, Homo sapiens
ugucacuuugccuucuggacuuuggagucuuuccaggaagaaauaaguuuaggggaaagugaca

SEQ ID NO: 388366 - RNA, 72 nt, Homo sapiens
guugaauggaacucagucugucuguuuccucaucugcaaaaugggaacagcacacccgcugcuuccaucaau

SEQ ID NO: 388367 - RNA, 61 nt, Homo sapiens
uuucuaguuuaacugguacuucaagucuucauucccuaaugaaggcucagugucauggaaa

SEQ ID NO: 388368 - RNA, 55 nt, Homo sapiens
uuugaaacucccuuuugucuaguagacugugcccuacaguagaagggauuucaaa

SEQ ID NO: 388369 - RNA, 110 nt, Homo sapiens
gggucucuuaguccaggacuaggcuauuggacagcauuucuagacuugccucuggcccagggcaggucuagaaaugcuuuccaagagcuuaguccuggacucagggaccc

SEQ ID NO: 388370 - RNA, 72 nt, Homo sapiens
gcuuuguaucuccaugucuguaacacaugacuagaaugacuucuugucagugucuuaacagagauuagaagc

SEQ ID NO: 388371 - RNA, 60 nt, Homo sapiens
accgugguguccaugcauaaugguggccacaugcaauuauaugugucuaggagcuauggu

SEQ ID NO: 388372 - RNA, 55 nt, Homo sapiens
auaucaaggccauuuucuaaauucgggcuugaaauacuagaaguggcuuugauau

SEQ ID NO: 388373 - RNA, 64 nt, Homo sapiens
aggauguaaugcacucccaaagauccaagggaagcccuuggaauaugcaauugcauuucauucu

SEQ ID NO: 388374 - RNA, 60 nt, Homo sapiens
auuugucaauacacuucuuccaaguuuaaaagccagucauuggagggauuguuggcaaau

SEQ ID NO: 388375 - RNA, 97 nt, Homo sapiens
guauuccuagguauguuauucucuuaguagcaguugugaaugggaguucacucauaguuuggcucucuguuugucuguuauugguguaugggaaugc

SEQ ID NO: 388376 - RNA, 60 nt, Homo sapiens
uaugaaauaguagguuuggagagugugcagccccacauuaucaaggccacucauuuuaug

SEQ ID NO: 388377 - RNA, 62 nt, Homo sapiens
gcaguuuuauugguugaaaucuggcacagguaccacuggacuaagacugccaguagggcugu

SEQ ID NO: 388378 - RNA, 64 nt, Homo sapiens
uucaguuugccaguauuuuguugaagauuuuuccaugaauguucaccaagaauauuggccugaa

SEQ ID NO: 388379 - RNA, 76 nt, Homo sapiens
acugacuuaagcuacuuuggugguuccuuauuauuagguucuuuuugguaaguaccaauagcuuccauuagucagu

SEQ ID NO: 388380 - RNA, 76 nt, Homo sapiens
cagauggcugccaucuugcugaguguucacaugaccucuuuaugugagcacugaaagaaggcaagugaacuuucug

SEQ ID NO: 388381 - RNA, 74 nt, Homo sapiens
auaucagugauggcacugccuggcuucauggcacccugccgugcugcaugaagacaggcugugccuucuggugu

SEQ ID NO: 388382 - RNA, 93 nt, Homo sapiens
aguguaucuggacaacuuacucagcaucugaguauucacagugguaagaaacccuuugaaugcaacaaaugcgggaagucuuuuagguucauu

SEQ ID NO: 388383 - RNA, 58 nt, Homo sapiens
auacugcuguaaacaauuuaaauagguuuucaauuauuuuggauuguuagagcagugu

SEQ ID NO: 388384 - RNA, 64 nt, Homo sapiens
caaggaugucaguguaugagccccggaugagaacaccuggggcaggugccacuggcuggccuug

SEQ ID NO: 388385 - RNA, 59 nt, Homo sapiens
ugaucucaggugauucacccacuuuggccucccaaagugcugggaucacacugaaauca

SEQ ID NO: 388386 - RNA, 69 nt, Homo sapiens
uaacaaggaaacaacuauaauucauuuuaauaaggugcuuguuaaauacagcaugguguuucuguguug

SEQ ID NO: 388387 - RNA, 82 nt, Homo sapiens
gagauuuuuuaauuuaguauguacaguugucacauugucagagacuucauugagauaaagcauguacuguguuaagaauuuc

SEQ ID NO: 388388 - RNA, 114 nt, Homo sapiens
accuacauuggacuguaacauuagugauaaauagaucuguaucuugcugguuaagucacugagauguaagaauuuauuuguuacugaagaacauccuagcccaaaauuguaggu

SEQ ID NO: 388389 - RNA, 66 nt, Homo sapiens
cuuaggcucuuugaggugcccaguguccuacuaauaaauucucuucauuguuuaaaguagccuaag

SEQ ID NO: 388390 - RNA, 78 nt, Homo sapiens
gacuguccuagaagagacgaggaugggugaugucugggaucaggcuggauucucaugcugucuucugggguaacaguc

SEQ ID NO: 388391 - RNA, 110 nt, Homo sapiens
agcugcacugaagguauuggcuggacuaugguucuaugauucugaucuagagcuugggguucucucucagguuuacucaggucauuggaagaauucaguuccuugcagcu

SEQ ID NO: 388392 - RNA, 80 nt, Homo sapiens
uugguuagguaguggaaccuucuaaaugacgcacuaugugauuccugugucauauagaauguucuaugauucuuagccag

SEQ ID NO: 388393 - RNA, 57 nt, Homo sapiens
ugcagagcuguuaauggagcugaaucugauuuguguuuagccuguaagcacuuugca

SEQ ID NO: 388394 - RNA, 64 nt, Homo sapiens
gaauuucaaguaagaaagacaucaggugcaaaggcccuguggcuggggcuugcuugguggguuc

SEQ ID NO: 388395 - RNA, 105 nt, Homo sapiens
gcagagguuaaguaacacgcugaggacacaggcuucagagaggggugaagcuggccuuugaagcuagguuguccaucucuagaagccacacccuuaagccucugc

SEQ ID NO: 388396 - RNA, 67 nt, Homo sapiens
uugaggaggcagucugacccuuagcagagcuugaaugcucugcugggagguccgcugcucucuucag

SEQ ID NO: 388397 - RNA, 60 nt, Homo sapiens
uccacuggcucccaagguuaucaagagugugcucugcuuuaacccugaaggagcucugga

SEQ ID NO: 388398 - RNA, 106 nt, Homo sapiens
uuuaccugauuacguugucugauguuaacagcacuacguggggauccaggauuucacuuggauaccaugcagcaugcuuuagagucagagagguggaacuggugaa

SEQ ID NO: 388399 - RNA, 98 nt, Homo sapiens
gcaguggaaguggcugcaagagcaacaguggcaguggugggaccccuuugcccagcguccccugugcccuguguuccugaggcagccgacucugcugc

SEQ ID NO: 388400 - RNA, 55 nt, Homo sapiens
gauuagucgugacugccugaaucaaggguuggaucagguagugccaugauugauu

SEQ ID NO: 388401 - RNA, 84 nt, Homo sapiens
ggcuauuuucacuucuuuuguggaucuucuguugcuucgggccaucuggauguauacgugcaggucacaggggauaugauggcu

SEQ ID NO: 388402 - RNA, 56 nt, Homo sapiens
uugagggaggcagggcuugucuucugucuucagagcagggccugacaucuccccag

SEQ ID NO: 388403 - RNA, 55 nt, Homo sapiens
guuaaggaucuugagaugaggagaaccucuugacuuaucucaguuuguccuaaac

SEQ ID NO: 388404 - RNA, 63 nt, Homo sapiens
acacucacauacauacaauguccaauaugggguuucuucuuacaaaguauggaauguuggugu

SEQ ID NO: 388405 - RNA, 55 nt, Homo sapiens
caggcaccugccccaaaaugcagccuggcugcuuuuugguagagcaggugugcug

SEQ ID NO: 388406 - RNA, 69 nt, Homo sapiens
ugcaguuggauuuugguauauacggggguccuguaaccaauccccugccuauaccaggcguugacugua

SEQ ID NO: 388407 - RNA, 124 nt, Homo sapiens
aaaggcaauugccucaaguuaaggagauccaugaaagacugaggaauuggaucagauuaccucuuaaauuccuuccaaagcuuagcuuuaacguagacuccuccaaccugggggaauuuucuuu

SEQ ID NO: 388408 - RNA, 68 nt, Homo sapiens
agcaaguguguucauauauucauugucuggaauaguaccacagacuagacagaugaacagcacauguu

SEQ ID NO: 388409 - RNA, 129 nt, Homo sapiens
auuuacacaccauggcuuuuuaaaaggguuguccuuagauguggccuccagggauaguuaagcuguaaauggaaggcuucauauguaaagacauuuuccuuuugaccuuguuucuuauggugagugugu

SEQ ID NO: 388410 - RNA, 61 nt, Homo sapiens
uucacacauaaggaaucuucagggacuccccaaaauaaaugaggauauuuuuauguuugga

SEQ ID NO: 388411 - RNA, 112 nt, Homo sapiens
cagaucugcccuggcauuagauucucacaggagcgugaacccuauugugaacuaugcaugcgaggcaucuaaguugcaugcuccuuaugagaaucuaaugccugaugaucug

SEQ ID NO: 388412 - RNA, 77 nt, Homo sapiens
ucacuugaaccucggagguggagauugcagugagccaagauagugccauugcacuccagcccuggcaacaagaguga

SEQ ID NO: 388413 - RNA, 72 nt, Homo sapiens
cugaugggaaugaagagaaccuucccacaaaacucaaauucuggggagguaaguuuuucguuugccauucag

SEQ ID NO: 388414 - RNA, 78 nt, Homo sapiens
ccagcugaaaucugggguuguuuggggaguagcugggagacacgggagacuccccgagagcugcgggugagcugcugg

SEQ ID NO: 388415 - RNA, 56 nt, Homo sapiens
acaguauggugguagugacauucaacuauccacauauaucacaaccacagugcugu

SEQ ID NO: 388416 - RNA, 59 nt, Homo sapiens
gcuaguuuggggcaggaggaaggcaugaaucuagaaccuucuaccuguagguaauuggu

SEQ ID NO: 388417 - RNA, 71 nt, Homo sapiens
cuuuuugcuagagucuagggucaaacacgcucuuguguccucacuccucgcccuucacuccuggcagaaag

SEQ ID NO: 388418 - RNA, 128 nt, Homo sapiens
ucuaaauaaaggauuauauuagcuaaaaacgauugaacuugagauaugaguagguaccuuucuaguaucugguuuuguuacagguucuuaugguugauuuucugccuguaauguaguauuuuaauaga

SEQ ID NO: 388419 - RNA, 55 nt, Homo sapiens
uugagacggagucuugcucuuuugcccaggcuggagugcaauggcucagucucag

SEQ ID NO: 388420 - RNA, 76 nt, Homo sapiens
agcuccugaaguguucccaguugaaaugauuaguaacugccaguaacucucaagcacugaggaugggucaagagcu

SEQ ID NO: 388421 - RNA, 96 nt, Homo sapiens
gagguaaggaacuugccagaaguuaugcagcugaggguaguggagccaggauuugagcccaggcagccucacugcaguccuugaguuccuaaccuc

SEQ ID NO: 388422 - RNA, 113 nt, Homo sapiens
uuugaagggugugaugcuuggaagcauuuucugugcuuugaucacuaugcuaggacacauuaggauuggucauggaaauagaaugcaccaccaugagcaucaucaccuacaag

SEQ ID NO: 388423 - RNA, 97 nt, Homo sapiens
aguggauuauguaaaaacauaguuuuacugggaaaguacaggucacagaugccccugugucuuguuuuuucccaggcaaaacaaacauaguuucacu

SEQ ID NO: 388424 - RNA, 88 nt, Homo sapiens
gaaauuuuccugucuuagaauuucccucauguuuauugacaauggaaugggauuggaaauuuugcagaucugacuaaggaugaguuuu

SEQ ID NO: 388425 - RNA, 95 nt, Homo sapiens
gguuuuauugaaguagauuguaauaugcagaauggugcaaaaaguaaauguacagcucuauuaauuauuacaaacugaaucuuuauguaaacacc

SEQ ID NO: 388426 - RNA, 81 nt, Homo sapiens
uggaaugcaauaaagagugguucuauauguaauuggcucuacaccaucaccacuacaaaacggaagcacuuuugcagucua

SEQ ID NO: 388427 - RNA, 65 nt, Homo sapiens
aaagaucaucauagagggcaugagaaccaaauuauaauggacaucauaugaucagugaugacuuu

SEQ ID NO: 388428 - RNA, 110 nt, Homo sapiens
guuccaguaauguuaguuucgugguagguuaguuagaucauguuuggauaucuggacucauguuuaugaugcuuugauuuauacaacaacaacaaacuuuauugaugaac

SEQ ID NO: 388429 - RNA, 61 nt, Homo sapiens
ugcuuguaguaaggaagaaaacugucauaacacaaaggugauggcuucuuaauugcaggca

SEQ ID NO: 388430 - RNA, 122 nt, Homo sapiens
accaucauguaacuaccaaaucaggaaauacaggguuaguauugguaauuguaauggcaaaauauuuauuuacaagcacaaauuuaauccugucacuuuccugauuuaauuuugcuaauggu

SEQ ID NO: 388431 - RNA, 94 nt, Homo sapiens
aucagguguauauuuuacauuauagcccaucucaguuuggauuagccacaguucaaguguucaggagcuacagcuguggagagauacauuuggu

SEQ ID NO: 388432 - RNA, 64 nt, Homo sapiens
uuacagcugggugugucugguacauagucaucugcgacuaagugaucauuucauguagcuguag

SEQ ID NO: 388433 - RNA, 56 nt, Homo sapiens
uugagauggaguuucacucuugucgcccaggcuggagugcaauggcaccaucucag

SEQ ID NO: 388434 - RNA, 82 nt, Homo sapiens
aucaccugagaucuuauuagaaaugcagaaucgcagacuuguggaaucagaaucugcacuacuaacaagguccucagcugau

SEQ ID NO: 388435 - RNA, 58 nt, Homo sapiens
gucacaaggagccuaguuaaaucucauuuauaaugccuuaacuguggcuucuuuuggc

SEQ ID NO: 388436 - RNA, 74 nt, Homo sapiens
uggagccccugggaggaagggcggucgugaucuccauggaucaguggacuuagucuuucccccugcuggcucug

SEQ ID NO: 388437 - RNA, 66 nt, Homo sapiens
cuaugagucugcagaucuauuaaggggcccaccaaguacaccucuauggaauuccagacuauauag

SEQ ID NO: 388438 - RNA, 78 nt, Homo sapiens
cucaaacucuaaaaauucuuuaaaaaucuaggaaauauucuuuuuaacaugggucuuggcaaagaauuuuuggcugag

SEQ ID NO: 388439 - RNA, 96 nt, Homo sapiens
ggucagugaggcagaggaagcagcuggccugagcgguggcgggugagggcaacacgcugucacugggaggggcagcagucccugcuggaccugacc

SEQ ID NO: 388440 - RNA, 77 nt, Homo sapiens
ugacaauaguauagcaacuaauugacuucaucaaguggcuaccucugccaaauugauaguuuaauuaaugcuaguca

SEQ ID NO: 388441 - RNA, 55 nt, Homo sapiens
gauauugaaucccuacacugaucucaguagaaaucucagguagggcuucaacauu

SEQ ID NO: 388442 - RNA, 58 nt, Homo sapiens
uggagaugcacgagcagguggagcagcugaagcagagcauccaccgcgugcaccucua

SEQ ID NO: 388443 - RNA, 56 nt, Homo sapiens
caguugggaagacuuggagguuuaaacaaaaaguaauaucaccagucuuuccacug

SEQ ID NO: 388444 - RNA, 71 nt, Homo sapiens
ucuuuauagcagugccccaaacuccugguaccaauuuccuguauuagucuguuuucacguugcuauaagga

SEQ ID NO: 388445 - RNA, 101 nt, Homo sapiens
ugaggugagaggauugcuugagcucgggagguugaagcugcagugaaccgugauuguuucacugcacuccagccugagcaacagagugagacccuaucuca

SEQ ID NO: 388446 - RNA, 107 nt, Homo sapiens
gcugggggcuccugggcugugcauggagaaggggacugauucagagacaccaacaacucacaccuggacgugcucccaucuccaccugugcgcccaccucccucagc

SEQ ID NO: 388447 - RNA, 100 nt, Homo sapiens
uaggacaacauuucuuuuuguagcuuuugagauuuauauuucuguuggguguuaaaauuucaaaggugaguaacuauuuacaugagggccaauugguuua

SEQ ID NO: 388448 - RNA, 72 nt, Homo sapiens
cccaugccuaaucuggugugcucuggacuugcaggaucccuggaguugcagcuaccagacauggugcguggg

SEQ ID NO: 388449 - RNA, 95 nt, Homo sapiens
aaaucuguauaccuuuuauauucuuuuuugucuuacuguauuagcuaggacuucuaguacacuguuaaaaagaaguggugagaggggacauuuuu

SEQ ID NO: 388450 - RNA, 130 nt, Homo sapiens
gugguugugugugcccugagccuugagaucagccugaggucaggcuuaagaucuucucagauguuuucugagcaugcaucuugccugggccucaguguggcuuuuucaauuccccuguauauauaacugc

SEQ ID NO: 388451 - RNA, 79 nt, Homo sapiens
gccacuugaggaggcagucugucccuuagcagaguucaagcgcuuugcugggagaucugcugcucccuucagagauggc

SEQ ID NO: 388452 - RNA, 71 nt, Homo sapiens
aggcccuugcucaaaacagaaaauugucaucuuauaugucuuauuacauuuuccuguagggggcaaggccu

SEQ ID NO: 388453 - RNA, 64 nt, Homo sapiens
auugacaggagagcuuggagugaaagcgagggcuucugaugcaccauuccacuuuccugucagu

SEQ ID NO: 388454 - RNA, 73 nt, Homo sapiens
acauauaagggaucagugacagaauuaauuucugaguaaugcagaauaaacaucaauauugaccuuuguaugu

SEQ ID NO: 388455 - RNA, 71 nt, Homo sapiens
gcuuuuuuuuagaguaagauuuuaccacugugggaaaaacauagcuguuuaauacucuagguuaagagagc

SEQ ID NO: 388456 - RNA, 83 nt, Homo sapiens
gaugcucuucaguaggugaauggauaaacugugggucauccagacaauggauauuauucaucacuaaaaagaaaugagcuauc

SEQ ID NO: 388457 - RNA, 58 nt, Homo sapiens
cugugagaggauaucaacugauggcaugauugucacuuucaguauauuguuuccacag

SEQ ID NO: 388458 - RNA, 78 nt, Homo sapiens
ugccuugguagugauuaauaguacagguucuuagauuuagaccauuuaggcucuuuaucaguuaacucuugccaggua

SEQ ID NO: 388459 - RNA, 59 nt, Homo sapiens
uauggcuaagaaaguguggcagugggcucauucucauggaauucacuggucuuaccaug

SEQ ID NO: 388460 - RNA, 55 nt, Homo sapiens
gcaauuuccaagcucuaucccauuugguuuuccccccauggugcuugaaaguugc

SEQ ID NO: 388461 - RNA, 75 nt, Homo sapiens
cuguggacaacaggaguuuuguuagugcucuucagggucccggagaucauguacuagaacaccuuuccuccacag

SEQ ID NO: 388462 - RNA, 99 nt, Homo sapiens
cccugccuucugcuucagggaaaagucacacugggucggcuccaaagagugucccugcugauucacuguggcuuucucugaucauuagccaaaccaggg

SEQ ID NO: 388463 - RNA, 130 nt, Homo sapiens
ccucggccucccagagugcugggauuacaggcaugagccaccgugccuggccaauaacauauuuuuuaaaaugauaacagccaggcacgguggcucacgccuguaaucccagcacucugggaggcugagg

SEQ ID NO: 388464 - RNA, 70 nt, Homo sapiens
uguaucuauugauuuucaguguucagcugguuguaaaaaauaccagcugcauaaugaaaugucauuuaca

SEQ ID NO: 388465 - RNA, 55 nt, Homo sapiens
guggaaugcaguguugauucaacacucaauguugaaaucaaucaguguaauuuac

SEQ ID NO: 388466 - RNA, 81 nt, Homo sapiens
guagaccaccugcgauauggugaguaauaucacccuccucuccuucccuggauauuacagaccauaucgccggggguguac

SEQ ID NO: 388467 - RNA, 128 nt, Homo sapiens
auuagcugggugugguggcaggugccuguaaucucagcuacuugguuggcugaggcagagagcgauccucacaucucaaccucccaaguagcugggauuauaggcacgugccaccaugccuggcuaau

SEQ ID NO: 388468 - RNA, 80 nt, Homo sapiens
ugaucaaacccuugcugaggauuuggccauugacaugggcuucugguuaaucaggccguuuccuaagaagagucagguca

SEQ ID NO: 388469 - RNA, 84 nt, Homo sapiens
uuuguauaaugucuuuguagaggaauggcuccaccauagcaugcuagugaccuugcauucuucuacauagcucacguaggcaaa

SEQ ID NO: 388470 - RNA, 63 nt, Homo sapiens
gcacaguguuacuugauauauuuuaaacauuguuguuuugguuaagucagcaguaacaugugc

SEQ ID NO: 388471 - RNA, 55 nt, Homo sapiens
uuaugcagcaaagugcuugaaacauaaccaaugcuucacuugcacguuugcauag

SEQ ID NO: 388472 - RNA, 58 nt, Homo sapiens
cauggcuuuaagcaacaccaaggcaaguacaugggucugggugaugcauaaacccaug

SEQ ID NO: 388473 - RNA, 62 nt, Homo sapiens
gcugcuauugacauaagaaggccuauguaguccuauguaggccuuuuuaugucaauaucagu

SEQ ID NO: 388474 - RNA, 59 nt, Homo sapiens
ugugcaucagaaagacaugaguuucaaccccagauccuccugcugucuguuugggcaca

SEQ ID NO: 388475 - RNA, 108 nt, Homo sapiens
cccauugugagucauggaaucccucaucaugggucucaucaugggccaugggucccaccaugggucaugggagcccccaucaugagucauggaaucccucaucauggg

SEQ ID NO: 388476 - RNA, 127 nt, Homo sapiens
gcagacuggggaccgaagcuucugcucccauacacuagggcuccugcagaacauggugacuccaggauucuacaaucuggaccuaggguaaaacugggaagcaaauuuuggcugccauacugucugu

SEQ ID NO: 388477 - RNA, 57 nt, Homo sapiens
ccugaguaccugccagugagugaacucuccagagcuuucaucuggccguauuccagg

SEQ ID NO: 388478 - RNA, 59 nt, Homo sapiens
guggugcauccuugaguaagcuucauaauucaugugcaaagcuugguuuggaugaucac

SEQ ID NO: 388479 - RNA, 90 nt, Homo sapiens
accucucuagguaccucauguaaguggaaucgugcaguauuuguucuuuugugacugucuuauuucacuucgcaugguguccguaggggu

SEQ ID NO: 388480 - RNA, 82 nt, Homo sapiens
uugcugcacugagaugagagaaugcuugccugagauguguaguucugucggggguaucuuuuucucuucaucagccaaguaa

SEQ ID NO: 388481 - RNA, 87 nt, Homo sapiens
gguccaguccuggcauggaguggauggccccagagagcggagaggaccccgugccuggggccaucucacccacuguugagacaggcc

SEQ ID NO: 388482 - RNA, 74 nt, Homo sapiens
agucuucaaaaaguccauggaaaauguguauuaucaagaaacugugcauggauugcaaaaucuuuuugagggcu

SEQ ID NO: 388483 - RNA, 71 nt, Homo sapiens
gcucuccuucccuuuucuccacuaggccugagacucccuucccaugccaagagacaaagggaauccagggu

SEQ ID NO: 388484 - RNA, 67 nt, Homo sapiens
gccaaguuaguuauugugaauuuuaguuuucuuauuuaugaaauggggauuguaauacugaguuggu

SEQ ID NO: 388485 - RNA, 56 nt, Homo sapiens
auguaugccuauauagaaguauggaaauauauauuuauaaauguauagguguacau

SEQ ID NO: 388486 - RNA, 60 nt, Homo sapiens
gagaaugaugauuuccaauuucauccaugucccugcaaaggacaugagcucaucauuuuu

SEQ ID NO: 388487 - RNA, 78 nt, Homo sapiens
ucccagccuugagcuaguugcaccagcagggacugcagcuaacagggaccuuugagaguaccuggcccagggcuggga

SEQ ID NO: 388488 - RNA, 103 nt, Homo sapiens
ugauguguuuaacucauuuaaugccccuaucaacccuaugagguagguacaauuacuaucuccauuguccagaugaggaaauuggguaaguuaaacaacauua

SEQ ID NO: 388489 - RNA, 75 nt, Homo sapiens
ggcuuuggacuguaauuuuauaggcaucauuggcaaugagaugauaaccuaugaaaaaauuacagcucaggaguu

SEQ ID NO: 388490 - RNA, 94 nt, Homo sapiens
agcaggugucugagugagggacagcuaccucgaagcuggcucucaaagagcacaaacuugaaagcuaucucaaaucgcuauuuuggcaucugcu

SEQ ID NO: 388491 - RNA, 101 nt, Homo sapiens
cuucacaaaaaucuucaugagcugguacuaauauuaucauucucagcuuccuggugggguuugguaacgugucuaguuugcacagcuaggaagugguggag

SEQ ID NO: 388492 - RNA, 88 nt, Homo sapiens
ggccuuuacaugcacaaggaugcugggacagagcugcugucugugguguuuccaguucucugucacugaaucccugucacucagggcc

SEQ ID NO: 388493 - RNA, 89 nt, Homo sapiens
cacggcuccguuauugcuaacaucccuuauguacugauuaugugcacagcacauugcuaaguggguggguaauagaaggguaggcugug

SEQ ID NO: 388494 - RNA, 61 nt, Homo sapiens
gugagacugaguuucgcucuugucgcccgggcuggagcgcaauggugugaucucggcuuac

SEQ ID NO: 388495 - RNA, 55 nt, Homo sapiens
uuuaaugcacuaggugguguuccuuuucacccuaggagcacaggauaguauuaga

SEQ ID NO: 388496 - RNA, 84 nt, Homo sapiens
gagaaaaaauaucgaugagucacagaagguuuugaugaaagcacagauuuuauuccacuuagugacucauuugugacuuuucuu

SEQ ID NO: 388497 - RNA, 84 nt, Homo sapiens
guuguagccagagacugcauuugaugacguauggugaggccugcucuuaccuauauaaaucagauucagcucugugugcuagac

SEQ ID NO: 388498 - RNA, 100 nt, Homo sapiens
uugugacacauuuaaagugcuaccuaauccugugguagcacucaaaguccuugugacuuugagcucugaaugacaggcauaagguuaacacuggucacga

SEQ ID NO: 388499 - RNA, 56 nt, Homo sapiens
uguuuccucaugaugaugucauuuucauaaguuggagaucuucguguggggagaca

SEQ ID NO: 388500 - RNA, 86 nt, Homo sapiens
cagguggaauaguguauaaaugucaacuagaucaaauucauugauugugguuuucagcuuauauauccuaacuuaauuucuaccug

SEQ ID NO: 388501 - RNA, 79 nt, Homo sapiens
ccaagagucuccagaccuauagugaacuuugugagaacaagaaauaaacauuuguucuguuaaaucacugagacauugg

SEQ ID NO: 388502 - RNA, 66 nt, Homo sapiens
augaaaacuuuggcagggccuauguccagaaugguauuuccuagguugucuucccagaguuuuuau

SEQ ID NO: 388503 - RNA, 55 nt, Homo sapiens
agagggcuugauagcucuaagcagguaauccccauuaguggaaaucagguccucu

SEQ ID NO: 388504 - RNA, 78 nt, Homo sapiens
gucacccaggcuggaguucaguggugugaucuuggcucacuacaaccuuacaaccucugccucccaaguucaagugau

SEQ ID NO: 388505 - RNA, 64 nt, Homo sapiens
aggccuagguucucaaaccagcgucaccacuuacgaguucugugacuuugagcaacuugugccu

SEQ ID NO: 388506 - RNA, 59 nt, Homo sapiens
gugugguuuuuagauuucuacagucuuucucuuaagauuuaggaauauagaaaccaugu

SEQ ID NO: 388507 - RNA, 86 nt, Homo sapiens
ggagaaucacucaaucccaggcggcacagguugcagugagccgagacugcagcauugcacuccagccugggcgacagcgagacucc

SEQ ID NO: 388508 - RNA, 68 nt, Homo sapiens
gucugaaaaacauuacuugucacuagaagcaaaauugcuuuuagcagccaugacaaagaugggcaggc

SEQ ID NO: 388509 - RNA, 100 nt, Homo sapiens
gaggcaggagaacugcuugaacccgggagguggagguugcagugagccaagaucgcgccauugcacuccagcucuaggugacagagcaaaacuccgucuc

SEQ ID NO: 388510 - RNA, 55 nt, Homo sapiens
uugggcaauaggaagcagguggucaguuaggcaaucauggcaucuuauuguccag

SEQ ID NO: 388511 - RNA, 68 nt, Homo sapiens
acauagcagguguuccacaaauauugguuaccuuacugauaaccaauguaguugaauauuugcuaugu

SEQ ID NO: 388512 - RNA, 76 nt, Homo sapiens
uugcuugaaucuggcaggcagagguugcagugagcugagaucacgucauugcacuccagccuggcaauaagagcaa

SEQ ID NO: 388513 - RNA, 55 nt, Homo sapiens
uguuucucucauucuguaaucuccccugggauugcaauuuaggugagagaguaca

SEQ ID NO: 388514 - RNA, 72 nt, Homo sapiens
ggagggaguuuagaaagcaggacaaggaagaaacagauuucuuuuuggucuccaguuucugcugcuuccuuc

SEQ ID NO: 388515 - RNA, 129 nt, Homo sapiens
uccugaccucaggucaucugcccaccucggccucccaaagugcugggauuacaggugugagucacugcgccuggccaauaauccuagcacuuuggaagaccuaggcaggaggaucacuugaggccagga

SEQ ID NO: 388516 - RNA, 65 nt, Homo sapiens
uacacccacugugacauuagaaguaacaucccccuagggcaugaugaauaauaucacaaggugua

SEQ ID NO: 388517 - RNA, 103 nt, Homo sapiens
accaauaaauugagggcuaggaaagcuguguugugcccagcaucauagacagcacugucuauguguggaauuauaacaggcccaagaucucuaagugauuggu

SEQ ID NO: 388518 - RNA, 84 nt, Homo sapiens
cagcacgugcuacuggaagaauaaugggccuuagagcuagcaaaacugaguucaaauccugcuuaugcuaccaguugugugcug

SEQ ID NO: 388519 - RNA, 67 nt, Homo sapiens
uuagauuauugguguuuugcaaucuccaaugaauuaauggaucuaagcauugggcaucaaugacuga

SEQ ID NO: 388520 - RNA, 62 nt, Homo sapiens
ugggaaauuagauaguacugaaugguucuggagaaggaccaggccuguacucugaacuccua

SEQ ID NO: 388521 - RNA, 123 nt, Homo sapiens
cuguucacaccuaaugucuugaagaguagguagcagcagugugggcugaaccuaggccagcuugcuuagcgggucacccugcugugaaguccuggcagguguugguaauguguggaaaugcag

SEQ ID NO: 388522 - RNA, 100 nt, Homo sapiens
auguaguugagcaguuuugagugagucucuuaauccucaguucuaguuugauucccuguggucugagagacaguuuguuaaaauuucuguucuuuuauau

SEQ ID NO: 388523 - RNA, 67 nt, Homo sapiens
guugucguugugucauucuuaaaauggcugcaucuuauugcagugcauagaugugccacauuuuaau

SEQ ID NO: 388524 - RNA, 61 nt, Homo sapiens
agagguagaagauaggcuacagaggcuagcuaaaggccagcuguggaggacucugacuucu

SEQ ID NO: 388525 - RNA, 87 nt, Homo sapiens
ucucaugcugugacccucuagagggaagcgcuuucuguugucugaaagaaaagaacgcgcuucccuauagaggguuacccuuugaga

SEQ ID NO: 388526 - RNA, 98 nt, Homo sapiens
gcuuacuauggugagacuacuguagaagcuagggugccccagccaacccuggaggucuacagugcaggcaguuccaccaaugaagaaugguggugagu

SEQ ID NO: 388527 - RNA, 81 nt, Homo sapiens
cuguucccugcucacugccagcuggugucuauuuaggaaacugaaacuuaugcuuguugcagccugagccuaacagaacag

SEQ ID NO: 388528 - RNA, 68 nt, Homo sapiens
uaacaaaugcaccacucuggugcaggauguugauaguaacaaaugcaccacucuggugcaggauguug

SEQ ID NO: 388529 - RNA, 79 nt, Homo sapiens
gcuucaguaaaugugacagguauccuguguucucagcaacugcugcaggauucucuggcaucugcacuuuggcuggagu

SEQ ID NO: 388530 - RNA, 123 nt, Homo sapiens
guuaaugacccucagaacagccuuuaaccaaaggaggaugggauguaaaauucuguagccuaugggaggaugggauguagccuucuauuuuccaggugguaauucugggugguguucuuuagc

SEQ ID NO: 388531 - RNA, 55 nt, Homo sapiens
ucuucaugucuucaaugggggggguaacauauaccuucugagguugcuaugaagg

SEQ ID NO: 388532 - RNA, 111 nt, Homo sapiens
auauaauuuuguuuaaauugguaauucagugucugcauucuuauuguuagguaacugucuucacagcuaagccauguaagauacaguuuacuaagggaaauaguuuugugu

SEQ ID NO: 388533 - RNA, 79 nt, Homo sapiens
ccaugguaauacugugauaucgagcgauugucugggccauugucccacaucuugucuggguacacaguacugaacaugg

SEQ ID NO: 388534 - RNA, 60 nt, Homo sapiens
uuuauggcauagcggcauuggauacacauuuggguguagcuaaguuguauuugucaugaa

SEQ ID NO: 388535 - RNA, 89 nt, Homo sapiens
ggaguuucaaucuuguugccuaggcuggaaugcaauggcguggucucagcucauugcaaccuccaccucccagguucaggugauucuuc

SEQ ID NO: 388536 - RNA, 55 nt, Homo sapiens
auguagcucuguagguuauuucagaggucugccaacuaugaccugcggguuauau

SEQ ID NO: 388537 - RNA, 72 nt, Homo sapiens
uggugcuucuacacuggaggagagcuguugcuauucucaaguugcaagcuuccucucagugacugugcauca

SEQ ID NO: 388538 - RNA, 71 nt, Homo sapiens
cugauuugugaucuucagaaaguggcuuaaucacacugaaucuuagcuuacuugcuuggagaauggauuag

SEQ ID NO: 388539 - RNA, 87 nt, Homo sapiens
uauuugaacuuuggguucuuggacuaguucaacagcauuucaccuuaagagcuguuuuucacuagaccaacgcucaacccucgagua

SEQ ID NO: 388540 - RNA, 103 nt, Homo sapiens
uugaggcaggagaaucgcuugaacucagagggcggaaguugcagugagcugagaucacgccacuguacuccagccugggugacagagugagacuuugucucaa

SEQ ID NO: 388541 - RNA, 62 nt, Homo sapiens
gguggaggcuuugacuggguaccaaggagguucucucauuugguggcuacagaguaaccacc

SEQ ID NO: 388542 - RNA, 72 nt, Homo sapiens
cuaaccaagauggcuuuggucucccagugauuuauuuguuaaguccuuggaguuccaaagccaauugcuuag

SEQ ID NO: 388543 - RNA, 78 nt, Homo sapiens
gagucacguuaauucucuugguuuugcugcaauguauuaugacucugucaggaggguccagagaaaacaaugugauuu

SEQ ID NO: 388544 - RNA, 129 nt, Homo sapiens
gcaugcaccgcacuuaguaaggggcauguggucucagaaauugaaugguaacucaugaaguaguauacaguguuguuacugcauaauuccugggaagauacauccccuauacuguuagauuuuucaugc

SEQ ID NO: 388545 - RNA, 67 nt, Homo sapiens
uaacauugucuugcuuaguuuuguauccucuguauuuacuccagggcuuggcaaagggcauguguua

SEQ ID NO: 388546 - RNA, 60 nt, Homo sapiens
guccuugaggcuuugacuguggcauauuauguguucaguuaacuagcuucaauucuggau

SEQ ID NO: 388547 - RNA, 55 nt, Homo sapiens
guauaugccucaguuauagcacuuaccacguggcauuauaauuguuugcauauau

SEQ ID NO: 388548 - RNA, 76 nt, Homo sapiens
gugugcacaugugcaugagcacauacgugcaugcacacacaugcacacacaugcgcacaugcauacacacgcgcac

SEQ ID NO: 388549 - RNA, 62 nt, Homo sapiens
gugcugggguagacagaccauggauucacaccacuugcaucauggacugugugacccugcac

SEQ ID NO: 388550 - RNA, 64 nt, Homo sapiens
aguauggauuuuggaauauguggggauucuggaacccuucccucacauauaccaagggcugacu

SEQ ID NO: 388551 - RNA, 85 nt, Homo sapiens
gauguguuugacauaguuucugaaauagaccacagcauaugccacuugguuucuauuuuaagauagguauguugacagaggcauu

SEQ ID NO: 388552 - RNA, 56 nt, Homo sapiens
auugcuuucuaucugugguaccuucccagaugguucacagcuaaaaugaaaguagu

SEQ ID NO: 388553 - RNA, 59 nt, Homo sapiens
guuguuggauuugguuagcuaguauuuugauaaagauuuuagcauccauguucaucaac

SEQ ID NO: 388554 - RNA, 66 nt, Homo sapiens
auagaugacaguuaggaagcugguggagcuuuaaugcuugcuuugcuuuguugauggugagucugu

SEQ ID NO: 388555 - RNA, 66 nt, Homo sapiens
augagguuugggugaggacacagagccaaaccauaucauucugccucuggccccuccaaaucucau

SEQ ID NO: 388556 - RNA, 71 nt, Homo sapiens
uggguauaggugaugaggaaggagaauucaaagacgaauuuugaauguuugcagcuuauaccauauaccca

SEQ ID NO: 388557 - RNA, 55 nt, Homo sapiens
gaagauggaggcugcagugagcugagauugugccacugcacuccagucccgucuc

SEQ ID NO: 388558 - RNA, 102 nt, Homo sapiens
ugagauggaguuucauucuuguugccuaggcuggagugcaguggcgcgaucucagcucacuacaaccuccaccuuacgcauucaagcgauucuccugccuca

SEQ ID NO: 388559 - RNA, 71 nt, Homo sapiens
ggucucugguuuuccuagggagaggacccugcggccuuccgcaguguuugugucccuggguacuugagauu

SEQ ID NO: 388560 - RNA, 76 nt, Homo sapiens
uuuuuucuauaucgauuucauugccucugaggucuguacuucucucuguccugggaugaaguugauguagaaagaa

SEQ ID NO: 388561 - RNA, 66 nt, Homo sapiens
ugucuccuggauauguaaaaauuauaucugaguugaacuacaguuuauuuauauauccaggcagca

SEQ ID NO: 388562 - RNA, 80 nt, Homo sapiens
ugaugaggugagggguuaggugcuauagguggccaaggaacagaaugaaacuaaugggauccaaagaccucaccucaucg

SEQ ID NO: 388563 - RNA, 109 nt, Homo sapiens
uaguuuaguuaauauuauugugccaauguuaacaucuuaguuuucauaaauguaucauaguuauguaagauguuaacauugugaagagaugccaugauauucugugcug

SEQ ID NO: 388564 - RNA, 95 nt, Homo sapiens
aagucgggcaugcauagugggaugcucugugaaagaaaguugaaaaauacaguccauggagcaaggcucauuguuacuaggcugagcccagacuu

SEQ ID NO: 388565 - RNA, 104 nt, Homo sapiens
uaucuggaauccuccgcaugcuaucagauugcugccaucugcuugagccacucugccugccaagcagacugcuuccagucucaugauguggggagcucugggua

SEQ ID NO: 388566 - RNA, 79 nt, Homo sapiens
uuugaacaaguuuuccuuuacugaguaccaaaccauguaaugauaacuuggacuuuaauaaaagggaaaugaguucgaa

SEQ ID NO: 388567 - RNA, 64 nt, Homo sapiens
uucagguugccaguauuuuauugaggauuuuuguauugauguucaucagagauacuggccugaa

SEQ ID NO: 388568 - RNA, 121 nt, Homo sapiens
gaaugucaguuugugcugucagucuuuuugauguagauauuuuagggcuaugaacuuuccucuuagcaccaccguugcucuaucccagggguuuugauagguugugucacuauugucauuc

SEQ ID NO: 388569 - RNA, 75 nt, Homo sapiens
acccuaucucugcaguggucucacuggcaaaguacccauaucuuugcagugguuucacuggcaaauaauuagggu

SEQ ID NO: 388570 - RNA, 69 nt, Homo sapiens
uuucucagaugucuuacccauguugaaaacauuugugugaucacacuggguaacauaucuguuaagaga

SEQ ID NO: 388571 - RNA, 87 nt, Homo sapiens
ucacuauguugccuaggcuggagugugguggcuauucacaggugagaucauagcacacuauagcuucaaaccccugggcucaaguga

SEQ ID NO: 388572 - RNA, 55 nt, Homo sapiens
ugacccaccuauuauuuuuaaaaugugauuguuuuggaaacaccuggugagguua

SEQ ID NO: 388573 - RNA, 84 nt, Homo sapiens
cuauuaggcuggugcaaaaguaauugugguucuugccauugaaagugauggcaagaacugcaauugcuuuucacaaccuaauag

SEQ ID NO: 388574 - RNA, 67 nt, Homo sapiens
cagcauguuauuuccuuuacauguccuaugaacaagaauuuucauuuuguaaaggagauugcagcug

SEQ ID NO: 388575 - RNA, 90 nt, Homo sapiens
uccuggucucugaauaggcucuccugcugucucuggucugcccaucccacucaccccugagacuugagggggcuucucugagagccagga

SEQ ID NO: 388576 - RNA, 65 nt, Homo sapiens
uuucuauucuagguuguggaggggauaagauacucagaggccaccuuucacguaggagaaagaag

SEQ ID NO: 388577 - RNA, 82 nt, Homo sapiens
aguucuaggguacaugugcacaacgugcagguuuguuacauauguacacaugcgccauguuggugugcugcacccauuaacu

SEQ ID NO: 388578 - RNA, 63 nt, Homo sapiens
gaucacauggccagguaguaaucaguuucacacucaggcagaugaacugcagggccugugguc

SEQ ID NO: 388579 - RNA, 77 nt, Homo sapiens
ucaccugauccugggaggcagaaguugcagugaacugagauagugccacugcacucuagccugggagacaagaguga

SEQ ID NO: 388580 - RNA, 68 nt, Homo sapiens
uguuuuugucuggauucagacaugauuauggaaugaucuugucauggucuugauccauuauggaaaca

SEQ ID NO: 388581 - RNA, 62 nt, Homo sapiens
gagacauugagaguuucgcugggauuaagaccacauggacuuaacagcuccacuccauucuc

SEQ ID NO: 388582 - RNA, 95 nt, Homo sapiens
gcaugggucauggugcacgaucuacauuuaacucuggcuacucagggcagucaugggagagaugugaucggggagugaugcaaucugauuuaugc

SEQ ID NO: 388583 - RNA, 74 nt, Homo sapiens
uaguuucaaagaguagacgcuaaacagguuucuuugcugcuggaacccuguaggacuauucuaauccuaaacua

SEQ ID NO: 388584 - RNA, 128 nt, Homo sapiens
gaguaaaguaggagaagaagaaaacugggauagaagguggaucuugaugcauuugcuugaucagaagcccaaauggcaccggcucuucccucuucccagaaaaccugacuuucaaacaccacuggcuu

SEQ ID NO: 388585 - RNA, 64 nt, Homo sapiens
auugugaauagugcugcaaucaacauacaugugcaugugucuuuauagcagcaugauuuauaau

SEQ ID NO: 388586 - RNA, 85 nt, Homo sapiens
ccaccugucaauguggguuuccuaagcaucagugggaaugaggaccccauguacugguguaugggaggucccaaggccacagugg

SEQ ID NO: 388587 - RNA, 88 nt, Homo sapiens
guuuuguccucagauacuggccuggagcugugaggaccugcuugguguuagauuuuacuacaguaggcucagugucgggguccaagac

SEQ ID NO: 388588 - RNA, 80 nt, Homo sapiens
ccuuuuucuaagauacauacagucaacugauagaggcaagaccgucuuuaacagugucaaucuguaguagagaaagaagg

SEQ ID NO: 388589 - RNA, 59 nt, Homo sapiens
gaguaacagcauaaauuugugacuuguuguacuggauaauucaggaguuaguugugcuc

SEQ ID NO: 388590 - RNA, 129 nt, Homo sapiens
acagagaacagugagcggagagaaaaagucuccuuaacccagaguuccuugucuuucaccaguggggacuuccaugacuuggcuagacugaggggucuggggugugacuuggcuguuucugcucucugu

SEQ ID NO: 388591 - RNA, 75 nt, Homo sapiens
gucacucguuaguuuucuuguuuauguucugugucuuuggcuagaauguaacucuaugaaggcaggauuuguggc

SEQ ID NO: 388592 - RNA, 75 nt, Homo sapiens
cuggauucaauuugccaguauuuuauugaggauuuucauauugauguucaucagggauauuggcccgaauuucag

SEQ ID NO: 388593 - RNA, 68 nt, Homo sapiens
guacccuauggauauagaugaauggcugcauuuuguugaggauuuuugcaucuauguucaucagggac

SEQ ID NO: 388594 - RNA, 92 nt, Homo sapiens
uuuuauuaugugugagauggugugcuaggaaauguauuaaaaucaccuacuuuucuguauuuucuauuagaccauaacauuuuugaauaaaa

SEQ ID NO: 388595 - RNA, 56 nt, Homo sapiens
guugguucuguuuauaugcuggauuacauuuauugauuugcauauguugaaccagc

SEQ ID NO: 388596 - RNA, 90 nt, Homo sapiens
uggcugggucaaauguauuucuaguucuagaucccugaggaaucgccacauugacuuccacagugguugaacuaguuuauagucccacca

SEQ ID NO: 388597 - RNA, 87 nt, Homo sapiens
gaaauucaagaugagauuuggguggggacacagccaaaccauaucauucugcucuggccccucccaaaucucauguacucacauuuc

SEQ ID NO: 388598 - RNA, 78 nt, Homo sapiens
gcuuacucugugcuaggcaaugugguagauauuugaaauacaaacgugaaccaggcacauuuccuacacauggcaagc

SEQ ID NO: 388599 - RNA, 82 nt, Homo sapiens
cuugugccacauuugauagucauucaauuuagccaguuuaucuuaaagucugcaauuugaggauugucauaauuuguauaag

SEQ ID NO: 388600 - RNA, 58 nt, Homo sapiens
uaaguauuuuaauuccuggcauuaaggucaugugugccugggaugcuuuaaauauuug

SEQ ID NO: 388601 - RNA, 80 nt, Homo sapiens
aaaaauccagaagaaauuuugaaacagguugccaggaaauuggauuggcauuuuguuuuagaauuagagccuggucuuuu

SEQ ID NO: 388602 - RNA, 61 nt, Homo sapiens
ucuggguuuuguaccgugcucgucccaaagggcaacaugacuccuuggugugaaaucuaga

SEQ ID NO: 388603 - RNA, 59 nt, Homo sapiens
cuguaacagaauaaauuuguuugguuuuaagcuaccaaauuugcaguaauuuguuauag

SEQ ID NO: 388604 - RNA, 94 nt, Homo sapiens
uauagcugcuuaggacuugggaguguguaggacccagugugagccucuuuuguggaacaguguguuuacacagucaacaaggcagguuucuaug

SEQ ID NO: 388605 - RNA, 70 nt, Homo sapiens
gaugugggcagcagcugcucugucccacaugcaaacucuccagcagguuaagacagcugcagcccacauc

SEQ ID NO: 388606 - RNA, 56 nt, Homo sapiens
auugagggcacaucuaaggaaguuccccuccuggguccuuggugaugcccugcagu

SEQ ID NO: 388607 - RNA, 76 nt, Homo sapiens
gcuagugggccuuauuuccugugugaaacaacuuuuaucaaaauguauuugacacugggagugugggugaacuggu

SEQ ID NO: 388608 - RNA, 57 nt, Homo sapiens
gcagagcuccuucauucuaugaauguuagcuaaauuauggacaugguuaggcuuugu

SEQ ID NO: 388609 - RNA, 129 nt, Homo sapiens
cucaguuuguaaaaccucauuuugaacuucaucuacaagguaucagugaccguaagcuaauuuuuuacuuucucggugccuuugucuccuaggucucaaaacggugugguucuuuuaagauaaauugag

SEQ ID NO: 388610 - RNA, 92 nt, Homo sapiens
cuuccugcugacucaggaggcaggaauuucucugcagaccccaccagaagacuuugcagggcugcagggagagcuugcaggagaguaagaag

SEQ ID NO: 388611 - RNA, 71 nt, Homo sapiens
cguuucccuggagagggugaccaggguaggcucugcagacaagcaaccuugaauagcccuuucucaagacg

SEQ ID NO: 388612 - RNA, 89 nt, Homo sapiens
ggagaauugcuugaacccaggaggcggaagguacagugagcugagaucacgccauugcacuccagcucugggcgacagagcaagacucc

SEQ ID NO: 388613 - RNA, 76 nt, Homo sapiens
ccuuacuaguguuggauuuuaacaaacuaggugagaagaagccucagcuaguugauaaaauucauuuguaaugagg

SEQ ID NO: 388614 - RNA, 66 nt, Homo sapiens
cucgacauuaaggcuugaucuuggugagaugauggaccauuuuaucucuagggccuuaucuuugag

SEQ ID NO: 388615 - RNA, 77 nt, Homo sapiens
gcaguuuucuagcaguggaaucuguuauacuaacucuuugaaugaguaacugaaacagauucugaaacugaaacugc

SEQ ID NO: 388616 - RNA, 55 nt, Homo sapiens
ggugcagugugauuuucuggcugaguggugucugccucagucauauaucugcacc

SEQ ID NO: 388617 - RNA, 61 nt, Homo sapiens
gguuaggaaguuuguucaggucacacagccauuuggugacaguaucuacagcuucuuaacc

SEQ ID NO: 388618 - RNA, 85 nt, Homo sapiens
ugagaagcagugacuucuucuggacuuugguucucuucuuagcccuuuuuccuuggagccgguguccacgaagaagaguuuuuca

SEQ ID NO: 388619 - RNA, 64 nt, Homo sapiens
uucaguuugccaguauuuuguugagaauuuuugcgucaguguucaucagggauauuggccugaa

SEQ ID NO: 388620 - RNA, 80 nt, Homo sapiens
aggugugucuuguuuauagcuuucuguccauagucccuaaaucagagaaaauucuauaaagaccuuauaaugauauaccu

SEQ ID NO: 388621 - RNA, 65 nt, Homo sapiens
ugagauuugggaggggccaggggcagaauuauaugguuaggcuuuguguccccacccaaaucuca

SEQ ID NO: 388622 - RNA, 61 nt, Homo sapiens
cugggucuagccuggucacaugcccauuucuaaaccaaucgcugugacugggccagccuag

SEQ ID NO: 388623 - RNA, 128 nt, Homo sapiens
auagucuggcaguuccucaaacaguuaaacauagaguuaccaugucucaguccauuuguguugcuauaaagaaguaccugagacuggugauuuaugaagaaaaguuggcuuaugguuuugcaggcugu

SEQ ID NO: 388624 - RNA, 71 nt, Homo sapiens
guucaucaagcuggcauauguaguucuuaacaaacacauuaaggaaacauucggaaugucacuugcagagc

SEQ ID NO: 388625 - RNA, 74 nt, Homo sapiens
gagcaauuauuuauggagauccucugcgggcaaagaugaagcugucuuccucuggggaggauuuauauuugcuu

SEQ ID NO: 388626 - RNA, 99 nt, Homo sapiens
gcugaucuguucuuacuucgucaugagacagaugcugaaaccaaaaccuagaaaaguuucuuauccaaagucacauggcaagucaguuccagaaccagc

SEQ ID NO: 388627 - RNA, 72 nt, Homo sapiens
gcgaugauuaggauaugcugugucugagagccugacauguguuucuuccuuucaguaguuguauccuguugc

SEQ ID NO: 388628 - RNA, 95 nt, Homo sapiens
ugcuggguucucaggguuagguagggacucugccauuucuuacugucaaaaucucuccuguggagaugguguuccacugccagucuagcucagca

SEQ ID NO: 388629 - RNA, 57 nt, Homo sapiens
auaugccacugaacuguacccaucaaaaugguuaagaugguacacuuuauggcaugu

SEQ ID NO: 388630 - RNA, 87 nt, Homo sapiens
guuuuaauuuagcaauguaaugcuguucuuugcuuaaguuggauuacagcaguuucauuuuguguaagaauagcauauauuuaaaac

SEQ ID NO: 388631 - RNA, 93 nt, Homo sapiens
auuucucuugaacugagggccaucccaggcauuguccaugcugaaggggugcuuucagcccauaguguuugagccuaaucacaguggagaaau

SEQ ID NO: 388632 - RNA, 83 nt, Homo sapiens
uugcuauuaaaucauguccuaggugggguggauaauguuccccaugcauuaacacccuucuccagguacauuuuaagcagcag

SEQ ID NO: 388633 - RNA, 130 nt, Homo sapiens
ccugugguuucuuugcaggaaucuucuuaagcuguuugacuauuguguguaggucaguuaaagcuagauaaacuaacccacgcagaauggacaaguggcuuaggaagauuccugcaaggaaaaaaauggg

SEQ ID NO: 388634 - RNA, 75 nt, Homo sapiens
agugcaaaggucuaguaaggcaauagcaguguucucagucucuaucuauauuauuauuguccuucuauacccacu

SEQ ID NO: 388635 - RNA, 74 nt, Homo sapiens
ccuggcuacccagcuuguggggucacagcugucuuuuuuuccaaaaaggcacugugacuuuauaggccuccagg

SEQ ID NO: 388636 - RNA, 98 nt, Homo sapiens
gcaguggcccagcccugcaaggccccagauggugucccaggcucaggcugugcagucgcagucggggccuggaggcaccaggccuugcaggccacugc

SEQ ID NO: 388637 - RNA, 64 nt, Homo sapiens
aagcaagguacagaaacagccggaaugguuacagcucagcguuuggcuuauuugaaucuggcuu

SEQ ID NO: 388638 - RNA, 66 nt, Homo sapiens
ugucucuuccuaucugugggaaaugauucaaaugauagauucaaggacucagagagggauuagaca

SEQ ID NO: 388639 - RNA, 81 nt, Homo sapiens
gucacaguucacacuuugcgcuguauucccuuguuagacucaagaucucaacagugggcacuguaaauguggaauggugac

SEQ ID NO: 388640 - RNA, 106 nt, Homo sapiens
uguguguauauauauguauauauaguaugugcauauaaguguguauauauauaguguguguauauauguguguguguauauaaauauguguguguguauauauaua

SEQ ID NO: 388641 - RNA, 76 nt, Homo sapiens
gucaucucauugugaucugucuuuccuuauagucucuguucagagaaggaguguacaggucaugcagauagaugac

SEQ ID NO: 388642 - RNA, 65 nt, Homo sapiens
gugagaaagaggguguuucaacuuagacauguucucugucaauguaggaaaugccucuugcuuac

SEQ ID NO: 388643 - RNA, 66 nt, Homo sapiens
auguaugucuucuuuagauaagugucucuucauggccuuugcccacuuuuuaaugggguuaugcau

SEQ ID NO: 388644 - RNA, 61 nt, Homo sapiens
uuggcauuuuggacacccaggaggauugauaguauaguuauagucugaguccaaaggccag

SEQ ID NO: 388645 - RNA, 74 nt, Homo sapiens
acuuugggaggcugagacuggaggauuaagugagccaugauugugcuacugcacuccagcuuaggagacaaggu

SEQ ID NO: 388646 - RNA, 65 nt, Homo sapiens
ggugaauaugacaauuaugugucuugggguuguucuucucgaggaguaucuuugugguguucucu

SEQ ID NO: 388647 - RNA, 62 nt, Homo sapiens
uucaguaauacugucaguuuggcuuuuuuuguaggucaacuuauugaacucaguauucugaa

SEQ ID NO: 388648 - RNA, 63 nt, Homo sapiens
ucucauuuugucuccuaagcugaucacuggagauuccaucguuagugcugaggcaguauggga

SEQ ID NO: 388649 - RNA, 104 nt, Homo sapiens
uucgcagcgucuuccaagucucuguucucuaaggaaauaugucacuugcugagcgaggguaggggaagugugguuucuuuacagaaccgggaagauucuccgag

SEQ ID NO: 388650 - RNA, 72 nt, Homo sapiens
uuucuucuugaaugaccaaaauaauaaaagacucugugaggcucaugagauuuuuggucauucaggaagaaa

SEQ ID NO: 388651 - RNA, 62 nt, Homo sapiens
ucuuugcuucugacuuuaaugucuuucaaauuuaugagauacacccagugcagaggcuaaga

SEQ ID NO: 388652 - RNA, 66 nt, Homo sapiens
cuggaaucucaaugcuuuuguaggccaaggcggaaggauggcuugaguccaggaguuugagaccag

SEQ ID NO: 388653 - RNA, 115 nt, Homo sapiens
ugcauugaaucuguagauggcacugggcaguauggucauuuucgugauauugauucuuccaauccaugagcaugggauguauuuccauuuguguuaucuacgauuucguucagca

SEQ ID NO: 388654 - RNA, 63 nt, Homo sapiens
cuauguguccauguguucucaucuuuuagcccccacuuauaagugagaacaugugguauuugg

SEQ ID NO: 388655 - RNA, 87 nt, Homo sapiens
guauggcuaccuuacccaacaucagaaaauucauacugguggaaaaccuuaugaauguaaagaaugugggaaggccuucagucgugc

SEQ ID NO: 388656 - RNA, 61 nt, Homo sapiens
caauguggcauuucucauucauuuuuguauagcucuuaaaaguuagugaaaugucauauug

SEQ ID NO: 388657 - RNA, 64 nt, Homo sapiens
gucauaccuucaagugauggccacaaaacucaaaagguuuguggucaucacuugaagguaagac

SEQ ID NO: 388658 - RNA, 58 nt, Homo sapiens
aaguuucucuauuuuauaagcagcucucucuacaugcagugcuuauccagagaaacuu

SEQ ID NO: 388659 - RNA, 63 nt, Homo sapiens
uuacccagaagucauucaggaacagguuguuuaauuuccauguuauuguauggcuuuggguga

SEQ ID NO: 388660 - RNA, 73 nt, Homo sapiens
gcuggguaagguggcuuaccuguaauucaagcacuuuggaaggcuugaggugggaggaucacuugagccuagu

SEQ ID NO: 388661 - RNA, 71 nt, Homo sapiens
gcaugaauugauucccuguggcauccuuaggagugacguucuuuuuagcaaugcuguggggaaguucaugu

SEQ ID NO: 388662 - RNA, 80 nt, Homo sapiens
gggugaguucauacuuugcuuaucccaggcacuggauaaauauuuaugcgguuugaggagugagcagagaugacugacuc

SEQ ID NO: 388663 - RNA, 88 nt, Homo sapiens
agucuggagaaacugucugcugccuuuuguucagauacgcccugcccucagagguggaaucuagagaggcaguaggccuugcuaggcu

SEQ ID NO: 388664 - RNA, 67 nt, Homo sapiens
ggauuacaauuuuuuggaagaguaaaaaguucacacuuuugaaauuucacagaaggauuguagggcc

SEQ ID NO: 388665 - RNA, 60 nt, Homo sapiens
cuauagaagaaaaauugccuugcugagaaaacucauguucaagugcuauuucuuuugugg

SEQ ID NO: 388666 - RNA, 63 nt, Homo sapiens
uuggaauuuuuauaggaauugccuugaaucuguagaucacuuuggguacuauggaaauuuuaa

SEQ ID NO: 388667 - RNA, 64 nt, Homo sapiens
ucucauugaagggaucuaauaggugaauucucauucaccuguagcaugcccuuggaugcacaga

SEQ ID NO: 388668 - RNA, 85 nt, Homo sapiens
gcuauauaugaugcugcaaauuuauuuucauaauugcuauaacuggcagggcaagcagaugauauguuuguagcuaucucguggu

SEQ ID NO: 388669 - RNA, 56 nt, Homo sapiens
guugguucuguuuaugugacagauuacauuuauugauuugcauauguugaaccagc

SEQ ID NO: 388670 - RNA, 83 nt, Homo sapiens
gccugccuaaacuauacacaugugaguucuuuucuaggcuuugguauagaaugguccagcucugcaugucaguucuggaaggc

SEQ ID NO: 388671 - RNA, 85 nt, Homo sapiens
agggugguuuugccaaacaaaggugcaguuggaugaaaaaccaguguaaauauuugcacauuuuuucuggcagaaauccuacucu

SEQ ID NO: 388672 - RNA, 58 nt, Homo sapiens
gcuggcaaaugguuauaaggccaauuggagugauuuuggaaaaauaaucuuugucagu

SEQ ID NO: 388673 - RNA, 55 nt, Homo sapiens
uauuucaguugcguuucccgaguagccccagcaacaggagaagcaucuagaaaua

SEQ ID NO: 388674 - RNA, 62 nt, Homo sapiens
guuaagggaagccuggguaagacuauaaucacauuauuugcuuaucuuucuuccucauuagc

SEQ ID NO: 388675 - RNA, 80 nt, Homo sapiens
ccugaauauguugcucuucuccagagcacaaucauuaaaaguaauugagcuggucuuggggaagaguaggguaaaacagg

SEQ ID NO: 388676 - RNA, 65 nt, Homo sapiens
aaaaaucuguaagagagcuuauugaguuauuagcaucaacaucaacugcacuaggacagguuuuu

SEQ ID NO: 388677 - RNA, 69 nt, Homo sapiens
uaacuuuuuauugcucuaaaguugccauuaguuugaccaacuaaccaaugaaugagcuguaguggguug

SEQ ID NO: 388678 - RNA, 57 nt, Homo sapiens
uaccaggcauuuguaaugcugugccaguaugucugguucuuagcacagugccuggua

SEQ ID NO: 388679 - RNA, 86 nt, Homo sapiens
uucucagcugcuuuuuuguuguuguuguuuguuuguuuguaaaagaaaauaaucuggacauuaacugcaagauagaugccugagaa

SEQ ID NO: 388680 - RNA, 79 nt, Homo sapiens
cuguaagugcucaaaugguccagcuagugguggaaauauuccaccugagguuuuuauuauuugacaguacuucuuacag

SEQ ID NO: 388681 - RNA, 70 nt, Homo sapiens
gcaucaguggccaagagcacagauauuggcaucaaucagagcuggaucugcaucuuggcacaacuacugc

SEQ ID NO: 388682 - RNA, 88 nt, Homo sapiens
ggagucucgcucuguugccuaggcuggagugcaguggugugaucucggcucacugcaaccuccgccucccggguucaagcgauucucc

SEQ ID NO: 388683 - RNA, 83 nt, Homo sapiens
cccaccaaauuaaaauggcaucuacguuaaaugucaugaguaaaggcaagacaacucaaggcauuuaccugcaggugucuggg

SEQ ID NO: 388684 - RNA, 80 nt, Homo sapiens
guacuccaggguuggaagguacgcuuaggaaaugauacaauguacuuauuuaauauuguccuuugaguuuuauggagugc

SEQ ID NO: 388685 - RNA, 106 nt, Homo sapiens
acagauuuuuauuugcucuuauuuuauuugacaaugugugcuuguauuuuauuugaaaugcacuggcauuucuauuguucugaaguaagauaucauaucuuucugu

SEQ ID NO: 388686 - RNA, 81 nt, Homo sapiens
uuuaucaugugauaacauuucuucugguacacuugcacauaagaaagcuguauagaugaaaagauguugcaauuggaugaa

SEQ ID NO: 388687 - RNA, 79 nt, Homo sapiens
aggcuggaguguaguggcaugaucuuggcucauugcaaccucugccuccuggguucaagugauccucucgccucagccu

SEQ ID NO: 388688 - RNA, 86 nt, Homo sapiens
auauuagguuggugaccauguaauugugauuuuucccauugaaaguaauggcaaaaaaugcaauuacuuuugcaccacccuaauau

SEQ ID NO: 388689 - RNA, 57 nt, Homo sapiens
gggggagugugguacccagcauuuugucccacagagggguucccauggcacucccuc

SEQ ID NO: 388690 - RNA, 70 nt, Homo sapiens
uuuagcauccaagguuaugacugacauuuguacaaggugauacuggucaaguaauccugggugucaugaa

SEQ ID NO: 388691 - RNA, 84 nt, Homo sapiens
uauuuauauuuguauuaacuaucuccacagaagucauuugcaacaaauugaauggaacuggagaugguuauauuaaguaaaaua

SEQ ID NO: 388692 - RNA, 61 nt, Homo sapiens
cuuuuaacauuaaaucuuauucuacuguaguaacaauauaaguggaaugaaauguuagggg

SEQ ID NO: 388693 - RNA, 90 nt, Homo sapiens
ucuuuuaucugaugagaugacuagaggagggauggccaaauaagguuuaucuggggucccaacucugauugauuggaauuggcugaagga

SEQ ID NO: 388694 - RNA, 73 nt, Homo sapiens
agcuugacuucuucaagucuuuggauaauuagcuaugaacagcuaguuccuggggcuugugguccaucaggcu

SEQ ID NO: 388695 - RNA, 126 nt, Homo sapiens
uuguugggaacuggagcaaagaugucucuuguuauguuuuagcaaaaagacuggcagcauuuugcuccugccauagagauuuguggaacuuuaaacuuaggagacauuauuuaggauaucuggcag

SEQ ID NO: 388696 - RNA, 64 nt, Homo sapiens
auugugaguagugccacaauaagcauacguguacauguaucuuuauagcagcaugauuuauaau

SEQ ID NO: 388697 - RNA, 74 nt, Homo sapiens
ggcuagaugaagggacugagcauauccuauccaguacauguaugagagugagagcagccccuuaaaaaucaguc

SEQ ID NO: 388698 - RNA, 58 nt, Homo sapiens
cuaaaguauugagugguaaagaggcgugacucaugcaacuuacuguccaaugguuuag

SEQ ID NO: 388699 - RNA, 57 nt, Homo sapiens
ugaauagaaguggcaggaguagguauccuuuacuuguuccugaaaaauucuaauuua

SEQ ID NO: 388700 - RNA, 78 nt, Homo sapiens
caaagaaacuaugaacaagugcaaccagguugagccuuuaaguguagccucauucuacauguuaauggauaaccuuug

SEQ ID NO: 388701 - RNA, 63 nt, Homo sapiens
uggaagccugcacucgggcagggccuugccccacuggguccuucugcagcugcagguauucua

SEQ ID NO: 388702 - RNA, 87 nt, Homo sapiens
ugcuguugccuuugauacugguuuuugucauguggaaagagugaugagaaaucuuuuugugaggaaacuguaucuguggccaaggua

SEQ ID NO: 388703 - RNA, 81 nt, Homo sapiens
aggcauuugcaucuagggcaacccagagcuucccuagccuuaagcuuuccuuuagcugguuguucuggaugggcaggguuu

SEQ ID NO: 388704 - RNA, 78 nt, Homo sapiens
aaauaucuaguauagugguuuccaaugagagcaggacugauuccuagugggguauuuuggaaaccucugcagguguuu

SEQ ID NO: 388705 - RNA, 83 nt, Homo sapiens
uagcaaaagcuugcugacacccauucaaugugacugguuuugcaaggauuggaaaacaugcacauuggauucagcugcugcua

SEQ ID NO: 388706 - RNA, 55 nt, Homo sapiens
agagcauucuuggcugauugaugggaaguuccagcaaucagcacaagugugcuuu

SEQ ID NO: 388707 - RNA, 82 nt, Homo sapiens
ggcauggguuguguuuuuuuaaaauaugggaguucaguuguuguagccccauuuguugaaaagacgauucuuucuccgugcc

SEQ ID NO: 388708 - RNA, 58 nt, Homo sapiens
ugauuggauuguaaguuuccugaggccuucccagccauauggaacugugagccaauua

SEQ ID NO: 388709 - RNA, 58 nt, Homo sapiens
ugagacugagucuugcccugucacccaggcuggagugcaguggcgugauuucggcuca

SEQ ID NO: 388710 - RNA, 68 nt, Homo sapiens
gugagcacaggugcgcgguuacucacacagauuccaccccugccgaguggccuccaaccaugucucac

SEQ ID NO: 388711 - RNA, 97 nt, Homo sapiens
ugcagcaauacaacugaagaacaaauucuuaccuuccaggugaggacacagaauacacuggagcauugguggauuuguuauuuagucuguuacugca

SEQ ID NO: 388712 - RNA, 61 nt, Homo sapiens
ucuaaaagacucaccagguaaggaugaaagaauuucuauaucuacuugcugggucucugga

SEQ ID NO: 388713 - RNA, 55 nt, Homo sapiens
ugccucaaccucccaagguggcuguaauccuagcacuuuguugggggcugaggca

SEQ ID NO: 388714 - RNA, 129 nt, Homo sapiens
ggauuauuacaauucaaggugaaauguggguggggacacagcaaaacuauaucaaugauaaaauguaagugauauggcuuggcuaugucaccacccaaaucucuucuugaauuguagcuccuauaaucc

SEQ ID NO: 388715 - RNA, 111 nt, Homo sapiens
ggcaugguagcacaaaccuguaguuccagcugcucaggcaguuaaggcagaaaaaaugcuugagccuuggagugugagagcagccuggaaaacauagcaagaucccauguc

SEQ ID NO: 388716 - RNA, 65 nt, Homo sapiens
ugaugccauuucaaaauaagauuuaaaaugacucuguaugugagcuuguagugugaaugguauca

SEQ ID NO: 388717 - RNA, 72 nt, Homo sapiens
gagccugaggacugagaggcacuguggacaccagacgacaaguucacauuagccucugggucacuuugguuu

SEQ ID NO: 388718 - RNA, 65 nt, Homo sapiens
uuucuuuguuguuguagcuggagacaauuagguaacacaaauugucacccuacauaacagggaaa

SEQ ID NO: 388719 - RNA, 60 nt, Homo sapiens
uggaaucuagagaaaugcaaacauaugaacugaagguggugcucuuuucucuagauucca

SEQ ID NO: 388720 - RNA, 111 nt, Homo sapiens
cuguuguuuauuaucacuggacuugguuauaauaugugagaucucagaauugaacuaaucauauuaauuuaaacauucagagauuuuaggucuaguacauaagaaauauag

SEQ ID NO: 388721 - RNA, 87 nt, Homo sapiens
uugcacaauuccaggaggcagcauucgcauagacagccuaccugugaucagccugggaugugacuguugcccccaugaguuaugcaa

SEQ ID NO: 388722 - RNA, 92 nt, Homo sapiens
ugugugcacaaauauguugacauauguguguccacauacauguaaacauauguauguguacguguacacauguuaacauaugaaugcacaua

SEQ ID NO: 388723 - RNA, 93 nt, Homo sapiens
ggaucuuacauucaaauacagggauauaaucauugucagugccaggggagaggaacacugccuaaugacuuauguuuuaaaugugugagaucc

SEQ ID NO: 388724 - RNA, 91 nt, Homo sapiens
aguguuagucaaaggguauaguuucuguuauacggcacaaauaagucccagcgagcuacugaacagcauaguacccgugauaaauaacauu

SEQ ID NO: 388725 - RNA, 80 nt, Homo sapiens
gacaaguaaauacucauugaaugaaauggcagacacuuugaacuaguuaaauugugccugcugcucauuuguacucuguc

SEQ ID NO: 388726 - RNA, 64 nt, Homo sapiens
auugugaauagugcugcaaaaaacauacgugugcaugugucuuuauagcagcaugauuuauagu

SEQ ID NO: 388727 - RNA, 61 nt, Homo sapiens
uuauaaauuaauucuaccuucugugugcuagggugcauuaaggaaguaauuugguuuauag

SEQ ID NO: 388728 - RNA, 59 nt, Homo sapiens
uuuuaguuacugcaguagcaaagagauucaugaguuuagccuauugcacauagcugaag

SEQ ID NO: 388729 - RNA, 99 nt, Homo sapiens
gugguaggacugucacugccugaggcugaugcagcaccucggcagacaucugaagccgcaacucugcucagagccuacagagcugagguccuggaucac

SEQ ID NO: 388730 - RNA, 58 nt, Homo sapiens
uacaguggaauguaggguuugagguggggaaauccguugugauccucccuucccugua

SEQ ID NO: 388731 - RNA, 86 nt, Homo sapiens
agagcuggaaaauuaaugugaaucaggaugcauuugguguugacauuuauaucuuaguguaauuugacucaauguuaauccucuuu

SEQ ID NO: 388732 - RNA, 64 nt, Homo sapiens
uauuuauugaguuucuauuaugugccaggcacugugcuuggcacuggagauacauuaauaaaua

SEQ ID NO: 388733 - RNA, 65 nt, Homo sapiens
ggccugaguggagggauucugcagcaguucaugagaccugcugacauggggauccaccuuaggcc

SEQ ID NO: 388734 - RNA, 58 nt, Homo sapiens
uuuguugaagugugcucucgccauuguuccaucugugauugagcaccuuuuuugcaga

SEQ ID NO: 388735 - RNA, 71 nt, Homo sapiens
ccauugggaguuggaggauagagucauguauugauaguuaauuuaguugaguuccuuucccaguccagugg

SEQ ID NO: 388736 - RNA, 56 nt, Homo sapiens
ucauaggauaugaagguggaaauuuaaguaggaaaauuugccuauuauuccuaugg

SEQ ID NO: 388737 - RNA, 86 nt, Homo sapiens
acugggucauaaaugaauauuugcuacucacucuucaguuuccuugucuucugcugaagugccuggcaaguguucgauaauucagu

SEQ ID NO: 388738 - RNA, 57 nt, Homo sapiens
gagauggagucucgcucugucacccagauuggaguguaguagcacgagcucugucuc

SEQ ID NO: 388739 - RNA, 73 nt, Homo sapiens
uaaagagugagaguuucugcaacuguauucugaaaguauugacagagcuguuguuaauuaacucauuucuuua

SEQ ID NO: 388740 - RNA, 58 nt, Homo sapiens
uauugugaaaguggccauagacaauauguaaaugaaaaaguguggcuguuuuccaaua

SEQ ID NO: 388741 - RNA, 57 nt, Homo sapiens
aagaacacuagcggcguugaaagcuuuuaugcagcuuucuacuccggcguuguuuuu

SEQ ID NO: 388742 - RNA, 64 nt, Homo sapiens
gcccaggauuuugaagcugcagugagcuaugaucacaguugugccauugcacuccagcuugggc

SEQ ID NO: 388743 - RNA, 82 nt, Homo sapiens
cucagaguguggcuucauguaauauuucacagcuuuccaugcagguucagaaggcugucauuugcaugaauccacuucugag

SEQ ID NO: 388744 - RNA, 60 nt, Homo sapiens
cucaugcacugaguccaccucuggacucugugggggccagaggaccgguuuagucaugag

SEQ ID NO: 388745 - RNA, 129 nt, Homo sapiens
gcgccugcgugaagugagagaaaggggauuagaagguggugucagagagcuuaugggaaaagagaaagugggucauauaggaucugcacaccaucuuaaagaucuggcuugagacacugggcauggugc

SEQ ID NO: 388746 - RNA, 60 nt, Homo sapiens
augguacucuauggaaagguuugccaaugcuacagaagagaaccccuauagagaaaccau

SEQ ID NO: 388747 - RNA, 84 nt, Homo sapiens
ggagcaaauggucaggaccucgguggcauucucccucucucucaaggacaggagggugaccaucugggccuuggccagaguucc

SEQ ID NO: 388748 - RNA, 94 nt, Homo sapiens
uauauaagcucuaucauagacaaucaguuauugaagagacauuuuagaaaaagucugucuaauaauucugaucgucuaugacauggcugaugua

SEQ ID NO: 388749 - RNA, 77 nt, Homo sapiens
gggggucuguugaaguguuuauuuuggccuucccaugggugaaggcccagcuugaaugcugcccaugagagaccccu

SEQ ID NO: 388750 - RNA, 75 nt, Homo sapiens
agcccuuugucagauggauagauugcaaaaacuuucucccauucuguagguugccuauucacucugaugauaguu

SEQ ID NO: 388751 - RNA, 90 nt, Homo sapiens
uguugcuacuuauacugacuaaugaaagagugugauauguaaaccacauauauaauaccacguguauuagcuagcuauugguguguaaca

SEQ ID NO: 388752 - RNA, 78 nt, Homo sapiens
uuggauuuggguagcuaguauuuugcugaggauuuuugaaucuauguucaucaggguauuggucuguagcguuuuugg

SEQ ID NO: 388753 - RNA, 66 nt, Homo sapiens
uuacccaguaacaaguauuuuggaccaugcauagacuauuuuccaaaacuacugguuacuguguga

SEQ ID NO: 388754 - RNA, 80 nt, Homo sapiens
ugcaaagauguccaagauauauuaaauacaaacaaaaaguaaguuacguauguuauguauggagugaucccauuuuugua

SEQ ID NO: 388755 - RNA, 79 nt, Homo sapiens
acauugccuaaguccccugacagaggggaggaaaauguaugcaaaaauccuaccccacugcgggagacaaaggagaugu

SEQ ID NO: 388756 - RNA, 60 nt, Homo sapiens
ugagggcaaaguggugcugagggcccaucuagguguugauagcauacauuuugcaucuua

SEQ ID NO: 388757 - RNA, 65 nt, Homo sapiens
acagcuggacacaucaugugaccaagguucgccaaugagcuaugagugaaaaugaugugugcugu

SEQ ID NO: 388758 - RNA, 55 nt, Homo sapiens
ugaaacacacauugcccuuuaucugagaguucugaaagggcagaggugugucuca

SEQ ID NO: 388759 - RNA, 69 nt, Homo sapiens
ucuacauggguguuuuagcuacugaauuaagaacgauuugaugacagugaguaaccccaacauuguaga

SEQ ID NO: 388760 - RNA, 129 nt, Homo sapiens
uuauuauauagguaaacugugucauggagguuuggacuacagauuacuucaucagccacauaauaagcaaaauacucgagagguaguuuuuuggucaucucccuccugccacacuccacccucaaguag

SEQ ID NO: 388761 - RNA, 92 nt, Homo sapiens
agacagucgcuugagcacaggauggggagguugcagugagcugagacugcgccacugcacuccagccugugcguaagagugagaccuugucu

SEQ ID NO: 388762 - RNA, 60 nt, Homo sapiens
gagaaugaugauuuccaauuucauccaugucccuacaaaggacaugagcucaucauuuuu

SEQ ID NO: 388763 - RNA, 59 nt, Homo sapiens
cuuuuagugcaucagacacccucucucacuguucagaaaugagaggaugcaucuaagag

SEQ ID NO: 388764 - RNA, 77 nt, Homo sapiens
uugcuuuuguugcccaggcuggagugcaguggugugaucucagcuaacugcaaccuccgccucccggguucaagcga

SEQ ID NO: 388765 - RNA, 84 nt, Homo sapiens
gugcagguuuguuacguagguauacaugugcuauggugguuugcugcaccuaucaacuugucaucuagguauuaagccccgcau

SEQ ID NO: 388766 - RNA, 72 nt, Homo sapiens
aauuauuucaauugauaaauuugugcaaugugcucacauacaucacuggcaaauauauccguugggauaauu

SEQ ID NO: 388767 - RNA, 62 nt, Homo sapiens
gucugaugucucugggauuagcuucaaaauaaaauggugagguugggaugagggauacagau

SEQ ID NO: 388768 - RNA, 67 nt, Homo sapiens
uggcaguguggcaggugggggcucagagcuggggccaccucgugguuccccacuugcuaacuugccg

SEQ ID NO: 388769 - RNA, 126 nt, Homo sapiens
augaggggacgauaccgcugguugacuuugacacucaggauaauagucgggagguguuggcuucuuagcaccagaaucugaguuauucugaauaugaucaacuguuaaauugccauguuuucucgu

SEQ ID NO: 388770 - RNA, 70 nt, Homo sapiens
aucagagguacuuucauuuuucaauugccacacagacaaaggagggguugaaaagucaguagccucugau

SEQ ID NO: 388771 - RNA, 55 nt, Homo sapiens
agggaacauuugcacuguuggugggaauguaaacuagacaguguggagauuccuu

SEQ ID NO: 388772 - RNA, 116 nt, Homo sapiens
cuaugugauagcuuuaagguuggugcaaaagugauugcgguuuuugccauuacuuucgauggcaaaaccugcaauuacuuuugcagcaacuuaauaaauaacaaagaaacauguag

SEQ ID NO: 388773 - RNA, 60 nt, Homo sapiens
ggcuggaguguguugcagaugaaggaagauuucucaucaccccacacacucucugcagcc

SEQ ID NO: 388774 - RNA, 61 nt, Homo sapiens
ucagagcuucuaucaacaauaaguagagucgaucuuuccugcucuuugguacgugcuuuga

SEQ ID NO: 388775 - RNA, 110 nt, Homo sapiens
cuaguuguguuugagugccauuagaauguaaauuccaagggcaggacauuucugccuguuuuguuucugcuuuuguuuguuauauucccagcaccuaaaaccacaccuag

SEQ ID NO: 388776 - RNA, 58 nt, Homo sapiens
aaaggucagcugcacauaguggacacucagaguguugacuggagacuguugauccuuu

SEQ ID NO: 388777 - RNA, 55 nt, Homo sapiens
gggggcauuuuuaacaauuaugucagaaaaacaagcauaaacuagaacugucccc

SEQ ID NO: 388778 - RNA, 73 nt, Homo sapiens
ccagcaaugauucucaaccaggucgaguuugcccucccaggggacauuuggcaacguagggaggcauuuuugg

SEQ ID NO: 388779 - RNA, 64 nt, Homo sapiens
acuuggucuagauuuuggaaagccucuauauaucuguuggggucaucagagaaucuacccaggu

SEQ ID NO: 388780 - RNA, 93 nt, Homo sapiens
gucaacaucaucaaugccgaucuugaaucuucugcuuugaacuugaagugggaccacaacuuagacaagauggcuugagguucaacaguugau

SEQ ID NO: 388781 - RNA, 104 nt, Homo sapiens
auggccauucuugcaggaguaaagugguagcucauugugguuuuaauuuuuauuucccugaugauuagugacguugagcacuguuucacauguuuguuggcugu

SEQ ID NO: 388782 - RNA, 82 nt, Homo sapiens
cucauucauuucuaucauaguuuggacuuucauuucaaaaugucagaaaugaaaguuaaacuagauuaacagaaaaguggag

SEQ ID NO: 388783 - RNA, 72 nt, Homo sapiens
ggagcacacaacuuggauuccucauaugcacaggucacaauacgguuugugcuccugugagaaucuaguucc

SEQ ID NO: 388784 - RNA, 72 nt, Homo sapiens
ggguagggacuaucaugauucccaauuuacagguaauagaacugaagugagaugcaguggaguuccuugccu

SEQ ID NO: 388785 - RNA, 110 nt, Homo sapiens
agcugcuccaugucaugccuggucgugcuucuuugucauauaggcugcugccaguggcgcgggcacugugaugugaggggguagggccuuucggguggcaaggagaagcu

SEQ ID NO: 388786 - RNA, 60 nt, Homo sapiens
gagaaugaugauuuccaauuucauccauguccccacaaaggacaugagcucaucauuuuu

SEQ ID NO: 388787 - RNA, 70 nt, Homo sapiens
agucaaugcauccaugaauggcuaauaaaaaauuuuuagaauguaaguagucauaucacaugcaguggcu

SEQ ID NO: 388788 - RNA, 66 nt, Homo sapiens
uggccagggcacugccaggccacaacagcagccuuccccucccucugcuggcaaaugcuuuggcca

SEQ ID NO: 388789 - RNA, 68 nt, Homo sapiens
gagacaggaggauuccuugagcccaggaguucgagaccagccugugcaaacaagugaaccccugucuc

SEQ ID NO: 388790 - RNA, 73 nt, Homo sapiens
ggauuagaggugugagccacugugcccagccccuuaugauauacccaguucacagggugaacaccccuaaucc

SEQ ID NO: 388791 - RNA, 92 nt, Homo sapiens
uugggguggagaguugugaagaugugcaucagauccauuugguccaauguugaguucagguucugaauaucuuuguuaauuuucugccuuga

SEQ ID NO: 388792 - RNA, 76 nt, Homo sapiens
auagaaaucagguuuucccuccagccuaucaccuaguaggaagauaaggcuuaugguaaaguccuguccucucuau

SEQ ID NO: 388793 - RNA, 95 nt, Homo sapiens
guaugacaccucaaagaagcaauacuguuaccugaaauaggcugcgaagauaacaguauuucagauaacaguauuacaucuuugaagugucauau

SEQ ID NO: 388794 - RNA, 56 nt, Homo sapiens
auugguucuguuuaugugauggauuauguuucuuaauuugcauauguugaaccagu

SEQ ID NO: 388795 - RNA, 60 nt, Homo sapiens
cucuuuguguucaggagccacguaccugggaacaaagggaugggccagggauacagagag

SEQ ID NO: 388796 - RNA, 68 nt, Homo sapiens
acaaugaaggaaaagggccuagaauuuuauuuugaguacaguaaugggccccuuuuccuauugguugu

SEQ ID NO: 388797 - RNA, 66 nt, Homo sapiens
caguuugguuuuccaucauuugacacaagcggacuucuuaauucugucacugguggacgaucacug

SEQ ID NO: 388798 - RNA, 87 nt, Homo sapiens
ggagucuugcucuguugcuuaggcuggagugcaguggcgagaucuuggcucacugcaaccuccgccucccgguucaagcgauucucc

SEQ ID NO: 388799 - RNA, 68 nt, Homo sapiens
aaggcuagagaagaagggcaucccagcuuuggaagacagaaagcaagaauucucuccuccucugccuu

SEQ ID NO: 388800 - RNA, 108 nt, Homo sapiens
aggacccaugaggauaagcugcaggcugugagguuucuauaguacacuccuuccuggaaugacucugccuaaauuucaccuuuaagccucagagauucauguuaucuu

SEQ ID NO: 388801 - RNA, 109 nt, Homo sapiens
ggccuccuccccacucaugccccgaaugacugucagggcagucauugcagugaagccaugcaggaaugcccgacggcucaugaagggggccacgaacaggacagaggcc

SEQ ID NO: 388802 - RNA, 128 nt, Homo sapiens
ugguggagggcuucuacggcuguuacuucucagguacuucugggcugagcagagcaggcucuggcagccugagcaaguccucaagcaaagggaagcagcuaacagcaggggaggcagagccuugacca

SEQ ID NO: 388803 - RNA, 59 nt, Homo sapiens
aauuuugagacaaaguuguuggauguucaucuguaugaacacugaaaugucuuaagauu

SEQ ID NO: 388804 - RNA, 61 nt, Homo sapiens
uagguuaccaccuaaccccuaauugugugucuuaccacauaaugcaaguggugguaaucug

SEQ ID NO: 388805 - RNA, 55 nt, Homo sapiens
uugagauggagucucgcucugucgcccagacuggagugcaguggcaccaucucag

SEQ ID NO: 388806 - RNA, 106 nt, Homo sapiens
gcuucgucucagaggggcaccuggcuguaugaggugucaguuggccccuacugggagaugccucccaguuaggcuacucuggcaucagggacccacuugaggaggc

SEQ ID NO: 388807 - RNA, 70 nt, Homo sapiens
gauuugccaagagagacuuugcagacuccacagauguuguguacugcagaguauucuguucugcaaaauc

SEQ ID NO: 388808 - RNA, 67 nt, Homo sapiens
aagguccuuaagguccaucgggagauuagggucaacccucauaccugagacaacuuugaggaaucuu

SEQ ID NO: 388809 - RNA, 75 nt, Homo sapiens
guaguggguguuaggacacugugggugggucacccugaagguggaucuuccucucgcaguccuaauccccacuac

SEQ ID NO: 388810 - RNA, 82 nt, Homo sapiens
cccugacugaauccugaugacacagugcugcaccuaaaaagugucugaagugccagcugcgucaucaaggaaaggcaaaggg

SEQ ID NO: 388811 - RNA, 58 nt, Homo sapiens
uuuccauggaaaaccauucaaugaaauguuuaauucauugaaugguuuuccuugggag

SEQ ID NO: 388812 - RNA, 67 nt, Homo sapiens
cuccucugacagugugaauauugacuugcacuuauaaaggucagacaguuccacuaguuaauaggag

SEQ ID NO: 388813 - RNA, 73 nt, Homo sapiens
ucacuguggauggaacuaugugagaaaggagauauaggaaaauauccauuacaaggauucuguucauggauga

SEQ ID NO: 388814 - RNA, 126 nt, Homo sapiens
agcugagucaugaaaagugaaaaguucagucaguugcccagauguauuuauugccaaauaacacaggguacuuggauacaucuggacagccgaaugaacucuuaacuccucgucucuccaacagcu

SEQ ID NO: 388815 - RNA, 88 nt, Homo sapiens
aucuccaagauguauuaagugcaaaaaugaaaguauagaaccacguuccugauaagcuaccauuuguauauaaagcaugugugggggu

SEQ ID NO: 388816 - RNA, 61 nt, Homo sapiens
guuugccaguauuuuauugaggauuuuugcaucaauguucaucaggaauauuggccugaac

SEQ ID NO: 388817 - RNA, 57 nt, Homo sapiens
cagacagggagggagcgcggcugggccagaaggcugaucaccgccugcccccugcug

SEQ ID NO: 388818 - RNA, 59 nt, Homo sapiens
uauuagguuggugcaaaaguaauggcaaaaaucgcaauuacuuuugcaccaaccuagua

SEQ ID NO: 388819 - RNA, 72 nt, Homo sapiens
ggauaugauuucaauuggauaugauuucauuguuucuuaauggaagcauaguauucuauuguguauaugucc

SEQ ID NO: 388820 - RNA, 59 nt, Homo sapiens
guauugucuauggcugcuuucaugcuacaacagcagauuuaaguaguugugacagaugc

SEQ ID NO: 388821 - RNA, 64 nt, Homo sapiens
gccucagucucuuucugccuuaugacucuuaaauucuuucuuaucaagaggcaagaauugaggu

SEQ ID NO: 388822 - RNA, 62 nt, Homo sapiens
gagaaggacuuuggugaagcuuucccugguauuuuucugcuaaagcuuuggcuaacuuucuc

SEQ ID NO: 388823 - RNA, 71 nt, Homo sapiens
agugugagucucucaaaacuguauauguugaugcccuaacuuccaauguaacaguauuuggagauguuacu

SEQ ID NO: 388824 - RNA, 61 nt, Homo sapiens
ugagguaagaguuuuccauuucugaaggacugcuaacagagaaaguaaagauucuaccuca

SEQ ID NO: 388825 - RNA, 63 nt, Homo sapiens
ugugcaaucuuccauuuuuaggagguaguuuauuuaaaugacuuaaauugagaagauaguaca

SEQ ID NO: 388826 - RNA, 55 nt, Homo sapiens
cuacacaaauuuggguagcuuuaggucuuuuaaaaaauagcucauguuuguguag

SEQ ID NO: 388827 - RNA, 60 nt, Homo sapiens
uuacacaauuuuauugaccuaaacucaggaaaucccucacuggucauggagguuguguga

SEQ ID NO: 388828 - RNA, 61 nt, Homo sapiens
gguguugggaaaacuggcuagccauaugcagaaaagugaaacuggaccccuuccuuacacc

SEQ ID NO: 388829 - RNA, 74 nt, Homo sapiens
augaagggauguuaaauauuaucaaaagcuuuuucagugcacauugaaaugauuauaugguguuugcccuuuau

SEQ ID NO: 388830 - RNA, 63 nt, Homo sapiens
gggcuuagagucuaggguuaggguggggaacauaagaaccauucaaaaccucugcuuaagccc

SEQ ID NO: 388831 - RNA, 58 nt, Homo sapiens
acuggcauggcaccauagugagaggaaggggguucuuucuugggcaugcuaugucagu

SEQ ID NO: 388832 - RNA, 74 nt, Homo sapiens
cuaugguaagagaaaugcaugcaugucaucaccaaagugagaacugccuguauuuaucuauguuacgcaaaugg

SEQ ID NO: 388833 - RNA, 72 nt, Homo sapiens
cacaauugucagugcuguuuaaauuguauccucucucucucuuaauugaacuuuugucacugacauguugug

SEQ ID NO: 388834 - RNA, 85 nt, Homo sapiens
ccaccgcuacccagcuaugucuuggagaauccuggguuuggucaaagccaguuucucccagaggcucagggcuggggggaggcgg

SEQ ID NO: 388835 - RNA, 58 nt, Homo sapiens
ucauggcauuguuaaggguuuuaaaugagauaauacaaguucuuagcauaaugccuga

SEQ ID NO: 388836 - RNA, 55 nt, Homo sapiens
cauggcccuguguggagcugcugcacccugugugaguggugccaugagggccaug

SEQ ID NO: 388837 - RNA, 74 nt, Homo sapiens
auucacacugaguaaauaaggcuaggaaaagaaaugcccuuccuguucauagucuaauuuuuuccacugugaau

SEQ ID NO: 388838 - RNA, 129 nt, Homo sapiens
ucacauuuuauacacuguuagggcugaacugugucuccugaaaauucacauguugaaacccaaagccauaccucagaaugugacuuauuaggagacacagccuccaaagacgugauuaaguaaaaguga

SEQ ID NO: 388839 - RNA, 96 nt, Homo sapiens
uuagcugucaggcaugauggauucaggaguaaaaagugaugcugugaagacaucaccuuucccuuucugaaucuuacuugccuuugaguuaguuaa

SEQ ID NO: 388840 - RNA, 73 nt, Homo sapiens
ggcaaaauguucuagcgugcccuuguguacacucuaaacguuacacauuggcaauucuggagcaaacuuuguu

SEQ ID NO: 388841 - RNA, 61 nt, Homo sapiens
uuaagggaggagcuucaagauggcugauuagaaguauuucauguccucuuccuccacuuag

SEQ ID NO: 388842 - RNA, 84 nt, Homo sapiens
augcuugcaagaaacauauuccacaagcguuuggguaagucauauauuauuugacacuuuggaaauaaauuucuuguuaagugu

SEQ ID NO: 388843 - RNA, 79 nt, Homo sapiens
cugagaaaguccauaaaccacuuaagggaaguacauccuuuguaucauucuugguuuaucgcuuuaaaauugcauucag

SEQ ID NO: 388844 - RNA, 67 nt, Homo sapiens
aagguuaagugguagguggugcccaagagaacugcauuuccuuggacagagcaucuuuuacuuccuu

SEQ ID NO: 388845 - RNA, 97 nt, Homo sapiens
auccuuaacgaucagcucaaaugucauuuacccuggaaggcuuuccugagucagggaccccggguggauguacaugugaacucgcacagccuuggau

SEQ ID NO: 388846 - RNA, 59 nt, Homo sapiens
ugagcugagaucaugcuauuguacuccagccuggggaacaagagcaagacuucaucuca

SEQ ID NO: 388847 - RNA, 73 nt, Homo sapiens
guuugauauguaacuacuccuuauaugccauuuuauuuugugcauacaugugauuguaguauacauauuaggu

SEQ ID NO: 388848 - RNA, 64 nt, Homo sapiens
gcugauauuuuaaaauuggcugguaauuauguuuuuaauauccggcauuaugaaauaucucagc

SEQ ID NO: 388849 - RNA, 59 nt, Homo sapiens
auuguggucagaaaauuacuugauauuauuucaauguuuuggauuuuuuuggccauagu

SEQ ID NO: 388850 - RNA, 68 nt, Homo sapiens
cuguagucucagacuuuugggcucaaagcauccuccaacaucagcuucucaaaguacugauauuacag

SEQ ID NO: 388851 - RNA, 61 nt, Homo sapiens
cuacugucaauagucaauguguaacaucuuacaauucaggcagcauugguuagaacaguag

SEQ ID NO: 388852 - RNA, 80 nt, Homo sapiens
cagccaggauuugguguucuggcucaagagucugugcugucaaccacuacaucguugagaaaaggcaccaagcugggcug

SEQ ID NO: 388853 - RNA, 60 nt, Homo sapiens
gaaccucugccuagauuucagaggauguauggaaacaucuggaugccuaggcagaaguuu

SEQ ID NO: 388854 - RNA, 57 nt, Homo sapiens
uucagguacuauaggcuguuggucuauauauccggccaacaguauuuagcuccugaa

SEQ ID NO: 388855 - RNA, 92 nt, Homo sapiens
uuucggguaucuuuacagcagugccccacucuacugguacccauuuacuauauuagucuguuuucacacugcugaugaagacauaccugaga

SEQ ID NO: 388856 - RNA, 113 nt, Homo sapiens
gugauauauauuuuuuuauuuuugaaagaugaacuggauuggaagauuuaucuuuguugugucuauuuugcaauugaggaaucauuuauuuuuagagaggugaauaaauucac

SEQ ID NO: 388857 - RNA, 57 nt, Homo sapiens
ugcauggauguuugaacacacugugcuguggaugguguucuuaauaacaucccugca

SEQ ID NO: 388858 - RNA, 70 nt, Homo sapiens
aauaccucaacugcuguagaugaaggggcagcauuugcucuagauccucaucacagcauuuccugguauu

SEQ ID NO: 388859 - RNA, 75 nt, Homo sapiens
gccuacuccuaagcaauuuguguugacgcacuguacaaacacaugucauagauugcuuggaaaaaaaucacaggc

SEQ ID NO: 388860 - RNA, 73 nt, Homo sapiens
ccaccccaccugcuuccugugaccuggacacagucugagcaccccaagguccaaagugggagagguggggugg

SEQ ID NO: 388861 - RNA, 64 nt, Homo sapiens
gucaucucuagcaaagaguguuuucagauauuuuuccuuaugugauuauuuuugcagaaaugac

SEQ ID NO: 388862 - RNA, 63 nt, Homo sapiens
uacaaagcuaccagauucuguuggaucacauuuugguuuucuccagcaggguguagcugugug

SEQ ID NO: 388863 - RNA, 105 nt, Homo sapiens
ugauuuuuguacauuaauuuuguaaccugaaacuuuacugaagucaguuaucagauucaggagcccuuugguggagucuuuagguuccuuuuagguauagaauca

SEQ ID NO: 388864 - RNA, 78 nt, Homo sapiens
uggcuucuaaacaaagagguaauaacaaagcuucucauuguguugcaaauuaagugaggugccuuuuauuagaaguua

SEQ ID NO: 388865 - RNA, 98 nt, Homo sapiens
ggguguguagccauuuuuccuuguguucaugugauuaaggugaacacauucuucaaacaccucaacaccguagaaacacaagggaauuccugcuaccc

SEQ ID NO: 388866 - RNA, 86 nt, Homo sapiens
gguuaacugagauuuaaauacuguguaaugguuaaaggccaaugacuggggaaccucauuggcuaagcuuguuacaccucacaacc

SEQ ID NO: 388867 - RNA, 69 nt, Homo sapiens
gucucugacuuccugcuggugccaggagugagucgugggaaaugcuucauuggccaccaggaaggagac

SEQ ID NO: 388868 - RNA, 68 nt, Homo sapiens
uugcuugaagcugcgaggcggaggcugcagugagacgagauugcgccauugcacuccagccuggguaa

SEQ ID NO: 388869 - RNA, 82 nt, Homo sapiens
ugcaacugaggagaaaggagcagugcuuuuggacggcacaagggcuguuucauggacgcaaugccuuuucaaucucagugca

SEQ ID NO: 388870 - RNA, 76 nt, Homo sapiens
ucuguucaugaccaugguauagaccacaggguggcggaugguagcauagugaucauaggccauggcagagaacaga

SEQ ID NO: 388871 - RNA, 88 nt, Homo sapiens
ggaucagucuuggauaaacuggugaagaaucggguaguaccaaguucuguuugaagacuauaugauucuucauuaucccacuggggcc

SEQ ID NO: 388872 - RNA, 68 nt, Homo sapiens
uuuauggaaaucuuaccuuauggucaaacugauuaagaucggauagauuauauauaagguuuuaugaa

SEQ ID NO: 388873 - RNA, 90 nt, Homo sapiens
uuguucgauacaaggagcuuugaaaguuuccgguucuuaguacauauggaacacuuagauuuuuaagguuuuuuuaauuguuuuagacaa

SEQ ID NO: 388874 - RNA, 60 nt, Homo sapiens
gagaaugaugguuuccggcuucaucuaugucccgacgaaggacaugaacucaucauuuuu

SEQ ID NO: 388875 - RNA, 78 nt, Homo sapiens
gguuuggguaagucagauuuacaaugucagccaucaucuggccauguuugaaagucuaggcuuacaguaaugcaagcu

SEQ ID NO: 388876 - RNA, 68 nt, Homo sapiens
caagcacaggggauuuaucagggcagugaaacuaguaugguaauacuguaauggugguuccgugcuug

SEQ ID NO: 388877 - RNA, 79 nt, Homo sapiens
uagccuccaauuuuuucaccauggucaguuuaguuauaagcccacuggcaauggcagaaauaguugugguaggaggcug

SEQ ID NO: 388878 - RNA, 72 nt, Homo sapiens
aaugauuggauagucuuuaucuguuggauaacuucauuuauaaaucuagagccauggggcuauucauucauu

SEQ ID NO: 388879 - RNA, 61 nt, Homo sapiens
aacuaaagcacugaauaaauuugcuugugcauauaagcaaaaagucaagguguuaaugguu

SEQ ID NO: 388880 - RNA, 71 nt, Homo sapiens
uugcuugaaccugggaggcagagacugcagugagccuacauugugucacugcacuccagcguguguggcaa

SEQ ID NO: 388881 - RNA, 79 nt, Homo sapiens
uggccauuuucauuuuucccuggacagccuugccugggguacugccugcugccggugaggguugcuaggaaaccggcca

SEQ ID NO: 388882 - RNA, 85 nt, Homo sapiens
acugauaugaggucccuggaguagccagauucacagagacggaaauucucuaugaaucuggcuacuccagggaccucauaucagu

SEQ ID NO: 388883 - RNA, 86 nt, Homo sapiens
uaaguucuaggguacacgugcacaauaugcagguuuguuacauauguauacaucugccauguuggugugcugcacccauuaacuug

SEQ ID NO: 388884 - RNA, 91 nt, Homo sapiens
cccugucuuguggaaucagaauuacugaauggagcccaggcauuuuuuaaaaaaguucccuugguaauucuguuccuuagcaagucuuggg

SEQ ID NO: 388885 - RNA, 112 nt, Homo sapiens
agugucacgaugggcuugacuagugaguuguuucacaauuaauaaaguacuaucuaucucuugccaaugagacaaucucaucucagugacaagcccagcaaaagaugauacu

SEQ ID NO: 388886 - RNA, 100 nt, Homo sapiens
uugauugcauaauuauuugguuacuugaauagcuaugcuuuucaugauccuguuaauguguuguaaguaguuauucaaggaaucaaaaaugaagcaucaa

SEQ ID NO: 388887 - RNA, 72 nt, Homo sapiens
aagacagagaaagggagaauucgugcuaucugcuugaccacuuaagcugagacauugguuuucuccugucuu

SEQ ID NO: 388888 - RNA, 95 nt, Homo sapiens
auguucugaaguacugaggguuagggcuucaacuuacgaauuuggugaguucacaguucagccuguaacacauuucuucaggauuuccagagcgu

SEQ ID NO: 388889 - RNA, 76 nt, Homo sapiens
ucugaaaaacuucuccuguaaauaucucucauacugguugccaucugagacauacuuacaggggaugcuuuacaga

SEQ ID NO: 388890 - RNA, 69 nt, Homo sapiens
uuaagauaaugguuuccagucccauccauguugcugcaaaggacaugaccuuggggaaccaugucuuga

SEQ ID NO: 388891 - RNA, 70 nt, Homo sapiens
uccuuuauuguuaaagauguuaaugauccucugagccuucuggagucguaauuuuuuugccggugaagga

SEQ ID NO: 388892 - RNA, 86 nt, Homo sapiens
acucagcagucaggggagauggcaaugcgaugaugacugagugucuuagucuuuuuuguauugcuaugcaauaucugaggcugggu

SEQ ID NO: 388893 - RNA, 119 nt, Homo sapiens
ccugcaaggggcacuagcaaggagccagugacauaaggcagaagcuucguggcugucaaaaagaagugcgaucuuuuuccuuguuccugggaauccugcaaacaugucugccccauagg

SEQ ID NO: 388894 - RNA, 122 nt, Homo sapiens
acaauuauguaaaagauauauuaacaaggacugcagaguauaaagauaauuguggauaacuugauuuuuuuaagguuguauuuaauauacuguuauuucuuuuuuuaauuuuuauuuuuugu

SEQ ID NO: 388895 - RNA, 64 nt, Homo sapiens
agcugagaucucuugccugaacuccagaguuauacauucaacugcaguuggguaugucucaguu

SEQ ID NO: 388896 - RNA, 91 nt, Homo sapiens
gcugguccccaccccugaggaaguguuuccccagcggaccuauuuucuggcccuugaggaagugguuccccagaggaagugguagcccagu

SEQ ID NO: 388897 - RNA, 71 nt, Homo sapiens
uaucaagacuacuagugcuauggguggcaccaguuuauucaagccucaauauuccacuauuaguccagaug

SEQ ID NO: 388898 - RNA, 58 nt, Homo sapiens
aacauggaagccagagagagcuucuuacauguaagucaguucacauggcuccuguguu

SEQ ID NO: 388899 - RNA, 88 nt, Homo sapiens
uggaguuguguaccuguagcucuucuaggcugggguugcauguuauugucacuacuagucugagaucucacaggcagccucagcucca

SEQ ID NO: 388900 - RNA, 72 nt, Homo sapiens
cuguugaaauguuaauuccauuguuggaugccacagcugugagcauuacucaugggaucaacauucuauuag

SEQ ID NO: 388901 - RNA, 88 nt, Homo sapiens
uuuugagaucagguagugugaugcuccuguuuucucuuuauaccuugaagucucaagacaguagccgucacauacaaaaauuacggaa

SEQ ID NO: 388902 - RNA, 63 nt, Homo sapiens
ucuuaggccugaggcaggacagagaggagcaggguuccuugacacugucacucaggccagaga

SEQ ID NO: 388903 - RNA, 68 nt, Homo sapiens
cuuuggaaugcaacagaaggauaauggcuguuucugcuauuacccagaaguaauguuguauuauaaag

SEQ ID NO: 388904 - RNA, 102 nt, Homo sapiens
cagauuugcuacacggguaaauugcaugcugcggggguuuaguguacagaugauauugucacccgggcaguaagcauaguacccaauagguaguguuuucug

SEQ ID NO: 388905 - RNA, 73 nt, Homo sapiens
gaaugaggucacgugcuauuugccuuucugauaccuggccuaugucacuaaagaaaauggcauggacgcauuc

SEQ ID NO: 388906 - RNA, 74 nt, Homo sapiens
uccagucaagggauuaaugugcucacuuggguaauugauagugauuaucaaagugaaauauuaguuaugaugga

SEQ ID NO: 388907 - RNA, 127 nt, Homo sapiens
guugugugacauaagaagaucuuggauuaauuagcacuauuuuucacuauccuucuauuaguauuccacugaggaaaugaagaaaaguguuguauuaaauuguaaggauuuaggaacauuaggcaac

SEQ ID NO: 388908 - RNA, 96 nt, Homo sapiens
cuuggagacaaugaggugcagaggaaaugagugaguguuuuuacgucacagucacugcucuucuaaaaaguuucuaaugcaccucgauauucuagg

SEQ ID NO: 388909 - RNA, 80 nt, Homo sapiens
uaggagaaaagcuaguccuauacccuaggacuaaggcuucagucuaagacuaagggcuagcuucaaacaaauuuucccua

SEQ ID NO: 388910 - RNA, 58 nt, Homo sapiens
acccggaagguggagguugcagggagcugagauagcaccauugcacuccagccugggu

SEQ ID NO: 388911 - RNA, 78 nt, Homo sapiens
ugggguucauaugagugccaaguuaccuggggaaaccuaacaacuuacaaauucuccagguuuggcuuuauaacuuca

SEQ ID NO: 388912 - RNA, 101 nt, Homo sapiens
ugaggcaggagaaucacuugaacucagaaguuggagguugcagugagcugagaucaugccacuguacuccagccugggugacagagcgagacuccaucuca

SEQ ID NO: 388913 - RNA, 67 nt, Homo sapiens
cugagcuaugccuggaaaggcagcugggaaaaauuaaaaccacaucuucuugucagguagaguucag

SEQ ID NO: 388914 - RNA, 69 nt, Homo sapiens
ugcauccucucaacaaugugugggguaauaagggcaaguauuaaaccacguuuacauuugagaaaugua

SEQ ID NO: 388915 - RNA, 61 nt, Homo sapiens
ugcugaguguuaccggacaccgugcuaggugaugugaucccauuaguaauacuugugagca

SEQ ID NO: 388916 - RNA, 73 nt, Homo sapiens
ccagugauaauucccugguuuugauaacugugcaaugcauggcauguaaguuguugacauuaggggaaucugg

SEQ ID NO: 388917 - RNA, 57 nt, Homo sapiens
guccuaccuggaggaacucaggacugcagggacagcugagaagaaacagguaaggac

SEQ ID NO: 388918 - RNA, 69 nt, Homo sapiens
gcuuauuuaguagagacgagcguuccaccauguuagucaggauggucucgaucugcugaccucgugagc

SEQ ID NO: 388919 - RNA, 81 nt, Homo sapiens
ugccccuauuugaccagagggcuacuuaaaggauggagcugauucucauugguuggacaguucucucuucagacaggggua

SEQ ID NO: 388920 - RNA, 72 nt, Homo sapiens
agaucucaauagguucuccacagguucuccauagguuguccauagaaccuccacaggaccuccauaggaucu

SEQ ID NO: 388921 - RNA, 95 nt, Homo sapiens
ugggcaauucaagagauggauuuuuuaggcagagcuagauugagggguuccagugugccccagcucugcuuuaauccauguugauuuaauucuca

SEQ ID NO: 388922 - RNA, 80 nt, Homo sapiens
gauguuucauccccuccaaaucucauguuaaaaugugauucccuuguuggaugugggguuuggugggagguguuugcauc

SEQ ID NO: 388923 - RNA, 82 nt, Homo sapiens
gcaccgucugucccaucacaguuuuaccauuugguacucucuggagcauugccauggccuagaccugugauuaaauuggugc

SEQ ID NO: 388924 - RNA, 66 nt, Homo sapiens
ccgcaaaggaaaauggagauauuuuaccuauuccugugauaacaguaucucaguuuuccuuugugg

SEQ ID NO: 388925 - RNA, 56 nt, Homo sapiens
uugagauggaguuuugcucuugccgcccaggcuagagugcaauggcgccaucucag

SEQ ID NO: 388926 - RNA, 56 nt, Homo sapiens
aggaggcuuagggucuuccaaguggccagggucuugagaggauucgccagccucuu

SEQ ID NO: 388927 - RNA, 77 nt, Homo sapiens
ucucugucuuccuuuguuacaguuggcucugucaccaucgucuccauaugacaggugagcaaacagaggaucagaga

SEQ ID NO: 388928 - RNA, 57 nt, Homo sapiens
cuucauggugguacaaaagcaauacacauucaguacgcuccuugacucacuaugggg

SEQ ID NO: 388929 - RNA, 121 nt, Homo sapiens
guaaaauagaagaaacaaguuucuaagagaccaagaugcuacauucuacaauuaggcuaauuuguuuuagacuuguccuggaaugaggcauuuguuaaaggaaaauaugucuuacccuuac

SEQ ID NO: 388930 - RNA, 57 nt, Homo sapiens
aaaugggagugagcuacuguuccagccugaaaggaagagagcuuuaacuacccauuu

SEQ ID NO: 388931 - RNA, 69 nt, Homo sapiens
ucuuuauagcagugugagaaugaacuaauacagaaaacugguacugggagugaggcacugcuauaaaga

SEQ ID NO: 388932 - RNA, 76 nt, Homo sapiens
uccacagguucugagcaauagauguggauaucucucgggggacauuauuuagccuauugcuacaguauccuuugga

SEQ ID NO: 388933 - RNA, 61 nt, Homo sapiens
uggcaguguuauuauauuuuuggcacuguuuacaaucaaggguugaguaauaacaaugcca

SEQ ID NO: 388934 - RNA, 78 nt, Homo sapiens
gaauugagauucaucuagguccagagaaaugacuuaauuuaauguaacugucucucacacacuuggguauuuuaauuc

SEQ ID NO: 388935 - RNA, 72 nt, Homo sapiens
agaacagcauagcuuuacuucuuauucauauuacauguuuaacacuggguaacaguggggcuaugcuuaucu

SEQ ID NO: 388936 - RNA, 65 nt, Homo sapiens
augauguugggauaacuggcuagccauaugcagaagauugaagcuggaccccuuccuuacaucau

SEQ ID NO: 388937 - RNA, 60 nt, Homo sapiens
uguuucaucagccagggucagucucuguugcuugcaacccagaacccugacugaggaaca

SEQ ID NO: 388938 - RNA, 55 nt, Homo sapiens
uagcccagugagguugauuugggacuucugaucuccagaaaucuaaacugggcug

SEQ ID NO: 388939 - RNA, 55 nt, Homo sapiens
guaggacugaauuccuucccauggauguagggccauggaggucaucugucacuac

SEQ ID NO: 388940 - RNA, 102 nt, Homo sapiens
cugauauuuuuagaccuuucuaguauagucuggaugcuaccaugauaauuaaagguaggcauguggcucuguucugaccaaugagauguaaagagaagucag

SEQ ID NO: 388941 - RNA, 83 nt, Homo sapiens
ggggcagugcuuaugcaucauucuggcauaaugaaaaugguuucucaucauugcuagaugaaguuugaguuuucuccugccuc

SEQ ID NO: 388942 - RNA, 65 nt, Homo sapiens
aagugcaaauucccaggcucuggcccaagacagucugacuggguggagccugggagucuggauuu

SEQ ID NO: 388943 - RNA, 103 nt, Homo sapiens
guuaauauuuuauacccuaucaagugcauaugcuaacgguugcaucugguggacuggugaagucagcuuuggcauaugcacuugcugggguaaaaauauugau

SEQ ID NO: 388944 - RNA, 101 nt, Homo sapiens
ugagagggagucucacucugucacccaggcuggagugcaguggcacgaucucggcuaacugcaaccucugccugcugguuucaagugauucuccugccuca

SEQ ID NO: 388945 - RNA, 69 nt, Homo sapiens
cagcuucccugugggcuggugcuccagggucugggugaaccgcugagggcaguggcuucagggaggcug

SEQ ID NO: 388946 - RNA, 68 nt, Homo sapiens
ggggcuuugauuacccauagugcaguuaguaaagguuugcuggcaugcauuguggguaauuaaguccc

SEQ ID NO: 388947 - RNA, 76 nt, Homo sapiens
ucuggaugagggccagaugcauuuguuauuugucuauaaaacgagucaagagcugcuccauuugucccucuuuaga

SEQ ID NO: 388948 - RNA, 120 nt, Homo sapiens
uuuuuuuuuuuugagauggagucuuacuuugucacccaggcuggagugcagugagccaagauugcaccauugcacuccagccuggcaacaagagcgaaacuccaucucgggaaaaaaaaa

SEQ ID NO: 388949 - RNA, 56 nt, Homo sapiens
guuauugcaguauagaggucuaagcaccaauucuuagaucauauacuugccaugac

SEQ ID NO: 388950 - RNA, 94 nt, Homo sapiens
gcagucagagggcagagaaaggcagggaccuucaguugcacaggaaggucugcaucuggguccguucugcuucucacugcacauguggccuugc

SEQ ID NO: 388951 - RNA, 70 nt, Homo sapiens
uuguggugucagagagcucuucuguuauucucugaaauauaaugacagguuuucuguuucugaaacacaa

SEQ ID NO: 388952 - RNA, 76 nt, Homo sapiens
cagugccagggauuucaugggcagucgucauuaaaugugcauggcaagccugacaugagacuguucuuccucauug

SEQ ID NO: 388953 - RNA, 59 nt, Homo sapiens
guagaugcauggauuuacuucuggguucucuauuccguuccauuagucugugugucuau

SEQ ID NO: 388954 - RNA, 71 nt, Homo sapiens
gccagagcccucagaucugcccaccacgaggugggguucagggguggcaaaucugaguggcgcuccacggc

SEQ ID NO: 388955 - RNA, 81 nt, Homo sapiens
guugucacaauguggcuuuacagcaugguucagucaauggggacaggugaaaugaaaacuugguguaaguccucagauaac

SEQ ID NO: 388956 - RNA, 93 nt, Homo sapiens
uaggggaauugcuugaacccgggaggcggagguugcagugagcagagaucgcuccacugcacuccagccuccugacaacagagcaagacucug

SEQ ID NO: 388957 - RNA, 89 nt, Homo sapiens
ggacugaggacuccagacaaauagacucauuuuuaucgagcaugaucauaauuaugccugauaaaaaugagugcuagagacuuaggucc

SEQ ID NO: 388958 - RNA, 130 nt, Homo sapiens
ccagagacaaaagggauacgaauguuagggcuuuaguuugcuuguguuugaacaccuacacaugcacaaaccuggccaaacuacagcuuucuccaaauuuuauuucuuuuuuuuuuuuuuuuuucuuugg

SEQ ID NO: 388959 - RNA, 59 nt, Homo sapiens
cugcuuagcugagguggcacuuagguugaagcauuaugagacauuggaaaguuaggcag

SEQ ID NO: 388960 - RNA, 73 nt, Homo sapiens
ucauguagguccuaacuaagaauuuuaaaauucuguuuuuuugauagucuuugcuggugaccuuccaauauga

SEQ ID NO: 388961 - RNA, 63 nt, Homo sapiens
uuuauucuccuguaggagcaaguuccuaaggcaaggagguugcuccccucauggaugaauaaa

SEQ ID NO: 388962 - RNA, 84 nt, Homo sapiens
gaggaaaccuguguucacagaggcuaagugccaggugcaccgugagccccuauggcauuuugugugaauuagaaaacuuuccuc

SEQ ID NO: 388963 - RNA, 57 nt, Homo sapiens
aaaguggugugaguauguaucuaagucaccugacauugugauucacggcaccgcuuu

SEQ ID NO: 388964 - RNA, 86 nt, Homo sapiens
cuugccaagugcauggagcaacagaccuaucacaguuacagccccacggcacuggaagugucugugcccagcucugcugacccaag

SEQ ID NO: 388965 - RNA, 60 nt, Homo sapiens
aauaaaucccauuuaugccuaguguuccauuacuggaaugcuaagcaugugggaguuauu

SEQ ID NO: 388966 - RNA, 58 nt, Homo sapiens
ugagcugagaucacacuacuguacuccagccuggaggucagagugagacuucgucucg

SEQ ID NO: 388967 - RNA, 73 nt, Homo sapiens
caugaugccaucucgggaaggaguuucaggcagaggaggcagugagugcaaagguccugagguggcaaucaug

SEQ ID NO: 388968 - RNA, 64 nt, Homo sapiens
uucaguaguacauucccguguucugucaaacuaaagauucugaacaauagaauaugcuaaugaa

SEQ ID NO: 388969 - RNA, 67 nt, Homo sapiens
gugcuuuguuguggcaguggcagugggauccgugcuuacaugugugugccagcagccacagcagcac

SEQ ID NO: 388970 - RNA, 55 nt, Homo sapiens
auaaaagcaggucuaggucaggauuggaaaacuauggccccuugcuuguuuuuau

SEQ ID NO: 388971 - RNA, 94 nt, Homo sapiens
ccccacagccccaguggaggaaccuucuggugaacugaggagggagggacaagcccggccucaguucauggaggugucugcucugccugugggg

SEQ ID NO: 388972 - RNA, 77 nt, Homo sapiens
gccuccugucucucucacuuuggcauaguaaugauggaccucuccugauuuacuauguuucaaagugucucagaggc

SEQ ID NO: 388973 - RNA, 110 nt, Homo sapiens
gaccugucaauccuguuggaccaucugugagauuaguucuggaccuggugaccucugucucccagggcaguccaaucuccagugguccccgcaacaggcuggacaagguu

SEQ ID NO: 388974 - RNA, 64 nt, Homo sapiens
auugaaauugaugaaauucuugcauuccagugcuucaaagaccuggacuuucaucaguuuuaau

SEQ ID NO: 388975 - RNA, 71 nt, Homo sapiens
gcaggauuuccuucuuuuguaaggcugaauauugcauuuaaauauauaccacgcagaaggagaaauacugc

SEQ ID NO: 388976 - RNA, 56 nt, Homo sapiens
ugaauagugcugcaauaaacauaugugugcacgugucuuuguagcagcaugauuua

SEQ ID NO: 388977 - RNA, 78 nt, Homo sapiens
agaagacuuugguaaacucgguggcaaaaagggcuaugcacaguccaaugccaacccagacuuucccagagguccucu

SEQ ID NO: 388978 - RNA, 76 nt, Homo sapiens
gaaaaaugcuguuccaggaccuaucacagcuuuauaaaaaccaaaucccuugugguggggccugugcacauuuuuu

SEQ ID NO: 388979 - RNA, 64 nt, Homo sapiens
auugugaauagugccgcagucaacauaugugugcaugugucuuuauagcagcaugauuuauaau

SEQ ID NO: 388980 - RNA, 76 nt, Homo sapiens
guauugcugccuggcaaaaagagggcaauaauaaaugcuaguuauuguugguuuuuaguuuuguguggugguaaac

SEQ ID NO: 388981 - RNA, 81 nt, Homo sapiens
uucuuuuggauauugacuuauucuauguuuuauuuuagaagacagaauugauauaagguuuaagucuaauauguagaagaa

SEQ ID NO: 388982 - RNA, 64 nt, Homo sapiens
uucgguuugccaguauuuuauugaggauuuuuguauugauguucaucaaggauacuggccugaa

SEQ ID NO: 388983 - RNA, 69 nt, Homo sapiens
uuugagcccgugagguugagacugcagugagcuguaauggcaccacuguacuccagccugggugacaga

SEQ ID NO: 388984 - RNA, 88 nt, Homo sapiens
cuguuuuucauuugcuugacugauuuaucuccauuuccuuauuuugagccuauggaguguaaauuaguucagccauugggaaaagcag

SEQ ID NO: 388985 - RNA, 82 nt, Homo sapiens
agggacuuuauucauucuuucacagaagagaaaaagagaaaaauaugucuauuccauuugugaaaggaaguguaacuucccu

SEQ ID NO: 388986 - RNA, 63 nt, Homo sapiens
gugggguaggguaggacucaacaaucuauauuuuuagagauaauucaggcugccuugccuuac

SEQ ID NO: 388987 - RNA, 78 nt, Homo sapiens
aacuuuuaucucaaugugucuugacugcacauccaguucccuuuaggaguugagauuuucaaggcacgaauaaaaguu

SEQ ID NO: 388988 - RNA, 87 nt, Homo sapiens
gggaacagguggacuuaagagagcccugacaugggcagauagcugccuuucaugugcaugcuuucuuauguguuuuagccuuuucuu

SEQ ID NO: 388989 - RNA, 86 nt, Homo sapiens
gggucacuguaugguaccagugucagcuuccuguguuacacgagauggcacaguugggugaagcuggugaugaagguaugugaccc

SEQ ID NO: 388990 - RNA, 77 nt, Homo sapiens
caagacagcaauccuugaggucuuugagcaaacgcaagaaccguccuucuccugcugcuggugaccucugcugcuug

SEQ ID NO: 388991 - RNA, 66 nt, Homo sapiens
gccugccaacaugccuggcuguuuuguauuuuuaguagagacaggauuucaccauguuggccaggc

SEQ ID NO: 388992 - RNA, 66 nt, Homo sapiens
guauugcagauucgcuuuguguuggggcacuccuucaacacuuaaccaagcuguuugcaacucuac

SEQ ID NO: 388993 - RNA, 62 nt, Homo sapiens
uuguauacugcacauuuagggagggaaggaauuguauuccuuuccuauugcugcuguaacaa

SEQ ID NO: 388994 - RNA, 57 nt, Homo sapiens
gggcggugccugucuccgaagcgaggagcggauuggcuucacggaggccgcgccccc

SEQ ID NO: 388995 - RNA, 69 nt, Homo sapiens
acaucuggcccuguguauauuucuacuguguacaugugaguauauguagguguacauacaugguuaugu

SEQ ID NO: 388996 - RNA, 66 nt, Homo sapiens
gagaaaguuccaggaaaucuuucucacuaauagccaaggaacugucuauuuccuggagcuggucuc

SEQ ID NO: 388997 - RNA, 74 nt, Homo sapiens
ucccgcagcucuucagagugagcaaugccaguuucuugaaugcuauugcugaugcugaagggaagucacaggga

SEQ ID NO: 388998 - RNA, 93 nt, Homo sapiens
cuguuuggaccaccuuaacuggaaagagaacugacaguaccugggaguuauagaagcccagcuggccaguucucuugccuggagaccagacag

SEQ ID NO: 388999 - RNA, 118 nt, Homo sapiens
uaucuagcugauauuuacugucuaguaaauaucuagcugauguuugucuaguagcaaacauguuguuauugaccaauaguaguuugauauuuacucucuaguaaauaucuagcugaug

SEQ ID NO: 389000 - RNA, 65 nt, Homo sapiens
uuggaauucuuuggaaacaguacuaauucuugauaucaccaggaauuccaauucagaauguccaa

SEQ ID NO: 389001 - RNA, 68 nt, Homo sapiens
ggauuuugagguuauuuguucaagaaguuagcuuccccuaacucuuacauagaccucauugaaaaucc

SEQ ID NO: 389002 - RNA, 56 nt, Homo sapiens
aggaacucuagauuuuagucuaucuccaaauuuauggauggauuggaaaaguuccu

SEQ ID NO: 389003 - RNA, 76 nt, Homo sapiens
agugcuacucuggugaaaacauucaugauaagaaaacaaagcccuaauuacuauggauauugccuaggguaguacu

SEQ ID NO: 389004 - RNA, 130 nt, Homo sapiens
uccaccugccucggccucccaaagugcugggauuacaggcaugagccacagugcuuggccuuaaaauuuuuuuuaaguagcugggcaugguggugcaugccuagcugcuugggagucugaggcaggagga

SEQ ID NO: 389005 - RNA, 92 nt, Homo sapiens
aauggcuauaaugucacugagcaauagaaaguuuucaacuucauuauaauuuuuuggauuuuuuuaauguuuguggauacacaguaggcauu

SEQ ID NO: 389006 - RNA, 72 nt, Homo sapiens
aacugccucguuuuuauuucuguccccauugaaugacacagccaauggcacaagacaugaagaagaggaguu

SEQ ID NO: 389007 - RNA, 60 nt, Homo sapiens
aucgcauaaucucuaaaaagcaaugauagugaacacaguucaugccagaguuuaugugau

SEQ ID NO: 389008 - RNA, 57 nt, Homo sapiens
gugcuauguuauccagcaagaugacccugcaaagucaaugcuguguauucaaggcac

SEQ ID NO: 389009 - RNA, 55 nt, Homo sapiens
uuuccgcagaugcucagcugagccagugcagcuggcucccugacaaauguggaaa

SEQ ID NO: 389010 - RNA, 118 nt, Homo sapiens
guuuguuuguuuguuuuuguucuguuguuuuguuuccaagauaguggauuagaggcuuuuagcaugcuucagcuacuuggaaacagcaagauagugaaugaaagucaacuuugugaac

SEQ ID NO: 389011 - RNA, 57 nt, Homo sapiens
cucaccuugugauccuccugccucggccucccaaagugcuaggaucacaggcgugag

SEQ ID NO: 389012 - RNA, 55 nt, Homo sapiens
cuggaugagauuaacauuugaggagcugcguggcggcucacaccuguaaucccag

SEQ ID NO: 389013 - RNA, 91 nt, Homo sapiens
ucuaccuauugugguuuuuaaaguaccugugguccaggggcaguggcucacaccuguaaucccaggacuuugggaggccaaggugggcgga

SEQ ID NO: 389014 - RNA, 118 nt, Homo sapiens
aucgcuuccacauuuuuagguaucuuuauagcaguagcccccuucugguacuaauuuucuguauuagcccauucuugcacugcuauaaagaacuacucaagacuugguaauuugugau

SEQ ID NO: 389015 - RNA, 60 nt, Homo sapiens
ccaacaguacaugauaaauaagguauugucugagaccuugcuuuauauuuauguaguugg

SEQ ID NO: 389016 - RNA, 57 nt, Homo sapiens
gggaggagagugaggaggauaauuuaaaacucauuaugcuuuggucauacuucuucc

SEQ ID NO: 389017 - RNA, 81 nt, Homo sapiens
gggauuacaaacaaauuuuuagcaacuagguagguuucacaaauauggaaucugcaaauaaugaagauuggcuguaauucc

SEQ ID NO: 389018 - RNA, 70 nt, Homo sapiens
uuucauccggcuguguauuaugaaguuugcuugauucuucccccuucucuugauuagcuccuggaugaag

SEQ ID NO: 389019 - RNA, 56 nt, Homo sapiens
ucgguauuuuagaauugagacuacauuucuaguaguauucucaguuuaaaggcuga

SEQ ID NO: 389020 - RNA, 108 nt, Homo sapiens
uaggggcuugcuguaaugcagucacuuggugaacacauuaugugcuucugggagauaauaagcuacaucgauggucagccgaggagaucugcuccacagagaccccua

SEQ ID NO: 389021 - RNA, 61 nt, Homo sapiens
cagaacucuuaucaaaacaggucaauaugguguguaugaucuguguaacauaggaguccug

SEQ ID NO: 389022 - RNA, 61 nt, Homo sapiens
gcaguuaugugaaucauguguuauaagagggggcuuaaaggcaugguuagacaugguuagc

SEQ ID NO: 389023 - RNA, 57 nt, Homo sapiens
cuauuugcaaagcacuaagaacaguguccggcacagagucagugcuauguaauguag

SEQ ID NO: 389024 - RNA, 59 nt, Homo sapiens
ccuaggaaguagacccauuacguaguuuccagaaauacugguuggguuaccuuccuggg

SEQ ID NO: 389025 - RNA, 62 nt, Homo sapiens
gauucauuucugacaugauuuggauguauuuuccccuccaaaucucauguugaaaugugauc

SEQ ID NO: 389026 - RNA, 70 nt, Homo sapiens
cauccaugugugaaucccagaaccugugacuguuaccuuacauggcaaaagggacuuuacagcagaggug

SEQ ID NO: 389027 - RNA, 88 nt, Homo sapiens
gcacaagucuuggacuucccagaaagacguugaccauguauugccuauugguaauguaauuuggagaaggcaugaaaaggcuugaugc

SEQ ID NO: 389028 - RNA, 97 nt, Homo sapiens
uguucauggaggagaugcagaguauaaguugacucaaucuuuggcaagauuuuuccuucuuuaaaggucaaguuaugcucuguaguauauuuggaca

SEQ ID NO: 389029 - RNA, 71 nt, Homo sapiens
caccuggagggcuugcuaaaacagauuccugggcccuagcccagauguuuucauucagcaagucuggggug

SEQ ID NO: 389030 - RNA, 79 nt, Homo sapiens
ggagugcaguggcacgaugaucugggcucacugcaaccucugccuccuggguucaagagauucucgugccucagccucc

SEQ ID NO: 389031 - RNA, 56 nt, Homo sapiens
uccauguuguugcaaaugauguugacuguugugaauagugcugcaauaaccauggg

SEQ ID NO: 389032 - RNA, 114 nt, Homo sapiens
uuguugguggcauuucaucgaggauccaugguauggcaguuucagcuauaguuuuugcucagggauuuauuguuggaauucuauccuggaucuauguugugacugucuuagcga

SEQ ID NO: 389033 - RNA, 61 nt, Homo sapiens
cuggcaagaggauaaaguccuaacuccuuaucauggaguccaaacuauaucuacuuuccag

SEQ ID NO: 389034 - RNA, 128 nt, Homo sapiens
ucuugcuuuuagagucuguuguugucugaguuuaagucaucuaucaccauguccguuuuaaaagcagaggcuuuuaaaaggucugaugauaaaugucuaauauugauauuuagaauauaaagcuaaga

SEQ ID NO: 389035 - RNA, 92 nt, Homo sapiens
ucuaaauuacugggcuugcauaucacaaacaagucuguacuuguccuccuacucuacaaauauaaauauaguaugugauguaggccuuugga

SEQ ID NO: 389036 - RNA, 63 nt, Homo sapiens
aguuuacauguuguggguuguggccuuguuaaaaggcucacugcuucuacggcaaguugugcu

SEQ ID NO: 389037 - RNA, 60 nt, Homo sapiens
agucuuuucccauuguucugcucuguggaagucaccuucagaguaauagugggggugacu

SEQ ID NO: 389038 - RNA, 88 nt, Homo sapiens
acaugcuccugcccaugcuuagcccagugggugcuucucuuccuggggccagcaggaaguccgcuuggcugguggggcaguggcaugu

SEQ ID NO: 389039 - RNA, 79 nt, Homo sapiens
agaugcuuuuucucuuucgaugaggcuauguccccaaaaacccaacauaagucaacaucaugaaguggaaaauacauuu

SEQ ID NO: 389040 - RNA, 60 nt, Homo sapiens
caagugaaugaugugaaguguaaacaaccaucuauguuucauguuacugucauacacuug

SEQ ID NO: 389041 - RNA, 109 nt, Homo sapiens
cagaucaucaggcauuauauuuucauaaggagcacacaaccuagaucucuugcaugcacagcucacaauaguuugugcuccuaugagaaucuaaugugcugcuaaucug

SEQ ID NO: 389042 - RNA, 111 nt, Homo sapiens
gugauauuagaaguauacuugucugguuuuaaaauuauucauauguuuacaaaugugaggagaugaggagauauuaaauaccauugggcuuuuauauuuauaauuuaucau

SEQ ID NO: 389043 - RNA, 83 nt, Homo sapiens
cugaagugauagcauuaagcuagcauagggguaaauuaaugaguauauuaauuuagaauucgcuagcuaaugucucauuucag

SEQ ID NO: 389044 - RNA, 57 nt, Homo sapiens
gaagccagguuucagcauuuaggaugcagccaacagccaaauugcuuucuugguuuu

SEQ ID NO: 389045 - RNA, 62 nt, Homo sapiens
gugagcugcuugggauaucagagaaguuuaaaaacuucucugguuuucaaagcaguauuugc

SEQ ID NO: 389046 - RNA, 66 nt, Homo sapiens
ucccaaugagaugagccggggaccucaguuggaaauaacccaccuucuguguugaucucacuggga

SEQ ID NO: 389047 - RNA, 58 nt, Homo sapiens
gggugagguaugggagaaggggcauagaacuuccauuucuucucugguuguacuaccc

SEQ ID NO: 389048 - RNA, 88 nt, Homo sapiens
uaucacacucaucccacuagcuuguccuccacccacacugcaucccugagcugggacacgcagaggacaggugugaugaaggugcaug

SEQ ID NO: 389049 - RNA, 63 nt, Homo sapiens
uauuagguaauauaaucauggcaguuauaucccauaacuucugccauauucuauugcuuagua

SEQ ID NO: 389050 - RNA, 103 nt, Homo sapiens
gucccacucuguugcccaggcuggagugcagugaugguaucuugacucagcaccuccuggguucaagcaauucugcugccucagccucccgaguaacugggau

SEQ ID NO: 389051 - RNA, 59 nt, Homo sapiens
aacgugagcauaggaggcuucuguugacguacuccaacagaagaacuguguuucaaguu

SEQ ID NO: 389052 - RNA, 58 nt, Homo sapiens
ugagcuagggucaugcuacugcacuccagccugggugacagaacaagauccugucuca

SEQ ID NO: 389053 - RNA, 60 nt, Homo sapiens
gucucuucuguagagcaaaaaguaguuagagugacuaguuaggucucucacagagaagac

SEQ ID NO: 389054 - RNA, 118 nt, Homo sapiens
gaggaugaaacaagaugauagaucaugguggcauguagucugggaccuggauugucgugccacagaucacagcucacagucuaugugcaaugccccugaauguugcccaccuguccuc

SEQ ID NO: 389055 - RNA, 59 nt, Homo sapiens
agaguucuuaugugugcacgaccuaugagacuagaaaacuguaacacauggagaacucu

SEQ ID NO: 389056 - RNA, 73 nt, Homo sapiens
uuucauuucagccauuggauagguuuauagugauacuguguuuuccuuugcaccuuccuaguggcugaugaag

SEQ ID NO: 389057 - RNA, 77 nt, Homo sapiens
ucgcuugaacccaggaggcagagguugcagugagccaagaucgcgccauugcacucuagccucggcaacaagagcga

SEQ ID NO: 389058 - RNA, 59 nt, Homo sapiens
uggagguuugcugaaugccauuuguaugaauaccauuuagguauuugguaaacucucca

SEQ ID NO: 389059 - RNA, 55 nt, Homo sapiens
cguuuugaucagugauggaccgcauauacaaugguggucccauaagauuauaaug

SEQ ID NO: 389060 - RNA, 57 nt, Homo sapiens
uguaaauuggcacacuggcauccuaggacugcauugaugccagugugucaauuuaua

SEQ ID NO: 389061 - RNA, 81 nt, Homo sapiens
aguucuaggguacaugugccaacgugcagguuuguuacauauguauacaugugccauguugguaugcugcacccauuaacu

SEQ ID NO: 389062 - RNA, 74 nt, Homo sapiens
uguauaacauuauacagagaggacagugguaaacuuaggacugcugcccuuucuauaugauguaauuuuauaua

SEQ ID NO: 389063 - RNA, 78 nt, Homo sapiens
aaucauguguauuuagcagugguugguuucugugcuuuuauaugucucaguaaagccagaccuguuaauugugugauu

SEQ ID NO: 389064 - RNA, 63 nt, Homo sapiens
uucgguuugccaguauuuuauugaggauuuucgcauugauguucaucaggguauuggccugaa

SEQ ID NO: 389065 - RNA, 57 nt, Homo sapiens
aaagcacacuguguacugguugcagaaucaguuggggaacaccagugcaugugcuuu

SEQ ID NO: 389066 - RNA, 89 nt, Homo sapiens
cuaagucacacuguuauuugaccugaagccugguacuuagaauuguucccguagaaguggcucaguugcaaaucaguucagugacuuag

SEQ ID NO: 389067 - RNA, 69 nt, Homo sapiens
ccggaaguggccuagagcgaccauuuagcuucuguuguuaaguggaucuaagccuaugucgcuuacugg

SEQ ID NO: 389068 - RNA, 67 nt, Homo sapiens
cuuccauauucuaggacaggcugacaggcgaucacaaccaaaguugccaguccuggguauggggaag

SEQ ID NO: 389069 - RNA, 66 nt, Homo sapiens
agaguaccauuacucacuuauuuuuuggggccaaugugcagaauuuacaguugcugaugguacucu

SEQ ID NO: 389070 - RNA, 74 nt, Homo sapiens
agaaccacugggcuggaguagugugauagaacaagaaagcagaacacugugcauacugggagguuggguguucu

SEQ ID NO: 389071 - RNA, 88 nt, Homo sapiens
ccugugaaaagcagaagucacagaugucucucagaagacgugaaauccaccagagagugacacugucuucugcucuuaaauccacagg

SEQ ID NO: 389072 - RNA, 81 nt, Homo sapiens
ggccucagcaaaucauccuauuugagcaauaaagacagcccaagcugguaccaagcaucgauaggaaauuuguuaaagguc

SEQ ID NO: 389073 - RNA, 60 nt, Homo sapiens
agagguguugugaauuauauuuccuuuuccuggccuaguuguacaguacacaacaccuuu

SEQ ID NO: 389074 - RNA, 73 nt, Homo sapiens
uugucaaaacccauaauuuguauaacacugagaaugaaccuucauguaaacuacagauuuugggugaugauga

SEQ ID NO: 389075 - RNA, 64 nt, Homo sapiens
auagaauagcauuacuuggugucuauggacauuuucugcccccagcaccagugcaugcuacuau

SEQ ID NO: 389076 - RNA, 64 nt, Homo sapiens
auugugaaugaugccgcaauaaacauacgugugcaugugucuuuauagcaacaugauuuauaau

SEQ ID NO: 389077 - RNA, 64 nt, Homo sapiens
auugugaauggugccgcaauaaacauacgugugcaugugucuuuauagcagcaugauuuauaau

SEQ ID NO: 389078 - RNA, 73 nt, Homo sapiens
gcuucucguuuuguuucuacuguaggauuuucuaugugcauaaucauacuguugugaaacaaaacaaguaagu

SEQ ID NO: 389079 - RNA, 55 nt, Homo sapiens
ucugguucgugccacggcccugacuugauacaggcagguagugucugaagccaga

SEQ ID NO: 389080 - RNA, 106 nt, Homo sapiens
uuacuccaucuuggguuuuucuuuacuagcagcaugagaauggaccaauacaguaaauugguaaugguaaagugaggugcugcuguaaggauaccagaaaauguag

SEQ ID NO: 389081 - RNA, 65 nt, Homo sapiens
ugaguguauguagugaccagggccagagguacuggacuucugaaacuuggacuuuauacgauuua

SEQ ID NO: 389082 - RNA, 101 nt, Homo sapiens
gauauauaaauauauguagaaaaagucuagaggaucaugugugguuuucucuaaguagaggcauuauaaaugauugucacuuuauauacauacuuuauauc

SEQ ID NO: 389083 - RNA, 57 nt, Homo sapiens
cugggagguggagguugcagugagcugagauugggccacugcacuccagccuuccag

SEQ ID NO: 389084 - RNA, 60 nt, Homo sapiens
ggauggcaugugcugccaccaagguauccacacuuaguugccuagcacaugcugagcucc

SEQ ID NO: 389085 - RNA, 99 nt, Homo sapiens
uauguauguguguacaugaguacauguaugguaugcauguguguacauguaugugaguacaugcauggcaugcauuguaccugugugugcacaugcaug

SEQ ID NO: 389086 - RNA, 113 nt, Homo sapiens
guuuuuauagaaucuugucuuuugcacaauaaaaggcaauucuccauuucaaugcagauauugaguaaaugaaaauugccuuuuuaaauuugagaggacagaagaauaaagau

SEQ ID NO: 389087 - RNA, 64 nt, Homo sapiens
guuugcauagugcugggaggggaggggaaggcugaucgccccacccuaaucuuauugugcaaau

SEQ ID NO: 389088 - RNA, 97 nt, Homo sapiens
gauggugucagagaucaacugaauuacuggacaccuagcugguguucagagaauuggauaauucguugaugugaaaagaaaccucugauuugguguc

SEQ ID NO: 389089 - RNA, 60 nt, Homo sapiens
gagaaugaugauuuccaauuucauccaugucccuacaaaggacaugaacucaucguucuu

SEQ ID NO: 389090 - RNA, 62 nt, Homo sapiens
ccaugugauuagaaauguacacagcaguacugcugaccuaaaaaauuacauuuguuacaugg

SEQ ID NO: 389091 - RNA, 84 nt, Homo sapiens
gguuuauaucaaguuucauggcucaguauaucuugggaauccagugugaaucaaguacugggcuauggauauuuaagagggauu

SEQ ID NO: 389092 - RNA, 104 nt, Homo sapiens
guugugggagggaaggaggugacgcagcaaucuauuugcaccuagaaauuuuaggcaagugauagcugcguaaucauacugcggcaccguuuuuuucuugcagc

SEQ ID NO: 389093 - RNA, 78 nt, Homo sapiens
agcucacaucuauuucugcuaauaacaaucccacugcuaauuaugggaugugguaguuauagugauaagagaggagcu

SEQ ID NO: 389094 - RNA, 60 nt, Homo sapiens
uugugaauagugccacaauaaacaugugugcaugugucuuuauaguggcaugauuuauaa

SEQ ID NO: 389095 - RNA, 69 nt, Homo sapiens
cuccacggcucacugggaccacucugaaguuggcugacguucaacuuuucccuggggugggucuuggag

SEQ ID NO: 389096 - RNA, 91 nt, Homo sapiens
auucugacgguaugucaaggaauucucaauagaguuaauuuuuuuaaaaaacugacucuugaaaguugacuuggaauuuaccaggcagagu

SEQ ID NO: 389097 - RNA, 67 nt, Homo sapiens
uugaggaggcagucugucccuuagcagagcucgagcacugugcuaggagaucugcugcucucuucag

SEQ ID NO: 389098 - RNA, 91 nt, Homo sapiens
gguaaaauuuagcauuugaggaauguguguuaaagauacacaagaauuccuuguacuauuuuugcaacauuucuguaagucugaaauuacc

SEQ ID NO: 389099 - RNA, 84 nt, Homo sapiens
uauuaggcuguugcaaaaauaauugccguuuuugccauugaaagugauggcaagaaccacaauuacuuuugcaccaaccuggua

SEQ ID NO: 389100 - RNA, 63 nt, Homo sapiens
aucuaugcuucuuaaauuaguuaugcaauuacaaaagaaagcaugauucauugaaguuuagau

SEQ ID NO: 389101 - RNA, 61 nt, Homo sapiens
ccucagaagaaguggaauugaugcucccuuuaccuucuaagcaucaaacugcucuuugagg

SEQ ID NO: 389102 - RNA, 66 nt, Homo sapiens
augaaucaacagugauggaaaguuauacugaaucauuucauaucuguuuugauuacugugaauuau

SEQ ID NO: 389103 - RNA, 78 nt, Homo sapiens
agguuucuuauuggugaggaaauuaugagcagugcaaauucuuuuguauaggcaaauuuccucauggauuaugggcuu

SEQ ID NO: 389104 - RNA, 65 nt, Homo sapiens
ugaagagagcagugguucucccagcauggcauucaagcucugagaaugaacagacugccucuuca

SEQ ID NO: 389105 - RNA, 84 nt, Homo sapiens
ugggacucugauaagucuggcacagucuagccaucuguagagaacugagauggcacuuuggacugcuagaugcuguagauccua

SEQ ID NO: 389106 - RNA, 64 nt, Homo sapiens
uucgguuugccaguauuuuauugaggauuuucacauugauguucaucagggauauuggccugaa

SEQ ID NO: 389107 - RNA, 60 nt, Homo sapiens
ccuugucacugaguggaaugaaacaagcauuaaaaacuguuuaauuuucucagugugagg

SEQ ID NO: 389108 - RNA, 62 nt, Homo sapiens
uaggacacagauggagaaaagcaagaggucauauuccaauguaucuuucuaccuguguucug

SEQ ID NO: 389109 - RNA, 72 nt, Homo sapiens
uuccauggccaacauauugacuuuuuuguuaggaggguggaaucaccccuacuccauagucaauucauggga

SEQ ID NO: 389110 - RNA, 68 nt, Homo sapiens
aguuguguugguuacucugugaucuagauucucaaguuaucuccuucaugguagcaccaacaauaacu

SEQ ID NO: 389111 - RNA, 86 nt, Homo sapiens
ggccagugcagcaaagcgguugaaagugugcacuugaggaggcagcagagccugaguucaauuuccagcuguucuguuuacuggcc

SEQ ID NO: 389112 - RNA, 65 nt, Homo sapiens
aaacaagacuagaaaucauuuguugagcacuuaaugcuuagcagucacuguucuaaguauuguuu

SEQ ID NO: 389113 - RNA, 59 nt, Homo sapiens
uuuuagcuuuucccaggacuccucuaaugacaacuccggaguuuucccugaagcuaaag

SEQ ID NO: 389114 - RNA, 73 nt, Homo sapiens
auuagguuggugcaaauguaauugugguuuuugccuuuaaaaguaauggcaauugcauuugcaccaaccuaau

SEQ ID NO: 389115 - RNA, 63 nt, Homo sapiens
ucucuauacuacguuuuccacacagcgcucggcacugagccaugggguaaaugugauaagagg

SEQ ID NO: 389116 - RNA, 69 nt, Homo sapiens
acucugguccaguuauccuguggggaggagacccuuagucuccuguccuuggaggcugggucccagagu

SEQ ID NO: 389117 - RNA, 115 nt, Homo sapiens
gagccagugagauguuuuugcugacaguuauggccuaugacagguauguugccaucuguaacccuuugcgcuaccuuauaagucaugaacccccagcuaugccuuugguugguuc

SEQ ID NO: 389118 - RNA, 92 nt, Homo sapiens
cuccuagaacuugcauucuacuauuggagacaaaugacuauaugauguaggcaaugucagcuaaugauggaaagcaaagcaaguugaaggag

SEQ ID NO: 389119 - RNA, 61 nt, Homo sapiens
ugcccucaugaggcuuaguacauuccugacacacuguguaaaacugagcuaccugggggca

SEQ ID NO: 389120 - RNA, 90 nt, Homo sapiens
gugaucggaggagcugccaugaagaucccugaaaugcucuggagguauauucuacauuuucuuggcuauuaacauucagcuccuuguuac

SEQ ID NO: 389121 - RNA, 55 nt, Homo sapiens
uccuaaaugggagacggcauggucacaugugaaccaaaugcuguaauguuuggga

SEQ ID NO: 389122 - RNA, 86 nt, Homo sapiens
aaaccuuguuucuuuaugguuuucucuuacguguuguuguauuggauggcaacucugugaguaagauuacaaugaaauagagguuu

SEQ ID NO: 389123 - RNA, 71 nt, Homo sapiens
uauugcuacuuugccuuccaaagucuugccuucuacagcuacauaacuccaggaaaucagaagugguaaug

SEQ ID NO: 389124 - RNA, 67 nt, Homo sapiens
uucaauuauuaacuucucccagcuuggugaugaauuucaaccacguagaugagagaguuaaagugaa

SEQ ID NO: 389125 - RNA, 59 nt, Homo sapiens
ggggagacagggacagugaucuaaagucuccaguggcauugugaacauuucccugcccc

SEQ ID NO: 389126 - RNA, 72 nt, Homo sapiens
ggauccaugguauggcaguuucagcuauaguuuuugcucagggauuuauuguuggaauucuauccuggaucu

SEQ ID NO: 389127 - RNA, 59 nt, Homo sapiens
gggagcuuggaggcccggcugguuuuucuaaggaguuggccggguggccauggcugccc

SEQ ID NO: 389128 - RNA, 90 nt, Homo sapiens
ugggccccacggacauuuuggcuggaucauucuuucuugcaggggcuuuccuaugcauugcagggugguuaacaaggucccuggccccca

SEQ ID NO: 389129 - RNA, 55 nt, Homo sapiens
cuccagucuuguuuccuaccuaaugaguuagucagaauaggaacauugauuggag

SEQ ID NO: 389130 - RNA, 60 nt, Homo sapiens
ccucuugggcaaaacucaaccagggcuaacaaauaaggcuggauugagaaccccaggagg

SEQ ID NO: 389131 - RNA, 56 nt, Homo sapiens
uagggacugugguacacugugcuauaugacaagguagaggacugaccacagcccua

SEQ ID NO: 389132 - RNA, 82 nt, Homo sapiens
uaacuauguucugggucacuaggugugaugguuaauuuuguauuaacuugacugagucauugggugcccagagauuugguua

SEQ ID NO: 389133 - RNA, 80 nt, Homo sapiens
aguuucacagucuauuucaaagaaaagauuugcauuugugaggcacacaucugcaguacuuugaaauauacuggcaaauu

SEQ ID NO: 389134 - RNA, 57 nt, Homo sapiens
uuucauaguuugcauagggcauuugcauagggcaaaugcuuuaguacagacuuggaa

SEQ ID NO: 389135 - RNA, 82 nt, Homo sapiens
gucuuugucugcuguguuugagaucugugcuuuugcguuggcgagccccagcacaaggguaguuucagugauuugcaaggac

SEQ ID NO: 389136 - RNA, 89 nt, Homo sapiens
aucauaugguuuuuguuguugguucuguuuauaugcuggauuauguuuacugauuugcauauguugaaccagccuugcaucccagggau

SEQ ID NO: 389137 - RNA, 70 nt, Homo sapiens
gcagaucucucuucucauugacauguccucacaguaaaugaugacuugaagaaucuaagggagguucugc

SEQ ID NO: 389138 - RNA, 71 nt, Homo sapiens
ucacuucuuuugugauuuuucaguuacuucaggccuucuggauguauacgugcaggucacaggggauauga

SEQ ID NO: 389139 - RNA, 60 nt, Homo sapiens
uuggagucaucucuguacuguaaagauuagauagaacucaucaggcucugaugacucuaa

SEQ ID NO: 389140 - RNA, 103 nt, Homo sapiens
uugagacggagucucgcucuguugccuaggcuggagugcaguggcacgaucucggcucacugcaaccucugccucccagguucaagagauucuccugccucag

SEQ ID NO: 389141 - RNA, 105 nt, Homo sapiens
gcacauaaaugcaggguaccuuuccuucccguuauugcccuugggugucuggcugcuuaggaugcccauuugccagauggggagagugaggccuguagaaggugc

SEQ ID NO: 389142 - RNA, 80 nt, Homo sapiens
uaaguggugugacucauagcucucaguuuuugguagacagcugaagccagagaacauucagagcuguagacaaacacuua

SEQ ID NO: 389143 - RNA, 88 nt, Homo sapiens
ggagaaucacuugaacccaggaggcagagguuguggugagccgagaucacgccauuacacuccagccugggugacagagugagacucu

SEQ ID NO: 389144 - RNA, 85 nt, Homo sapiens
cuaaugguuauaggucuuuuaugaaauauauuugcaaguuguccucuucuaguaagucuuuuaauuaaaaguuuauauucauugg

SEQ ID NO: 389145 - RNA, 67 nt, Homo sapiens
uggauuaagugcuugccagugcugguagagaagccugucaccucccaccacucucagcacuugucca

SEQ ID NO: 389146 - RNA, 92 nt, Homo sapiens
accauggacuauaacagcugcaaggcaaaagcagcaaauaaucaauggagaaaugccuggcuuuugccuuuggucuuuaucuaggucugggu

SEQ ID NO: 389147 - RNA, 97 nt, Homo sapiens
ucguggggguacuuaggaacaguuuuagacuaaugcgaaaggaauucuauuuaggaaugaagcuuguuucuguaccuuuucuaauguucuuccacgg

SEQ ID NO: 389148 - RNA, 56 nt, Homo sapiens
caugaauuagcaauggugugcagggaaggaaccaguaucaccacagcucguucaug

SEQ ID NO: 389149 - RNA, 79 nt, Homo sapiens
gggcuuaugaucuggagguuuuccucaugacugcaggcaggaucucuuuuucaugcaggaccaccccagcaucaagcuc

SEQ ID NO: 389150 - RNA, 62 nt, Homo sapiens
gauaagguuuggaguacaacugaucccgucacccaggugugcauaguacccaauacuuuauc

SEQ ID NO: 389151 - RNA, 55 nt, Homo sapiens
guuuugaauacuacuagaacuugggcagguccuacaaacuuggugguguugagac

SEQ ID NO: 389152 - RNA, 96 nt, Homo sapiens
aagacccacaguggagagaguuagagauaggcuguguggccguggggcucagcggagggaagucgccaggcugcauggccacucuguuugggucuu

SEQ ID NO: 389153 - RNA, 56 nt, Homo sapiens
ucuugcagagucauucuaauuucuaguuauucuucuaggaagagucccucucaaga

SEQ ID NO: 389154 - RNA, 92 nt, Homo sapiens
ucuuccuauauuguacugcuacugguucuguuucuuugguugaauccuaacugauauaaaagggaucauaggaaguacaaucgggcaauaga

SEQ ID NO: 389155 - RNA, 57 nt, Homo sapiens
gcaucacagggagacaggccuccggauaacugcgggcaggucugacuaaugugaggc

SEQ ID NO: 389156 - RNA, 57 nt, Homo sapiens
gauggcauugaagaguugucccuacuggugugagggagcugggccuucacugucauc

SEQ ID NO: 389157 - RNA, 66 nt, Homo sapiens
ugugugugugugugugugugcguguuagcagaagcugguaauagcucggauaaacaugauuucaua

SEQ ID NO: 389158 - RNA, 78 nt, Homo sapiens
cacaccccuggauagagauugaugaugcuaaugagccacacaaugugugaacaagcacguacagcuacuguccaugug

SEQ ID NO: 389159 - RNA, 80 nt, Homo sapiens
gcagaaaggagaaaaagaaauagcuaguauaggacuacauagucacgugcuuucuuuucauuuagaauuuccucuuuugc

SEQ ID NO: 389160 - RNA, 63 nt, Homo sapiens
guaguuuaucagaaagaauagggccaaaauguagcuuauacuauuucuuuuuggaugggcuau

SEQ ID NO: 389161 - RNA, 94 nt, Homo sapiens
augggaauacaauucaagaugagauuuggguggggacacagagccaaaccauaucauuccgcccuuggccccuccaaaucucaugucuucccau

SEQ ID NO: 389162 - RNA, 89 nt, Homo sapiens
ggggaaggggugaugagauggaucuuggauuugaacccaucaguuuguguuagaaccuaaguucucuuucuauguuauaacccugcccc

SEQ ID NO: 389163 - RNA, 81 nt, Homo sapiens
ugaucaugguggauaagcuuuuugacgugcugcuguauuuguuuugccaguauuuuauugaggguuuucacguuauguuca

SEQ ID NO: 389164 - RNA, 58 nt, Homo sapiens
gcauguucagcuuuaguauguuuucagaaaugcauuacauaaagaagcaggacauugu

SEQ ID NO: 389165 - RNA, 102 nt, Homo sapiens
cugaggcaggagaaucgcuugaaaccagggggcggagguugcagggagccgagauugcgccauugcacuccagccugcugacagagugagauuccgucucag

SEQ ID NO: 389166 - RNA, 78 nt, Homo sapiens
aucucaaccucugaggacagaagggggcucucaaauccgcccaugcauugagaucuucgcucuucacagaggugggau

SEQ ID NO: 389167 - RNA, 78 nt, Homo sapiens
ucaauauagaaaagauacaguaugcaugugguauuauuauuuuauggaaccacugacauauaugugaucugucauuga

SEQ ID NO: 389168 - RNA, 78 nt, Homo sapiens
cuuuuccuucauucucauuucauagugcuuaauuugauaagaguucuaguugcauuggcugcuaugcugggggaaaag

SEQ ID NO: 389169 - RNA, 59 nt, Homo sapiens
cucaccucaggugaucuggcuaccucugccucccaaagugcuaggauuaccugggggag

SEQ ID NO: 389170 - RNA, 89 nt, Homo sapiens
gccuuugguuuggaaaccuaguagccacagguggcgaggaaguuuaagagcgcuuggguggcuugauggcacaagguuucugaacgggc

SEQ ID NO: 389171 - RNA, 129 nt, Homo sapiens
aaacugcaacuuuaagcaaaccaacuauagcagguccucaaaugacaucauuucauucaacaucauuuuuuuacagcguugaugagaaaaugugguuuggcuguauguuguuuugccuaaaguuaguuu

SEQ ID NO: 389172 - RNA, 66 nt, Homo sapiens
cugaaguuggugagauaucugcugauguuuaagauguaagcaaggugguaucuuacucaugaucag

SEQ ID NO: 389173 - RNA, 93 nt, Homo sapiens
aguaaguuggugccuaaguaauggcaguuuuugccauuauuuucaauggcaaaaacugccauuacuuuugcacuaacccaaauaaaauuuacu

SEQ ID NO: 389174 - RNA, 68 nt, Homo sapiens
uuuggguagauacccaguaguggaauugcuagauugaauaguagaucuucuauugguuguuugacaaa

SEQ ID NO: 389175 - RNA, 57 nt, Homo sapiens
ccaugaaagugauaaaugucucuaaccaggguuagaaaagauguuguccuuuuaugg

SEQ ID NO: 389176 - RNA, 98 nt, Homo sapiens
ggcaggagaaucgcuugaacccgggaggaagaaguugcggugagccgagauagugccaucgcacuccagccugggcaauaaaagcgaaacuccauguc

SEQ ID NO: 389177 - RNA, 64 nt, Homo sapiens
auugugaauagugccgcaauaaacaugcgugugcaugugucuuuauagcagcacgauuuauagu

SEQ ID NO: 389178 - RNA, 70 nt, Homo sapiens
gccagcuggcaguggaagugccaguuucuucguguguaaaacaagagaaggcaaucuacugccuacuggc

SEQ ID NO: 389179 - RNA, 58 nt, Homo sapiens
ugagugcuggcuguagugacugggcagauuaucauuaggucacuggacagcacacuca

SEQ ID NO: 389180 - RNA, 73 nt, Homo sapiens
ugcaauuccaugugaagagaccaccaaacaggcuuugugugagcagcauggcuguuuauuucaccugggugca

SEQ ID NO: 389181 - RNA, 74 nt, Homo sapiens
ggguuuucaaaauaauugcaguucuguguuauaucccauuugggggaggugacaggaugcagauaaacaaaccc

SEQ ID NO: 389182 - RNA, 84 nt, Homo sapiens
uauuagguuugugcaaaaguaauugcgguuuuugcuguuacuuuuaauggcaaaaaccgcaauuacuuuugcaccaaccuaaua

SEQ ID NO: 389183 - RNA, 97 nt, Homo sapiens
uugaaaauguaagagcauaaaagcuggauuucgcauccuguuaggguauuuuugguccuaucagagaugggaagucagcuaauaauugcauauuuag

SEQ ID NO: 389184 - RNA, 72 nt, Homo sapiens
aggauucuccucuuuucucaguugcauaagcaaauccuuaugcaaacaucugaagagacaucagagaaucuu

SEQ ID NO: 389185 - RNA, 63 nt, Homo sapiens
uggcgauuguuaugagaaguaacugagcuaguauuuucucagcaaucucacagcaaucuguca

SEQ ID NO: 389186 - RNA, 67 nt, Homo sapiens
aagggacagccauggggcgcagccaacggggaguuauaaaggugguuaacagcacaugcugucccuu

SEQ ID NO: 389187 - RNA, 83 nt, Homo sapiens
uuuuucuagagagaagacuuaagcuuuuauguagucuuauuauuuuccuuuauuacuucugguuguguuuuccuuuagaagag

SEQ ID NO: 389188 - RNA, 77 nt, Homo sapiens
ucggaaguuaggaggcuuaaaaucucagucuuguuucaacaaugcauugauugagcaaggucuccuaguauuucuga

SEQ ID NO: 389189 - RNA, 117 nt, Homo sapiens
ccugccccuguucucccccaugccccuagagcuacagcccucacugucccgugaggggaaaaggcauggugacaaugggggcuguagcccuaggagaacggggggaagaugggcagg

SEQ ID NO: 389190 - RNA, 60 nt, Homo sapiens
uguauagccacuauuaaagcugcaauugacuaggaauuuuggcuauuucuguggcauaca

SEQ ID NO: 389191 - RNA, 82 nt, Homo sapiens
ugucguguaguuuucauguauuucacugcuacuagauauuccucagauaucuuugcugagaugcauggcaaaugaacagaca

SEQ ID NO: 389192 - RNA, 64 nt, Homo sapiens
uucaguuugccaguauuuuauugaggauuuucgcauugauguucaucaggaauauuggccugaa

SEQ ID NO: 389193 - RNA, 86 nt, Homo sapiens
uaaguucuaggguacauuuacacaacgugcagguuuguuacauauguauacaugugccauguucgugugcuguacccauuaacuug

SEQ ID NO: 389194 - RNA, 82 nt, Homo sapiens
gagacccuuuauuucugucagucaugaaccacuaggcuuaaauggcuuuggacuucuaacugacauggacaaaagaugucuc

SEQ ID NO: 389195 - RNA, 56 nt, Homo sapiens
guuugucaucaucaucaucaucauaucacuuuuuagggcagugagagaugacaaac

SEQ ID NO: 389196 - RNA, 67 nt, Homo sapiens
guagaagcacagggccuguauuucuaauaucaccaguguuaccauucugcuggcccaugaauucuac

SEQ ID NO: 389197 - RNA, 72 nt, Homo sapiens
cacugcuaagugugacagggaacauuagaaaacacuguuagauauuuuguuucuacugucucuguaguagug

SEQ ID NO: 389198 - RNA, 96 nt, Homo sapiens
gaagggaacacaugauaggucuguuuugaaaaggaauggggacagaacaaaauauuacuaggucugaucaaaagaggcuuguucuggcuugucuuu

SEQ ID NO: 389199 - RNA, 66 nt, Homo sapiens
gccugagcuuuuauacaaguaauuaucuaaugugugauaagauaaugcuggaacuagagggcaggc

SEQ ID NO: 389200 - RNA, 82 nt, Homo sapiens
agagccugugaauggaugugcagucagggagguuuuacaucaccaagauuccuaucccagaaacgcauauguucauagcucu

SEQ ID NO: 389201 - RNA, 72 nt, Homo sapiens
auauuaucuguuuucugcaaacuagacuugaggaacuuccuugagucaaguuuuuucagagaauaaaaauau

SEQ ID NO: 389202 - RNA, 65 nt, Homo sapiens
aggcgaaugauguugggcaccuuuucuagugcugauuaugaaguguguguucaagucuuuugccu

SEQ ID NO: 389203 - RNA, 80 nt, Homo sapiens
gugacggucucaaguaguaacaguaguaacuguugaaaugacagucucaaguaguaacuaacugugacagcuugccacac

SEQ ID NO: 389204 - RNA, 75 nt, Homo sapiens
uauuagguuggugcaaaaguaauugccauugaaagucauggcaaacacugcaauuacuuuugcaccagccuaaua

SEQ ID NO: 389205 - RNA, 66 nt, Homo sapiens
uacucuuuuugguguacaauucuauggauuugacaaaugcaugaagucguauguccaaaaauagua

SEQ ID NO: 389206 - RNA, 59 nt, Homo sapiens
uggugacuauucucaugugguucugaagucaaacgaccacacuguuuagaauggcauca

SEQ ID NO: 389207 - RNA, 64 nt, Homo sapiens
ucuguggcauuuuggcugugguggagagcucaugaaucuacacaugugaaaaaaauguuacagg

SEQ ID NO: 389208 - RNA, 101 nt, Homo sapiens
gaggcaggauaauugcuugaacccaggagguggagguugcagugaguugagcuugcgcuccacuguacuccagccugggugacagggcaagacccugucuc

SEQ ID NO: 389209 - RNA, 71 nt, Homo sapiens
uuguuuugagauggaguuucgcucuuguugcccaggcuggagugcaauggugcgauuucaacucacugcga

SEQ ID NO: 389210 - RNA, 78 nt, Homo sapiens
agucagcgggaguggaaagucagacacacagggccugaaggucaugaaaggacucuggcuuucacuccaagcaagacu

SEQ ID NO: 389211 - RNA, 107 nt, Homo sapiens
uauaccacauugagaauguuuagguuggugcaaaauuaauugcggguuuuugccauuacuuugcaccaaccuaauauuuaagaaaacgcauucuauuugaugguaua

SEQ ID NO: 389212 - RNA, 80 nt, Homo sapiens
gaguaccuagcagacaugggcugaaccacacaaaaucaucuauaaguggucuccacaugcuuugcucuguccaagcacuc

SEQ ID NO: 389213 - RNA, 77 nt, Homo sapiens
guauauucaaggaugccaauaaauguuaauaucuaaaauuggauugugauaauuguugcaaaacucugugaauauau

SEQ ID NO: 389214 - RNA, 72 nt, Homo sapiens
gaagaugugugcugaucgggcacggugucucacccuguaaugagacaccuucacuuaauggcaggcaccuuc

SEQ ID NO: 389215 - RNA, 128 nt, Homo sapiens
guagauugcucucccuuuuuuuuuccucagcuuuuggaggaacuuaagauugcucucccuaauguagguagcccacauccaguccaccaaaggucugaauggaacaaaauggcuaggagggacucuac

SEQ ID NO: 389216 - RNA, 69 nt, Homo sapiens
aggccauuggaaaagugcaguauuugggcaggagugucccauuuuuccagguacugucugucauggcuu

SEQ ID NO: 389217 - RNA, 100 nt, Homo sapiens
agaugcuuuucaaaauagaggucaucuucuuggagauuucuucuuaaugguaacuucuaaagauguuaaaagcuaucuccaaggucaucucagggcaucu

SEQ ID NO: 389218 - RNA, 75 nt, Homo sapiens
uaaagccaggauauaucuugggcuuuuaaggcuaauaaauucccuccuuaggcuaguugauauaguuuggcuuug

SEQ ID NO: 389219 - RNA, 124 nt, Homo sapiens
guucuggguauagucugcaguccagagugagaacuuauggugauuuuuucaggccugucuauggccucccaaagaccagucagcaugagcuuccucccuucugagcccauaaagaccccagaac

SEQ ID NO: 389220 - RNA, 79 nt, Homo sapiens
gagauuaacauugugcuucacagaaggaauguggucucaugaaaggauauaugguuuuuggaagcauaucccugauuuc

SEQ ID NO: 389221 - RNA, 72 nt, Homo sapiens
gguguggucacuuccggguuguugccauggcauuuguaaucugucauggcacuggugggagugucuuaugcc

SEQ ID NO: 389222 - RNA, 130 nt, Homo sapiens
guguguauauauacauauguacacacguguguauauauacauauguacacacguguguauauauacauauguacacacguguguauauauacauauguacacacguguguauauauacauauguacacac

SEQ ID NO: 389223 - RNA, 127 nt, Homo sapiens
aaaauacaaguuguccagugaaauuugaauuucaggugaucagcgaauaauauuuuaguauaaguaugucccaaauauugcaugguuuuuaucugaaauucagauuucauuggauuuccugcauuuu

SEQ ID NO: 389224 - RNA, 92 nt, Homo sapiens
gcaucacugguuagaggaauaauugauuaggggucaccgauggggguuauuaguuggagagucacuaguuagugcuaauagccaagagaugu

SEQ ID NO: 389225 - RNA, 59 nt, Homo sapiens
ggugacagagugagguccugucucaaaaaaggagggagagagucaucucuaucuguacc

SEQ ID NO: 389226 - RNA, 76 nt, Homo sapiens
uuagacccaaaaaugcuaaggacuuuacuucuaauaguauggaggacacugauagucuuuggcaugaacaguuuag

SEQ ID NO: 389227 - RNA, 103 nt, Homo sapiens
uguacuuaauauuauuagguuggugccaaaguaauugcaguuuuugcaauuauuuuuaauggcaaaacagcaauuacuuuggcaccaaccuaauauuaguaca

SEQ ID NO: 389228 - RNA, 89 nt, Homo sapiens
ggagaaucacuugaacccgggaggcagagguugcagugagccaagauagcgccauugcacuccagccccggggacaagagugaaacucc

SEQ ID NO: 389229 - RNA, 56 nt, Homo sapiens
uggcuugaauuguguuuugauaagcguguauugcuuuaguaaagccagucaaguca

SEQ ID NO: 389230 - RNA, 77 nt, Homo sapiens
cacaacuccuucacacggugaugauuccuagagauucaugaauauuuggagauuccuacucugugcuaggcacugug

SEQ ID NO: 389231 - RNA, 55 nt, Homo sapiens
cucccaggcuacaggaucuuugacugagcucucaguggauguuguggccugggag

SEQ ID NO: 389232 - RNA, 61 nt, Homo sapiens
guauauguucuugcacuggaaagaacugcagaauaauuuuuccuuuggaagaugcauauac

SEQ ID NO: 389233 - RNA, 120 nt, Homo sapiens
uuuuuuuuuuuuugagauggaaucuugcucugucgcccaggcuggagugcagugggccgagaucacaccauugcacuccagccugggugagagugagacuccauuucaaaaaaaaaagag

SEQ ID NO: 389234 - RNA, 86 nt, Homo sapiens
cuagguuaacuagauuauaugucaucacagacacccucuacaucuuagggggugucugugauggcauauaaccuaguuucuucugg

SEQ ID NO: 389235 - RNA, 63 nt, Homo sapiens
gauggacugagaaagagaacagaaagaucuuaaaauauucugugacacuuccgucaguucauu

SEQ ID NO: 389236 - RNA, 107 nt, Homo sapiens
acccucugggcauuccagaguauccuguugguccauuacauugaugacauguuuauaggacaugauuagcagaaaguggugaccauccugguugugcuucauagggu

SEQ ID NO: 389237 - RNA, 57 nt, Homo sapiens
gagcuaguguuuacuugccacucuuucgucccuccugugagcagugaacaccagcuc

SEQ ID NO: 389238 - RNA, 75 nt, Homo sapiens
gauacagacuuugcuucauuuugggugugcagauacagaguuugcauugacacaugaagcucagguugucuuguc

SEQ ID NO: 389239 - RNA, 103 nt, Homo sapiens
auccuguuccccgcucuuggaccacuugauuucuggucacaguuuuugcauuccgcuauuccugggcuauaaucauguaggcuucagggcaggaggacaggau

SEQ ID NO: 389240 - RNA, 122 nt, Homo sapiens
gagaauuuuuauaugcuuguuggcugcaugaaugucuuauuuugagaaaugucuguucauauccuuugcccauuuuuuaauauuagacuuuugucagauacguaguuugaaaauauauuuuc

SEQ ID NO: 389241 - RNA, 62 nt, Homo sapiens
ggagagccaggaacaucagucugaggaaugugagaaaccuaggcuuuuggagguggcuuucu

SEQ ID NO: 389242 - RNA, 67 nt, Homo sapiens
gcuuagcaucaugcaguugcuauucauucauguucuguguaucaguuguuccuuuauguugcugagu

SEQ ID NO: 389243 - RNA, 84 nt, Homo sapiens
gaguuaaugggugcagcacaccaacauggcacauguauacauauaugacaaaccugcacguugugcacauguacccuaaaacuu

SEQ ID NO: 389244 - RNA, 57 nt, Homo sapiens
cucagugaagggcaagaggcaaccccacucuuccaguuguucaggccccacacugag

SEQ ID NO: 389245 - RNA, 56 nt, Homo sapiens
ccuuuccuguggcaaggacuggagggggugucuuucacagucuccucuagggaggg

SEQ ID NO: 389246 - RNA, 69 nt, Homo sapiens
ggacauagcuagauaaccucauguuauuaagagccuacauauucuaucugagguuuuauucuaaugucc

SEQ ID NO: 389247 - RNA, 60 nt, Homo sapiens
ugggugugaccgcucaagggggcuucuggggaggccccuucuggaggugaucgcugcuca

SEQ ID NO: 389248 - RNA, 56 nt, Homo sapiens
aguuauaguauuuuugcugguggaaggucuucccucaguguugauggcugcugacu

SEQ ID NO: 389249 - RNA, 83 nt, Homo sapiens
gccaguuuucccagcauaauuuauuaaauaagguaauauuuuuguaugcuuuguugaaaaucauuuggguguaugcaccuggc

SEQ ID NO: 389250 - RNA, 65 nt, Homo sapiens
gcuuaucaucauguuuuugcugugucauccaagucaaugauaaaacuccugaacaagaugagggc

SEQ ID NO: 389251 - RNA, 103 nt, Homo sapiens
uauaccaccugacacugaaucaaguaccagauauaauuucugugcugcugugugaaggcgcaaagauaugucugcuauuugcuguuccuugugauguggugug

SEQ ID NO: 389252 - RNA, 68 nt, Homo sapiens
ucagucauggguuaaagguggauacuuauuauggauugaacugugucucccccaaauucauguauuga

SEQ ID NO: 389253 - RNA, 77 nt, Homo sapiens
aaggaacaugagauuugggagggguagggggagaaaugacaugguuuggcuuugugucccuacccgaaucucaccuu

SEQ ID NO: 389254 - RNA, 58 nt, Homo sapiens
ccacagucuaugcaacaagguccagccagaugaagccuguagccagguagaacugugg

SEQ ID NO: 389255 - RNA, 96 nt, Homo sapiens
ccuuggaaccuccuaugugcugcaucuuuggauggaaauuggagucccagagacaaaugaggcuccacccugcuuccagaagcucagaguccaggg

SEQ ID NO: 389256 - RNA, 98 nt, Homo sapiens
aagaggguuagaaacauaucucagaguguacaagauuacgaauuguuuggaaugauuuuuagcuauucugaagauguguggacuuaacauagccccuu

SEQ ID NO: 389257 - RNA, 61 nt, Homo sapiens
uacagugcuuuuugguggagaaggggcaugugaucagugucucuguagagacagcacugug

SEQ ID NO: 389258 - RNA, 62 nt, Homo sapiens
cuauuagguuggugcaaaagucauugcggguuuugccacuacuuuuuucaccaaccaaauag

SEQ ID NO: 389259 - RNA, 64 nt, Homo sapiens
uggugagaaacuagauauuuuucuccuaagauugaguauaaggcaaggauguuucuucucacca

SEQ ID NO: 389260 - RNA, 112 nt, Homo sapiens
ccagucaccauucacauuuuuaguucuaugcuagaugcuguagggauuuaaaacaauucauugucuaagccuucaagauguuuagucuacauaaaauuaaacuaaugacugg

SEQ ID NO: 389261 - RNA, 71 nt, Homo sapiens
uggaagugagcugcagucugggguccaguguugagaagcagugcggacuuccaccgugcaccucuguuccg

SEQ ID NO: 389262 - RNA, 61 nt, Homo sapiens
guggucccagcacuuacacaucugagccagcucaggcuggauggaaaguuuugagggccac

SEQ ID NO: 389263 - RNA, 102 nt, Homo sapiens
uuugacuuauauuaaggugaccuguuugaaauugccaauuuugugggucgaugacagcugaauauuggcaguuuuaaaugguucaaucuaaugcgaguuaaa

SEQ ID NO: 389264 - RNA, 101 nt, Homo sapiens
cuuuugcuuuaguuuauagacugguuuauuauacaguuuauuuguaaauuuggcucaucauagaauguauuaguaaauuuguccauaggcagaagccagag

SEQ ID NO: 389265 - RNA, 64 nt, Homo sapiens
guaugacacaggaagcuuaaccuaucuauauaugagugauaaaugaggcauuuugugucauuac

SEQ ID NO: 389266 - RNA, 84 nt, Homo sapiens
ggcuauuuucacuucuuuuguagaucuucaguugcuacaggccaucuggauguacacgugcaggucacaagggauaugauggcu

SEQ ID NO: 389267 - RNA, 78 nt, Homo sapiens
ugcuauugugaaugaugucgcaguaaacauacaugugcaugugucuuuauagcagcaugauuuauaguccuuugggua

SEQ ID NO: 389268 - RNA, 65 nt, Homo sapiens
ugacauuucagacaggaggcuggggaagauauugcaucauugcauuggccccguuuuaaauguca

SEQ ID NO: 389269 - RNA, 130 nt, Homo sapiens
uuugcauuaaggaaggagguccuuucccccuuucuggaaagaaacccuuaauucuucugguaucauugugcuggagaagacagagguuuauuucagggaguggggagccccuuuuccuuaggaugcugca

SEQ ID NO: 389270 - RNA, 89 nt, Homo sapiens
guuuuuugguagcauuuuuugcuuuauucugcucgugcauauuuuggaaugaggugaguaaauaaaugaaugaacaaacaaauaagaac

SEQ ID NO: 389271 - RNA, 58 nt, Homo sapiens
agaaggugaugaguuccagcauuuuuucagacuuggaucuggcuuucauuccccuucu

SEQ ID NO: 389272 - RNA, 66 nt, Homo sapiens
auagagaggcaggucaaaggugaagcuuauugcucacuacugacacuacugcaaucaucucucugu

SEQ ID NO: 389273 - RNA, 83 nt, Homo sapiens
uguaagagccuuuucuuuaaucacaaaacgaagaauuuucucuagcuuuucuacauauugugguugaugaagacugucuugca

SEQ ID NO: 389274 - RNA, 56 nt, Homo sapiens
aauuuggggggccauagcauggacuguuaugaguuaaauuguggccccuacaaauu

SEQ ID NO: 389275 - RNA, 55 nt, Homo sapiens
cuggagugagaacuucaaugauggccauuaggccaauuggauggucuuuuuccgg

SEQ ID NO: 389276 - RNA, 64 nt, Homo sapiens
ugugagggguggggacugacaggaaccuacuggagauucuaucacagccccacacucucuugca

SEQ ID NO: 389277 - RNA, 79 nt, Homo sapiens
uccugagguaaaacucaugaaaguguguggaaacuugaaguuuuuaacucucaaucuauuccacuuucauccucuagga

SEQ ID NO: 389278 - RNA, 125 nt, Homo sapiens
gaaaaaugacuccagaaucuuuaaaucugcucuacuguauagauggaguugauuuuuaaaaguugaaaaauauuauaagaugauuuuauuuacaguaaguugacuuaggauuggacuuauuuuuu

SEQ ID NO: 389279 - RNA, 56 nt, Homo sapiens
ggugggacugugucuuauucaucuuuguacucugguugcuuaacacaguucccacc

SEQ ID NO: 389280 - RNA, 56 nt, Homo sapiens
gaagauggcaucauuuucuuuuaaauaacagauggguaaaagugaugucauucuuu

SEQ ID NO: 389281 - RNA, 92 nt, Homo sapiens
uugccuuucuaauuaugacaauuguuuucuuguguagguauuaucaaaaccaguaccacugccgagaaaacagaugaagaggagaaagguaa

SEQ ID NO: 389282 - RNA, 97 nt, Homo sapiens
gguagcuguguucucccugagguccuggauuauuggggaaggcagaaacagccccaauuuucagaaccuuaggcaacuuuagacaacuacuacugcc

SEQ ID NO: 389283 - RNA, 62 nt, Homo sapiens
gggguuuacacauugaugagcuuuaaggaauaaaagauaagguccuuaaauguguaaccucc

SEQ ID NO: 389284 - RNA, 57 nt, Homo sapiens
ccuuucuagauagaugaaacccauauggagaggaaauagugacaucauuuagaaagg

SEQ ID NO: 389285 - RNA, 82 nt, Homo sapiens
aguucuaggguacaugugcacaacgugcagguuuguuacauauguauacaugcgccauguuggugugcugcacccauuaacu

SEQ ID NO: 389286 - RNA, 77 nt, Homo sapiens
auauuuuuccaugaacuagaauagaacaugggcaaauuuucaaccucaugucccuaucuugguucacugaaagguau

SEQ ID NO: 389287 - RNA, 74 nt, Homo sapiens
ucuugguaacaauuucugucucagguuguuugugcugcuauaacagaauaccugagacuaggcauuuuauaaga

SEQ ID NO: 389288 - RNA, 91 nt, Homo sapiens
ucauaauugccacuuuuucauauaugguguucagaaucaugauaauuauaaagcugaugauggaggccgugauggacguggcugucugugg

SEQ ID NO: 389289 - RNA, 61 nt, Homo sapiens
gugcagaauaaggucaguacaucaucacacagcuuuccuggucucugaccucauuguguac

SEQ ID NO: 389290 - RNA, 60 nt, Homo sapiens
uguaaagaaagcuguuguuguauucugcucaauggaauguaugauacaguuuauuuuaca

SEQ ID NO: 389291 - RNA, 66 nt, Homo sapiens
uggagaacugaugucuccaagaagugcuuuacagucagaaaguucuggagucauuucaguuuuuca

SEQ ID NO: 389292 - RNA, 58 nt, Homo sapiens
uaguggaacugugucauacaaaugcagccuguuguauugaauguacuuguucucacua

SEQ ID NO: 389293 - RNA, 73 nt, Homo sapiens
uaauuuugauguguugggaagauuucaaguccucucuccuggcuauuuugaaauacaccauacauuguuguua

SEQ ID NO: 389294 - RNA, 68 nt, Homo sapiens
aguuugugagggagcuaagaugaguugagauaaaccaguguuacuguucuuguauucugucguggacu

SEQ ID NO: 389295 - RNA, 59 nt, Homo sapiens
uccaaggucuuuguuuggucuguaucagggcuacacaagccucauacaacaagcuugga

SEQ ID NO: 389296 - RNA, 63 nt, Homo sapiens
ucaguauaaggaggcuacagggcagacuacuggguuugacauguaauguggcucuuaugcuga

SEQ ID NO: 389297 - RNA, 78 nt, Homo sapiens
aaguggauugguuaauuuuuuuacuuuuuguuaccacaaaguucuugcugaaggauuauauuguuuaucaauccauuu

SEQ ID NO: 389298 - RNA, 85 nt, Homo sapiens
uuaaaagaaaagggugggcugugaguuaacaauuaggugucuuaauacaaguauuugucacuuaacagccauuauuucauuuuaa

SEQ ID NO: 389299 - RNA, 74 nt, Homo sapiens
uuacuuuuugcuccuggcaaacucauaagagggaaaguaaacccugcuguggucuggaauaggacaaagaguga

SEQ ID NO: 389300 - RNA, 81 nt, Homo sapiens
acccuuuucaguuuaucaaggcaaacaugucaguaugucuuaauauugauaauguuaacuuuggucacuugguuauggggu

SEQ ID NO: 389301 - RNA, 71 nt, Homo sapiens
uggccaccacaucaacacagauggaugcagcagaugguuuaggaagcuccagaguggugaugcuggggcca

SEQ ID NO: 389302 - RNA, 55 nt, Homo sapiens
gucacugggugcugcgccugucacuuugaauuguugagaggcaagggcucaugac

SEQ ID NO: 389303 - RNA, 81 nt, Homo sapiens
ugugcacucuuuggcaaggaggggcacuuucacugaugccccauuauaugaggugaaauauccccuucuuucuggaccaua

SEQ ID NO: 389304 - RNA, 86 nt, Homo sapiens
ugcacaucuuaggucggugcaaauguaauugcaguuuuugucauggcaaaaaccgcaauggcauuuccaccaaccuaauauaugua

SEQ ID NO: 389305 - RNA, 77 nt, Homo sapiens
gucacauucauuuuuuaaacaacuuaagauuccaugucauuuaaauaguguuauguuguuugagaaaguccaguggc

SEQ ID NO: 389306 - RNA, 108 nt, Homo sapiens
uauauguaccauauuuucuuuauccaauccacuguugauggguaccuggauugauuucaugucuuugguauugugaauaguguuuggaugaacauaugggugcaugug

SEQ ID NO: 389307 - RNA, 61 nt, Homo sapiens
gcugggauuacaagcgugaaccaccgcacccggccccuuguucacaguuucuaaucccagc

SEQ ID NO: 389308 - RNA, 74 nt, Homo sapiens
gauagcuaugguaguuguugcagguaggauguaacuuccuagguuuacuaccgcucacaauuauauuugcuauu

SEQ ID NO: 389309 - RNA, 62 nt, Homo sapiens
cagaguugauggaguacacuacaggaagagcccacuguguuugugacacucguuaaccucug

SEQ ID NO: 389310 - RNA, 63 nt, Homo sapiens
ugacaugauguuccuacacugugccuaucaacacuuguagacacacuguauaagcguuuguua

SEQ ID NO: 389311 - RNA, 89 nt, Homo sapiens
ccccauaugugugaguaacuuaaguauagguaacagaagcaaacugguggguuugguauucuaguuaugauauucucgcuuuuaugggg

SEQ ID NO: 389312 - RNA, 94 nt, Homo sapiens
gacuggcuuuuucauuaaguagaugaaugugaauguuucuugacagcaaggacaauguuuccauguucaauuuacuaugaaaagaacgccaguc

SEQ ID NO: 389313 - RNA, 56 nt, Homo sapiens
auugguucuguuuaugugauggauuacauuuauugauuugcauauguugaaccagu

SEQ ID NO: 389314 - RNA, 57 nt, Homo sapiens
aaauucaugaaagaagacugccaugguuguauacauggauucaucccucaugaauuu

SEQ ID NO: 389315 - RNA, 76 nt, Homo sapiens
ggcauuuugauagauguacaguagcauuuuacacauuuuagugacaacuaaugacacugagcaucuuucauauguc

SEQ ID NO: 389316 - RNA, 67 nt, Homo sapiens
augagauuuggguggggacaaagagccaaaccguaucauuuugccucuggccccucucaaaucucau

SEQ ID NO: 389317 - RNA, 67 nt, Homo sapiens
gaaguggguucugcuguaaccagacaguugcauucccaaggagcuguguguuaucagaaauugcuuu

SEQ ID NO: 389318 - RNA, 74 nt, Homo sapiens
uuguguuuaaggaguagaauagaugcaccuucauucagaaaguggaaguuuaugaagucuaagccaaaacacaa

SEQ ID NO: 389319 - RNA, 89 nt, Homo sapiens
gaagagugucauuguuauuuugauaaggauuacauuggaucuauagaucacuuuggauagugugguccuuuuaacaauauuaauucuuc

SEQ ID NO: 389320 - RNA, 55 nt, Homo sapiens
uguuccaaguaauuaaagccaugcauaacaugguaggcaagauuacuuacgagca

SEQ ID NO: 389321 - RNA, 65 nt, Homo sapiens
gcuuuuugcugcagcaauacuggagauggcaaaacauugagacucagaggcugucagcaagaagc

SEQ ID NO: 389322 - RNA, 129 nt, Homo sapiens
guauacucccuuacugcguggccuuggacaugucacuuccucucugauggccucagucucuucucagucuccucugagguaaucagagaggaagugacauauccaaggccacacaguaaggaaguauac

SEQ ID NO: 389323 - RNA, 58 nt, Homo sapiens
augcugucacugggucccaggggcagguuucugccaucacugcaucacaggacagcau

SEQ ID NO: 389324 - RNA, 71 nt, Homo sapiens
ggggaauccuauacuguuggagggcauguaaauuaguacauccacaauggagaagaguaugaagguuccuc

SEQ ID NO: 389325 - RNA, 64 nt, Homo sapiens
ggaucuauuuguugugucuaguucaauacuauagaguuggguuggucagaugcugaguggaucu

SEQ ID NO: 389326 - RNA, 86 nt, Homo sapiens
cuaggaaggugucuacugcugucagugccaaguaguauccuuaagaacuauauggucuacuugacagacaugucugguaccccuag

SEQ ID NO: 389327 - RNA, 107 nt, Homo sapiens
ccaacuuuauuagucuuuuucauggucauuuuggcaacguuggaucccucaaauuaacauaugaguuuuaggaucagcuugucaguuuuugcuaagaaacaaguugg

SEQ ID NO: 389328 - RNA, 73 nt, Homo sapiens
aggcuggagugcaauggcgcgaucugggcucacugcagccuccgccucccagguucaagccauucuccugccu

SEQ ID NO: 389329 - RNA, 99 nt, Homo sapiens
agacgcuuaggcccagucacucuuuuaaugcuuucuuugcuuacuuaguuuaaaggugggagcauugcauuagaagcccagagauccggcuuuuagucu

SEQ ID NO: 389330 - RNA, 62 nt, Homo sapiens
uuaaguggugcauuguuaaauggggucaucagcaugggcuucauuaagaagguaugauuuga

SEQ ID NO: 389331 - RNA, 86 nt, Homo sapiens
uuuauuuguaaagguuauuaacuugacccugaaaucuacaaacuguuccauucaguaguaaguuggaacucuauuuauguaguaaa

SEQ ID NO: 389332 - RNA, 70 nt, Homo sapiens
uuaucacugcucauguggcauccacuaaaacuguaaguggguggccuuaaaugccacugagcagugguga

SEQ ID NO: 389333 - RNA, 130 nt, Homo sapiens
ucaucaugaguuuguuuuuagcuuugauucccugaaagcugagauuggaauucuugugcaugugugcucucugcggaaacuucuaaccuuacuagggaaucaagacaaggaggggaacaagaucagaugg

SEQ ID NO: 389334 - RNA, 69 nt, Homo sapiens
gauuccacagucuuugcuuuuaaccagagguuagcaaacuacuucuguaaagggaagacaguagguauc

SEQ ID NO: 389335 - RNA, 75 nt, Homo sapiens
uguaauuauguaguuucauagaacacaguaauggagcugauuuaacugccuacugugcaaauaugcaugaauaca

SEQ ID NO: 389336 - RNA, 63 nt, Homo sapiens
aagaacuguuuacaauuuucacccuggaaagguuuuucucuugugugaacuguagauagucuu

SEQ ID NO: 389337 - RNA, 64 nt, Homo sapiens
ucaggugcagagaagaaaugggagcauuccccuaaagcccccucucauuccuucauguaccugg

SEQ ID NO: 389338 - RNA, 61 nt, Homo sapiens
augagggcguauccuucauuaagcgguuagcacaucuucuuggugauaaguaaguucuuau

SEQ ID NO: 389339 - RNA, 58 nt, Homo sapiens
gcaccaaagaccuaccugguuagguagguuagguaccugguuagguaggucuuugugu

SEQ ID NO: 389340 - RNA, 92 nt, Homo sapiens
guuugugaaaauguggguugcugagucccaucaccagaguuuuaauuuaguaggucugggauguggcucaauaauuugcauuucuaauaagc

SEQ ID NO: 389341 - RNA, 91 nt, Homo sapiens
gagaggugagguaagagugucuuugugcuggccccaguuuuacccucuuuggggccaucaugaauacauuggguuccucuugugccugcuu

SEQ ID NO: 389342 - RNA, 71 nt, Homo sapiens
uauggcuuucuacuugaguucuagccuguccaugccaaaugagcaguagaggacuuaagugaaaagccaua

SEQ ID NO: 389343 - RNA, 58 nt, Homo sapiens
gcuggaguccaguggugcaaucauaguucacuguaaccuuguacuccugggcucaagc

SEQ ID NO: 389344 - RNA, 61 nt, Homo sapiens
aguggugauaaccacuaucauagcuaccauuaaauuauucguugugacugguugucucgcu

SEQ ID NO: 389345 - RNA, 72 nt, Homo sapiens
auacuauuagguuggugcaagaauuauugcuguuuuuguaucacaguuacuuuugcaccauccuaauaguau

SEQ ID NO: 389346 - RNA, 85 nt, Homo sapiens
ucucacuguuuuaauaguguaagaacuuugaaaucuacauguaauguaaugcauuaggucuccuuuuugccuaaauaaugugaga

SEQ ID NO: 389347 - RNA, 59 nt, Homo sapiens
aguuaggcauggcugucauuuccagguggaagcacauaagaacugguguauguuuaacu

SEQ ID NO: 389348 - RNA, 93 nt, Homo sapiens
ccaguugcacacuggcauuuucuugcugcaagcuuuuuuaaauuucugaacucaaggcaguggcagaagaugucagucaccucugauaacugg

SEQ ID NO: 389349 - RNA, 81 nt, Homo sapiens
uuuccacucagugaagugugaccucagcaucuccccaccuugguggaaggauggaggcuuaugcuuaggacuggguggaaa

SEQ ID NO: 389350 - RNA, 72 nt, Homo sapiens
acuugaaccccggaggcggagguugcagugagccgagaucgugccauugcacuccagccugggggacagagu

SEQ ID NO: 389351 - RNA, 62 nt, Homo sapiens
uuccugagagcuuugaugcacuguuuccuguuguaggaugggcaggcacuggcucucaggga

SEQ ID NO: 389352 - RNA, 122 nt, Homo sapiens
cuccuggcaggguuaaagggagaguacuuuaaacccauauaccagcugugcuucaguuucucucacuuugcccuggguaagcugcuguagggucagaaguaacccuuucugugccaguugag

SEQ ID NO: 389353 - RNA, 56 nt, Homo sapiens
ccauuuugagguguuugugcaccaucugugacacacacagcaaacacuguaaaugg

SEQ ID NO: 389354 - RNA, 67 nt, Homo sapiens
ugagaccauaguaaguaaggagcuucacugcauucuuggaugugaagacucaauuauuaugaacuua

SEQ ID NO: 389355 - RNA, 72 nt, Homo sapiens
uguaugugacuggaacaguaggaagccugcacgaugguaacagauccugcuguuucugagucagucuauaca

SEQ ID NO: 389356 - RNA, 72 nt, Homo sapiens
ugucuaauuuugccuugacacuuacaguccaacaaaaaauuuauaggaaaaauaucacagguaaaguugaca

SEQ ID NO: 389357 - RNA, 74 nt, Homo sapiens
aggaugacagggaaacauugaaguguccuuaguagaggagugacauuaucagguuuguuuucuagcuuaauucu

SEQ ID NO: 389358 - RNA, 76 nt, Homo sapiens
uugcuugaacccgggaggcggagguugcagugagccaagaucgagccacugcacuccagccucggugacagaguga

SEQ ID NO: 389359 - RNA, 120 nt, Homo sapiens
aaugaauuugcaugcuagagggaguguaaugguauuuaaagacccuugauuguucuagaaguugccugagaucuuuaagaacuacugcugcuuuacucuuucucagaugacagaauuauu

SEQ ID NO: 389360 - RNA, 77 nt, Homo sapiens
acacccuuccauggaguugucuacuauguccaaggaacuagacuggaaaauggaagacuccucuuuggguauggugu

SEQ ID NO: 389361 - RNA, 66 nt, Homo sapiens
gcauaugauaggguuuccagggcugucaccauuuuagucaucuucccuggacauucaucauuaugu

SEQ ID NO: 389362 - RNA, 74 nt, Homo sapiens
cucagccauuagaaguagagguagagugacuuccccagcugugugaccuugggaagucacucuaccucucugag

SEQ ID NO: 389363 - RNA, 81 nt, Homo sapiens
uucagguaucuuuauagcgaugccccacuccugauaccaguuuucuguuaggccauucuugcauugcuauaaauaccugaa

SEQ ID NO: 389364 - RNA, 80 nt, Homo sapiens
cuuggauuaggaggucauggacaaggugugagccauggauggaacuuggagggcaugcuguccaugggcugggguccagg

SEQ ID NO: 389365 - RNA, 92 nt, Homo sapiens
cagugagguugaauacacuuuguacuggcuuguuucagagaggaaacucuaaccucuuuggcauuagccuguauagaacucaccccuuacug

SEQ ID NO: 389366 - RNA, 65 nt, Homo sapiens
cuaucucaccaaccucaguagcaucuguuaaaaaauaacagaugcuggcaagguugcagagaaag

SEQ ID NO: 389367 - RNA, 78 nt, Homo sapiens
guuacauaugcaagacaccgauuagcuuuuucucugaaugagauggagagccauuggaguuuugagcagaaaagugac

SEQ ID NO: 389368 - RNA, 55 nt, Homo sapiens
cagccucggcaacaacagagacuuugaaccagauaauucuuuguugugggggcug

SEQ ID NO: 389369 - RNA, 66 nt, Homo sapiens
ugucaaggcauagcugacauacaauaaaauaaacccuuuuguuguauaguucuauguguuuugaca

SEQ ID NO: 389370 - RNA, 67 nt, Homo sapiens
uugaauucuugcauuuuuaaauagugcucaauauuugagugaacuacuguaagcugcaagauuuuaa

SEQ ID NO: 389371 - RNA, 55 nt, Homo sapiens
uucacaguagggaacugacaaaguugaagggcuuugccagcagccuggcugugaa

SEQ ID NO: 389372 - RNA, 130 nt, Homo sapiens
cccacccaccugccccagauguccugggcuuggggugccacgcuggcgucauggcuggcaucuuggcugguggcaccacagacgccaggcgugggucacagcgugagcccagccagcugguugggguggg

SEQ ID NO: 389373 - RNA, 77 nt, Homo sapiens
gucuucucugugugcuuaggauuugcuuauucuauaagacuguuggugaguagaacaucaagucauacaggcaaggc

SEQ ID NO: 389374 - RNA, 65 nt, Homo sapiens
uuuuugguugguaggcuauuaauuauugccucaauuuuagagccuguuaguggucuauucaggga

SEQ ID NO: 389375 - RNA, 87 nt, Homo sapiens
ggagaaucgcuuaaacccgggaggcagggguugcagugagccaagauugcgccacugcacuccagucuggcgacagagcgagacucc

SEQ ID NO: 389376 - RNA, 65 nt, Homo sapiens
uguaacuuuuuccagagcauugccuuugguuuuccguagugccaacaugccuggagaugguuaua

SEQ ID NO: 389377 - RNA, 80 nt, Homo sapiens
uuagguaggugcaaaaguaauagcgguuuuuaccauuauguucaauggcauaaaccaccauuacuuuugcaccaaccuaa

SEQ ID NO: 389378 - RNA, 56 nt, Homo sapiens
guggaauugcuggaucaaaugguaguucuaccuuuagaucuuuaaggaaucuccac

SEQ ID NO: 389379 - RNA, 73 nt, Homo sapiens
ugccuggaaucuauggauaacaucggguucuaagucaugaguugauuuuuaucuacuagguuuacgccaggca

SEQ ID NO: 389380 - RNA, 91 nt, Homo sapiens
uucucuuacuuucaaaggacauugcuauugauugccauuauuuaugaagucacuagacuuagguagucagcagugcuuacaaagaggggaa

SEQ ID NO: 389381 - RNA, 101 nt, Homo sapiens
ugaggcaggagaaucgcuugaacccgggaggcagagguuguagugagccaagauuaugccacugcacuccagccucggugacggagugagacuccaucuca

SEQ ID NO: 389382 - RNA, 93 nt, Homo sapiens
caauaugaagaaaaagucaagaaucucagcaucuuuggcucugacaucauagauggaaaaggcuugguucuuugaugacauuuuugaguauug

SEQ ID NO: 389383 - RNA, 74 nt, Homo sapiens
cucgcucuaacaccacagugugguuuggacguggccacagugccguacaaaccacagugugcugcuggggcggg

SEQ ID NO: 389384 - RNA, 64 nt, Homo sapiens
guaaucucagcuacuugggagccugaggcaggagaauugcuugaacccgggagguggagguuac

SEQ ID NO: 389385 - RNA, 59 nt, Homo sapiens
ucagcagugugaaaauggacuaauacaguaaauuuguaccaggagugaggcacugcuga

SEQ ID NO: 389386 - RNA, 69 nt, Homo sapiens
cuugaacccaggaggcagaaguugcagugagcagagaucgcgccacuguacuccagccugggugacaag

SEQ ID NO: 389387 - RNA, 84 nt, Homo sapiens
cuuuaacugcagccaaggcaugcugaguccuaaaagggagguuauuuccuugagggacucuaugacuuaguuuaacaguuggag

SEQ ID NO: 389388 - RNA, 62 nt, Homo sapiens
ggaguuaugggugaggaggaggugcagcuccaaagccuucauuuccuggagcguauggcuuc

SEQ ID NO: 389389 - RNA, 68 nt, Homo sapiens
aacugaauguaacuaaaccugugaaaauguccaaacacagcuuuacucuagguuagauugauucgguu

SEQ ID NO: 389390 - RNA, 67 nt, Homo sapiens
gugagaauauuuuccaugucucaucugcaacugaaaguguguugucucugauggauaaaauucucac

SEQ ID NO: 389391 - RNA, 81 nt, Homo sapiens
caccaggaaugcccuggcugacuuugccuggcgaaugacucauugugauucgcagcucaguucaacuagggcuuuuuggug

SEQ ID NO: 389392 - RNA, 62 nt, Homo sapiens
cuggaugucaaagaggaaaacuggauguccuucuccagaagcggucaucaaguuccuccuag

SEQ ID NO: 389393 - RNA, 69 nt, Homo sapiens
guuagugagccaugauuuuaccacugcacuccaaccugggcaacagaggaagaccgugucucaaaaaac

SEQ ID NO: 389394 - RNA, 55 nt, Homo sapiens
accaccgacagcugcauuuuucucagagcuggaagcaugcacagcuguuuguggu

SEQ ID NO: 389395 - RNA, 58 nt, Homo sapiens
gacacgcugugacaguccagccaucaguuuugccgaugaacuggaugucgaguguguu

SEQ ID NO: 389396 - RNA, 64 nt, Homo sapiens
gcaugcgggccugggcuuggcagggucccaucauucuuuuuucugcagccauucagcccuaugc

SEQ ID NO: 389397 - RNA, 65 nt, Homo sapiens
cugcaaccuaauccccuuugccuuguaaucugacauagacacagguacaagggauuaggaugugg

SEQ ID NO: 389398 - RNA, 66 nt, Homo sapiens
uguuguugguucuguuuauaugcuggauuacguuuauugauuugcauauguugaaccagccuugca

SEQ ID NO: 389399 - RNA, 77 nt, Homo sapiens
acuugcaauuagaaaaguccuaauuaauacaguggguuuugcaucucugacuuauguggacuauuucauuuugaagu

SEQ ID NO: 389400 - RNA, 110 nt, Homo sapiens
cagaaagacacugcuuggaggcagggacuccugagacucacaggcuccccagcacggccacuggggacacaggccaguccaggggccccagcccuuugguucccuuucug

SEQ ID NO: 389401 - RNA, 82 nt, Homo sapiens
uauaaucuaagcucuaggguacaugugcacaacguguucuaggguacacauugugcacauguacccuagaacuuaaaguaua

SEQ ID NO: 389402 - RNA, 101 nt, Homo sapiens
gggccuuauguuucuuaguuaaaaccugauaauacuuuuauuuugaggaaaaguaguugcuauuuacucagaagaaggauuagagguugaagccauggccc

SEQ ID NO: 389403 - RNA, 100 nt, Homo sapiens
gaggcaggagaaucgcuugaacccaggaggcggagguuguggugagcgaagaucgugccauugcacuccagccugggcaacaagagcaaaacucugucuc

SEQ ID NO: 389404 - RNA, 58 nt, Homo sapiens
gcccuggaggcggaggcugcaguaaguugagauagcacuacugcacuccagccugggc

SEQ ID NO: 389405 - RNA, 73 nt, Homo sapiens
aucuauuggugacacccaaauuuuaagcuccacagggcagacuuugggcuagaugcuuuggggucauaaagau

SEQ ID NO: 389406 - RNA, 129 nt, Homo sapiens
auccacccaccucggccucccaaagugcuggaauuacaggguugagcuagccaaaaaagucuucacuugguuaagcacaguggcucacaccuguaaucucagaacuuugggaggacaaggugggaggau

SEQ ID NO: 389407 - RNA, 123 nt, Homo sapiens
auagugaaaugacuaugccaaagaugaaggaacuguaaagaaauucuaaggaagugaaugggucuuacauggccuuaugguacucuuugcagagaucaauauuuuaaaaaauuauuuuauuau

SEQ ID NO: 389408 - RNA, 76 nt, Homo sapiens
ucgcuugaguccaagaguuggaggcugcagugagcuaugaucgagccagugcacuccagccugggcaacagaguga

SEQ ID NO: 389409 - RNA, 89 nt, Homo sapiens
gcuucuggaaaaucacuaacaaggcaagauacugguugcugacuaggcuacccuuguagucaucauuagucucuuuugcuuccgggggc

SEQ ID NO: 389410 - RNA, 89 nt, Homo sapiens
ggagaaucacuugaaccccacaggcggagguugcagugagccaagaucgugccauugcacuccagccugggcaacaagagugaaacucc

SEQ ID NO: 389411 - RNA, 66 nt, Homo sapiens
ugucguugguucuguuuaugugaugaauuacguuuauugauuugcauauguugaaccaagcgugca

SEQ ID NO: 389412 - RNA, 64 nt, Homo sapiens
auugugaauagugcugcaauaaacauacaugugcaugugucuuuacaguagcaugauuuauaau

SEQ ID NO: 389413 - RNA, 56 nt, Homo sapiens
ugaaagguccacuguuacucugauaggcuucccuucacaguuggccuggccuuuua

SEQ ID NO: 389414 - RNA, 99 nt, Homo sapiens
ugucucaauugucugguaugcaagugauaugacauauuuguguuaauaaauuugugucuuauaugcauuugugugcaggcagucacucaaacugggaca

SEQ ID NO: 389415 - RNA, 87 nt, Homo sapiens
aaggugguaguacuacaguagagaggauguagaaauagggcagaaguuguuaagucuugcucugcuguugacuacccaugugaccuu

SEQ ID NO: 389416 - RNA, 80 nt, Homo sapiens
uuauggacauuaaagcgauguagaaaauguuaauaaacccgagaaauaaagcauaaucuacauuuucuuuauguacauga

SEQ ID NO: 389417 - RNA, 71 nt, Homo sapiens
ggggucuuuugguacuagcugaucgcagagauuccuuccccaucucuugagcccucgcuaguccauucucc

SEQ ID NO: 389418 - RNA, 66 nt, Homo sapiens
gaugaaacuucccagggagcagcccucagaaagaauagaugguagccuguggugaauguuucuguc

SEQ ID NO: 389419 - RNA, 61 nt, Homo sapiens
ugugaugcuguggguauaacgauaacucccccaaacguaaucauaauaccacagugacaca

SEQ ID NO: 389420 - RNA, 55 nt, Homo sapiens
uucccucagaaacacacagcccagcagcuccugcgguugugugguuuugcgggaa

SEQ ID NO: 389421 - RNA, 72 nt, Homo sapiens
uaaagcuguuguacacuuuaccuuuaaagacuacuuguguguguuaagggggcugagguguacacaucuuug

SEQ ID NO: 389422 - RNA, 64 nt, Homo sapiens
acuuauucuagguauucauuuucuucccaacuauguagaagcauuuugagauacuagaauaggu

SEQ ID NO: 389423 - RNA, 88 nt, Homo sapiens
cucuggccugaaacugauggcugugauuuugauuugcaggcuggguuugaccaaagaagagucauugcagcagaacgugggccaggag

SEQ ID NO: 389424 - RNA, 104 nt, Homo sapiens
ucugucaacuaacacgcauguaagugagcuuggaagugacuucuuccccaagugagucuucagaugagguccuagccaacuuuuugauugcagcuugugacaga

SEQ ID NO: 389425 - RNA, 79 nt, Homo sapiens
agaucaaagagagcuaugugcauaauuaucauaaaauauauggauguuuaaaaauguauguaaagcucucuaaaaaucu

SEQ ID NO: 389426 - RNA, 55 nt, Homo sapiens
uagagcucaucuucuuuaaacuucucaugauaguucugaggaaauugagauucug

SEQ ID NO: 389427 - RNA, 62 nt, Homo sapiens
uuucugcugugcuuucuugcguauuuucuuaauggauagauaggacaaugguacagcagaaa

SEQ ID NO: 389428 - RNA, 103 nt, Homo sapiens
uuugggccaguuucuuacauucuuugggccacuuuaguuuccuuauugaaaaauggggauaauaauaguggcuacaucucagugugauucugaggaaaccaga

SEQ ID NO: 389429 - RNA, 55 nt, Homo sapiens
guauacaguugacccuugaaccgcacagguuugcgguucgcagguccacuuauac

SEQ ID NO: 389430 - RNA, 60 nt, Homo sapiens
uuucccuuuuuucuaguagguaggucggacacuuagacuuccuacuucugagaggugaga

SEQ ID NO: 389431 - RNA, 73 nt, Homo sapiens
cauagaauguguaaugaucaagccaggauaucuggguuauccaucacccucaguguuuaucauuauuuuugug

SEQ ID NO: 389432 - RNA, 77 nt, Homo sapiens
gauaauuauugagcacugacucugugccaggaacauguacaaaguaccuggcacagaguaagugcucaauaauuguu

SEQ ID NO: 389433 - RNA, 67 nt, Homo sapiens
ccugaggaaauuguaaugacuucacuugaggcagcugccuuggaagacaaugcugauucucuucagg

SEQ ID NO: 389434 - RNA, 98 nt, Homo sapiens
uaguuggauuacugucacucauccauacuuacuguuaucaugcuuucucuuggugcuagauagcaggagaauggucaugggcauuugcggaucagcua

SEQ ID NO: 389435 - RNA, 57 nt, Homo sapiens
cuuggcuccgacuccccuccaagaucagagcaguugcuggaguggagagaggccagg

SEQ ID NO: 389436 - RNA, 87 nt, Homo sapiens
ucaugccaguaacugauagcauucaauuaucuguugacacuugguuaaaaucauaacaugaauugaugcuaggagaaucuagcaugg

SEQ ID NO: 389437 - RNA, 62 nt, Homo sapiens
uggacaugaagggcacaggaggcuuggaauccugucucugcccuugugaagcuucaaaucca

SEQ ID NO: 389438 - RNA, 108 nt, Homo sapiens
cagaguugauuccagaauggaauauguguaaagaguucacauuuguuguaucuuaguugguauuccacaauaugauuuuuaauagaucuuucauuuugaucucaucug

SEQ ID NO: 389439 - RNA, 92 nt, Homo sapiens
uuggagacuuuucacacauuagggguaaucucuuaacccauuggcauuugaauaugauggcaagaaggauuuauuccuugaaaauacuucaa

SEQ ID NO: 389440 - RNA, 73 nt, Homo sapiens
gacaugaaauuugggagggaccaggaacagaaugauaugguuuggauuuguguccccacccacaucucauguu

SEQ ID NO: 389441 - RNA, 58 nt, Homo sapiens
ucaaugugaugugucacaugaacccaauuagggacaaaaaugauaucaucacaauuga

SEQ ID NO: 389442 - RNA, 88 nt, Homo sapiens
ggcugggacugaggucauguucugucagguuccaaagagcgccaggaagacucugagaccacagagcacggccugcuuucucccagcc

SEQ ID NO: 389443 - RNA, 77 nt, Homo sapiens
ugaagauuauuucaaaacuggcacuacaucaagagcuucuggaagucuggauaguuucaguuugggaaauaacuuca

SEQ ID NO: 389444 - RNA, 62 nt, Homo sapiens
uaugcuguuuuguagcucccucuuuucacuaacccacuacaagauggggcaagaagagcaua

SEQ ID NO: 389445 - RNA, 59 nt, Homo sapiens
ggcagaauugcugaggaugcuagccuacuuuuuacacuagcuuuccuccugcaucuguc

SEQ ID NO: 389446 - RNA, 127 nt, Homo sapiens
ucacauucuaguguuuuucuguuucgaguguuuucauauugucagguugacuuaauuaucacaauuuugugagguguuaaccaaccuguguuccaaaugaagaaagaaacucaaaaagguuagguga

SEQ ID NO: 389447 - RNA, 92 nt, Homo sapiens
cagccugcuuuuugaaguuuugaaguguggcacugaguuuuccucucuaacuaugaaagucuuagauggcaucuucuuucaauauaaggcug

SEQ ID NO: 389448 - RNA, 66 nt, Homo sapiens
gacauauaagugaggucauacagcauuugucuuuuuguuuguggcuuaucucauuuagcguauguc

SEQ ID NO: 389449 - RNA, 110 nt, Homo sapiens
gucagguaaguuaauaaauauuuauugagaguuuacauuguucaagcaauugugcuuuggacacuggagauucgucaguaauaggcacacauggaauuuaauaaucugac

SEQ ID NO: 389450 - RNA, 114 nt, Homo sapiens
ggucucucucugccacccagguuggaguauaguggcaugaucauagcucacugcauccuugaacucuugggcucaagugauuaucccaucucagccucccaaguaguuaggacu

SEQ ID NO: 389451 - RNA, 81 nt, Homo sapiens
gucaccucuuuauaauucuggcauaggcuguugggccugagcuggccucauggucuuuucccuggauuauaggaggguggc

SEQ ID NO: 389452 - RNA, 91 nt, Homo sapiens
ggugaguguuagagcucuauuagaagccgugggucacggaagagaacccacagaacccagugacuaguauugagcucgauuaggacgcacc

SEQ ID NO: 389453 - RNA, 76 nt, Homo sapiens
guagcaaauacgugauauugcaguauauaggaaagaaugagcacuuucauuauuguaaacaucuguacauugcuac

SEQ ID NO: 389454 - RNA, 59 nt, Homo sapiens
cagaauugggaguguccugauaucccgauaucuugagaacagaagcauuccuaauuuug

SEQ ID NO: 389455 - RNA, 67 nt, Homo sapiens
uccuuagcacugucuacucuggauuucuaauaaagagaagggaaaucgagggugaacugugcuagga

SEQ ID NO: 389456 - RNA, 62 nt, Homo sapiens
ggguagcaaauggcugucaaguagccaagagggcugagaguugacaaggagccauugcaucu

SEQ ID NO: 389457 - RNA, 63 nt, Homo sapiens
auugcuuaggagcccugaaaucauggcaggaagaucuuguuagaugaaugucucuuaaacaau

SEQ ID NO: 389458 - RNA, 68 nt, Homo sapiens
ugucuaucgaaguucacaauguacuuuccauuuuauucuuauguauuauggaacuuaauugauggaca

SEQ ID NO: 389459 - RNA, 79 nt, Homo sapiens
accugccuaccucaguucaauaacagauagauaaacagugggugugaauuuaucuguuauuaaaccgagguagacaggu

SEQ ID NO: 389460 - RNA, 91 nt, Homo sapiens
ugagucuucucauucuagacacuagauaugugacugauugagugaggaagacaaucacucacaugccuagugucuaggauaagaagauuca

SEQ ID NO: 389461 - RNA, 58 nt, Homo sapiens
ucagacgcucacuuucugcacacauagaaggauuugugugaggaguuacuggcuuuga

SEQ ID NO: 389462 - RNA, 85 nt, Homo sapiens
agguauacaugugccauggugguuugccgcaccuaucaauccgucaucuagguuuuaagccccaugugcauuaaguguuuauccu

SEQ ID NO: 389463 - RNA, 76 nt, Homo sapiens
uugagguauaaagguagguuguugauaugagcucuuuguucuuuuguaauguacacacuuaucacuuaaacuucag

SEQ ID NO: 389464 - RNA, 64 nt, Homo sapiens
ucauguugaaguagugcuacagauguuuaugauuauccuacucagacugagcacugcuuuauga

SEQ ID NO: 389465 - RNA, 88 nt, Homo sapiens
aguugugugagaugcuauaauuaugauaugacuuaguauaugucaguaauuauaauuguuauguuaaauuguuguaugccacaaaauu

SEQ ID NO: 389466 - RNA, 99 nt, Homo sapiens
aguuuuaaguuuugugguacguaguagguuuauaauauuauuuugaauccuuaguuguaauuuuaugucugcugauguguacauaauuuuuauuaaacu

SEQ ID NO: 389467 - RNA, 112 nt, Homo sapiens
uauaggaauauauagaugagaaauuauugacuugauauauagcugauuaaaauaauucuaaucuggcauauguacaaguuacuuauguuucauauuaccuauaauucuuaua

SEQ ID NO: 389468 - RNA, 62 nt, Homo sapiens
uggccaguugaagacaaugcucacuuacuacgagauaaugugcguguugucugaagcugcua

SEQ ID NO: 389469 - RNA, 65 nt, Homo sapiens
ucuuaaacuccgugguguuggcuguaucugcagagcccuggccagcuagcauucauaguuugagg

SEQ ID NO: 389470 - RNA, 88 nt, Homo sapiens
caaugagaacauauacuugaaagcacuuaguaaauuagaaaugugggucacaaauaauacugcugugcuugaguuguuguuguuguug

SEQ ID NO: 389471 - RNA, 64 nt, Homo sapiens
cuggucaaccuugugugaaggcaaguccugcauugccuaacaggcaauauugccuucagacuag

SEQ ID NO: 389472 - RNA, 56 nt, Homo sapiens
aagcacgauggggucacgaugagacggguaacauucuuucacguguccaucugcuu

SEQ ID NO: 389473 - RNA, 55 nt, Homo sapiens
augaguugaagcuacaagaggcacaagacagaaagugccuaugucuucaaaucau

SEQ ID NO: 389474 - RNA, 66 nt, Homo sapiens
gaggaauugcugcuccagaggucagcaugguggagacaacaagcaucacuggaggcagccaucuuc

SEQ ID NO: 389475 - RNA, 57 nt, Homo sapiens
auuaaagaacugagggcugugcgcgguggcucaccccuguaaucucaguacuuuggu

SEQ ID NO: 389476 - RNA, 65 nt, Homo sapiens
auggugaaacacagaaagcuuucucucugaaauugaaaaggaggcaagaaugcuuguuucaccau

SEQ ID NO: 389477 - RNA, 78 nt, Homo sapiens
cauaaucccuacuuucaggcacuaugcugggugcugacauuacaguaaggcacauaggccuggaaaccaauuauugug

SEQ ID NO: 389478 - RNA, 59 nt, Homo sapiens
uuuguaagaacuauaaauugcuuggguucacucucuuccuuguauguaguacuuauaaa

SEQ ID NO: 389479 - RNA, 57 nt, Homo sapiens
gacuacuaggacagggaagaauuggaaaauuguguuuucuucccuguuuuuucaguc

SEQ ID NO: 389480 - RNA, 56 nt, Homo sapiens
acuaaaaagcgaggauuccuguacuucccgguggcagguaguuuuccuuuuggagu

SEQ ID NO: 389481 - RNA, 57 nt, Homo sapiens
uucauuuuuuuauaugcauaucacaauucugugugauaugaaagggaaauaagugaa

SEQ ID NO: 389482 - RNA, 64 nt, Homo sapiens
uguguaaagcuuguuccagaaacagugagaaaaccauuuggauuggagcuuaagguuugacaua

SEQ ID NO: 389483 - RNA, 74 nt, Homo sapiens
ggggcguggagucaucacucagaguggauuccuagacagaaaaaggugcaugccacugaggagaguucaccccc

SEQ ID NO: 389484 - RNA, 111 nt, Homo sapiens
acccuaaugcauauuauggacuguaguuaauaaucaugucaguauugguucaucacauauaacacacuaaugcaagauguuaauuauaggggaaauugugcaugugagggu

SEQ ID NO: 389485 - RNA, 67 nt, Homo sapiens
cauucggaaagggugcaggguagaaggggccacauguagauacuuugccuuuguacuuuuucuaaug

SEQ ID NO: 389486 - RNA, 63 nt, Homo sapiens
ugaaauacuuuggcucuuuguuauuaauaaccugaacaaugaaagagcccaaaguaguauuca

SEQ ID NO: 389487 - RNA, 84 nt, Homo sapiens
cuggcugucagcuggggggacaaccucaggccccaaggcugcccgcacuccuuggcuuguuguccccugcuccaucaaagccag

SEQ ID NO: 389488 - RNA, 73 nt, Homo sapiens
ccuacacugucugaugaaaguaguucgaggggagaaggggaaccuuggaaugaacugccagcaggcgguaagg

SEQ ID NO: 389489 - RNA, 73 nt, Homo sapiens
cugaauucucuguauauuuaagaucccuacuuugcuagcuuuauuguaugggauaguaucaguggaauaucag

SEQ ID NO: 389490 - RNA, 61 nt, Homo sapiens
ggaggcaaagcacuuugcuuggaaauauuuuucacaugacauacaaggugcuucgaccucc

SEQ ID NO: 389491 - RNA, 67 nt, Homo sapiens
uugaggaggcagucugcccauucucauaucuucagcuguguguugggagaaccacugcucucuucaa

SEQ ID NO: 389492 - RNA, 58 nt, Homo sapiens
guguauguguauguguguguuugugugugugugcgcacagaugcaugcacauaaacac

SEQ ID NO: 389493 - RNA, 79 nt, Homo sapiens
cugugaauuagugagaagacagguaguuuaaacggggaguaucaucccuauuuaaaccugucuucucacuaauucacag

SEQ ID NO: 389494 - RNA, 63 nt, Homo sapiens
cuucucccacccucauuuuuaggcagcugauuauuucuaugccagaacugagagguggggaag

SEQ ID NO: 389495 - RNA, 68 nt, Homo sapiens
auuuccagcaauacuacauuccuuuugggaaagcacuccauaauucauggaugagucauuguggaaau

SEQ ID NO: 389496 - RNA, 76 nt, Homo sapiens
cggucaacaaagaugaaagugcugcaaggccaugcauggugacucacgccuguaaucucagcacuuucguaggccg

SEQ ID NO: 389497 - RNA, 55 nt, Homo sapiens
ucuggaauauuagcuggucuuaacuaggcaaaguuggacaaaagaauauuccagg

SEQ ID NO: 389498 - RNA, 93 nt, Homo sapiens
ggguauuuggaauauuauaauauagcaauuugggaaucagacuuuuccccaucuccagaguuuguuuuacuuguuguaguugguauuguaucu

SEQ ID NO: 389499 - RNA, 96 nt, Homo sapiens
ggcaggagaauugcuugaacucgggaggcggagguugcagugagccgagauggcaucauugcacuccagccugcggaacaagagcaagacuucguc

SEQ ID NO: 389500 - RNA, 75 nt, Homo sapiens
ugauguacaaugucaggagcaaugauaaauuugccagcaaucugaaaugugucaccuuuugacuuaguggaugca

SEQ ID NO: 389501 - RNA, 57 nt, Homo sapiens
cucuuagauuagccauccuaauauccauucuggaauuaggccugcagaaucaaagag

SEQ ID NO: 389502 - RNA, 98 nt, Homo sapiens
uugugugucugugguuccauggcucuguuccaugugucuucuuauucuaggaacagaugagggaagagcuuuuagcugggauugccauucccacacaa

SEQ ID NO: 389503 - RNA, 86 nt, Homo sapiens
ccaaaagauuguaaauuuuaagaaugaagucacugaauggcaauaccacuccacaguggcacuauucucagagucagugcccuugg

SEQ ID NO: 389504 - RNA, 84 nt, Homo sapiens
ggaucucgcucuguugcccaggcuguagugcaguggugcagucacagcucacugcauccuccauauccugggcucaagcgaucc

SEQ ID NO: 389505 - RNA, 78 nt, Homo sapiens
ugaggauuacaauucaacaugacauugggguggggauacagagccaaacuauaucaccauccucauugucaauccuca

SEQ ID NO: 389506 - RNA, 66 nt, Homo sapiens
gccacugggccuugccuacuuauguaauuuuuaaaaauuacaugucuugguaagguuagaaguggc

SEQ ID NO: 389507 - RNA, 95 nt, Homo sapiens
guguguacauuugggggauugggagagaaggauggauaaggggagaggcagagagauugucacccuuuauccauuuccucuuuugugugcuccac

SEQ ID NO: 389508 - RNA, 89 nt, Homo sapiens
uucuuuuaaacuaucagggacugaaugaacauaggacuugaguaaagauauugcuuaagcuaguuuauucaggaaagccgcaagaagaa

SEQ ID NO: 389509 - RNA, 88 nt, Homo sapiens
caccauuuguccuuuggcucaguuuccuccgucugcuucucccugaugcagggcccagcacauagcaggaaugggcacagggguggug

SEQ ID NO: 389510 - RNA, 96 nt, Homo sapiens
gcagcuaugaguaacugggaagcacggaugagcugaugugaggguuuugugaauggucuucucauggaacaucuguacuggcuuagcagugucugc

SEQ ID NO: 389511 - RNA, 75 nt, Homo sapiens
ugaauaugugagcaugagagucauacaaauaaaaauccugaaagaaaaggaagaugacugaugcuuaaauauuca

SEQ ID NO: 389512 - RNA, 58 nt, Homo sapiens
gcagucaugugaggagcccagacaggaccagcaaagucuggcucagucaacugacugu

SEQ ID NO: 389513 - RNA, 55 nt, Homo sapiens
uugagauggagucuugcucugucgcccaggcuguagugcaguggcaccaucuugg

SEQ ID NO: 389514 - RNA, 83 nt, Homo sapiens
cuugaccaggcauuaggaccaggcuuggagauaggggucagugaugggcucuuguacuacuuaggaucuggagucuggucagg

SEQ ID NO: 389515 - RNA, 82 nt, Homo sapiens
aguuuuaggguacaagugcacaaugugcagguuuguuacauauguauacacgugccuuguugguguacugcacccauuaacu

SEQ ID NO: 389516 - RNA, 74 nt, Homo sapiens
gacaacaaugaaguuugcuacauugauugccucuuucuuucgugaaagauuucucuguagcacuugaugcuguu

SEQ ID NO: 389517 - RNA, 69 nt, Homo sapiens
augcuggugguucacaugcgcagacacacuggcgagaagccacacaagugcacggugaggcaccagugu

SEQ ID NO: 389518 - RNA, 75 nt, Homo sapiens
ggcacacuguaggugcugaacucauugcugaaugcacacauccagcagauguuuagugagcgccuacugugugcc

SEQ ID NO: 389519 - RNA, 59 nt, Homo sapiens
aaugugcuguucagaggaguccuaggacacauguggggcuccauucuggguaucacauu

SEQ ID NO: 389520 - RNA, 118 nt, Homo sapiens
cugaguuugaaccucagccacccaccugcaggcugagugacccugggcaaccuuuucccccucucucugcucaguuuccucagcugcaaaauggguaaaauccugguaccauucucag

SEQ ID NO: 389521 - RNA, 97 nt, Homo sapiens
cuggaaugugcuaucuaccaugagcgauuagauguacuauguacucaaggauauauaguguuuuuugguacgcuugugguugagaaguuucuuuugg

SEQ ID NO: 389522 - RNA, 84 nt, Homo sapiens
ggccuacucuggaguaagucugcaagugaaaucaccuuugaugaggugauguuugaguugagacaggaaucacagaaaggagcc

SEQ ID NO: 389523 - RNA, 87 nt, Homo sapiens
uauauaagaggaauaacaugucagaaucaacuugaguuuaucccaggaauacaacacugguucgacaugugaaaaucacucaguaua

SEQ ID NO: 389524 - RNA, 56 nt, Homo sapiens
ccuggcacugagcaguguucuauacacacaguaggagcauaguuaguuaggcuagg

SEQ ID NO: 389525 - RNA, 57 nt, Homo sapiens
auucuagcacuuugggagacugaggcagaaggguugcuugagucuaggaguuagaau

SEQ ID NO: 389526 - RNA, 105 nt, Homo sapiens
gguugaaugccacaucugugcagaagauagcagcucacuuauuuauggcucagagaaauggagccuaaauuaagcuagcuauugcuggagaguggauaagcggcc

SEQ ID NO: 389527 - RNA, 89 nt, Homo sapiens
ggagaaucgcuugaaccuggaagguggaguuugcagugagcugagaucgcgccauugcacuccagcuugggcgacaagagcgagacucc

SEQ ID NO: 389528 - RNA, 76 nt, Homo sapiens
ucauuuuuacuuguaucugcacugaaaggauacauaagaaacuaaagugauuccauguagaagacaggggagauga

SEQ ID NO: 389529 - RNA, 103 nt, Homo sapiens
ccagcuccaacccacuagaucgcuuggaucucagucuugaugacaagcgagacauccuaaaaauuaagcugaauuuaagcuucggagaggguggguaagcugg

SEQ ID NO: 389530 - RNA, 95 nt, Homo sapiens
gggcugauucuuaucuuuagaaauuuuaugggagcuauuuuggcucugcuugggaaaguuuugguugaguuacuagcaguaugagaaucuagucc

SEQ ID NO: 389531 - RNA, 78 nt, Homo sapiens
ggaagucaacuugaauauuaggaguagagccucuauauuagcauucaagcuccuacugcuuaaaagucaauuacuuuc

SEQ ID NO: 389532 - RNA, 95 nt, Homo sapiens
uuaaggcauuauuacuacguggcacugauaauaucaguuaaggcccuuuaaauaauaucaagugauuuguccauguggcacguggaauaucuuag

SEQ ID NO: 389533 - RNA, 60 nt, Homo sapiens
ugugaauggugcugccgugaagauaggcaugcuugugucuucaugguagaacuauuuaua

SEQ ID NO: 389534 - RNA, 63 nt, Homo sapiens
gucaaagagcagaaacaacuuguucaagggcagacccugagcaagucauuuuguuaaacugac

SEQ ID NO: 389535 - RNA, 66 nt, Homo sapiens
ucucucacuacuccuauucaacauaguacuggaaguccuagcuaaugcagucaggagaaggaaaga

SEQ ID NO: 389536 - RNA, 55 nt, Homo sapiens
uuugagaucuuuagaaucaggcauuuggaccaguugaccuguaaaguaucucaga

SEQ ID NO: 389537 - RNA, 59 nt, Homo sapiens
ugagacggaguuucgcucuugucacccaggcuggagugcaauggugcgaucuccgcuca

SEQ ID NO: 389538 - RNA, 64 nt, Homo sapiens
ccauuuuauuuuaggucaucagaagcuaccagugguggcaugaggccauaaaaguaagccgugg

SEQ ID NO: 389539 - RNA, 55 nt, Homo sapiens
agauagcccagcauuuguucccuggcugcuaacucacccacaaagcuggcuaucu

SEQ ID NO: 389540 - RNA, 57 nt, Homo sapiens
gcucccaguggucuugaaacagggacacuaaacugaucccucugcuacacugggagc

SEQ ID NO: 389541 - RNA, 100 nt, Homo sapiens
agaauauauguauacacauauauacccauacauauuggugacugucugaaggauggagaggcugccauguauggguauauauguguauauaugugugucu

SEQ ID NO: 389542 - RNA, 66 nt, Homo sapiens
gcugaggagugugccgcuacccccacuaauuuuuuaaggcaaagcguaguggcaugcaccuguagc

SEQ ID NO: 389543 - RNA, 94 nt, Homo sapiens
ugugacauaucucugguaguaucacuuagguuaugccgcucuucuacuuggucccugccaaccuggagagugacauauuucuaggccaggcaca

SEQ ID NO: 389544 - RNA, 58 nt, Homo sapiens
ggaugagguaauaaguccuuggaaaccucuuguuuccucagggaaaguugccccauuc

SEQ ID NO: 389545 - RNA, 89 nt, Homo sapiens
ccugggguuucgugaggaaaacagaggguguuuuuuccuccaaaauggggucuguggcaccuccucuguuuuucccaaggagucccagg

SEQ ID NO: 389546 - RNA, 65 nt, Homo sapiens
gccuuauuuuguaauugaaauguuuaaaaaauguuuuagauauguuuaguuucaaaaugauaggu

SEQ ID NO: 389547 - RNA, 80 nt, Homo sapiens
augagaccagcagaaaaccuguccaacuagccccaguuaagccauacaauagugauagauaggcaaauuuguuguuuuau

SEQ ID NO: 389548 - RNA, 65 nt, Homo sapiens
cacuuccugaaauggauuuggugauacuucucauugaggugucaugaacucacauucugggggug

SEQ ID NO: 389549 - RNA, 83 nt, Homo sapiens
ucuugaacuccucaccucaaaugaucugcuggccucagccucucaaagugcugggauuauaaguagcauugugaaauucaaga

SEQ ID NO: 389550 - RNA, 74 nt, Homo sapiens
guaauuuggggucuuugaaauuuauaugagaccauuuuucuggucuuacaugcaugacaaggugccaugauuau

SEQ ID NO: 389551 - RNA, 57 nt, Homo sapiens
gauagggcagucagugcuagaugaugacccauuauaauuagucuccucugcccuguc

SEQ ID NO: 389552 - RNA, 60 nt, Homo sapiens
ugauuugucucucagcccuacuuaaaaagaaauccuaggaaggcugaaguggaaagauca

SEQ ID NO: 389553 - RNA, 67 nt, Homo sapiens
gccuucccacauucuuuacauucauaagguuuuccaccaguaugaauuuucugauguuggguaaggu

SEQ ID NO: 389554 - RNA, 72 nt, Homo sapiens
auaagaugagcagacuguaucaaugucaguauugugguugugauacuguacugcaguucugcaaaauguuau

SEQ ID NO: 389555 - RNA, 82 nt, Homo sapiens
ugauuguggugaauaagcuuuuuaaugugcugcuggauuugguaugccaguauuuuauugaggauuuucgcaucgacguuca

SEQ ID NO: 389556 - RNA, 63 nt, Homo sapiens
auuguuuccaguaauagcacagcauuguaggugauaguguugauacuguuauuguaagauaau

SEQ ID NO: 389557 - RNA, 99 nt, Homo sapiens
gaguuucauacauguuguugugcauaucagagguuugcugacuuuuauuacuguguaguguuccuuuguguggacaccucacaauuuguuuauguauuc

SEQ ID NO: 389558 - RNA, 57 nt, Homo sapiens
uguggaucuuauucagaaccaugaaggcaguaccucuaugagucugcaagaaccaca

SEQ ID NO: 389559 - RNA, 58 nt, Homo sapiens
ucccagaacugaaaguuuaauuuaaaaaaaccugggaguuauaacuuuuguucugggg

SEQ ID NO: 389560 - RNA, 57 nt, Homo sapiens
ugaaauggugcggucugcagcauguguccaaggccacguggcaggagcaucguuuca

SEQ ID NO: 389561 - RNA, 78 nt, Homo sapiens
auguuuacauacuuuggaaguguguauguauagcuauauugaaauaguuuuugugaaacuuucaauuuauguuaucau

SEQ ID NO: 389562 - RNA, 69 nt, Homo sapiens
gcagccuugcugacucaaggggaacugcucuucuuaaggcuagcuaauuccuagagauuagcaagcugc

SEQ ID NO: 389563 - RNA, 57 nt, Homo sapiens
ggguucuuugcaggaccaaccccugcauaagggauucuggugucuuggaaagagcuc

SEQ ID NO: 389564 - RNA, 60 nt, Homo sapiens
ugugaauagugcugcaacaaauauacgugugcaugugucuuuauagcagcaugauuuaua

SEQ ID NO: 389565 - RNA, 61 nt, Homo sapiens
gcuggaagucauugagguguguuaaucccuguagcuguaguaacaaauuuagugacuuagc

SEQ ID NO: 389566 - RNA, 70 nt, Homo sapiens
gagugaguuuugguaguuucugucuuuagauaauugaucuauauuaucuaagauuuugcuaagaucauuc

SEQ ID NO: 389567 - RNA, 79 nt, Homo sapiens
cagggcauuucugucacuugaacagugugaguugggguagagaauucacagaugaggcgagaggcagagguggauccug

SEQ ID NO: 389568 - RNA, 79 nt, Homo sapiens
caugccacaugggaacucggugaauaaauaccccagcucccucaccccugggguaggcuacacugaguuccccaguaug

SEQ ID NO: 389569 - RNA, 79 nt, Homo sapiens
cuguaagaaguacauuucuguuguuuauaaauuaccuagucuaagggauuuugucauagcagcaggaauggacugacag

SEQ ID NO: 389570 - RNA, 88 nt, Homo sapiens
uagggaguuuacauccacccauuauugaugcaacagcccuuaauagcaccuuuguugucagaggguguuguguugcuuaauaucccua

SEQ ID NO: 389571 - RNA, 69 nt, Homo sapiens
ucuuuacagcagugccccacucccauaccaauuuacuguacuggucuguucucacacugcuguuaaaga

SEQ ID NO: 389572 - RNA, 77 nt, Homo sapiens
aguuuuaucagauuggugcaaaaguaauuuugguuuuugccauuaaugucaauuacuuuugcaccgacuuaauagcu

SEQ ID NO: 389573 - RNA, 92 nt, Homo sapiens
augggaacuacaauucaagaugacauuuggguggggacaaagccaaaccauaucuuuccagccuuggccccucccaaauuucauguccucau

SEQ ID NO: 389574 - RNA, 110 nt, Homo sapiens
uguuuuauggguguauguuucucccugucccugugaccguggagaaaaaagugcuaaauaaucaugggguaaaggcacaggggacacaucaagauaauuuacauagaaca

SEQ ID NO: 389575 - RNA, 86 nt, Homo sapiens
uaaguuuuaggguacaugugcacaacgugcagguuaguuacauauguauacaugcgccauguuggugcgcugcacccauuaacuug

SEQ ID NO: 389576 - RNA, 70 nt, Homo sapiens
gagcaccuuuccagagcuguuauaagccaaugcagacguauugagcucuuccagccuggagccacugcuc

SEQ ID NO: 389577 - RNA, 57 nt, Homo sapiens
ccuggaucauugucauucccaaucaucucccucuugaggaguagacccugaaccagg

SEQ ID NO: 389578 - RNA, 85 nt, Homo sapiens
ggucuuacaagucauagauagauucaaagguuuccugauuugcaauugguuaaggagaugaagcuuuaucuaaaaauuugugauc

SEQ ID NO: 389579 - RNA, 76 nt, Homo sapiens
ucagaggcuagcaucauaccaaucugguccuucuuguaugaagccaugagucuuuggcuggugccaguuucucuga

SEQ ID NO: 389580 - RNA, 100 nt, Homo sapiens
gggaaacguuuauuuuucuucaccauugucuauaauauuaaauguaagcauuuuuaaaauuuguuuguuugguuagaugggcaaguucaggaaguuuccc

SEQ ID NO: 389581 - RNA, 62 nt, Homo sapiens
uggguuaagggaauguuguagcugguuugaucuacucaaaccacuaaaacuuucucuuucca

SEQ ID NO: 389582 - RNA, 57 nt, Homo sapiens
gaagguggggaccaagaaggaaguauaauucaagaugcuuccaguggccccaucuuu

SEQ ID NO: 389583 - RNA, 69 nt, Homo sapiens
cuugaacccgggggguggagguugcagugagccgagaucgcgccauugcacuccauccugggcaacaag

SEQ ID NO: 389584 - RNA, 59 nt, Homo sapiens
ugugauugcuaacucuauguuuccauuuuccauaaugugaccuguaguaagcauucaca

SEQ ID NO: 389585 - RNA, 121 nt, Homo sapiens
gauguguuguagacucuggauucuguuauguucuugagaguuugguguuuuguuucuguuaacaugcaguuaaucacagcugaacucaaacuccaaaucuagcuucccugaggcaagcauc

SEQ ID NO: 389586 - RNA, 59 nt, Homo sapiens
auagauauagacuagaagcaauggcuuucacuaaaauggccucuagacacugugucuau

SEQ ID NO: 389587 - RNA, 75 nt, Homo sapiens
aucaagguguaggcugggaugcauuuucaucaguaggcucaacuagggauggauaugcuuccaacugccuaugau

SEQ ID NO: 389588 - RNA, 59 nt, Homo sapiens
gugauaguucuuacuccaaagugccauuucuuagugauccuugaguucagagcugucau

SEQ ID NO: 389589 - RNA, 127 nt, Homo sapiens
guugcuagauuuugaaaaguuaggguuuuucucccuauaaaguuaagacagaauguuaagauugcugguauuaauacugcuuaacuuuaggaaaggaauuauaucacccuccaguucuuucuguaac

SEQ ID NO: 389590 - RNA, 76 nt, Homo sapiens
agaccuuugugagguggauagauugcaaaacuuuucucccauucucuagguugccuguucacucugauaauaguuu

SEQ ID NO: 389591 - RNA, 67 nt, Homo sapiens
gauuagagucagaggcagcccuggaaucuagcccuccuggucuuaggucacugcucugugucuaauc

SEQ ID NO: 389592 - RNA, 112 nt, Homo sapiens
aacaagauuacauaagagaaaagcaacagauuccacuuucaaauucaaauuccaaguuggaaagcugaauuugaaaguggaaucuguugcuuuccucuuaugugauauuguu

SEQ ID NO: 389593 - RNA, 59 nt, Homo sapiens
uguucucuaguuuaauguguaugcuuuguuuucuucagcuacauaguaaacugagagca

SEQ ID NO: 389594 - RNA, 64 nt, Homo sapiens
ugcucugugggugaagacaagggagagugucucauaccucuuuggugaauggucauccagagua

SEQ ID NO: 389595 - RNA, 87 nt, Homo sapiens
cauuugaugaugauuccauucgaguccauuugaugaugauuccauucgaguccauuugaugaugauuccauuugaguccauuugaug

SEQ ID NO: 389596 - RNA, 67 nt, Homo sapiens
uagaugccaucacuuuuccuuuuacagauguacuguuccaucuggaaguuaagcuuggugccaccua

SEQ ID NO: 389597 - RNA, 56 nt, Homo sapiens
aaugucacugugguccuccagucagaguaggagcucauggaggucaggugaucauu

SEQ ID NO: 389598 - RNA, 71 nt, Homo sapiens
gggagcucauuagcaauuaaagccugcuuuuuaaaauuccaaaagugguuuuaaucuggugaguggcucuc

SEQ ID NO: 389599 - RNA, 66 nt, Homo sapiens
ccaguccuuggcucggucuugugcucagggccuuccuugacuacaccacacgguuaaggcugcugg

SEQ ID NO: 389600 - RNA, 59 nt, Homo sapiens
auuggcuugucucccauucuggagcgucacccggccucacggagaccugcaagaccaau

SEQ ID NO: 389601 - RNA, 61 nt, Homo sapiens
gggugcuauggucuuuccaauagaugguuguucaaccauugcauugcccuccauaguacuc

SEQ ID NO: 389602 - RNA, 74 nt, Homo sapiens
gucuuugucuuuguguuguugguguauuugccucuuuuccugugccagauacaaagcuacucgagggcagggau

SEQ ID NO: 389603 - RNA, 64 nt, Homo sapiens
auugugaauggugccacaauaaacauacauguccaugugucuuuauagcagcaugauuuauaau

SEQ ID NO: 389604 - RNA, 67 nt, Homo sapiens
uugaacccaagggguggagguugcagugagccgagaucgcgccacuguacuccagccugggugacag

SEQ ID NO: 389605 - RNA, 74 nt, Homo sapiens
uacuaagaucucugcaguuuuuuuggacgugugugcauguguuuguguauaugucugagacugggggaugggua

SEQ ID NO: 389606 - RNA, 65 nt, Homo sapiens
aaagccucuucccagagaaaaggguuucuuuugcuaagggaauuaaccucuggggacagcguuuu

SEQ ID NO: 389607 - RNA, 63 nt, Homo sapiens
uuuccauuuccgugucugugauaucuggccuguuaauggcuaaaaugacauaggaaaaggaga

SEQ ID NO: 389608 - RNA, 64 nt, Homo sapiens
auugugaauagugccgcaauaaacauaugugugcaugugucuuuguagcagcaugauuuauaau

SEQ ID NO: 389609 - RNA, 59 nt, Homo sapiens
cccucaccaagggucccaaggaauaccaaacggucauuccuuaggcccuuugguuaggg

SEQ ID NO: 389610 - RNA, 58 nt, Homo sapiens
cuggagcacagcagggccagcugccccacgagcucgggugcucaccuugcugcuccag

SEQ ID NO: 389611 - RNA, 66 nt, Homo sapiens
guugucuaggacagagacugugugccacgcuacuuuuuauuccccacacagugcuuugucagaagc

SEQ ID NO: 389612 - RNA, 75 nt, Homo sapiens
ucuuuuuggagucugauuuuuauguugcucauuuacuuaggaaucgagaauuucuaguucagaacugcaaaaaga

SEQ ID NO: 389613 - RNA, 78 nt, Homo sapiens
uuuucuugggugaguuugugaauaaauuaaguugcuuuuuaaucuguugcuuuuaauugcaaauacaucccaggagaa

SEQ ID NO: 389614 - RNA, 78 nt, Homo sapiens
aggagcucuuuuagggcaggccugguggugacaaaaugucucagcauuugcuugucuguaaaggauuuuauuucuccu

SEQ ID NO: 389615 - RNA, 56 nt, Homo sapiens
ugagucagucucacucugcugcucaggcuguaaugcagcagggagaucuuggcuca

SEQ ID NO: 389616 - RNA, 85 nt, Homo sapiens
ucugacacacaauugguggucaacuguugauucaugagugaauuuuauugguuacuguugaucgccagugaaauaagugcuuaga

SEQ ID NO: 389617 - RNA, 70 nt, Homo sapiens
cauagcacugagcucuacccucaguuacucuucuuucacugucuguugcagguaguaaguugagugcaug

SEQ ID NO: 389618 - RNA, 70 nt, Homo sapiens
uucucaugaugugcaggugaaagaagccagucauucaaugacaagagccuucuuuccuucacuuccagaa

SEQ ID NO: 389619 - RNA, 57 nt, Homo sapiens
acuagcugggugucguggugcacaccuguagugucaccaguggcacuccagccuggu

SEQ ID NO: 389620 - RNA, 63 nt, Homo sapiens
caagugaaugaugugaaguguaaaccaaccauuguuguguuucauguuacugucauacacuug

SEQ ID NO: 389621 - RNA, 65 nt, Homo sapiens
uuuguauuuucaguagagacacgguuuugccacguuggccaggcuggucuugaacugaccucaag

SEQ ID NO: 389622 - RNA, 78 nt, Homo sapiens
cucccucuggguucccugaagauacagaguuugggggugagaggcccgccagacugcacuuuuuaggcuaggcgggag

SEQ ID NO: 389623 - RNA, 64 nt, Homo sapiens
uucaguuugccaguauuuuauugaagauuuuugcaucaauuuucaucagggauauuggccugaa

SEQ ID NO: 389624 - RNA, 97 nt, Homo sapiens
cagcuguuguauagugcacauaaggaaaguauucuuauuaacauaauuauauuuagugcuagaugacuuugccauguguagauuaccauccuagcug

SEQ ID NO: 389625 - RNA, 59 nt, Homo sapiens
ggaucccugagaacuuuuaauguuuuuucuaccacuaaaaauauaggugacagggauuc

SEQ ID NO: 389626 - RNA, 61 nt, Homo sapiens
cccucuacagggaagcgcuuucuguugucugaaagaaaagaaagugcuuccuuuuagaggg

SEQ ID NO: 389627 - RNA, 89 nt, Homo sapiens
ccuaucacagaccugccagauuccucugguaaacugcagguucccucugccucaguuguggccagggauucugaccaggagaugauggg

SEQ ID NO: 389628 - RNA, 61 nt, Homo sapiens
uugucuguacuggcugcaucgauggcugcaggaaggagaguugagcuuuuaguacagacag

SEQ ID NO: 389629 - RNA, 69 nt, Homo sapiens
cccugauuuaaaguguaugggaggguaugcauagguuauaugcaaaugcuacaccauuuuguauuaggg

SEQ ID NO: 389630 - RNA, 57 nt, Homo sapiens
uuugcauggagcucucuuuggacuguagcaucuauagucuuccuaccuccauccaaa

SEQ ID NO: 389631 - RNA, 59 nt, Homo sapiens
agacaucauuugauggugggagcugcuaucugauuugcccugccuccaucagugagucu

SEQ ID NO: 389632 - RNA, 95 nt, Homo sapiens
ggguguuaaaagucaagauuguauacuuucaaaggucaggguucuuucauaccucagauguuugagaaguauacugaacaugauguuaaacaucu

SEQ ID NO: 389633 - RNA, 55 nt, Homo sapiens
gaagauucaaccaaaccagaacaccaauaaaacggguugacuugguugaauuuuu

SEQ ID NO: 389634 - RNA, 129 nt, Homo sapiens
uuguauuuuauucacuuauuguagacccucaugagguagcccauuuguuuagggaaaguaggcauaauguauauuuuccuuaaaaguuggcaaacuucaugugaacccgccaagagaaauagaguauag

SEQ ID NO: 389635 - RNA, 72 nt, Homo sapiens
uccaacccugaagaauauuuccugcacuugggauuggugcaaaauuccaguagaauuuuauucaacagugga

SEQ ID NO: 389636 - RNA, 55 nt, Homo sapiens
uguuguaugacacuaccaugguggauaugugucuaaaccuguagaaaguacaaca

SEQ ID NO: 389637 - RNA, 63 nt, Homo sapiens
auuuuaugguauaugaaauacaucucaauaaaguccacugagguguagagauauaccugaaau

SEQ ID NO: 389638 - RNA, 89 nt, Homo sapiens
cuuuugguggcuuggcauuguguugauagaaguuauuuuucaaggauuccuaagcuuuuucuaaucauaauugucuccgccaugaaaag

SEQ ID NO: 389639 - RNA, 128 nt, Homo sapiens
cuacauaaccuucagcaagucacguaaugucucuaauuucccaaggccaguuuuacccccaccuugguaggacauugcccuuguggagaacagaagauccccuuugcaucugauaagagggcuuguag

SEQ ID NO: 389640 - RNA, 55 nt, Homo sapiens
uugagauggagucuugcucuguggcccaggccagaguucaguggcaccaucucag

SEQ ID NO: 389641 - RNA, 64 nt, Homo sapiens
uucaguuagccaguguuuuauugagaauuuuugcauugauguucaucagagauauuggccugaa

SEQ ID NO: 389642 - RNA, 92 nt, Homo sapiens
uuuacgagucacagcuuucucaucagcaacgugaggauaauaauaggauuuaugucacagguuuuggugaaaauugagaugcuauggguaga

SEQ ID NO: 389643 - RNA, 66 nt, Homo sapiens
gcauuucccagauuagugauguugaguguuuuuucguauauuugcauaucuucuuuugagaaaugc

SEQ ID NO: 389644 - RNA, 69 nt, Homo sapiens
gccaaucugugucacuguauaauauuuauuauuuuaauuaaagaaaauggauagugacauuuauuuggu

SEQ ID NO: 389645 - RNA, 81 nt, Homo sapiens
agugguugggaagauggcaagaauggaacaggagagccguggauucaggcucgucugaguucuagucucaaucccaccauu

SEQ ID NO: 389646 - RNA, 56 nt, Homo sapiens
aaaugguggcugugauuuuuguuauccuuauuauuacagugucauggucauuauuu

SEQ ID NO: 389647 - RNA, 59 nt, Homo sapiens
ucagaacugauacuagaacuuuagauaguucuagugcuuguucuaguaucuaguucugg

SEQ ID NO: 389648 - RNA, 64 nt, Homo sapiens
uucgguuugccaguauuuuauugaggauuuuugcaucaaucuucaucagggauauuggccugaa

SEQ ID NO: 389649 - RNA, 76 nt, Homo sapiens
ucagcaguagcaauuguucugauucccugugguucccuaagacagcccacugaguugagagaguuguuauuucuga

SEQ ID NO: 389650 - RNA, 65 nt, Homo sapiens
gugaaauguguagaggaucuggauugugaaugccugaauuaauaccccagcccugccacuuucau

SEQ ID NO: 389651 - RNA, 63 nt, Homo sapiens
uauccucucuccgcaucacagcaugugauaagccuuuuaaaugugugcuuggagagcaggaug

SEQ ID NO: 389652 - RNA, 75 nt, Homo sapiens
aauuguuuauuuguuuuucacauuuauuugaucuuauuuacuagauuauauguuucuuagggacagaggacaauu

SEQ ID NO: 389653 - RNA, 76 nt, Homo sapiens
gucugguguaugccugauucuguggcuaugaaacauccggaauagacaaauccauagagcuaggaugcagacagau

SEQ ID NO: 389654 - RNA, 61 nt, Homo sapiens
aacaguagugggcuacagaaucagaaaucaaaagaacugucuguuaaaugcccauucuguu

SEQ ID NO: 389655 - RNA, 56 nt, Homo sapiens
gugaucucauuuggaauuagaguuguugccaauguaaugaauuaagaugaggucau

SEQ ID NO: 389656 - RNA, 69 nt, Homo sapiens
ggggcuuggaaggcugaauggccucucuuaagacccacaggcagagaacauuggucuuccuauggcucc

SEQ ID NO: 389657 - RNA, 57 nt, Homo sapiens
cauucaaugugaugauagcccuguguuagccuuauauggucuuuauuguguugagug

SEQ ID NO: 389658 - RNA, 76 nt, Homo sapiens
ccaucacacugugauuauuauccccauuuuccagaugagcagacggaagccuaggaagauugagucacugugaugg

SEQ ID NO: 389659 - RNA, 57 nt, Homo sapiens
guuacaggcuggagugcagugaaugagaucgugccacuguacuacagccugggugac

SEQ ID NO: 389660 - RNA, 72 nt, Homo sapiens
augugguacauaugcacaguggaguacuauucugccggaaaaagaaugagauccucucacuugcaacaacau

SEQ ID NO: 389661 - RNA, 75 nt, Homo sapiens
uuucaauaguacaggguguaguacaguuaaauuuauguaguuaugauuuaauacugcaucuuuacucuuuugaga

SEQ ID NO: 389662 - RNA, 64 nt, Homo sapiens
uaagucuuuuuggaguuuauaaguguaagccacgguaccuuacucuuaugccuaugaggacuua

SEQ ID NO: 389663 - RNA, 121 nt, Homo sapiens
gugagauauuagaaaagaaauuggugguaguuggugauugauugggucugugguaauauucuaggcuuuggaucacccugccagucaccaaauccaauagauuuuuuuuuuuuuuuuuuac

SEQ ID NO: 389664 - RNA, 98 nt, Homo sapiens
gaggcaggagaaucacuugaacccaggaggcugagguugcagugagcugagaucaugccacugcacuucagccuggugacagagugagacuccaucuc

SEQ ID NO: 389665 - RNA, 55 nt, Homo sapiens
uugacugggccagacagagauccuugcuggggaucucucugguggucacagucag

SEQ ID NO: 389666 - RNA, 70 nt, Homo sapiens
uugcuugaacccaggagguugcagugagccgagaucguguuauugcacuccagccuggguaacagagcaa

SEQ ID NO: 389667 - RNA, 68 nt, Homo sapiens
uaggacuuugagaauuguuauuaggugaguuugacaauagcacaggguaauaaugucucagacaccua

SEQ ID NO: 389668 - RNA, 61 nt, Homo sapiens
augccuauuaaaguugacauuuugaccaucuaccauaagucaugaauguccuugauggcau

SEQ ID NO: 389669 - RNA, 82 nt, Homo sapiens
gauugcuaaagagaauuugcccauuucauucuaacucuaugauuuuuguaucgccugauggggagauucuccuuucauaauu

SEQ ID NO: 389670 - RNA, 63 nt, Homo sapiens
ccuguaacuccuuggcucaagugauccucccaccucagccucuugagcaacuaggguuauagg

SEQ ID NO: 389671 - RNA, 67 nt, Homo sapiens
uauuagguuggugcaaaaguaaucacgguuuuugcauaauggcaauuauuuuugcaccuaccuaaua

SEQ ID NO: 389672 - RNA, 77 nt, Homo sapiens
uuauacagcugguaaguggcagagauucuggaggcagacugccugcauuugaauucugucgcuuacuagauguauga

SEQ ID NO: 389673 - RNA, 78 nt, Homo sapiens
gugguagaucauguuuccauagaaggccucaacaauaucugcuaccccaugugcucuuuugcaaugugaucuugccac

SEQ ID NO: 389674 - RNA, 76 nt, Homo sapiens
uauuuucagauacuccuggucucaggaggaggaguguuucuggucuuucucucugaggaaggagcaucugugaaug

SEQ ID NO: 389675 - RNA, 118 nt, Homo sapiens
uuucuuguaugcacauaccuucuuccaguguuugacucaccuuuacguucucuuaaugaugccuuguaaugaacaaagguucuucaaagcuggaggcaucacauuaccugacuugaaa

SEQ ID NO: 389676 - RNA, 70 nt, Homo sapiens
cuauucugauugcaguagucugaaagcaauagucagacuauugcuuugccucugcuguccauuacgguag

SEQ ID NO: 389677 - RNA, 83 nt, Homo sapiens
cagaacuguguuuucauugguuaaucaccgguguccagugaucuguccuucauagccugugaaaauuuauaacauccuuucug

SEQ ID NO: 389678 - RNA, 91 nt, Homo sapiens
uucauuuuuugguaauguuucauugcagauauguagacacuuuguucagucuuaacuugcccuuuguaaugauaauguuaaauuagaugaa

SEQ ID NO: 389679 - RNA, 70 nt, Homo sapiens
uagguuugugcaaaaguaauugcgguuuacuuuccauggcaaaagcugcaauuacuuuugcaccaaccua

SEQ ID NO: 389680 - RNA, 57 nt, Homo sapiens
cuuaugcaucuuccacacucauuaaauacuuguuugauggguggauggauggaugag

SEQ ID NO: 389681 - RNA, 68 nt, Homo sapiens
caaucccugggaagcagguucucccaaagaaggcagcagcuucuuugggccaugcuucccggucauug

SEQ ID NO: 389682 - RNA, 90 nt, Homo sapiens
caucccuucaggucuccaaggaaugcuaaguuuccucccugucgugagagacacgaggugaacuuaguguugggagacagaagcuggaug

SEQ ID NO: 389683 - RNA, 74 nt, Homo sapiens
guauaacuaaguuauugguauguguucuaaaauuaugggaaacuccuauaaucaugauaugacuuaguguaugc

SEQ ID NO: 389684 - RNA, 75 nt, Homo sapiens
gguuggugcaaaaguaauugcaguuuuuaccauuaagaguaauggcaauaaaaugcaguuacuuuugaaccaacc

SEQ ID NO: 389685 - RNA, 55 nt, Homo sapiens
ugugucuaucaaggaaguggucuaguucaucuagguuaucaaauugguaggcaca

SEQ ID NO: 389686 - RNA, 55 nt, Homo sapiens
ccacugggcuagguguuuuggauuugauugcaacccggcacuuucaguccagugg

SEQ ID NO: 389687 - RNA, 56 nt, Homo sapiens
gguauauaguggcuuuccauugagguuuucacucuuugaaggaggucauuuauacc

SEQ ID NO: 389688 - RNA, 84 nt, Homo sapiens
uuaguucauuggacaugggcuaguucauuaguucuuuaacacauuuauaagagcugauuuuaaguccuuguccagaaauucuaa

SEQ ID NO: 389689 - RNA, 78 nt, Homo sapiens
gcccagcuccagaaguccagaagcugacccugaggccaaggcccagcagcaugaggggacuucugcagagccccgggc

SEQ ID NO: 389690 - RNA, 69 nt, Homo sapiens
guggcaaggaaaugcugcucacucacaggcucccucccuugagggcaccagcacaccauuuccugccac

SEQ ID NO: 389691 - RNA, 63 nt, Homo sapiens
uaucugugguuguaugcauauuacaaucaagccuuaagcuaguaaaguauaucaaccuagaug

SEQ ID NO: 389692 - RNA, 59 nt, Homo sapiens
uguccaggcagaaguuugcugcagaggcaugggccucauggagaacaucugcuagggca

SEQ ID NO: 389693 - RNA, 59 nt, Homo sapiens
uagcacugucuugcaccugugcuuuccacagaaucccagguauaggucaaugaguguua

SEQ ID NO: 389694 - RNA, 55 nt, Homo sapiens
uuccugagagggcugggugcaguggcucacgccuguagucccagcacuuugggaa

SEQ ID NO: 389695 - RNA, 94 nt, Homo sapiens
gagaguaaaauucuacuguagagauuaacucaugguuuuaccgucaggaaaacugguaguuuugaguuaaucucuacgauagaauuucuuucuc

SEQ ID NO: 389696 - RNA, 60 nt, Homo sapiens
ugaguuauuuauucuguggcuucaguuagguugugagucaugguaguaaauuuggacuca

SEQ ID NO: 389697 - RNA, 66 nt, Homo sapiens
gcagcauucaccaugagcugacuuaagaacacuugggacuuaagggagcaucagugguaguguugc

SEQ ID NO: 389698 - RNA, 78 nt, Homo sapiens
aguagcgcgccacguagauuccuccaugcgcaguucacaguaggguuugugcuccuaugagaaucuaaugccgcugcu

SEQ ID NO: 389699 - RNA, 98 nt, Homo sapiens
ugcuuccuuagaacagucuccccauccuuuagacuguccaguugaguuucuagaauuccagcucagggcugaaggcuggggugguuauugagauggca

SEQ ID NO: 389700 - RNA, 98 nt, Homo sapiens
gaggcaggaggaucacuugagcccgggagguuggggcuacagugagcugagaucaugccacugcacuccaaccuggugacaaagugaaauccugccuc

SEQ ID NO: 389701 - RNA, 71 nt, Homo sapiens
gcaugaucuauaguauagcauauuaagcauuuguacuuccccagaugcauugguggcauauucauccgugu

SEQ ID NO: 389702 - RNA, 55 nt, Homo sapiens
agccauauauguuuguauaugcauuuagaaacccaaaugcaaacauguguguguu

SEQ ID NO: 389703 - RNA, 87 nt, Homo sapiens
uucagcuugagaauauuugaagauguuagaagagggaaaaaauuccaaccaagaaucauauugauauuuaaaauauuuucaguugag

SEQ ID NO: 389704 - RNA, 129 nt, Homo sapiens
uaaugauauauguuaucuuguuugauuugcguaacauccgaaagcugaguauuaucaguacaauuuguacugagaagacaucagcuuucggaugauuacgcgagucaaacaagauaacauauaucauua

SEQ ID NO: 389705 - RNA, 88 nt, Homo sapiens
augccacaguuuauuucuccauuuaccuacacaugggcauuuggguuguuuuucauuuuggguaauggagaaauaaaucugcugacau

SEQ ID NO: 389706 - RNA, 59 nt, Homo sapiens
cuucaugaucucugcaaagaccccuuuuccaaauaaggucacauuugcaagaucagaag

SEQ ID NO: 389707 - RNA, 83 nt, Homo sapiens
augaagauucuauuuaucacuuggaaaaauauccaucacuuauuaugcuuaugggagcugggugaggaguacagagucuucau

SEQ ID NO: 389708 - RNA, 58 nt, Homo sapiens
gugaauagugcugcaaugaacauacaugcccaugugucuuaaugguagaauuauuuac

SEQ ID NO: 389709 - RNA, 79 nt, Homo sapiens
aaggagauuugcuucucuagggacuguauagaugagauuuuaacaccugugcaaugucaggagaugcagcucucuccuu

SEQ ID NO: 389710 - RNA, 79 nt, Homo sapiens
aaagaaagcagacauguucauuuugaaaggagguacuuuuucacucacuagguucaauaugaacaugucugcuuuuuuu

SEQ ID NO: 389711 - RNA, 72 nt, Homo sapiens
gggauaggaacuuugaaagucauuucuucuaaguagcaaagcugcuuguugaauugcauuuuccauuaucuu

SEQ ID NO: 389712 - RNA, 97 nt, Homo sapiens
gcuggcagugagaauuucaagucaguggaucuuagcucgcugggcuccauggggaugggauucacugagcuagaucacuugacuuccugacuucagc

SEQ ID NO: 389713 - RNA, 64 nt, Homo sapiens
gcucagcagcgacacccuguggugagagaucuuugacucccagcaacagagugucuugcagggc

SEQ ID NO: 389714 - RNA, 73 nt, Homo sapiens
cacagagguagagacuauguauuagagaucaaaacccuuuccuuucuuuauucaguguccucuugccauugug

SEQ ID NO: 389715 - RNA, 55 nt, Homo sapiens
guggaucaaaccccagcucuacuaaaaauagaauuagcuggguguguuggugcau

SEQ ID NO: 389716 - RNA, 65 nt, Homo sapiens
gcacacacauaggcagcuagauacccuaaguauacuuaaaauuuaguacugcuuuaugugugugu

SEQ ID NO: 389717 - RNA, 72 nt, Homo sapiens
ugacagccuuaugaggcaagucaauuucuuacuacuuccaucacuuaagagauuguguucauaggcauguua

SEQ ID NO: 389718 - RNA, 56 nt, Homo sapiens
cugaagcacaccuaggcugaaggaauucuuguucuuuggucucugguugacuucag

SEQ ID NO: 389719 - RNA, 101 nt, Homo sapiens
ucccuaucauuacucucccugcaccccuuacaucagcucugguauccuggaguugggugaaggagcugauguaagggguacagggagaguaaggauaggga

SEQ ID NO: 389720 - RNA, 68 nt, Homo sapiens
ggguaugugcgcacaacgugcagguuuguuacauauguauacacgugccauguuggugugcugcaccc

SEQ ID NO: 389721 - RNA, 123 nt, Homo sapiens
guuaagagaccaggccggcuccggcuggaaguggguguguccuacugugugcugccgcaugcaugguggcaccucuggaugcauucaacuuccaguucucugcagugccagguaccuagugac

SEQ ID NO: 389722 - RNA, 85 nt, Homo sapiens
uuucagguaucuuuauagcaaugccccauucccaguacugauuuucuguauugguucuugcauugcuauaaagaacuaccugaga

SEQ ID NO: 389723 - RNA, 111 nt, Homo sapiens
cacuaaagaacuaguuaagggggacacuggucucauggcaugagagugggccucagcuuuuucaucuguagacugggaauaguauugcccccuggaguggguugaauagug

SEQ ID NO: 389724 - RNA, 71 nt, Homo sapiens
gaggaaaaaaaugguuuccuggccagggcuagggcauuacugcuuugugccacuccaggaggcuguuccuc

SEQ ID NO: 389725 - RNA, 129 nt, Homo sapiens
uuggccucccaaagugcugggauuacaggcaugagccaccaugcccugcuggucugaugguuuuagaaaggagaguuccagccgggugcaguggcucacaccuguaaucucagcacuuugggaggccga

SEQ ID NO: 389726 - RNA, 70 nt, Homo sapiens
cugcuccucagcguugaguucugugcagaagggcucuucuggcaugggguaguagcgcugggcauagcag

SEQ ID NO: 389727 - RNA, 81 nt, Homo sapiens
guuaauuugagauuggagaaaguuauaacauuauuacucaaagugagaaauaguagugucccugacuaucacaguguugac

SEQ ID NO: 389728 - RNA, 74 nt, Homo sapiens
gagguucugguuagacaugaauuugcgggggacauuacucaauccacuuagcaaugucguguacucaccuccuc

SEQ ID NO: 389729 - RNA, 113 nt, Homo sapiens
acaaagugugcccuguguauuaauaucagccaacagugcuucauucacacauugcaugacuauugaugucuuaaucuguggagguacugagccaguguggggcauaugauugu

SEQ ID NO: 389730 - RNA, 60 nt, Homo sapiens
cauucauguugcuuguucuacuuaauauauuaagugcuauguggaaagcagcaugauaug

SEQ ID NO: 389731 - RNA, 82 nt, Homo sapiens
ugguuugaagucacuguugaccuuagcaagagagccagcuggagaugcuuuugcugggucagcggugguaacggugaggcca

SEQ ID NO: 389732 - RNA, 86 nt, Homo sapiens
aauccucaaagcguggacguguguccccauggcuuguggaucagcuaagcucgggaucauuuccauaagucugcuuuucagggauu

SEQ ID NO: 389733 - RNA, 77 nt, Homo sapiens
uaguuuacugagaaugaugauuuccaguuucauccaugucccuacaaagaacaugaacucaucauuuuuuauggcug

SEQ ID NO: 389734 - RNA, 85 nt, Homo sapiens
gcugccccugaccugaauccaaacugcacuguagugagaaaauuuuguccuuauaaacaugaagauuugggguuguuacugcagc

SEQ ID NO: 389735 - RNA, 67 nt, Homo sapiens
gaauuauaagagauaaagaccacauagugcuggagcugucaguggauacugucucugucugucauuc

SEQ ID NO: 389736 - RNA, 60 nt, Homo sapiens
uuucccuuuguuaaauuggaagaguuuagaaugaaaacucuuuucacagacaaauggaga

SEQ ID NO: 389737 - RNA, 60 nt, Homo sapiens
uuugauguaggcacuuaaugcuauaaauuucccucuuagcacugguguugcuauaucaaa

SEQ ID NO: 389738 - RNA, 67 nt, Homo sapiens
ucugcacugagcaucuaaccuuauaggcauaucuuccuuucuugugaauguuuauucucggugcaga

SEQ ID NO: 389739 - RNA, 66 nt, Homo sapiens
uucuauuaagucacugagacuuguggcugcugguucucagcauuauuauaaucagugacugaagaa

SEQ ID NO: 389740 - RNA, 85 nt, Homo sapiens
ugucuauaacugccuuucuuucccugauuuuaagauaugugacuugaauucacaugugaagauugggaguaggcugggcugggca

SEQ ID NO: 389741 - RNA, 82 nt, Homo sapiens
aguuuuaggguacaugugcacaacgugcagguuuguuacauauguauacaugcgccauguuggugugcugcacccauuaacu

SEQ ID NO: 389742 - RNA, 79 nt, Homo sapiens
aggcuggagugcaguggugugaucucggcucacugaaagcucugccucccggguucgcgccauucuccugccucagccu

SEQ ID NO: 389743 - RNA, 92 nt, Homo sapiens
cucagagauggugauauggauuucauuagacuugaguuacaguuugguuguagacucaagacugcaugaauucugugugugcuguuccuggg

SEQ ID NO: 389744 - RNA, 68 nt, Homo sapiens
cugaaaagcaucugcauagcugccgaggguacaguggcccugcuugagcuugcgaauggccuuuuuag

SEQ ID NO: 389745 - RNA, 55 nt, Homo sapiens
accuucagaacugugggcaguaaauguuuguuguuuaagccacacagucuaaggu

SEQ ID NO: 389746 - RNA, 106 nt, Homo sapiens
guuuccucauuuguugagugagauaucuagacuagggaaaucuuaaagcuaacagccuucaguucccguguuuuaucuuccaacaucagcaacaaaaacaggaagc

SEQ ID NO: 389747 - RNA, 129 nt, Homo sapiens
uagcuauacugguuuacacauaugagaaacgggagcuguuuagagccugaucaggaauauuugaaauuauuugaaaaaugacuagggcucuaaacagcucccauuucucacguauguaaaccagugcua

SEQ ID NO: 389748 - RNA, 59 nt, Homo sapiens
uucagaguggacagaaauuaagcuuaauucucuuugauaaauuuucucuccagucugag

SEQ ID NO: 389749 - RNA, 55 nt, Homo sapiens
uuggaagguaaucaaaaguucucucagaggucagggagaggggagggccuuccaa

SEQ ID NO: 389750 - RNA, 71 nt, Homo sapiens
ggagugaccaaagauagcucaaguuuuggaaugaaugacuuugaagcuguacuaguucuuugaaucauucu

SEQ ID NO: 389751 - RNA, 57 nt, Homo sapiens
uuaccucagaccugcucugugugcauagaggacagaggguaguuugugugcaggugg

SEQ ID NO: 389752 - RNA, 60 nt, Homo sapiens
gauauugauguuaauauuauauguuuacacuuacguagauauguuauugauguuaauguu

SEQ ID NO: 389753 - RNA, 96 nt, Homo sapiens
gaugggaggaucaccugaggcugggaggcagagguugcaaugagccaagauugcaccauugcauuccagccugggcaacguagugagacccccguc

SEQ ID NO: 389754 - RNA, 91 nt, Homo sapiens
ggcugugaaccaggucaucaggacgggucaucugcuuccccacgggugugguugggcugcagggaccuuguugcugagacuaggaacagcu

SEQ ID NO: 389755 - RNA, 64 nt, Homo sapiens
uagggaguguuguuuagguugugccaugacacacacacucaugcagagcaaagccgcaccccua

SEQ ID NO: 389756 - RNA, 71 nt, Homo sapiens
ccuucucuccuggugauuggagugugaauuucuugagguuuauuuuaucagcauccaggaauugaagaagg

SEQ ID NO: 389757 - RNA, 82 nt, Homo sapiens
aguucuaggguacaugugcacaacgugcagguuuguuacauauguauacaugcgccacguuggugugcugcacccauuaacu

SEQ ID NO: 389758 - RNA, 88 nt, Homo sapiens
gguuuuguuugugacccguggugcaaaggauugagugaaagcuacugcucaguucaugguaggcaccauaguugguccagauaaggcc

SEQ ID NO: 389759 - RNA, 80 nt, Homo sapiens
gucuuauaggugguauuuaaaauuauuuggcucuuucaaauaaaaaggggagugaauaaucuuggguauuaauaaaaggc

SEQ ID NO: 389760 - RNA, 68 nt, Homo sapiens
ggagaugcuguguugcuggcuuaaagauggagaaagagauccaugagccaaggaauacagcagccucc

SEQ ID NO: 389761 - RNA, 69 nt, Homo sapiens
ugggcccggaagagagagauguaauaauaacaccuggcuugguauaacauccuuucuuaucguugucua

SEQ ID NO: 389762 - RNA, 86 nt, Homo sapiens
uacccagaaagacacauggccucccgcauuugccguuuaucucugcagacaggaaagcuagguguggguguacuguggaucgggug

SEQ ID NO: 389763 - RNA, 77 nt, Homo sapiens
gucauguucugagaagugcgucguuugaugaugaugucgauaugccaacaugagauggcacuuccacgagccuagac

SEQ ID NO: 389764 - RNA, 55 nt, Homo sapiens
gggaagagguagagcugggcuuuggacccaggagccugguuucccugcuucuccc

SEQ ID NO: 389765 - RNA, 78 nt, Homo sapiens
gccugccguucagcaggggcuucaauggucuugcucaaaucacaugugcgcugaugaauguccuuguugacuguaggu

SEQ ID NO: 389766 - RNA, 60 nt, Homo sapiens
cagaauaccacaggcuggguaaucuauaaacaauugaaguuuauuuggcuugugguucug

SEQ ID NO: 389767 - RNA, 59 nt, Homo sapiens
uucagacugggugaagaggguauccccacaggagaagagcccuaauauugaguauugaa

SEQ ID NO: 389768 - RNA, 81 nt, Homo sapiens
uucuauacacaaacacauuuuugucauauugguauuuacaacaguuccaagugggaaacaaaaauguccaucuguagggga

SEQ ID NO: 389769 - RNA, 76 nt, Homo sapiens
uucaguauaaguuggugcaaucauguauuucauuauguugucugauggagucgugcccuugcauuuauauauugaa

SEQ ID NO: 389770 - RNA, 125 nt, Homo sapiens
accagugguagggucagggacugagaguaggggaaugagucccugaggaacauccagggcuguggguaugacagcugaagucacucagggguccccagccaucugggaccuggaagaccaaaggu

SEQ ID NO: 389771 - RNA, 70 nt, Homo sapiens
acuguagagguagauucuguuuugacccuuugaggauggagaagucaguuuacggacuacacucagcagu

SEQ ID NO: 389772 - RNA, 83 nt, Homo sapiens
uuuugguaaugauacauaagacauuuaaaaauugauaauauauaguguuggcaauugcuaugauuugaaugugucucccaaaa

SEQ ID NO: 389773 - RNA, 58 nt, Homo sapiens
guuccuuaacaguuuccucucauucagacacaacuucaaugaagugaaguuagggaac

SEQ ID NO: 389774 - RNA, 71 nt, Homo sapiens
gaauucaguuugcuaguguuugguugaugguuuuugcauuaauaaucaucaaggauauuggucuguaguuu

SEQ ID NO: 389775 - RNA, 129 nt, Homo sapiens
ccaccccucccucuuuugaguucagugccuugcucagccccuccccuguaucucagcgucuucagaccucugacagagcgacgauguagggucucccggggcccaagguggucucagggucaggggugg

SEQ ID NO: 389776 - RNA, 59 nt, Homo sapiens
auauagcaaugaaagagaugaacuugcaacaacauggaaaaaucucacaauugcuauau

SEQ ID NO: 389777 - RNA, 66 nt, Homo sapiens
uaggaguaugugcugugaaaugaucuaaaauuuguaauauuuuugucaugaacuguacuacuccua

SEQ ID NO: 389778 - RNA, 72 nt, Homo sapiens
cauugucuuuugguggcauuuauaaagcccccaccugugggagcuuaguacuaaaugucauacaaagcaaug

SEQ ID NO: 389779 - RNA, 83 nt, Homo sapiens
auuccaaauguaaaaaauucagucucaucugagacaaggccacagucccuucugucuaugagucccugaauuuaaaacggagu

SEQ ID NO: 389780 - RNA, 58 nt, Homo sapiens
cuauuugcugggguucaugaucaucuccuagaggaugucacagguccuagccaagugg

SEQ ID NO: 389781 - RNA, 87 nt, Homo sapiens
ugucugacuucaacaguuugauugacauacauagguguggaucucuuugaguuuauccuaguugauguuuguuaaauuucuuagaca

SEQ ID NO: 389782 - RNA, 60 nt, Homo sapiens
uugugcaugaugcauacauggucgcccaguuaaggugaccacaaucuuauauuaucacaa

SEQ ID NO: 389783 - RNA, 88 nt, Homo sapiens
ggagaaucgcuuggacccaggaggcagagguugcaaugagcugagauugugccauugcacugcuucuugggugucacagcgacacucc

SEQ ID NO: 389784 - RNA, 66 nt, Homo sapiens
gguuagacucauuuuggucaaggauuuaugaauauugguauuuccauuccauaaugagguccaauc

SEQ ID NO: 389785 - RNA, 75 nt, Homo sapiens
ugggauuucuaguucuagacccuugaggaaucaccacacugucuuccacaaugguugaacuaguuuacucuccca

SEQ ID NO: 389786 - RNA, 77 nt, Homo sapiens
gugcuuaggagacuggauaucucuuuugcagcucuaguuuuauacuaugaaggggguacuuuucgguuccuaggugu

SEQ ID NO: 389787 - RNA, 96 nt, Homo sapiens
accccuaacacuccuaucugcuucuagaccuguaacuagacuaaagucccagugggccccuagaggugagguucagagugcgacccaugaggaggu

SEQ ID NO: 389788 - RNA, 130 nt, Homo sapiens
auguauaugcaccauagcauaugugguguauauguauaugcacuauagcauaugugguguauauguauaugcacuauagcauaugugguguauauguauaugcacuauagcauaugugguguauauguau

SEQ ID NO: 389789 - RNA, 56 nt, Homo sapiens
ugucacggaauguaaguggaaguaauguaugcuaacuuccaaguuguuccuugaua

SEQ ID NO: 389790 - RNA, 60 nt, Homo sapiens
acuguaauaauuuugaagccaccuccuauugcuauuauggugagcucaauuguugcaagu

SEQ ID NO: 389791 - RNA, 64 nt, Homo sapiens
caguguucucucuuugaguuccuccuggugucuguuacaacagaugaggaauucaagaacacug

SEQ ID NO: 389792 - RNA, 98 nt, Homo sapiens
ugauccucuguccauaguaaguuacgcauguagugacaaaugcaugccacaaggucuugagauuguaucugcaauguguugcugcuggcuguugauca

SEQ ID NO: 389793 - RNA, 64 nt, Homo sapiens
uggccucuuugucucuugaucuuuguugguuuaaagucuguuuuaucagagacuaggauugcca

SEQ ID NO: 389794 - RNA, 65 nt, Homo sapiens
auauucacuauaugcagaaccaacgugugacagugaccucacuuuggugcuggguuuaguaauau

SEQ ID NO: 389795 - RNA, 123 nt, Homo sapiens
gaggugggagguucgauugagaccaggaggcagaggcugcagugaguugagaucaugccgcugcagugaguugagaucaugccacugcacuucagccugggugacagagcgaaacccugucuc

SEQ ID NO: 389796 - RNA, 61 nt, Homo sapiens
ccucacauguucaggagcacuuagagaagucuuguuuaagguagccacuggacaagagagg

SEQ ID NO: 389797 - RNA, 104 nt, Homo sapiens
ccacaaaacacauugaucaggugagccaccuccagugccaccgagagcccuacgguuuacaggcagguguucccugguugagagagacacauguguuuuagugg

SEQ ID NO: 389798 - RNA, 97 nt, Homo sapiens
cugguuuguucugcucuuguuugggccucugauuucuuugggaugucauccucaaagauuauugggcaccaggguacaaugcaggguacaagcucag

SEQ ID NO: 389799 - RNA, 101 nt, Homo sapiens
uacccugugcacaaauacaguuuccagaugaaaugguaaucuaaacaacagagcuauacauuacuagaacauuuagggaacuguauggugauucuggggua

SEQ ID NO: 389800 - RNA, 109 nt, Homo sapiens
gacaggggacgaugcacaggacaggaguguguaggagaaagguaaccacgaucuaaucagucaaucuugccuguaacuguugccauguuuguguguuugugucccuguc

SEQ ID NO: 389801 - RNA, 58 nt, Homo sapiens
uaguggcuacugacugaugauuauaauuuuaaauuguaaauauggcuaguggcuauug

SEQ ID NO: 389802 - RNA, 104 nt, Homo sapiens
cccucugggcgacuccggcucaucgauuccggcccagaggagcgcccccgggcgccgaggaugggcggagacgugcagccgccccugagaggucgcccagaggg

SEQ ID NO: 389803 - RNA, 61 nt, Homo sapiens
agcaacauagaaauuugggugggaggcuaagaagcagauauauucaaguuucuaagaugcu

SEQ ID NO: 389804 - RNA, 72 nt, Homo sapiens
gacuccagagugcauucguaugaacuguauguucggggcugauguuacaguauuaugagugauugaaaaguc

SEQ ID NO: 389805 - RNA, 76 nt, Homo sapiens
ggucaaauauugagagugaaguuugcuaccuguaacuuaaaguaacauuuagagacauauuuuacucagauugacc

SEQ ID NO: 389806 - RNA, 78 nt, Homo sapiens
cugccucauuuauggcccaugaccgcaacaggauacacucaccuauacugcuuaagggcaugggccccaccugggcag

SEQ ID NO: 389807 - RNA, 93 nt, Homo sapiens
cggggacacagaucuaaaccagaucacauguguacucaauguguagcucccacuuauaagugagaacaugugguguuugauuuucuguuccug

SEQ ID NO: 389808 - RNA, 55 nt, Homo sapiens
uuguuuagaugggugcuucaccuuggccagucaccaugagagcacaacugaacaa

SEQ ID NO: 389809 - RNA, 66 nt, Homo sapiens
agcacaucaagggagcaggcucagggucuacucagcagacgugauaucugagccugccccagugcu

SEQ ID NO: 389810 - RNA, 83 nt, Homo sapiens
caucucugaguuuaaugcuacacuuuuggaagacaggacuuuuaauuaugucccuuccagguuuugugaguuuaaaugagaug

SEQ ID NO: 389811 - RNA, 80 nt, Homo sapiens
cuugguggacaucugggaguuucuggaggaguccagaaaaguuuggaagauucuagaagauuccagaagauuccagcagg

SEQ ID NO: 389812 - RNA, 67 nt, Homo sapiens
gguuugugcaaguguaauacagcuaggcuccuuugauucuuagcuguucugcgcucuggaaaaaacc

SEQ ID NO: 389813 - RNA, 75 nt, Homo sapiens
auuagaggacuagauauucuggcauuuauuuaguaacauauggcacuuaguagcacagaguaucagcacuuuaau

SEQ ID NO: 389814 - RNA, 100 nt, Homo sapiens
gaggcaggagaauugcuugaacccgggaggcggagguugcagugagucgagauugcaccauugcacuccagccuuggcaauaaaagcaaaagucugucuc

SEQ ID NO: 389815 - RNA, 72 nt, Homo sapiens
augguauuucuaguucuagauccuugaggaaucaccacacugucuuccacaaugguugaacuaguuuacggu

SEQ ID NO: 389816 - RNA, 55 nt, Homo sapiens
agcuguggcuuugacauguuaagauauuucauaacacagucaaauccacuuggcu

SEQ ID NO: 389817 - RNA, 73 nt, Homo sapiens
gggaauuaaguuaggcuucagcagucugagccuuggugugggcggagacauacaugaucuuaauuuauaucuu

SEQ ID NO: 389818 - RNA, 78 nt, Homo sapiens
ugguuuuugucuuugguucuguuuauaugcuggauuacauuuauugauuugcauauguugaaccagccuugcauccca

SEQ ID NO: 389819 - RNA, 70 nt, Homo sapiens
cuggggguuuuuaaguaccagaagcaacauuauuucuauauuuuuuguucugccacugaaaaugccucag

SEQ ID NO: 389820 - RNA, 82 nt, Homo sapiens
aacccacuagagagcucugaaguuauagaaccacagcagcaguguguuucuauggucacagaugcuugauuauuagaggguu

SEQ ID NO: 389821 - RNA, 87 nt, Homo sapiens
ucucaagcugugagucuacaaagggaagcccuuucuguugucuaaaagaaaagaaagugcuucucuuugguggguuacgguuugaga

SEQ ID NO: 389822 - RNA, 70 nt, Homo sapiens
aacgugguauuuggaucccuguuucugcauuaauuugauaagaauaacagucuccaguuguauccauguu

SEQ ID NO: 389823 - RNA, 60 nt, Homo sapiens
ggagauguccuaagugguuaacucuauugaaagggucacauaagugcauaggauauuucu

SEQ ID NO: 389824 - RNA, 58 nt, Homo sapiens
uaggaagugagagugaaaauaucagaguugacauuuccauuucuggcuuucacaccug

SEQ ID NO: 389825 - RNA, 70 nt, Homo sapiens
ggucagacaacugaguaaccaaaugguuucgccuacuuauuugguuauucaguuguucaguuucuugacc

SEQ ID NO: 389826 - RNA, 91 nt, Homo sapiens
uccuacguugguucagaucaauagcucaauauguauggcugcaauguaaagcuacuauguagagauauugaauaucaaccucaacuuagga

SEQ ID NO: 389827 - RNA, 98 nt, Homo sapiens
guucacuaaauguaagaguccuuagucucucuugcaguuaccaaguaaugaaggcauugugguaggaugaagagaugaauuugauacauucagugagc

SEQ ID NO: 389828 - RNA, 69 nt, Homo sapiens
aagugcuggacauguguauuaccucgauugugaugauaguaucacaaauguuugcaugugucuaaacuu

SEQ ID NO: 389829 - RNA, 59 nt, Homo sapiens
ggcuaacacagggcaagucaggcuccauuccuuugagagucaacugguucuguguaguc

SEQ ID NO: 389830 - RNA, 108 nt, Homo sapiens
gaucaucagacauuagauucuuaaaaggagcacacaacauaggucccuugcaugcacaguucacgauacgguuugugcuccuaugagaaccuaaugcaacugcucauc

SEQ ID NO: 389831 - RNA, 89 nt, Homo sapiens
uuaaagcuguaaacuuuccccaagugaauguuugguagcaguguucuaucucugcgaccacuaugcccuguucacuuuuacgguuuuaa

SEQ ID NO: 389832 - RNA, 114 nt, Homo sapiens
cugugauauuaggaguuauaucucccuaggauauuacaaaucauaucacaggguguacacccacugugguauuagguguaguaucucccuaggauauaacaaauaauaucacag

SEQ ID NO: 389833 - RNA, 85 nt, Homo sapiens
auauuuaggauacugguaugggcugaauugugucccugcuaccaauucauauguuuaagcccuaagcgccaguaccucagaaugu

SEQ ID NO: 389834 - RNA, 65 nt, Homo sapiens
uguccccgaggcuggagugcaguggugugaucuccgcucacugcaacguccaccucucagguuca

SEQ ID NO: 389835 - RNA, 71 nt, Homo sapiens
uguuaucaucagccauacaacguaugcauguaugccugaugcuaacauauguuguaugguugaugguaaca

SEQ ID NO: 389836 - RNA, 129 nt, Homo sapiens
ggcggaucacaacauugaacauaacuauugacacaauucauugccagaaucuaugauaauuuuccacacauuuucuugucuauggaguuugaaugagaaaauccaucaauggccuaccaaugcaucgcc

SEQ ID NO: 389837 - RNA, 62 nt, Homo sapiens
ucagugaauauauaacagcgauguuuuguuuucagaaaaucaggcugauaguguuguacuga

SEQ ID NO: 389838 - RNA, 96 nt, Homo sapiens
aucuauaaaauggggauuuauauuuaucucuuaugauauaaggaugguaaaaaauagcucaucauggagaugauuaugaaucacuuauauguggau

SEQ ID NO: 389839 - RNA, 76 nt, Homo sapiens
cggaauaauuuuuaugggucuuggaaugcaauauaaacuuaaaauauuguguuugcaaguccuauuggcaugaccg

SEQ ID NO: 389840 - RNA, 63 nt, Homo sapiens
aagcuuagacaacaacuuuguagaaugaguauaccucacaaagcaaaggaauugccuaagcuu

SEQ ID NO: 389841 - RNA, 61 nt, Homo sapiens
cauguuaaguggaaucauucaauauuuguccucuugcaacuagcuuauuucacuuagcaug

SEQ ID NO: 389842 - RNA, 67 nt, Homo sapiens
auugaguacuuagugucauauacuaggaauuuccuuugguauuuucaugugcacuaugucauuuaau

SEQ ID NO: 389843 - RNA, 91 nt, Homo sapiens
uuuuggguaucuucuuagcagcaccccacucuacugguaccaauuuacuguauuagucuguuuucaugugcugaugaagauauacccgaga

SEQ ID NO: 389844 - RNA, 67 nt, Homo sapiens
uuagaacaguguuugccucgcucucacucacucucauaaaugcuagugauggucaugcacugucuga

SEQ ID NO: 389845 - RNA, 55 nt, Homo sapiens
cagccggguggcuccuaggguaauuaaaccuguugccgugcggccccacccguug

SEQ ID NO: 389846 - RNA, 55 nt, Homo sapiens
cagcccaaaucaggauucacaaggcugucugcugccaucugaauguuuguggcug

SEQ ID NO: 389847 - RNA, 63 nt, Homo sapiens
cuauguguccauguguucucgccauuuagcucccacuuauaagugagaacaugugguauuugg

SEQ ID NO: 389848 - RNA, 61 nt, Homo sapiens
ggagguagucuuucccuuaucagagcucaaacacugugcugggggaacccaagauuccuuu

SEQ ID NO: 389849 - RNA, 86 nt, Homo sapiens
uccaauugucuagauucuagaaaguuaaucagaucuuuuauguucuaacauuuuaugaucaucugaaagcuuuuacagacaaugga

SEQ ID NO: 389850 - RNA, 64 nt, Homo sapiens
acauuuggauuguuucuagauuggggcuuucacaaagagugcuacuauggacaguccagggugu

SEQ ID NO: 389851 - RNA, 78 nt, Homo sapiens
gauacagacagcauuaugagguuaaugugcaauaucguuacaccaugaauuuuagcuccaugauaguaugucuguguc

SEQ ID NO: 389852 - RNA, 71 nt, Homo sapiens
accucucugagccugagguuccuacuccauaaaaugagggagggacauuacagguuacagguaauccaggu

SEQ ID NO: 389853 - RNA, 129 nt, Homo sapiens
ugaaaucaugcuaggaggaaguugugaagcaaaaggcuauaugugggugccucauaaaucaucuggugggugccuuauaacacccacauauagucuuuugcaucacaacuuccucuuagcaugauuuca

SEQ ID NO: 389854 - RNA, 70 nt, Homo sapiens
gaucauaaaugauauggucacccuuaugaaugacuggugaucuuucauaaggguggccauauaaaagauc

SEQ ID NO: 389855 - RNA, 59 nt, Homo sapiens
uggaauuaaggcaauugaaagcuacaguccaaaaagagcuuguucauguuuuaguuuca

SEQ ID NO: 389856 - RNA, 61 nt, Homo sapiens
ugaagacauuuuuggguguguagucuuccccaucucacucaacacucuucauaugucuuca

SEQ ID NO: 389857 - RNA, 59 nt, Homo sapiens
gcuucuccagcccuacuggagaaugcccccaucgccggcauuccuagugguugggaagu

SEQ ID NO: 389858 - RNA, 79 nt, Homo sapiens
gccuuccagaugaucugucacuuaucacauuuaaguuuguagauggauuagaugcugauugaauagauuucugaaaggc

SEQ ID NO: 389859 - RNA, 78 nt, Homo sapiens
uucugaaugccaguuagcaaaauuuuucaaauauuuuuauagugccaagaaagugcugcuugacugggauuauuagga

SEQ ID NO: 389860 - RNA, 84 nt, Homo sapiens
ugggucaaaugguauuucuaguucuagauccuugaggaaucaccacacugucuuccacaaugguugaacuaguuuacucuccca

SEQ ID NO: 389861 - RNA, 64 nt, Homo sapiens
gcauuagauucucauaggagcacacacccuauugugaacugugcguguaagagaucuagguugc

SEQ ID NO: 389862 - RNA, 88 nt, Homo sapiens
ggagaauggcaugaacccuggaggcggagcuugcagugagcugagauagcgccacugcacuccagccugggcaacagagccagacucc

SEQ ID NO: 389863 - RNA, 75 nt, Homo sapiens
ggaagcagcugugcacaucuggcggcccgagccugucgucuggggucugccgucugagguggcgggacugcuucu

SEQ ID NO: 389864 - RNA, 83 nt, Homo sapiens
agaaucgcuugcacccggagguggagguuguagugagcugagaucaugcuauugcacuccagcuugggugaccgagugagacu

SEQ ID NO: 389865 - RNA, 57 nt, Homo sapiens
gucauggagggacauaacuaacuucuguuuaggcuuugaguguggggucuccaugac

SEQ ID NO: 389866 - RNA, 64 nt, Homo sapiens
guagugcaguuugagaaucagugggugacagcagauacacagggguuccaaagcuugcaguuac

SEQ ID NO: 389867 - RNA, 82 nt, Homo sapiens
cuggggcuuuuuggaggagguuagaucaugaggaaggaggcuucauaaauaugauuuaauguccuuauaaaagacaucccag

SEQ ID NO: 389868 - RNA, 56 nt, Homo sapiens
gaagccuugagggacugugcuaucuggcugagauacuacacuuuucccaagguuuu

SEQ ID NO: 389869 - RNA, 65 nt, Homo sapiens
uuaugguauuuugugauaccuuguuccuuuauaugguauaggacaugguaucacaaauaccauaa

SEQ ID NO: 389870 - RNA, 100 nt, Homo sapiens
gugucuagaaaugauaccucugagcuagggccuggaauaggggccucuugauucuuacuggugcccuauccugcuguggcugagcugguguccaagaugc

SEQ ID NO: 389871 - RNA, 55 nt, Homo sapiens
cauuuuaauaauagaauaaccuuaggcuuggccuaaggugguggugauugagaug

SEQ ID NO: 389872 - RNA, 74 nt, Homo sapiens
gguaaauucuauuagcacugagaauggcuugcucauguauguaguauccuucucuguuaaaauauggauuugcc

SEQ ID NO: 389873 - RNA, 73 nt, Homo sapiens
guuguuauuagguuggggcaaaaguaauugccauuaaaaacugcaauuacuuuugcaccaaccuaauaguaau

SEQ ID NO: 389874 - RNA, 68 nt, Homo sapiens
uugaggucaucacuuucuauuucugugccauagguuucucaaugguaaauaagaguggugagucucaa

SEQ ID NO: 389875 - RNA, 58 nt, Homo sapiens
ugaguuaggaucucacugugucacccaggcugcaguacagugacaggauccuagcuca

SEQ ID NO: 389876 - RNA, 63 nt, Homo sapiens
uugcagagccccugcaagggucucagggacaccaucucccaccauacccccagggcucugcag

SEQ ID NO: 389877 - RNA, 55 nt, Homo sapiens
ucuuauauuaucuuauauuuucugggaacuguccauaauuguaagauguauggga

SEQ ID NO: 389878 - RNA, 127 nt, Homo sapiens
gcaaauuaacuuaaugaccgaauaauguaguucauggauuuuuacauuuguaguacuggacaucuuggccgguuagcucaguuggugagagcguggugcuaacauuugcaguccuuggaugaauugc

SEQ ID NO: 389879 - RNA, 80 nt, Homo sapiens
uuugauuucuucuaauacacgguaugacuuugcucguuuuucauacaaguagacacugaaauguauugaagaguauuaaa

SEQ ID NO: 389880 - RNA, 130 nt, Homo sapiens
auucagagagaaaagaauccucuucccaauagaugguguugggcccauagacugccaguauugggucaauagacugucaguauuggcccaacaccaucuacugggaagaggauucuuuucuucuuugaau

SEQ ID NO: 389881 - RNA, 67 nt, Homo sapiens
cuuaucuauauuugguuguugauguauccauuaaauuggggcauggaaacauaagaguauagauggg

SEQ ID NO: 389882 - RNA, 63 nt, Homo sapiens
cuagcagggguaccugugaccucaagagccucagaggacauauguuacagugugcccuuuuag

SEQ ID NO: 389883 - RNA, 86 nt, Homo sapiens
guuucagguaaaugauauuuuauguaaguacaccgcaaauauugcauggauauacuuguacuucaagauuaugguuuaucugaaau

SEQ ID NO: 389884 - RNA, 90 nt, Homo sapiens
gacaggauuaguauuacugaguuuuccuuuugucccaggcucuaauauggcuuggcauggggcagaacauuacaacauaccagucguguc

SEQ ID NO: 389885 - RNA, 81 nt, Homo sapiens
gauaauuauuauauguucucauucauaugugggagauaaaaaaaugaacucauggagauagagaauauauugaugguuauc

SEQ ID NO: 389886 - RNA, 65 nt, Homo sapiens
augaaaucuuuggcagaucuuauguacagaaugguacuuccuagguuauuguccaggguuuuuau

SEQ ID NO: 389887 - RNA, 72 nt, Homo sapiens
ggacaucacauggggaagggacuagcuucuuguaaaaccagcagucccacucccaugaugaccuauuagucc

SEQ ID NO: 389888 - RNA, 63 nt, Homo sapiens
ccuaaugacauugaugcucuggcugggagggcucagucccggagggggugucaaguugauagg

SEQ ID NO: 389889 - RNA, 99 nt, Homo sapiens
acauaguagguuggagcaaaaguaauugcaguuuuugccauugaaaguaaugucaguuacuuuugcaccaaccuaauacaaaccaucccauaucugugu

SEQ ID NO: 389890 - RNA, 81 nt, Homo sapiens
gaauagggaccuuagaauuguauguauguuucuaggcuaauauuugcaagacaugucuaagguuuaaaguuuuuccuauuc

SEQ ID NO: 389891 - RNA, 98 nt, Homo sapiens
ggcaagagaaucauuugaacccggaaggcagagguuguagugagcugagaucacaccacugcacuccagccugcugggugacagagugagacucuguc

SEQ ID NO: 389892 - RNA, 92 nt, Homo sapiens
gggcauuccucccaacuccacuaggcugaggcuggacacagcuaggguccccaucguugguuccuuagccuaggacuagggagaccaugccc

SEQ ID NO: 389893 - RNA, 129 nt, Homo sapiens
auguaugugugugaaggggguguauguguaugaguauguauaugagugugucugugaguacaaacacccacuaacagacacacucacauauauacucucauacacauauacccucucacacacauauau

SEQ ID NO: 389894 - RNA, 90 nt, Homo sapiens
uguuauauuugcaugggcuacauuuuuucauccugucacuuucaaucuacaugugucauugaaucuaaaaugagucucuuguagacagca

SEQ ID NO: 389895 - RNA, 77 nt, Homo sapiens
ucugccaccuuuaagauaauagcuguccuuacuagcuagguccggggaccugcagcccuauuuuggagaagugcgga

SEQ ID NO: 389896 - RNA, 61 nt, Homo sapiens
uuucccgcugauacuggauaggcuagcaguggauauuagccuauccaauaucagugagaaa

SEQ ID NO: 389897 - RNA, 77 nt, Homo sapiens
ggaaauguauuuuggaaucagaggguuaucacaugggucagcccaucauuucauggagccauccuuugaucauuucc

SEQ ID NO: 389898 - RNA, 64 nt, Homo sapiens
cauuuuauaugcggucuguugugacugaaacacaguuaugcagcacaugacuguauguauaaug

SEQ ID NO: 389899 - RNA, 79 nt, Homo sapiens
ccaugucuugcacuuaccuaagaacuauaggaauucuccauguaccuccuacaguuuuucuagcaguguuggacaaugg

SEQ ID NO: 389900 - RNA, 73 nt, Homo sapiens
cuuugaggguaucaccccguagagucugcagcuacuuccugggguggcugcuccucuguggaggugcucaagg

SEQ ID NO: 389901 - RNA, 55 nt, Homo sapiens
uaagugaauauggacaguuagcauuuagcaacauguaucugucuacuuucucuug

SEQ ID NO: 389902 - RNA, 84 nt, Homo sapiens
aguucauugauagaauguuccccaauuuagguucaucugcuguuuucuaugacugcauuggguuaugcauuuuuaacaagaauu

SEQ ID NO: 389903 - RNA, 78 nt, Homo sapiens
gcaagacacuggcuuuugagaaaaacacugguuuuaugaaugccaaguuucauuccucacaagccuucucuucuuugc

SEQ ID NO: 389904 - RNA, 64 nt, Homo sapiens
uuaaccauuaagggucaggaaauugacuuccuccuggacacuggcuuggcuuucuugguguuaa

SEQ ID NO: 389905 - RNA, 66 nt, Homo sapiens
ggcaugugggauugugaaaugcugggggacaaggacuucuggguuuuuacaauguuuacaccuguc

SEQ ID NO: 389906 - RNA, 73 nt, Homo sapiens
uccaguuugacaugauuaauuaccuaagugcagcaagaauaaugauugacuacauaaguaaucucaaauugga

SEQ ID NO: 389907 - RNA, 55 nt, Homo sapiens
guguggcaguucuccuugauggguuguaaaugcccucaaggcaggaacuguacau

SEQ ID NO: 389908 - RNA, 121 nt, Homo sapiens
gggcuggugcuggccucaugugcccugagaucuauuccucacccuucuccuccccugugcccgugaguguugugguaguggguggguggguggaucaggggucgagguuggcgccgagccc

SEQ ID NO: 389909 - RNA, 69 nt, Homo sapiens
ugaaagcuuuugggcaagauuuaaagaaacuguuuaauuucuacugauacuguauccuaaaagcuuuua

SEQ ID NO: 389910 - RNA, 67 nt, Homo sapiens
uugaaccugggaggcagagguuggagugagcugagaucaugccacugcacucuagccugggugacag

SEQ ID NO: 389911 - RNA, 60 nt, Homo sapiens
uggcgguaucucaggcagagauuaguguuuaauucacuauugcccauaaggauauuguca

SEQ ID NO: 389912 - RNA, 74 nt, Homo sapiens
uuuuaaguuaagaaguguaacuuaaguuuaacuuuuuuuuaaguguaacuuaaguguaacuuuuuaaguuaaga

SEQ ID NO: 389913 - RNA, 103 nt, Homo sapiens
uugagacagagucuugcuguguugccuaggcuggagugcaguggcacgaucucggcucacugcaaccucugccucccggguucaagcaauuuuccugccuuag

SEQ ID NO: 389914 - RNA, 78 nt, Homo sapiens
gacaccuaacaauuauucagugacuuaagagauauacuagucuguuucuuagucauguaauaguccagguuagguguu

SEQ ID NO: 389915 - RNA, 66 nt, Homo sapiens
guauuucuaguucuagauccuugaggaaucaccacacugucuuccacaaugguugaacuaguuuac

SEQ ID NO: 389916 - RNA, 66 nt, Homo sapiens
ugcuaaacuuuugcuuaaaucuuaaucagaugggcuuuuaucuggagagagauuucagcaugagca

SEQ ID NO: 389917 - RNA, 84 nt, Homo sapiens
uagcaaaguaggcuuuucugggaugugggcuucauucugguuucugcuaagaaggccaugauccuuaaaaguccacaggugcug

SEQ ID NO: 389918 - RNA, 55 nt, Homo sapiens
ccaaguguuuucauuguuccauucccaccuaugagugagaacaugcggcguuugg

SEQ ID NO: 389919 - RNA, 114 nt, Homo sapiens
uggaacaacuuguacuaggucggugcaaauguaauugugguuuuugccauuauuuuuaauuacuuuuaauggcaaaaaaacgcaauuacguuugcaccaaccuaacacauucua

SEQ ID NO: 389920 - RNA, 55 nt, Homo sapiens
cauucccagugguuagcucuggucuucaggagacuagaagcagcccucgggaaug

SEQ ID NO: 389921 - RNA, 64 nt, Homo sapiens
cacuuuuauuuguguuucuauuucuguccgaugagaguggacuggaguauaaggcaaaggagug

SEQ ID NO: 389922 - RNA, 76 nt, Homo sapiens
uauuguucagggaaauguuggugucaugaguucucauauaacagcagccagaucaucaguauuugcuuggacagua

SEQ ID NO: 389923 - RNA, 99 nt, Homo sapiens
gaggcagaagaaucauuugaaccugggaggcggagguugcaaugagcugagauugcaccauugcacuccagccucggugacagagugagacucugucuc

SEQ ID NO: 389924 - RNA, 86 nt, Homo sapiens
gagucuugcucuguugccuaggcuggaaugcaguggcgcaaucuuggcucacugcaaccuccgccucauggguucaagcaauucuc

SEQ ID NO: 389925 - RNA, 88 nt, Homo sapiens
ggguuacuuugucuauuuuuaaaaucggguuauaaguuuucuuguuauugagcuguaugaguuguuuauaaauuuuggaaguuagccc

SEQ ID NO: 389926 - RNA, 90 nt, Homo sapiens
aaggcugauugaauggacguagauucucaaggauuuccucucuucuaagugugaccuuuaaaagcaauuuaccucuuucaguucagucuu

SEQ ID NO: 389927 - RNA, 66 nt, Homo sapiens
uaauucuauuagugccuaagucuuaggggcugacaauuaggcucuaagggaggcauaguauaauua

SEQ ID NO: 389928 - RNA, 59 nt, Homo sapiens
uauuugguuugccauuccaagguguggagcuauucuacacuugcugaguaaaucaaaua

SEQ ID NO: 389929 - RNA, 71 nt, Homo sapiens
ucuuauauggcuuuguucaacagccucaccuaauuucaggaaaguagagguguaaauagagcuaaauaggg

SEQ ID NO: 389930 - RNA, 82 nt, Homo sapiens
uuggauuccuguuccuuuguuaguuugcugagaaugauggcuuccaacuucauccauguuccugcaaaggacaugaauucaa

SEQ ID NO: 389931 - RNA, 60 nt, Homo sapiens
uuuugcacuucugagugugacaugcccuagugggcaugcacauucgucgggguggcggga

SEQ ID NO: 389932 - RNA, 56 nt, Homo sapiens
ugacaagagaccccuccgcaggcgcaguugcuagucuuuaaggggccuuuguguca

SEQ ID NO: 389933 - RNA, 68 nt, Homo sapiens
aaauggugugcuuaggucauuuacauuuuagguaauuacuuauauguuuguacuuaggccuauuauuu

SEQ ID NO: 389934 - RNA, 127 nt, Homo sapiens
caguaagugcguguauagguuugcuaccuggguauauugcauagugcugagguucgggguauaaaagauccugucaccuagguacugagcaucuauacccaacagcuagccuuucaacucuugccug

SEQ ID NO: 389935 - RNA, 130 nt, Homo sapiens
cccaccucagccuccugaagugcuggaauuacaggcauaagccacuguaccugucucuuaaaaauaaauuuaaagguggggaacgguggcucaugccuguaaucccagcacuuugggaggccgagguggg

SEQ ID NO: 389936 - RNA, 60 nt, Homo sapiens
ugcucacugagaaacaauuacaauuauucauaguaagacagguaaugugcuucaguagca

SEQ ID NO: 389937 - RNA, 60 nt, Homo sapiens
ccaguuuagagcaacaguaacuggggaucuggugaacuccacugugguaucugauacugg

SEQ ID NO: 389938 - RNA, 73 nt, Homo sapiens
ucuugggauuugcuuugaccaauagaaugccacuaaagugauguuauguuaguuacaaggcuagacgucaaga

SEQ ID NO: 389939 - RNA, 85 nt, Homo sapiens
aaagugcagauuccuuggcauugccccuggaauuuugauucagcagauuugagguggggccaaaugcuacaguagucugcauuuu

SEQ ID NO: 389940 - RNA, 67 nt, Homo sapiens
gauuuuuugccaguauuuuguugaggauuuuugcaucaauguucaucagggauacuggccugaaauu

SEQ ID NO: 389941 - RNA, 69 nt, Homo sapiens
gguucacaagaguuacagacagacacuuugcuguuuuuauuucagcaguuugugguuacugugugagcu

SEQ ID NO: 389942 - RNA, 90 nt, Homo sapiens
agcuuuuugaugugguuugccaguauuuuauugaggauuuuugcauugauguucaucagggauauuggucuaaaauucuauuuuguuguu

SEQ ID NO: 389943 - RNA, 86 nt, Homo sapiens
gaggugaggucaugaggaaggagccuuugucugauaguccuuacaagaaaagacaccagagagcaugcucuuucucucccucucuc

SEQ ID NO: 389944 - RNA, 77 nt, Homo sapiens
ggagacguuuugugucuagcucagggauuguaaacacacccaucagcacccugucaaaacggaccaaucagcucucu

SEQ ID NO: 389945 - RNA, 68 nt, Homo sapiens
cuuuggcuucuggacuauugugcagccauuucaaaugaaucauuuugucaauguaucaugagccaaag

SEQ ID NO: 389946 - RNA, 57 nt, Homo sapiens
aagucagacagcugagcugccuaccagcugugcagcuuugggcaaguugccuggcuu

SEQ ID NO: 389947 - RNA, 57 nt, Homo sapiens
caccuugucccggcuccauuaccucuacagcgagaaaaugguguugccaacaaggug

SEQ ID NO: 389948 - RNA, 93 nt, Homo sapiens
gcuaagcuuaagaauuguaugugagcuauguucuucuuguuuuuaaaaaauuguuuugaguacaguaaaggcuaguuuauguugaagcuuggu

SEQ ID NO: 389949 - RNA, 65 nt, Homo sapiens
gaaguuuaguguuuugaaacauauagaagcaaacacugcuucuauguuugaaaaugccaaauuuc

SEQ ID NO: 389950 - RNA, 65 nt, Homo sapiens
cuguugucugugcugagaguugaaaguugcagccuugucccaaccucacucucaggcagacgcgg

SEQ ID NO: 389951 - RNA, 66 nt, Homo sapiens
uggguuaggcagugugguauagcagauaugugguuaacaucauugcugugucauuuguuuaaucug

SEQ ID NO: 389952 - RNA, 70 nt, Homo sapiens
ggaaacugagguuacuagugccuaucgcuggcuccgaggagcucacagccuagcacugugacacaauucc

SEQ ID NO: 389953 - RNA, 61 nt, Homo sapiens
ccuugugcaugaccccagguggggcgggcagaagaaccucccagcugacagaaugauaagg

SEQ ID NO: 389954 - RNA, 86 nt, Homo sapiens
uauuagguuggugcaacaguaauugcgguuuuggcuauuuaaaaguaauggcaaaaaaccgcaguugccuuugcaccaaacuaaua

SEQ ID NO: 389955 - RNA, 62 nt, Homo sapiens
gcuuagcaacagcaauauguucugagaaauguauugucagaugauucuguuguuguguaagc

SEQ ID NO: 389956 - RNA, 68 nt, Homo sapiens
gcgagaauuauugagcauguggcuuuagaagcaaagcuucugugguagaaaucucaaauagaacuugc

SEQ ID NO: 389957 - RNA, 128 nt, Homo sapiens
aggaggugcuugcauccuuccucuaaaguauaaugucauauaggguuuaccuguaugucaaaguauaaugaaauauaaggguuaccuuuaugucauuauacuuuggaggagggaugcaagcaccuccu

SEQ ID NO: 389958 - RNA, 55 nt, Homo sapiens
aguuagaagguauagccauuuuuuuaaggguugugagugguauuaccuuuugauu

SEQ ID NO: 389959 - RNA, 56 nt, Homo sapiens
augaaugcaucuaucaaagcauacgaauggugaguugcugugauagaaugauucau

SEQ ID NO: 389960 - RNA, 55 nt, Homo sapiens
auaaggucauacugcaguggagugggcccuaauccaauuugacugguguccuuau

SEQ ID NO: 389961 - RNA, 58 nt, Homo sapiens
ccccagcacuuggaguggggagacacaagcuggcagcucccuaagccagaugcugggg

SEQ ID NO: 389962 - RNA, 90 nt, Homo sapiens
ucuugaguaccuguuuucaauaugugugauaaaaugggaaguacaugugaaguuuuccuccugcauucugaaauacaaguugccucaaga

SEQ ID NO: 389963 - RNA, 116 nt, Homo sapiens
gcauauucugauacaagaaaacggcugaaguuuaugguacaggaaugcuguucucagucucucuauuaugaagagcugcauucguaucauauugugccuuaugcuucggagaaugc

SEQ ID NO: 389964 - RNA, 63 nt, Homo sapiens
gcccugcaucuguuacuaggaaggggaggguguggaggagcucuucuuggggcagggcagggu

SEQ ID NO: 389965 - RNA, 76 nt, Homo sapiens
gaucauaugaugugugcauuuaacuuuaugaaaaacuaccaaauuuuuuuucagagugguuguaccauuugagauu

SEQ ID NO: 389966 - RNA, 76 nt, Homo sapiens
ucgcuugaacacaggaggcagagguugcagugagcugagaucucaccacugcacuccagccuuagugacagaguga

SEQ ID NO: 389967 - RNA, 66 nt, Homo sapiens
cugucaguaucauuggcauguaaccagaaauauuauuuucuuaugaacuaaaugaugcaaugacag

SEQ ID NO: 389968 - RNA, 64 nt, Homo sapiens
gauggaguguuccauuugucacauuacuuuggagcuucaaaaugugccugaugggaauucuauu

SEQ ID NO: 389969 - RNA, 89 nt, Homo sapiens
auuucuaagcuauaguaacagguauagaaagcuaaagggauaagauauuguaucuaaccuguuuuuagauucuguaccuccuuagaaau

SEQ ID NO: 389970 - RNA, 79 nt, Homo sapiens
ggcagcaggauuggacaaagucacaaaaucccacaacuuggcaacacagguuuugugacucauggucuagugcucuguc

SEQ ID NO: 389971 - RNA, 82 nt, Homo sapiens
auuuuauauguaaauguagaggaaugaauuuggccagaauuauuccagcuaaguaucguccuuuuugauuuuacuaugaaau

SEQ ID NO: 389972 - RNA, 88 nt, Homo sapiens
aggggaauugcuugaacccaggaggcagagguugcagugagcugagaucaugcuacugcacuccagccugccaacagagcaagacccu

SEQ ID NO: 389973 - RNA, 90 nt, Homo sapiens
uguucagauuuuaaaauaacuucuacagaauauguuugagguauuuucuuaaugaacuuuauuuuguagagaaguuuuagguucccagca

SEQ ID NO: 389974 - RNA, 64 nt, Homo sapiens
uguaaaugcucuuuaugaaguuggaggaaauuacccucuauuccaaguuuucuaagaguuuaua

SEQ ID NO: 389975 - RNA, 92 nt, Homo sapiens
ugagauuuuggaggcguggcagucuuuggcaaugacaacuuuuggguuaucaccuugcaguggaugcuauaauguauugccccagacuuuca

SEQ ID NO: 389976 - RNA, 82 nt, Homo sapiens
gcuggagugcagugacaguggagacuuacuucagccuccaccucccaggcucaagugauucucaugcuucagccucuccagu

SEQ ID NO: 389977 - RNA, 96 nt, Homo sapiens
cuuuuguagaugugauuacauuaagaauuuugagaugggagacauuauuuuugauuauccagaugggcuuaauguaaucauagaaauccuuaaaag

SEQ ID NO: 389978 - RNA, 104 nt, Homo sapiens
uugaggcagaagagucgccugaagccgggagguggagguugcagugagcugauauugcgccauugaacuccaggcugggcgacaagaacgaaacuucgucucaa

SEQ ID NO: 389979 - RNA, 70 nt, Homo sapiens
accuauaauaucagguugugaugaugagauguggaggaagaguccgucaacaagaaaugauauuuuaggu

SEQ ID NO: 389980 - RNA, 66 nt, Homo sapiens
uauugugaauagugcugugaugaacauacaugugcguguaucuuuaugccagcauucuuaacagug

SEQ ID NO: 389981 - RNA, 85 nt, Homo sapiens
gagguggaguggguaagcugucuauccugucaaacccagcagucugaguaugacuugagcuggagccugccugcucccaugccuc

SEQ ID NO: 389982 - RNA, 78 nt, Homo sapiens
ccaucugugggcuucaacacagucaguuccuggaucaacaaacauuuauucagcaccugcuguguuccaggcauaugg

SEQ ID NO: 389983 - RNA, 92 nt, Homo sapiens
caaggugcagacaggauuacuucccucuggaggcuccugggaagagucucaucccugcucuuuugguuucuagaggccgccuuuguaucuug

SEQ ID NO: 389984 - RNA, 130 nt, Homo sapiens
agacaggauacuggcuuugacgucagaaacuugggguagaauagaauugauaucacaggauaaccaugugaugucgagaauucaccucaacucaaaccucuggccuccuugagcccugaccuccuuaucu

SEQ ID NO: 389985 - RNA, 74 nt, Homo sapiens
uaguaaguuuuuugugauugagugauccuuguuuuaacaaagacuugauuauuuaguacauuuuugauauauua

SEQ ID NO: 389986 - RNA, 83 nt, Homo sapiens
cauaugugugccugugcaugacagcauacaaacgugcauaguguguauguguguaugcaugugugcaugagugugcacaugug

SEQ ID NO: 389987 - RNA, 72 nt, Homo sapiens
agggcucuagcauuucugggaugauaaacaaacaacagcuuuaauuuaaagucaccagcuguguuagccccu

SEQ ID NO: 389988 - RNA, 104 nt, Homo sapiens
ggcaggucuuugcugcacuguucuugugguagugaaugagucucaugaggucugaugguuuuaaaaaugggaguuucucugcacaaaaucuugcuuugccugcc

SEQ ID NO: 389989 - RNA, 61 nt, Homo sapiens
aagaugguauuucauuaguuuuggauggucccuuccacagagcucagaugcuaugcuucuu

SEQ ID NO: 389990 - RNA, 64 nt, Homo sapiens
gacuggguuaguuugaaagacugaucuucaagcucugaaauucuuucuucugcuacaucuaguc

SEQ ID NO: 389991 - RNA, 123 nt, Homo sapiens
agaauuugcuaggccaugagggcucuacucucaugaaugaauuaaugucguuauuuccagaaugaauuaguugucgugagagugguuccauuauaaaaguaagcucucugguguacaccuucu

SEQ ID NO: 389992 - RNA, 108 nt, Homo sapiens
gacaaccaaaaauguucuaaugauaaguuugucuuuguaaagauauucacucauagcccauucuauggucuuuggaaagacaaaguucaugucagauguugauuuguc

SEQ ID NO: 389993 - RNA, 77 nt, Homo sapiens
cuauuaggucugugcagcagugauugcgguuuuugucauuacuuuuuacugcaauuacuguuguaccaaccuaauag

SEQ ID NO: 389994 - RNA, 77 nt, Homo sapiens
uuagcuugacuguuuuugguguauaaaaaugcuagugauguuugcacauugauuuuuauaucuuaagacuuugcuga

SEQ ID NO: 389995 - RNA, 80 nt, Homo sapiens
ugguuauagaacccaagggccuagaacaaacauaaauaguagcuaggaagguguuacaguguaggccuugggugagacca

SEQ ID NO: 389996 - RNA, 72 nt, Homo sapiens
cucuguggucagaguccuuggccaccccucaggaucuaggcuguuggagaggccacagagucugcuacaggg

SEQ ID NO: 389997 - RNA, 66 nt, Homo sapiens
accacgccuggcuaauuuuuugaaucuuuaguagagacaggcuuucaccguguuggccaggcuggu

SEQ ID NO: 389998 - RNA, 55 nt, Homo sapiens
uacaguuggcccucuguauucgugggucccacauuugcagauucaaccaacugug

SEQ ID NO: 389999 - RNA, 129 nt, Homo sapiens
agaagaaagaguacugacuggaaaucagagaggcaugaagagcuuguucuaccuuugacgcauuccugcuuucugcccgugggcaagucacuucaguucucuggcccucaguuuccugcucuuuaaaau

SEQ ID NO: 390000 - RNA, 62 nt, Homo sapiens
agucaagauggcaagguaaggcuaaugugcaucuagacauuguuuuacaggcuguuuugauu

SEQ ID NO: 390001 - RNA, 82 nt, Homo sapiens
caaaaacucuaugaaaguuccuaauguggcuaucuaguguauuccuaacauaggcacauuaggaacuuuuguagaguuuuug

SEQ ID NO: 390002 - RNA, 70 nt, Homo sapiens
gacauggauauguguaucuauguacauguacacacaugugcauccauguacauauaugcacagacauguu

SEQ ID NO: 390003 - RNA, 86 nt, Homo sapiens
ugguaaaauauuuugacaagggaaaugcaaaauguuuaaguaauuaugacaaugcuuuuguuuucucuuguuuuaauguuauauua

SEQ ID NO: 390004 - RNA, 76 nt, Homo sapiens
uuacuagauuugaagguugaucucaugugucaacucagaggguguuuuugggugagauuaccauuuaaaucaguga

SEQ ID NO: 390005 - RNA, 129 nt, Homo sapiens
ccaccaacugucagauccguggcagcauuagauucucauaggagugugaacccuguuuugaacugugcaugcggggcaucuagguugcaugcuccuuaugagaaucuaaugccugaugaucugaggugg

SEQ ID NO: 390006 - RNA, 109 nt, Homo sapiens
uugagagguacugaagggauguggauggggcauugacagcaucugaccccacaugguucagaugcauccauaccccacuuuuuacuccauccuaucacuacuucuucaa

SEQ ID NO: 390007 - RNA, 65 nt, Homo sapiens
cuuugaggacuggaacacaggucuacagauggaugacaaugggauuaugagacccagccucaaag

SEQ ID NO: 390008 - RNA, 66 nt, Homo sapiens
cagugggcgcugagcugugaccucucucugcaggacugacagcuauucaucaguuggugcucgcug

SEQ ID NO: 390009 - RNA, 92 nt, Homo sapiens
aauaaagcuguacuuaucuaugaauguuaguauguguggguguacacauauacacccauacacacauauuuaugugauaaguaugccuuauu

SEQ ID NO: 390010 - RNA, 56 nt, Homo sapiens
gcaauggaaucccuugaucaauuuucuaugcaauaugauuaaacugguuccauugu

SEQ ID NO: 390011 - RNA, 89 nt, Homo sapiens
gggaggaucgcuugagcccgggaugcggaaguugcagugagccaaaauagugccauugcagcccacccugggugauagaaugagagccu

SEQ ID NO: 390012 - RNA, 64 nt, Homo sapiens
aaacucugucuaguuguaaaauuugcucaugaguuagauuggauuugaagucugggcaggguuu

SEQ ID NO: 390013 - RNA, 70 nt, Homo sapiens
ucuuuaagcagugcaagaauggaauaauaccauaaauugguggcuguagaguggguuacugcuauaaaga

SEQ ID NO: 390014 - RNA, 88 nt, Homo sapiens
ggaggguacuguucuauaugcauugugggguacugaguauuauccuuugucuccacucacuacuuaccaguagcauaacucucucucc

SEQ ID NO: 390015 - RNA, 87 nt, Homo sapiens
ggagaauagcuugaacucgggaggcggagguugcagugagcugagaucacgccauugcacuccagccuugugacagagugagacucc

SEQ ID NO: 390016 - RNA, 76 nt, Homo sapiens
gaugaugcuagguguuagggcugcaauaccaaauacuagauuauucacagguucaugaggcucaucuagcaucauu

SEQ ID NO: 390017 - RNA, 62 nt, Homo sapiens
ggagauaauccagggagggacucagcugagaacaguucccugccuucucuggaauugccucc

SEQ ID NO: 390018 - RNA, 63 nt, Homo sapiens
gaggaggcagucuguccauucucagagcucaaacacagugcugggagaaccacugcucucuuc

SEQ ID NO: 390019 - RNA, 66 nt, Homo sapiens
agcaaaaaugaugacaguacuaggaguugaucaaaacucugccuucccuguggucauuauuuugcu

SEQ ID NO: 390020 - RNA, 87 nt, Homo sapiens
gcauuacaauggcaaugaaauagugagaguggauaaccucgucuuguuucgauuucaaagcuuucaauauuuuaucauuguguaugu

SEQ ID NO: 390021 - RNA, 79 nt, Homo sapiens
gcucugauggagauauacaaggagauuaauguuguauucaugccagcuaacacaacauccauuuuguaguccauggagc

SEQ ID NO: 390022 - RNA, 85 nt, Homo sapiens
cagcagcgaggucugcgucacauugccgucacauucccgaaucugugauuccaaagcaagugaacgcaucaccuccagcccuuug

SEQ ID NO: 390023 - RNA, 56 nt, Homo sapiens
cauugcauuuucuuuguaccuuugucaaagaucaguggugccaagaauauucaaug

SEQ ID NO: 390024 - RNA, 80 nt, Homo sapiens
aaaugguuagauuuuguuaucuguuuagcguuaauuucuaauuuuaaugcaucaugguuggcaaacaugacugauuauuu

SEQ ID NO: 390025 - RNA, 88 nt, Homo sapiens
ugggaccaccauuguauaugcgguccaucacugaucaaaacguuguuaugcagugcaugacuguauauuaucacaugugaucuuccca

SEQ ID NO: 390026 - RNA, 58 nt, Homo sapiens
caggguagacaguaggugucuguguccagggcucacccuauaccucugugaaccccug

SEQ ID NO: 390027 - RNA, 62 nt, Homo sapiens
caagcuauguagucucccugcguccccuuccuguccuuaagaugcagagaugugguagcuug

SEQ ID NO: 390028 - RNA, 127 nt, Homo sapiens
ggaagggaugaaggugauagggucuccuuggcaaagagacaugcaucggggcuuugacaaacaugaguccuccuuguuuugucucugcugauuaaugaggagaugcugccaucuuucuuuacuuucu

SEQ ID NO: 390029 - RNA, 64 nt, Homo sapiens
ggagugccuauugauggaaagauaccagauauuuuuauuaaguaucuauacauuaauguauucc

SEQ ID NO: 390030 - RNA, 111 nt, Homo sapiens
cuucccucuggcauuauaacugucugauuuguguauucuguauuauacuucccacucaguagaauguauacaguauacaguaacagaugguauuugaagucauggaugaag

SEQ ID NO: 390031 - RNA, 94 nt, Homo sapiens
uagcccaugagagagguuuugcccucgagauaaacuguagcucuaaauuucuuuuaaguuguuagggggaaaaaaucuauuucaguacuugcua

SEQ ID NO: 390032 - RNA, 84 nt, Homo sapiens
aaugcaauacacuugagcauuguguuugacugugagcaacagaaaccgcucaggucuagucuuaaaugcauuagggguugcauu

SEQ ID NO: 390033 - RNA, 64 nt, Homo sapiens
uugggcuagauaauuauuugugaauagggagcuuuccugugcauuguaggauguuuagcagcaa

SEQ ID NO: 390034 - RNA, 82 nt, Homo sapiens
cuacccuggcaccugcuuuucuauuggcauauccacgacaaugcugagcucaguguggggccaggaucagggcucgguguag

SEQ ID NO: 390035 - RNA, 92 nt, Homo sapiens
caggguuaguauacaugaaaaacaagugcgugcuucguggggaauguauggagaaauuucuacguaucagucguuucugugaacaagcucug

SEQ ID NO: 390036 - RNA, 73 nt, Homo sapiens
ugcuauggaaaaauucugagcaggaaucaguagguaugauugaaauuaaugcuuuugggauauuucucuggua

SEQ ID NO: 390037 - RNA, 55 nt, Homo sapiens
aagaguaguaguggcacucucuaaccauuagggacaaucuaagacuacuacucuu

SEQ ID NO: 390038 - RNA, 84 nt, Homo sapiens
uauuagguuggugcaaauguuauugagguuuuugccauugaaaguaauagcaaaaaucacaauuauuuuugcaccaaccuaaua

SEQ ID NO: 390039 - RNA, 59 nt, Homo sapiens
gggagggaagguaccugugugaccaugcauugugcuuuagccacagugcuuugcuuucc

SEQ ID NO: 390040 - RNA, 60 nt, Homo sapiens
guggaagguaaguuuugagcauuauauacuucugaaaaugucuuuauuuuaccuuccuac

SEQ ID NO: 390041 - RNA, 85 nt, Homo sapiens
uugcuagaauauagaaauguagaauauagaaauauagaauugaauuuuguauguugauguuauauucugcaaccuuguuaaacaa

SEQ ID NO: 390042 - RNA, 78 nt, Homo sapiens
agguucaauaacauccuuugguuccaaaacaaggucucuugagccucccuuuguugcaagggaaaagucacugaaccu

SEQ ID NO: 390043 - RNA, 56 nt, Homo sapiens
acaggaggauggcagcagguugguggaacaggacuuuucugugcuugucccccugu

SEQ ID NO: 390044 - RNA, 121 nt, Homo sapiens
uuugggggguuguuuuucaucuuguugguaagauuuaucacauugacugauuugcauauguugaagaauccuugcauccauuggauaaaucucacuuugucaugaugaacaaucuuuuaaa

SEQ ID NO: 390045 - RNA, 64 nt, Homo sapiens
gucaucugugguauagauguggaugucuuuguucaaaugguccuugagucuuugcucagaugau

SEQ ID NO: 390046 - RNA, 76 nt, Homo sapiens
gugccacacuaagaagaaauaaauauuguaauugaacuaugauucagugcuuuuuguugucaucauuguuuggcau

SEQ ID NO: 390047 - RNA, 91 nt, Homo sapiens
caauucugugaagaaagucauugguagcuugauggggauggcauugaaucuauacauuaccuugggcauuauggccauuuucacaauauug

SEQ ID NO: 390048 - RNA, 130 nt, Homo sapiens
accacauuuucuuuauccagucuagcauugaugggcauuuagguugauuccaugucuuugcuauugugaauagugcuggaauuaacauagaugugcauguguugauagaacaauuuauauuccuuugggu

SEQ ID NO: 390049 - RNA, 59 nt, Homo sapiens
gauaagggaauaaaagcaggcugcuugagccagcagcagcucauuuggguccccuuguc

SEQ ID NO: 390050 - RNA, 78 nt, Homo sapiens
agaguagccuuccagcugcaauuacauggguuccucaccuuucucuccuccucagauugcccuugaaggcuaaacucu

SEQ ID NO: 390051 - RNA, 94 nt, Homo sapiens
gaggucuccuuuguauguguuguuauguuacaggaaugggguguauugauucugagcaauaaacaacauauuuuuaacauucaggauugacuuc

SEQ ID NO: 390052 - RNA, 103 nt, Homo sapiens
uacaggugugagccacugcgccuggccugaaaauacaugguccugagccucaacucaccugugcaaguuauaggccaggucaauggcgaugaguacaccugug

SEQ ID NO: 390053 - RNA, 58 nt, Homo sapiens
gucuuuguuuugauuuaccagauuggaaacauccuuuuuguagaaucaacauagggac

SEQ ID NO: 390054 - RNA, 55 nt, Homo sapiens
uuuugggagaggggcugugauucguccaaacuggaucauaugcucacuccuagaa

SEQ ID NO: 390055 - RNA, 86 nt, Homo sapiens
caugagggcagagacuuugauuaguuugcugcaauguguugagcaucugguacacugcugaguaaauaauuuuuucugucuuuaug

SEQ ID NO: 390056 - RNA, 94 nt, Homo sapiens
gaggcaggagaaucgcuugaacccaggaggcagagguugcagugagccgagauugugccacugcacucugggcaacagagcgagauuccgucuc

SEQ ID NO: 390057 - RNA, 55 nt, Homo sapiens
agcacagcagugagccaaggagacgggacccucugcuuuguccuccugcugugcu

SEQ ID NO: 390058 - RNA, 60 nt, Homo sapiens
uguaagcauugggcaugcaguccaccuuuucuuguuggaagcgguucaguauuguuugca

SEQ ID NO: 390059 - RNA, 77 nt, Homo sapiens
guacugcagacauguggauggagguguggggagugaguuagacagcuuugggcccugaccuccauucugagcagugc

SEQ ID NO: 390060 - RNA, 69 nt, Homo sapiens
gcuacuuugagaaauauuuagguauuuucccccugguaguaccauuaggauauuucugcuggagauggc

SEQ ID NO: 390061 - RNA, 58 nt, Homo sapiens
gaggagcucugcacgacuccacggaagggaacccagugaguuguagcuauaguuucuu

SEQ ID NO: 390062 - RNA, 65 nt, Homo sapiens
ggagauccacuguguuuguguugaggauucauuacacaugacucaguagaaaauacauggacuuu

SEQ ID NO: 390063 - RNA, 57 nt, Homo sapiens
ugaaagacacagaaguugcccagguuuaguccuaggcagcuuacuuggucucuuuca

SEQ ID NO: 390064 - RNA, 58 nt, Homo sapiens
ucaguuuucucaucugugcaauggggacaucuuuccaaagcgcuguuaagaagacuga

SEQ ID NO: 390065 - RNA, 60 nt, Homo sapiens
ugucaaguugugguucaauuuugagacacaagcaauuccucaagaaacuccagccugaca

SEQ ID NO: 390066 - RNA, 77 nt, Homo sapiens
ugcgcguccaugugaagagaccaccaaacaggcuuugugugagcaacauggcuguuuauuucaccuggaugcaggcg

SEQ ID NO: 390067 - RNA, 86 nt, Homo sapiens
gauuuauuauauacccugcagaucuuggggcuugccagccuccaugaucaugugguuggcaagucccaagaccugcagggugaguc

SEQ ID NO: 390068 - RNA, 61 nt, Homo sapiens
aacuucccugaaauauucacuuucacccugcucugaacaguuaggauuucagggagaaguu

SEQ ID NO: 390069 - RNA, 62 nt, Homo sapiens
uaucucauccuccuugaucccauccccaucaaaacuagagauugaaauaaggagaugagaug

SEQ ID NO: 390070 - RNA, 101 nt, Homo sapiens
ugaggcacgagaaucgcuugaaccugggacguggagguugcagugagcugagaucaugccauugcacuccagucugggcaacagagugagacucagucuca

SEQ ID NO: 390071 - RNA, 63 nt, Homo sapiens
ccauguguccauguguucucauuguucagcucccacuuauaagugagaacaugugguauuugg

SEQ ID NO: 390072 - RNA, 60 nt, Homo sapiens
uuauuagguugguggaaaaguaauugugguuuuugccauuacuuuugcacaaccuaauaa

SEQ ID NO: 390073 - RNA, 79 nt, Homo sapiens
guacuuuguuauggcaacccuaagaaacuaauauaaucccauuuuugucaagucuugggcaaguuccauuuacaaagac

SEQ ID NO: 390074 - RNA, 60 nt, Homo sapiens
gugacuacaggccacaguuugguaagauacuccaaauuccggcugggccugguggcucac

SEQ ID NO: 390075 - RNA, 112 nt, Homo sapiens
gcuuguggcccugguuuuccaucaggugaccugagccacuauggguuaccccuuccauggcaucuguguggccuccaagguuccugaagagcagacaucuugggccaugggc

SEQ ID NO: 390076 - RNA, 64 nt, Homo sapiens
uuacauucauguggugauaugguuuggaucuguguccccagcuaaaucucauguugaauuguga

SEQ ID NO: 390077 - RNA, 88 nt, Homo sapiens
cuucaucuaccagugaguacaugcacugagagggucucggcuccccuggaggccucccuccaccacugcaggucacuuacucaugagg

SEQ ID NO: 390078 - RNA, 57 nt, Homo sapiens
uuauuuauauucaguguggaucucugagcaugguucaagcacauugaguguguguga

SEQ ID NO: 390079 - RNA, 66 nt, Homo sapiens
gugaauaaaacaccugccaagacgugguaggauuuaaaagugauuuggggcggguguuuuauucac

SEQ ID NO: 390080 - RNA, 67 nt, Homo sapiens
gcaaacugugugagaauucacagaaauaaaccugguagguuugugcuauguuauucacaugggcugu

SEQ ID NO: 390081 - RNA, 63 nt, Homo sapiens
guacugcaagaaaugacagugcagauaucuguucaauauucugauugacauucuuuggaguau

SEQ ID NO: 390082 - RNA, 74 nt, Homo sapiens
uuaaaucaguaggcuacuccuuaaaaugacuuccuaaaauaucuuugucaaacauuuggaagccuuugguuuaa

SEQ ID NO: 390083 - RNA, 59 nt, Homo sapiens
uguccuguaggaggcagaacaaggauuagacugccuaucuguacugucauccugggaca

SEQ ID NO: 390084 - RNA, 64 nt, Homo sapiens
uuacucugugcaggggcaugcaguguacuuuaggauacaaaguaacaguuccuguauucaguaa

SEQ ID NO: 390085 - RNA, 62 nt, Homo sapiens
uguucucacuuauuugugggagucaaaaauuaaaacaauugaacucauggagaaggagaaua

SEQ ID NO: 390086 - RNA, 130 nt, Homo sapiens
acagcuaauaucacaguaaauguacaccauguguguacacccugugauauuaauaauauccuagggaaauauuacuccuaauagcacaguguguguacaccauguguguacagccugugauauuauuugu

SEQ ID NO: 390087 - RNA, 95 nt, Homo sapiens
gagaaauuuccccuuggcugucuuguuucauggauucguggaaacucccauuaaacagccggucacagaaaaagauaugccaaggaaaauuacuu

SEQ ID NO: 390088 - RNA, 75 nt, Homo sapiens
gaauuauaugucacagaggcuaagaccccaccagguugacaagcuaggccuggguucugagucuuuugaaaauuc

SEQ ID NO: 390089 - RNA, 56 nt, Homo sapiens
acccaguagucauucaggagcagguucaguuuccauguaguugagugguuuugggu

SEQ ID NO: 390090 - RNA, 56 nt, Homo sapiens
uuccccacaauaccuguuuacuuuauuauuuauaguacuguaguaauugaggggaa

SEQ ID NO: 390091 - RNA, 78 nt, Homo sapiens
uagguugaugcaaaaguaauugcaguuuuugcaauuacuuuuaauggcaaaaaccgcaauuacuuuugcacuagccua

SEQ ID NO: 390092 - RNA, 58 nt, Homo sapiens
uucacgguguucacggggguccagaacaucagcaggauccaccucguggacaagugga

SEQ ID NO: 390093 - RNA, 74 nt, Homo sapiens
guugagugcaauucaggggagguggcuaugagaauuucaaucauggaaaucuaaguuuggauugagaucucagc

SEQ ID NO: 390094 - RNA, 90 nt, Homo sapiens
acuggcauuuucuucagugauacugcuuauuaauuuaauuugcuuuuaauuugaauuggcucuaggugucacagauuuugaaguuucagu

SEQ ID NO: 390095 - RNA, 55 nt, Homo sapiens
gggugaacacacucuguguguguaugugugaauguauaugcauguguuuucacuu

SEQ ID NO: 390096 - RNA, 94 nt, Homo sapiens
cccaaaccagacacuuggaucuagagcacuguggguccaaauaucagucugaugugccugagaaacagugcuuguccuguggguauggguuggg

SEQ ID NO: 390097 - RNA, 57 nt, Homo sapiens
uucaagcuucuugaugagcaucauaccgaugugugccuucuaagaaggagucuugaa

SEQ ID NO: 390098 - RNA, 127 nt, Homo sapiens
agccuugucugucucuucccgccaguggacaucauuuuuccaggcagucuggggguguauccaggagucuuggcccugccacagcccaggcugccuggcccugugcagagagcaggugggcaggguu

SEQ ID NO: 390099 - RNA, 91 nt, Homo sapiens
gcugcuagauucaguuugcuaguauuuuguugagaauuucugcaucuaaguucaucagggauacuggccuguaauguuuguuucuugcagu

SEQ ID NO: 390100 - RNA, 55 nt, Homo sapiens
auguggaggguuguaaugaaugccuugaauuggugguuuauagcacuucucacau

SEQ ID NO: 390101 - RNA, 99 nt, Homo sapiens
gugaauaagggccaagugcaguccugucuugauuaaauuacuuaauaauauuauuaaauaauaauaggucugggcaguauuguuuuuaaccugacucau

SEQ ID NO: 390102 - RNA, 64 nt, Homo sapiens
gcugggugccacgggcacccugggacccuccuuccguggcccagugguucccuguggccugagu

SEQ ID NO: 390103 - RNA, 64 nt, Homo sapiens
acaaaggaaauaggauuagcauaguuuuuuaauucacacugacugcuacugucacuuccuuugu

SEQ ID NO: 390104 - RNA, 77 nt, Homo sapiens
ucacuugaacccaggaggaggagguuguggugagccgagauugcgccauugcccuccagccugggcaauaacaguga

SEQ ID NO: 390105 - RNA, 70 nt, Homo sapiens
cuuuuccauggugcucaugagacaagcaggaguaggauuagucugccuuguucucugaguccuggcaaag

SEQ ID NO: 390106 - RNA, 122 nt, Homo sapiens
gugaggcuggagggggagucugggggaggaggugaggcuagauggggauguguccagggcagguagccuugagaccccuuuauuuagccccagcucagggaacccucccacaguggccuugc

SEQ ID NO: 390107 - RNA, 57 nt, Homo sapiens
gcuuggagaugggggaugagccugaagggguaugguucaacccuugcgucaccaagc

SEQ ID NO: 390108 - RNA, 87 nt, Homo sapiens
ggccugcuguguaugccggacgcuguuuacaaauuggccuuuaagcuuuuuggaaaauugagauguggguuggugacuuagcaggcc

SEQ ID NO: 390109 - RNA, 64 nt, Homo sapiens
accauauaccuaggcuacaugguuuggacuauugcuucuaagcuacggaccuaggcuacauggu

SEQ ID NO: 390110 - RNA, 66 nt, Homo sapiens
uauugacguguaguaaacagucagaaaacuuagcuaaaaacaauuugacauuauuucaugucagua

SEQ ID NO: 390111 - RNA, 76 nt, Homo sapiens
ucaccauucccauuugugaccaaaaucaacauaccuccccacauaggcaagguuugauuuuggucagggaauguga

SEQ ID NO: 390112 - RNA, 56 nt, Homo sapiens
gguccugucacuuguggcaccagggccaguuuuuugugugcuugagugaugggauu

SEQ ID NO: 390113 - RNA, 93 nt, Homo sapiens
cuccccauucccugagagcagggucuuucucucccucucugaagacuaagccagaguaaugagacucaccuuugcucugcaguaggugaggag

SEQ ID NO: 390114 - RNA, 66 nt, Homo sapiens
ugaaaacucaucaguggggaugugguugaauaaaugaagguucauccacaccauagaugauuauca

SEQ ID NO: 390115 - RNA, 61 nt, Homo sapiens
aauaaaauauccuuauucuuacaaaauccaagcaggaaguggcagugggagauauuuuauu

SEQ ID NO: 390116 - RNA, 69 nt, Homo sapiens
aacuaggugauugaagguggaaugugaggcagaaaggagaguaaacguugauccucaaguuacugaguu

SEQ ID NO: 390117 - RNA, 57 nt, Homo sapiens
uaugagagcugguagguagagagucaaauggcuauugcugccuaccugguugucaua

SEQ ID NO: 390118 - RNA, 57 nt, Homo sapiens
aguauccauguguuuucaucauuuagcucccacuuauaagugagaacaugugguauu

SEQ ID NO: 390119 - RNA, 69 nt, Homo sapiens
aggcugaagugcaguggcacagucauggcucacugcagccgugaacugcagacaugcaucuuuaugccu

SEQ ID NO: 390120 - RNA, 73 nt, Homo sapiens
uaguuuggugcauaaguaauugcagcaauuugccaauaauggcaaaacccgcaauuacuuuugcacuagccua

SEQ ID NO: 390121 - RNA, 68 nt, Homo sapiens
ggugccaggaguaacagcugaugucuugcuuaacaaagcagcuugucuuauacuacuucauuggcacc

SEQ ID NO: 390122 - RNA, 64 nt, Homo sapiens
ugagauuugggaggagcuaggggcaaaauaauaugguuuugaucugugucccugcccaaucuua

SEQ ID NO: 390123 - RNA, 59 nt, Homo sapiens
cuagguuauguggcuuuucuacuuuggcccagccaacuuggagagugacauaauucugg

SEQ ID NO: 390124 - RNA, 58 nt, Homo sapiens
uucucgcuuuuuccaccuguaucgugcuugcgccccauccaggugugaagagccggag

SEQ ID NO: 390125 - RNA, 55 nt, Homo sapiens
ccucuuuguugagacuucaccaaaugguucucaccaaugguucucaacagagggg

SEQ ID NO: 390126 - RNA, 57 nt, Homo sapiens
uugacuguaagauggcuauuacaauuuuaaggugacaauaugcucucucacagucaa

SEQ ID NO: 390127 - RNA, 106 nt, Homo sapiens
aggauugagaagacugcagaugugaaggagaaaaaaauucaacuucaucugaacugaauuguuucauucuuuacauuacagccaucaacauuaucaacuuuauccu

SEQ ID NO: 390128 - RNA, 88 nt, Homo sapiens
ggaauuugaggucugguaaauguuaacaagacagcacuucauccuaaugaaaguaucuuggaguuugacaaccaacacuucagauuuc

SEQ ID NO: 390129 - RNA, 84 nt, Homo sapiens
ugccaguuugagaagcacagggccugugcuuucaguuuucucacauuugaauauuauguuguauggguuuuguuucuucuggua

SEQ ID NO: 390130 - RNA, 88 nt, Homo sapiens
ggaggaucacuugaacccggggggcagagguugcagugagccaagaucgugccauugcacuccagccugggugacagagugagacucc

SEQ ID NO: 390131 - RNA, 81 nt, Homo sapiens
gcaaggguugaggacugguugaaagcuuugccacauucuauacauuugaaagguuuuuuuccaguaucucuuaucuuaugu

SEQ ID NO: 390132 - RNA, 71 nt, Homo sapiens
gggacauuuauugccucaauuccaagacugccuggaaaagggcgguacugccuugggcaguagagaguucc

SEQ ID NO: 390133 - RNA, 63 nt, Homo sapiens
cugcauuugcacugagacucagcuuccaguucagugaggacagccgggcuaguguagaugcgg

SEQ ID NO: 390134 - RNA, 76 nt, Homo sapiens
cuugaacccaggagauggaggcugcaguugcagugagccaagaucacaccacugcacuccagcuugggugacagag

SEQ ID NO: 390135 - RNA, 69 nt, Homo sapiens
auagccaguagagagcuguuagacuccuacacguuuauaaaucucugcucagcuucaucucacugcuau

SEQ ID NO: 390136 - RNA, 130 nt, Homo sapiens
uuuugcuuacuauagcuuuguaguauaguuugaaauugaguagugugaugcaugucucuagcuuuguucuuuuugcucaagauugcuauugcuauucagagucuuuuguaguucaaagaaaagcccagga

SEQ ID NO: 390137 - RNA, 70 nt, Homo sapiens
uggacagcaucccauucacagucacccuucuccauggaguggccauuggaaggugcacugugacagucca

SEQ ID NO: 390138 - RNA, 73 nt, Homo sapiens
cccuguugauggcugucacagcaauuuaugguuuuaaauuauaaaugcuuccagucauuaaaaagugacaggg

SEQ ID NO: 390139 - RNA, 130 nt, Homo sapiens
uugcaucauacuccauggauugauauaccacaguuuggccauagguuauuuauuauauuuuguaauuacaaagaauguggcauugaauaaccuuggacuuuguauuguuggccaucugucuuccagguaa

SEQ ID NO: 390140 - RNA, 64 nt, Homo sapiens
auugugaauggugcugcaguaaacauacgugcgcaugugucuuuauagcagcaugauuuauaau

SEQ ID NO: 390141 - RNA, 57 nt, Homo sapiens
cuaucucauugguuuuugaaaguuuugggaugggcauuucaaaauaccaagagauag

SEQ ID NO: 390142 - RNA, 128 nt, Homo sapiens
auuugagaugauucuauggcaacagaaaugugcuugagggaaaucaguugcggcaucuucuauaauugugucaccuagauuuugccuuaggaauuucuagauuuccauagaacauugugaccucaaau

SEQ ID NO: 390143 - RNA, 83 nt, Homo sapiens
gaggggagaggugcuugaaucuaugagcucagcucguuaccuugagccagaggccucauuuagauuuaaguacuacucuuuuu

SEQ ID NO: 390144 - RNA, 56 nt, Homo sapiens
uugagacggaguuuugcucuuguugcccaggcuggagugcaauggcuccaucucag

SEQ ID NO: 390145 - RNA, 64 nt, Homo sapiens
uucgguuugccaauauuuuacugaggauuuucacaucgauguucaucagagauauuggccugaa

SEQ ID NO: 390146 - RNA, 71 nt, Homo sapiens
uggcuaaaggaauggaacaaagucuugaaaugauaaauaaaaacaucuuauuuauuuugucuguucagcca

SEQ ID NO: 390147 - RNA, 77 nt, Homo sapiens
uucaaaucauuaggcauuuuucugauaaacuagguucuugggugccuucuaucggcaagaaugcguacuuauuugaa

SEQ ID NO: 390148 - RNA, 67 nt, Homo sapiens
uugaggaggcagucugacccuuagcagagcucgagcacugugcuaggagauccacugcucucuucag

SEQ ID NO: 390149 - RNA, 98 nt, Homo sapiens
uguaggauacuauuccucuggauauaaaaguucugaaacguuuguuaaaaaucauuauaguugugucuugaauuuuguauguagcauuaguucguaua

SEQ ID NO: 390150 - RNA, 87 nt, Homo sapiens
cuccagagcaacuguuaacauguuguggauaaugccuguuaagauuagauauauuuaugacauguuuauaaaccucuuccuugggag

SEQ ID NO: 390151 - RNA, 79 nt, Homo sapiens
gcauagacccuguaacauacaagugguucaauaaauguuagccaucaccauuguaguuacagaaaaggggucccaaugc

SEQ ID NO: 390152 - RNA, 65 nt, Homo sapiens
uguggaggaccaauuaugcauugugaguuuuaucauuuucacugcauuggaugguuccucccaca

SEQ ID NO: 390153 - RNA, 62 nt, Homo sapiens
cucaucauaacucugaaaacucuacuuccaaauugcacucugaguuucaggguggacaugag

SEQ ID NO: 390154 - RNA, 87 nt, Homo sapiens
uagguauacaugugccauggugguuuguugcaccuauuaacccaucaucuagguuuuaagccccaugugcauuagguauuuguccua

SEQ ID NO: 390155 - RNA, 76 nt, Homo sapiens
aggcauggcauguauucuuauuauuccuacuuuauagaugagaaauugagcaguagagagaauacauaacuugccu

SEQ ID NO: 390156 - RNA, 55 nt, Homo sapiens
ggggaaucuaaaagcccuuacagaggucaagccugcagugagcuaagauuacccc

SEQ ID NO: 390157 - RNA, 79 nt, Homo sapiens
uuuucccccagaugaggacaucuuccuuauggaugaagcaauucgugaauaagagaaaaugaucccaaggaggggaaaa

SEQ ID NO: 390158 - RNA, 84 nt, Homo sapiens
uauaauagguacuuguuuaugugaugugaugagaaguuccuaucuauaccagauagucuccaaguaacaucacguuaucuuaug

SEQ ID NO: 390159 - RNA, 59 nt, Homo sapiens
uagcagguucugggugggaaugaggccaccauggggccauggcucacugagaacagcua

SEQ ID NO: 390160 - RNA, 59 nt, Homo sapiens
gggaacagaaauguccuuaaaagcagguugcuaaaugcaacugauauguuccuguucuc

SEQ ID NO: 390161 - RNA, 58 nt, Homo sapiens
auagaaccuacauucuuaacuguugcacuacacugugcaacuguacccugugggcugu

SEQ ID NO: 390162 - RNA, 106 nt, Homo sapiens
augaaugaaccuugaggacauuaugcuaaguggaauaagccagucacacaaagauaaauacuguaugauuccacuuagacaaagugucuagaguagucaaauucau

SEQ ID NO: 390163 - RNA, 78 nt, Homo sapiens
uuuuuuguuacuacagcaagccuaccccauccuacauaccagucaggaugggguaggcuuugcugcaguaacaaaaga

SEQ ID NO: 390164 - RNA, 61 nt, Homo sapiens
ucuggcccucagacucaugggcacauucagaagucuugccuacugagacuggguggccagg

SEQ ID NO: 390165 - RNA, 87 nt, Homo sapiens
gaguaacacaugaggauggugccugcugacauaguuacauuuauugagcacuuaugcacuaggcacuguguuugcauguaaugacuc

SEQ ID NO: 390166 - RNA, 99 nt, Homo sapiens
gaugguucuaacacauagaaaugguaaguacucaaggugaugaaugcccuaaaugccaugacuugaucauuacacauucuauguauguaacaaaauauc

SEQ ID NO: 390167 - RNA, 60 nt, Homo sapiens
ugugaauagugcugcaauuaacauacaugugcaugugucuuuacagcagcaugauuuaua

SEQ ID NO: 390168 - RNA, 64 nt, Homo sapiens
guucuuagguuguuucuggucuuagguauugaugucauccuugaucaccggggucaaccagagc

SEQ ID NO: 390169 - RNA, 81 nt, Homo sapiens
aggacccuuucagauugaagaguugaggggcucuggagcagggaccccauuugaacuccuucaacugccuugccugguccu

SEQ ID NO: 390170 - RNA, 58 nt, Homo sapiens
cagggguagauggucagcacacauccauaccugcugguggcugugaucaucacccuug

SEQ ID NO: 390171 - RNA, 103 nt, Homo sapiens
uugagauggagucucacucugucacccaggcuggagugcagugggguaaccucaggucacugcgaccuccgccucccggguuccagugauucuccugccucag

SEQ ID NO: 390172 - RNA, 94 nt, Homo sapiens
aauaucacagaguguacacccacugugauauuaggagaaagcucucccuuggguauuagaauaauaucacaggguguacacucacugugauauu

SEQ ID NO: 390173 - RNA, 99 nt, Homo sapiens
gaggcaggaggaucacuugagcccagguuguugagacugcggugagcuaugaucgagccacuguacuccagccugggcaacagagcaagacccugucuc

SEQ ID NO: 390174 - RNA, 65 nt, Homo sapiens
gaggaaucaaagccaugcucaguuuucaguccccuugguugaggaaaggguuggcuugaccccuc

SEQ ID NO: 390175 - RNA, 126 nt, Homo sapiens
uagucccagguacuuaggaggcugagguaggagaauugcuuggacccgggagguuggcucacugcaaccuccaccuccuggguucaaacagucucccugcuucagccucccuaguagcugggauua

SEQ ID NO: 390176 - RNA, 118 nt, Homo sapiens
uauagaugaagaaucaaaguuuugguaucacagauauggguuuaaauccuggcuuucagugguugcuagcccaugauuuggagcaauauuucuaagaccucuugccuucucaucuaua

SEQ ID NO: 390177 - RNA, 58 nt, Homo sapiens
uuugcuauagugaauagugcugcagugaacauaugcgugcaugggucuuugugguaga

SEQ ID NO: 390178 - RNA, 104 nt, Homo sapiens
guugauacaaguaauuaaacauuuguccaaauccaugggauguacagaaucaagagugaagccuaauguaaacuauggacuuugggcaauaauuaugugucaau

SEQ ID NO: 390179 - RNA, 78 nt, Homo sapiens
ccauaagggacucuuuaaucucuuuuauccaaugaauuacaucaugugcaagaucauuaaagcucugguccucugugg

SEQ ID NO: 390180 - RNA, 75 nt, Homo sapiens
acacauguaccuguauguucauuucacacauguauugcugggaacauguguguacauggcuaugcauacaugugu

SEQ ID NO: 390181 - RNA, 91 nt, Homo sapiens
ucccagaggcuugaaguaggaaaggaggagguaagauuugccuuuuucuuccauucuccaccucuugccucacuugcuagaugcucugggg

SEQ ID NO: 390182 - RNA, 78 nt, Homo sapiens
guugugugcauauuuauucauauuuuuguuaaauguuaaaucauuuaucacaguaaaucugggugcauaguacauaau

SEQ ID NO: 390183 - RNA, 66 nt, Homo sapiens
uugagacggggucucacugugucaccuaagcuaaaguguaguggcacaauuuugacucccccucaa

SEQ ID NO: 390184 - RNA, 69 nt, Homo sapiens
accaagcuaacaacacagcagauuagaaguaccagacuuugcuuuuaguucacuugugcuuguuguggu

SEQ ID NO: 390185 - RNA, 81 nt, Homo sapiens
acagaaggcagagagccuucaugaccagcucccuggcugguggcggaggugggacugagucauugaggcccucuccucugu

SEQ ID NO: 390186 - RNA, 86 nt, Homo sapiens
auauguucuaauccucuaauguaaccugcaaauauuaccuuacuuggaaaaagagucuuugcagaugcaguaaaguaagaauguau

SEQ ID NO: 390187 - RNA, 56 nt, Homo sapiens
uugaaagagaccaucucugagaugaucccauuuuccagagaucaucucuguuuuaa

SEQ ID NO: 390188 - RNA, 70 nt, Homo sapiens
acuaauggauuaacgucccugucgugugacauuuucugguaugacagcugaagauguugaaccguauggu

SEQ ID NO: 390189 - RNA, 60 nt, Homo sapiens
cugcuuuuucuaggaggacaauuauauuuuugauuaauauuguaauuuuagagaaagugg

SEQ ID NO: 390190 - RNA, 55 nt, Homo sapiens
guguauucaucuggcugagguaaaccuuucuuuuuauucagcuguuuggaaacac

SEQ ID NO: 390191 - RNA, 66 nt, Homo sapiens
ggaaaacgcauccucacaggucugaagacagcacaccugaguggaucuucugggauaguguuagcu

SEQ ID NO: 390192 - RNA, 55 nt, Homo sapiens
uugagauggaaucuugcucugucuccuaggcuagagugcaauggugccaucucgg

SEQ ID NO: 390193 - RNA, 84 nt, Homo sapiens
cugcuccuccauugguccacugugaaauugggacaaaagauaucuuauuuuuuaggauucacauggauucaugauggagagcag

SEQ ID NO: 390194 - RNA, 58 nt, Homo sapiens
aguaggcuugcucguugccaauuauccucuugaaaacuggucuuaugcaagcacuauu

SEQ ID NO: 390195 - RNA, 85 nt, Homo sapiens
cauccagcuacacguucuuucaccaucaucacccuccaguauugagugugagguacgugucaagaaccacacagcuuuucggaug

SEQ ID NO: 390196 - RNA, 60 nt, Homo sapiens
guauuggaacauccuaaauggaccugaacauccaaguuuguccaaaacaguguccaaugc

SEQ ID NO: 390197 - RNA, 78 nt, Homo sapiens
gcaauguauugauuucccuggaacucauuuccaacauuucuucaacccuggagaugacacugggucaaaucucauugc

SEQ ID NO: 390198 - RNA, 77 nt, Homo sapiens
uuauuagguugguggaaaaguaacugccauaacuuuuaauggcaaaaaccacgaguacuuuugcaccaaccuaauag

SEQ ID NO: 390199 - RNA, 59 nt, Homo sapiens
cagacuugggaauguccuaauaucucgauaucuugagaacaaaggcauuccuaauuuug

SEQ ID NO: 390200 - RNA, 73 nt, Homo sapiens
caauggguguucaaccuuuaauguucagggauugugcaagucuguguuugaucaagauuguaaacaccuauug

SEQ ID NO: 390201 - RNA, 72 nt, Homo sapiens
guuugcccagcaccauuuauugaaaagacagucuuuuccccauuguguuuucuugguggcugugucacagau

SEQ ID NO: 390202 - RNA, 58 nt, Homo sapiens
augaauguacacgcguacuuguucugucucugaaaagcaaguacacauguacguucau

SEQ ID NO: 390203 - RNA, 58 nt, Homo sapiens
ccauggcaauggucagucuauucaaacauaagccuggcauggugcuggccucccaugg

SEQ ID NO: 390204 - RNA, 113 nt, Homo sapiens
gcugcagugcagugcucuggcacggugccgguuacacaguaggucccuaguaaaugguuguuacugagucccuacuguguaccaggcacugcugcaggugcugcgaauacagc

SEQ ID NO: 390205 - RNA, 59 nt, Homo sapiens
aguauaaugaaaugugucaguagaacuguuucuaaguuauuugacaguuucuuuauauu

SEQ ID NO: 390206 - RNA, 55 nt, Homo sapiens
auugucacugugcuccaccagucagaguaagggcuuguggagucaggugaguaau

SEQ ID NO: 390207 - RNA, 70 nt, Homo sapiens
gguauuucuaguucuagauccuugaggaaucgccacaccgucuuccacaaugguugaacuaguuuauacu

SEQ ID NO: 390208 - RNA, 55 nt, Homo sapiens
ccagaccuuacuggugcagguagacgccagcucuuuuuguaucucuggguacugg

SEQ ID NO: 390209 - RNA, 73 nt, Homo sapiens
aagggggagaauaugugaagggggcuuccaugggaggcuucgauggcccacccacccuuccauucuuccucuu

SEQ ID NO: 390210 - RNA, 92 nt, Homo sapiens
aaggacaaggaauaugaaagaagaguaaguagguuacuuaguagggaaguaacuaagcuaauguguuuucucuuaauuguugaccuguucuu

SEQ ID NO: 390211 - RNA, 106 nt, Homo sapiens
uccaucuauaauccgagggaagagagagagaacugauuggaguugggcauagaaucugaggaacgugcccacauccaaucaguucucucuuaagauuacagaugga

SEQ ID NO: 390212 - RNA, 76 nt, Homo sapiens
uugcuugagcccagaagguggaggcugcagugagcugcauuugcacuacuguacucuacccugggcaacagagcaa

SEQ ID NO: 390213 - RNA, 100 nt, Homo sapiens
auggugaauuuugaauuuauaacuaaugagcuugaauauuuuuucaauacaccauuggaagacuuuagaggcuuauaauguagggaauaagauucuccau

SEQ ID NO: 390214 - RNA, 85 nt, Homo sapiens
ccgcgcccagccggacucugggauuuaaagauaaccaagugaaaauagguucauccucuuugacucacagccuggcugccugugg

SEQ ID NO: 390215 - RNA, 116 nt, Homo sapiens
cugagcauacuggugugcaccuguagucccaccuacuuggggacugagaugggaggauaacuugagcccuggagguggaggcugcagugagccaugaucauaccacugugcuccag

SEQ ID NO: 390216 - RNA, 77 nt, Homo sapiens
acauuuuucaauccuucuuugugacuacaucaggucauguaaccaaguuuucaacaauggaauggaguggaaagugu

SEQ ID NO: 390217 - RNA, 93 nt, Homo sapiens
auuuaagagggcagaauaaucaccaugaaaaaaucuguuuuucuugcuugauaugcugauguuuucagguaauucugaugcucuaacuugaau

SEQ ID NO: 390218 - RNA, 69 nt, Homo sapiens
ugcagcugaaauugagauuuagguaaaugcuucugcuuugguuaucaucauuucagcaaccacacugca

SEQ ID NO: 390219 - RNA, 55 nt, Homo sapiens
uucaugagggcggacgcccuggagaguguggcugcuccagcccagcccucgugga

SEQ ID NO: 390220 - RNA, 84 nt, Homo sapiens
caggugaggagaagagagguugguguccaggggagauggacaaaucucuuucuuuggauggaaccucucuuucuuccuccucug

SEQ ID NO: 390221 - RNA, 103 nt, Homo sapiens
gagaguaggagguuggacauugagauguuuagauuguugucucugugauagguuuugagagacucgggucuaagaugucuuucccauuagccugaauauucuc

SEQ ID NO: 390222 - RNA, 70 nt, Homo sapiens
cccugcagagucuguccugccugcccacuccuucagccaagguuccggcacaucgcagacuuugucuggg

SEQ ID NO: 390223 - RNA, 60 nt, Homo sapiens
caauggcuucaacuacggcuucaacacaggugugucugagcuuguauuuguagccuguug

SEQ ID NO: 390224 - RNA, 129 nt, Homo sapiens
agacacaaacgcugacuucagauuguuuacaguucgagagaaaaggcauauaugcaauguccaaugucuuguaaugcaccuuugcuuucugaaucugcuccccaucuuugaaucuccugaauucugucu

SEQ ID NO: 390225 - RNA, 83 nt, Homo sapiens
cugguaagucuuguaggcaguuucaugagguaguuaaugauguccaguguaugaaauugcuaucgcaguacuauuacugccag

SEQ ID NO: 390226 - RNA, 90 nt, Homo sapiens
ggcuuagcuagaugcugggucaguagcauguaugucuuuuauuugugagaucacaucagcuuuggcuacuuaaugcaacauagcuaggcu

SEQ ID NO: 390227 - RNA, 64 nt, Homo sapiens
gcacugcuuaguaaugggaccgguucugagaaauguguuuucagaccauuucauuacagacugc

SEQ ID NO: 390228 - RNA, 58 nt, Homo sapiens
gugugagauggugaauuuguguuguuuuaagcacuaaguucaugcucaucuguuacac

SEQ ID NO: 390229 - RNA, 87 nt, Homo sapiens
aaaauaguuugcauuuauguagaccuuaucuauauuuaucaagugcuucucuauucaugaggugaggucaguaagguagacuguuuu

SEQ ID NO: 390230 - RNA, 63 nt, Homo sapiens
auaucugcauugccauuuaugugggauaaagcuuguuuacccuuaaagguauuguguaggugu

SEQ ID NO: 390231 - RNA, 88 nt, Homo sapiens
gugagaucauccuuuuggcuugcaugggagcugggugaggccugugacugcuggcuuuccccgaccucccugacaaccuacaugacac

SEQ ID NO: 390232 - RNA, 55 nt, Homo sapiens
aguggcagugugaggauccugcuuuagaagacuacagcguuuucaaugcuccacu

SEQ ID NO: 390233 - RNA, 71 nt, Homo sapiens
cucuaauuaagaucaggaggcuuggguuccaauugacaaagcucuucauuccccugauacuuagucaagag

SEQ ID NO: 390234 - RNA, 61 nt, Homo sapiens
agucaucauugguugugguguuucuugggguagagguauaugcuacuggacaauggugacu

SEQ ID NO: 390235 - RNA, 63 nt, Homo sapiens
uaugacugaguaguauuccacuauauguguauauacauauaguggaauacuacucaguauaua

SEQ ID NO: 390236 - RNA, 63 nt, Homo sapiens
uaagguccuccugaagaacaaggcuugcagcagacaggagucagguaguuucagaggaccuug

SEQ ID NO: 390237 - RNA, 121 nt, Homo sapiens
caugccuggcuaauuuuuguauuuuuuguagaggcgggguuucaucauguugaccaacuccugggcucaaaugaucugcccgccuuggccucccgaagugcugagaauaaucccaagcaug

SEQ ID NO: 390238 - RNA, 83 nt, Homo sapiens
uuugguuacaugcguaaauuguuuaguggugauuugugagauauuggugcacccaucaccugagcaguauacacugaacuaaa

SEQ ID NO: 390239 - RNA, 65 nt, Homo sapiens
uuugguaguuuguugggacccaugggugggcaugggaagcugacauuuccaaaggaacuaccaag

SEQ ID NO: 390240 - RNA, 64 nt, Homo sapiens
cugcugcgugacccaggagugagugaucccccaaccccagaagcucacccugacaucugcccag

SEQ ID NO: 390241 - RNA, 63 nt, Homo sapiens
aacuuacagucuagaggagaaucaggcuaacaaggagucacucaccauagacugugaaaaguu

SEQ ID NO: 390242 - RNA, 69 nt, Homo sapiens
gagcuaguguaauauuuugggggugcuauaaaaacuugucuugucauauuaccagaauuacuuuaguuc

SEQ ID NO: 390243 - RNA, 67 nt, Homo sapiens
gggucccauuguaaacggccaacuacccauccccagggcccuuggugccguccugcaauccuggccc

SEQ ID NO: 390244 - RNA, 61 nt, Homo sapiens
auaauuggcaguaguggcuaacagaacccaggaaaacaguuuacuuacuacugccuauuau

SEQ ID NO: 390245 - RNA, 55 nt, Homo sapiens
uugagauggagucucacucugucacccagacuggagugcagugucaccaucucag

SEQ ID NO: 390246 - RNA, 57 nt, Homo sapiens
gucuggcuuauuucacuuagcauaauguccuuuuuauguugucacaaauggccggau

SEQ ID NO: 390247 - RNA, 86 nt, Homo sapiens
ggagucuugcucuguugccuaggcuggagugcaguggcaugaacucggcucacugcaaccuccaccucccagguucaagcgauucu

SEQ ID NO: 390248 - RNA, 79 nt, Homo sapiens
ggaucaccugggagcuuuuauaaguauaaacucucaguugaaucaggguuugcaucuuagaaaguucuccaggugauuc

SEQ ID NO: 390249 - RNA, 62 nt, Homo sapiens
agugacaagagcuaggcuuuuucaaguuagacagauuuggcuccaauucuggcucugucacu

SEQ ID NO: 390250 - RNA, 113 nt, Homo sapiens
uuagccgggcauggaagugcaugccuguagucccagcuacuugggaggcugaggcaggauugcuugagccuguagugagcugugauugcaccacuguacuccagccuggguga

SEQ ID NO: 390251 - RNA, 56 nt, Homo sapiens
cuagaggcacagccuaggcacuggggcuaccagcuccuagggcucugugccucugg

SEQ ID NO: 390252 - RNA, 72 nt, Homo sapiens
ggcaggauuauuacuccuauuuuguagaugaggaaacucagucauagaaaagugaaguaagcuguccaagcu

SEQ ID NO: 390253 - RNA, 100 nt, Homo sapiens
gaggcaggagaaucgcuugaacccaagaggcagagguugcggugagccaagguggugccauugcacugcauucugggcaacaagagcgaaauuccguuuc

SEQ ID NO: 390254 - RNA, 62 nt, Homo sapiens
ggugccuacugugugucaggcauauuaucuucuaucccacaauaaccugaaaguauggcacc

SEQ ID NO: 390255 - RNA, 88 nt, Homo sapiens
ggagucucucacacugucgcucaggcuggagugcaauggcaugaucucagcucauugcaaccuccgccucccagguucaagugacucu

SEQ ID NO: 390256 - RNA, 72 nt, Homo sapiens
auuaaugaggcaggaaaggcguaucugggaaauaaaaucaucaucuaagcauggcuuuucuucuuuguuaau

SEQ ID NO: 390257 - RNA, 107 nt, Homo sapiens
uuugcauaauguuucuuaaagucaggaguaguaggaaguuuuguagucaaacagacuuagcuuuggauaccugcuguuccacaugcugacuuuaagacacuggcaga

SEQ ID NO: 390258 - RNA, 59 nt, Homo sapiens
gaucccuggucaaagcaugcaauauauuaucuaauaguguggcuuuguaaccauggguc

SEQ ID NO: 390259 - RNA, 97 nt, Homo sapiens
gcuuuuuauguuccuauagcauuuguacaaaaugcaguaggaguggaaucauuauucuaaauugcauaaguacaaaugaaauggaagagcacaaagc

SEQ ID NO: 390260 - RNA, 72 nt, Homo sapiens
cgguguccuugaaacaggaagaauucaaauuuauuuggaacguuucuguuuuucaaggguuaacaaucacug

SEQ ID NO: 390261 - RNA, 70 nt, Homo sapiens
cuugaacccaggaggcggaaguugcagugagccaagauugugacauugcacuccacuccugaacaacaag

SEQ ID NO: 390262 - RNA, 88 nt, Homo sapiens
gccgguugggugugcguuggugcuucagcggcgccguggaggguccgggucgccgggggaugggcaccagcgccgaagccaggcuggc

SEQ ID NO: 390263 - RNA, 58 nt, Homo sapiens
gucuuggcuucuuuauguggcuauagggccccggguagccaugcagaaggccugagau

SEQ ID NO: 390264 - RNA, 94 nt, Homo sapiens
gccaaaugcuuugcuagagcugguaaaauggaaccaaaucgacuguccaauggauuugguccccuucaaccagcuguagcugugcauugauggc

SEQ ID NO: 390265 - RNA, 88 nt, Homo sapiens
gcucaaaauaauccuuauccaaaguggcauauuauaggguagcauauucugaucuucuauaacagugugguuuggagauugauugagu

SEQ ID NO: 390266 - RNA, 115 nt, Homo sapiens
accuacaugagcaagacgcuagauucaaagaauuacauacuguaugguucuguuuauuugacauucucaaaaacaaaccauugcaaugaagaacagauuggugguugccauaggu

SEQ ID NO: 390267 - RNA, 67 nt, Homo sapiens
uugaggaggcagucuguccauucucagagcucaaacaccaugcuuggagaagcauugcucucuucag

SEQ ID NO: 390268 - RNA, 113 nt, Homo sapiens
gccucucuuucaguaugugaaagugcuaagagguauuucaaaacaacccaugggauuagcaugcccacuggcuguuaggaauuaccuccguuuuacauuagagaaaugaaggc

SEQ ID NO: 390269 - RNA, 68 nt, Homo sapiens
ucuuuucuggaaguagauagauugugucaguggucaacaccucugccaaagucaacuucuaaaauaga

SEQ ID NO: 390270 - RNA, 59 nt, Homo sapiens
guauagugaauacuuagguaacauagucauuuauuauucuuaucaaguaugcacuguac

SEQ ID NO: 390271 - RNA, 70 nt, Homo sapiens
uuaaaucugcaaagcugggcugagacacaggaaacuggaaaaugucuccacuaauuugcaaaagguuuga

SEQ ID NO: 390272 - RNA, 64 nt, Homo sapiens
gguucuucagauaccaucuaauacagagaucuaaucucuguauuagaugguauuugaagauacu

SEQ ID NO: 390273 - RNA, 99 nt, Homo sapiens
uaguacuuguagacuuggcuuuccccgugaaacuuucucauuccugauauuugaguagcugggaagguaaucauguggucaguaucauuuacugugcua

SEQ ID NO: 390274 - RNA, 82 nt, Homo sapiens
auugaaagugcuuaaguuaucucuguaccuuugucugcagccccuaugcucagugcuuggcacagagagcugcuugcucaau

SEQ ID NO: 390275 - RNA, 68 nt, Homo sapiens
uaaugguaucauuacuguuuuauuuggauuuaguuuggauuugaauuucugcuuuaaugguaucauua

SEQ ID NO: 390276 - RNA, 77 nt, Homo sapiens
guugugggcucucaauuccauagugucuguggcagaaucuagaguucugccuauuauuauggcauaguuuucauaac

SEQ ID NO: 390277 - RNA, 63 nt, Homo sapiens
cucugagguaagacuaucuagguugaagcuauuaguuaaugauuuagguagcuuuucugggag

SEQ ID NO: 390278 - RNA, 58 nt, Homo sapiens
ucccaccacuauuauaucacccucgguaaagaaccuucgagauguaguauggugugga

SEQ ID NO: 390279 - RNA, 60 nt, Homo sapiens
caggguuccugaccugggguagguaaagaaugucacuuucuaucaggcccaggagcccug

SEQ ID NO: 390280 - RNA, 83 nt, Homo sapiens
gggaucuggugagcuagaccacuuggcucccuggcuucagccccuuuccaggggagugaaugguucugucucgcuggcauucc

SEQ ID NO: 390281 - RNA, 78 nt, Homo sapiens
gugucacuagcauuuaggggcuugagggccagggaucaggugaucuuugagugcccugagucccucaugggaggacac

SEQ ID NO: 390282 - RNA, 69 nt, Homo sapiens
cccuuacagggauuguuuuaaucaccugcuauucauccugcuggugagaaagggauuccuguuccaggg

SEQ ID NO: 390283 - RNA, 58 nt, Homo sapiens
uccuucauucauuaauuuagcccuggacccagggcugacuccuauuggaugaacugga

SEQ ID NO: 390284 - RNA, 92 nt, Homo sapiens
gccugacucuuggcaagugcuugaugaaugaucaauauuauuauuacuauuguuguuauuauuacuaagucuuccuaagaagagucaugggc

SEQ ID NO: 390285 - RNA, 77 nt, Homo sapiens
agaaaaaagagagagauggggucuuguucuguaccucaggcuacaguacagugacaccauuauagcucgugaauucu

SEQ ID NO: 390286 - RNA, 94 nt, Homo sapiens
guggcauaguacacuaaguuuugagguauuuuguuaugcagccuuagcaacugguaagguugcucaaauauuuuacagucuaugaauuguccac

SEQ ID NO: 390287 - RNA, 69 nt, Homo sapiens
aaaagugguguuguuucuaaauguugcuaacauuuacauuuguaacaaauuuggaauugauccauuuuu

SEQ ID NO: 390288 - RNA, 105 nt, Homo sapiens
aggguuccucacugggaacgugggcuucugacacuucaaaacugccaauuugcuggggcaaaggcaaguuaaaaaugucauaaaguuuuccaguugucuuuuucu

SEQ ID NO: 390289 - RNA, 69 nt, Homo sapiens
uuuggaauucucauuugaauuuggccaaguuggguacaguuggucaaaucugaugggagaaacaccaga

SEQ ID NO: 390290 - RNA, 68 nt, Homo sapiens
gggcaagucuuuguugcauaggcuuguucuguucaucauaggacauuuagcucagcugacaccugccc

SEQ ID NO: 390291 - RNA, 87 nt, Homo sapiens
uaguuaucacauaaauaaacaagcaauuugcucagaaauaaaugugucauuguaaacaaauugcuugucuguaguggacuuuggcug

SEQ ID NO: 390292 - RNA, 61 nt, Homo sapiens
uuccuugugacuaguagugaccacguggccagccaauguagcacagccagugaugaaggga

SEQ ID NO: 390293 - RNA, 55 nt, Homo sapiens
cugagauggagucucgcauuguugcccaggcuagagugcaguggcgccaucucag

SEQ ID NO: 390294 - RNA, 77 nt, Homo sapiens
ugguaccuaguaggagggagguggagcaaaauggcaaauagaagccuccacugauuguccuccaugcaggaacacca

SEQ ID NO: 390295 - RNA, 59 nt, Homo sapiens
gaaggaaaguuuauagagauucaucuuccuagaaacaugucccuaagagccuuuccuuc

SEQ ID NO: 390296 - RNA, 76 nt, Homo sapiens
guuccaaugugcuuggggcacaugaguaagggagggccacuaccaauuucaguccugaggcacauucuuuugggac

SEQ ID NO: 390297 - RNA, 62 nt, Homo sapiens
ucaguuugccaguauuuuauugaggauuuuuccaugaauguucaucagggauauuggccuga

SEQ ID NO: 390298 - RNA, 84 nt, Homo sapiens
gugggagcaguagagcugguaagaaguguucagguuguggauacauuuugaagacuaaguuaucaggauuugcugauggcuuau

SEQ ID NO: 390299 - RNA, 68 nt, Homo sapiens
auaguaggaauuugguaaauauuuguugaaugagugaauagauaaauggauaaaugaauaccuacugu

SEQ ID NO: 390300 - RNA, 58 nt, Homo sapiens
uaacagaccuagauaguauagucuacuacacaccuaggcuauaugguauagucuguua

SEQ ID NO: 390301 - RNA, 66 nt, Homo sapiens
uauauuuuucuaauugcauuggcuaagauuucgaaugaaauguucaguagucauugggaaagugug

SEQ ID NO: 390302 - RNA, 66 nt, Homo sapiens
gagauggaguugucgccugggcuggagugcaauggugugaccucggcucacugcaaccuccaccuc

SEQ ID NO: 390303 - RNA, 64 nt, Homo sapiens
ugcccaaggccauaugauauaaguucucuuaccuucuacacuugugucaugguugacuuuggca

SEQ ID NO: 390304 - RNA, 79 nt, Homo sapiens
guugaacuuuucucccauugcaaacaacagaagcuaaguuguuucuuagcuucuaauuuaagcaaacuggggauuuaau

SEQ ID NO: 390305 - RNA, 56 nt, Homo sapiens
guguucaaagcugauugagauuagauggauuuguuuauuaaaguuagcuuuagcau

SEQ ID NO: 390306 - RNA, 60 nt, Homo sapiens
cucaaagugcugaaagaggccaggugcaguggcucacgccuguaaucccagcacuuuggg

SEQ ID NO: 390307 - RNA, 100 nt, Homo sapiens
auaauuuaugaauaguguaucuccucuuugcuuugaucaaguguucuuuaaaagccaagacuaugugaugaaggcauagggaugugaugucaagaguugu

SEQ ID NO: 390308 - RNA, 128 nt, Homo sapiens
agugugauaaauaagaaaaaacaugggccuguaagacacagugacaugggaucaaaucugauuguggcuacaauuacugguuaauuuccaguuacugcucccaaccccuccauuccauucucuacacu

SEQ ID NO: 390309 - RNA, 62 nt, Homo sapiens
gcucucguaauucccuugugucaugggaggcacccagugggagauaagugaaucacgggggc

SEQ ID NO: 390310 - RNA, 67 nt, Homo sapiens
gugagguaagaguugcuuugcuaaauguauguugcccuucaaggcaauuagggcugcucuggcuuac

SEQ ID NO: 390311 - RNA, 129 nt, Homo sapiens
gcaugauuugucugaaguuuuauggcuagucagaggugguggagacuagccccuggguuuuuggcuaaacaauccaguguuucuuccacuauuucaugcugcuguuguuuaacauagauuuauccaugu

SEQ ID NO: 390312 - RNA, 56 nt, Homo sapiens
cuaagauggagucuugcucugucaccccuggcuggagugcaauggcaccaucuugg

SEQ ID NO: 390313 - RNA, 73 nt, Homo sapiens
gugaaguuuuugugaggccuaaagaauaaauuuaauuuucucuggguacauuugucucauguaauaacuuuau

SEQ ID NO: 390314 - RNA, 58 nt, Homo sapiens
gucucgagucucaccuauaucuaauuuagauauuuagaugagauguuagacuuuagac

SEQ ID NO: 390315 - RNA, 67 nt, Homo sapiens
ugucagguuauugccaugcaaaagagugguaacuuccagguguugccauagcaaugguaagcugaca

SEQ ID NO: 390316 - RNA, 97 nt, Homo sapiens
uuacauuaucauuaacuguuucucuguaauauauuaaaccuuuuguucuuugucuuuacauaucugauauguuagggggagaaguuaacaaauguaa

SEQ ID NO: 390317 - RNA, 60 nt, Homo sapiens
uuauuuggucuguaauuacauggacuuuauuuggaggucagugaaggaacaacuaaauag

SEQ ID NO: 390318 - RNA, 58 nt, Homo sapiens
ccucagcuccuauaucuguauggccuguuuuuuccuagguuaugauuguagagcgagg

SEQ ID NO: 390319 - RNA, 55 nt, Homo sapiens
uucgguucauaaccacguguaaaauggaaacagcaaugagguguaugacacugaa

SEQ ID NO: 390320 - RNA, 64 nt, Homo sapiens
uucgguuugccaguauuuuauugaggauuuuugcauggauguucaucagggauauuggccugaa

SEQ ID NO: 390321 - RNA, 127 nt, Homo sapiens
ugauaagaaaauaaauguguauuuguuaagcuagugagacagugguacuuuguuauggcagcccuagaaaacaaauacaguagccauucucuuuaucuggcacagaagcaacuuuauuaauauauua

SEQ ID NO: 390322 - RNA, 120 nt, Homo sapiens
ucuguuuucaaucuuucaaaagacaugugaaaaaugaaguuggccugagguuugaggcagauguuuugacugauuugugcucaucucagucaacuguuuucucaagggguugggagcaga

SEQ ID NO: 390323 - RNA, 58 nt, Homo sapiens
cacuaauuagugauaaggccaagacuaaaagguaggugucauaugucucugauuagug

SEQ ID NO: 390324 - RNA, 81 nt, Homo sapiens
auacaguagaaguccuuugugacauguauuuaggcuugagacuaauacuugucauaaaggcauuauaaguguuuauuguau

SEQ ID NO: 390325 - RNA, 64 nt, Homo sapiens
gaagcagugaggucaagagcuuggcuaucuuucacugacaccuggcucuguggucucagguuuc

SEQ ID NO: 390326 - RNA, 74 nt, Homo sapiens
uuucuuuguaucuuuguuaguuuauucuuugcuugaaaggaaguaaguaguguugagacaaguuuauaaggaaa

SEQ ID NO: 390327 - RNA, 77 nt, Homo sapiens
ugcgcguccaugugaaaagaccaccaaacaggcuuugugugagcaacauggcuguuuauuucaccuggaugcaggca

SEQ ID NO: 390328 - RNA, 55 nt, Homo sapiens
guugucacauuaguagcuuacaacugucuaucaugaguauguuuaaugugacaau

SEQ ID NO: 390329 - RNA, 106 nt, Homo sapiens
ggcaugaagcuuuuaagucggcgcagcucaugcaccugcucaaugcagaucuugucuucuuguaccugagcccucugcugaguuaacugcuacaaagcuuccugcu

SEQ ID NO: 390330 - RNA, 55 nt, Homo sapiens
uugcaaaguugccaaggaaggagcuaggccggagccugaaaggcaaacuuuguaa

SEQ ID NO: 390331 - RNA, 76 nt, Homo sapiens
ccaggucacguugaggccagagcucccauggcuuugggcucccauggcuuugggcugcucugccccuauggcuugg

SEQ ID NO: 390332 - RNA, 57 nt, Homo sapiens
uuucuggcuuuuaaagaaauguuucuggacugcagagcagaaaaagaaggccagaga

SEQ ID NO: 390333 - RNA, 64 nt, Homo sapiens
gguuguggaagugaacaaccaaggcaggugguacugccauuuccugauagaacacuuuccaauc

SEQ ID NO: 390334 - RNA, 87 nt, Homo sapiens
auguauuguuuuguuuugagaucgaguaucgcugucacccaagcuggagugcaguggcgcgaucucggcucacugcaaagucugcau

SEQ ID NO: 390335 - RNA, 102 nt, Homo sapiens
aagggagacagagaaaggcuugcuuuuaaccauaucugagaccucgcuuucagaggccuuugugugggccaagggcuggccuacuuccuaguuuacucccuu

SEQ ID NO: 390336 - RNA, 59 nt, Homo sapiens
ugagacggaguuuugcucuugucuccuaggcuggagugcaauggcacaaucuccucuca

SEQ ID NO: 390337 - RNA, 60 nt, Homo sapiens
aggaauagcauugaaucuaccaauugcuuugggcaguauggccauuuuaaugcuauuucu

SEQ ID NO: 390338 - RNA, 55 nt, Homo sapiens
auuaacgucaaaguucuacugguuuuucaaggcuggauggaauguuuggguuaau

SEQ ID NO: 390339 - RNA, 57 nt, Homo sapiens
auguguggaaguguguugcccccgugugcaaauaucuaucauagcacuucagcacau

SEQ ID NO: 390340 - RNA, 80 nt, Homo sapiens
gguagccaauuguguggaguuuuucuacaaccugagcagaccagcuguagcaaaucgauacuauuggaucaagagcugcc

SEQ ID NO: 390341 - RNA, 76 nt, Homo sapiens
uauacuuuaaguuuuaugguacaugugcacaaugugcagguuaguuacauaaguauacaugugccaugcuggugug

SEQ ID NO: 390342 - RNA, 130 nt, Homo sapiens
guuuauaaauuacccagucucagguaguuuuuuauagcagugugagaacagacuaauacagaaaauugguaccaggaguuuggagcacugcuauaaagauacugaaaaucuuuggaacuggguaacaggc

SEQ ID NO: 390343 - RNA, 57 nt, Homo sapiens
guuaucgucucacaguagaaacuggucuacucaucacagcuucuugaggacgaugac

SEQ ID NO: 390344 - RNA, 69 nt, Homo sapiens
ugucuauccgugguuuccugcuguugaacccauggcuggcccugacggaggacaccugcggaauaggca

SEQ ID NO: 390345 - RNA, 57 nt, Homo sapiens
ucgcaguuaauaaugaugugcgcuauaaagacacaugcacauguauguuuacugcgg

SEQ ID NO: 390346 - RNA, 59 nt, Homo sapiens
gcaaugucugugcuaaaaacugggaauacaguggucaaaaauuuagacagacauccugc

SEQ ID NO: 390347 - RNA, 100 nt, Homo sapiens
uuccagucacccuccugacucaguguuucagcugcucagaucauacaggcaccuauuuucuucugcagaaaugcugauguaucauggaggguggguggga

SEQ ID NO: 390348 - RNA, 70 nt, Homo sapiens
guuguugagacugagucuugcccugucacccaggcuggagugcaauggugcgaucucggcucacugcaac

SEQ ID NO: 390349 - RNA, 68 nt, Homo sapiens
ugcagcaucagaaucugcauugugacaagcucucuauguugucuugcacauuacagaucugcauugca

SEQ ID NO: 390350 - RNA, 74 nt, Homo sapiens
guguuuaagacuuagcuagguuuccauuuagaucuucauaucuguugcauggaagaaaguuggguucuuggcau

SEQ ID NO: 390351 - RNA, 60 nt, Homo sapiens
guaacaccagggagcucuuaccugcuaguuguauuggcaauaaggacuccuuagguuugc

SEQ ID NO: 390352 - RNA, 78 nt, Homo sapiens
ggccuuugcauugcucuuagaaauauuucuugacaugugaacuugcauugggugacuaagagugugugugaaccagcc

SEQ ID NO: 390353 - RNA, 59 nt, Homo sapiens
uaauguuaguuuuccauacaugguuaucuuuuaaggauagcaguaagaaacugacauug

SEQ ID NO: 390354 - RNA, 73 nt, Homo sapiens
uuccugucaauauuuacuguuucuuuguugauuuacugaaugugaauugcauaugcaguagaucuaccaggga

SEQ ID NO: 390355 - RNA, 106 nt, Homo sapiens
auuucccagucucagguaugucuuuaucagcagcaugaaaauagacuaauacagaaaagugguacuaguggggugcugcugaaaagauaccugaaaauguggaagu

SEQ ID NO: 390356 - RNA, 60 nt, Homo sapiens
guggcagagcagcuugcacaacagcuuggagcuguuguggagucuucuguucuggaccac

SEQ ID NO: 390357 - RNA, 67 nt, Homo sapiens
gauuuaugaucggcagugagaguauggagauacaggaucaucuauauacugccugcugauuaguguc

SEQ ID NO: 390358 - RNA, 61 nt, Homo sapiens
gugaaggcagaggggcacauggagucgauuacacacuccacaguaaggacccugccuuuac

SEQ ID NO: 390359 - RNA, 64 nt, Homo sapiens
gagguguuuuucucagacaaaacaugaauauuuuuugucuuaauugucuagagaaauauaucuc

SEQ ID NO: 390360 - RNA, 55 nt, Homo sapiens
cccuaauccguaagugucuuguuuacuuuggugagaguagggguugggauugggg

SEQ ID NO: 390361 - RNA, 73 nt, Homo sapiens
caaguuauaguagcaugcacuggugcugggggcagaaaauguccauagacaccaaguaaugcuauucuauuug

SEQ ID NO: 390362 - RNA, 69 nt, Homo sapiens
gcauccaugugaagagaccaccaaacaggcuuugugugagcaacauggcuguuuauuucaccugggugc

SEQ ID NO: 390363 - RNA, 91 nt, Homo sapiens
gcucagggugagagugggccugcagguucugagaggcugggcuggggacaguugucucccaaccccugugcccagucuucuugccaggagu

SEQ ID NO: 390364 - RNA, 76 nt, Homo sapiens
cauuagaguaaauguccuagcuucuugguacuacuagcaggagugggauucaacuaguugguacuuuuauucagug

SEQ ID NO: 390365 - RNA, 69 nt, Homo sapiens
gcagagugagcaauugauacuugaaguagacaguggauuguccccaacuucaaauuguuuuaacuuugu

SEQ ID NO: 390366 - RNA, 65 nt, Homo sapiens
ggcucacaaugucuaagauguuucuaucucugugggccuagaaaucuacuuagacuuucugagcc

SEQ ID NO: 390367 - RNA, 112 nt, Homo sapiens
gaccugugugggcaaucuccagggcaugugggucuauuggcaugcacgcauggguagccaagagucaaagcaaguuuugccaauggauucccaucaucuuugcaugcagguc

SEQ ID NO: 390368 - RNA, 86 nt, Homo sapiens
uaaguucuaggguacaugugcacaacaugcagguuuguuacauauguauacaugcgccauguuggugugcuguacccauuaacuug

SEQ ID NO: 390369 - RNA, 68 nt, Homo sapiens
gggccuagcaggguccaaugugaggcagcauuacccugugcuugcaacacauugccccugcucugccc

SEQ ID NO: 390370 - RNA, 74 nt, Homo sapiens
auguuugagaugauggauaugcuaauggccauguguaauggccuauuugacauuauauacacguaucuaaacau

SEQ ID NO: 390371 - RNA, 130 nt, Homo sapiens
aggcacccgccaccacaccuggcuaauuuuuguguuuuuaguagggaagggguuucacaaggcuaggcgugguggcucacccaacucuacuaaaaauacaaaaauuagccaggcgugauggcaugcgcuu

SEQ ID NO: 390372 - RNA, 92 nt, Homo sapiens
gaagcauuggcuacuuuuaaauguagauauagaaaaagacugacccacucaggauuggguuauauguuucuguuuggaggcaucccugcuuc

SEQ ID NO: 390373 - RNA, 83 nt, Homo sapiens
caugcuugcuugcauccguguaugugcuuauaugauuuuuauauguaaagugguguuuguauuuaugcaaaugugcaggcgug

SEQ ID NO: 390374 - RNA, 83 nt, Homo sapiens
caagauaaugaaaguuaaguauuuagcaugaugccuggcaccugacgggugguccaggaauguuaguacuucuuaguguuuug

SEQ ID NO: 390375 - RNA, 123 nt, Homo sapiens
ggaauuucuucucuugcuuuuuacaaagugagaauucuggaccucaccccauagcaauggaagcagaauccauggacugaggugcagcaauccucauguguaacacauaacuggaauaauucc

SEQ ID NO: 390376 - RNA, 81 nt, Homo sapiens
gaaguacaaaugagagagugucaugaauggguucuggaaauaaaccuauacccaguguucaacauucacauucuguguuuc

SEQ ID NO: 390377 - RNA, 83 nt, Homo sapiens
ggauggcuugagcucaggagguggagguugcagugagccaagaucgcgccacugcacuccagccuuugcgauagagccagacc

SEQ ID NO: 390378 - RNA, 89 nt, Homo sapiens
auuguguuuuaaaauuggcauugaguuucaaaucauacuguauaaacugccagugguaugacacucaguguuuauuuuaaagccaugau

SEQ ID NO: 390379 - RNA, 87 nt, Homo sapiens
gggggucaaaugguguuucuaguucuagauccuugaggaaucaccacacugucuuccacaaugguugaacuaguuuacacucccacc

SEQ ID NO: 390380 - RNA, 84 nt, Homo sapiens
ggagaaucgccugaccccaggaggcagagguugcagugagcugagauugcaccacugcuagccuggguaacagagcaagacucc

SEQ ID NO: 390381 - RNA, 70 nt, Homo sapiens
ugagguacaacauggacugaagaggagcauguguuaaaaacgugugaauuauuuauccuguaguaucuua

SEQ ID NO: 390382 - RNA, 129 nt, Homo sapiens
uggaaaugagcagagcacauuaauaucgaagaaucugugauuuuccaguggcccugaucaugauucuuuuguggucugguuagggguuggauaacagagaaccuuggguuuauucuacugcuaccucca

SEQ ID NO: 390383 - RNA, 122 nt, Homo sapiens
aauguaguccuccuuaucugagauuuuaguuucugugguuucauuuaccugugaucaaccccaaucugaagacagauaaguacacuacaaugagguauuuucagagagagagagucuacauu

SEQ ID NO: 390384 - RNA, 101 nt, Homo sapiens
ugaggcaggagaaucgcuugaaccaaggaggcagagguugcagugagcugagaucaugccacugcacuucagccugggugacugagugagacucugucuca

SEQ ID NO: 390385 - RNA, 76 nt, Homo sapiens
ucuccugcauuugugaaugucauaagcuccacccugaguuuuagcccuuggauucucuggcguucaucaauggaga

SEQ ID NO: 390386 - RNA, 65 nt, Homo sapiens
agauacacauugugagaaaugcguccuuaggugauuucaucaugcaaacaucauagaguguacuu

SEQ ID NO: 390387 - RNA, 74 nt, Homo sapiens
aggaaggguaauacaucaaaucauuauccguuacuaacuccuugauguuagugaaugggugugauuuguuuccu

SEQ ID NO: 390388 - RNA, 74 nt, Homo sapiens
gcucacggcuauuaucccaacacuuuggggguggguggacugcuuaaucucaggaguuugggaccagccugagc

SEQ ID NO: 390389 - RNA, 66 nt, Homo sapiens
uggagcaaaaugguccaguuagugcuguguagcacuguguaguaccacgugaugccauuuucccca

SEQ ID NO: 390390 - RNA, 79 nt, Homo sapiens
caguagcucugugaccacuagcacagcugccaguggacccccuggucacccugaugcugguggucccugcuagucacug

SEQ ID NO: 390391 - RNA, 130 nt, Homo sapiens
uauugucuuggcccagguaugagagucauugccuuaccuguguuuugggcccagauauguguuacaauuugagcucugggcaggacccaggaagaagagucacaucaccuaggugcugaguccagcaaua

SEQ ID NO: 390392 - RNA, 70 nt, Homo sapiens
gagccaguuuggcuaauuuuggcuaauuuuuguagaaacggggucucgccauguuggccaggcuggucuc

SEQ ID NO: 390393 - RNA, 100 nt, Homo sapiens
ucugcugaagcaacggcccaagcuguaccuuggccccuuucauccacagcuggagcagcugggaugcagggugccaugccuugaggcugcacagagcaga

SEQ ID NO: 390394 - RNA, 63 nt, Homo sapiens
guauguggaguguaugugacagagaggaauaagauguuaucucuguccucugcuuuccauagc

SEQ ID NO: 390395 - RNA, 78 nt, Homo sapiens
gccugggaugaauuagguauguuuaugaaucaucuuucauuucucaugggcuccauaccaaguugauccagaccaggc

SEQ ID NO: 390396 - RNA, 68 nt, Homo sapiens
uauggagaaugaugacuuccaauuucauccaugucccuacaaaggacaugaacucaucauuuuuuaug

SEQ ID NO: 390397 - RNA, 59 nt, Homo sapiens
cagauggcucaguguguaucuaucacccccaguggagaaguaauacugagcacaugcug

SEQ ID NO: 390398 - RNA, 70 nt, Homo sapiens
cuuguuuggcuacuguacuugagcuauuguaugauuucagcucaggaguuuggaugcaguagccggcgag

SEQ ID NO: 390399 - RNA, 94 nt, Homo sapiens
uaaaugucauuucuuuaaggaucaaaagugugaauaauaaguaaauauguuuuuucaagcuauggugaucuuuuccaagggauggugauauuua

SEQ ID NO: 390400 - RNA, 65 nt, Homo sapiens
uucaguucuguggcuuguaggggucaagggaaagcuuucccuucgcccucugaaaguuugcugaa

SEQ ID NO: 390401 - RNA, 82 nt, Homo sapiens
ccagccugagcaacauagugagacccccaucucuaccagacauuuuuuuugagauggagucucacucuguugcccaggcugg

SEQ ID NO: 390402 - RNA, 82 nt, Homo sapiens
agaugaucugucuaguaaggaugagcugcacuuugccuuuuuuucaagcaaggauaauucacuucuuuuaggcagggaauuu

SEQ ID NO: 390403 - RNA, 87 nt, Homo sapiens
ggagaaucgcuugaacccgggaggcagaggugcagugagccgagaucaugccacuguacuccagccugggugacagagcaagacucc

SEQ ID NO: 390404 - RNA, 101 nt, Homo sapiens
acaggaggauuuugugggggcucgugucacugugaggauauuguaguaguaccagcugcuaugcccacagugacacagccccauucccaaagcccugcugu

SEQ ID NO: 390405 - RNA, 81 nt, Homo sapiens
uggauuccgcauucaugaaagccacagguuucuuucuugaucacugaaagcagcaggugguuuucaaugccauugccucca

SEQ ID NO: 390406 - RNA, 71 nt, Homo sapiens
gucuccacaaccucaacagcaucuauuguuuuuugaauuuuuaauaauagacauucugacaggugugagau

SEQ ID NO: 390407 - RNA, 76 nt, Homo sapiens
agugacuucccugaaucucagguucuguauuagucuguucucgcauugcuauaugccugagauuagguaauuuauu

SEQ ID NO: 390408 - RNA, 109 nt, Homo sapiens
gaguuagguuguccaguuuguggcagcacauauagguuguuuuauuucuaccggcuucauuaauaauaaagcugccugcaaugcucucaaaaagauaaucgcuuagcuc

SEQ ID NO: 390409 - RNA, 128 nt, Homo sapiens
cuguuuugcaucuccuguuacaggaugugaccauuugacauauccuugcugacaauugaacaaaaugcucuaauacggcaaagaaugagugaguacauaauucugaugaaucugaugaaguaaaacgg

SEQ ID NO: 390410 - RNA, 73 nt, Homo sapiens
gaaaguucuauugguaggggcugaggcaucuccaaagguagucucagcucaccauacuaaguuaggauucuuc

SEQ ID NO: 390411 - RNA, 79 nt, Homo sapiens
ccuggaaggcuggcagcccugggcagagggauugguucacuacugagccccauccccugcacggggugucauucuuagg

SEQ ID NO: 390412 - RNA, 55 nt, Homo sapiens
uugggcgugaggagagggugaaucuguguccagggcuccccaguuuuccguucag

SEQ ID NO: 390413 - RNA, 70 nt, Homo sapiens
uacugagggaggaguguugaagucuccaacugaaaaugcagaucucuucauuucucuuauuucaucggug

SEQ ID NO: 390414 - RNA, 76 nt, Homo sapiens
ucacuugaauccuggaggcagagguugcagugagcugagaucaugucacuguacuccagccugggcaacagaguga

SEQ ID NO: 390415 - RNA, 67 nt, Homo sapiens
agguaagaguugauguugcagucuugaggagaauuccuucuccuucagaaaaccucagucuuugccu

SEQ ID NO: 390416 - RNA, 75 nt, Homo sapiens
acacagacuaaaugguaaccagaugaggugauggauguauuaauucgcuugauagugguaaucauuuuucgaugu

SEQ ID NO: 390417 - RNA, 60 nt, Homo sapiens
guucuugcucauggcagaagugaauagggagcaggcucaucacauggccagaguaggaac

SEQ ID NO: 390418 - RNA, 64 nt, Homo sapiens
gcagauuaaguggauuuaaaugucugguccauagcaaugucagcaccuuuccuccacuaucugc

SEQ ID NO: 390419 - RNA, 61 nt, Homo sapiens
uuacauuccuggggguauuaugacugccucugcugccucauacaggccaccagggaaguga

SEQ ID NO: 390420 - RNA, 86 nt, Homo sapiens
ugacuggguuauuucuaaacaccugucuucaaguuuagaaauucuuucuucugcuugaucuaguguguuguugaagccuucaguua

SEQ ID NO: 390421 - RNA, 81 nt, Homo sapiens
gaagaauguguauagcagugacaugugccaguuuauggugaaugccauaaaauuucucacaugugauuuuccauguucuuu

SEQ ID NO: 390422 - RNA, 84 nt, Homo sapiens
gugagcagacuuccuuggagaugaagcagaguugcugugaucuaauucauugacucaguuguuagucuucauuuacuuucucac

SEQ ID NO: 390423 - RNA, 77 nt, Homo sapiens
uacugggcaccuguuauauguuuggaaugaggaaauagaccauuucuuuaugaugcauauaaucugggaagacagug

SEQ ID NO: 390424 - RNA, 59 nt, Homo sapiens
acgggugaugucagcaaaacuucuugcuuagaaacauuguuuugaacuuggcaaccugu

SEQ ID NO: 390425 - RNA, 84 nt, Homo sapiens
gugcagcaagccuucgauuugcucacaguuguuuuaaacauuuuuaaaaguuuaaaugcacauacuugagaaaagcugcugcac

SEQ ID NO: 390426 - RNA, 56 nt, Homo sapiens
auaaugaacagagccuugagaaccugugacaauagguccaacuuuucugucauugu

SEQ ID NO: 390427 - RNA, 76 nt, Homo sapiens
uagggcuugacacuaauuauuauaggugauauauuaacccagauaucagugccaccaauuaguaagucaaccucua

SEQ ID NO: 390428 - RNA, 84 nt, Homo sapiens
gcaauagccccuuuugagggagcauuuguuuugagggucuuucaucuggagaauaaaucucuccucuucagcuuggcugguugu

SEQ ID NO: 390429 - RNA, 68 nt, Homo sapiens
ccuccguauuuagagugcucaaagaugaggacugcauccuugcauuuguagcucacucugagcugagg

SEQ ID NO: 390430 - RNA, 113 nt, Homo sapiens
aaauauauauauaauuuuuaguuuaucaaauccucaccucaucaugaaauuuuacuucauuguuaauauucaugcuugguguggggauuaugaauuaauguaaguaaguauuu

SEQ ID NO: 390431 - RNA, 61 nt, Homo sapiens
gauuuuaggguuggaucuuuauuaauauguaauaucuaugagguauccaagcccagaaauc

SEQ ID NO: 390432 - RNA, 55 nt, Homo sapiens
aauguuuuuuugguguccagguaauaauguguggcacggaauucaaagaggcauu

SEQ ID NO: 390433 - RNA, 66 nt, Homo sapiens
auaaauuugaauuguaguacauuugguggucacuuaagugacagcaguacuauaaauuaacuuuau

SEQ ID NO: 390434 - RNA, 66 nt, Homo sapiens
uuugugucccugcggcugaggagaaacggcuacuccgcgccaccucauccaccgacaggccacaaa

SEQ ID NO: 390435 - RNA, 93 nt, Homo sapiens
ggaucagugacccauuugugaguaagccagaugaauugauuuugccugugccagaagaggaucaacugcuugagaucacaaaugacaguggcc

SEQ ID NO: 390436 - RNA, 83 nt, Homo sapiens
gguuaucaucuuuugguugugagagacugggggcaaaauacucuguuuugaccccuucuaauagccucauuguaaugguagcu

SEQ ID NO: 390437 - RNA, 83 nt, Homo sapiens
uuagauuuguguuuuugcuucacauagugguuuugucguccuaauuagaucauaaacugcuugaggguaaguacaucagcuga

SEQ ID NO: 390438 - RNA, 64 nt, Homo sapiens
uugucagauggauagauagcagacauuuaaucccauuccguagguugucucuucacucugauga

SEQ ID NO: 390439 - RNA, 55 nt, Homo sapiens
uucuucuuaggugaugaagaggucauuuuaacuucuacagccaguucaggaagaa

SEQ ID NO: 390440 - RNA, 99 nt, Homo sapiens
gaggcaggaggaucguuugaacuugggaggcggagguugcagugagccaagaucacaccauugcacuccagccuggccaacagagcgauacugcgucuc

SEQ ID NO: 390441 - RNA, 85 nt, Homo sapiens
caggggcucugagauccuguuugcagguuuccuuuguacucugagguauaaucugucuagacaaggagucuugggcuagucucug

SEQ ID NO: 390442 - RNA, 113 nt, Homo sapiens
gagguacuaacgcacuacauuuuugaauuacuauugauugacaugucucuguucaauguaaacagcuuaaacagagagugcaguuauagaaauggaauuugcaugagaaccuu

SEQ ID NO: 390443 - RNA, 61 nt, Homo sapiens
ucacggaagaagcguaugauguuacucccaauaucgcagggaguguacacuucuucuguga

SEQ ID NO: 390444 - RNA, 63 nt, Homo sapiens
ggguugcaugggagcugggugaggccugugacggacagcuuuccccgacuucccugacaaccu

SEQ ID NO: 390445 - RNA, 111 nt, Homo sapiens
guugaaucauuuguuuuuaaacauaaaucaagcaaaccuuucuuggaacugaaaacuauauuuucccauuaaugugaucauuucaggaauuuugcuaaauagggggucaau

SEQ ID NO: 390446 - RNA, 57 nt, Homo sapiens
gcuggagccagaagucugaggcugcaaugagcugugaucaugccacugcgcuccagc

SEQ ID NO: 390447 - RNA, 106 nt, Homo sapiens
uagaaaaaaugccaaauggauuaagcuguaguugaggauuuuaagacuguuucuaaaaacguauuuaaaaggucuuaauuguaccuagauacaaguauuuauuuua

SEQ ID NO: 390448 - RNA, 91 nt, Homo sapiens
gucuuuguccuugguucuaugucaaggugaagaaagaucagcagaauguuggauuucuagcaccuuauuuuuaacuaagcaacgcagagau

SEQ ID NO: 390449 - RNA, 102 nt, Homo sapiens
gggguccugcaccugggaaggcacaccgagggagaggggcgggaagcaucuaagauuccauuuguucggugucgccauuccgcugggagggucaggaacccc

SEQ ID NO: 390450 - RNA, 69 nt, Homo sapiens
aaauugagacucuuagauuggaaaucugaauuuauuuacacgauugagauugaucuagaguuuuauuuu

SEQ ID NO: 390451 - RNA, 62 nt, Homo sapiens
gaucugaguggugguuacacgaauaauuuuuuuuaaguuuauguaacugcaaaccucagauu

SEQ ID NO: 390452 - RNA, 87 nt, Homo sapiens
uguuuagugacucuguguguaauaccuuugacuauauguggagaaccaugaaugaaguugguuguuugcucauaaguucacuggaca

SEQ ID NO: 390453 - RNA, 55 nt, Homo sapiens
aagacccauagugugauuaguuugccuucugguuccuuggucccuuuggguucuu

SEQ ID NO: 390454 - RNA, 63 nt, Homo sapiens
ggauguggcauucagugccucagggagccacuggagggauuugagcaagaggugacauuaucc

SEQ ID NO: 390455 - RNA, 59 nt, Homo sapiens
agucagugcauaagaaugaaguagguaugaguucggagcuaaauucuuaagcucuggcu

SEQ ID NO: 390456 - RNA, 55 nt, Homo sapiens
cgcugugguauuauuagaaauauccaagggagauauuacuucuaauaucacagug

SEQ ID NO: 390457 - RNA, 64 nt, Homo sapiens
ucucugucucuuucuguuuaucuuugucuucuguuuuagacaaugagcuccucaaggucagaga

SEQ ID NO: 390458 - RNA, 57 nt, Homo sapiens
ugcagugugaaagagccugacagguauuuggcuuuccagcuuguucuuucaacugua

SEQ ID NO: 390459 - RNA, 70 nt, Homo sapiens
aauauagaaggagcuaagagaucauacaugaauaauuggcacauguggacauuucuuauuuucucauauu

SEQ ID NO: 390460 - RNA, 69 nt, Homo sapiens
ggugccugauuugugcuugauuugccuagcugggaauuucaguuuugcauuuaagacgacucccucacc

SEQ ID NO: 390461 - RNA, 110 nt, Homo sapiens
uaaauuucaguuuucuccuagagugucuuugcgguucacauuuugcuaaguuaaggauuuagcacugugauugacaaaaaauauuacuuacagaaaauaacugacauuug

SEQ ID NO: 390462 - RNA, 64 nt, Homo sapiens
guguuucuaguuagauccuugaggaaucaccacacuguuuuccacaaugguugaacuaguuuac

SEQ ID NO: 390463 - RNA, 71 nt, Homo sapiens
aaccccagcuuucauggaacuuacaugcuaauaaagcuuggcaagaguauuucaaggaagaugaagugguu

SEQ ID NO: 390464 - RNA, 82 nt, Homo sapiens
uuagguuggaccauaggaaauuccuguuuuguaguuuuuuaaacauuguuaaauagcagcaauuuuguaugguuuaaccuaa

SEQ ID NO: 390465 - RNA, 90 nt, Homo sapiens
acggcugaucuagugucuuguccguuuuggcuuucucccugauuccagaaugcagguagagauguagagacgugcucucaggacagcugu

SEQ ID NO: 390466 - RNA, 55 nt, Homo sapiens
aagcuggagugcaguggugcaaucuuggcucacugcaaccucugccuccuggcuu

SEQ ID NO: 390467 - RNA, 55 nt, Homo sapiens
uggcagcagcaaauggcauaucaucuuccgugaucuuggagucaucaugcugcua

SEQ ID NO: 390468 - RNA, 59 nt, Homo sapiens
uggggcuucagcagcuguaaacaucuaccccuagaugcugccaugggguuguagcccca

SEQ ID NO: 390469 - RNA, 66 nt, Homo sapiens
uguuggcaauauauucugaauucaguuuaucauuggaauugggaucucagauauauuauguuaaca

SEQ ID NO: 390470 - RNA, 66 nt, Homo sapiens
ugcugagauguuuuguuaucaaaggauuguuaauauguggugccugauaauagacauucauaagua

SEQ ID NO: 390471 - RNA, 106 nt, Homo sapiens
agacuguagaacugcuuauugagagguucuuggaauuagacaaguggugguucaaaauagacccucuugagguuccaagauggccaaauaggaacagcuccagucu

SEQ ID NO: 390472 - RNA, 64 nt, Homo sapiens
guuaugaauagugcugcaauaaacauaugugugcaugugucuuuauaguagcaugauuuauaau

SEQ ID NO: 390473 - RNA, 61 nt, Homo sapiens
aggaaccugaugcucucacuguucuccacugccugaaacugucagcacaacucagguuccu

SEQ ID NO: 390474 - RNA, 60 nt, Homo sapiens
gagaaugaugauuuccaauuucauccgugucccuacagaggacaugaacucaucauuuuu

SEQ ID NO: 390475 - RNA, 66 nt, Homo sapiens
gaugauguuuaaugcuugaauguuuggaagaagagugcuuugcaaaugucaaggguuaguguuauc

SEQ ID NO: 390476 - RNA, 113 nt, Homo sapiens
auaaaugcaaguuagaacuuuaaggcaugauuuuauaucuauguaacuaguuaacaugguuuauaugagaaaauauaaggucgauaagacuugaagggaacuggacauguuau

SEQ ID NO: 390477 - RNA, 80 nt, Homo sapiens
aagcauuuuuaucuugcuuauguugaauuguucaagagaccaaaggaauuuggcaaagaucaacauguuaggaugugcuu

SEQ ID NO: 390478 - RNA, 77 nt, Homo sapiens
uuauacacugugggaguguaaauuaguucaaccauaguagaaaacaguauguuuacacucccaccaacaguguauag

SEQ ID NO: 390479 - RNA, 56 nt, Homo sapiens
uguucugagaaaugcaugcuuuggugauuuuggcauugugugcauaucacagagca

SEQ ID NO: 390480 - RNA, 69 nt, Homo sapiens
gauuuggaggcagaagagggauaugaugugacugaaucaugucaggaugcuccuuuuggcuguugaguu

SEQ ID NO: 390481 - RNA, 77 nt, Homo sapiens
uauucacaagaguuucacugcaaacugacuuuucagggcaaauucaccacccaaaagucuguagugaaaggugaaug

SEQ ID NO: 390482 - RNA, 101 nt, Homo sapiens
gcagcgugaaaauguacgaauacaguuugcuagaauuuuguugagaauauuugcauguauguucaucagggauauuggcuuauuguuaucuuuucuguugu

SEQ ID NO: 390483 - RNA, 106 nt, Homo sapiens
gggaacuguggucaggugagaggaggcagcuuuuacaaucagacuucauugaauagugugggcugcuguuuccuuguaacaaaaccccauaaugauggcaguuucc

SEQ ID NO: 390484 - RNA, 83 nt, Homo sapiens
uuguuguguuuaaccucccccaccugaggacagucuuauuuuaaaauaaggcuuuuguucagcguggguguauuuuauaauaa

SEQ ID NO: 390485 - RNA, 83 nt, Homo sapiens
gcaacgaauauucccaagcuagauauuaugcuuccagcacaugugggaaagcaaacaucagcuugguuaacaguuuuguuugc

SEQ ID NO: 390486 - RNA, 66 nt, Homo sapiens
auguugguagguuguauguguuuagggauuuuuccauuucuccuagauuauccaacuuauuagcau

SEQ ID NO: 390487 - RNA, 126 nt, Homo sapiens
gggcuggagcagaugauuuuagaagucucuuucaguucugauagucucugauuuuguggaauaguagaucucaacacuggaaguacaucagagucguguggaacuugugaaaaacuguuccagucu

SEQ ID NO: 390488 - RNA, 73 nt, Homo sapiens
ucucuggcuuuuaacaucuauaaauaagguagggugcuaaugcugcuccauuuuguagaugagaaaacugagg

SEQ ID NO: 390489 - RNA, 62 nt, Homo sapiens
ggcaugaaguagcccacaggcagcugcccuccagugggcagccugugguuuugcuuuuugcc

SEQ ID NO: 390490 - RNA, 90 nt, Homo sapiens
ucaguuuucacucugucaauauguaauaacugaaucugucuuuguggugaggauucagugaguuaacauauuugaagugcuuaaaaauga

SEQ ID NO: 390491 - RNA, 57 nt, Homo sapiens
cagcuugugguauugcugguuguauuuauucaguguuaucugcaaacacacaggcug

SEQ ID NO: 390492 - RNA, 99 nt, Homo sapiens
ugugaaagggacaugagauuugggaggggucaggaguggaaugauaugguuaggcuuuguguccccacccaaacaucaccuggaauuguaauccccaua

SEQ ID NO: 390493 - RNA, 86 nt, Homo sapiens
gucugagggggaucuuguggugcuuuuacgugggccugccauggcugcccauguaacaaucagcaugcccuuccccgcucugaggc

SEQ ID NO: 390494 - RNA, 99 nt, Homo sapiens
agcugagccuucucuuuggaaaccuuguagccacagguggcgaggaaauuuaagagugcuuggguggcuugauggcacaagguuucugaacaggcagcu

SEQ ID NO: 390495 - RNA, 68 nt, Homo sapiens
ggguacaugugcacaacgugcagguuuguuacauauguauacaugcgccauguuggugugcugcaccc

SEQ ID NO: 390496 - RNA, 62 nt, Homo sapiens
ugaccugaaauaugagggugaugcccagagccaguuuuggcagaugacccucaaguugguca

SEQ ID NO: 390497 - RNA, 58 nt, Homo sapiens
aagugcagggacuaagacaugagccacugugcccggccuaugccucaguuuuguacuu

SEQ ID NO: 390498 - RNA, 85 nt, Homo sapiens
caaagaaagucuaaaaguauuuugucaaugggaauuuguuuuagcacuuccaagauguuauuccauugucuuuugacuuucauug

SEQ ID NO: 390499 - RNA, 129 nt, Homo sapiens
gcucacauuccuagcagcuaugcguuguggcugagcacauggccacuaggaauaaagacugcauuucucagcuuucuuuguagcuaggaguggucaugugacucaaugcuggccaauagggaugugagu

SEQ ID NO: 390500 - RNA, 80 nt, Homo sapiens
gcccggacugcugucacaguccagccuaguauguauaccauaugguuugauacuggguguggacaaaguagucagugggc

SEQ ID NO: 390501 - RNA, 62 nt, Homo sapiens
auaugcacuauggaaguagcucauguaaauaaaaacugaauaaucauguccauaguguauau

SEQ ID NO: 390502 - RNA, 95 nt, Homo sapiens
ugccaacacauugauuuuggacuucuagccuccagagcuguaagacaauauauuuucuguuguuugaagccagaaagauaucauguuauuuggca

SEQ ID NO: 390503 - RNA, 59 nt, Homo sapiens
ugucauuggacuucuuucaugguggcuuagggcuccuagagagaguguuucaagagaca

SEQ ID NO: 390504 - RNA, 70 nt, Homo sapiens
gcuucucucauucaaauuaaagugaauggaagcccauucccuuagacuacuaauaugagcugggagaggu

SEQ ID NO: 390505 - RNA, 67 nt, Homo sapiens
uccaggcuguagguaaauuuaaacauuuucugguuuacaauugguugaguuuaucuaaagaccuggg

SEQ ID NO: 390506 - RNA, 62 nt, Homo sapiens
gcuuggcagcacgcaguccagaggcucccggagccaggcccucugcggauguuugcugcggc

SEQ ID NO: 390507 - RNA, 130 nt, Homo sapiens
uucccaaagugcggagauuacaggugugagccaucgugucuggcccugaaugcuguuauuauucccuuaaaaaaguuucaguacuggccaggccugguagaucacuccuguaaucccagcacuuugggag

SEQ ID NO: 390508 - RNA, 76 nt, Homo sapiens
gacaugauuaaguauuaugugcugcauuuugagacaauccaaaaugugaaagccuauaacgacugacuguuguguc

SEQ ID NO: 390509 - RNA, 59 nt, Homo sapiens
gaaaaaugugagccuacuauaauaguauagccuacuguaauaguaggcucacauuuguc

SEQ ID NO: 390510 - RNA, 61 nt, Homo sapiens
ucaguauguaguaugaagaagaugcuugcucuguaagugugcacucuaggcuagauauuga

SEQ ID NO: 390511 - RNA, 73 nt, Homo sapiens
gcacaacuaugagucaauuaaaccuguuuccuugauaaauuauccagucucagguaguucuuuauaguagugu

SEQ ID NO: 390512 - RNA, 62 nt, Homo sapiens
caugggcacugacuugcauucgccuguucaaagacaaacaugagugcugcuucgugcgugug

SEQ ID NO: 390513 - RNA, 59 nt, Homo sapiens
cugagcuuguuuuccugcaacuagauggucccaucugggggugauggagacagugacag

SEQ ID NO: 390514 - RNA, 129 nt, Homo sapiens
ucacugugggaccuuagaccagacacuucaccucucugagcuucaguuuccccucuguaaagggagggcaaaauugcaguuaggaugaugguuuaucuguagccugguuucuucccuugcacacugugg

SEQ ID NO: 390515 - RNA, 58 nt, Homo sapiens
guuugcagaucaugaagaacccuauacaccauaguaauggcuuuuuacuucugcggac

SEQ ID NO: 390516 - RNA, 92 nt, Homo sapiens
cuucuagaaaucaugauccauuuagagucuugcaauuuuaccaagcagagugagugaaaugccuugagauuuugacucgucuuuucaagagg

SEQ ID NO: 390517 - RNA, 63 nt, Homo sapiens
guggaguacugagggucacuuauuuauuuauuuauuuauugaaacggagccucagucugucac

SEQ ID NO: 390518 - RNA, 70 nt, Homo sapiens
gagcaucaugauuuccaguuauuauaccucuuaaaacaaguuuaaggaucauggcugggcgugguggcuc

SEQ ID NO: 390519 - RNA, 61 nt, Homo sapiens
ugggcauaauuacagcauuguuuuuggaagauuccauguaauaaagucugaagugugcuua

SEQ ID NO: 390520 - RNA, 77 nt, Homo sapiens
uaguuuacugagaaugaugauuuccaauuucauccaugucccuacaaaggaaaugaacucaucauuuuuuauggcug

SEQ ID NO: 390521 - RNA, 76 nt, Homo sapiens
auuuaggggcacacuucgguuagcauuguucugaaugaauguaugacucaaugcaggucaagauguacccuuagau

SEQ ID NO: 390522 - RNA, 86 nt, Homo sapiens
uguaugauagguuauuauggcauuauuguucuugcuggauauucauggaaguaggaauuuaauguaugauaauacaucaauguaca

SEQ ID NO: 390523 - RNA, 78 nt, Homo sapiens
augcuuggaaccaaaaguauuuuggaucucagauuuucucagauuugggaaugugcauuauacuuacagguuaagcau

SEQ ID NO: 390524 - RNA, 58 nt, Homo sapiens
cugcuugaccugcuguucucacauccagcucuguaugugagaacaacaggucaagcag

SEQ ID NO: 390525 - RNA, 78 nt, Homo sapiens
ucugguuucguguguguguguguguguguguguguguguguguguguguaucaugcacaugcauagguaugauacaga

SEQ ID NO: 390526 - RNA, 86 nt, Homo sapiens
ggcuaacacuaucugccuuacagggaugccaugagaauuaaauggaauaaugccucugaggaagauuguguuuucuaaaaauggcc

SEQ ID NO: 390527 - RNA, 61 nt, Homo sapiens
guggugagaaaagaugucuuuguuccauaucuuugcaaacaagcuucuaguuucucaccau

SEQ ID NO: 390528 - RNA, 56 nt, Homo sapiens
gagggcguguuaucaggagagcaaagaccccucuuccucuuugaggcaucgcccuc

SEQ ID NO: 390529 - RNA, 67 nt, Homo sapiens
gcaguguugggauggaaauuuguaccccauccacacagaugggcaucuucccaucccaagacaaugc

SEQ ID NO: 390530 - RNA, 76 nt, Homo sapiens
ugaauaggacugagagucacagugaauguggcaugcaugccugugucaugugacauaugugagucucggcauguca

SEQ ID NO: 390531 - RNA, 107 nt, Homo sapiens
ggaggcugaggugggaggauggcuuggaccuggaagauagagguugcagugagcugagauugcacuacugcacuccagucuaggucauagagccagaccuugucucc

SEQ ID NO: 390532 - RNA, 57 nt, Homo sapiens
cucuaaagggaagugcguucuuuucuuuuagacaacagaaaguucuucccuuuggag

SEQ ID NO: 390533 - RNA, 102 nt, Homo sapiens
cauuccuaccuuaaucuucagagauccuugaaauguuuagaaguuuggauuugauaguacauccaaagcugaagcauuucuaguucuuucaagcagggaaug

SEQ ID NO: 390534 - RNA, 103 nt, Homo sapiens
agacauugagcaaaaugugauguauggagacaaauaaaggagaguccugauaggaccucuuguuuugaucuuuacuuaauacacguuucuuugcuaugugucu

SEQ ID NO: 390535 - RNA, 100 nt, Homo sapiens
gaggcaggagaauugcuugaacccgggaguuggagguugcagugagccgagaucaagccauugcacuccacccugggcaacaagagcaaaacuccgucuc

SEQ ID NO: 390536 - RNA, 72 nt, Homo sapiens
uuaucucacaugaauugucuuguuccagagggcuauugccuguggaugcaguggacauuuuauuuuagauga

SEQ ID NO: 390537 - RNA, 72 nt, Homo sapiens
ggccauuccuaaaccugacagguagcaaagugcacagccacugggaugccugagccagguuuuaggagagcc

SEQ ID NO: 390538 - RNA, 65 nt, Homo sapiens
uuguaauguuaggguguccauguuagaccuuuccugccuucucuugugggcauucaauguuauaa

SEQ ID NO: 390539 - RNA, 63 nt, Homo sapiens
cacugagcugauagaauuccaguuagaaagcaaagaaacuuggcauuuuaguuagcuucagug

SEQ ID NO: 390540 - RNA, 112 nt, Homo sapiens
gacauugggaaacugucaugugaguugcuuagucaugaaucacugauuggaauaugguucuucagugcuuccccuggcuaaagcacaggcucaaagcuauguuguccauguc

SEQ ID NO: 390541 - RNA, 78 nt, Homo sapiens
uguaauuuauuagcacauuuccagcacauggcaaucaaucaaugaaaguuuguuguuguuaauguuguuaguaucaca

SEQ ID NO: 390542 - RNA, 73 nt, Homo sapiens
uaggccugccuagauguuguagggggugagucuuuuucaaacuggccccacugugauuucuagguauagccug

SEQ ID NO: 390543 - RNA, 64 nt, Homo sapiens
uuugaaucugaaacucugacauugucugugacuauuucgaaggcaaugugagaguuuauucaaa

SEQ ID NO: 390544 - RNA, 107 nt, Homo sapiens
gcauuggugguuauagucuguauaacuauagaugauuauuacauucauuguuuauuuauuuauguauguaguagauauuuauggaaaggcuaugacacggcagaugc

SEQ ID NO: 390545 - RNA, 59 nt, Homo sapiens
auuucuccuaggaguaucaauacaagguguugacaacugauuaacuccuuuagagaagu

SEQ ID NO: 390546 - RNA, 94 nt, Homo sapiens
auuccuuucuugugauaauugaaaucauuucaauucauuuccuucuugguuggacagaaacauguuuucaguagugagcaaaucuugagggaau

SEQ ID NO: 390547 - RNA, 62 nt, Homo sapiens
ugccugaaaguuauucaggggcaaguuguuuaauuuccuugcaacuuugugauuuuaaggua

SEQ ID NO: 390548 - RNA, 129 nt, Homo sapiens
ccuuggcuucucaauguguggggaauauaggcaugagccaccccacuggcuauaaaaaguaauuuuaaaaauaguuaggccagaugcgguggcucacaccuauaaugccagcacucugggaggccaagg

SEQ ID NO: 390549 - RNA, 89 nt, Homo sapiens
uacugauaugcaggaugugguauucacucugugcagcuuaaugggauaucugacagaugacugccacuguagaagcaugaucuucagug

SEQ ID NO: 390550 - RNA, 128 nt, Homo sapiens
aucuccugaccucgugagccaccugccucggccucccaaagugcuggaauuggccgggcgcgguggcucacgccuguaaucccagcacuuugggaggccgaggcgggcgaaucacgaggucgggagau

SEQ ID NO: 390551 - RNA, 67 nt, Homo sapiens
auaugugacugauggagaauaugugauugauggagaacuccugaacauuaguccuauagucacauau

SEQ ID NO: 390552 - RNA, 65 nt, Homo sapiens
cauugucaggcuaggcuggggcauuacaguuuccuuuagcacccucuccuaguccugccaugaug

SEQ ID NO: 390553 - RNA, 59 nt, Homo sapiens
auguauuaugugguugggagaauaauuucuguccccauucucccaagaugcucauacau

SEQ ID NO: 390554 - RNA, 57 nt, Homo sapiens
gggugcuaugauguaagucuuuggucacuuuagccauauuugcauuauggagcaccc

SEQ ID NO: 390555 - RNA, 65 nt, Homo sapiens
agugagugaauucucaagagagcugaugguuuuaaaguguggcacuuccucguucuccacucacu

SEQ ID NO: 390556 - RNA, 103 nt, Homo sapiens
ccaugagcaaguacuuccaccucucugagcaucaguggccucaucucagaagacugcugggaagaguaaccaggaugcugggugugaagcuccuagcacaugg

SEQ ID NO: 390557 - RNA, 58 nt, Homo sapiens
guggcgagaucauagcucauuguagucuccaacuccugggcucaagugaucuuuccac

SEQ ID NO: 390558 - RNA, 67 nt, Homo sapiens
acagaauucauugcuuauuuguugguggagaaaauccuccacacauuuggucgcagaugucuucugu

SEQ ID NO: 390559 - RNA, 71 nt, Homo sapiens
uggggaucacagagcuugggaaaggaaugucaacacuggaaggcaggucugaguccaagucuguguccuca

SEQ ID NO: 390560 - RNA, 60 nt, Homo sapiens
ggcaagugucagcagcaacaccccucaccucccauuccaggguguuucucugucacugcu

SEQ ID NO: 390561 - RNA, 68 nt, Homo sapiens
cccuuacuuuacaggugaaguuaugaagcuauugugauacucuauugccucuuuuguaaaaguggggg

SEQ ID NO: 390562 - RNA, 56 nt, Homo sapiens
uuauaggcaggugguguagaugggagcaaacugaugaaccauaaagaugccuguaa

SEQ ID NO: 390563 - RNA, 97 nt, Homo sapiens
ugauuguuuuuuguguauguugggagucacugguaaguuucacucuuuugcguacgauauccaguuuucccagcaccauuaauugaagaaacuguca

SEQ ID NO: 390564 - RNA, 56 nt, Homo sapiens
guggcacaauuaaguagcuauuagguuggugcaaaaguaguugcuguuuuugccau

SEQ ID NO: 390565 - RNA, 57 nt, Homo sapiens
aucacagcccuccucuuggaugucuccacaucagggccucaggaugaguguuguggu

SEQ ID NO: 390566 - RNA, 60 nt, Homo sapiens
uguuaauugaaugcagaugccagggaggagcaacuuccagggcaugugcaucaagagaca

SEQ ID NO: 390567 - RNA, 91 nt, Homo sapiens
ucucaguggcauacaugggaucuauuagguuggugcaaaaguaauggcagaaaccaccauuacuuuugcaccaaccuauagacuacuaaga

SEQ ID NO: 390568 - RNA, 63 nt, Homo sapiens
gcuaucugguguuuuucucccucgucguuguaaucaggcaugauugaaaaagcacuagguagc

SEQ ID NO: 390569 - RNA, 76 nt, Homo sapiens
uugcuugaacccaggaggcagaaucugcagugggccaagaucaugccacuguacuccagccugggugacagagcaa

SEQ ID NO: 390570 - RNA, 86 nt, Homo sapiens
gcuccuggcugaccccugagaucgaaucaugcuguuugcuaauguguggaaaguauguuuugcucucuaggaguccuccccagagc

SEQ ID NO: 390571 - RNA, 88 nt, Homo sapiens
ggcaggaagccaacuugcaaacaucuuguuucacauuucagcaauaagcccaaaaugaaagcaugaguuuucagagggaucuccugcu

SEQ ID NO: 390572 - RNA, 66 nt, Homo sapiens
uaauugccucaagugaucauggcaacuuccacuuucucuguaguuaucuucuccugaggcuaauua

SEQ ID NO: 390573 - RNA, 57 nt, Homo sapiens
aagugcaaaucuguggcugaaaggaucauauccccucguccaaacauuugccagcuu

SEQ ID NO: 390574 - RNA, 128 nt, Homo sapiens
agugcucuauuuuuuaaaaccuguacugacucauuuaauuaucauggcaagccuaugaaauagcuacuauuauuaucacaguuuugcauauggguaaaugaaggcacaaaagggaaaaauagcuugcu

SEQ ID NO: 390575 - RNA, 90 nt, Homo sapiens
ccuugugugcacugaggcaugauggcuccagaucaugacacuaaaugcugcagguaaugcuggugcugugugcccuggguguacagaagg

SEQ ID NO: 390576 - RNA, 93 nt, Homo sapiens
guggcuacagaagagagacaccuuaugcuugagaaaaggaaaauaaagaguaaagaggacuuugucuugcagcuuaggcaucagcuucgccau

SEQ ID NO: 390577 - RNA, 63 nt, Homo sapiens
aagaauuaacagugaauuucaauaugggacugauuucccuacuuggucuucucugugauucuu

SEQ ID NO: 390578 - RNA, 103 nt, Homo sapiens
ugguuuucuaauaggaaaauguacuuagguaguuuucccguauccaauccucaugacaggauugugagggagauauuacuuuauuuuacacuugagaaaacca

SEQ ID NO: 390579 - RNA, 66 nt, Homo sapiens
cacuuugcacucaguaagugggagcuguuauuauuucacggguucugugugcuugagugcauggug

SEQ ID NO: 390580 - RNA, 64 nt, Homo sapiens
cacaaaauuccagguggcgccauucacaugguggccauuaugaauggcaccaccuaggguugug

SEQ ID NO: 390581 - RNA, 89 nt, Homo sapiens
uguauuagguuggugugaaaguaauuaacgauuguugccauuaaaaguaaugguaaaaaauacaauuacuuuugcaccaaccuaauaca

SEQ ID NO: 390582 - RNA, 57 nt, Homo sapiens
uaugucuggaucgucaggaguucccugcaggcggugaugcuuggcgaugccaacaua

SEQ ID NO: 390583 - RNA, 61 nt, Homo sapiens
aagguaguuuucuuuaaugcuggaauuucaggcaauggcagcccaaagagagagcuacuuu

SEQ ID NO: 390584 - RNA, 81 nt, Homo sapiens
ucaucaaguuagagaguaucagagcgaggauuagauccaagacaugguucaauuucuggcucgauucucugaccgggcuga

SEQ ID NO: 390585 - RNA, 67 nt, Homo sapiens
cuuuuaaugagguaaaggacaauguuuugauaaguauuaaugcacauuuauuuuaccuuucugagag

SEQ ID NO: 390586 - RNA, 77 nt, Homo sapiens
cucugggcgauaaagagcuuuugaggugucaugggcuaugaaccugguacgaguucuuucugaucagccuguuagag

SEQ ID NO: 390587 - RNA, 76 nt, Homo sapiens
aucuuuaacaguguagaggccuauugguucagaguguucaauagaauuccccaagcuacuucacacuaguuaagau

SEQ ID NO: 390588 - RNA, 63 nt, Homo sapiens
caguuaaucuguagauucagcacaagcucaaucaaaagugagcagcuuuaucuguagaaauug

SEQ ID NO: 390589 - RNA, 90 nt, Homo sapiens
ugaagaacuaggugccuggaauguuccuaaagauucacuugggaaacagcuuaauauaguggacuuuggcaacagaccaacuaggcuuca

SEQ ID NO: 390590 - RNA, 88 nt, Homo sapiens
ggagaauugcuugaucccgggaggcggagguugcaguaagccgagaucgcgccacugcacuccagccuuggcggcagagcgagacucc

SEQ ID NO: 390591 - RNA, 75 nt, Homo sapiens
uagaguuaaaccuggguuggagcccugcuucagucauuuacuagcaguguggccuuagacccggccucagcuuug

SEQ ID NO: 390592 - RNA, 112 nt, Homo sapiens
agcuuaguugggugccucuggcucaaggucucucagauggcuacagucuuagcugugggccagugcugcagucaucugaagauuuuguuagaggauaaucagcuuucaagcu

SEQ ID NO: 390593 - RNA, 55 nt, Homo sapiens
cuugaaagugacagugagaaaugcauaccuaguagaacucacaguaacuuuuaag

SEQ ID NO: 390594 - RNA, 82 nt, Homo sapiens
acauuccuggagguauaauuauaggaucauugacuauuauaaggcugcuaaagcaugaugcuaaauuucuuuucaggagugu

SEQ ID NO: 390595 - RNA, 80 nt, Homo sapiens
acuuucuuaaugcaucagugguaguucuuucucccucucacucagcaagguaagaaccaagugguguauuucuggaaagu

SEQ ID NO: 390596 - RNA, 98 nt, Homo sapiens
ggcaggagaaucgcuugaaugcggcaggcggagguugcggugagcugagaucgugccauugcacuccagucugggcaacaagagggaaacuccguguc

SEQ ID NO: 390597 - RNA, 118 nt, Homo sapiens
cucugugauauuaggaguuauaucucccuaggauauuacaaaucauaucacaggguguacacccacugugguauuagguguaguaucucccuaggauauaacaaauaauaucacaggg

SEQ ID NO: 390598 - RNA, 82 nt, Homo sapiens
augugcacagugguuaauggcacagacucuuggucaaguugugcaacuuugcccugagucugagcccucucuucugugacau

SEQ ID NO: 390599 - RNA, 69 nt, Homo sapiens
agacacauuccaagcauuacaaugugaugcuacuccaucacauuguuauguaaauguuuugaaguguuu

SEQ ID NO: 390600 - RNA, 66 nt, Homo sapiens
uguuguugguucuguuuagaugcuggauuacauuuauugauuugcauauguugaaccagccuugca

SEQ ID NO: 390601 - RNA, 75 nt, Homo sapiens
uggggaagaaaaaacuagguuuguggccaaaaguaaucauauaauaggccugauaagccuuuucuuucugcccca

SEQ ID NO: 390602 - RNA, 62 nt, Homo sapiens
auggcugggguccuguggaguucuaguaaucuucuuacgauaauaaagcaaccuuaugccau

SEQ ID NO: 390603 - RNA, 58 nt, Homo sapiens
agguguuuuccuuucuguugcugucauggucauugcaaacagugcugaacagacaccu

SEQ ID NO: 390604 - RNA, 56 nt, Homo sapiens
gugauuucuccagugauucuuugcuuaacgacagagauacauucugagaagugcac

SEQ ID NO: 390605 - RNA, 83 nt, Homo sapiens
uggucagacuugucuagaacuucugaccuuaggugagccgcucaccuaagucaccuaagugcuaggauuacaggcaugagcca

SEQ ID NO: 390606 - RNA, 56 nt, Homo sapiens
uacagcugcaauaaugccagauacuuuaucaggcaucugguauuacugcaacugua

SEQ ID NO: 390607 - RNA, 77 nt, Homo sapiens
guuccugagcugggaagucaauauuucgcaccucaggcccugcugaguggaagaccagacuuuccaacaucaggaau

SEQ ID NO: 390608 - RNA, 120 nt, Homo sapiens
uauaguuguucacugagauucuucuuauauaugucaacaguguuuuggguuuucuggcccuaucagaggaauuacggagauuguauguguaagagguuuccugaaguggaauaaccugug

SEQ ID NO: 390609 - RNA, 76 nt, Homo sapiens
guucuauggucuuuaguugaaacaugugguagugacugcgauacugcuauaagaggacagaugaagauuacagagc

SEQ ID NO: 390610 - RNA, 56 nt, Homo sapiens
uugggacccuguccuguaacaauagcgucucacuguguugcucagauuggucucaa

SEQ ID NO: 390611 - RNA, 129 nt, Homo sapiens
cuuaauauguaaaguaaaaauuaugcaucugugcaaagucuuagaauuaugaauuaaaaugucagcauuuugguaaucccuagugucuagacuguuuccuuuuugugugugugcuuacuuuauaaugag

SEQ ID NO: 390612 - RNA, 100 nt, Homo sapiens
agccauaaaaaagaaugggcucaugucuuuugcagcaacauggaugaaacuggaggacacuucauccauguugcugcagaagacauguaaacaaugugcu

SEQ ID NO: 390613 - RNA, 65 nt, Homo sapiens
guuuuaggguacaugugcacauugugcagguuaguuacauaugaguacaugugccaugcuggagc

SEQ ID NO: 390614 - RNA, 81 nt, Homo sapiens
uacauucaaaggugagguugaaggacauuuuuauugauacuaauauaugaauaaaacccaaucaacuucaaguaaaaugug

SEQ ID NO: 390615 - RNA, 60 nt, Homo sapiens
ugaaagcucuguuuucagcaccuccagguuugccagugagguguuguugaggagauuuca

SEQ ID NO: 390616 - RNA, 89 nt, Homo sapiens
gcucagagcuucaaguaagaagugggcauaaaaauccaauucuggccucauuuacucucauuuauuuacucuuuuuuaggucuuugagc

SEQ ID NO: 390617 - RNA, 119 nt, Homo sapiens
cuccugaacggugaucauucuuuuucuaacauuuucugagugcuaaccagguacgaggcauuacuguuagcacaucccuaaaaugcugugggguaggaacuauuauugucacagaggag

SEQ ID NO: 390618 - RNA, 58 nt, Homo sapiens
ugaugagauaaaccaucucuuaagugcagaaauauuugaugaugguuuccuuuccuca

SEQ ID NO: 390619 - RNA, 58 nt, Homo sapiens
cuccauccagaaucaauagcaguuaucauucauuuugauguguuuguuucuggaggag

SEQ ID NO: 390620 - RNA, 72 nt, Homo sapiens
gcuaagcuucauacaguggcugcacuccagccaguaaaaaggcuggagugcagucacuguguguagcuuagc

SEQ ID NO: 390621 - RNA, 76 nt, Homo sapiens
cauguaggguaaguuccugacauugccauggcauuuguaaacugucauggugcuagcgggaaugucucuuagcaug

SEQ ID NO: 390622 - RNA, 68 nt, Homo sapiens
gauggggugaugggcagaguuaaggucuagacagcauuuugagaucuuugcuguccucaccaugaguc

SEQ ID NO: 390623 - RNA, 68 nt, Homo sapiens
uguauuaaggcccauucuaugaagcaguaauugagaaaugauugguuacacagacuggugcuuauaca

SEQ ID NO: 390624 - RNA, 74 nt, Homo sapiens
uuuuguuacugcagcaaagccuaccccauccugacugguauguaggaugggguaggcuugcuguaguaacaaaa

SEQ ID NO: 390625 - RNA, 57 nt, Homo sapiens
gccuagagguugaggcugcagcgagccaugauugugcuuuugcacuccagccugggu

SEQ ID NO: 390626 - RNA, 95 nt, Homo sapiens
guuaaggcagggguuuaagugucagaguugcuaaugacacauuuuuuaguagauguugaucauugguuuuuucacauuuucauucaggcuuugac

SEQ ID NO: 390627 - RNA, 99 nt, Homo sapiens
gaggcgggagaaucgcuugaacccagauggcagaguuugcagugagcccagaucgcgccauugcacuccagccugggugacagagcgagacuccaucuc

SEQ ID NO: 390628 - RNA, 82 nt, Homo sapiens
uugagcaugcagcaggauuggagccucucugaaccuauucugguuugggggcugcccaauucaugaauuguuuucugcucaa

SEQ ID NO: 390629 - RNA, 86 nt, Homo sapiens
cuccugcugggacccgggaggacaaauaggugcagccccccuagaaugguugagccaaggauugucuuuccugguuccugaaggag

SEQ ID NO: 390630 - RNA, 97 nt, Homo sapiens
ggaguuuugcucuuguugccuaggcuggaguucaguggcgcaaucuuggcucacugcaaccuucaccucccaggucuccagguucaagcgauucucc

SEQ ID NO: 390631 - RNA, 122 nt, Homo sapiens
ucucacaguuuccauuugugaggaguuggggcaggcuuagcuaggucuuuggcucagggucccacaaggcuacaaucaaggcacuagcugagcugcauucucaucaaaggcuggacugggga

SEQ ID NO: 390632 - RNA, 55 nt, Homo sapiens
cauacaugugcuugucuuaugccuuuaaagcacuguauaugaagagucaugugug

SEQ ID NO: 390633 - RNA, 68 nt, Homo sapiens
uuggauaucauuggccauguuucaaucgaauggagccacugggccccaacacuggcuuugagauuuag

SEQ ID NO: 390634 - RNA, 64 nt, Homo sapiens
auugugaauagugccgcaauaaacauacaugugcaugugucucuguagcagcaugauuuauaau

SEQ ID NO: 390635 - RNA, 64 nt, Homo sapiens
gugucagcaauacugacagcauuaguuucauggucacagagauuuuuguuauuauuguuaacau

SEQ ID NO: 390636 - RNA, 82 nt, Homo sapiens
augccuuuauuucuauuucuugcuuaauuucucggcuaaaaccuucaguguaauguugaguagaagugaagauagugggcau

SEQ ID NO: 390637 - RNA, 89 nt, Homo sapiens
auuauaugguuuuugucguugguucuguuuauaugcuggauuacauuuauugauuugcauauguugaaccagccuugcaucccagggau

SEQ ID NO: 390638 - RNA, 58 nt, Homo sapiens
acccaaaaggcgaagguugcagugagcugagaucaugccacugcacuucagccugggu

SEQ ID NO: 390639 - RNA, 59 nt, Homo sapiens
agccuugaacuccugggcucaagugcuccuugugccuuggccuccuugugucuagggcu

SEQ ID NO: 390640 - RNA, 84 nt, Homo sapiens
cccaugucugauugguucucgguguuauuuaucuggaugccuuaaaauuucagaucaguuccacaagaacucuugagacuuggg

SEQ ID NO: 390641 - RNA, 56 nt, Homo sapiens
aggcaugagaaucacuugaacccgggaggcagagguuccagugagccuagaugccu

SEQ ID NO: 390642 - RNA, 105 nt, Homo sapiens
gauaaagguccaauuguccaauuugcauggagauauacaguuuuuccaguaccguuuauugaagagacuguccuuuccccauuguguauucuuggcacccuuguc

SEQ ID NO: 390643 - RNA, 78 nt, Homo sapiens
gauucaauguugagagauugugugauuccaauaauuucucuguuuuguuuggauuuucuaauuucugugcauaggguu

SEQ ID NO: 390644 - RNA, 130 nt, Homo sapiens
gauucucuggagggaguacucucagaccucagcaaauuguccuauugguuuaagccauaaguuagcucaugcugguaccaagcaccgauaggagauuugucaaaggucaggggcaccuccacucaggauc

SEQ ID NO: 390645 - RNA, 90 nt, Homo sapiens
aaaacacaucagauucucugcccuacagacucagugaccccagcaucauucuagacugaagaaaacgagggcaagaagucuuguaguuuu

SEQ ID NO: 390646 - RNA, 69 nt, Homo sapiens
uguggugagcugagaucgugccauuguacuccagccugggcaacaagagcgaaacucagucucaaaaca

SEQ ID NO: 390647 - RNA, 59 nt, Homo sapiens
gcacagagcaaugagcuacggucugguuuaaguagugacaagaccugauuguucugugu

SEQ ID NO: 390648 - RNA, 58 nt, Homo sapiens
ucauuuuuuaacuggccuauuugguuuaugcagaagacauauggguguuggaaaauga

SEQ ID NO: 390649 - RNA, 64 nt, Homo sapiens
uuccucuagacugucgguuucucagacuuuccuuguuuuugauggccuugacaguuuggaggag

SEQ ID NO: 390650 - RNA, 68 nt, Homo sapiens
uuugauguccaccucagcccacccuccaaacaugauuuaauugggcuggguuuggcaugggcaucagg

SEQ ID NO: 390651 - RNA, 56 nt, Homo sapiens
uuggacuucuggacuccagaaccgugagaggauauacuucugguguuuuaagccaa

SEQ ID NO: 390652 - RNA, 55 nt, Homo sapiens
uuuuguuuggaaugcaguggcugcagacugcacagcucagugcacccccauaaaa

SEQ ID NO: 390653 - RNA, 57 nt, Homo sapiens
agaauugggaguguccugauaucccgauaucuugagaacagaagcauuccuaauuuu

SEQ ID NO: 390654 - RNA, 89 nt, Homo sapiens
aaguugauucuugcauuucuucuacuugguggauuuaauauuugcaaaucaccagugucagggaacugcuuacuuuggaggaaucacuu

SEQ ID NO: 390655 - RNA, 74 nt, Homo sapiens
gauuccauucgauuuuauucaaugauuccaauggauuccauuggaaucaucaacgaaugaaaucgaauggaauc

SEQ ID NO: 390656 - RNA, 61 nt, Homo sapiens
auaucaguauggauucauggauuccucuuguauucaaugaguuauaaucugcuacugauau

SEQ ID NO: 390657 - RNA, 59 nt, Homo sapiens
ugagaccgaguuuugcucuuguugcccaggcuggagugcaauggcacgaucuuggcuca

SEQ ID NO: 390658 - RNA, 59 nt, Homo sapiens
auucagaggggcagcugucuugggccccagugguuucccagaucccuguuccucugaau

SEQ ID NO: 390659 - RNA, 81 nt, Homo sapiens
ccaguguguaugguuggcagguaaggagugggagccugguucgccagcccugacuccuugccuccuccugggagucacugg

SEQ ID NO: 390660 - RNA, 62 nt, Homo sapiens
gcuuauuuauuuucucguugcucacagcucuggagcugucaucauuugagagaagaaagagc

SEQ ID NO: 390661 - RNA, 61 nt, Homo sapiens
acugagaucuuuaaauaaauaaauggaauauauaccauggucauggguuggaagacucagu

SEQ ID NO: 390662 - RNA, 86 nt, Homo sapiens
gggggcugcucaagguggccuggaucuucccgucaaguucaaagcguugacaggaugcucagggcccaccgccuucaucacccccc

SEQ ID NO: 390663 - RNA, 104 nt, Homo sapiens
uuuuaauuugagggaucauagucauugucccucaaugacuaugaucccuuuuaauuggggucauagacauugagggacaaugacuaugaucccucaaauuaaaa

SEQ ID NO: 390664 - RNA, 79 nt, Homo sapiens
acagguagcaccagugcucuucucaacauuuguuaucacuaaugauagaagccuuuggaagagcaaaggguuacucugu

SEQ ID NO: 390665 - RNA, 123 nt, Homo sapiens
uuuugguugggcauuuugcaugggcgauaguauauucuuaguuggaaugggauaaggagcccugaaugcuuuuuaaaauuccaugcuaaaacugugaauugggccuaauggaagccccuagaa

SEQ ID NO: 390666 - RNA, 68 nt, Homo sapiens
aaacaagaguuuauauuggcaauccuggggacuuacguuuguggcauuguccaauaaaauuuuuguuu

SEQ ID NO: 390667 - RNA, 57 nt, Homo sapiens
gcuaacaaguuucuugguucuccagcuugcacguggccuauuaugagacuucuuagc

SEQ ID NO: 390668 - RNA, 104 nt, Homo sapiens
gagaccugggacuggcuggggucaagggcucauguuuuugggggugcaccuagcccaggccugccuuauuccaacugagcucuccuccccaccuucccauucuu

SEQ ID NO: 390669 - RNA, 66 nt, Homo sapiens
agcauuuggguuuuacaucaggcuaaggaaaaucuuccauaucccagauuaaaaaucuagguugcu

SEQ ID NO: 390670 - RNA, 57 nt, Homo sapiens
aagggcuguacccggcuggcugaucauagucgcuugcccaguagcaguacaucccuu

SEQ ID NO: 390671 - RNA, 57 nt, Homo sapiens
uggucaguugugccucaauuccaaagggaggaugguauaaugaggcaugucugacua

SEQ ID NO: 390672 - RNA, 57 nt, Homo sapiens
gucccacuggucaauacacaaaaagccaaucagugaguugaguauugccagggaggc

SEQ ID NO: 390673 - RNA, 98 nt, Homo sapiens
gggacugugcaggagaaguuuugaugcacuuguaggacauuaguguuccaugagaugcaucaaagcugccucugcuaaaacugaaaauggguggucuc

SEQ ID NO: 390674 - RNA, 79 nt, Homo sapiens
ccaugaaugguuuacaaguguaaucuuuucuggagaagagacuagguauuagguuacaucuugaggaaucuucccgugg

SEQ ID NO: 390675 - RNA, 75 nt, Homo sapiens
uccugcgguuugcaugggagcugggugaggccugugacugccggcuuuccccgacuucccugacaaccugcauga

SEQ ID NO: 390676 - RNA, 72 nt, Homo sapiens
uguacccuaacacccuucagcuuucuuagcucagaggcauuuugagguauggauaucuggagaggaaguaca

SEQ ID NO: 390677 - RNA, 72 nt, Homo sapiens
aggccauauuaauuacacaggaugagaauguuuacaccauuaaguucuacuccaguguuauaauaugcgucu

SEQ ID NO: 390678 - RNA, 115 nt, Homo sapiens
cuucagauauacgaguuucuaccacucauuggucauuucuuaacuagagugaacaaaauuguuggcuuuuuaaggaaauugccugucugguggguaaagcguaucuauuuguaag

SEQ ID NO: 390679 - RNA, 63 nt, Homo sapiens
caguucagcgcauucugauuucaagaagaguguccuucagauggaauacaugucgcugagcug

SEQ ID NO: 390680 - RNA, 63 nt, Homo sapiens
gaaugggcugacauuaaguaccguuaaacuccuaggacagugacuuucuguggcaguccauuc

SEQ ID NO: 390681 - RNA, 64 nt, Homo sapiens
gauuuaggagugaugcagaguauaaaaucucaaauuaaaagugaagcugagucauuccuggguc

SEQ ID NO: 390682 - RNA, 68 nt, Homo sapiens
ggguacaugugcacaacguguagguuuguuacauauguauacaugcgccauguuggugugcugcaccc

SEQ ID NO: 390683 - RNA, 82 nt, Homo sapiens
ccaugcuuguuaauacucaguccuggugaggcugagauacaaggagucucacuuucauggguagcugguaugcaagcacugg

SEQ ID NO: 390684 - RNA, 58 nt, Homo sapiens
uggagugcgagggugaaacuuuauucagaaaaacuugucguuucaaacuuacauuuca

SEQ ID NO: 390685 - RNA, 64 nt, Homo sapiens
cugugaggaaugucaaugguaguuuaaugaaaauagcauugaauccauacauuucuuuaggcag

SEQ ID NO: 390686 - RNA, 58 nt, Homo sapiens
ugagcugagaucgugccauuguacucuagccucgacaacacagcaagacucagucuca

SEQ ID NO: 390687 - RNA, 80 nt, Homo sapiens
agaugagugagaaguuuaguuccgguuucuuauucuuccgcuguagaguucauauccuggaacugaauuucuuagcauuu

SEQ ID NO: 390688 - RNA, 70 nt, Homo sapiens
ggugcaagcuguugguggauguaccauucuggagucuggaggaugguggcccucuucuaacagcuccacu

SEQ ID NO: 390689 - RNA, 97 nt, Homo sapiens
uuauuuguuuauuaucuguuggguuauugcuggaucccuagucucuagaacagcacuuguuuucauaguagucacuuaauaaauaauacauggauga

SEQ ID NO: 390690 - RNA, 96 nt, Homo sapiens
uugguaguguguccaaauauugguuaaauauuaugugaguauuuacucaggcucuauuuacauaggucuaauguuuuucaaggauuucacugccaa

SEQ ID NO: 390691 - RNA, 70 nt, Homo sapiens
auucuguauaauuauagcuguucaggguauuuugguuuugcauggauaucccagugaugauugauaggau

SEQ ID NO: 390692 - RNA, 56 nt, Homo sapiens
ugaugguuuuaaaaagaggaguucccuuguacaacucucucuuuuuccugcucuca

SEQ ID NO: 390693 - RNA, 79 nt, Homo sapiens
guauagaguuuuguauguaauugaaguuaaguuguuuucagcuugaaauauacaauuauaauuauaagaaguuuuaugc

SEQ ID NO: 390694 - RNA, 105 nt, Homo sapiens
gauucuccagggaccuuguugccuccuggcucagugggguccugguucucccagugggagucagaggcccacuguagcuugaugccuaaggagagcuggaggauc

SEQ ID NO: 390695 - RNA, 59 nt, Homo sapiens
cuaaauuuuuccuuacuuucuguugaauaauaguauuuggaauuuagggaaugauuuag

SEQ ID NO: 390696 - RNA, 82 nt, Homo sapiens
aguuuuaggguacaugugcacaacgugcaaguuuguuacauauguauacgugugccauguuggugugcugcacccauuaacu

SEQ ID NO: 390697 - RNA, 99 nt, Homo sapiens
cugucaaguccagugggggauuaugggcauuuguuaacuaacuacaugaauauauaguguggcagaugcucuuggugcccauccacaugccuuuggcag

SEQ ID NO: 390698 - RNA, 57 nt, Homo sapiens
uuggcacuugauaauauucugggcuccuuuguuucccaguuuguuaaacagggucag

SEQ ID NO: 390699 - RNA, 57 nt, Homo sapiens
gaucuaguauaugaggugaagccaagcagaauagccacaucaccuugaugcuggguc

SEQ ID NO: 390700 - RNA, 130 nt, Homo sapiens
cugccucagccucccaaagugcugggauuacaggcaugaggcacugcgcccuacugaggguucuuuauaaauucuaggccaggcacaguggcucaugccuguaguccuagugcuuugggaggcugagcag

SEQ ID NO: 390701 - RNA, 72 nt, Homo sapiens
ggccuucuuaaguauuaggccccaggcugggcccgcuggcucacgccuguaauccuagcacuuugggaggcu

SEQ ID NO: 390702 - RNA, 77 nt, Homo sapiens
uuuguuuuguuuugagauggagucucgcucuguugcccaggcuagagugcaauggcaccaucucggcucacugcaaa

SEQ ID NO: 390703 - RNA, 109 nt, Homo sapiens
gcauagaaguuaaaugacuuguucaaggucacauugcuagcauggguuagagccaggauucaaccuaaggcagugugacugcagaguccaugcucuuuaaccacuaugu

SEQ ID NO: 390704 - RNA, 76 nt, Homo sapiens
gugugucuguguaauggugcaugugugucugggagugaaguugagggcaugcauuguacuaguaugccuaccauac

SEQ ID NO: 390705 - RNA, 69 nt, Homo sapiens
auucccagccaagaacgcagcgugcuggggagcaaccuccccugagucaccugcuucucaccucggaau

SEQ ID NO: 390706 - RNA, 79 nt, Homo sapiens
ugccuggaguacaguucucuuuguugucaguuaaauagagaaccacaugccauaacauauaagagaacuguaaaaggua

SEQ ID NO: 390707 - RNA, 83 nt, Homo sapiens
ggcaauugagguaauagauaauauuuuugaggaacuuugcuucaaaaaugugauuuauuccccaaaucuuuuguauuuuugcc

SEQ ID NO: 390708 - RNA, 58 nt, Homo sapiens
gggaaagaccuuccugggguguggccuuugucuguuuugucccgggugggcuguuccc

SEQ ID NO: 390709 - RNA, 118 nt, Homo sapiens
ucagaucagcagcggcauuagauucuuauaggagcgggaacccuauugugaacuccacaugugagagcuccagguuucaugcucuuuauuagaaucuaaguaaugccuguugaucuga

SEQ ID NO: 390710 - RNA, 83 nt, Homo sapiens
ucuuaaccccuacaaaggacugaaacuggcugucagcucuggggcuugccacagucauagcagccuuuguuaacaaguuaaga

SEQ ID NO: 390711 - RNA, 97 nt, Homo sapiens
gugauugcaaaggucacuguucagauccuuauuccuuacuggcccuaaauucagacuagauuggacugagaggacuacaguguauuugugcauucau

SEQ ID NO: 390712 - RNA, 58 nt, Homo sapiens
caaggcagugugcacauaacacuguauugcaaguauuaguguaugugcaugugucuug

SEQ ID NO: 390713 - RNA, 60 nt, Homo sapiens
ugggaggcaagaguaguuaaguuaggaacagcugucuggagcuuuaccucuugcuuuuua

SEQ ID NO: 390714 - RNA, 79 nt, Homo sapiens
ucagguauuuauagcaaugcaagaauggccuaacagaaaacugguaucaggaguggggcaucgcuauaaagauaccuga

SEQ ID NO: 390715 - RNA, 68 nt, Homo sapiens
uuucaucuccuuugcuugccuuuuaccucuuucuuaagacugcagugaacaagcaaaggcaggaggaa

SEQ ID NO: 390716 - RNA, 58 nt, Homo sapiens
ggcccugcauugucaaggccaagccucagcugagguuuugcccacauguagguaugcc

SEQ ID NO: 390717 - RNA, 81 nt, Homo sapiens
cugagugguauguuuauaaguauaggagaagcugguauuccccuaauuguuacuaucuaauaaacuacccccaaaacuuag

SEQ ID NO: 390718 - RNA, 71 nt, Homo sapiens
gcuugggauuuaguuuuggacaaaaagaugcaucaggaaggugcauggacucauugaauuaagucccaggu

SEQ ID NO: 390719 - RNA, 74 nt, Homo sapiens
gguuuuggagugauaugguuauaugggaugcccauguaaacagggacccuuuaaccauggcacucagcaggacc

SEQ ID NO: 390720 - RNA, 59 nt, Homo sapiens
uuuaaaugaaguuuggaguuucauaacaaaauucugaaaauguccagauuucaauugaa

SEQ ID NO: 390721 - RNA, 59 nt, Homo sapiens
uagcugguauuaggaguuguguugccaggcaugguggcacaugcuuguaauuccagcua

SEQ ID NO: 390722 - RNA, 72 nt, Homo sapiens
ugacuccauuucuccucauuuacaauaaaucaguguuucugcagcuggacuugauaaaugaauaauggauca

SEQ ID NO: 390723 - RNA, 59 nt, Homo sapiens
gggagucaguagagcuauugucauucugaagucuuauugaaauggcuuuuccuguuccc

SEQ ID NO: 390724 - RNA, 57 nt, Homo sapiens
ugaauguaacuaaaggacuuuucauccuuuccuggagaaggggcuaguguauguuca

SEQ ID NO: 390725 - RNA, 65 nt, Homo sapiens
caguguucuguugguguuuaaucacugcagggacgccugccugauucuucacccacacuccauug

SEQ ID NO: 390726 - RNA, 58 nt, Homo sapiens
ucuauuuuguuuccagcucuacuuucagguccauccauagagcuuggcacagaguaga

SEQ ID NO: 390727 - RNA, 80 nt, Homo sapiens
agucacagauuaaugugucaaauuaauguauuuguguugguuaauauaaaugcuucuauguggcauguuuagucaagacu

SEQ ID NO: 390728 - RNA, 67 nt, Homo sapiens
uagcaaagggaaagaagggccuggagggcauugugugccgaaggaggccaguuuuuccugcuugcug

SEQ ID NO: 390729 - RNA, 60 nt, Homo sapiens
agagcaccauuuagcaaggugauauucaaaauaauugaccaccagcugggauggagcucu

SEQ ID NO: 390730 - RNA, 119 nt, Homo sapiens
uguguacacagguaucugugucuguguauaugugucuguguguaugucuuauguguacaugugucugcauguauauguuuguacauaugucucuguauauauaugugucuguguacaca

SEQ ID NO: 390731 - RNA, 130 nt, Homo sapiens
gugucagaaucaccuggugggcuuguuaaagaacagauugcugggccccagccccagaguuugauucugcaguucuaggguggggccagauaauuugcuuuucuaacaaguucuaugggaaugcugaugc

SEQ ID NO: 390732 - RNA, 62 nt, Homo sapiens
ccuaucuccaugaguaaacuaagaagcauucaaaucaacuuuuuguguuucauggaaauagg

SEQ ID NO: 390733 - RNA, 57 nt, Homo sapiens
uauagcuugauuauggugaugguuacucaacuguucauuacaaaaacucaagcugua

SEQ ID NO: 390734 - RNA, 71 nt, Homo sapiens
cacugcaguguaauuaagguugcuaaucaguugacuuuaaauugaagaaauaauccuaaauuaucugagug

SEQ ID NO: 390735 - RNA, 73 nt, Homo sapiens
gguuuguuaccuagguauacauguugcauggugguuugcugcaccuagcaacccgucaucuagguuuuaagcc

SEQ ID NO: 390736 - RNA, 87 nt, Homo sapiens
gccacuuuuuugucagguauguuccaaaggcggagcuuuccauccaaagacccacuuagaaaauaccugucauccuaaagagguggc

SEQ ID NO: 390737 - RNA, 75 nt, Homo sapiens
cacgaugcaaaugcuucacaucucuggugauuugaauugaaucacacuugauguugagcaacacaccugcuugug

SEQ ID NO: 390738 - RNA, 110 nt, Homo sapiens
uuuuguauauggugguguuuggaagaagguauuuguaauauaugucauugaugugaaaauggcagauaggauacaggacuaacuugcagcucccacuuggauggacagaa

SEQ ID NO: 390739 - RNA, 80 nt, Homo sapiens
cacauuuuugcauaaaccuacauuuucacuucucuuugaagaacaccuagaggugaguuugcugggucauaugauaugug

SEQ ID NO: 390740 - RNA, 64 nt, Homo sapiens
auuaugaauagugccgcaauaaacauaugugugugugugucuuuguagcagcauaauuuauaau

SEQ ID NO: 390741 - RNA, 74 nt, Homo sapiens
aagggacuugacuugucucagaugagacuuuggacuuggacuuuuggguuaaugcuggaauaaguuaagacuuu

SEQ ID NO: 390742 - RNA, 104 nt, Homo sapiens
auaugaacacagguaugcacaugcaugcuugaauaucugagugcauacaugcuuggauaucuaugaauguaugugcaugaaucaagucucuucugugugcaugu

SEQ ID NO: 390743 - RNA, 94 nt, Homo sapiens
ugaggcaggagaaucacuugaauccagaagguggagguugcagugagccaagccauugcacaccagucugggcaaagagugaaacucugucuca

SEQ ID NO: 390744 - RNA, 73 nt, Homo sapiens
uccuacuuuaugauaucugcaaaucaaguauugccaagcuggacaacauauucacagguaucagagauuagga

SEQ ID NO: 390745 - RNA, 61 nt, Homo sapiens
ugaggucauucugugguacccagcugggcugggcugggcuggaggacccaggauggcuuca

SEQ ID NO: 390746 - RNA, 78 nt, Homo sapiens
agaccagaggucagcaaaguucuccugcagaaggcaaaauagcaaauauuucaggcuuugcuggccaugugguggucu

SEQ ID NO: 390747 - RNA, 79 nt, Homo sapiens
ugauauuuuuugcaggcauuggaaguuuaggaaaucaauuuauucuuuuuaagcucuuuuuccuguaaaauugauauua

SEQ ID NO: 390748 - RNA, 62 nt, Homo sapiens
ugcuugugagcgaaugugugucuuguuuucagccacugaguucauggucauuugucacagca

SEQ ID NO: 390749 - RNA, 81 nt, Homo sapiens
uccaguucucuucuacuaaauugugugugacuugaugaucccuucaccuuguaggaccugguuuguaagagauggacugga

SEQ ID NO: 390750 - RNA, 74 nt, Homo sapiens
gcccccacucugcugcaacacacagcgcucugcucagggauggggcaguggagugcuguuguuacacaaggggc

SEQ ID NO: 390751 - RNA, 55 nt, Homo sapiens
uguucucaaucauaugugggagccaaagaguuugaucucauggagguagagaaua

SEQ ID NO: 390752 - RNA, 80 nt, Homo sapiens
uuggaguacagguaguauuugguuacauaaguaaguucuucaguggugauuugugagauuuuggugcaccuguaacccga

SEQ ID NO: 390753 - RNA, 89 nt, Homo sapiens
ggagaaucgcuugaacccgcgagguggagguugcagugagccaagauugugccauugcacuccagcuugggcaacaagagugaaacucc

SEQ ID NO: 390754 - RNA, 82 nt, Homo sapiens
aacucuuucucauuuaucuggggagaggguagaggucaggaugacauuuaagucacuccagguuaaagugaaggacugaguu

SEQ ID NO: 390755 - RNA, 87 nt, Homo sapiens
cuuuguucucugcuauauucccagugccaggcacugggaauaccuauguucuuaugccaggcacugggaauauagcagagaauaaag

SEQ ID NO: 390756 - RNA, 88 nt, Homo sapiens
ggaaaauugcuggaacccaggaggcagaagcugcagugagccuagaucgugccacuguacuccagccugggcaacagagcaagacucc

SEQ ID NO: 390757 - RNA, 71 nt, Homo sapiens
augagugaaugaauguuuauccuuagauuuuagaaauuaaaggagaggaacauacauuuuaaugcacuuau

SEQ ID NO: 390758 - RNA, 96 nt, Homo sapiens
cuccccaagugcaaugucgaucauggaguuggguucaaggucugugagugauuaccuuugcaucagcucuggauguggcuuugcuuauuuggggag

SEQ ID NO: 390759 - RNA, 70 nt, Homo sapiens
acaaacaaaaagggcuugaauacucuuuuuggaauauuagaagcuguauaauuaugcccugagugugugu

SEQ ID NO: 390760 - RNA, 56 nt, Homo sapiens
uuaggaauuugaaucccaguuaagccauuuacuagcuggguugccagguuacuuaa

SEQ ID NO: 390761 - RNA, 58 nt, Homo sapiens
cugauugugcagagguguaauugaaauguuuuguucaauguuacacagguauaaucag

SEQ ID NO: 390762 - RNA, 65 nt, Homo sapiens
auguguaugguuguuguagagagaacaguagaacagauuuuucuguccaggcuuacuauauauau

SEQ ID NO: 390763 - RNA, 63 nt, Homo sapiens
aauguagguggauauugcaauuagcuuccuucuuaguacugcuguugcaguauccuauauguu

SEQ ID NO: 390764 - RNA, 93 nt, Homo sapiens
aaauuaacccauauuuaguaaggcauucucaaacuaguucucgaaggguuggggguggauuugaagaaugggaacuaaaguuauaguuaauuu

SEQ ID NO: 390765 - RNA, 87 nt, Homo sapiens
auauaauaugaguauuuuacaucguguaauugacuacuugaucgauucauaaauuauauuguggugugaaugugucugauaauauau

SEQ ID NO: 390766 - RNA, 82 nt, Homo sapiens
aucaugccuucugcaugugacagcaacccccagccccuuggacaggagcucugggguugcugucacacauggaaggcaugau

SEQ ID NO: 390767 - RNA, 71 nt, Homo sapiens
ucacuucuuuugugauucuucaguuacuucaggccaucuggauguauauguguaggucacaggggauauga

SEQ ID NO: 390768 - RNA, 84 nt, Homo sapiens
cagcuuggcuacugaccugcuagggggucucuuaaccucuugguucacccucuuaaccucuuggagcgucagugcccucagcug

SEQ ID NO: 390769 - RNA, 70 nt, Homo sapiens
ugucacacgggguauguuccuuuggauauuauucauaauguccuagagggaugucaccccuuaugucaca

SEQ ID NO: 390770 - RNA, 58 nt, Homo sapiens
aaagaacaagaagacacucuggcuuuuugaguuguuagagguuuugcacugguucuuu

SEQ ID NO: 390771 - RNA, 61 nt, Homo sapiens
ugaaaugucuuuaggaggcuucuuugaaaguuauuugaugccccuagguaagacuguuuua

SEQ ID NO: 390772 - RNA, 85 nt, Homo sapiens
gaugugauuuccacacuguguaauucauucacuuacgguguacaguccagugggucuuagcaugcucgguguugacagucacauc

SEQ ID NO: 390773 - RNA, 74 nt, Homo sapiens
guuuucuccaccucuuugauguucugaaagaugggcacuguaaugucauauuaccaaacacagagaaagagaac

SEQ ID NO: 390774 - RNA, 74 nt, Homo sapiens
agggaacacuuucacacuguuggugggaauguaaacuaguacaaccacuguggaaaacagugugaagauuccuu

SEQ ID NO: 390775 - RNA, 80 nt, Homo sapiens
uuggaaauguguaaagcuuuucuuuguucagugagucuuuucauuauuuaaaauagagagcagcuuugcgguuuucucaa

SEQ ID NO: 390776 - RNA, 89 nt, Homo sapiens
uaagcucuaugagaacaggaauuucuguugguguugugcauugcuauaucaccagcaccaauaacaguuucuagcauauacuaggcuua

SEQ ID NO: 390777 - RNA, 68 nt, Homo sapiens
aaguuccaaugcacauaaaauccuccagggugcauuuuuacuuuggaagugggugugugugguaacuu

SEQ ID NO: 390778 - RNA, 101 nt, Homo sapiens
gguggucagugaggcagaggaagcagcuggccugagcgguggcgggugagggcaacgcgcugucacugggaggggcagcagucccugcuggaccugacccc

SEQ ID NO: 390779 - RNA, 78 nt, Homo sapiens
uuuucccuuucagagguagagaguuuugauucugucucuuucacagcagcaagagaucuuugccugugcccuggaaaa

SEQ ID NO: 390780 - RNA, 91 nt, Homo sapiens
ugguggccagaacauuaucacuuugauaguuuaaauggcauugaccaauguauuugaaucagguacaaguuugaagauuuucugguuauua

SEQ ID NO: 390781 - RNA, 99 nt, Homo sapiens
ggagaaggucucaggagcauauugggucagguauguguggaaaggcccuccaggcucaaauucacacugggccuacucugugcccugacuccaagcucc

SEQ ID NO: 390782 - RNA, 56 nt, Homo sapiens
cugugaacaugggagaaauggcucucagucugugcacaauuuucccuggaacauag

SEQ ID NO: 390783 - RNA, 61 nt, Homo sapiens
gagagggcgucuguauaggccuaggugaacuucaagauuuuagagcaacacacgcccucuc

SEQ ID NO: 390784 - RNA, 62 nt, Homo sapiens
ucugguagacucuguaagugaucauacaaaggcuuaaugugaugaucaccaauguuuauaga

SEQ ID NO: 390785 - RNA, 105 nt, Homo sapiens
gaggaaaagaaguucaacaucaagguauuggcagaauugguuucuucuaaggccucucuggcuuggagauggccauuuucuuguaucuucaugugaucuuuccuc

SEQ ID NO: 390786 - RNA, 76 nt, Homo sapiens
ggguggagguggagguauaagcccagaagaguauucuugaauuuuuuuggcuagaaauauaccuccaaauacaccu

SEQ ID NO: 390787 - RNA, 103 nt, Homo sapiens
gcucugucuccucugauugccccuaauggagcuugacaguuguagaguuaauccaagcucuggucuccagguuucaccucaggaaacaaucgguccccagagc

SEQ ID NO: 390788 - RNA, 79 nt, Homo sapiens
uagguuguugcaaaguaauugugguuuuugccauaaagagguaaauggcaaaaaccgcaauuacuuuugcacuaaccua

SEQ ID NO: 390789 - RNA, 87 nt, Homo sapiens
cuguguaguuugcugagaauggugguuuccagcuucauccaugucccugcaaaugacaugaacucauccuuucuuauggcugcauag

SEQ ID NO: 390790 - RNA, 85 nt, Homo sapiens
cuugaguccaaguguuugaggcuguggugcacuaugauugcaccugugaauagucauugcauuccagcccaagcaacagagcaag

SEQ ID NO: 390791 - RNA, 60 nt, Homo sapiens
gauuccuuuuaaugguuaaaguugcaggucugaaaauauuuugaucauuaaaagugaauc

SEQ ID NO: 390792 - RNA, 129 nt, Homo sapiens
uggguagcaguccuaacacaaaggacuccacugagaaguguugaucuguuagaacagagcuggguacaugacaguguucuggcucaggucaacacuuccugguuccagcccuugguagggugcuuucca

SEQ ID NO: 390793 - RNA, 99 nt, Homo sapiens
gaggcaggagaaucgcuugaacccaggaggcggagguugcagugagccaagaucgugccacugcacuccagccucggugacagagcgagauuccgucuc

SEQ ID NO: 390794 - RNA, 85 nt, Homo sapiens
gaauuggaauucugguaauugcaccagguuucucaggguucgguucccccuagaaacacagguggaauugcuucaguuuguauuc

SEQ ID NO: 390795 - RNA, 55 nt, Homo sapiens
guaauaacuguggaaaaagguuuuugcagucgcuuaucugugccacuguuauuac

SEQ ID NO: 390796 - RNA, 86 nt, Homo sapiens
uguuauucucuuuugagccuugaugaaaccuauaaagcugaugaguugcuggugucaucaaggcuuuggaggaacagagagagaca

SEQ ID NO: 390797 - RNA, 56 nt, Homo sapiens
cacaugugugcaggugugugugugguugccccaguguacacguaugagcacaugug

SEQ ID NO: 390798 - RNA, 76 nt, Homo sapiens
cagaggcagauacucauaggugauggaugaggaagcugagggaguucuugccuaguggccuuaugaguauucucug

SEQ ID NO: 390799 - RNA, 72 nt, Homo sapiens
ggagcagacauggaucuaacugggcuggcaggagccaacgauuaucuugaggacugagacagaccaagcucc

SEQ ID NO: 390800 - RNA, 56 nt, Homo sapiens
ugaguuagguugucaaugucuuaaggaaugugauccuugaauuccaaccugauuca

SEQ ID NO: 390801 - RNA, 80 nt, Homo sapiens
aggugagccacauaaaaucaccaauauagucccaucccaucuuugacuuacaaaaguggcaguuuuaugugguucaaccu

SEQ ID NO: 390802 - RNA, 77 nt, Homo sapiens
gcccaauuuaaaaaauccuuggauuuuuauucugggugauaaccaguguuagauaauuagaggguuuuaaguugggu

SEQ ID NO: 390803 - RNA, 79 nt, Homo sapiens
cuagccuauagaguugaguuuuagaagaagccuuucggauacugaaaacaaggcacugaacuuaaauucugcagacugg

SEQ ID NO: 390804 - RNA, 57 nt, Homo sapiens
ggugacuuucugucuuggugaucuguccagcgcugucaguggauuauuaaagucacc

SEQ ID NO: 390805 - RNA, 83 nt, Homo sapiens
ugauaguuggagcugcagucuaccuggauuuuuauuuaaccaagugaguagauccaagacuguccuauagcuucaaucauuca

SEQ ID NO: 390806 - RNA, 129 nt, Homo sapiens
ccagugccuaacaauagaggcaaacccgugagcagaaagcugcaaggucgugugcucagcaggaggugaggcugggguggcugagcagcgucuguucagugcuacuuuccucugagacggguccacugg

SEQ ID NO: 390807 - RNA, 93 nt, Homo sapiens
gggucuuuaugguaauggcaauaauagcuaccauuuauuaaguauuuauauuggggaugguuaaguauaugcauugucucuuuauaacuaccc

SEQ ID NO: 390808 - RNA, 93 nt, Homo sapiens
ugaugacagguuuugcauaauuccuugcaccagaaucaaacagagcaagaauuuugaucucuggugcaaggaauuaugcaaaaccugucauua

SEQ ID NO: 390809 - RNA, 83 nt, Homo sapiens
guagaguucacauaggaaugugaaucgcuuggucccgagaugcucaaagaauagguaggugucauaauccaugccaucucuac

SEQ ID NO: 390810 - RNA, 55 nt, Homo sapiens
cauuugguguaguucucuguuguuguacccauaacauuguugauuauacuaagug

SEQ ID NO: 390811 - RNA, 55 nt, Homo sapiens
uuccuccagacaucccauguuucauugacaccaauaaugauugucuauggaggaa

SEQ ID NO: 390812 - RNA, 75 nt, Homo sapiens
ggagguggaccuugcacugagccgagauugagccacugcacucaagccugggugacagugcaagacuccaucuuu

SEQ ID NO: 390813 - RNA, 62 nt, Homo sapiens
agggaaggcuuuuacuauuuguuaacucacuugagggacauaaacugucaaaagccagcccu

SEQ ID NO: 390814 - RNA, 106 nt, Homo sapiens
gguuguuguaacaagaaggaugacagucucugccuacugagcacacagugugccggaugcugcagcgcaugugggcagagaggccucacucugucucacagcgacc

SEQ ID NO: 390815 - RNA, 75 nt, Homo sapiens
acuuauaagacaggacauuuuuggauggauuagaugcguaggcaucccugaaccccagaaaucucuaaucuaggu

SEQ ID NO: 390816 - RNA, 88 nt, Homo sapiens
uuuauauauauagcucuugcuuacccacugugcuauuccugauuagauugcgggcuuacagaguugguaaaggaguugacaaaauaaa

SEQ ID NO: 390817 - RNA, 105 nt, Homo sapiens
ugguaacucuugaauauuugucagguaauugcuaagugcaagggaguaugggaaaagauuacauucuacucugugguguauuugcauugacauaaauaguagcca

SEQ ID NO: 390818 - RNA, 58 nt, Homo sapiens
gugugugugugugugugugugcacgugugcuuauguguacaucucuacacacauguau

SEQ ID NO: 390819 - RNA, 58 nt, Homo sapiens
guggaggagaugggaagcaaaaucaguuguaugaauccaguucccauguuucuucuac

SEQ ID NO: 390820 - RNA, 99 nt, Homo sapiens
gaggcaggagaaucauuugaacccaggaggcagaaguugcagugagccaagaucacgccauugcacuccagccugggugacagaaugagacucugucuc

SEQ ID NO: 390821 - RNA, 78 nt, Homo sapiens
uacacagugccuugcuguugguauaugcaccguuaguccauaauugugucaaauggcaauuagcauuggcuuuuugua

SEQ ID NO: 390822 - RNA, 61 nt, Homo sapiens
ccucagauguguaucuguacauuauuuuucuuaaugauauugaacacuuucauaugugagg

SEQ ID NO: 390823 - RNA, 56 nt, Homo sapiens
gagaagggcuuuuucucccaccagucauaguuguauucugggaagaaauucuucuc

SEQ ID NO: 390824 - RNA, 62 nt, Homo sapiens
uuaauuuaggaauggcagagaccagaugauauaugagucugguuuaagacaugcugaauuga

SEQ ID NO: 390825 - RNA, 57 nt, Homo sapiens
gcagcggucauggauucagguccagcaaguccauacuauucaauccauuggcccugc

SEQ ID NO: 390826 - RNA, 96 nt, Homo sapiens
gaggugggaggaucgcuugaaccugggggcgggaguugcagugagccaagaucaugccacugcacuccagccuucaggacagugagacccugucuc

SEQ ID NO: 390827 - RNA, 79 nt, Homo sapiens
gugcggauggauugcuaauguggggauuuggggggaaaucaaaguguucucaaaugcuguauuguaguaauacuugcac

SEQ ID NO: 390828 - RNA, 76 nt, Homo sapiens
uuauguuauauuggcagaagagaagaugauagcugugaaaaauguagccuucuuugauuuuguuacuaagacauga

SEQ ID NO: 390829 - RNA, 64 nt, Homo sapiens
uucaguggacuuaguagugcuuugcaaaugugacaugaguugagcaggcuuggguccuacugaa

SEQ ID NO: 390830 - RNA, 62 nt, Homo sapiens
uugugaauagugcugcaauaaacauaugugugcaugugucuuuacagcagcauuauuuauaa

SEQ ID NO: 390831 - RNA, 84 nt, Homo sapiens
ucucccaaaaagcaaagaugguggucuacccuuucccuugggaacuccauccuggggagaacugagaccucugucagcuggaga

SEQ ID NO: 390832 - RNA, 109 nt, Homo sapiens
uucaaaguaauuccaguuaagccauucuuuauuuuacauuuugaauaacaggguaagccauaacuccauguuaaaguaauugaaauggccuuuagcagauaauagugaa

SEQ ID NO: 390833 - RNA, 74 nt, Homo sapiens
ggauuugguuugccaguauuuuauugaggauuuuugcauugauguucaucagggauauuggccucaaauuuucc

SEQ ID NO: 390834 - RNA, 86 nt, Homo sapiens
aacuuugccaggcuuggugaugcaugccuguagucccagcuacuagggaggcuaagguaggagaaucacucaagccuggggagguu

SEQ ID NO: 390835 - RNA, 63 nt, Homo sapiens
gggguggucguggagucucuggcuuguacccagggugcgagucgcacccacgacgggcacccc

SEQ ID NO: 390836 - RNA, 84 nt, Homo sapiens
uuuccuuuuucauuugggauggcuugauucguucugagaugugaggucuagaaugaaacaagcugugccugaagggacaggaga

SEQ ID NO: 390837 - RNA, 68 nt, Homo sapiens
gugagugugcauucaugccugugugagcucaugucugugugaguucauaucuaugagugugcauucau

SEQ ID NO: 390838 - RNA, 90 nt, Homo sapiens
acccuccugugauagcagaauaauguccccccaagggauuauccccccggauuauaccccacagggggcauuauacuggauuaucugggu

SEQ ID NO: 390839 - RNA, 61 nt, Homo sapiens
accuauggcugauaguucaugaccacugaucaaugcagggugcauggagaacacugagggu

SEQ ID NO: 390840 - RNA, 75 nt, Homo sapiens
cucagaauuucauacuguccaauucuaguggccuugcaaccuggcaggcaacuugagugaggcaagugugcuggg

SEQ ID NO: 390841 - RNA, 100 nt, Homo sapiens
uuucuugacauuauguguggugaagaaguacaagacaaauuuucuagauaugaaaugucuuugaguauuucugcaaagggcuuguuaccauggugagaaa

SEQ ID NO: 390842 - RNA, 59 nt, Homo sapiens
gauuggcauucuggccugguucaugccaccucuauguugacuacaccaggaugcuaguu

SEQ ID NO: 390843 - RNA, 78 nt, Homo sapiens
uggaggcugcagugguaguauugcuugaguccaagaauuugagguuccagugagcaaugauugagccacuguacucca

SEQ ID NO: 390844 - RNA, 106 nt, Homo sapiens
ucaaacgugucauucuuucccucuguggcuaagacaaccuuuccugucucccaagauuacaugaaagguugucuuaagccauagagggaaagaaugacauguuuga

SEQ ID NO: 390845 - RNA, 103 nt, Homo sapiens
cacagucucagguaguaucuuuauagcagugugaaaacagacugauacagagaauugguaucaggaguuugggguacugcuauaaagauaaacugaaaaugug

SEQ ID NO: 390846 - RNA, 60 nt, Homo sapiens
gugccucaggagacuauucagcaagcaacaauucugcuucagaguagcugucugaggugc

SEQ ID NO: 390847 - RNA, 97 nt, Homo sapiens
ggagauggacaagauguagaacacugaguucagggucagcccaggacagcuccuaacagccugacauguacuuauuuguuuucucuugucuauuucc

SEQ ID NO: 390848 - RNA, 56 nt, Homo sapiens
gccuuagcagaguccuuaccagggucuaggggcuggauacaggacugagcugaggu

SEQ ID NO: 390849 - RNA, 66 nt, Homo sapiens
cuucaaguguggccaccugaccagcucccaagacaacacugcuugucaggggaccauacauugaag

SEQ ID NO: 390850 - RNA, 113 nt, Homo sapiens
cccagccugucuuggggugaggaucgcugcccggaagcggggcacuggggccccaacacaggggguuugcagugucagcuucuguguucaccucuccccuuaucuuaacuggg

SEQ ID NO: 390851 - RNA, 63 nt, Homo sapiens
caugcaagacaccacgugagaauggaaaaugaccuucagcauuguccguggugucuuuccaug

SEQ ID NO: 390852 - RNA, 68 nt, Homo sapiens
cagcauuggauuuucugauccuguaaacauaaauaacauuagaaaucaaggucagcaaagucuagcug

SEQ ID NO: 390853 - RNA, 55 nt, Homo sapiens
ggauccuuaacuaucacagugaggaguacugauuauaacuggauguaaagggucc

SEQ ID NO: 390854 - RNA, 126 nt, Homo sapiens
ggaaauugggaagggaccaagauggccaggguggguaggggaaggggaguauuugaaaucagaggccuggggccaguuggcaagaaccuucuuccaagcuauaugccaugguucaagcccuguucu

SEQ ID NO: 390855 - RNA, 82 nt, Homo sapiens
aguucuaggguacaugugcacaacgugcagguuuguuacauauguauacaugcgccauguuggugugcugcaccuauuaacu

SEQ ID NO: 390856 - RNA, 68 nt, Homo sapiens
aggggcaugaauacucuuuggguguauguuuccugaacauggcacagagaauguguucugggguuccu

SEQ ID NO: 390857 - RNA, 60 nt, Homo sapiens
ggauuuucagugucuucaucuacaaaaugaaagauuuagagugaaugacaucuaaagucc

SEQ ID NO: 390858 - RNA, 71 nt, Homo sapiens
ccgcagggaccuugcugcggcgguggcaucuuccucccaggcgaugaccagagagugcgcaggguccgcgg

SEQ ID NO: 390859 - RNA, 80 nt, Homo sapiens
cacagggguccccggaugacggccgcuucacacaggggcccccgacugacggcugcaucacccggggcagaccuacugug

SEQ ID NO: 390860 - RNA, 55 nt, Homo sapiens
ugcccuguaucccacuguuucacucaucuuccccagugaacgaugucucagggca

SEQ ID NO: 390861 - RNA, 114 nt, Homo sapiens
uuccuuucuuccugccaaacaaauccagugauugugaaaaaccucucguggaagguucaagcauguuucaauaaaugaaggauuuuaauucagugaauuugcagaaacaaggaa

SEQ ID NO: 390862 - RNA, 57 nt, Homo sapiens
gaggagaaugcugauaauuggugaaacuaggugauaggaguuuauugcauucuucuc

SEQ ID NO: 390863 - RNA, 57 nt, Homo sapiens
aacaagaagagagggacguaaucccacugcuuggaaugcgauccucaauccucuguu

SEQ ID NO: 390864 - RNA, 59 nt, Homo sapiens
augaagacaucgucugggauuaucuggggagcccuaauuccaaugacagguguccuugu

SEQ ID NO: 390865 - RNA, 69 nt, Homo sapiens
gauaaaugcuugagaugauggauacuccauuuacccugaugugauuauuaugcauuguaagcguguauc

SEQ ID NO: 390866 - RNA, 57 nt, Homo sapiens
auaauucuucuuuugagaagucugaaaaaaaggauguucuucaggcagaaggauuau

SEQ ID NO: 390867 - RNA, 56 nt, Homo sapiens
cuucccuuucugaaaaucucauucgcacauugagagguuggaaguggagggggagg

SEQ ID NO: 390868 - RNA, 72 nt, Homo sapiens
aaacauaagcaugcuucuacuuuaguuaucacuuugaauuugauuuuuaagguaugugggcauuuuguguuu

SEQ ID NO: 390869 - RNA, 59 nt, Homo sapiens
gugagcaaacuuaccuaagguuguauuaauaguaagugguagagcuugaguuuguucac

SEQ ID NO: 390870 - RNA, 61 nt, Homo sapiens
agguaacuugggucaugaggguuuguuguauagauuaucucaccacucgaguauuaagccu

SEQ ID NO: 390871 - RNA, 64 nt, Homo sapiens
uucaguuugccaguauuuuauugaggauuuuaacauugauguucaucagggauauuggccugaa

SEQ ID NO: 390872 - RNA, 68 nt, Homo sapiens
cuuugcuuuuggguagugaguuccuccaggcccuaggugggucuagagguauuauccaggagccagag

SEQ ID NO: 390873 - RNA, 64 nt, Homo sapiens
uuuuacacuucgguugugugcauacacuuguguauuugauguuuuaugcaacaaaaguguaaga

SEQ ID NO: 390874 - RNA, 85 nt, Homo sapiens
gucucuucccaggaggguaugcacacucucccaggaggguaugcacacucucccaggaggguaugcacacucccccuggagggau

SEQ ID NO: 390875 - RNA, 65 nt, Homo sapiens
uuauuuaagaugcagucauacuggaggagggcaggcccuuaauccaaugacugguauccuuauaa

SEQ ID NO: 390876 - RNA, 65 nt, Homo sapiens
ccuucucaccaucccacaguuugagagagacaguuuuucucacauuucacagggaugggggcagg

SEQ ID NO: 390877 - RNA, 59 nt, Homo sapiens
ugagucaauucuaacaauggcaaucaaaugccaugccacuugauuacugaauugacuug

SEQ ID NO: 390878 - RNA, 60 nt, Homo sapiens
uugagacugagucucgcccugucguccaggcugcacugcaguggcgugaucucagcucag

SEQ ID NO: 390879 - RNA, 84 nt, Homo sapiens
uccucugaccucugauagcaguagguguucagggcuucggggcccaggccucaucucugcucucggcaggacguacacagagga

SEQ ID NO: 390880 - RNA, 88 nt, Homo sapiens
gaaauauuuuguaacaaucuccaggugauaccacauuuaucucuucaaaaugaggugauaucuggaaauuaaaugagcaaaccauuuc

SEQ ID NO: 390881 - RNA, 66 nt, Homo sapiens
agcagcauuaguggaaucuugucacaacuaaaucccaauagugcucgagcuuugcauuaagcugcu

SEQ ID NO: 390882 - RNA, 61 nt, Homo sapiens
aguuuccugaggccuccccagaagcagaagccacuuugcuuccuguacagccugcagaacu

SEQ ID NO: 390883 - RNA, 74 nt, Homo sapiens
gauaccgcuauacuggguuuaugccaagaacauuacacauguuuguggaaugcucauguguagacaacaguguc

SEQ ID NO: 390884 - RNA, 86 nt, Homo sapiens
ccaauauacuguaacuuacaguggaaguuaaccccauuuugaaaaauuagauuguuuuaauuccauugugaaguugaaaaaauugg

SEQ ID NO: 390885 - RNA, 80 nt, Homo sapiens
gcucaguguguuguugauugaauuuacuuuucauucuaaugaacuugagaacauuaauaguuaauuuugccaugcugagu

SEQ ID NO: 390886 - RNA, 112 nt, Homo sapiens
agucucgcucuuugcccaggcuggagugcaauggcuugaucucggcucacugcaacccucugcuuccuggguucaagcaauucuccucucagccucccaaguagcugggacu

SEQ ID NO: 390887 - RNA, 74 nt, Homo sapiens
ccaggcuacugccuguguucacuuaaggcugaagggcuucucagucagcuuguggugaauacugcuaggccugg

SEQ ID NO: 390888 - RNA, 76 nt, Homo sapiens
agagacgggauuucuuuauguuacccaggcuggucuugaacuccugucuugaagagauccuccugccucagucucu

SEQ ID NO: 390889 - RNA, 66 nt, Homo sapiens
ugggaggggcccugaggccugaggugguggaaggagcucaccuaucucaggcccaggcccuugcca

SEQ ID NO: 390890 - RNA, 68 nt, Homo sapiens
gagcccugagcuuguuuuccugcaacuagauggucccaucugggggugaugggagacagugauggauc

SEQ ID NO: 390891 - RNA, 75 nt, Homo sapiens
uuagacaaauuucacagugaacuuugaggacucuagauacgaguguuucauguuuuucugugaggcauugauuga

SEQ ID NO: 390892 - RNA, 104 nt, Homo sapiens
ucuucuagucauggcagaaggugcagagggagcaggcaugucacauaacaagagagggagccaugugacaagcucccucugcaccuucugccaagauuagaaga

SEQ ID NO: 390893 - RNA, 71 nt, Homo sapiens
cagaaauuuaucuucucacagucuggagucuggaacauccaggaucaaggugcugacaggauagguuucug

SEQ ID NO: 390894 - RNA, 63 nt, Homo sapiens
gggaaucuuguuggaaugcagauucugauucaguaagucugagacuguuucuaacaagcucuc

SEQ ID NO: 390895 - RNA, 72 nt, Homo sapiens
ucuaauugagguaguacuuauuauuggaagccuaugcaaagguauuggaauggggauuauuuugcaauugga

SEQ ID NO: 390896 - RNA, 66 nt, Homo sapiens
cuuggaauacucaaaagguugggauauuuuauucauauuucuuuccaaauucuaugauauuccagg

SEQ ID NO: 390897 - RNA, 90 nt, Homo sapiens
ggcacaacggaccacauauugcaugauuccauuuguguggaauggcuggaacaggcaaauccauagaugggaaacagauuagugguugcc

SEQ ID NO: 390898 - RNA, 56 nt, Homo sapiens
agugaggucuacuucuugaaccuuaaaagaaaguggggauuagagguagacucauu

SEQ ID NO: 390899 - RNA, 70 nt, Homo sapiens
cuaaaugcuuugcacguauuaucucagucaacucucacaaugaccauaugagauagguaccgaagcuuag

SEQ ID NO: 390900 - RNA, 64 nt, Homo sapiens
aggacaggagaacagcgcaaagacuugaagcaaagguaaaguuauugcuuuacucucuuauccu

SEQ ID NO: 390901 - RNA, 89 nt, Homo sapiens
uuggauguacuugcagagcugggauggcgcugacacagccuccugugucacagcuuccaucucggugcgcgggucagaaugagcaccaa

SEQ ID NO: 390902 - RNA, 84 nt, Homo sapiens
aaugcaauucauuuauaaaucuaaaucucauaugggcacauaccuggugugugugggugcagaucuggagagggaaugagcauu

SEQ ID NO: 390903 - RNA, 55 nt, Homo sapiens
auaaaaaugugcacaugaaagggccuuauauacugcucuuuagucacauuuuuau

SEQ ID NO: 390904 - RNA, 56 nt, Homo sapiens
auccauugucuaaugcuaagauggugaggcaauagcaccucuuaaauacagugggu

SEQ ID NO: 390905 - RNA, 82 nt, Homo sapiens
uuggugacuugucaagucuuuaauuguccuuuguuuucuccucuggggaugagcugaaagagacauugcuccaacucaccaa

SEQ ID NO: 390906 - RNA, 77 nt, Homo sapiens
uggccaggcuggcaucgaacuggugauccacccgccucagcgucccaaagugcugggauuaccaccgugccuggcca

SEQ ID NO: 390907 - RNA, 64 nt, Homo sapiens
gacaauuucucagaguccauaaaauuaucuuacuuaaagauaagguuagcucugagaaaguguc

SEQ ID NO: 390908 - RNA, 67 nt, Homo sapiens
uuaugaagccuguguugaauuauagaaauaaaauuuuaauuauguuuacauuaacauggcuuuguag

SEQ ID NO: 390909 - RNA, 128 nt, Homo sapiens
agggcacaaaagauuggccagaccaggugugccauuugcauagugcaugaagaagcuggccacccuacccuaaucuuugauuaugcagauggguucuguacuuggcuggcaccauuuugccuguuccu

SEQ ID NO: 390910 - RNA, 84 nt, Homo sapiens
ucagguaugucuuuauuagcagcaugagaauggacuaacacaaugucuuagucuuuuuucugcugcuuauaacagaauaccuga

SEQ ID NO: 390911 - RNA, 67 nt, Homo sapiens
auugccaagauuuaauucaucaguuagggauugggguuucagaacugguaauaaaauuguuugcagu

SEQ ID NO: 390912 - RNA, 61 nt, Homo sapiens
accauugcaguuuuugguguaucucaucaauuugcugagcauacuucucagacguaauggu

SEQ ID NO: 390913 - RNA, 73 nt, Homo sapiens
aggccuuaaugacaucauaggugaagucauaguugacucuucucuuuccuuccugggaugucauuggcugccu

SEQ ID NO: 390914 - RNA, 63 nt, Homo sapiens
cuaccuggguggcucaugacuuuggguaagucccuuucuuccucaugagccaaccauggauag

SEQ ID NO: 390915 - RNA, 76 nt, Homo sapiens
gaugcauuggacuguaagugccuugaguacagggauaugucugcuuugcucacucuauucacagugccagugcauu

SEQ ID NO: 390916 - RNA, 77 nt, Homo sapiens
cauauauauagcaguauacguacuggguccaauacuucgggugaaaaugaggccuacuguguauaugcuaguauaug

SEQ ID NO: 390917 - RNA, 71 nt, Homo sapiens
ggcgugugcaacaugccuggcuaauuuuuguauuuuucauagagaugagguuucaccauguuagccacgcu

SEQ ID NO: 390918 - RNA, 72 nt, Homo sapiens
uuuauauguaccuguuuaaaaaagugaguguacacucaaauuauuuaauuuuuggauaaugguacauguaag

SEQ ID NO: 390919 - RNA, 81 nt, Homo sapiens
aucguuaaggcuucuuuggcacuuccuaagugccagggacuguuguuaaugccuuugaagugcuaauaaugacuuaauggu

SEQ ID NO: 390920 - RNA, 72 nt, Homo sapiens
gucuuuuucuuacccuuuaacccuuuaaaguguuuaugugacacuuuaggguuaggggagucucuugagggc

SEQ ID NO: 390921 - RNA, 56 nt, Homo sapiens
cugcuggugaugucugggcaugugucugcuucacaguccaguguuaugaucaguag

SEQ ID NO: 390922 - RNA, 63 nt, Homo sapiens
ugagcuguuugaagaagcauuugccauuuuccggaaauuugaugucaauacuucagcaguuca

SEQ ID NO: 390923 - RNA, 59 nt, Homo sapiens
ccugcauugcuucacacuaucuuuacuauuuugcauggauagugcuagagaguagcagg

SEQ ID NO: 390924 - RNA, 55 nt, Homo sapiens
uuccacgugaaguauucuaaaggauuccugacccaugggaaauucuuauguggaa

SEQ ID NO: 390925 - RNA, 71 nt, Homo sapiens
uauggcuuuucacuuaaguccucuacugcucauuuggcauggacaggcuagaacucaaguagaaagccaua

SEQ ID NO: 390926 - RNA, 87 nt, Homo sapiens
gcccggcauggugccuacucucugccaggaaugaagaagccuaggacucuaugccccaucccuggaggaguauggccuauucagggc

SEQ ID NO: 390927 - RNA, 69 nt, Homo sapiens
gucagcucuuguuaaaacuaacuagccuggauacaaccucugguguuuguuuguuuuaucaugagugau

SEQ ID NO: 390928 - RNA, 65 nt, Homo sapiens
ucugagaauuagucuuuguauuuaaauauaauagauuugugauuaagcaacggcugcuuuucaga

SEQ ID NO: 390929 - RNA, 84 nt, Homo sapiens
aguuagccaggcuuggugguacucaucuguagucccagcuacucaggaggcugaggugggagaaucacauaagcuugggaaauu

SEQ ID NO: 390930 - RNA, 88 nt, Homo sapiens
cuccccucugcccugagauucuuggauucugccucaccucaucgguguuuugguagaauucaagauucaacaggcuuuuugaugggag

SEQ ID NO: 390931 - RNA, 81 nt, Homo sapiens
uuugauuccacagccgauaccaugacuacuaagcuauacugucucccucuguggaucacugggcgugcugugugaaacaaa

SEQ ID NO: 390932 - RNA, 81 nt, Homo sapiens
aacaguuaccauagaguuuuucauggauugaaagguuuguccuuugaaccauuugaagaaugaucaucuuucucugcuguu

SEQ ID NO: 390933 - RNA, 59 nt, Homo sapiens
gcaugcuuccucacuaagcuuagccauuucuagcuugugauuuagagugagagacaugc

SEQ ID NO: 390934 - RNA, 61 nt, Homo sapiens
ggaaguuccugaaguucagguaugaaaaaagcaauuggaagauacuggcucgggaauuuuc

SEQ ID NO: 390935 - RNA, 81 nt, Homo sapiens
ccagaagcaaacagcuguuuuugugggcaugugauugagguaccugagcagucuaugcuagaaggucaguugaagcucugg

SEQ ID NO: 390936 - RNA, 55 nt, Homo sapiens
auuacuguggcuccugggaauacugaaucugugaaauccaugagcccacagugau

SEQ ID NO: 390937 - RNA, 56 nt, Homo sapiens
ugacuuagguaugucugugaugaucuaaugaaaugucauggaacaacuuaaaguca

SEQ ID NO: 390938 - RNA, 102 nt, Homo sapiens
ucaauucuguuuuacuaguaagcucauugcucugguuuuaaugugucccccaaaauucaugcauugauacuuaauggacaaugugaugguauuaagaauugg

SEQ ID NO: 390939 - RNA, 81 nt, Homo sapiens
gacuauuagauuagugagguagagcaugugaaagauuguaagagcacaaugccuucacauauuauuucaucaauaaagguc

SEQ ID NO: 390940 - RNA, 128 nt, Homo sapiens
aggcggcguggauccuacagcuucucguguacggaaaggcgguguggauccuacagcuucucuacugaaagguggcguggauccuacagcuucucguguacggaaaggcggcguggauccuacagcuu

SEQ ID NO: 390941 - RNA, 82 nt, Homo sapiens
caggcuaauugucauacauuugcaugcuaaaagacacucccaccagugccauggcaguuuacaaaugccaugacagugccug

SEQ ID NO: 390942 - RNA, 57 nt, Homo sapiens
ggguggaucacuugagaccaggaguuggagaccagcuugggaaacagagugaaaccc

SEQ ID NO: 390943 - RNA, 78 nt, Homo sapiens
gcuuaggagaaagcuuagggaaaagucuuucaucauugagagugcuguuagcccuggguuuuucacagaugccuaggc

SEQ ID NO: 390944 - RNA, 60 nt, Homo sapiens
gcauuuugugauauccgaccaugaaguuaugucuauugugugucuuuuaucacacaaugu

SEQ ID NO: 390945 - RNA, 98 nt, Homo sapiens
cuuacugcuugcugauauuuauguaaaaagcccagccgcugagagggccacgauauugccaauuucagcucuacuuuuugcauuuaguaagauaaaag

SEQ ID NO: 390946 - RNA, 61 nt, Homo sapiens
auauuugcaguguaguuggccagcaagcuacugaagaaauguugguaaguauugcagauau

SEQ ID NO: 390947 - RNA, 63 nt, Homo sapiens
accuguguuugauugcaaauaaucuacagauaaguggaccuuugcaauucaaaccuguauggu

SEQ ID NO: 390948 - RNA, 81 nt, Homo sapiens
augauucaguuuuugaugugcucaguuuggaaggucgguuagacuuccaugugggcuugucaaguaggcagcuggggucau

SEQ ID NO: 390949 - RNA, 71 nt, Homo sapiens
gggacccccagaguuucugauucagcaggucuaagaugggaccugagaauuuacaauucuaucagguuccc

SEQ ID NO: 390950 - RNA, 60 nt, Homo sapiens
ugcuuauuagccacauguggccagugguuacuauauugggcaguguggcugcauauagca

SEQ ID NO: 390951 - RNA, 57 nt, Homo sapiens
ccaucuuugugguguuaucuaccuuuggucuuugauguuggugaccuacagaugugg

SEQ ID NO: 390952 - RNA, 60 nt, Homo sapiens
uuacauuuccccauauugagaaccgaauuucucaagucaguuugggagaagcuauuguaa

SEQ ID NO: 390953 - RNA, 95 nt, Homo sapiens
guggaggcaauuaugaaggacuccaacuaggagagguguggacugagagaacacccugguagcuaugaagucuuuacuuuugauugggcauccau

SEQ ID NO: 390954 - RNA, 67 nt, Homo sapiens
uuguuauacuuggauauuggucagagacuaaauuauuuuguacucucaccguaucccagauuugcag

SEQ ID NO: 390955 - RNA, 58 nt, Homo sapiens
ucaguucuaguuuauugguucuguuugggaguaacgagcccaguguugccagagcuga

SEQ ID NO: 390956 - RNA, 100 nt, Homo sapiens
gagacaagagaauugcuugaacccuggaggcugagguugcagugagucgagauggcgccauugcacuccagccugagggacaagagcaaaacucuuucuc

SEQ ID NO: 390957 - RNA, 66 nt, Homo sapiens
uuuccucuguaguccugcaagaggagaagugacuaaauaaacucuuuuuuauugcuauauaggaaa

SEQ ID NO: 390958 - RNA, 85 nt, Homo sapiens
ccaguaucugugaaugugaccuuauuugggaauagcaucuuuaacgauauuuaaauuaaguugagguuauaauggauuagcaugg

SEQ ID NO: 390959 - RNA, 88 nt, Homo sapiens
ggagaaucacuugaauccaccaggcggagguugcagugagccgagacugcgucauugcacuccagccugggugacagagugagacucc

SEQ ID NO: 390960 - RNA, 84 nt, Homo sapiens
caguugugagugguuaagaugcagucauacuggaguauacuggaguauacuggaguaugcugagucuaugauccaacaugacug

SEQ ID NO: 390961 - RNA, 55 nt, Homo sapiens
guacaaguuuagccaauuuuauguuauaguaucacaaagugguuuaaacuuguau

SEQ ID NO: 390962 - RNA, 59 nt, Homo sapiens
gugggaugaucacaguucacuguaaccucaacuuccugagcucaagugaucccucccgc

SEQ ID NO: 390963 - RNA, 66 nt, Homo sapiens
gccagguggacuaauaucaugugacugaaagcccccacccuaaaucacaugguagguuuuucuggc

SEQ ID NO: 390964 - RNA, 79 nt, Homo sapiens
ccugccgucccucaggagucccauuggucugcggggggcacaaauucugcauggaguggaaauucuuggguacgacagg

SEQ ID NO: 390965 - RNA, 66 nt, Homo sapiens
uucuauuggucuuucaugagacuaagccuuccauccuggauugugugucaugcagagacccuggag

SEQ ID NO: 390966 - RNA, 58 nt, Homo sapiens
ggggaaauuaucccagaagauaacagaaggguguucuggaacuucaaauaauuucccc

SEQ ID NO: 390967 - RNA, 77 nt, Homo sapiens
agucauguuguucugagauuucagauaguucaugcacuuggcccucugagccacugacuuaggccucaacuaugacu

SEQ ID NO: 390968 - RNA, 75 nt, Homo sapiens
uucccuauuuagaucuuuaaaaggugcuagauucucagucagucucuucaguauugggagggucuggaaggggaa

SEQ ID NO: 390969 - RNA, 64 nt, Homo sapiens
aguuaguuauagaguuuaauugguuauaaucuuauuugaauuaguuggcugccuaugauuaacu

SEQ ID NO: 390970 - RNA, 78 nt, Homo sapiens
ugaaaauuacuaauggagcagguuuuacauguucuccacaaaaaguaugugagguaauuagcucccuuagccauuuca

SEQ ID NO: 390971 - RNA, 69 nt, Homo sapiens
ugcacuuuggagacguuuaaagagaacuguuaggauuuuucauuuccuuuggcuaacuuucuaagugca

SEQ ID NO: 390972 - RNA, 96 nt, Homo sapiens
uuguaagugugcguucugggagcaucaagaccauccaagauucaggugaucccuggauggagaggcuugugaugccugggaaguguguguuaacag

SEQ ID NO: 390973 - RNA, 82 nt, Homo sapiens
aaugugucuuaugaaaauugccaaacaacugucccuggggauucugcuuugauuggcauuuuuagucaugggaauguauauu

SEQ ID NO: 390974 - RNA, 68 nt, Homo sapiens
guugguaaguuuggggcuaauuuguuaugcagcaaaagauaacaaauauagcguugggcuucauggac

SEQ ID NO: 390975 - RNA, 67 nt, Homo sapiens
auuuuugguugguaggcuauuaauuauugccucaauuucagagccuguuaauggucuacucagggau

SEQ ID NO: 390976 - RNA, 64 nt, Homo sapiens
ggcuauugaagcuugugcguauaucacgaaguucucgugcuaugguuuuuagcuccaucagguc

SEQ ID NO: 390977 - RNA, 66 nt, Homo sapiens
uuccaauguuccguguugcagucccuauaagacucauaugacugaauguauacggaauaucuggaa

SEQ ID NO: 390978 - RNA, 83 nt, Homo sapiens
agagauguggcaccuacucauuuuucagcucacuauccauuacaacagggcgugguguuagaaugagaaguuugcauguuucu

SEQ ID NO: 390979 - RNA, 63 nt, Homo sapiens
acauuucuugcauauucucugaggcaggagagaccuucucuuauucuggauaugcagagaugu

SEQ ID NO: 390980 - RNA, 73 nt, Homo sapiens
guuguggucagaaaagguaguuaauaugauuuugauccucuuaaauuuguucagacauguuuuguggccuaac

SEQ ID NO: 390981 - RNA, 81 nt, Homo sapiens
ugguucauaguucugcagacauuacaagaagcauggugccagcaucugcuccuggugaggguuucagggagcuuacaauca

SEQ ID NO: 390982 - RNA, 74 nt, Homo sapiens
gccgaggaggggaguuacaaucacaggcauuguguugagcucaaugcuaugugugacuucuuauggugcuuggu

SEQ ID NO: 390983 - RNA, 57 nt, Homo sapiens
guucauguuuucuuucacuuugucaguguaucacaugaagugaguguuaaacugaac

SEQ ID NO: 390984 - RNA, 69 nt, Homo sapiens
cugauucuaauguggaaauuguuguauuuaaucugaaaaugacuuuaccuacaacaguuccauugucag

SEQ ID NO: 390985 - RNA, 57 nt, Homo sapiens
gcuggaggcaucuuggaguacagggauauuucauucugagcacugagauccucuagc

SEQ ID NO: 390986 - RNA, 74 nt, Homo sapiens
aguagagauggauuuuaagugaaugaaacauugacuuaguugauguuucauucacuucaaagucucucaguacu

SEQ ID NO: 390987 - RNA, 66 nt, Homo sapiens
uuuuaugguacuagaguaagaauuguuguuacggaaagacaaacauaaucuuguaguauuauaaga

SEQ ID NO: 390988 - RNA, 96 nt, Homo sapiens
gacaggagaaucacuugaacccaggaggcggagguugcagugagccgagaucgcaucauugcacuccagccuuggcaacaagagugaaacuccguc

SEQ ID NO: 390989 - RNA, 98 nt, Homo sapiens
uaauguuuuuguuguguuuguguucugacauguuuucaagauuuauaauuuaguuguguuucugugauauguaaacaggaaguagaggagggauauua

SEQ ID NO: 390990 - RNA, 57 nt, Homo sapiens
cagaacugaccucugauucuaggacugaccucugacccuggaacugauucaguucug

SEQ ID NO: 390991 - RNA, 56 nt, Homo sapiens
uacagcacaggugcagguguugcuuguccuggggccaaggcgccucccugucugug

SEQ ID NO: 390992 - RNA, 56 nt, Homo sapiens
uugagauguaguuucacuccuguugcccaggcuggagugcaaugcugcgaucuugg

SEQ ID NO: 390993 - RNA, 75 nt, Homo sapiens
gccuggauguccuggacccagacaaagcucgaccauuuucugcuguguaugguguucaggacagaugguccaggc

SEQ ID NO: 390994 - RNA, 56 nt, Homo sapiens
caugaagcauguuuugucaugaggcaacucaguugacaaccucaugcuuugucaug

SEQ ID NO: 390995 - RNA, 56 nt, Homo sapiens
gcuacugugaauagugcaacaguaaauguaugugugcaugcaucuuuuauaguagc

SEQ ID NO: 390996 - RNA, 57 nt, Homo sapiens
cucaccuugugauccacccgccuuggccucccaaagugcugggauuacaggugugag

SEQ ID NO: 390997 - RNA, 55 nt, Homo sapiens
acucuaacacugagcaaagaaaauuagaauauuuucaugucuuggcuguuagagu

SEQ ID NO: 390998 - RNA, 89 nt, Homo sapiens
gugaugauugugcuggaggaauaugcuuauuagcaagaaauacuaaaguauuugggcaugauggggcauuuucacaguuuaagcuuugc

SEQ ID NO: 390999 - RNA, 83 nt, Homo sapiens
agacuacuggauuuugagaaucuuugcuaaaggaagaggauuaaauauucuuccaaugcccaagauuucuucaauucuauucu

SEQ ID NO: 391000 - RNA, 89 nt, Homo sapiens
gggcuggaaagugaaagccaagaguggugguucugaaacuuuuacuuuguaauuucuauccaucauucucucuggcucuucugaggccc

SEQ ID NO: 391001 - RNA, 58 nt, Homo sapiens
ucuuuaugaccaaagaaaugcuauaggaagauuaucucuguggcuuuuggucuaaaga

SEQ ID NO: 391002 - RNA, 88 nt, Homo sapiens
cucggccucccaaagugcugggauuacaggcgugagccaccgcgcccggccucacagccuaguuuuauacauuuuagggagauaugag

SEQ ID NO: 391003 - RNA, 83 nt, Homo sapiens
gucaaaaaucaguuaacuguagauacauggauuaauuucuggguuaucuauucuguuccauuugucuauguuucuguuuuggc

SEQ ID NO: 391004 - RNA, 74 nt, Homo sapiens
aguaugucugaugggagaaagaguauuuacagagauguacaaagcuccauuucugccaugagaauacacauacu

SEQ ID NO: 391005 - RNA, 100 nt, Homo sapiens
cuauuuuaucauaacaaaaguuaaugguucaacuauggcauuuagagcugcccacguagccugauugucuauuuaguucacuuuugacugaguaaaaugg

SEQ ID NO: 391006 - RNA, 66 nt, Homo sapiens
gcuuccuggcauauaaaaucuaaaaucauuagugccuccuaagugaugucuuuuugugugcugagu

SEQ ID NO: 391007 - RNA, 76 nt, Homo sapiens
gggcugcugcuuuuuuuucagagaugcccugcccagagggcaggaaucuugagaaggauucuggccacaguggccc

SEQ ID NO: 391008 - RNA, 92 nt, Homo sapiens
ccugcucuuccaugcucuccuccaggcacagcagggugcugagguccugagcugcacugagagaagccccaaguacagcaugaagauguagg

SEQ ID NO: 391009 - RNA, 64 nt, Homo sapiens
uuaaggccugaagcucauaaaggauuaccgaauauuguuaaaacuuugaaagcucaagucuuag

SEQ ID NO: 391010 - RNA, 93 nt, Homo sapiens
uccucccaggauuucuuucuugugggugcccuuuuugcagcguaaaaaccccaggggaagagguagcagucacaaaagaaauccuagggagga

SEQ ID NO: 391011 - RNA, 61 nt, Homo sapiens
auccccugcggcucuuuuggcuguaaggacuagaaaugcaguucagaucagcccaagggau

SEQ ID NO: 391012 - RNA, 67 nt, Homo sapiens
uaagucuucuuuuuuccuguguauuuguuauguuguaaugaaaaaauacaaggaaugaagagauuug

SEQ ID NO: 391013 - RNA, 70 nt, Homo sapiens
gucacuagaaccuggaagacagagguugcagugagcugagauugcaccacuguacuccagucugggugac

SEQ ID NO: 391014 - RNA, 61 nt, Homo sapiens
acuuccaucaacaccagaucacaucaucuuccacucuguugaugugucugguuaugggagu

SEQ ID NO: 391015 - RNA, 55 nt, Homo sapiens
uguggcacuguguccagagaaaccgguguacuaguugacuuagguucgggccaca

SEQ ID NO: 391016 - RNA, 64 nt, Homo sapiens
agugauauguuugccuugaggggagaaguaacaugcuuguccauaggagguagauauuaucacu

SEQ ID NO: 391017 - RNA, 72 nt, Homo sapiens
ccaggcagguggguuccucucugggcauaccacguggagacguguaugguuguaugaggacccaugugcugg

SEQ ID NO: 391018 - RNA, 99 nt, Homo sapiens
gaggcaggagaaugacuugaaccuggaaguuggagguugcagugagucgagcucucaccacugcacucccgcccgggugacagugcaagacuccgucuc

SEQ ID NO: 391019 - RNA, 95 nt, Homo sapiens
gaccaugaggacauuguuggggacccucccugaaccaaggaagagacugugacucuuccuugguucagggaagguccugaaccaaaucgaggguc

SEQ ID NO: 391020 - RNA, 65 nt, Homo sapiens
gaagcugccugcaucagucgcuacuccuaggacaggugcugcccuugauugaccagagcaguuuu

SEQ ID NO: 391021 - RNA, 99 nt, Homo sapiens
uuaugauauuaugcuugugacuggauguacagucaguauuuguguguaaauuuaaauauauaaauuucauguguaugugcaguuaauauucauucauga

SEQ ID NO: 391022 - RNA, 58 nt, Homo sapiens
cuuugggagaaacguaguuuauaguuuaaacaaagacaguaacagcacuuucccaaag

SEQ ID NO: 391023 - RNA, 60 nt, Homo sapiens
uauggauuuuuuugacaagagcgucgaugcuuuccauuggguucuuaaaaaggaucuaug

SEQ ID NO: 391024 - RNA, 71 nt, Homo sapiens
gauucuaaaagcuaguguuccagugaacaggcagaaguugcaugaccuuuuaugaccuagcuuugcaaguc

SEQ ID NO: 391025 - RNA, 67 nt, Homo sapiens
cuugacuggaacuuuagugagucuacaacuuucuuaagaagggcucacauuuaguaucacggucaag

SEQ ID NO: 391026 - RNA, 57 nt, Homo sapiens
uaugaccuuguccccucucgccucugaucaggauggugauguuguggcgaggucgug

SEQ ID NO: 391027 - RNA, 130 nt, Homo sapiens
cuauagccacaaaaaauuaguuaaugaauauacaauaaaaaauggcuuuuaauauccauaauauaaaguguauuuagggggaguaaaaguauuuuuguaugugauugaaguucuuaucagcugaaaauag

SEQ ID NO: 391028 - RNA, 64 nt, Homo sapiens
cagccuguccucaaaaugaaaguucaguaaguauuugaagacucaguuugagggacaccugcug

SEQ ID NO: 391029 - RNA, 66 nt, Homo sapiens
gcucuggacguugaggcugcagugagccgugaucacaccacugcacuccagccuggccaucagagu

SEQ ID NO: 391030 - RNA, 80 nt, Homo sapiens
ggucuuaacagaagacucagcaucuguucuugagcuggcucauagcagcuaacaggguguuugcaguuucuucuaagacu

SEQ ID NO: 391031 - RNA, 66 nt, Homo sapiens
auuguaccuggugagacauguuuuauaguuccucuuaacccuauagcacugaccuuccaggacaau

SEQ ID NO: 391032 - RNA, 55 nt, Homo sapiens
cuggaauucaaaaucugaauuuugccccacucugcauuucugguuuugguuccag

SEQ ID NO: 391033 - RNA, 78 nt, Homo sapiens
aaaccauacuguguccuuuauacuguccaaaauuucauucuuccuuauuuucaguguggcaggcauagcuaguuguuu

SEQ ID NO: 391034 - RNA, 91 nt, Homo sapiens
cacaaaaaaguucagagauuuuaagccuuugaagcaaggcugauacguuaaaaauucaagugguucagaagucugaacuuugaagcuugug

SEQ ID NO: 391035 - RNA, 76 nt, Homo sapiens
ucugaauauucugugguuuaaggaauuuugacuuguagguagaaguuaagauuauccaaauuacuuuuuaugagga

SEQ ID NO: 391036 - RNA, 60 nt, Homo sapiens
cauguguguugggcaggggcugucugugaauagcaaguuuagccccauguaaaccacaug

SEQ ID NO: 391037 - RNA, 56 nt, Homo sapiens
cagggugccugguuguuaagauuguagaagcuuuuacagugggcacuggcgcccug

SEQ ID NO: 391038 - RNA, 63 nt, Homo sapiens
gagauguacuguuggucuuucauuuucuucaguuugaaaaugauaugccuaggaguauauuuu

SEQ ID NO: 391039 - RNA, 125 nt, Homo sapiens
gacuuuaauucuggcacuauguauggcucucugggucuggguuuguguugccuaugccugcagaugguguagcagccauaaacacagugagcagaacagcaaaucagucaguuuuuggaacaguc

SEQ ID NO: 391040 - RNA, 62 nt, Homo sapiens
agagacauugacuuuguuccagacuaucuuuacaaggauauuugcacagagauagugucucu

SEQ ID NO: 391041 - RNA, 56 nt, Homo sapiens
guggcaaguguuccaagaggcgauuuauucuuucugcugauggacacacuugccau

SEQ ID NO: 391042 - RNA, 60 nt, Homo sapiens
cacuuuauaaccugagcuuaugauuaugauuaccugugaaugguucaguuuauaaagaug

SEQ ID NO: 391043 - RNA, 58 nt, Homo sapiens
gcugaucacauuuccaaaacccauucguugacauagggguuuuggaaaugugaacagc

SEQ ID NO: 391044 - RNA, 77 nt, Homo sapiens
uggauuccauggucaccacaacugugcgcucagccugcagcaggaggggguauguaagugagugagugcagggucca

SEQ ID NO: 391045 - RNA, 87 nt, Homo sapiens
cugcuuucacuccacuaucagcuuaucuguacccacucaggcugagugagugucaggagacagguagcuguugcguaggggagacag

SEQ ID NO: 391046 - RNA, 56 nt, Homo sapiens
cuuggcacgugauagguguugagcaaacguuuacugaacaucuaucagaugccagg

SEQ ID NO: 391047 - RNA, 55 nt, Homo sapiens
guaaggauggugacauacaacugaaucuagcacccagcugauguuacauucuugc

SEQ ID NO: 391048 - RNA, 89 nt, Homo sapiens
gccucagagaacugaguuauuuucuuucccccucuugcacuauuacugacucauagcauggacuugagcaaauuauuuagucucuaggc

SEQ ID NO: 391049 - RNA, 127 nt, Homo sapiens
guaggugcauuugcacgcgugugcuguggugugugauguaggugcauuuacacgcgugugcuguggugugugauguaggugcauuugcacgugugugcuguggugugugugaugugugugcauuugc

SEQ ID NO: 391050 - RNA, 55 nt, Homo sapiens
ugcccuggaugcugcaggugugugccccaauacacccugucagcuggccugggca

SEQ ID NO: 391051 - RNA, 62 nt, Homo sapiens
ccugagacaucugagauuuuaagcagcacccucuuugcucugaaugugcuagugucucaagg

SEQ ID NO: 391052 - RNA, 94 nt, Homo sapiens
gcuccuuccaucuuuuucuaucaaaaaguguuccauggagaaucuugaauugggucauggagcuuuacuuuauguuuaauaagaggugaggagu

SEQ ID NO: 391053 - RNA, 129 nt, Homo sapiens
uccuuuguaagcuacucagucuugggcaugucuuuauuagcagugugagaacagacuaauacaguaaauugguauuagguagugagaugcugcuguaaagauacccaaaaauguggaagugacucugga

SEQ ID NO: 391054 - RNA, 83 nt, Homo sapiens
uuuucuauuccuguguaaguuuagguaagauucguguuguucuuuggaaaugccaucuuguccugagguuuuauuguggaaga

SEQ ID NO: 391055 - RNA, 66 nt, Homo sapiens
cuaccuaaaugucucuacuaaguuuagggcugguccuggaaauugggguagaggguuugcaugugg

SEQ ID NO: 391056 - RNA, 85 nt, Homo sapiens
uaauaauagaugcugaaguuucacagacaacuggucccuuacucaauagguaagaucaguucuuuugauuuucuaaauauuauug

SEQ ID NO: 391057 - RNA, 64 nt, Homo sapiens
uucgguuugccaguauuuuauugaggauuuuuacacugaugaucaucacggauacuggccugaa

SEQ ID NO: 391058 - RNA, 101 nt, Homo sapiens
ugaggcaggagaaucgcuugaacccgggagguggagguugcagugagccgagaucgcaccauugcacuuccgccugggugacagggcgagacucugucuca

SEQ ID NO: 391059 - RNA, 127 nt, Homo sapiens
ucaugcuuugggguuccuuuuucuaagaaccacacuuugugucuggcuccugucuaaucacuguggcauccugacauagugauuagaaaggagccagacgcaaagaagggaacauuagacaccaugg

SEQ ID NO: 391060 - RNA, 63 nt, Homo sapiens
auguuuauacauacuuguguaugugcauuuaauagaauguaaaccauauauguauguagaugu

SEQ ID NO: 391061 - RNA, 58 nt, Homo sapiens
gaggcugauugauauccauggagaauauaauuuuguucaccugguuauuaauagccuc

SEQ ID NO: 391062 - RNA, 96 nt, Homo sapiens
uguuuagugcucggcucuuaguugagaucaaguauucuccacuaagaggaaucaauucuuuggagaaauggcugaucaaaaagcugagacuagaca

SEQ ID NO: 391063 - RNA, 65 nt, Homo sapiens
auugccuggaggagguuugucagccuacacaggcuccuggagaugguuuauacuccccaggcaau

SEQ ID NO: 391064 - RNA, 64 nt, Homo sapiens
guaaucucagcuucuugggaggaugaggcaugagaauugcuugaacccaagagguggagguugc

SEQ ID NO: 391065 - RNA, 92 nt, Homo sapiens
uauccugauuugaugaagugcuaucuuuugagaugcuaaaauguagaauggaauggguaugauuuuguauguugaaugaugguauauggaua

SEQ ID NO: 391066 - RNA, 86 nt, Homo sapiens
cauuagauucugauaaggagugugcaacuuagcucucuuacaugcucaguucacaguaggguuugcacuccuaugagaaucuaaug

SEQ ID NO: 391067 - RNA, 98 nt, Homo sapiens
gucuuugagaaaacuauggaagacaggcuguauuuuaaaugauugauaaucuuaauguucuuuugaaacauuaccuguauuuccauaaaggucaagac

SEQ ID NO: 391068 - RNA, 65 nt, Homo sapiens
ucucauacaguaggcacuauuuguauguagcuauugagcacuugaaauguggcuacuguguuaga

SEQ ID NO: 391069 - RNA, 71 nt, Homo sapiens
uguuuagaacuuuaaaguguuuucaaaaugucagaaucucuggacauaugauaaugcuuuucuucagagca

SEQ ID NO: 391070 - RNA, 94 nt, Homo sapiens
gugcauguacaugugugcaugcauguguguguguccaugugugugcauguguguguggacauguacauauguguaugugugccugugcaugugu

SEQ ID NO: 391071 - RNA, 78 nt, Homo sapiens
aauugugguuugaugaaaccucaaaaugaagcaucuuacagaacaguauauguuacggaguuuuuauccaguacaguu

SEQ ID NO: 391072 - RNA, 100 nt, Homo sapiens
aauacaugcuugcuaugacauaauugugaugauugaaauacugugugugacaugacuagcacagugcuuggcacacaguaauaacauagcugccaguauu

SEQ ID NO: 391073 - RNA, 63 nt, Homo sapiens
cgcugcuuuuaagaacuguaacacucacugcaagggucuguggguucauucuugaagucagug

SEQ ID NO: 391074 - RNA, 73 nt, Homo sapiens
ggguucaaagguaauguuuucuaccaucaaacuaauuacaaauguucauugguaagaaaaccauuauuagcuc

SEQ ID NO: 391075 - RNA, 62 nt, Homo sapiens
uugagagcugaugaaagauaaaggaauuuuugcucguuugucagagauuuauuagcuuuuaa

SEQ ID NO: 391076 - RNA, 65 nt, Homo sapiens
uuuguucugguaucagcaauuucuguucuuguucuaacaggguggugccugguccauucaacaaa

SEQ ID NO: 391077 - RNA, 79 nt, Homo sapiens
uuugcccucuuggucuccuugauuagaguauagaguggccuggccaucucacuguauccagggguccauagucagcaaa

SEQ ID NO: 391078 - RNA, 55 nt, Homo sapiens
cuaguucuagaucccugaggaaucgccacacugacuuccacagugguugaacuag

SEQ ID NO: 391079 - RNA, 96 nt, Homo sapiens
auguggagucugugguuguuugacauuaccaucauucccuacuuugaauuuauaugcuacugauaagcaaucauuuucuuacauuuauucacacau

SEQ ID NO: 391080 - RNA, 79 nt, Homo sapiens
uauguacagacauuauucaggcuacacugauugucccaggaauguccuuuguagcaaauaaaagucuggauuauacaug

SEQ ID NO: 391081 - RNA, 112 nt, Homo sapiens
gcuccaugggagugggauccgcugagcuagaccacuuggcucccuggcuucagccccuuuuccaggguagugaacgguucugucucacugguguuccagucgccacuggagu

SEQ ID NO: 391082 - RNA, 71 nt, Homo sapiens
ggauuugguuugccaguauuuuauugaggauuuucgcauagauguucauuagggauauuggucuaaaauuc

SEQ ID NO: 391083 - RNA, 86 nt, Homo sapiens
cauucaguaugauauuggcuguggguuuaucauaaaaauagcucuuauuuugagauaucuuccaucaguaccuaguuuauugagug

SEQ ID NO: 391084 - RNA, 60 nt, Homo sapiens
gagaaugaugguuuccaguuucaucuaugucccuacaaaggacaugaacucaucauuuuu

SEQ ID NO: 391085 - RNA, 68 nt, Homo sapiens
ucaaagguccccuguaagaacuggcugauggggcagauaauuuacugguuacagugggaccuuccuga

SEQ ID NO: 391086 - RNA, 83 nt, Homo sapiens
agucuucaucugucuagcucaccaacuucaauugauggguaacagaaggucacaccugguuggucagcucaauggagaggguu

SEQ ID NO: 391087 - RNA, 77 nt, Homo sapiens
caucacauguucucacuuauuugugggagcuaaaaauuaaaauaauugagcucaucaagauagagaauaaaaugaug

SEQ ID NO: 391088 - RNA, 104 nt, Homo sapiens
gcaugcugaccagcccacccacagcucauugcuguccuggaggaagguuuggggcccucugcggggcagcaguggcuggggagaauugagccaugcagacaugc

SEQ ID NO: 391089 - RNA, 67 nt, Homo sapiens
uuaucagcagcaugaaaagcaacuaauacaguaaauugguaucaguugagugaagugcuacugauaa

SEQ ID NO: 391090 - RNA, 80 nt, Homo sapiens
gguagauaucuucuguggggcagguguacuccacaaacugcuugugaaacugcuggaaugcucuccccacggacucugcc

SEQ ID NO: 391091 - RNA, 55 nt, Homo sapiens
ucuccagguagauaugucaggaaucauuugaaauacuuauaugucugcuggggga

SEQ ID NO: 391092 - RNA, 58 nt, Homo sapiens
cugucuccuccacugcaugggagacucaucacggaagcuugcacagagaaggaggcag

SEQ ID NO: 391093 - RNA, 57 nt, Homo sapiens
gcacuucuucaucugcugcagaauaauaauaacaccuuguagcaugaugcugagugc

SEQ ID NO: 391094 - RNA, 67 nt, Homo sapiens
uugacauuuuucuaaccuauauauaaaguacaaaaauacacuugauauggugagaaaguagugucaa

SEQ ID NO: 391095 - RNA, 70 nt, Homo sapiens
agggagaugagcuaaguucucacagcaagucagugacagaucugcugcuggaucuuacucaucuuacccu

SEQ ID NO: 391096 - RNA, 87 nt, Homo sapiens
gagaaucgcuuaaacccaggagguggagguuguggugagccgaaaucacaccauugcacuccagucugggcaacaagagugaaacuc

SEQ ID NO: 391097 - RNA, 88 nt, Homo sapiens
gggggauaggaacuguucugugcauuguaggauguuuagcagcacccugacugaguacccacuagaugacaguagcaacaccaccccc

SEQ ID NO: 391098 - RNA, 78 nt, Homo sapiens
gcugaaaguacauaaguuugaguagucuagaguggaaugugguuaaauaucccugcagauuacuuuauguguuucagu

SEQ ID NO: 391099 - RNA, 55 nt, Homo sapiens
accauuaugcuguuugugcugugcagaagucuuaguacaguaccuggcaugaggu

SEQ ID NO: 391100 - RNA, 59 nt, Homo sapiens
cuugccuuagguuuagagccaauuaaaauuagguugagcuccucucaaccuaaggcaag

SEQ ID NO: 391101 - RNA, 112 nt, Homo sapiens
ugccuguggcucccuccacagggaucccuugcaugcacaguucucaauaggguccgcgcuccuaugagaaucugaugcagccaccgaucugacaggaggcagagcucaggcg

SEQ ID NO: 391102 - RNA, 58 nt, Homo sapiens
ccauaguacuugcauaguacuauguggaguccacauaguacuccaccaguacaugugg

SEQ ID NO: 391103 - RNA, 76 nt, Homo sapiens
uugaaaguccaggacuguuucagcugaaccagagggcacacaauuugcaucacugaaacuguccuggguuagucaa

SEQ ID NO: 391104 - RNA, 101 nt, Homo sapiens
gcugccugggcuuuuggcacaucuugaucuuuaguuacagagagucaggacaagacugagaucuuuuguggcugagaaacgauucaagggcugggugcagu

SEQ ID NO: 391105 - RNA, 90 nt, Homo sapiens
agagugagaaggacuucaucuugugcuuugagugcaagcuuagcugcaguaguauagagcacaagguagauuucuaagguuucugacucu

SEQ ID NO: 391106 - RNA, 71 nt, Homo sapiens
gccaggcaacauuuaccucaaucuugcugaagagcccuugggcuuaaagcgaauauuggugguauccuggc

SEQ ID NO: 391107 - RNA, 62 nt, Homo sapiens
aagucuaagcauucacaaggcacuugaguacuccaacuuuuaagguuuuuagugcuugacuu

SEQ ID NO: 391108 - RNA, 87 nt, Homo sapiens
aaguaguccaaagaaucauuguuucuaaguuugugagaaaggauguugauaguuugauaggaacaauggugaaucuguagauugcuu

SEQ ID NO: 391109 - RNA, 73 nt, Homo sapiens
uuugcuagauuguuuccauaaugacauauauaaacuacuuuucuuugugucaccguuagaacaauuuaacaga

SEQ ID NO: 391110 - RNA, 112 nt, Homo sapiens
acgugauggucucugggugguucagcuucuuauauggcggcucacagaguguuuccagacaggagguagaagcugccagucuuguaaggccugagcccagaaacuggcaugu

SEQ ID NO: 391111 - RNA, 76 nt, Homo sapiens
auggaagucuccauagucuucgaagaaugaguuagacucagauaacauuagccuaaguaacuguggagacagccau

SEQ ID NO: 391112 - RNA, 104 nt, Homo sapiens
ugaggcggagucucgcucuguuguugccuaggcuggaguguagugguaccaucucggcucacugcaaccuccgccucccgggcucaagcaauucuccugccuca

SEQ ID NO: 391113 - RNA, 74 nt, Homo sapiens
guaauuagaguuuuuggcauuaagaugcuguauccauaucuggguuuuggcuagaaaugcuuaaaaucuauuau

SEQ ID NO: 391114 - RNA, 104 nt, Homo sapiens
gaggugggaagacugcuugagcccaggaauuggagucugcggugagcuaugaccagaucauaccacugcacuccaguuucgguaacagagcuagacccugucuc

SEQ ID NO: 391115 - RNA, 90 nt, Homo sapiens
uggcaauacugacgugauuggccaaacuaaagaacugcucaagccugugaaucagauuuaguaacuuggucaaaugguaagguauggcca

SEQ ID NO: 391116 - RNA, 82 nt, Homo sapiens
ccaagguugucagcugccuuuccagacauugauaggcaccuugccucuuaggguuaaaugucuguagaugugcugaaccugg

SEQ ID NO: 391117 - RNA, 128 nt, Homo sapiens
ggaggauuuuaucuugccaucauucuguuagcugguuguuauauagacuugauuguauacuuguuuuauauuuucagugggcuauguaauuaacugucuguuucugugguggcagguaauggucuuuc

SEQ ID NO: 391118 - RNA, 78 nt, Homo sapiens
gaggaaccuucauacuguuuccauuaugguucugccaauuuacauuuacauuucugccaacaguguguaaguuuccuu

SEQ ID NO: 391119 - RNA, 82 nt, Homo sapiens
ucagguaucucuauagcaaugugccccuccuugguaccaauuuuauuaggcuguucuugcauugcuauauggaaauacuuga

SEQ ID NO: 391120 - RNA, 60 nt, Homo sapiens
gagguagguuugguuacaaaagagcaacauccuugucgugauggaaccaaacuguaucuu

SEQ ID NO: 391121 - RNA, 83 nt, Homo sapiens
gaauucuacucuccugcuuugcaaauggccuuuccaagcagaggcugcugugguggccuguuuggcagaugcagaggauauuc

SEQ ID NO: 391122 - RNA, 65 nt, Homo sapiens
augguguugggagaacuggcuagcaauaugcagaaaguuggagcuggaccccuuucuuacaccgu

SEQ ID NO: 391123 - RNA, 69 nt, Homo sapiens
gauggucagggagucucuaucaguggagccaaaccagcuccacugacacaguuaaagacccuugccauc

SEQ ID NO: 391124 - RNA, 77 nt, Homo sapiens
gggucucuucuguguuuauggcaugcucccucucaaccuucccauccaagugugguugugucuaaauaaggagaccu

SEQ ID NO: 391125 - RNA, 83 nt, Homo sapiens
caguccuguuucaauguuaauuuccugauuuugauaacugauauuauugagauguaagauguuaauauuaauugagaaagcug

SEQ ID NO: 391126 - RNA, 68 nt, Homo sapiens
guggcuacaugguguauugauuauugcugucuuuuuggacagaacugggaaaugcacauaugcaucac

SEQ ID NO: 391127 - RNA, 58 nt, Homo sapiens
ugagauucuggguggauauaaauuuggggggaacucuauuaaaucuagugcagacuca

SEQ ID NO: 391128 - RNA, 56 nt, Homo sapiens
gaagccagagugagcaugaaacucuuccugagaaagacaugugcacuacuggcuuc

SEQ ID NO: 391129 - RNA, 63 nt, Homo sapiens
guaagguuguauuucaagaaacaguguauuuaaauuuacuaggcuuuugaaaugcagauuugc

SEQ ID NO: 391130 - RNA, 70 nt, Homo sapiens
acauuaucgauuaugugccaaagauuuggagaccuccaugaucuguagaacuaguccuuauagauaaugu

SEQ ID NO: 391131 - RNA, 113 nt, Homo sapiens
ggucuucucacucugucacacccugguuggagugcagcuugugcgaucagcagugagccaugauugcacaucugcacuacagccugggugugacagugugacacacaaagauc

SEQ ID NO: 391132 - RNA, 57 nt, Homo sapiens
ugugaacagcagcugggcuuugcuucaauaugcugaaggcaugugcugcaguucaca

SEQ ID NO: 391133 - RNA, 80 nt, Homo sapiens
auaaugucucuaugguuucuccauaucaucagaugugucagaauuuuauuugauuuugugguuagauaauaguccauugu

SEQ ID NO: 391134 - RNA, 60 nt, Homo sapiens
gugagaugaggucucacucuguugcccaggcuggagugcuauugugagaccucagcucac

SEQ ID NO: 391135 - RNA, 60 nt, Homo sapiens
gugugcacaacaugcagguuuguuacguauguauccaugugacauguuggugugcugcac

SEQ ID NO: 391136 - RNA, 76 nt, Homo sapiens
acugcaguugggacaaagacuccuugaauucagagcugugcuuugaaauucaaggagucuucgucccaauugcagu

SEQ ID NO: 391137 - RNA, 71 nt, Homo sapiens
uguggaaucccaagauaauuuguuuguagauggauaccuaguuugcauauucgaguuauuuugggaccaca

SEQ ID NO: 391138 - RNA, 58 nt, Homo sapiens
agguuugggguuggucaagaugauaaucugucucugacacugaccccaaaaagauccu

SEQ ID NO: 391139 - RNA, 99 nt, Homo sapiens
gaggcaggagaaucgcuugaauccaugagguggggguugcagugagcugggauccugccacuguacuccagccugggcaacagagcgagacuccgucuc

SEQ ID NO: 391140 - RNA, 82 nt, Homo sapiens
uguuaguuccaguuuauagguagauuuagaauguuuucuagucgacaauggguugaguuuaucuaaagaccugggaucaaua

SEQ ID NO: 391141 - RNA, 87 nt, Homo sapiens
ggagaauugcuugaacccgggaggcggagguugcagugagccaagaucgcaccacugcacuccagccuugugacagagcgagacucc

SEQ ID NO: 391142 - RNA, 65 nt, Homo sapiens
gagauggagucuugcucuguugcccaggcuagggcauugucuuggcucacugcaaacuccgccuc

SEQ ID NO: 391143 - RNA, 72 nt, Homo sapiens
uauuuguaaagcuacaggaccugcucauucgccuggacaggugagugcgggugguguguggcguuccaaaug

SEQ ID NO: 391144 - RNA, 119 nt, Homo sapiens
uucuccucuuuguuuuucuuugaauuuuucuucacugcaguguauuggacaguucacauguguaguucgacguaugaauguccugacgcugcaguuagaaacuaucacagacuggaagg

SEQ ID NO: 391145 - RNA, 95 nt, Homo sapiens
gggccuuucggguuugguucaguauugcaccuggaguccuacaggaaaugaaagaguaauggacccagauuugucugaauccagagucgaagccc

SEQ ID NO: 391146 - RNA, 76 nt, Homo sapiens
gauucucauaggagugugaacccuauugugaacugcacaugcaagggaucuggguugcaugcuccuuaugagaauc

SEQ ID NO: 391147 - RNA, 78 nt, Homo sapiens
cagcauuuaggagcagagucacagccaaauucaucaagacaaugagcccauggcauuuucucuguucuuagacugcug

SEQ ID NO: 391148 - RNA, 58 nt, Homo sapiens
cagguucaagcaauucuacugccugagccuccucaguagcuggaauuacuugcaccug

SEQ ID NO: 391149 - RNA, 95 nt, Homo sapiens
ggcauccuaggccacuuugcuuagagggcauuaaaggugccaugaaagguagacucugaaccacuuugaucccucugaaguaggugacugaugcc

SEQ ID NO: 391150 - RNA, 77 nt, Homo sapiens
ucugugucacauguaaguuugguguucugaagccagugaauuuaugcgguugaacaauagauucauaucaucacaga

SEQ ID NO: 391151 - RNA, 58 nt, Homo sapiens
ugagacugagucucccucugucgcccaagcuggagugcagaggcguaaucucggcuca

SEQ ID NO: 391152 - RNA, 76 nt, Homo sapiens
aauugccugucacagggguuugauguacagauuauuuuguuacccagguaauaagcauaguaccugauagguaguu

SEQ ID NO: 391153 - RNA, 73 nt, Homo sapiens
ccuuauggucagggacucuguuuugagucugcugugucccuagagacuagagcagagcccucucuauaauagg

SEQ ID NO: 391154 - RNA, 80 nt, Homo sapiens
ucuggcucugggcuaaagaaauacauaugggagucaucauaguaucgauauuuuucuucaggguccacuccagagacaga

SEQ ID NO: 391155 - RNA, 60 nt, Homo sapiens
ggagaguggguggcgugucgucuacaggaugacaucaccaccuccgucaucaccaccucc

SEQ ID NO: 391156 - RNA, 84 nt, Homo sapiens
ugggacucccagggauucugaagugucacgcuaguccauggguacauuuauggcuuuguuaacauuuucuuuccugcuuaccca

SEQ ID NO: 391157 - RNA, 60 nt, Homo sapiens
gucagaugaguagguagcaaaaauuuucucccauuuuguagguugccuauucacucugau

SEQ ID NO: 391158 - RNA, 71 nt, Homo sapiens
ucuuuauagcagugugaaaauguacuaauacagagaauugguauugggauagugggguauugcuguaaaga

SEQ ID NO: 391159 - RNA, 77 nt, Homo sapiens
aaaaacuguaggacauguacuuguaacagcaauucaucuuucaauucuagucagcaauguucauguucuggguuuuu

SEQ ID NO: 391160 - RNA, 71 nt, Homo sapiens
gucauuaugcuccaucuugucaguaaucuucuuguuaaagagcacucguugacaugaugagcaauaauggc

SEQ ID NO: 391161 - RNA, 56 nt, Homo sapiens
agagguuuuggggcugagagcuuggugggcacgggcugccagcugucccggcuucu

SEQ ID NO: 391162 - RNA, 58 nt, Homo sapiens
gcgguggugugggugggggaggugcugaggcugcagugauccuugauugcaccacugc

SEQ ID NO: 391163 - RNA, 62 nt, Homo sapiens
ccaucuugaaggcuagcugacacagauuauuuuuugugcgugugccuguaagaauuuuuugg

SEQ ID NO: 391164 - RNA, 93 nt, Homo sapiens
gucaggaggucucucagcucucuaaggucuugcuuuuagcucuaacagagaggagguaggggccuuaaagaugcaugggagcccccuuuuggc

SEQ ID NO: 391165 - RNA, 60 nt, Homo sapiens
ugucuggaguaugaaccauguaucagcaccgaaagguucuagaagucagacuuucgggca

SEQ ID NO: 391166 - RNA, 78 nt, Homo sapiens
cucuuauggcuuugugccucagcauucuuugcauucagcuggaaaaggugaaagaggcuguaggauaaugccugagag

SEQ ID NO: 391167 - RNA, 127 nt, Homo sapiens
aagacauuacucuuuaagagcaguuuuagguucacagcaaaauugagaagggaauauauaggaaaucucuguaacuuucucucaauuuugccgugaaccuaaaacugcucuuaaagaguaaugucuu

SEQ ID NO: 391168 - RNA, 63 nt, Homo sapiens
cuacguguucauguguucucauccuuuagcucccacuuauaagugagaacauguggcauuugg

SEQ ID NO: 391169 - RNA, 84 nt, Homo sapiens
ggguugauccuguuggcuugucagucuccaacaguucucuauacagacgcaaauguucuggagaggcaggccacaggucagccc

SEQ ID NO: 391170 - RNA, 59 nt, Homo sapiens
uggauauaaaacauuuuguuuauccauucaucaguugaugaauauuuggguugugucca

SEQ ID NO: 391171 - RNA, 76 nt, Homo sapiens
caucccagagacagaaugauaaacuguugucagcagccgaggaagacagaccccaguuuacacugcuuugagggug

SEQ ID NO: 391172 - RNA, 64 nt, Homo sapiens
guugugaauagugcugcaauaaacauaugugugcaugugucuuuauagcagcaugauuuguaau

SEQ ID NO: 391173 - RNA, 60 nt, Homo sapiens
cagagcauggaggacugcaggccuggcuggcuucagugagggaugcguacccuaugccug

SEQ ID NO: 391174 - RNA, 89 nt, Homo sapiens
ggggagaguuggagacagugucagccauugaaaagaccaaacaauuuaaggcccuuuuccccugggaacauugauucuuuaaucucccc

SEQ ID NO: 391175 - RNA, 58 nt, Homo sapiens
ugcaugagaugccauuugguggauuaauuuguucuuggacuaaaucucauuuuaugca

SEQ ID NO: 391176 - RNA, 120 nt, Homo sapiens
ggauguuacuccuaaugucacagggauguacacccugugauauuauucauaguguaccagaggaauauuagcacuaaugucacgaugcauguacaccuugugauauuauuugucauaucc

SEQ ID NO: 391177 - RNA, 67 nt, Homo sapiens
ggugaggguugagcuggaauucacacccacaucugggaggugcaaauuccagcucaacuccugcacc

SEQ ID NO: 391178 - RNA, 71 nt, Homo sapiens
agugggacugauaagagaugauuuugccaugagggcuucauccucaugaaugcaguaauguccuuaccacu

SEQ ID NO: 391179 - RNA, 66 nt, Homo sapiens
guauuucuaguucuagaucccugaggaaucgccacacugacuuccacagugguugaacuaguuuac

SEQ ID NO: 391180 - RNA, 76 nt, Homo sapiens
ugagaaaaauauucaagagauaauguuaagugcaaaaauagcauaagugagcaaaucuaugaauguauauuucuca

SEQ ID NO: 391181 - RNA, 61 nt, Homo sapiens
cugagaucaugggucaggugguuuguacucuagcaauaaaagcacuugacuuguuucucag

SEQ ID NO: 391182 - RNA, 130 nt, Homo sapiens
aucguccuugccacagcagccuccccuucacuccugcuugccacagaugguguccucccuuccagggcucuugcaguguucugggcaggaagaaggagaggggaaagggcugaaucccagcaagggacuu

SEQ ID NO: 391183 - RNA, 69 nt, Homo sapiens
ggcaccuagaagaauuuuaguaucuuacuccccugcauuucagugagaugcuuguaaauucauuuugcc

SEQ ID NO: 391184 - RNA, 76 nt, Homo sapiens
auuaauaaagaagugucucuaauuaguggggagaugauguacgcuucaguaaauguuaggacauuucaugauuggu

SEQ ID NO: 391185 - RNA, 65 nt, Homo sapiens
uauuucaguugugcagguaguuugcauuuuaaaucaucucacacaacuugcuggaaacugaaaug

SEQ ID NO: 391186 - RNA, 74 nt, Homo sapiens
aacuuuugaugucuugcaggcacgagaugaguucacaagcaaucagugcuggaaggaugugcaaaauaaaaguu

SEQ ID NO: 391187 - RNA, 78 nt, Homo sapiens
ucugugugcacaugcgugcgcacauauguauguguauaugugcauguguguauguguauguguauaaacuaugacaga

SEQ ID NO: 391188 - RNA, 129 nt, Homo sapiens
gggcucuggccuauguugggcucucauaaucauagguagcauagcaggaauauuagugauagguuguugcucccuauauuguugcugugaccugugaguucagggugcugcccuauguacacagauccu

SEQ ID NO: 391189 - RNA, 81 nt, Homo sapiens
aagcuuggcuggaacucauuuuaguaagauucaaucuauacuugguuugucacucuuccuaggguaggcccucccaggcuu

SEQ ID NO: 391190 - RNA, 81 nt, Homo sapiens
agauaaugauacaugcccaaagaguucagguagauuucaaugugguuggaagcuccugguaucuuuguuguacaauuauuu

SEQ ID NO: 391191 - RNA, 66 nt, Homo sapiens
ggcugaugacaguaugacuccaaaaguuuuaaucaaaaaauuauuuugggaauuacuguuggugcc

SEQ ID NO: 391192 - RNA, 59 nt, Homo sapiens
guccucagugugcuuauuucggcuugcuccaugguuugcgguagcauagacugcaggac

SEQ ID NO: 391193 - RNA, 69 nt, Homo sapiens
ggcuaaauuuaucucaaacugcagugauucucuuggaacugggaaguuaguguugugauaaauccagcc

SEQ ID NO: 391194 - RNA, 71 nt, Homo sapiens
uccuagaauagcagacauuucaaggcaggauuugucucucuucugaacugaaauaaucugcuacuuaagga

SEQ ID NO: 391195 - RNA, 76 nt, Homo sapiens
gacccacaggugaaugccucuccuucuggccccacccaccucacaggcagaaagagggaggcuucacaaggagguu

SEQ ID NO: 391196 - RNA, 80 nt, Homo sapiens
cuugagcccuggaggcugaggcuguagugugcugugaucaugccacugcacuccagccuaagaggcagaacgauaucaag

SEQ ID NO: 391197 - RNA, 88 nt, Homo sapiens
uccauggugcaugaaaucccaaauccguucacuuuuuuacuaaauuagauggagcaaaacagauuugggaauucaucuuguucauggg

SEQ ID NO: 391198 - RNA, 84 nt, Homo sapiens
aaccagugaggaagaaguaggcuuuggggcuugacagucauggguuugagcuacugcacuguccuagaguccuccucauugguu

SEQ ID NO: 391199 - RNA, 72 nt, Homo sapiens
uggucauagguugggcguuugauuuuauggcuuuuaggaagcaaaaaaaaucagcgaccuugcuugagauca

SEQ ID NO: 391200 - RNA, 66 nt, Homo sapiens
gugguguaucacacuuauugaccugcagauguuaagccacccuugcaucucuggugugaaacccac

SEQ ID NO: 391201 - RNA, 68 nt, Homo sapiens
gauaguggucuuuuuaguuuagucaugaauuuguuagagaaaaaaugacuuuucugaaaaccaccauc

SEQ ID NO: 391202 - RNA, 70 nt, Homo sapiens
gcugcaucuguggucagcauccgccacucccaaggggcucgcagguggcggguuugaaccacaaagcagc

SEQ ID NO: 391203 - RNA, 100 nt, Homo sapiens
auguaugauuccauuauuuuuaagugcauagacagguguguguguguguauguacacagugucuguguauuuaaaauccaaaccaaaugggaucagacau

SEQ ID NO: 391204 - RNA, 86 nt, Homo sapiens
ucacuucacauggauuaacucauuuauuucaauggcuuuguuuuauucaugcccauuuuauagaugaggaaauucaggugcaguga

SEQ ID NO: 391205 - RNA, 96 nt, Homo sapiens
ccuuuuggaaugggacugugaaucauaugccagucaugcuauugucauuuggaagcagauagcuuaugugguuucacagauucacagguggagagg

SEQ ID NO: 391206 - RNA, 89 nt, Homo sapiens
cuugauuugaaaaaaaugcugcccugauuuuacauauauccaggauggauaugucuauuauuagggcagguuaugagggauaagucaag

SEQ ID NO: 391207 - RNA, 69 nt, Homo sapiens
cauaacuaagggccaugauggaggauaaauauccauguugcuuguucccuucuggcuuuuaugucugug

SEQ ID NO: 391208 - RNA, 76 nt, Homo sapiens
uaguuuacugagaaugaugauuuccaauuucauccaugucccuacaaaggacaugaacucaucauuuuuauggcug

SEQ ID NO: 391209 - RNA, 60 nt, Homo sapiens
ucuaauauguauuuuaacguguaagggcuuggauacaacuacccuagaauacauaguaga

SEQ ID NO: 391210 - RNA, 81 nt, Homo sapiens
ggugaggggaacugaaauggaaugugugcacaguguauuucaaacacauguaugugaauucauuuaaucaucccuuuuacc

SEQ ID NO: 391211 - RNA, 77 nt, Homo sapiens
agggaucucauuaaaugcagauucugcuuagguuacucugggguggggccugagguucugcauuuugacagcucccu

SEQ ID NO: 391212 - RNA, 60 nt, Homo sapiens
ggagauguccuaagugguuaacucuauugaaagagucacauaagugcauaggauauuucu

SEQ ID NO: 391213 - RNA, 107 nt, Homo sapiens
cuggagcggaaggugugggaacuggcgaggcuggucuggcagucuuccagugugguguuccacacgggugccggcaucagcacugccucuggcauccccgacuucag

SEQ ID NO: 391214 - RNA, 63 nt, Homo sapiens
uuuauuccagcccuggugagccaggcucaaccucugucuuggccacauauugggugggaugga

SEQ ID NO: 391215 - RNA, 60 nt, Homo sapiens
gagaaugaugauuuccaguuucauccaugucccuacaaaggacaugaacucaucauuuuu

SEQ ID NO: 391216 - RNA, 76 nt, Homo sapiens
aaugagguccuguuauuugcaacaacaugauggaauuggagauuguuauguuauguuaaugauaauggaaaucauu

SEQ ID NO: 391217 - RNA, 64 nt, Homo sapiens
gacuuugguagaggaaaaaucucauucuuacauauuacuuagauuuuacuuccucauuagaguc

SEQ ID NO: 391218 - RNA, 77 nt, Homo sapiens
uaucuagccuaugaagcuuguccagccuagaagauauuaagaugggcauuaauguacucauuucauaggguuaggug

SEQ ID NO: 391219 - RNA, 102 nt, Homo sapiens
gccguggagcucucugugccacgcugcggggccucggucugaccagcagggggcaccgaguguucucccgcagcggcccggcgugggcggcggcuccaaggc

SEQ ID NO: 391220 - RNA, 65 nt, Homo sapiens
gccgccugguguuuugauggucggguaauaacaauaguaaucacacuauuaauaccagucccggc

SEQ ID NO: 391221 - RNA, 100 nt, Homo sapiens
uacagucacauucugagguacugggggccaggauuucaccguauaauuuugggggaacaaaauucagccuauaauaguccucagagaaaagaccaaugua

SEQ ID NO: 391222 - RNA, 72 nt, Homo sapiens
ugagcaggcaauggauauaaaagagauaagaacagaugaaccaaucucaguguuaucuaucugccuucuaca

SEQ ID NO: 391223 - RNA, 62 nt, Homo sapiens
aucaugacacacaucaaaucuaauucucaguugguuuuuaggcgagauguguguuucaugau

SEQ ID NO: 391224 - RNA, 64 nt, Homo sapiens
gugugaugaggaaguuuacaaagcaucugucugaaauggauaauuuugagaauuuuccacacau

SEQ ID NO: 391225 - RNA, 70 nt, Homo sapiens
gagugguagagguagacuuccuugucuuauucuaguucuuugagaaaagguuuucagcuuuuccccauuc

SEQ ID NO: 391226 - RNA, 63 nt, Homo sapiens
gaggaagucugucuagaacugauacaguauauccacagugcuaucagagacccaggcuuccuc

SEQ ID NO: 391227 - RNA, 90 nt, Homo sapiens
ggaguuucacucuugucacccaaggcuggagugcaauggugugaucucggcucauugcaacuuccgccuccuggguucaagcgauucucc

SEQ ID NO: 391228 - RNA, 79 nt, Homo sapiens
caugugcauccgugugaagagaccaccaaacaggcuuugugugagcaacauggcuguuuauuucacaugggugcaggug

SEQ ID NO: 391229 - RNA, 56 nt, Homo sapiens
uugagauggaguuucacucuugucacccaggcuggagugcaauggcaccaucucag

SEQ ID NO: 391230 - RNA, 66 nt, Homo sapiens
cugugauagguuagucaugaauuugcaguuaaugaagggcuauuuauuucaugccuacccucacag

SEQ ID NO: 391231 - RNA, 70 nt, Homo sapiens
ugccuaggaucagagugaaccuuguuaugacgcuuucagaugccauguucaacacuuuggucaccaggca

SEQ ID NO: 391232 - RNA, 101 nt, Homo sapiens
ugaggcaggagaaucgcuugaacccaggaggcagacauugcagugagcugagauugcaccauugcacuccagccugggugacagagugagacuccgucuca

SEQ ID NO: 391233 - RNA, 71 nt, Homo sapiens
uaauuuucccacuugguagauugguagcccaccaaagaaggggcuguuaacauuuuagagugggaaaauua

SEQ ID NO: 391234 - RNA, 56 nt, Homo sapiens
uaaggcccggccuuuccaagcacuuauguaaagagcucuuggaaggaagggcuuug

SEQ ID NO: 391235 - RNA, 107 nt, Homo sapiens
uguaauaaauagauauuuguugagugaaugaaugauuaaaugaaugaccaaacagaaaccacuuaagaaucuauuuacuaacagaaaaaagaaucuauuuacuuaca

SEQ ID NO: 391236 - RNA, 112 nt, Homo sapiens
gcaacgcugugggcccauuugaagcuggagaccacacauuuguuguagcaccauuacaccugaguuugugguuuucuuguauugagcaguuuuagaagcagcagcagauugc

SEQ ID NO: 391237 - RNA, 70 nt, Homo sapiens
uguuagaugccauagcagaauuuggucaagucucuuagugcagggauuuggauggaguuguuaugugaca

SEQ ID NO: 391238 - RNA, 123 nt, Homo sapiens
ggcaugcgccaccacgcccagcuaauuuuuuguacuuuuaguagagacgggauuucaccuguugaucaggcacccugucucuacuaaaaauacaaaaauuagcugggugugguggcgcaugcc

SEQ ID NO: 391239 - RNA, 56 nt, Homo sapiens
uuggucaucucccuccuuuuagcuuaaaccgaagcaugaugggggagauaggccga

SEQ ID NO: 391240 - RNA, 55 nt, Homo sapiens
cagugcuuugguucucaaagcuucuuuucaaugggugcuuagagacaaaacauug

SEQ ID NO: 391241 - RNA, 56 nt, Homo sapiens
ccucucuugaaagacuccuuuggugaccagugggucacaguccuguuuaggagagg

SEQ ID NO: 391242 - RNA, 73 nt, Homo sapiens
cauaggauggagggcuagucauuucuuuuuguaucuuuuacauaaaaaucuaugacugcuucuccucugaaug

SEQ ID NO: 391243 - RNA, 108 nt, Homo sapiens
cuucaaaauuucuacaauguuaaaucugccauauccuuaauuugaguaaacuggucuuugcaacuaauaaaauagcccuggauuuugugcucaaagugguauuuggag

SEQ ID NO: 391244 - RNA, 58 nt, Homo sapiens
acuauuggauauuaaucaugacauauacugggcauguuauggauuuauauucuguagu

SEQ ID NO: 391245 - RNA, 56 nt, Homo sapiens
aggcagagguugcagugaguggagaucaaucgcgucaugucacugcacucuagccu

SEQ ID NO: 391246 - RNA, 69 nt, Homo sapiens
aacuuuagguagucaaagguuaguccuuguggucuaagguugcauugauaaucuuugguauuuaaaguu

SEQ ID NO: 391247 - RNA, 56 nt, Homo sapiens
gacccuggcuaccugguaggcggaaccaugucacuugugccauguagcacaugguc

SEQ ID NO: 391248 - RNA, 89 nt, Homo sapiens
guguaugacagcuaaauuguuaaauccaaggucaugaagcuuuauccuuauguuuucuucuaaggguuucacagguuuagcucuuacau

SEQ ID NO: 391249 - RNA, 66 nt, Homo sapiens
cugaggucauucaugugggcgcauaacagaagugacagacugguguguuggcaagaaugaucacag

SEQ ID NO: 391250 - RNA, 72 nt, Homo sapiens
gcucagugagguagguaccauuaucacugcuagaaagcagugaacuuauauggucuuacuguggcacugggu

SEQ ID NO: 391251 - RNA, 66 nt, Homo sapiens
caugagaugugggggugucagggucagaguaauaugguuuggcuguguuucccuacaaaucucaug

SEQ ID NO: 391252 - RNA, 84 nt, Homo sapiens
caaagagaaggagaaaagagcuguggcccuucagggagcccagaccuagggacucccugagccagggcuuugacacccucuuug

SEQ ID NO: 391253 - RNA, 81 nt, Homo sapiens
aguuuuaggguacaugugcacaauguacagguuaguuacauauguauacauugacaugcuggugcgcugcacccacuaacu

SEQ ID NO: 391254 - RNA, 67 nt, Homo sapiens
gcaaacuuuuuacucaaugauuccucugauaacaaguuaugggagaaccauuuggagaaaaaguugc

SEQ ID NO: 391255 - RNA, 58 nt, Homo sapiens
acccaguaauuggaggcuguggugaacuaugaucacgcuacugcacuccauccugggu

SEQ ID NO: 391256 - RNA, 63 nt, Homo sapiens
uggaguaggccuaagaaugacaagaguuccucuucugggcuggugguucuggaggccacucua

SEQ ID NO: 391257 - RNA, 77 nt, Homo sapiens
ggcuguuuaugcugcuauaaacauagguauacugugguagaauauagauauaucuguccauggcccugcuuucaguu

SEQ ID NO: 391258 - RNA, 122 nt, Homo sapiens
uguuuccaauuucucauuauuauuaccaaugucuagcacauuuaucuuuauacauguacaacuguaucuguaggagaguuggaauggcugcgucgaaggguaugguauaggaauuuuaaaca

SEQ ID NO: 391259 - RNA, 124 nt, Homo sapiens
caggcaagcaucuuaguauuccugagucuuguauuucacaucuaugaagugaggauaguuuaacucuaccuuauaguaugauguugagaauuaaauuaaacaauauaguugagaagcuuguuug

SEQ ID NO: 391260 - RNA, 77 nt, Homo sapiens
acgaacguggauaucuguugauaagucuguccccaggcccauauagcuacagaucagagauauuuagguuacaacgu

SEQ ID NO: 391261 - RNA, 69 nt, Homo sapiens
uagggaccaaguggcuuuaagaacuggauuaaaguugauccagugcauucagacacuuggcauucccug

SEQ ID NO: 391262 - RNA, 89 nt, Homo sapiens
gaagacccggcuuucuccaggugucauccaccuccuguccugcugcccuguccagggggggcaccuuggugaagaggccggucaucuuc

SEQ ID NO: 391263 - RNA, 69 nt, Homo sapiens
agggaagguuucaauagauacagaacuauuuugaguuugcauuucguuuugauaaguugcacuuuccuu

SEQ ID NO: 391264 - RNA, 58 nt, Homo sapiens
uaggugaauguaguaagguguugauuagaggugcaaucaacccaagacauuucacuua

SEQ ID NO: 391265 - RNA, 71 nt, Homo sapiens
cuacucggagggagugaauuuucauuauacaacuuuuagcuaauauagucaaaucucauuacccccaguag

SEQ ID NO: 391266 - RNA, 77 nt, Homo sapiens
agcuguucuuacuuuguccuucaaggugugucauucuuuggcagauggccaggccggggacagaacugaagacagcu

SEQ ID NO: 391267 - RNA, 119 nt, Homo sapiens
cgugaacagugauuucuguggauaugcaauucuagauugauaguauuuucucccagcacuuugaagaugugucauugguuucuggauuucaucauugcuauuaaaaaucaacugucaug

SEQ ID NO: 391268 - RNA, 56 nt, Homo sapiens
ccauuacacacagaguucuggaguuguacuguuaauguacucuguauguggagugg

SEQ ID NO: 391269 - RNA, 57 nt, Homo sapiens
gugugagugcacauagcucuagaaugccucacaugaccuugagaugugaacucacac

SEQ ID NO: 391270 - RNA, 79 nt, Homo sapiens
guguccccugcguggguaggcaagcggaugucagagaggcaccgaacucucugccuuugucuugccugccuagggaugc

SEQ ID NO: 391271 - RNA, 87 nt, Homo sapiens
cugcagagagacuuggcagugguucugacggaccugugaguccacaauaggaaacggucuucaugaccauagcuaaguaccauguag

SEQ ID NO: 391272 - RNA, 91 nt, Homo sapiens
cugaguuauucuauaucauggagauuaacauuccaagcuucauuuccauuuguggaaugguaaacuuccaugacuguuaaagguauuucag

SEQ ID NO: 391273 - RNA, 60 nt, Homo sapiens
uuugagucugucacucuguugagguuggauccuuauucuaauagcauugauggacucaaa

SEQ ID NO: 391274 - RNA, 116 nt, Homo sapiens
gcugucaguaauuaagucuugucaguuuggggccaguuguuacagaaaugaucauuuaucuuccuggauugucacuggagauagcaaucugguuuccugcaagucugacuuauagc

SEQ ID NO: 391275 - RNA, 66 nt, Homo sapiens
cugacaagauucaucacucaguuuucugggacaacugaaauuggaauggaguauggauuuggucag

SEQ ID NO: 391276 - RNA, 55 nt, Homo sapiens
uaugaaagcuacuucucacaaucacagacuuuuggugugagaaggaucuuauaug

SEQ ID NO: 391277 - RNA, 61 nt, Homo sapiens
gggaaauaauauagcuacuuucauuuuacuuugauuaguaugagaguaguguauuauucuc

SEQ ID NO: 391278 - RNA, 84 nt, Homo sapiens
gugucucagcuuggaauaucuuguaucugaccucauaaaauugauccugauuuugugggugguaaaauacaaugauagaggugc

SEQ ID NO: 391279 - RNA, 57 nt, Homo sapiens
gcaauauguuacaacacccccugaaaauagguuuuaggcaggauaguuacauauugu

SEQ ID NO: 391280 - RNA, 76 nt, Homo sapiens
gggguuggaguuaaguugcagguugugauuccauaggccuggccuggggucugauccugcauuuguaaccagcucc

SEQ ID NO: 391281 - RNA, 59 nt, Homo sapiens
cuggcucauuucauuuagcauaauggccuaaguuucaucuguguuggaguaugugucag

SEQ ID NO: 391282 - RNA, 90 nt, Homo sapiens
ugucacccuuaacugaguauuucgcuguccucaaaagguuuacaguuaaacaaucuuuuuaguugcucagguauucucuuaggguugaua

SEQ ID NO: 391283 - RNA, 56 nt, Homo sapiens
gugguggugugugccuguaaucccagcuacucuggaggcugaggcacuaguaucac

SEQ ID NO: 391284 - RNA, 65 nt, Homo sapiens
caaacugacacagacagcugcuuaucaaauccugacacauaacagcauuugugucuaguaguuug

SEQ ID NO: 391285 - RNA, 99 nt, Homo sapiens
auucagcuuauaaugcauuacuaucacuguuuugaugcccggaucgucucagagcguccgagcaucaaaacagugauaauaauggauuauaagcugaau

SEQ ID NO: 391286 - RNA, 64 nt, Homo sapiens
uucaguuugccaguauuuuauugaggauuuucacaucgauauucaucagggauacuggccugaa

SEQ ID NO: 391287 - RNA, 69 nt, Homo sapiens
uuuuuuucugguuguguaauuuuaaauagaaccccagggguuugcuuugagaaugcuaccagagaagag

SEQ ID NO: 391288 - RNA, 65 nt, Homo sapiens
auguugagugcguaucagugcauuguggcauugaguguguaucagugcauuguggcauucagcau

SEQ ID NO: 391289 - RNA, 64 nt, Homo sapiens
cuugacacacagaguggggauuagcuggauucgcuggauuuagcaauucauuuugugucucagg

SEQ ID NO: 391290 - RNA, 66 nt, Homo sapiens
uauggcagcugacacuuccgucuucagggcagggcguacgaagagggggccuguuaguugcacaug

SEQ ID NO: 391291 - RNA, 99 nt, Homo sapiens
gaggcaggagaaucacuugaaccugggagguggagguugcagugagcugagaucaugccauugcacuccagccuuggugacagagugagacuccgucuc

SEQ ID NO: 391292 - RNA, 56 nt, Homo sapiens
cccaggcuggagugcaguggugcagucauggcccacugcacugucaaccuccuggg

SEQ ID NO: 391293 - RNA, 75 nt, Homo sapiens
uuuuaaaauuuaacagcuuuagaaauuuggggauuuaauucccaguggaauauaugaaugcuuuaaauauuagaa

SEQ ID NO: 391294 - RNA, 60 nt, Homo sapiens
ugguaccaguaaugggucaaaggcacucuuucugaguauucuagaaaaauuacuggacua

SEQ ID NO: 391295 - RNA, 81 nt, Homo sapiens
ggagugggcuguguggagggagaccaagcaccaaggcccgcccuggccucugaguguccaccccuuucacaggcccauuuc

SEQ ID NO: 391296 - RNA, 82 nt, Homo sapiens
ugcauauuugggcauguaggcccccuucucaggacaguuggaugcucaccugggaagaagguuuacuugccaaacaauugca

SEQ ID NO: 391297 - RNA, 72 nt, Homo sapiens
ggcaggauuuguugugugauucaucagggcagagaagcaguuugaggaaaggcauaaguagggcaucuuguc

SEQ ID NO: 391298 - RNA, 63 nt, Homo sapiens
cccaacacuuuccagaugagggagaaguagaacugcuugccucucacacugaauguguguggg

SEQ ID NO: 391299 - RNA, 60 nt, Homo sapiens
ugggcaauggcucugauguuguugugacuucugaugucaccaccagaagagcuauucuca

SEQ ID NO: 391300 - RNA, 57 nt, Homo sapiens
ccuuggccuuuggguccugggguggccccugcagucccaagauggaccagaccaagg

SEQ ID NO: 391301 - RNA, 74 nt, Homo sapiens
agguguccuuuaaaaauauguuguuugcccucucuuggauaauuaguuaccuaacauguuuuuaagggaagcuu

SEQ ID NO: 391302 - RNA, 87 nt, Homo sapiens
gaguugggagaccguugguuaccuucagaaaugaguugcgacaguuagugccgcuugcugaacaggaaccuggcagucuccagauuu

SEQ ID NO: 391303 - RNA, 62 nt, Homo sapiens
guuuucagaaaucccagggggguaauggacugccuauaccccugugacggguauuugaggac

SEQ ID NO: 391304 - RNA, 63 nt, Homo sapiens
cuauguguccauguguucucaucauuuaccucccacuuguaagugagaacaugugguauuugg

SEQ ID NO: 391305 - RNA, 68 nt, Homo sapiens
uccaggagauacacugcaccagccaagaagcacgaaacacaggaauggaaguggagugucuuccugga

SEQ ID NO: 391306 - RNA, 69 nt, Homo sapiens
acagccuggcauucagggccucuaccagucucugcaucuuggugguaguggucccccagucccagcugu

SEQ ID NO: 391307 - RNA, 82 nt, Homo sapiens
auucuccuagcugcacuuccugcuacugggaagggugggguugcuuuccuggggagcaguaguaggcaggcagcuggagaau

SEQ ID NO: 391308 - RNA, 73 nt, Homo sapiens
uggcucggagcagacaugaggaccgcuggcaccuccucagcccucucugugcucugcugccugccccgaguca

SEQ ID NO: 391309 - RNA, 80 nt, Homo sapiens
guaaggguucacuggaacuaagggggcuccagcuaaaaaacaaguuugaaaggcacugaucuuauccaguaucaucuuac

SEQ ID NO: 391310 - RNA, 63 nt, Homo sapiens
gcauuaugccuuagauauugaauggcuagauuuacuaguagcaauggcucugagcuaucuugc

SEQ ID NO: 391311 - RNA, 60 nt, Homo sapiens
aaagacaugaaaaucagcuccaaaaaaucaaugauccaggagcugguuuuaugaaucuuu

SEQ ID NO: 391312 - RNA, 57 nt, Homo sapiens
uuugcacuuuaauauaaugugaaugcaagcacagaaauauuguagguaaagugcagg

SEQ ID NO: 391313 - RNA, 78 nt, Homo sapiens
gguaucuuuauagcagcaccccacuaccucagugccaauucaguguauuagucaguucucaugcugcuauaaggaacu

SEQ ID NO: 391314 - RNA, 81 nt, Homo sapiens
gacccauuugaggaggcagucuguccguucucagaucucaaaauccaugcugggagaaccacuacucucuucaaagcuguc

SEQ ID NO: 391315 - RNA, 75 nt, Homo sapiens
gccgugcgcucugcgggggagcugccgggcgccccuuguccagugcuugcagcucagcugcggaguuuuguuggc

SEQ ID NO: 391316 - RNA, 76 nt, Homo sapiens
ucacucgaacccgagagguggagggugcagugagcugagaucacgccacugcacuccaaccuuggugacagaguga

SEQ ID NO: 391317 - RNA, 86 nt, Homo sapiens
cuguagccuuguaguauaguuugaagucagguagugugaugccuccagcuuuguucuuuuggcuuaagauugucuuggcaaugcgg

SEQ ID NO: 391318 - RNA, 116 nt, Homo sapiens
uuauuuaaucuuuauuaaauuaaauucuuuauuuguaaggcagggccaguaaaaccauaaauauuacuggcucugcuuuacaaacagggaagcacauguuccaagaaguuaaauga

SEQ ID NO: 391319 - RNA, 80 nt, Homo sapiens
uuacuuaaccucucugagacuugguauuguaaucugugaaaaggaaauaaucacaguguucuugugaggguuaaauguag

SEQ ID NO: 391320 - RNA, 69 nt, Homo sapiens
aguucacccucuaauaacucuacgaggcaaaugcuauuguccauauuuugcaguuacagagagugagcu

SEQ ID NO: 391321 - RNA, 111 nt, Homo sapiens
ccagaccucugaggagggggagcugccuggcagaggcuggugccucagaagcuaagaagagggucuuauguaacugggacacaagccucugaggguagcaucagaggcugg

SEQ ID NO: 391322 - RNA, 56 nt, Homo sapiens
ugagcuaggaucacaccugcauuccagucugggugacagaaugagauccuaucuca

SEQ ID NO: 391323 - RNA, 61 nt, Homo sapiens
caagccuagcagacaggcugggagcagagcaaacgggccucuucacugucugcugagcuug

SEQ ID NO: 391324 - RNA, 99 nt, Homo sapiens
cccacagaucaguguuuaucugcauuagggugaagaccuggauauacauggauuaucaccagguugacagacccugaugcagguggagugagacauggg

SEQ ID NO: 391325 - RNA, 60 nt, Homo sapiens
ggugagcgaggaaacgacggcgcgccuggccugcagugggcucacguguucuugcucauc

SEQ ID NO: 391326 - RNA, 74 nt, Homo sapiens
uucccgggacuucauauuucccugugugcagauggguguugcuaacaaccccacucacacauggaccuggugaa

SEQ ID NO: 391327 - RNA, 65 nt, Homo sapiens
ugagaauguaucauagucacuuccaguuugggcuaucacaaaugaaacugcuaugaacauucuca

SEQ ID NO: 391328 - RNA, 75 nt, Homo sapiens
gagaugucauugaaguggaaucauccagucuuugucuuuuugugacuggcuuauuucacuuaauguaauguccuc

SEQ ID NO: 391329 - RNA, 55 nt, Homo sapiens
augauuccacuuucuaagaggggcuacucuagauacuucacagaaguggaaucau

SEQ ID NO: 391330 - RNA, 60 nt, Homo sapiens
gcccaugagaggggcugguccaaccugagcacccuuugguaggcuggccucucucagggc

SEQ ID NO: 391331 - RNA, 109 nt, Homo sapiens
ggcagaggggcugggggaguugggggaaacaugagacuggguuuguagggccccuaaggaggagcucaggacccgguccagguggguacgaguccuagguuccuuugcc

SEQ ID NO: 391332 - RNA, 81 nt, Homo sapiens
caaguauuauggcucuauuuccuugucuagauacugauauaacuguaauuguggauggguugaaaugugagccaaugcuug

SEQ ID NO: 391333 - RNA, 56 nt, Homo sapiens
gagacacugggauucuuuugaucugggaucccauguuccugagauucccaguucuc

SEQ ID NO: 391334 - RNA, 101 nt, Homo sapiens
aguuauuuaaggcaaacagcugaaauugcacaaguggugauuugguuaauucugccaguugaguaaguaauugugacacauuucauaguuugcuuaugauu

SEQ ID NO: 391335 - RNA, 56 nt, Homo sapiens
gaggucauguggcaggcagccagugugccucaagggccccugccugcucugaucuc

SEQ ID NO: 391336 - RNA, 59 nt, Homo sapiens
uuucauaguaacaguaacuaugguagguaacuuauuuauaguguuccuuuacuaugaaa

SEQ ID NO: 391337 - RNA, 71 nt, Homo sapiens
gaggcuuucuggucuaaaggcacaggcaagggaguguuggccauuugucuccuagacgaccaggcggccuc

SEQ ID NO: 391338 - RNA, 84 nt, Homo sapiens
ucaucgguuauagggaucauuuuucauccuacagaacuguucuuguacugauggaauuugaggaaugauuauauaugaugguga

SEQ ID NO: 391339 - RNA, 60 nt, Homo sapiens
gaguugagaaguugggaaagagaugguauacucacaucccuuugcacugcuccucagcuc

SEQ ID NO: 391340 - RNA, 91 nt, Homo sapiens
agaccuccagacacagaguaggcacacaucuacuacaaauaugaauguauguuuguggccucaugugugugcaaacuugucuggaugaucu

SEQ ID NO: 391341 - RNA, 72 nt, Homo sapiens
ggaugagcacagauuccaacuuccuguuacagauucuaaccuccugugacaggauggagaucgguauuaucu

SEQ ID NO: 391342 - RNA, 84 nt, Homo sapiens
agaaucaucccauaucuaugaaaucggaaucucuuggguggaugccagagauccucauuuuauagacacucucaaggugauucu

SEQ ID NO: 391343 - RNA, 93 nt, Homo sapiens
uaguuggcgcuauagacaaaaugguguuaguagaucuuuagaggacauuuuauuuaaugauugcagaauaccaucuuuuaugaagcacaacua

SEQ ID NO: 391344 - RNA, 74 nt, Homo sapiens
gcuuagagcaccauuagcguugggccggugccacagagcaaauaggacugagccccaucugaggugcccagagu

SEQ ID NO: 391345 - RNA, 66 nt, Homo sapiens
gugucagaaucucagaugacaacgucaggugcaagcaccuaauguugucgucucagauucugacac

SEQ ID NO: 391346 - RNA, 129 nt, Homo sapiens
cuugguuucuaucuccuacaggugagguaaugcuguagcugugaugguaucagcaaagaauaugccagaucagagcaauagggcuuauauucaaaugacuugagaaagauaauaaaguuaaugaacaag

SEQ ID NO: 391347 - RNA, 94 nt, Homo sapiens
cacaagcaauaggaacaugcucuugauuugaguucucugaauucaaaaauucaaaggauagauuaagaucagcagaaguuuagaggagcuggug

SEQ ID NO: 391348 - RNA, 130 nt, Homo sapiens
accgcgcccggccaagcuuacuuuuuaagaacuggcauagggcgggcacaguggcucacgccuguaaucccagcuacugugcccggccuaugccaguucuuaaaaaguaagcucaggggcugggugcggu

SEQ ID NO: 391349 - RNA, 88 nt, Homo sapiens
uuucaaaagaauugugauugauauauuuacagaauuaagucuuuguagccagguguguguguauauuauuauuaccauuuuuuugaga

SEQ ID NO: 391350 - RNA, 65 nt, Homo sapiens
gcuacagaauauuucugcccugagcucauuaugaacagaguuuuggacugacuugucuuuguggc

SEQ ID NO: 391351 - RNA, 98 nt, Homo sapiens
uggguagcccugggggcccgcaucacagcuccugugcuggcaaaccacaccauguuugccagugcaguagcugugaugcgggcccccagggcuaccca

SEQ ID NO: 391352 - RNA, 88 nt, Homo sapiens
ggagucucacucuguugccuaggcuggagugcaguggcacuaucuugggucacugcaaccuccaccucccagguucaaguaauucucc

SEQ ID NO: 391353 - RNA, 59 nt, Homo sapiens
caccagaagaaucagaucacacgugggcuuugagaaugagugcaagguuuuucugagug

SEQ ID NO: 391354 - RNA, 55 nt, Homo sapiens
uagagcacagugauuagaccuagggagguacaaccugcugcuuacugugcuucug

SEQ ID NO: 391355 - RNA, 110 nt, Homo sapiens
uaguuauauuuuaauucauugaacaaauauuuauugaucaaccauuauaggccagaccugugacaaauuuaguggacuguuuguuaauuuaguugaacauauacuuacug

SEQ ID NO: 391356 - RNA, 74 nt, Homo sapiens
uguggcuaguggaauuaagaaacugaauuuuaaauuguauuuaguuuuaauucauuuaaauuucaauagccacg

SEQ ID NO: 391357 - RNA, 65 nt, Homo sapiens
guggccucugaguaacacagugugacaugccuucaacuaugaucugaauguucuauagaagccgc

SEQ ID NO: 391358 - RNA, 64 nt, Homo sapiens
guaaucucagcuacuugggaggcugaggcaggagaaucgccugaacccaggaggcggagguugc

SEQ ID NO: 391359 - RNA, 57 nt, Homo sapiens
uuauugccugauugaggucauuacccuauggugguaaugacaucagcaauguaauaa

SEQ ID NO: 391360 - RNA, 73 nt, Homo sapiens
cugcacauuucagcuugaaugcuccgguguggggcuugcaccugaucaccagaugcuucaagcagauggccag

SEQ ID NO: 391361 - RNA, 129 nt, Homo sapiens
aauugacuguaaagcacuauauaaagauuaagcuuuguuaaggucauaggaagaauucaaacucgaauaucuacuugauugauauucuuucuggaucccaaaauguaaguugauauaugauguguuauu

SEQ ID NO: 391362 - RNA, 104 nt, Homo sapiens
aggccugauuagucaaaaugauaucuuauccucuuugccaguauugguucaaaaauaagcaugugaccuaauucuggccaaagggauaagagguuugcuggcuu

SEQ ID NO: 391363 - RNA, 82 nt, Homo sapiens
gugccagccauggcugauuugagagaggguguuuauaucccagugguguagaaagcucuucugaaauccagaggccgggcac

SEQ ID NO: 391364 - RNA, 65 nt, Homo sapiens
agauucagaaaguguuuacgaguuagaaugaccaauagguuaaguagauaguugguucugaaucu

SEQ ID NO: 391365 - RNA, 81 nt, Homo sapiens
gauuuuucaucugguuuagcugguuauuauauaugacaaaaagagaucacaaugugauaguuggcuaaagcagucugaguc

SEQ ID NO: 391366 - RNA, 77 nt, Homo sapiens
gccuuguaguauaguuugaagucagguagcaugaugccuccagcuuuguucuuuuggcuuaagauugacugcaaggc

SEQ ID NO: 391367 - RNA, 56 nt, Homo sapiens
gagacggagucucgcucuuucgcccaggcuggagugcaguggcgagauuucggcuc

SEQ ID NO: 391368 - RNA, 82 nt, Homo sapiens
cuuacucaacuuuauggcauucuguauaacauugcuccugaccaaggagcuuguuuuauagaaagucaaguguaccagugag

SEQ ID NO: 391369 - RNA, 67 nt, Homo sapiens
gggcauugugggcagagggcagggcugugccucaguuuuccaagccucuuccugugccacagugccu

SEQ ID NO: 391370 - RNA, 78 nt, Homo sapiens
uucagaucucuccuagaguacuuaccacagcauguauuacaugugcuguuugugggucacucuauugcuagacaugag

SEQ ID NO: 391371 - RNA, 66 nt, Homo sapiens
gaugcuacucauuucaccuauauuauugaauuucaucugugaggacuccgugagguggguaguauc

SEQ ID NO: 391372 - RNA, 74 nt, Homo sapiens
ugcuugagcucaggaggcagaggcuacaaugagcaaagaucaugccacugcacgccauccugggcgacagagcg

SEQ ID NO: 391373 - RNA, 120 nt, Homo sapiens
caauguauacauauaucaaauuuuaccccauauuguacauuggguacaaucuguacccucauaauacaaauuguaccccaauguacaauauggggagcaauuugauacauguauacauug

SEQ ID NO: 391374 - RNA, 78 nt, Homo sapiens
guuuggaaacuuuguagccacagguggugaggaaauuuaacagcgcuuguauggcuugauggcacaagguuucugaau

SEQ ID NO: 391375 - RNA, 62 nt, Homo sapiens
ugccaugaagagaggaagcagugaugucaggcucauaggaucccugcucccuccuucuggca

SEQ ID NO: 391376 - RNA, 65 nt, Homo sapiens
uuguccuaauuagguaaagcauacaaaaauuucaacacagaauugugauuauuuaaauaggacag

SEQ ID NO: 391377 - RNA, 65 nt, Homo sapiens
gauggcacuaagccauguaggaaggauccaucuccaugauccaauaccuccaacuaagucccauc

SEQ ID NO: 391378 - RNA, 70 nt, Homo sapiens
aguagcuuagccuuuacaccuacuuuauauccuggagaagaaauugagguagaggugaacuugaccuacu

SEQ ID NO: 391379 - RNA, 77 nt, Homo sapiens
uuguuaaaaucauauucuuguucuguuccaaaucuugaauaacugaggcuuggaauaucaugagaguuuguuaacaa

SEQ ID NO: 391380 - RNA, 56 nt, Homo sapiens
ggagaagauucaaaaagucauauuccagggagugagacugauaggacauuuucuuc

SEQ ID NO: 391381 - RNA, 71 nt, Homo sapiens
gugagaucuguuuugagaaaugcaugcucgggcgauaucacugucgugcagaccucacagcauucacucac

SEQ ID NO: 391382 - RNA, 89 nt, Homo sapiens
auugugaaguguacauguauauuuucugccuucaggaaucagauucuuugcuguaaacauagaauguaauguaccuccuuucaaacaau

SEQ ID NO: 391383 - RNA, 63 nt, Homo sapiens
gucugcugccuuuuguucagauaugcccugcccccagagguggaaucuagagaggcaguaggc

SEQ ID NO: 391384 - RNA, 73 nt, Homo sapiens
aaaggauaagaacagaaguuuccacgcagcuaucacucaacugccuggaaacuuauguucuucuguguucuuu

SEQ ID NO: 391385 - RNA, 90 nt, Homo sapiens
uguuuggaguguggauuuggaggaaggaugguugcuaugaaaagauuucuuuauaaacagcuuauccucuauucucccaacguccaaaua

SEQ ID NO: 391386 - RNA, 125 nt, Homo sapiens
uucuuguccuaaguccuguggucuauugaauuauuuauggcuauucuucuuuugucagucuucaaagagauagaaaaauaugugaaugguuauggagcuaguaguuaguggagcuagaaccagaa

SEQ ID NO: 391387 - RNA, 72 nt, Homo sapiens
cauugcacaacucugagaagcacuaucuaugugguauucuaugugaauggugcuuccuagauguguacaaug

SEQ ID NO: 391388 - RNA, 63 nt, Homo sapiens
gcuaagguucuugcuugcaugacuguccacaugucgggcucauguggguagggaaucaauagc

SEQ ID NO: 391389 - RNA, 86 nt, Homo sapiens
uaaguuuuaggguacaugugcacaaugugcagguuuguuacauauguauagaugugccauguugaugugcugcacccauuaacuug

SEQ ID NO: 391390 - RNA, 58 nt, Homo sapiens
ugagacggagucucgcugugucacccaggcuggggggcaauggugcgaucuccgcuca

SEQ ID NO: 391391 - RNA, 75 nt, Homo sapiens
gccaacauuuugcaguuucugucuccagggcauuugaugcuucuggguauggggaaggagacugaagaucugggc

SEQ ID NO: 391392 - RNA, 58 nt, Homo sapiens
caaagcaaugcacuccugaccaaguagauucuuuuaaaaauuagagugcauuacuuug

SEQ ID NO: 391393 - RNA, 67 nt, Homo sapiens
uuuaaggcaugccuguacaugcucauacauuuuucuaaauauaaucuuaugugcaggaugcccugag

SEQ ID NO: 391394 - RNA, 58 nt, Homo sapiens
accaaugucuuugacugaugaacccacaaacaggcauucaucagucaaagacaauggu

SEQ ID NO: 391395 - RNA, 88 nt, Homo sapiens
aucccuucagguuuccaaggaaugcuaaguuuccucccuaucaugagagaugcaaagugaacuuaguguugggagauggaagcuggau

SEQ ID NO: 391396 - RNA, 58 nt, Homo sapiens
cuuggcaagagggaugcaagguuugggcuggggcuggggcccaguacccucugccaag

SEQ ID NO: 391397 - RNA, 91 nt, Homo sapiens
ggagaaucgcuugaaccuuggaggcagagguugcagugagcugagaccacacgccauugcacucuagccuaggugacaagaacgaaacucu

SEQ ID NO: 391398 - RNA, 103 nt, Homo sapiens
acuagacuguuacaucugaagguuaaauuuauguaaaagucuuuuguccuaacugaugaauagaaaucuguuugcugagucugacuucaugguacaguuuagu

SEQ ID NO: 391399 - RNA, 87 nt, Homo sapiens
caauuuuguuuauguuugugcuauguuauauauucuguuuguuuaaaacuaggguuuaugugauggguacauauggacauaaaguug

SEQ ID NO: 391400 - RNA, 126 nt, Homo sapiens
ggcuuaugggauguggagggugguccucccugucacacgcaggcuuacgggaugugggggguaguccuccccgucacacgcaggcuuacgggaugugggggugguccucccugucacacgugggcu

SEQ ID NO: 391401 - RNA, 65 nt, Homo sapiens
uguaguccuagguacuuaggaggcugaggcagaggaucgcuugagcucagguauuugaggcugca

SEQ ID NO: 391402 - RNA, 77 nt, Homo sapiens
ggcuguauuacugagugugacaaauacgucggaagggccccgcucuggaugauuguucucacucaagagagaaagcc

SEQ ID NO: 391403 - RNA, 81 nt, Homo sapiens
gcuuugucugguugacagcauguggcccucguaaccaaggggugauucaacccuggccacagggcugaacguggacaaggc

SEQ ID NO: 391404 - RNA, 62 nt, Homo sapiens
uguuucuaggggagggguauauuaucagcuuccaaaguggaucuaucacuucccuggaaaca

SEQ ID NO: 391405 - RNA, 72 nt, Homo sapiens
cuguagccuccaacuauuagacucaggugauccuccaaccuuagccuccugggucuguaguuagggcuacag

SEQ ID NO: 391406 - RNA, 57 nt, Homo sapiens
gcaaaguuuugcagauuaaugggaaccuuacucauuaaacugucuuuggagcuuugc

SEQ ID NO: 391407 - RNA, 62 nt, Homo sapiens
ggagaaacuggaccuggcuuuaccuugaguucuuaagcaaguaacuggccuucaauuucuuc

SEQ ID NO: 391408 - RNA, 124 nt, Homo sapiens
ggccucccaaaguguugggauuacaggugugagccacugcgcccagccuagagcaguaacuauuaagaaaccuuuaagccaggugcaguggcucacgcuuguaaucccagcacuuagggaggcc

SEQ ID NO: 391409 - RNA, 56 nt, Homo sapiens
ccauuucacucuuccugaaggacccggcaggcggguggaggaggggugggaaaugg

SEQ ID NO: 391410 - RNA, 68 nt, Homo sapiens
ggugugguaucauuuaaccauuagagaaacccaugaaacaaugacuacuaauuagaugaugaaacacc

SEQ ID NO: 391411 - RNA, 60 nt, Homo sapiens
agggagucacuuccccuugucaugagggaugcuuaugacuucagacugaaaugauucccu

SEQ ID NO: 391412 - RNA, 77 nt, Homo sapiens
augguauuucuaguucuagaucccugaggaaucgccacacugacuuccacagugguugaacuaguuuacagugccau

SEQ ID NO: 391413 - RNA, 64 nt, Homo sapiens
cagggcuggauccagaggcuggagguccggcaaggaggaaccuaggcacugggguccagcccug

SEQ ID NO: 391414 - RNA, 93 nt, Homo sapiens
acaugucauuaugcacuggucaaacccauagaacauacaaaaccaagagugaauugucaugucaacuauggaauuugggugaugaugaugugu

SEQ ID NO: 391415 - RNA, 77 nt, Homo sapiens
uuagauuauugagcauccacugucuuccuucacucuuuucucuacuaggaagauaaagugggagcucacuaauuuaa

SEQ ID NO: 391416 - RNA, 84 nt, Homo sapiens
cagguuaugcuaaauuuuaauacugcuauuguaggaaaaaauauauuuuuguuacagcagaauugaaagagaaccuaugacuug

SEQ ID NO: 391417 - RNA, 55 nt, Homo sapiens
ccuuguaccccugagucccauaauuguuacaguuugccacuccugggugucaagg

SEQ ID NO: 391418 - RNA, 126 nt, Homo sapiens
cuuugucaugcucguugauacacacucccaccuagcgccuugcacucagaagauucaguucauauaucuguuaauugacucuaacugacugagguucccuggaugaggagagcaaugagaacagag

SEQ ID NO: 391419 - RNA, 73 nt, Homo sapiens
ggucacaccagcuccggggaacgucacucgacaggugagguuggugccgugguccuggggccaugggaugauc

SEQ ID NO: 391420 - RNA, 98 nt, Homo sapiens
caagaccagcaagggcaacaugaugaaaugccaucucuaccaaaaauacaaaaacuuagucgggugugguggcgugcaucuguggucccagcuacuug

SEQ ID NO: 391421 - RNA, 105 nt, Homo sapiens
ccaugaaucacaaauguucuuaauggcaucuagaguggugaauccuuuccaaaacguuuucaauuuacuuugcucagauccaucagaggaaaucacacuuuaugg

SEQ ID NO: 391422 - RNA, 62 nt, Homo sapiens
ucuagaguagaguuuccuuaggaaagcacuggagcuuuucuggaaggauguuucuaucuaga

SEQ ID NO: 391423 - RNA, 68 nt, Homo sapiens
ggguacaggugcacaacgugcagguuuguuacauauguauacauaugccauguuggugugcugcaccc

SEQ ID NO: 391424 - RNA, 81 nt, Homo sapiens
auuucgaucuccuuaauaucugguguaagcuacuguggcuugaguuguauguggcuuuccuagaucuuagggugcagaagu

SEQ ID NO: 391425 - RNA, 70 nt, Homo sapiens
ucaucacuggucaugagagaaguacaaaucaaaaccacaaugagauacuaucacaugccaguuagaauga

SEQ ID NO: 391426 - RNA, 90 nt, Homo sapiens
gcugaguauuauagugauaggucuacuguaauugcuauaauuaaaaauguaucugggccaggugcaguggcuuaugccuguaaucucagc

SEQ ID NO: 391427 - RNA, 57 nt, Homo sapiens
uguucauggauccaguggcuucauguauaucugguagcuacaacuuuuccaugagca

SEQ ID NO: 391428 - RNA, 55 nt, Homo sapiens
uuggcagucugaggcacagacuggaugaaaaccuuuuucuauuuuaggcugucaa

SEQ ID NO: 391429 - RNA, 58 nt, Homo sapiens
uauugcacuccucaugcauuuggugauccuugacugugugcauuuuugaguugcaaug

SEQ ID NO: 391430 - RNA, 60 nt, Homo sapiens
cuuuaugagguuggauggaucugggcuugaauccugauucauuuucuacuuugcuugaag

SEQ ID NO: 391431 - RNA, 70 nt, Homo sapiens
guuuauuucuacuauuuugccugauuuuuuucuaaucagaaauaaggcaaguuuuuaguggacaugguac

SEQ ID NO: 391432 - RNA, 99 nt, Homo sapiens
uugaugugagcggguuccuguacugcaugaagcagggguuugcauccgaaacaaccacccgugcugaauauguaggugauacguugaucuguacagcaa

SEQ ID NO: 391433 - RNA, 97 nt, Homo sapiens
uugggaaagguccuugauuucugagaccaaaacuuguaacugagcuuuagauuauaaaugcucucaagaguguucaagugaguaaccccuuucucaa

SEQ ID NO: 391434 - RNA, 83 nt, Homo sapiens
augcauguguuaguuuggaagacauucugucugcuagaaguucugcuuauaguuguauaaugucuuucauaacugauaagcau

SEQ ID NO: 391435 - RNA, 87 nt, Homo sapiens
accuuuuuagaguuacauauaagugaaaccagaaaguauggagucuuuuuugucuggcuuucuuuacuuaauguagugcuuugaggu

SEQ ID NO: 391436 - RNA, 85 nt, Homo sapiens
cugggagcucauuaaaaauguagaaucucagaucucaccccacaccuaaugaauccgaaucugcccuuuauacugagcuccccag

SEQ ID NO: 391437 - RNA, 90 nt, Homo sapiens
uggaguucuuuagugugucaauuuaugucauucauaaauuaugcaagcccauuacaugggugaguaugaguugacuucuaauucauucua

SEQ ID NO: 391438 - RNA, 88 nt, Homo sapiens
uggcaugggguauuuaaugagucucucuggccagagagccuccucaagucucuggccagagacauucauuaaaguuacccagauacca

SEQ ID NO: 391439 - RNA, 60 nt, Homo sapiens
gcagugcaugacgguauauauauauacaggcacagcuuguuuuaucaugcuucacacugu

SEQ ID NO: 391440 - RNA, 70 nt, Homo sapiens
caggcucauagcugccaugagcuaugauugcaauggugcuaucauagcucacugcagccucgaccuccug

SEQ ID NO: 391441 - RNA, 85 nt, Homo sapiens
uaagaucuacucaaguuugaagugccauaugcgauacaguauucuagcuguaaucaccauguguacauuagaccucuagaacuua

SEQ ID NO: 391442 - RNA, 68 nt, Homo sapiens
ucacgggaaaauuauugccaucauaaucuugucucauaugguuacucaaggcaauacuuucuuguugg

SEQ ID NO: 391443 - RNA, 76 nt, Homo sapiens
ggauuuuguagauaauauaauagguuacagaacaugucaugcguacugugaucaugguauuaaucugcuuucaucu

SEQ ID NO: 391444 - RNA, 116 nt, Homo sapiens
ggaagcugaggugggaggaacgcuugagcccgggaguuggagguugcagugagcugagauuucaccacugcacuccagcuugggugacagagcgagaccuugcccccucaccuucc

SEQ ID NO: 391445 - RNA, 59 nt, Homo sapiens
ugagacugagucuugcucugucgcccaaagcugaagugcaauggcaagaucucggcuca

SEQ ID NO: 391446 - RNA, 58 nt, Homo sapiens
uggcaccaggugcccagcacggccacgcccaccuggcuggccugccgcaccugggcca

SEQ ID NO: 391447 - RNA, 77 nt, Homo sapiens
auuucccaaacugcuccagagagauguuuauagauauuaagaaaacuaacauucuaugguuuaauaguuugggaaau

SEQ ID NO: 391448 - RNA, 90 nt, Homo sapiens
aaauuuuauuccaugucaauuuggccuuuguaugcaguauccuagauggauucuuucauauaaaggcucaguacugaacagaaaaaauuu

SEQ ID NO: 391449 - RNA, 62 nt, Homo sapiens
cugaauguuucacucugaaaugggaguccuuggaggguuuugagcagaagagagacauucag

SEQ ID NO: 391450 - RNA, 84 nt, Homo sapiens
caauucuggucuuuaugacugcaaagcauauacucuuaacccaaacuggaagauauguuaguuauaaacucuuugccggaagug

SEQ ID NO: 391451 - RNA, 87 nt, Homo sapiens
gcuuuuaaccuacuagaggagguagucauauguauuaauuauuuauugcuauguaacacauuaccuuuagacuaagugguuuaaagc

SEQ ID NO: 391452 - RNA, 67 nt, Homo sapiens
aacagucauggguugccauggugauuauuccaaaugcauugugaucauauggaacuggugacguguu

SEQ ID NO: 391453 - RNA, 82 nt, Homo sapiens
uuccccaucugccuuuggugacaggcaugugugggcauuccuuaccucccccaccagccugaucaucaaagcaacaagggaa

SEQ ID NO: 391454 - RNA, 75 nt, Homo sapiens
aaaagaauguaacucuccuuuugaucuucagaaaaagagacccccuucugugguugaaaggagagauauacuuuu

SEQ ID NO: 391455 - RNA, 60 nt, Homo sapiens
ucagcacauucaaggccugccugacccuagaaaaccaggaggccaaaagacauguguuga

SEQ ID NO: 391456 - RNA, 78 nt, Homo sapiens
cuuccccaguaggcaauuaacaccuggguucuagccaauggguaauuuucucucuggucuuaaaauguccuggggagg

SEQ ID NO: 391457 - RNA, 65 nt, Homo sapiens
aaaaggcaagaaaauggauucucccugugaaaacagccgaagggagaugccaacaucuugauuuu

SEQ ID NO: 391458 - RNA, 65 nt, Homo sapiens
ugagauuauauuucuuaacagaaauuuacuuaacugugaggaugcuguguggcaaguauuucuca

SEQ ID NO: 391459 - RNA, 74 nt, Homo sapiens
uucuuugagcuuauuagagcauuuugcuuauuccauccauuaaguaguugaaauguauuaaugaguugaaagag

SEQ ID NO: 391460 - RNA, 67 nt, Homo sapiens
ggagacgcagugcauguggcacucuccagguggccacccucagccacucacaugcauauucguuucu

SEQ ID NO: 391461 - RNA, 85 nt, Homo sapiens
gggggucccaggggcuggaggccugccugguuagccucuguuucccagacauugacucgaggcgccuccaguccucucaaccccc

SEQ ID NO: 391462 - RNA, 56 nt, Homo sapiens
cccaaaggauucauuuccaggagucugaaaagauucuggaauuuggauauuuuggg

SEQ ID NO: 391463 - RNA, 90 nt, Homo sapiens
uuggaugugugugguaguaugugcuaguaucaaacgagacuucgauuuauaggacuuggauugcuacuagauagugaucacagcauccaa

SEQ ID NO: 391464 - RNA, 97 nt, Homo sapiens
gggaggagaaucucuugagcccgggagauggagguuguggugagccaagaucgcgccauugcacuccagccugggcaacgagagcgaaacuccuucu

SEQ ID NO: 391465 - RNA, 59 nt, Homo sapiens
cagcugguguuacaaaccagagcuuguuauguguguguuuuucucuguuccaccaguug

SEQ ID NO: 391466 - RNA, 70 nt, Homo sapiens
guguguguacaugcaugcaugggugugcgugcauaugucugcauauguauacgugugugugugcgcgugc

SEQ ID NO: 391467 - RNA, 58 nt, Homo sapiens
ugcuucaguaguaaauuguuauugaagcuucagucaauagcaaauugcuauuaaggca

SEQ ID NO: 391468 - RNA, 70 nt, Homo sapiens
gaaaaggcaacaucugagugggaaagcaaggaugucaauucucacugucaguuucaguguuagccuuuuu

SEQ ID NO: 391469 - RNA, 63 nt, Homo sapiens
ggcggcuuguguuugcuccccagaauauucauauuuuaaauauuggaacaagcagcaaguguc

SEQ ID NO: 391470 - RNA, 64 nt, Homo sapiens
uucaguuugccaguauuuuauugaggauuucugcaucaauguucaucagagauauuggccugaa

SEQ ID NO: 391471 - RNA, 59 nt, Homo sapiens
cuggaaugcagcuuuaggggcucucuccacacuucccgaaccccagcuucaccuuccag

SEQ ID NO: 391472 - RNA, 91 nt, Homo sapiens
ggaccugaugucacaguguuuguucaucccagcucugcugcugcguagcuccgugguggugaacaaauuacuuaacccgugccugagguuc

SEQ ID NO: 391473 - RNA, 55 nt, Homo sapiens
cagcugguggcaagaagacagaaguccuccuacaacuaucucuuggcacucgcug

SEQ ID NO: 391474 - RNA, 125 nt, Homo sapiens
ccaggacaguuguaaaguacuuuguaagauauauuuugugaaaucagauagccuuuuuaaauagccuuuagaaaagcugcucuguuucuaaaauguugugacugauuuuuacuucguaacucugg

SEQ ID NO: 391475 - RNA, 90 nt, Homo sapiens
gcuugcaaaggguagaggaaggauuggaaacgcagagccauuggacuggaacgccauuguguauuccucccauccuuuccugcuccaggc

SEQ ID NO: 391476 - RNA, 57 nt, Homo sapiens
ugaaaugguuaugugaggagauuggcagauccuuuucucaaugaaacaaccauuuca

SEQ ID NO: 391477 - RNA, 77 nt, Homo sapiens
ggaagaaaggcaaagcaaugcugguauuguuguaauaugauguuuaugguagaagcaacauuuuugaccuuucuucc

SEQ ID NO: 391478 - RNA, 69 nt, Homo sapiens
cccucauuguaacacaugcugcucucuggugggcaauguugaaaaccagggagcuggcauguguggggg

SEQ ID NO: 391479 - RNA, 80 nt, Homo sapiens
gggugcggcgggagcugcaggagcugcgggcaucucaccugagcaguucaggcuccgugccagcuccguggccaucaccu

SEQ ID NO: 391480 - RNA, 104 nt, Homo sapiens
uugagccaggagucuuguucugucauccaggcuagagugcaguggugugaucucagcucacugcgaccucugccucccggguucaagcgauucuccugccucag

SEQ ID NO: 391481 - RNA, 74 nt, Homo sapiens
ugggggucacucuagcaucagggugguauucauagaaggguggguaauaccuuccccugcuggagaggcucuug

SEQ ID NO: 391482 - RNA, 68 nt, Homo sapiens
ucuuucuuauuaugcucaauguuugcaaguuucacaugaagccugaaugcaagcaugaagaguagaga

SEQ ID NO: 391483 - RNA, 56 nt, Homo sapiens
ugugccuacugauagagccaagggcugauauccuaucuggcucugucgaaggcaca

SEQ ID NO: 391484 - RNA, 128 nt, Homo sapiens
auuaggaacaguaucacuugagggguguaccucuacugcgauaucaggcauaauaacauccucuccccccgaauauuaagaacaauaucacagguggacugcacacccucugugauauugaaaauaau

SEQ ID NO: 391485 - RNA, 56 nt, Homo sapiens
uuauaugauugaagugcauaagacauacuuuuagguuuuggcacugagugguauaa

SEQ ID NO: 391486 - RNA, 70 nt, Homo sapiens
accauagguuuucacuguagauucuguggacccccagccuauggauucugucagauggcaaaucuauggu

SEQ ID NO: 391487 - RNA, 78 nt, Homo sapiens
cacaugacuagugccuacugaauuuaccuggcuuucgauucucagaaggcaggguggcuugggcugggagggucagug

SEQ ID NO: 391488 - RNA, 113 nt, Homo sapiens
caucuucugccucauggauaagcucauugagaucuauggcuuugccuaauaauuauaauaaagguauucuaagccugcaucuucaaccagaguucuaucuccagcuagaaaug

SEQ ID NO: 391489 - RNA, 62 nt, Homo sapiens
cagccaaucugauucuauaccauuucuuagaacaaagaagagugcuauagauuagauuucug

SEQ ID NO: 391490 - RNA, 76 nt, Homo sapiens
ggaggcugaggugggaugaucgcuugagcccaggaggucgaggcugcaguggguugugaucgugccccuacacucc

SEQ ID NO: 391491 - RNA, 97 nt, Homo sapiens
ugccaugaaucauauuaacacauuuccuaauauuaagccaguuuuuauuucuggaauacaguauuaggugaguguauuucaaguauguuauugagca

SEQ ID NO: 391492 - RNA, 65 nt, Homo sapiens
agccagugguuuuuagcuugcugggcuccgugggagugggaccugcugagcgagaccacuuggcu

SEQ ID NO: 391493 - RNA, 57 nt, Homo sapiens
auagaagcugccaacguuucaggcuugcacucucugaagccauggcccaagcucuau

SEQ ID NO: 391494 - RNA, 72 nt, Homo sapiens
cugggugugguguccugcaccuauaguccuagcuacucgggaggcuaaggugcaaggaucacuugaguccag

SEQ ID NO: 391495 - RNA, 85 nt, Homo sapiens
gucagguugcgcacugcaugaggauacucagucaaugggccaaguguucgcugagaugcuccucuugcaaagccuuuugcuuggc

SEQ ID NO: 391496 - RNA, 123 nt, Homo sapiens
ccaaagucgcuuccacauuuucagguaucuguauagcaaugccccacaccugguaccaauuuucuguauuaguccauucucgcauugcuauggguaaugaauaaagaaaagagguuuaauugg

SEQ ID NO: 391497 - RNA, 103 nt, Homo sapiens
aggugacuaaauuugcaucuuuuugguguauauguaaacuaugcauguuucuuuaaugaagccaugguguuuauuuauaccauuuggaauguauucugcaucu

SEQ ID NO: 391498 - RNA, 68 nt, Homo sapiens
ggguacaugugcacaacaugcaguuuuguuacauauguauacaugggccauguuguugugcugcaccc

SEQ ID NO: 391499 - RNA, 103 nt, Homo sapiens
uugagagggagucucacucugucaucuaggcuggugugcaguggcaugaucucagcucacugcauccuccaccuccuggauucaagcgauucuccugccucag

SEQ ID NO: 391500 - RNA, 75 nt, Homo sapiens
ugcuuggagccuuugggagcuuuccuggucaagggagguuuugugccauggaggauuuauagaggcccccaagca

SEQ ID NO: 391501 - RNA, 88 nt, Homo sapiens
ggagucucucccuguugccuaggcuggagugcaguggcgcgaucucggcucacugcaaccuccaccucccggguucaagugauucucc

SEQ ID NO: 391502 - RNA, 76 nt, Homo sapiens
gcgucacagugaaugucaucauugccuagcgacuguuccuccggcuuggcagagaaggagacauucaugaagaugu

SEQ ID NO: 391503 - RNA, 76 nt, Homo sapiens
agaugaaaauuccugggacucuuuaucagagauuaugguauagcauuucuuuguuggaguccaaggauauuuauuu

SEQ ID NO: 391504 - RNA, 57 nt, Homo sapiens
agccgugauugcaccacugaacaccagacgcagugucauguacuuguagucccggcu

SEQ ID NO: 391505 - RNA, 67 nt, Homo sapiens
auauuggccaggcuggucucgaacuccugaccucagcugaggagacugagacaauccuggucaauau

SEQ ID NO: 391506 - RNA, 130 nt, Homo sapiens
ucuugggcaagucucugaagguaucuggccagagcguccuccuuuacaguuggacucacgagggcccuuggcaacuccauaguccucugaguccauguagaagugcuuuggaaagagacagggcugaaga

SEQ ID NO: 391507 - RNA, 76 nt, Homo sapiens
uaauagaugaauguauugaacuguuggagagguuuucugagguucgaagaccugcacaguuuaccauuaucaguug

SEQ ID NO: 391508 - RNA, 67 nt, Homo sapiens
ggcacuuaaugcauaauuuguaugagguaaaguguuugccucaaaucacuguguaaaagucagugcc

SEQ ID NO: 391509 - RNA, 66 nt, Homo sapiens
uucuuuaggacacucucuccaccaguaauugacaaagucugcuucuguugagugucugauaaagga

SEQ ID NO: 391510 - RNA, 70 nt, Homo sapiens
agccauucucaaaguguggucuguggguucuuguagagucccaagaacuuuuuaggaggcacuugaggcu

SEQ ID NO: 391511 - RNA, 58 nt, Homo sapiens
ugagacugagucucgcucuauugcccaggcuggagugcaauggugcaaucucggcuca

SEQ ID NO: 391512 - RNA, 61 nt, Homo sapiens
ccugaaaaaccucaguucugcucuuaaggcccuuaaacugcuugaauuggguuuacccagg

SEQ ID NO: 391513 - RNA, 76 nt, Homo sapiens
uugcuugaacgcaggagguugagguugcagucagccgugaucgugccacugcacuccagccuucgugacagagcga

SEQ ID NO: 391514 - RNA, 76 nt, Homo sapiens
guguuuccuugagcucuucuagcaauucuagcaaguuauggcuagaauaaccuaaggaaggguugugggaauuuac

SEQ ID NO: 391515 - RNA, 61 nt, Homo sapiens
uuagacucguaguaacuggaugucugcccauuuccccuuggcauuuauugcuauaagcuga

SEQ ID NO: 391516 - RNA, 60 nt, Homo sapiens
uuuuucaccugugaacugggacaucaguaaugaugggcucacuagaucaagggagagaaa

SEQ ID NO: 391517 - RNA, 74 nt, Homo sapiens
gguuggugcaaaaguaauggcgguuuuugccauuucuuucaauggcaaagaugaccauuacuuuugcaccaacu

SEQ ID NO: 391518 - RNA, 99 nt, Homo sapiens
caggaacaggccauuuucacuucuuuugugauucuucaguuacuucaggccaucuggauguauaugugcaggucacaggggauaugauggcuuagcuug

SEQ ID NO: 391519 - RNA, 103 nt, Homo sapiens
uugagauggagucuugcucuguugcccaggcuggagugcaguggcgugaucucuacucacagcaaccuccgccucccggguucaagcgauucuccugccucag

SEQ ID NO: 391520 - RNA, 58 nt, Homo sapiens
ggcuacucugcaguaauuccagccccuuaccaaaagaggguggaggcugagaguggcc

SEQ ID NO: 391521 - RNA, 83 nt, Homo sapiens
ugaggaucaaaugaauugauguguguguguuugcaugugugucuauauguguaauacacacauauaugcagucauaucacuua

SEQ ID NO: 391522 - RNA, 77 nt, Homo sapiens
ccugaggguauuuacaaucacagccagcuuccgcuauuaucaaggauagggaauggcugaugguuccaucucucagg

SEQ ID NO: 391523 - RNA, 60 nt, Homo sapiens
uauuuuagagaaccucuugaaaguggccaccucggccuuuugcaauaagucacuggaaua

SEQ ID NO: 391524 - RNA, 83 nt, Homo sapiens
cugaugagggcuugggaugggggauucccugaugguuaauaucagauugacuagggacauucuuccacgccagccaaucucag

SEQ ID NO: 391525 - RNA, 82 nt, Homo sapiens
aguucuaggguacaugugcacaacgugcaaguuuguuacauauguauacaugcgacauguuggugugcugcacccauuaacu

SEQ ID NO: 391526 - RNA, 55 nt, Homo sapiens
auauuugcagcuacuuauguuagaaaaguuaauuuagcagcguuguugcaaaugu

SEQ ID NO: 391527 - RNA, 63 nt, Homo sapiens
cgcccgucguguguggguuuauccucauagaacuuugagcacagagacuggcccaggcgggug

SEQ ID NO: 391528 - RNA, 120 nt, Homo sapiens
ucauauuccuaguggccugcugucuuaguuggggucuccccacaaguagaaccugagacaaggauuccagcucagguaguuugugggagaugauccuaggaaacaccacugaagauguga

SEQ ID NO: 391529 - RNA, 115 nt, Homo sapiens
gaaauaagggaaaaaauccguaaaauguucaaaguuggaggacaaacuguuuaguuuuaauauuuuuaguguauuuaucuuuggaauuuguuuuaugucuuuuuuuuuuuuuuuu

SEQ ID NO: 391530 - RNA, 126 nt, Homo sapiens
acagccaguccccaggccugugaagggaggugagcagcacauggcagaacauauugaagaccaaggagucaguggcccucugugugcugcauacggacugccggaggaaggcuugcuggaggcugu

SEQ ID NO: 391531 - RNA, 57 nt, Homo sapiens
gguuuuagggugggugucauuggacuuaugucauccaaugagcucaucuugaaaacc

SEQ ID NO: 391532 - RNA, 60 nt, Homo sapiens
guuugacuuucugcucaacagguaguaaagucacucaaaauuuuggacggagagucaaau

SEQ ID NO: 391533 - RNA, 60 nt, Homo sapiens
aggauucauaggaagccgggugagugggcgucuuuuacuccccuuguucugugagcuccu

SEQ ID NO: 391534 - RNA, 84 nt, Homo sapiens
gccaaucuacaauagugauguuauccacagaaguaauugggaaaguugcauaucuuguggaauaucucuggaauaagggcuggu

SEQ ID NO: 391535 - RNA, 62 nt, Homo sapiens
uauucauguuuuccugcauaucaguucuuuuauauugcuguguguauaucacugcaugagug

SEQ ID NO: 391536 - RNA, 79 nt, Homo sapiens
gucagccaugagggagggcaccugaccuugggaguucugucucgcccuaggguggagugcuuuuccucgguugguugau

SEQ ID NO: 391537 - RNA, 59 nt, Homo sapiens
agcuauugucagcaggcacaugagucaguuaaauaauuuaaagcuuagcuauaguggcu

SEQ ID NO: 391538 - RNA, 71 nt, Homo sapiens
gagcugaauggucuguuuugacagggugcugacuggugcguuuacaaucccugagcuagacacaaagguuc

SEQ ID NO: 391539 - RNA, 105 nt, Homo sapiens
gggggcagaaggaaagaagacuaaugugcuuguauuuaaaucauguguucuuuuucagaaucagauucaaauaaaggcaugcugcuacaacucuccacuccccuc

SEQ ID NO: 391540 - RNA, 59 nt, Homo sapiens
cagacuuccuaagaauuggccauuggaagaguucccuguggcuaaagauuuggaaucug

SEQ ID NO: 391541 - RNA, 65 nt, Homo sapiens
uguagggugguuguagcuacaucugaauaagacacuuuuggaaaaugagauaguaauccccuaca

SEQ ID NO: 391542 - RNA, 60 nt, Homo sapiens
agauugaugaagaucaugauugacgauugaaaaguugacaagauauggucuuaucaaccu

SEQ ID NO: 391543 - RNA, 89 nt, Homo sapiens
guuccuugcagguagguguccuuguguacaagcagcuuccuugugggcaagcuguugguaaaaaggacaugaucacuugacucuggaau

SEQ ID NO: 391544 - RNA, 89 nt, Homo sapiens
ggagaaucgcuugaagccgggaggcggagguugcagugagccaagauugugccacugcacuccggccugggcaacaagagcgagacucc

SEQ ID NO: 391545 - RNA, 84 nt, Homo sapiens
ugugaauccuguagagcucuaucauugguuaauuaaucaugguguucauggaacugauauugauggaaaacuacugcguucaua

SEQ ID NO: 391546 - RNA, 62 nt, Homo sapiens
agugauggagccaggauuuaauuccagacaaugaggcuuugggauccuggagcuccaucacu

SEQ ID NO: 391547 - RNA, 65 nt, Homo sapiens
uaaaagguugaguauagggauuacuugggauccuucuuuguaagacucuggacucuaauguuuug

SEQ ID NO: 391548 - RNA, 55 nt, Homo sapiens
gugcaagaggacaguaaggguggagguguggaugcuuaacccagucuuuuugcac

SEQ ID NO: 391549 - RNA, 55 nt, Homo sapiens
ugacuagagcaauuggaaacaauuguuaaaaauuguuuuuaaaauguccugguua

SEQ ID NO: 391550 - RNA, 129 nt, Homo sapiens
ggauccaaaguagagcuucuaaugaccccaaggaguauugaaugaccaagugagguacccaccagacccacuguguccauuacucucuuggaacaacuggggaucgugguuaaguucucucuuggauuc

SEQ ID NO: 391551 - RNA, 68 nt, Homo sapiens
uguaaucauccagucccaaauaugggaaacaaugaaaaucacaacuuccaugggacggaaugaauaca

SEQ ID NO: 391552 - RNA, 130 nt, Homo sapiens
aguggcccccuggaucauagcugccuugacaacuuggcagcgcaguugaaaaagaaguaaacuuuugucuucuuuaagucacugcacugcugggcaucuuuguuacagcagcuuaaccuuuaaccacacu

SEQ ID NO: 391553 - RNA, 59 nt, Homo sapiens
ugagacugaguuuccaucuuguugcccaggcuggaguacaaugaugcgaucucagcuca

SEQ ID NO: 391554 - RNA, 62 nt, Homo sapiens
ucaguuugccaguauuuuauugagaauuuucgcaucgauguucaucagggauauuggccuga

SEQ ID NO: 391555 - RNA, 59 nt, Homo sapiens
cuccccccacaguguucuugccaaugagagaaaugagcaggagcauuguugugguggag

SEQ ID NO: 391556 - RNA, 80 nt, Homo sapiens
gggauugaaauguaagucuuuguuucuuaaaauaacuuuuuaagguuacaaaggacuucauaguaaaucuuccaaauccc

SEQ ID NO: 391557 - RNA, 88 nt, Homo sapiens
gaugaauaaaugcuaaccuuuagucagcucuuaggaugcaccaggcagugcuccaagugcaugccagggguuaagucauuuaaucauc

SEQ ID NO: 391558 - RNA, 59 nt, Homo sapiens
ucccagucuagagccggauuggcgaguuagacgcuuguagauccaagguuggauugggg

SEQ ID NO: 391559 - RNA, 60 nt, Homo sapiens
agggcgaaagaaauagcuauaaacuguaaccaaacauucacuaagcuguuguuuuguccu

SEQ ID NO: 391560 - RNA, 74 nt, Homo sapiens
guaguuuaauuaggucccaugugucaauuuuaauuuuuguugaaauugcuuuugaagacuuagucauaaauuau

SEQ ID NO: 391561 - RNA, 70 nt, Homo sapiens
ugcuucuuguucagagaauaaaaauuggugucugaaugcccaguuuugcuucucaugagggacugaagua

SEQ ID NO: 391562 - RNA, 62 nt, Homo sapiens
caauguguccauguguucucauuauuuaacucucauguauaagugagaacaugugguauuug

SEQ ID NO: 391563 - RNA, 62 nt, Homo sapiens
gcgcuuccuuugcucaaaauuguguucuucuuaauagagccaguauuuauguaaggaagugu

SEQ ID NO: 391564 - RNA, 77 nt, Homo sapiens
gucagaugaauagucugcaaguauuucuaucccguucuguggguugucucuuuacuuuguagauuguuuccuuugac

SEQ ID NO: 391565 - RNA, 126 nt, Homo sapiens
uauuuggaaauagggccuuugcagauguucaaguuaacaugagauggagucuugcucugucgcccaggcuggaguguaguggcuccaucucggcucacugcaacaucccgguuucguguucaagug

SEQ ID NO: 391566 - RNA, 59 nt, Homo sapiens
uuaugucuuugagcaaugcuguguccccugauagaaaggcacucucuauaaagacauga

SEQ ID NO: 391567 - RNA, 56 nt, Homo sapiens
uuuagcagcaaagagccaugcucuguaaaagagauacuggcucucaguuugcuaag

SEQ ID NO: 391568 - RNA, 71 nt, Homo sapiens
ucagaaaugucacauaaguuuugugcuagggccaggucuguggcacaaugacccuugugggcagugucugg

SEQ ID NO: 391569 - RNA, 106 nt, Homo sapiens
guuuugucuuuaaugucuucauugacucauugguuuuucaggaguauauuauuuaauuuugauguacuuaagaauuagugauuucagaagagauacuugauaugac

SEQ ID NO: 391570 - RNA, 64 nt, Homo sapiens
ccccagugcucuucacacugguuuaggauggagacauauauggauaguuuacugaagagugggg

SEQ ID NO: 391571 - RNA, 60 nt, Homo sapiens
ugggaacauggaaauucugcucuguuucagccaaaacagaaaaacaggauuguguuccua

SEQ ID NO: 391572 - RNA, 62 nt, Homo sapiens
uuguuacccuggaguaguaggaaucuggguucuagcuuccugacaaccacuaggaauuacag

SEQ ID NO: 391573 - RNA, 72 nt, Homo sapiens
uccacuucuugucacugcauccccagcuccugguacaucgugggaguggggcggacaggaccaggaaguggg

SEQ ID NO: 391574 - RNA, 70 nt, Homo sapiens
ucagcacucuuaguuugucucagcaacuggauagcucugugcagguacuugacaacuugggcucugcuga

SEQ ID NO: 391575 - RNA, 88 nt, Homo sapiens
ccaacguugcggagcuaguaaguguggugucaggauuugaacccaggcagucugggucuugcaccuacaugcuuuguccugccauugg

SEQ ID NO: 391576 - RNA, 61 nt, Homo sapiens
auuuuaugggcacagaauuguuuauaauauuucuuuaugaucuuuuuaauguccaugggau

SEQ ID NO: 391577 - RNA, 56 nt, Homo sapiens
uagaucacucaggcaauaaaaguucugucaucgaacuccugaccucaagugaucua

SEQ ID NO: 391578 - RNA, 77 nt, Homo sapiens
cccuuagcacagugcgugguacauaauuagugcucaauaaauguuagcucuuguuaguauuagcaguugugcagggg

SEQ ID NO: 391579 - RNA, 107 nt, Homo sapiens
guauauaugguauaaagggugauuagacaguguguguauauaugguauaaagggugauuagacuguguguguauauaugguauaaagagugauuagacuguguguau

SEQ ID NO: 391580 - RNA, 68 nt, Homo sapiens
ggccacggggcugacauguuucucucuguuuacuggucacacgaccagauaaacguguccccgugguc

SEQ ID NO: 391581 - RNA, 63 nt, Homo sapiens
gagacuuuaucaugucuguguguaccuaggcaaugccuaguacagauggcaugcuguuuucuu

SEQ ID NO: 391582 - RNA, 67 nt, Homo sapiens
ugugugugacugagucuugcuuugucucccaagcuggaguacaguggugcgaucucggcucacugca

SEQ ID NO: 391583 - RNA, 62 nt, Homo sapiens
ucauuccucuuaaagguaucauugaagcuaugggaaugagugagaucacuaagagguaaugg

SEQ ID NO: 391584 - RNA, 72 nt, Homo sapiens
aggaaugcuuauacacuguugaugggaguauaaauuaguucaaccauuuuagaagacagugugaagauuccu

SEQ ID NO: 391585 - RNA, 81 nt, Homo sapiens
gugggguacaauguaauguuguguuacaaauauaccuugcggaauguuugagcaggcuaaucaauauauuuauuaccucac

SEQ ID NO: 391586 - RNA, 71 nt, Homo sapiens
ucacuucuuuugugauucuucaguuacuucaggccaucuggauguauacgugcaggucacaggggauauga

SEQ ID NO: 391587 - RNA, 102 nt, Homo sapiens
ugaggcaggagaaucacuugaaccgcguagguggagguugcggugagccgauauggcaccauugcacuccagccugggcaacaaaagugaaacuccgucuca

SEQ ID NO: 391588 - RNA, 92 nt, Homo sapiens
auacuauagguuaagcacuuggcaaagugucuggcauuuaguaaauaauaaauguuagccauuauuguuaauuuguguuuaacaugaaguau

SEQ ID NO: 391589 - RNA, 83 nt, Homo sapiens
ugguacuuuuagaagugcuaagaaguggauuuugcaaugacucaugacacuguagcaccucuuuggccuuucguaaaguauca

SEQ ID NO: 391590 - RNA, 58 nt, Homo sapiens
gagacagcgugguuaacauuuugucgugaaucauuuagaauguuuuuccauguuucuu

SEQ ID NO: 391591 - RNA, 92 nt, Homo sapiens
ucuguacuauucuugaauuugaucacuuaggaacgaauaugauuggaacucauucauguuuagagagggugucaaauugagaaccaggcaga

SEQ ID NO: 391592 - RNA, 59 nt, Homo sapiens
uaggaacauaaaugguaucacuuagggaaaauuguaagguauuuacauuucuguuucua

SEQ ID NO: 391593 - RNA, 115 nt, Homo sapiens
gcauccuuuuuauuuugaauuacauagggguagauauggcaucgucaccuuuucagugcuuggagccacugaacagccugaggagucacccuggcuucagagguggaagggaugu

SEQ ID NO: 391594 - RNA, 55 nt, Homo sapiens
gucacuucccggggucucugaguccccucugcacucagaagcucccagggaggac

SEQ ID NO: 391595 - RNA, 98 nt, Homo sapiens
uauagccaguuuuguguaugguaggaugacggagucuaauuuuauguuuuucuguauagauacccauucucucauuccuucaugccauccugacuaua

SEQ ID NO: 391596 - RNA, 75 nt, Homo sapiens
cucauugauuucauaucccgagacuuugcugaaguugccuaucagcuuaaggagauuuugggcugagaugauggg

SEQ ID NO: 391597 - RNA, 60 nt, Homo sapiens
gaggcugguuuucaguuacugaguuggaggggucccugagacagaacugagaacagucuc

SEQ ID NO: 391598 - RNA, 55 nt, Homo sapiens
ucaagaggaacuugacuucagaaaccuuuuagguagauucaucuguuccuuuuga

SEQ ID NO: 391599 - RNA, 65 nt, Homo sapiens
ggaaagaagcuuugugagaaacuguuuauugaugugugaauucaucucacagaguuaaccuuucc

SEQ ID NO: 391600 - RNA, 59 nt, Homo sapiens
cccugaccccuguagcagcauucuuaaaugggcuuaggucuaguuggagggguacaggg

SEQ ID NO: 391601 - RNA, 80 nt, Homo sapiens
uguggcugucugacuaggggcccuggcuucuuacuggcucugaacuggaaguggccaucagguccuagcagccacccaca

SEQ ID NO: 391602 - RNA, 57 nt, Homo sapiens
cuugaacuagccauaaagaagccuuugcucuuagaagguucauguaauuaguucagg

SEQ ID NO: 391603 - RNA, 105 nt, Homo sapiens
ugaggcaggagaauugcuugaacccgggaggcugagguugcaguugcagugagccaagacugugccacugcacuucagccugggugacagagcaagacugucuca

SEQ ID NO: 391604 - RNA, 77 nt, Homo sapiens
ggagaacucaauuuggaauugucaguaaaugauggcucacuguuauauacuugcuuccaguccaagucuguuucuuc

SEQ ID NO: 391605 - RNA, 92 nt, Homo sapiens
guggauuaucuuuuugauauguuguuggauucgguuagcuaguauuuuguuaacaauuuuagcaacuauguucaucagagauauuggucuau

SEQ ID NO: 391606 - RNA, 64 nt, Homo sapiens
ggaaauuuugacucauucccuuaaguacuagcuguuaagugguauuuaauauaugagaguuucc

SEQ ID NO: 391607 - RNA, 72 nt, Homo sapiens
guuacauuucuguuguuguuuuaagagacaaggacucccucugucgcccagguugacaugcagaggugugau

SEQ ID NO: 391608 - RNA, 129 nt, Homo sapiens
aggaaugauagguguaugccaccggaaauggacaauuuuuagauuucgcauagagauggagucaugcuauauugccuagccuggucucaaaauccuguccuuaauggauccucccgccucagccuuccu

SEQ ID NO: 391609 - RNA, 69 nt, Homo sapiens
gucuuuuauuuuacaggcucauaaucagaagggacuugccuuaucucagaugagacuuguaaccuggac

SEQ ID NO: 391610 - RNA, 67 nt, Homo sapiens
gcacuugcauucauugaaaacacacagauagaccuucacaucucacagaguuucagaguggaagugu

SEQ ID NO: 391611 - RNA, 70 nt, Homo sapiens
guuaucaggugcuggcuggucguuauuuaucuucucacagacgaugugagugacugcagcaucuggaaac

SEQ ID NO: 391612 - RNA, 76 nt, Homo sapiens
agugggcauagaauuguucauagaauuccuuuauuauccuuuaaauguccauggaaucuguagcaauguccccgcu

SEQ ID NO: 391613 - RNA, 65 nt, Homo sapiens
cucuccacagaagaccaagaaagcuuccaucucucauggagaucuuuguuaucuuuugauaagag

SEQ ID NO: 391614 - RNA, 55 nt, Homo sapiens
auauccaguucaaugaaagaaaugauccuauuguguuuuucauugagugugauau

SEQ ID NO: 391615 - RNA, 63 nt, Homo sapiens
guucaguuuuaaagggaaauugcuauuuuaguucuuaugcuauuuuuauguguaaaacugagc

SEQ ID NO: 391616 - RNA, 104 nt, Homo sapiens
ggggggacaucuuaucuuugugacuuuauucaccucuggcuucuaugguagcaagucauuaugucaguggagaaaaggacaugucagccaagaaauaucccccc

SEQ ID NO: 391617 - RNA, 55 nt, Homo sapiens
agugcauugagacuugugaguucaugcaaauguauucaaauagcugcagugcacu

SEQ ID NO: 391618 - RNA, 84 nt, Homo sapiens
uuguagcuggugauugguuucauucaguggaagagcugcaaauaaacuaagcuaacuggguaacagccaaggccaugguuacag

SEQ ID NO: 391619 - RNA, 68 nt, Homo sapiens
cguggguucaagugauucuugugccuuagccuccugaguagcuggaaauacaagcacuugaccccacg

SEQ ID NO: 391620 - RNA, 94 nt, Homo sapiens
gucuaagaguguggcugaugagcugcuguuauucaucagaacugggaaacagugaauauccauucugugcuaacugcaggccaggcuccgagac

SEQ ID NO: 391621 - RNA, 59 nt, Homo sapiens
cugacugcauuugccccaucgaauaagcucuaagcuaauauucugacuuaugcaguuag

SEQ ID NO: 391622 - RNA, 64 nt, Homo sapiens
aguaucucaguucucgugauuagucagguacacuucuuacauugguuuuucggauugagauauu

SEQ ID NO: 391623 - RNA, 74 nt, Homo sapiens
gauuacugaguaaaagugugagugcagaauuuauaaaguucuuaguggcaccacuuuuuuuuaacucagugauc

SEQ ID NO: 391624 - RNA, 81 nt, Homo sapiens
ccaaggauuggggggaugcugugcccagggugccucugagaccugggggcaggcugugcuuggagucccccuaggccuugg

SEQ ID NO: 391625 - RNA, 84 nt, Homo sapiens
gauugucagaggugucugagguuggggucagggcuagcagugugcugcagcggcuggccucagcuugagcaacccaacucaauc

SEQ ID NO: 391626 - RNA, 61 nt, Homo sapiens
ugcaaguucucacuuguaugugggaguuaaaaaauuugaucacauggaggcagagagugua

SEQ ID NO: 391627 - RNA, 85 nt, Homo sapiens
gacacuugagauuacguucggcccacuuggauaaucccacaucaucuucccaucucaagaucaugaacuuaaucugcaaaguguc

SEQ ID NO: 391628 - RNA, 94 nt, Homo sapiens
agaagaaucgcuugaaccccugagguggagguugcagugagccaagauugcgccauuguacuccagccugggcugcaagagugagacuccuucu

SEQ ID NO: 391629 - RNA, 60 nt, Homo sapiens
uucugcuagucugucagaucuuagccuuagcaguuacuucuucugacauauuagugagga

SEQ ID NO: 391630 - RNA, 69 nt, Homo sapiens
gucccuuaagcuauagugaauaaauugcacaauaaaugagcaaggaucuauaaacauagcuccaggggc

SEQ ID NO: 391631 - RNA, 107 nt, Homo sapiens
gaggagguugcucaguuuccauguaguugugcaguuuugagugaguuucuuaauccugaguucucauuugauugcauuguggucugagagacuguuaugauuuccuu

SEQ ID NO: 391632 - RNA, 60 nt, Homo sapiens
ccuaauacgauguaaauguguaaaugcuauguaaauaguuguuauacuguauuguuuagg

SEQ ID NO: 391633 - RNA, 69 nt, Homo sapiens
ugcugcucuggccucuggaaguuucuguuugcugaaagcuaguguucaccagaggucaugaggccagca

SEQ ID NO: 391634 - RNA, 64 nt, Homo sapiens
cugauguagguggucugugaucuuuuccuuuauuucugauccacaccugagcaccauauauuag

SEQ ID NO: 391635 - RNA, 68 nt, Homo sapiens
cagacccuguugguggaucagauugggcuugagaugaggugcccagcccuguccagcagagggugcug

SEQ ID NO: 391636 - RNA, 65 nt, Homo sapiens
ggugaaucugacgauuaugugucuugggguugcucuucucgaggaguaucuuugugguguucucu

SEQ ID NO: 391637 - RNA, 65 nt, Homo sapiens
ggugaaucugacaauuauguaucuugggguugcucuucucgaggaguaucuuugugguguucucu

SEQ ID NO: 391638 - RNA, 60 nt, Homo sapiens
cugaucuaugaacacaggauaucuuucuacuuacucagauuuuccugaugcauacaucag

SEQ ID NO: 391639 - RNA, 56 nt, Homo sapiens
agaggacugcuguuguuaacuuuuggagggccuagcucacaaaacagcuguguucu

SEQ ID NO: 391640 - RNA, 118 nt, Homo sapiens
aaguugcuucuacauuuuugaguaucuuuucagcagugccccacucuacugguaccaauuuacuguauuagucuguuuucacacugcugaugaagacauaccugagacugggcaauuu

SEQ ID NO: 391641 - RNA, 116 nt, Homo sapiens
agaaagaauuuuucuggacccagagcaacuuggcauuuuuauuagaucaaaaucaaauccaauagaguccugcucgaguugcuuccuuuauuaaaauggaaacagacaguauuucu

SEQ ID NO: 391642 - RNA, 66 nt, Homo sapiens
gugcuguuugucaggacacgaguucuugagaacuaggagucgguguuacugacagaaugugagcuc

SEQ ID NO: 391643 - RNA, 69 nt, Homo sapiens
gugaggucagggcuguggacaggaucacacaagacaggccagaugugcuguucacucuccugcccuuac

SEQ ID NO: 391644 - RNA, 116 nt, Homo sapiens
ucugaauacuuaauaggcucaauuggaagcuagugaaguuuuaaucaguuguccauuuaggaccccucaucagcaccaguucauagggccugucugaaauauucuuagguagcaga

SEQ ID NO: 391645 - RNA, 58 nt, Homo sapiens
ggcuggagcuggggccugugcagggcuucccaugcugugccacaguuaagcuucugcc

SEQ ID NO: 391646 - RNA, 110 nt, Homo sapiens
auaucacggggggauguacaccaccugagauauugggaguaaugucaggcucucccuuuccuggauauuacgaacaauaucacagcguggguguacaccuccugcuauau

SEQ ID NO: 391647 - RNA, 78 nt, Homo sapiens
gacuccaguacagugcauggcacugagcagguaugcaaccauuuuuguugcaugagcgaauguguccuguacagaguu

SEQ ID NO: 391648 - RNA, 80 nt, Homo sapiens
cuagggugauuuuauuucuaaugucacaguguguguacaccauguguauacacccugugauauuauucauaguauccuag

SEQ ID NO: 391649 - RNA, 115 nt, Homo sapiens
ggcugucucccuaguugugacuagcuuggcuuuuguuauuuggaagcuaaauuccaaaagugagcauaccaggcagcaaaggcagaagcuguaauucuccuagggccuacuagcc

SEQ ID NO: 391650 - RNA, 70 nt, Homo sapiens
uauacugucuuuguaugccuagaagugcagcuaucucuuuguuaacacuaguuuuaugcaaggcaguaua

SEQ ID NO: 391651 - RNA, 93 nt, Homo sapiens
ucacucugucacaucauggcuugagugcaggugugcaaucaacagugagcuguaaccauacaccugcacucuagccugggugugauaguguga

SEQ ID NO: 391652 - RNA, 67 nt, Homo sapiens
aagaagacaaacccacuggcuuuguuuaugaacauuuauugacauuacagugggucuugucauuuuu

SEQ ID NO: 391653 - RNA, 66 nt, Homo sapiens
cucugcaggcacccagggcagguuacacaggaauugccugaagcuggucucaggugcccugcugag

SEQ ID NO: 391654 - RNA, 61 nt, Homo sapiens
gucuugaugggaagcucugccauguggaaggaucacaucucagguuucuugacaacuggau

SEQ ID NO: 391655 - RNA, 82 nt, Homo sapiens
gcugagaagacugcauagucauuucuaucagaugcugccaaauagcaaauacaaugaguggagacuguguguagaguucagc

SEQ ID NO: 391656 - RNA, 78 nt, Homo sapiens
ucuuuccccuugggcuugggcauagcuuuagggucuucagcacagucuuccaaacagcuaguaccaauccacuaaaga

SEQ ID NO: 391657 - RNA, 61 nt, Homo sapiens
ccaaugagagguaucagauccuuauccaucaucuucuuggaucuugguauagucuuauugg

SEQ ID NO: 391658 - RNA, 78 nt, Homo sapiens
gcagccauuguucuauccaaauuggguaucuguuaaccauuugaaagguauagguucuggaggcuuaacaauggcugc

SEQ ID NO: 391659 - RNA, 57 nt, Homo sapiens
ugagaugaagucuugcucuguugccagucuggagugcaguggcaugauaucagcuca

SEQ ID NO: 391660 - RNA, 71 nt, Homo sapiens
uauaaggcugguauagacauucauguagaaaacaaaauacuaaauuugacugucauauagccugccucaug

SEQ ID NO: 391661 - RNA, 63 nt, Homo sapiens
uacucuccacuaggcaaugucuggagacauuuuugguugucaugacuugagagugggagagua

SEQ ID NO: 391662 - RNA, 67 nt, Homo sapiens
uggugcuagaagguaagagcuggaugcagcuguugugguagcauuuauggguuaccuuuguuaacca

SEQ ID NO: 391663 - RNA, 91 nt, Homo sapiens
gggagauaauuuagcuuuagcugugugaaccuagcagcuaucauguuauucacugauaucugaauagauacacaaugaggcauuuacuucu

SEQ ID NO: 391664 - RNA, 62 nt, Homo sapiens
gacuuagaugucuuccugacuguauuuuagagugcuaaacuucagucauagacaucagaguc

SEQ ID NO: 391665 - RNA, 130 nt, Homo sapiens
guguccaacuuuucucucauugagcagguuuaugaauuuuauccaggauauaugcuugguuuuuuguauuccugagcuguauuuuguucuaaaagcuauacaauuaguucauuuucuuauugauggacau

SEQ ID NO: 391666 - RNA, 125 nt, Homo sapiens
aauuuuagacuuguaucucuuuguaaggacccuuggaaauuaacagggauuguccauacucugagaggaaguggcuucucugucuaguuucuaccacuuauaauuauguuggucuuuuuaaaauu

SEQ ID NO: 391667 - RNA, 101 nt, Homo sapiens
ucauauuugcgcaaaguucuagaggagcacggauucugcuuugaagaucagagaagcugugucuugaaggcugaguaccuguucuaagaucaaagaaaugg

SEQ ID NO: 391668 - RNA, 56 nt, Homo sapiens
gaaugucauauaauuggaaucagccuuuucaaauuggcuucuaauaauaugcauuu

SEQ ID NO: 391669 - RNA, 96 nt, Homo sapiens
uagggcaauagcucagcagugcagcaucaaaucacacaagaugcuggucccuucugaaucuuguauuuugguagcuaugccugagcccuugccuua

SEQ ID NO: 391670 - RNA, 87 nt, Homo sapiens
gagguauagaagccuguucccaaggcaggagcaacuuucugauccuagaaagcuaaugacuuugggugaaaacagucacauguccuc

SEQ ID NO: 391671 - RNA, 88 nt, Homo sapiens
gccuugcuuauaguaagugaggagguucacuucagacccaaauuccugugugugaucuuucaggcuugaccauagacaauugcaaggc

SEQ ID NO: 391672 - RNA, 84 nt, Homo sapiens
cugcauucccuguccugcugugaggugugaccaccugauggccccauuccaguguguucauccucagagaugucaagaaagcag

SEQ ID NO: 391673 - RNA, 56 nt, Homo sapiens
cugaggacaucagggaagcauccucagaggagaagauuguuuaauugagucuucag

SEQ ID NO: 391674 - RNA, 121 nt, Homo sapiens
guuugagugauacgaaccgucuccucucccggguagaauguaacuuccaugucauggguaaaggcagcaccuggagaugaaaaacauucagcacagggaugaaaagaggucuugcuuaaac

SEQ ID NO: 391675 - RNA, 82 nt, Homo sapiens
aguucuaggguacaugugcgcaacaugcagguuuguuacauagguauacaugugccauguugguuugcugcacccaucaacu

SEQ ID NO: 391676 - RNA, 62 nt, Homo sapiens
ucuugauaugaaguucaaaccaggugcugucguaacucaccugguuuugguucauauuaggg

SEQ ID NO: 391677 - RNA, 89 nt, Homo sapiens
ugugaagauaaaugaguuaauauguauaaaguguuuaguauaggcaaaccuuguuuguuuuauuccacuuugcuucauugugcuucaca

SEQ ID NO: 391678 - RNA, 73 nt, Homo sapiens
auccaguuuuaggagauuucuaucugcauuacuccacucucacagugcuauaaagaaauauccgagacugggu

SEQ ID NO: 391679 - RNA, 129 nt, Homo sapiens
caauacaaucaccugcaggguuuguuaacagacagauggcugggucucacuccagagauucugauuuuguagaucuugggugggaacugagaauaugccuuuuuaacaaguccucaggugaugcuguug

SEQ ID NO: 391680 - RNA, 78 nt, Homo sapiens
aauaaaugaggcacuguauuuuauugcaaaacacuaaaacaugaugcaaaugaccaaaagugcaguacuucguauauu

SEQ ID NO: 391681 - RNA, 68 nt, Homo sapiens
gaucccugagcuuguuuuccugcaacuagauggucccaucugggggugaugggagacagugauagauc

SEQ ID NO: 391682 - RNA, 74 nt, Homo sapiens
gucuccaaccagagguauggcacuauccucucugauagcaaaucaagagcacagugcuggcaucuggugaagac

SEQ ID NO: 391683 - RNA, 58 nt, Homo sapiens
gcccaacaaccagaacucaguccacugaaagguaggaaaugcagucuuuguucugggc

SEQ ID NO: 391684 - RNA, 61 nt, Homo sapiens
gguguaaggaaaugguucaguuucaauuuucugcauauggcuagccaguuuucccagcacc

SEQ ID NO: 391685 - RNA, 120 nt, Homo sapiens
uccuuuaugauaugugucuuugaaaggcaaggaguggcaguaagcagagugauauaaacauggggccugggcuuuaauucugucugcccucauccuuuaugaggcgcaugauuuagaggg

SEQ ID NO: 391686 - RNA, 70 nt, Homo sapiens
uguuguaaaauucuguuucauucuguuuuaugcuacuguaacaauaucugagacggaguuauuuauaaua

SEQ ID NO: 391687 - RNA, 59 nt, Homo sapiens
uguuauugagguuacuuauaaggugugauagaaacaccaaggaagaacacucaauagca

SEQ ID NO: 391688 - RNA, 56 nt, Homo sapiens
ggagaucacucuuuguagcguguuuuauuuucaaaugucagcagggagugaacucu

SEQ ID NO: 391689 - RNA, 97 nt, Homo sapiens
cacacacacauauauacauauauaugcacuauacacacguauauauauauauauauauacguguguguauguaugugugugugugugugugugugug

SEQ ID NO: 391690 - RNA, 62 nt, Homo sapiens
uuccaggucuuccugaauggauuccucuccccauuguggaauauuacagagaggaccuggga

SEQ ID NO: 391691 - RNA, 66 nt, Homo sapiens
aagauagcagccaggcauccacccuaaggcuaacauuccagaugguuggaagccuggugcuaucuu

SEQ ID NO: 391692 - RNA, 60 nt, Homo sapiens
auauccuggagcauuuuugcaaaaugaaaugcagcaauuagauggaguguuccaagaugu

SEQ ID NO: 391693 - RNA, 60 nt, Homo sapiens
aggguggcgagaaucacauucuaauuuggaguaaagaaaucagaagaaauuccguccccu

SEQ ID NO: 391694 - RNA, 81 nt, Homo sapiens
ggagguggaggaaagcagugugaaaugauuuaagggauuaaaagguauuuccuuauagaacuuaccugccuuucacgcuuc

SEQ ID NO: 391695 - RNA, 62 nt, Homo sapiens
aucauucaggaagagaaauagcacuuguauuaaagaagacucugcauccauuucugagugau

SEQ ID NO: 391696 - RNA, 97 nt, Homo sapiens
ccaguaggacugugaaauauaacugagacaagguccuagguaaugugauucuuuugccuaggcccaguccucagaaaggauuuugacauaucccugg

SEQ ID NO: 391697 - RNA, 78 nt, Homo sapiens
uucaguuuccauguaguugagcggcuuugagugagauucuuaauccuuaguucuaguuugauugcacuguggucugag

SEQ ID NO: 391698 - RNA, 76 nt, Homo sapiens
gguuaugcaaggcaugcaguacguuucuaugguaaauugcaaaccaagaacuuugacugaugucuucuuuuuaacc

SEQ ID NO: 391699 - RNA, 129 nt, Homo sapiens
ucuuuuuacagucuuauagagcauggaaagcauuuuggauuuuuacuucaacuauggugggaaaccauuaguaguuugaguggggguuaguggcgugaugugauuuauguuuuccaaagauuacuagga

SEQ ID NO: 391700 - RNA, 85 nt, Homo sapiens
ugacuacuuaagugaauuucacuacugagugacaaagaggaaaaaaggccauuuauagaauaugaaguuuagacuuaguagcuca

SEQ ID NO: 391701 - RNA, 66 nt, Homo sapiens
augagauuuggguggggacacagagccaaaacauaucauuuuguuucuggccccucccaaucucau

SEQ ID NO: 391702 - RNA, 78 nt, Homo sapiens
aaugauugcuagggagaauuauuggauacaggaacagagauuaucuuguaauuuaaaugauccuuggaguuagucauu

SEQ ID NO: 391703 - RNA, 70 nt, Homo sapiens
gagcccugaaagcuacagucuccuaggacccugaaggcuccuaaaccuuugagcuuuugucagaggguuu

SEQ ID NO: 391704 - RNA, 129 nt, Homo sapiens
ugaagauauagaacaaaaagcuggcauuaucagaacauguagacaacggacaaaguuaaggggcacaauauuuaacauugucauuuuucuaauguauuguuguaauguacauaacuuucuuugguguca

SEQ ID NO: 391705 - RNA, 64 nt, Homo sapiens
uucaguuugccaguauuuuauugaggauuuuugcauugauguuuaucagggauauuggccugaa

SEQ ID NO: 391706 - RNA, 79 nt, Homo sapiens
guaaacuuuagaaaugugacugccacucaguuuagagggaaaggcauuccugugugguaguagaauuucggaaauuugc

SEQ ID NO: 391707 - RNA, 74 nt, Homo sapiens
uugggcuuagcaguuguuguuacuuguauuuugauaguuccaaugcagacaugacaauuaauugaggugcccag

SEQ ID NO: 391708 - RNA, 76 nt, Homo sapiens
uauacuuuaaguuuuaugguacaugugcacaaugugcagguuuguuacguauguauacaugugccauguugguaug

SEQ ID NO: 391709 - RNA, 58 nt, Homo sapiens
guuguggcuugugauuaagcaccuacaacauucuagaacuuaguuacaucccugcaac

SEQ ID NO: 391710 - RNA, 76 nt, Homo sapiens
guauuagguuggugcaaaaguaauugugguuaaaaguaaugagaaaaccucaauuacucuugcaucaaccuauaac

SEQ ID NO: 391711 - RNA, 87 nt, Homo sapiens
ccagcguugguuuggcaugaagaccccauccuuucaauguagauuauuaaaggucauuuucuucugcugcaaugaacccagcguugg

SEQ ID NO: 391712 - RNA, 129 nt, Homo sapiens
aguagccaucucaguuaucagacuguuguggcauaaaagcgcuuguguucuuguauccuuuauuuuacuuaauaauggcaccaaagcacaagagcaguuaugcuggaauacuguuauaauuguucuauu

SEQ ID NO: 391713 - RNA, 89 nt, Homo sapiens
ccucuucugaacuccugcagcugauaaauacagucuaguccuccauggucucaacagcuaguguuugccagcguagccuucuagagagg

SEQ ID NO: 391714 - RNA, 68 nt, Homo sapiens
ggauacauucuaagaaacgugucacuaggugguuccaucauugugcaagcaucauggaguguacgucc

SEQ ID NO: 391715 - RNA, 62 nt, Homo sapiens
gcaggcagaaaaaugugaaaagagagacuggccuagucucccagccuacauauuucuccugu

SEQ ID NO: 391716 - RNA, 63 nt, Homo sapiens
cuuguagaguuguuaaaaauguggaguaccagauccucccucuaugguuucuaauucugcagg

SEQ ID NO: 391717 - RNA, 56 nt, Homo sapiens
cccaugauucaauuaucucucacugggucccucccaugacaagugagaauuauggg

SEQ ID NO: 391718 - RNA, 124 nt, Homo sapiens
uauauauauauauacacacacauauuuauucaggaccuacuaugugccaggcauauaucaaucaauacauuauuauugcuggcacauaguagguccugaauaaauauguguauauauauauaua

SEQ ID NO: 391719 - RNA, 65 nt, Homo sapiens
ugaggaggcagucugucccuuagcagagcucaggcacugugcuaggagauccacugcucucuuca

SEQ ID NO: 391720 - RNA, 55 nt, Homo sapiens
gugagucaugucccaucugauuuauauuggaucuggcuguggagccaugacucac

SEQ ID NO: 391721 - RNA, 68 nt, Homo sapiens
caugaagguaguuuauagaugugguuagcaguugucugugacuguaagucuacagcugccuuucagug

SEQ ID NO: 391722 - RNA, 81 nt, Homo sapiens
uaggaguuauuuguuccuugagagcuugauaucacuugaagcaucugugucuauuuacuuuuaggagauagauuucuuuua

SEQ ID NO: 391723 - RNA, 70 nt, Homo sapiens
guuuuaugcacaucagcuccagggaccuucugagaaucaagggugaccugacaugaaugugcucaaaagc

SEQ ID NO: 391724 - RNA, 83 nt, Homo sapiens
ggacccagugggaguuaauuuaaucauagggaugguuacucucaugcuguucucaugacagugagugagcucucacaaggucu

SEQ ID NO: 391725 - RNA, 62 nt, Homo sapiens
uuacacucaauuuaugugugugagggucuauucaauuuuaucacauguguaaauugguguaa

SEQ ID NO: 391726 - RNA, 62 nt, Homo sapiens
gucugacacagugauuaguaaauuaauucaacaaauuauugagcaucuacuguguuccagac

SEQ ID NO: 391727 - RNA, 83 nt, Homo sapiens
ugguuguuuauguguauuugcaugaguauguguuaaguucugugcaauuuuaucacacgugcagauuuauauaaauauaacca

SEQ ID NO: 391728 - RNA, 70 nt, Homo sapiens
uuggcagauauuccauuugugcuagaaaagauuguguauucuacuguuguuggguggaaugucaugucaa

SEQ ID NO: 391729 - RNA, 70 nt, Homo sapiens
ucucuuuaguugucuccucaaggguacuagucacucaguagaguaccauuugguugggcagccaaagaga

SEQ ID NO: 391730 - RNA, 77 nt, Homo sapiens
uauguguuuauuguacauacaccgguguguauauguguacauauacacaaguuuguguguguauauauguacauaua

SEQ ID NO: 391731 - RNA, 85 nt, Homo sapiens
ugucugugguacccuacucuggagagugacaaucauguauaacuaaauuugauugacacuucugugaguagaguaacgcaugaca

SEQ ID NO: 391732 - RNA, 112 nt, Homo sapiens
ugaggcuucugucaagaugucuuccagggcugcagucaucugaaggcuuaacuggagcugaugauccaccucuaagauggcucacucacagggcuguuggcaggaggccuca

SEQ ID NO: 391733 - RNA, 81 nt, Homo sapiens
uaggcauugaacuaucccuguucauggugauuuucagaauaagacugagaugugaucaccugaaggguguccuaaugcuua

SEQ ID NO: 391734 - RNA, 62 nt, Homo sapiens
gucuuggcaugugcagcugggauggaaaugcuccuccaguggacaguuacagcagcuaagac

SEQ ID NO: 391735 - RNA, 59 nt, Homo sapiens
cagacagugucccgagucccugggugcaguccuuccagaggccaccgugacucugucug

SEQ ID NO: 391736 - RNA, 86 nt, Homo sapiens
ggugugcuuuaaugacuaagaccuaaaauugugaauauuuauacauaaacauuccaguuguaagguuuuucauaagaaaguugacu

SEQ ID NO: 391737 - RNA, 67 nt, Homo sapiens
uuaaucuaggucacaugguaaauaagugggcuuuuauggucuauuugggguaccugugguagauuaa

SEQ ID NO: 391738 - RNA, 62 nt, Homo sapiens
uugagaugauguuacucuuuuuccuugguguuuuccuaaggaagccuugugacauaucucag

SEQ ID NO: 391739 - RNA, 77 nt, Homo sapiens
aggaaggagcuuuauucggcuaggagcuucggcaggcuugugucccaaaagccgagcuccccgagugagcaauuccu

SEQ ID NO: 391740 - RNA, 83 nt, Homo sapiens
aaugugaggcuacauuguuacaauuaguauauauuuccagagaauugugacuuucaguauuauguaacaauaguccuuauguu

SEQ ID NO: 391741 - RNA, 62 nt, Homo sapiens
ccauuugcuagccauguguacuuggguaaguucccacacccucugcauugucugggaaaugg

SEQ ID NO: 391742 - RNA, 72 nt, Homo sapiens
guggagggugagaucaauuugggacacaucgacucaaucugagaugggucuuuauuugcucauuuacuccac

SEQ ID NO: 391743 - RNA, 77 nt, Homo sapiens
ucacuugaacuugggaggcggagguugugaugagcuaagauagcgccauugcacuccagccuuggcaacgagaguga

SEQ ID NO: 391744 - RNA, 76 nt, Homo sapiens
uccuaugacaacacuuugaguauuauuauccucauuucacaggugagaaaaacauagucucagagugguuaaggga

SEQ ID NO: 391745 - RNA, 74 nt, Homo sapiens
ggugaaaaggcuuuuugcugacguccuuaccugguggaaugguaagaggugguuucaguagauggccaagcauu

SEQ ID NO: 391746 - RNA, 61 nt, Homo sapiens
ugaucucagcucacugguugaaacgauucuucugccucagccucccaaguagcugggauua

SEQ ID NO: 391747 - RNA, 95 nt, Homo sapiens
ccgaaugcagucaaugcccauccacagagggaucauuuaaaccagcccuagccagaggggaaucagauuccagugguuggaacuugagcguuugg

SEQ ID NO: 391748 - RNA, 63 nt, Homo sapiens
caccugcucaccugcgugcuccuucuccugcaagggguuugagcaccaugggcugaguaagug

SEQ ID NO: 391749 - RNA, 56 nt, Homo sapiens
ggcugcuauauugguucaggcuugggcacaugacccaagccagaccaauagcagcc

SEQ ID NO: 391750 - RNA, 58 nt, Homo sapiens
cugugagaugguaaauuuuuguuguguaagccacacagcguguguuacuuucuuacag

SEQ ID NO: 391751 - RNA, 57 nt, Homo sapiens
gcuauacauaaugcacauggguugcuaaauuaguaacacaccugcauggugugaagu

SEQ ID NO: 391752 - RNA, 61 nt, Homo sapiens
uccugagaagcauaccagugucuguugaccuagcaacagaguguaggaauguauuccagga

SEQ ID NO: 391753 - RNA, 62 nt, Homo sapiens
gacugaucuuaucuccugauaccucccuuucccugaggcccuucacaagccaagaucacguc

SEQ ID NO: 391754 - RNA, 66 nt, Homo sapiens
uagaaucugugaguuugguuguuuucaagcccugcaaaggguugaguuugaccugaacucugucua

SEQ ID NO: 391755 - RNA, 61 nt, Homo sapiens
aguagcuguaucugccaccugcuaugccguggugggcacuguauggcauugauuaguuacu

SEQ ID NO: 391756 - RNA, 61 nt, Homo sapiens
agacuuacagagaacaucuguccaggggcgcucugcacuguguggaugacugucugggucu

SEQ ID NO: 391757 - RNA, 68 nt, Homo sapiens
uggaaaguacugagguccaccugaaguguuugaucacuaacuuuggguaagccagucauacuguuuca

SEQ ID NO: 391758 - RNA, 68 nt, Homo sapiens
guguguguguguacaugugugcaagugcaugucaauguacacauaugugcacauuuacauauauacac

SEQ ID NO: 391759 - RNA, 75 nt, Homo sapiens
gagguccuucacgucgcuuguaagguggauuccuagguauuuuauucucuuugaagcaauugugaaugggaguuc

SEQ ID NO: 391760 - RNA, 120 nt, Homo sapiens
gcugcuugagaagaggcagcuuguuuggcuacuuggucagcuagauuauucccucagcucuugaaggaaagauucuucuagugaccuggaacaugaacaacugcuaucucuucuggcagc

SEQ ID NO: 391761 - RNA, 74 nt, Homo sapiens
gguuucaucacuucaucuguauagcccuaccugggucuucucaggcuugacucuuacaguguguggugaaagcc

SEQ ID NO: 391762 - RNA, 57 nt, Homo sapiens
uggcaagagauaugugucuauauucauucuucugcauauggauauccuguuuugcca

SEQ ID NO: 391763 - RNA, 58 nt, Homo sapiens
uuggaugauaaagaagccuaagaugagacaucuucccugagguugcuuucucauuuag

SEQ ID NO: 391764 - RNA, 63 nt, Homo sapiens
uaguuagauucacaaagggagcaagcaaccuacaguucuugauccucugagaaucuaucgcug

SEQ ID NO: 391765 - RNA, 59 nt, Homo sapiens
cacaugaagacacugagaaccaugugugccuacaugcaacugguuucaguuuuucagug

SEQ ID NO: 391766 - RNA, 57 nt, Homo sapiens
caccuggcuaauuuuguauuuuuaguagagacgggguuucucaguguuggucaggug

SEQ ID NO: 391767 - RNA, 59 nt, Homo sapiens
ugugaauuuugguauacacaaggguccugaaaccaauucccugaauauaccaaggcaca

SEQ ID NO: 391768 - RNA, 59 nt, Homo sapiens
ggaugacauuacagucacuugcuguuggcuuugcucacagucaagaugugugucuauuc

SEQ ID NO: 391769 - RNA, 62 nt, Homo sapiens
uugacuauaucucuguauaaacuuucagugauuauucuagggguuacgguauguauaguuaa

SEQ ID NO: 391770 - RNA, 73 nt, Homo sapiens
uuggguuuugauacaugucuaaucagacugauuucugucacauauagaaauuuagauacuguauuaaaccuag

SEQ ID NO: 391771 - RNA, 76 nt, Homo sapiens
gccagcugggaucaagcuacacccuuuggaaagaaucacuaucugcucuaaucauguagacuuauugcagccuggc

SEQ ID NO: 391772 - RNA, 70 nt, Homo sapiens
gauauuccuauccuuaagucuucucaacuugaauucacguguuacugaaagacugaagaauaggcauguc

SEQ ID NO: 391773 - RNA, 67 nt, Homo sapiens
auaugguacuuaugcucaaacuagaaacaucuaccagacguaaccucuuugaagguagguacuauau

SEQ ID NO: 391774 - RNA, 63 nt, Homo sapiens
ggcauauggguuuauuucuggucucaaugcuacuccauugaucuauauuucuauccauaugcc

SEQ ID NO: 391775 - RNA, 56 nt, Homo sapiens
uggauauguuuauuacccugaauguggugacaaugucauggguguaugcauauuua

SEQ ID NO: 391776 - RNA, 62 nt, Homo sapiens
guaucacguuguuuuggugaaauauggccuuagaguauaguuugaaauagauaaugugaugc

SEQ ID NO: 391777 - RNA, 55 nt, Homo sapiens
uuucuuuuuauuucuguuguccacaaguuugugucuagcagcagacagagggagg

SEQ ID NO: 391778 - RNA, 58 nt, Homo sapiens
aacuucugccuguauauccaagcauuuccauacaucuugugaaaucuaggcagagguu

SEQ ID NO: 391779 - RNA, 113 nt, Homo sapiens
aggucaggggucgaucuuuaacuaccaggcuuaggucaggcgggcccaggcuugguuucgggucugguuccuuggcuucgggucugguuccuaggcaccaggcuaccugacuu

SEQ ID NO: 391780 - RNA, 62 nt, Homo sapiens
auaagaugauguuuauaaaaggcauugcauaaugauuuguuaugucaagaaacauuacuuau

SEQ ID NO: 391781 - RNA, 70 nt, Homo sapiens
ugcacuuacuuuuaaggggccuugauuuaggagucugguauuaccuaaaugcucuuuaaaagugcuugca

SEQ ID NO: 391782 - RNA, 63 nt, Homo sapiens
ugauuuaaaguguaugggaggaugugcauagguuauaugcaaaugcuaugccauuuuauauca

SEQ ID NO: 391783 - RNA, 56 nt, Homo sapiens
ugaauagugcuguauuaaacauacgugugcaugugucuuuauagcagcauuauuua

SEQ ID NO: 391784 - RNA, 77 nt, Homo sapiens
uaccuggaaagagguuguaccuaaaguguucucuguauuggcggaaaauguuucccgggcaaccucuuuucauugug

SEQ ID NO: 391785 - RNA, 85 nt, Homo sapiens
gccuccccuggacacugagaucuuggaggcuuugugauccagccuuggaugccggguccugagaucuugcaguccagggaaaggu

SEQ ID NO: 391786 - RNA, 72 nt, Homo sapiens
uuuuauaagauuacuauaaugugcagcuuauaacugcaaaaugugagaucugucuuuauaguauuuaugaag

SEQ ID NO: 391787 - RNA, 89 nt, Homo sapiens
ggagaauugcuugaacccagguggcggagguugcugugaaccgagaucgcaccauugcacuccagccugggcgacaagagcaaaacucc

SEQ ID NO: 391788 - RNA, 79 nt, Homo sapiens
cagcauguugaaaccugaagaaaauauuugcugagaacauucaguucgauaauuuuccucaauucagugguuuaggcug

SEQ ID NO: 391789 - RNA, 89 nt, Homo sapiens
agagcucacaacucauuuguggguagcaagauuugaaaccaagacgugauucaaaucuuuggcucccacuaguuaugucauggagcuuu

SEQ ID NO: 391790 - RNA, 68 nt, Homo sapiens
ugagguacgaaauacacuguacuuaaauuuccuguccuggaugugaauauauguguuuuucugcuuca

SEQ ID NO: 391791 - RNA, 81 nt, Homo sapiens
ucacucauucauucccugagcaucuguugagcccuugcuuugugcugggcuuugagcuaguugcuggggguacaaugguga

SEQ ID NO: 391792 - RNA, 80 nt, Homo sapiens
cacagucaacacuaggcaaaugccagcaaucacacuucaccacagggucauugaaaccuggcauuugggugcaugcugug

SEQ ID NO: 391793 - RNA, 55 nt, Homo sapiens
uuccugcacuugcuugccuaugugcuccuucccacgaggggugaagugcagcgga

SEQ ID NO: 391794 - RNA, 76 nt, Homo sapiens
cuugagcuugagauccuuucugaagaaguuuuaacgcauagggaaaggcuacaaggacaaggaauucgaggucagg

SEQ ID NO: 391795 - RNA, 64 nt, Homo sapiens
aaggaguacccauggguguugagaacauugauucuucuaaacaucccaugccuggguacuccuu

SEQ ID NO: 391796 - RNA, 61 nt, Homo sapiens
gauuaagaggcagccauccacucugagaauagcucagaguggagucugcagccuuucaguu

SEQ ID NO: 391797 - RNA, 71 nt, Homo sapiens
guggccuaccauguaucugggaugcuuuuagucauggcuggaccuagagugaccgugaugcaguaugccau

SEQ ID NO: 391798 - RNA, 100 nt, Homo sapiens
ugaggcaggaaacuugcuugaacccagagggcagagguugcagugagccgaguucgugccacugcacuccagcccggcaacagagcaagacuccaccuca

SEQ ID NO: 391799 - RNA, 108 nt, Homo sapiens
ucuguaugguauuuugaaugaaucauauuagugucaugaaguuuugaaugaaauuuucugaauuuuacacugacuucuguauuaguguagauuacugaaauacauaga

SEQ ID NO: 391800 - RNA, 60 nt, Homo sapiens
ggcgauaaccacguuuacccuucauuaaaguguuuaugagcaguaaauguaucuauugcc

SEQ ID NO: 391801 - RNA, 70 nt, Homo sapiens
auuccuaaggcuugcuucagucuugaaaauauaggaucacguaucuuagaagauuugcaguuuuggggau

SEQ ID NO: 391802 - RNA, 67 nt, Homo sapiens
cagaaaaguggcaagaauguacaaaaggugcugauauagcauucauuucgauuugccaacuguuuug

SEQ ID NO: 391803 - RNA, 85 nt, Homo sapiens
gagaauugcaucucugagauguucugauuuuuucaaaucaauacauagaaauuggacauauuuauaggguacaaugugaugucuc

SEQ ID NO: 391804 - RNA, 107 nt, Homo sapiens
auucuggaaaauguugcuauauaaaacacauaauguaugaauagaaguauaugguaacugacagacuuuuguuauacagugugauaaagugaauagaacauuagaau

SEQ ID NO: 391805 - RNA, 60 nt, Homo sapiens
ugugaauagugcugcaaugaacauaugcauguguguaucuuuauaauaguaugauuuaua

SEQ ID NO: 391806 - RNA, 69 nt, Homo sapiens
gcuagaaaaagcuuagaugggcuuguauugacugguaguugaaauacaaucauuuaagacuuugcuggu

SEQ ID NO: 391807 - RNA, 60 nt, Homo sapiens
uugagacggagucucacucugucgcccaggcuggaguggaguagcgagaucucugcucag

SEQ ID NO: 391808 - RNA, 78 nt, Homo sapiens
gggggaaaauacauauuuuguuuacauuaaauuuugaagugauuuaggcuuuauugaaaacaauacuggccuucccuc

SEQ ID NO: 391809 - RNA, 90 nt, Homo sapiens
ggugaguguuauagcucuauuagaagccgugggucauggaagagaaccauggaacccagugacuaguguucagcucgauuaggacgaacc

SEQ ID NO: 391810 - RNA, 73 nt, Homo sapiens
cuguggguuuuacuguuuuacugucaucauuuuacaccaaucacugagagguaaagccugauaagacuuacag

SEQ ID NO: 391811 - RNA, 74 nt, Homo sapiens
ggaaucucacuccuaccacuuaacuaugucacuuaaauuaaccuugugugacugggaguggugaagauaauucc

SEQ ID NO: 391812 - RNA, 79 nt, Homo sapiens
cauucuaauuagguuaucucaaguguaauuuggccauuccugagcaugggcuagauuuugcguggugauuauaugaaug

SEQ ID NO: 391813 - RNA, 71 nt, Homo sapiens
ugaccaaaaaugucacaaagauuguuuuggggugaggaaaaucuucuaaaacuagauugugaugaugguua

SEQ ID NO: 391814 - RNA, 69 nt, Homo sapiens
uggauugagaagcuguggcucaggcacagagaaagaugcccaguuccucccauccugcuucucugucca

SEQ ID NO: 391815 - RNA, 109 nt, Homo sapiens
ggggacccgcggucauuuggguuuuuggcucugcgucucgcggacgguugcauuuccugcccccucccggcggccgcgugggccccacccgguggagcguggggguccc

SEQ ID NO: 391816 - RNA, 57 nt, Homo sapiens
gcuuugaaaggauuaaaccuguuaucacucaccugcuacagcauagccuuuuaaagc

SEQ ID NO: 391817 - RNA, 56 nt, Homo sapiens
aggcccugauacaaguaaggucuacguuuuccuaagacugacucuuauuauggccu

SEQ ID NO: 391818 - RNA, 85 nt, Homo sapiens
accggaagucaagugguagaaucaucuuggagagauucuauauccguuucuaagggaagguaaucauuacuugaucaauuuuggu

SEQ ID NO: 391819 - RNA, 76 nt, Homo sapiens
ucuuuugaauggagacauauguucuaagaacaaaagcacuuacagucauuuggaauauaaccuguuucuaagaaga

SEQ ID NO: 391820 - RNA, 55 nt, Homo sapiens
agcauggcauuccuguaaagauucuuaugaggagaguccauuugcugccauugcu

SEQ ID NO: 391821 - RNA, 82 nt, Homo sapiens
acaugggcauccaagagacugaugacuuccggggcuggcuccauucaggcagguagaucagucucuuuaugaauaccugugu

SEQ ID NO: 391822 - RNA, 66 nt, Homo sapiens
auggugaaagaggacauccucaucuuguuccucaucuuagaggggaaacauccagucuuucaccau

SEQ ID NO: 391823 - RNA, 81 nt, Homo sapiens
uguuuauucauauaagugauguuauugggugacuccaaacacaugguucuccuacagaugauaucaccuaaaugccaaaca

SEQ ID NO: 391824 - RNA, 60 nt, Homo sapiens
caaaggugcuuuccagguccaagguggcaccaaaacuguuggccuggggaucacacuuug

SEQ ID NO: 391825 - RNA, 80 nt, Homo sapiens
cuuuugagaagcuugaccugcagauucuuacaguccaaguuuugcugugguuugugaauggaguagcaggaucacagaag

SEQ ID NO: 391826 - RNA, 56 nt, Homo sapiens
gaugugcaaauuuccaaacucuuaaaacagaauaauuaaggggugaauugcacauu

SEQ ID NO: 391827 - RNA, 57 nt, Homo sapiens
uccaugaggcuacaguaaucucacugugguaacaucaggguagcugugguccauggg

SEQ ID NO: 391828 - RNA, 70 nt, Homo sapiens
guugccuagccuggagugcaguggugcgaucucagaucacugcaaccucugccuccuggguucaagcgau

SEQ ID NO: 391829 - RNA, 82 nt, Homo sapiens
guuguuguuguuguuguugagacagggucuuacucugucacccaugcuggagugucccaaucucagcucagcucacugcagc

SEQ ID NO: 391830 - RNA, 58 nt, Homo sapiens
gcccagaguggagugcaguggugcaaucauagcuuauugcagucuugaacuccugggc

SEQ ID NO: 391831 - RNA, 89 nt, Homo sapiens
uguggguuaauugauacacauuuuuauauauuuaaggggagcauaugcuauuuucuuaaaugcauagaauguguagugaucaaguuaca

SEQ ID NO: 391832 - RNA, 74 nt, Homo sapiens
ccucaugguuuuguuauaugaauuaaaaauguuuaaaaauuuugucauuugugaaacauggauagaacuggagg

SEQ ID NO: 391833 - RNA, 64 nt, Homo sapiens
uucgguuugccaguauuuuauugaggauuuucgcauugauguucaucagggauauuggccugaa

SEQ ID NO: 391834 - RNA, 64 nt, Homo sapiens
uucgguuugccaguauuuuacugaggauuuucgcaucgauguucaucagggauauuggccugaa

SEQ ID NO: 391835 - RNA, 62 nt, Homo sapiens
ugucuuuuagcaugcuaauuagcauacauaauuauaauuagcuauaauuagcagugaggaca

SEQ ID NO: 391836 - RNA, 130 nt, Homo sapiens
ggugugguuuguuuuuguuucucugguuccaugaggugugaccuuagauaguuuauuugugcucuuucagacuuucugauguaggcauuuaagguuaugaccuuuccucuuaacacugccuuuccguauc

SEQ ID NO: 391837 - RNA, 71 nt, Homo sapiens
cuuagaucuuguaggacagagacuauacagaaaagagacauuugaauagugacuuugauucugcuucugag

SEQ ID NO: 391838 - RNA, 61 nt, Homo sapiens
ucucuuugucucuaagaagugaugagaaggggcugauaucacagaacuuugagcagagagg

SEQ ID NO: 391839 - RNA, 81 nt, Homo sapiens
aaaaaagguuuuaaugcuuggucaagagcagaaaucugauuuuuagcucuuuguuuugacuaggaaauuagaacuuuuuuu

SEQ ID NO: 391840 - RNA, 86 nt, Homo sapiens
gagaauugcuugaacaugggaggcaaagguugcagugagccaagauuucgccacugcacuccagccucggugacaaagcaagacuc

SEQ ID NO: 391841 - RNA, 81 nt, Homo sapiens
gguacugcauucaagugaugugauucuucuuuuuggguucugccaacaggaagcauugaacauaucacuuggcucaguacc

SEQ ID NO: 391842 - RNA, 69 nt, Homo sapiens
aaauaauuuugcucuucggaagagcuugcuaugaggaugaaagguaagcuagacugagagaaaauauuu

SEQ ID NO: 391843 - RNA, 72 nt, Homo sapiens
aaucuaccaagcuauacgcaaaagguuauauuuaaauaaguuuaauguuacaguauugguauuugguagguu

SEQ ID NO: 391844 - RNA, 89 nt, Homo sapiens
gguauuuuauucucuuuguagcaauugugaaugggaguuuacucgugauuuggcucucuguuugucuguuacugguguauaguaaugcu

SEQ ID NO: 391845 - RNA, 113 nt, Homo sapiens
ugcaguuugaaauggcuggagagaagagagcuugggguguuaaauucagacuaaagcuaucucuacauauucuaaguuuggccuaaaaguuccuccauacauuguaagcugca

SEQ ID NO: 391846 - RNA, 61 nt, Homo sapiens
gcagccaaugggggacuuggccaagcgucaggcacugauggaagacuccucucuuggcugc

SEQ ID NO: 391847 - RNA, 68 nt, Homo sapiens
ggguacacguucacaacgugcagguuuguuacauauguauacauguuucauguuggugugcugcaccc

SEQ ID NO: 391848 - RNA, 62 nt, Homo sapiens
ucucucuuccugccuugcugauaacugucuucuuugcugugucuucacauggccgagagaga

SEQ ID NO: 391849 - RNA, 75 nt, Homo sapiens
agguggugggcuggauuugcuugcagaucacaguuugcugaugucugcaagucuaaacuagccaugucaauuccu

SEQ ID NO: 391850 - RNA, 65 nt, Homo sapiens
aacuugaucacauggccauuucuagcugcaaaagaugcuuuaguuggguagcuauguguucaguu

SEQ ID NO: 391851 - RNA, 103 nt, Homo sapiens
gggaugcugaggcagaauugcuugaacccgggaggcggagguugcagugagcugagauugcaccacugcacuucagccuguugacagagcgagacuccaucuc

SEQ ID NO: 391852 - RNA, 80 nt, Homo sapiens
gaagauuuacugcugacaaucagguugcuaaguauaauauuauucauuauaauaugugacaagaauuugagugucucuuc

SEQ ID NO: 391853 - RNA, 103 nt, Homo sapiens
aagacagucuaggaggaggaggagguagggugugaaacagccaggcucucuccaaaucccaaguguugacacagccaucuugucccaucccuggaagccucuu

SEQ ID NO: 391854 - RNA, 84 nt, Homo sapiens
gagguaaugagagcuaacauugauucagugccugcuauguuuugcacuguuagguacuuuacauguuaucucauguaauaccuc

SEQ ID NO: 391855 - RNA, 64 nt, Homo sapiens
cagugcacugggauuauaagugugagccaccaugccccucauauuuuauaugucguauguauug

SEQ ID NO: 391856 - RNA, 61 nt, Homo sapiens
accuucaagaggcauuuuccaaauacuucacuuacucuguuuacaauggcuccuugaaggu

SEQ ID NO: 391857 - RNA, 77 nt, Homo sapiens
uagcuuauucacaggugugggacaaaggacagacaaaacucaaaaucguccuucugugcucaccugagaaaaugcua

SEQ ID NO: 391858 - RNA, 96 nt, Homo sapiens
uguauccaagauauuuccaaggagaguacauuuuuacuuuuucaggugcuaugauuaaaccucuuaacaguguauuccuuuggacagaggcauaua

SEQ ID NO: 391859 - RNA, 82 nt, Homo sapiens
ugucaaguaggcaguuagauaugagcuucuagagagaguucuagcuagagguauacauuugagagccaagaacauacagaca

SEQ ID NO: 391860 - RNA, 92 nt, Homo sapiens
aaagggaaguucuuauuuucuguaacuauuucuauagcugcugcuuuucugcuguugugauuauuuauagacagucaaaagagucucucuuu

SEQ ID NO: 391861 - RNA, 57 nt, Homo sapiens
gaguaagucucaugagaucugaugguuuuauaaauugcaguucuccuggacaugcuc

SEQ ID NO: 391862 - RNA, 75 nt, Homo sapiens
guuuuggcacucagauagagaauaucguagcuuaguauguucucacugcauaaucaucucucugcaugcaugagc

SEQ ID NO: 391863 - RNA, 78 nt, Homo sapiens
cucacuccauugccuaggcuggagugcaguggcacgaucucgguucacugcaaccuccgccucccagguuuaagcgag

SEQ ID NO: 391864 - RNA, 66 nt, Homo sapiens
ccagauaggcgguguccuccaagugcuuccgggucaucuggagaaucuggccauacugcugauugg

SEQ ID NO: 391865 - RNA, 56 nt, Homo sapiens
uaaauuuccauuguugauaagccacccagucuaugguagcuuguugugguaguuug

SEQ ID NO: 391866 - RNA, 63 nt, Homo sapiens
ggcaucuggaucuguccaaccggaggcaugaaucaucccuuuguccaacggauccacgcuguc

SEQ ID NO: 391867 - RNA, 55 nt, Homo sapiens
cuaggacugugcauggagagccacuguuuuaggucacggucaucacagucucugg

SEQ ID NO: 391868 - RNA, 106 nt, Homo sapiens
ccuccuuggucuggccugcugucaugcaggguucgccagcccacugaggaugaagaggagggcugaggggcugguaggcucugggugcuggcaagcggaagggagg

SEQ ID NO: 391869 - RNA, 69 nt, Homo sapiens
ccuuucaggcaagggugacccugaauaauggucuguuccuccaugccucaguuuccuugucuguaaagg

SEQ ID NO: 391870 - RNA, 82 nt, Homo sapiens
gucuuccaagugguucuaugaguuugcaacaguacauaagucuucuuugcaauacagucaugcagcaacugguuuauaagac

SEQ ID NO: 391871 - RNA, 117 nt, Homo sapiens
ggguggugaccugggauucaaucugugaggaaggaaaccugcuagcaggacucucacuuugcugagcauuauuuuuccuucuuccuuuuugcccaauaaauuccauuuuccucaccc

SEQ ID NO: 391872 - RNA, 130 nt, Homo sapiens
ucugggcgugugcaguaguguagucucugcaugauuucuuugacuguagauggcaugaaugauaucugugauuucuuugguuguuuagggugcauuuauuaguagaggcugugaugaaguuuugcugagg

SEQ ID NO: 391873 - RNA, 57 nt, Homo sapiens
uacucuuaaugugcgggaauguauuuccuuaaaauucuucccucagccuugagggua

SEQ ID NO: 391874 - RNA, 83 nt, Homo sapiens
gcuggugaggagaaagauaaaaggaugauagggaacaguacucaguucuugcagagucaguuauuuugccuauuucuaccagc

SEQ ID NO: 391875 - RNA, 65 nt, Homo sapiens
ccuggcaguguuucuugugggcucugcuucaacucuucugagccccaagcucgacucugcucagg

SEQ ID NO: 391876 - RNA, 58 nt, Homo sapiens
auccugccaaaacugaguccuucccuucaaggcaguagguucccuuuuggccugggau

SEQ ID NO: 391877 - RNA, 56 nt, Homo sapiens
guuucgucuugcccagccuuuucagugauguucauaaaaggcugugagaacgagau

SEQ ID NO: 391878 - RNA, 59 nt, Homo sapiens
guguacugauaaucguggcagggagaacaaaugcguaucuuguccauuuguugguacac

SEQ ID NO: 391879 - RNA, 115 nt, Homo sapiens
gaccucuaguccuuagaaccugaauucucauucugguuucacaaaagaacaaacuauucauuugugcaaacuaggauugcgaguuucucagagccagguaagguacugucagguc

SEQ ID NO: 391880 - RNA, 66 nt, Homo sapiens
ugaagggcauuguuuugccaaaguucguuaaguuaaaaaauauuuuggaucaauaaaugucuuuca

SEQ ID NO: 391881 - RNA, 78 nt, Homo sapiens
ugcugugcaguuuaagauacaucuuuuaccuuuaaggagcuuacggucucuuuggguagauauguagcugcacaagca

SEQ ID NO: 391882 - RNA, 55 nt, Homo sapiens
ugcucaguuuaaaacuuuugaguauugaagugaugcucaaacaaaaugcugagua

SEQ ID NO: 391883 - RNA, 98 nt, Homo sapiens
guuucugauucagcagaccaagguugagguuugcauuucuaacauuuguauuucuguuagaacauuccaggugauguuggagcugcugauucagagac

SEQ ID NO: 391884 - RNA, 61 nt, Homo sapiens
ucagugcaggaaucucuagccaaaucuuaagaaacaccauggcuggcaaaacugcaacuga

SEQ ID NO: 391885 - RNA, 57 nt, Homo sapiens
guaaucucagcugagcugagauuauuugagccaccaaucuacaugagcugagauuau

SEQ ID NO: 391886 - RNA, 66 nt, Homo sapiens
guacacuguaacucuuugagggcagggccauugugauaccugucuuuauuuuauugcagugauuac

SEQ ID NO: 391887 - RNA, 66 nt, Homo sapiens
caauuuaguaaauuuuucaucuugccugcacuuaaagguuggcuaugaagucguuacuaccaauug

SEQ ID NO: 391888 - RNA, 66 nt, Homo sapiens
uacaucuuccuuagaauccggguugaggguuucauauuuguaucucauugauucuggggugaugug

SEQ ID NO: 391889 - RNA, 74 nt, Homo sapiens
guguuuagcgcaugugaauguguaagaaaaucuccauaggugacuuuuuugauuuacaugcuuaucuguaauac

SEQ ID NO: 391890 - RNA, 57 nt, Homo sapiens
aguaucauuagggggauuauauauauggggagaaccaaucccauuccugaagauacu

SEQ ID NO: 391891 - RNA, 84 nt, Homo sapiens
ugaguguauguguguguguacacuuagggguguguaugugaauccaugucugagugucccagugugcauacaggugugugcuca

SEQ ID NO: 391892 - RNA, 70 nt, Homo sapiens
gguagggaguuuuggggugcagaaggguacuggagcuaauuuuuucuuccaguuucccagcuacccugcc

SEQ ID NO: 391893 - RNA, 66 nt, Homo sapiens
ugugcugagaaaugcaucauuaggugauuuuguuguugcaaaacauccuagggugcacuuaacaca

SEQ ID NO: 391894 - RNA, 55 nt, Homo sapiens
cacccuuagaguuggaaguggggucagcucuauuccucaaaagaaaacuggggug

SEQ ID NO: 391895 - RNA, 76 nt, Homo sapiens
gaaaacagacuaauacaguaaggcacuuugguuuugaucuuaagugcauguauuaguguagucucugaauguuuuc

SEQ ID NO: 391896 - RNA, 87 nt, Homo sapiens
gagauuggaaagcccuuuaaaguaugauauagaagucauaaacaauaugacuauaggauaacaugcauuuuuaaguuuuucaaucuu

SEQ ID NO: 391897 - RNA, 69 nt, Homo sapiens
agggagcagagacccugagcucuuauuuaggcugagcuagaugaguagcuaauguuuacugagcucccu

SEQ ID NO: 391898 - RNA, 130 nt, Homo sapiens
caaaggcaacggauacugcugaggcuccugagaaugucccguuuucgaggcugcaguagcuccgguguccgguucugcagugccgagagggaggccucgggcuccgggcgggggaauguguugcaguuug

SEQ ID NO: 391899 - RNA, 86 nt, Homo sapiens
aguaauaggaccaaaugaucacauuuauaguggcacgcauaguaguuuaugaguggcaguauaugugugaguguuuccuuugugcu

SEQ ID NO: 391900 - RNA, 56 nt, Homo sapiens
aacagagcuggugacuccagguagccauagcaacugugagguaacgcugcucuguu

SEQ ID NO: 391901 - RNA, 69 nt, Homo sapiens
aaacucauuuuaguagguaaagaucuucaucuguugggucucaaggcugaugagaucuuuacuggguuu

SEQ ID NO: 391902 - RNA, 129 nt, Homo sapiens
uuggccucccaaagugcuaggauuacaggugugagccaccaggcccgacccaaggagaauauaguaagaacccauaaugggccuggcacgguggcucacaccuguaaccccagcacuuugggacuccga

SEQ ID NO: 391903 - RNA, 75 nt, Homo sapiens
ugguaaauaucuugcaauguaauugagguuuuugccauugaaaguaauggccaaaaugcaauuacuuuugcacca

SEQ ID NO: 391904 - RNA, 65 nt, Homo sapiens
cucacaauucagacaugugugcauuagauuaacuaguaugaugacauugucacagucugagugag

SEQ ID NO: 391905 - RNA, 66 nt, Homo sapiens
aguugacauauauaaagugcuuggaacagugcuuagcauuuagucaguacucuauaagugccagcu

SEQ ID NO: 391906 - RNA, 68 nt, Homo sapiens
gaccacugugagacugguucugaacccagugaccuccaucucugggagcaguugcaucuccagugguc

SEQ ID NO: 391907 - RNA, 75 nt, Homo sapiens
gauacagaaggacaguaccacucaugagcucacauuugggcuggcucaaugaaugcagcacuguuuuucugcauc

SEQ ID NO: 391908 - RNA, 61 nt, Homo sapiens
agucaaaaaagaagcuauuauuaaauggaauaacauaguaauaaagcagcuuuuugggacu

SEQ ID NO: 391909 - RNA, 98 nt, Homo sapiens
agguauacuugacagugagcucugauuaguauaauuuaucacuguuuugcacagagaugauauuauucuagcccagagcaaacacauuuaaugugcuu

SEQ ID NO: 391910 - RNA, 101 nt, Homo sapiens
uguaauaaucacacgaggguaaauggguauucauuaccucaagcauuuaucauuucuuuguguuaugaacacuccaauuguacuccuuugguuauuuuaca

SEQ ID NO: 391911 - RNA, 88 nt, Homo sapiens
guccugcacauagagaacuggcuucaccauucugcacagguagacaaugcagagugauggcaguauuucaguagugacaucccaggac

SEQ ID NO: 391912 - RNA, 81 nt, Homo sapiens
uaauggcuggugaagguaggagucacacuuaguuaggccucuggcugcaaaguccucauucuuacccaguaucuuccauug

SEQ ID NO: 391913 - RNA, 83 nt, Homo sapiens
ggcuccucuuggcauccucugucugcucaaccacccacaacgggccacguggaauggagagagggugcacgguguggggagcc

SEQ ID NO: 391914 - RNA, 74 nt, Homo sapiens
uuaugauuuucccccuuuacaggugaggaaacugaggcccaccuguauaacaagugggaaaucuaaugucacga

SEQ ID NO: 391915 - RNA, 73 nt, Homo sapiens
ggaguuuaguugagcaaugaacgauucagggaucggauaucccccagaaucacagcugauucaaagagacucc

SEQ ID NO: 391916 - RNA, 84 nt, Homo sapiens
aauauacaguugacauggaaguagguauacauuacauacuaacuauaauguuaagcccauuuacuauguugaugaaacuauauu

SEQ ID NO: 391917 - RNA, 117 nt, Homo sapiens
gcugaauaagcuaggcaaugcaguugccauuggggugagguaggugaagaaugcacggaaccuuccuguacguuuauuuauuuauuuuucuuugcaacugcauugacugcugacagc

SEQ ID NO: 391918 - RNA, 98 nt, Homo sapiens
gcagugagagcuguggccucuggagucacagugaccugagucagaguccagcuuugcuacugucuaucugugcuucucuagguggcagauuuaacugc

SEQ ID NO: 391919 - RNA, 74 nt, Homo sapiens
uacuaagugaguauaauuuuaagagggauaauguuauuuugcccaagauauuuuuaaaaggugcauacuuagua

SEQ ID NO: 391920 - RNA, 69 nt, Homo sapiens
uaauuauuuuaaugaccuugucuguuaauucuaucaucuauaucaguucugggucaguuugaaugauua

SEQ ID NO: 391921 - RNA, 79 nt, Homo sapiens
augagugaaauccuuaaauagugggaccaaaguacccuuuccaguauaagcuuuggucccaaugugauaaggucaucgu

SEQ ID NO: 391922 - RNA, 61 nt, Homo sapiens
cuuaaaggacaugauuucaucugaagguaaaugagacuagauggcauuucaguucuuuagg

SEQ ID NO: 391923 - RNA, 57 nt, Homo sapiens
ugacuggagucuugcucugucgcccagacuggaguacaauggcacgauuccggcuca

SEQ ID NO: 391924 - RNA, 78 nt, Homo sapiens
cccuaaaauaacauucuaaacuauccucuuccagaugcuuguuggcaaaggcaaguauguuuuaggaugcuauuaggg

SEQ ID NO: 391925 - RNA, 130 nt, Homo sapiens
gggaagggggcguauuuuguuuuuuggagacaggaucuugcucuguuguccauccugggacuguagugauacagucauggaucacaguagccucaaaggccugggcucaagcaguugcccaccucagccc

SEQ ID NO: 391926 - RNA, 56 nt, Homo sapiens
gcauauauauguaacuaccuaugaaaaauguaucauagguaguuauacaaaugugu

SEQ ID NO: 391927 - RNA, 55 nt, Homo sapiens
augaguuccuuccuugccuaggugaguguaacuuauuuagcaggggguaacuuau

SEQ ID NO: 391928 - RNA, 75 nt, Homo sapiens
gguagaaauugucuuauuuaugugggcuagaguuacacgggaagucuaaucugugcauagaagaggcacucugcu

SEQ ID NO: 391929 - RNA, 58 nt, Homo sapiens
aucagagguacuuuccauuuuucaucugccacacagugcaaagguaguaaccucugau

SEQ ID NO: 391930 - RNA, 68 nt, Homo sapiens
aaagggugugcagcuaucucauuguuguuuuaauuuacaauuuccuaaugauauguugagcacccuuu

SEQ ID NO: 391931 - RNA, 56 nt, Homo sapiens
uugugguuuuagcacuguggaugauggcuguucccauccauuagcucaaacaacaa

SEQ ID NO: 391932 - RNA, 92 nt, Homo sapiens
cggaguuuguguuuugcuaacagaguuuguaaggcucagaggguguugaaauguuucugagguuacugcuuuguagaacacauaggauuuug

SEQ ID NO: 391933 - RNA, 63 nt, Homo sapiens
acagaaucaaggccauuucgcagacaacuacccuaaaauaucuacagaugguguugcuucugu

SEQ ID NO: 391934 - RNA, 82 nt, Homo sapiens
cugugacuuugggcguuucuuaaccucucugcagcuuauuuauuaagaaugcugugaagaugagaugacgcccuucauacag

SEQ ID NO: 391935 - RNA, 105 nt, Homo sapiens
auuccuaaguauuuauuuuuugugacuauuguaaaugggauuguucucuugaauauuuuuuucuagaaagcucauuacuaguguacagaaaugcuacuuuugagu

SEQ ID NO: 391936 - RNA, 94 nt, Homo sapiens
ggcacgagaaucgcuugaaccuugaagguggagguugcagugaacaagauugugucacugcacuccagccugggcaacagagugagacucuguc

SEQ ID NO: 391937 - RNA, 76 nt, Homo sapiens
gggcaggcaauggaggcuaguaaaaagguagaauuuuucuugggguucugcugauucucugagccucaguuugccc

SEQ ID NO: 391938 - RNA, 69 nt, Homo sapiens
gugcuauaagguuaggaaaaauuucucugaggaauuaacauuuaagcugagauccauagcuuuaagcau

SEQ ID NO: 391939 - RNA, 55 nt, Homo sapiens
guaagauugcaccuuaaugaacccaucuucgggguaauuugagaguauaucuuac

SEQ ID NO: 391940 - RNA, 72 nt, Homo sapiens
aaauuuagugcaaacucuucaaugcugguuccacauuuggcaccuggcuuggauugauuugccacugaguuu

SEQ ID NO: 391941 - RNA, 74 nt, Homo sapiens
gggcauaaugcuaagagcugccccucuuucucaucuggaaaggaagggcaguuccuuaacauuaauuauuguuc

SEQ ID NO: 391942 - RNA, 82 nt, Homo sapiens
aagagacggggucuugcuauguugcccagucuggagugcaguggcuauucacaggugcaaucauagcauacuacagucuuuu

SEQ ID NO: 391943 - RNA, 60 nt, Homo sapiens
ggguucuacuucugggcugccaguuguuagauaugugaccuugggcaagaaguggaacuc

SEQ ID NO: 391944 - RNA, 58 nt, Homo sapiens
uucauuguagcaaauguguaaacaaauguguauuuguuuaagaauuugcugcaaugaa

SEQ ID NO: 391945 - RNA, 98 nt, Homo sapiens
uguaagugaaagagagaugcuggaguucauggaaccaagacuaucaauugguauuaauagauaguuaugauuugaugauuuuacuuucuaaacuaaca

SEQ ID NO: 391946 - RNA, 76 nt, Homo sapiens
ugucuguauaaaaaucacuuugcuacaaggcaguuaguuacuaaucugaccaaccggcuggagugaaggugagaca

SEQ ID NO: 391947 - RNA, 89 nt, Homo sapiens
ggagaaucgcuugaacccagguggcagacguugcagugagcugagauugcaccauugcacuccagccugggcaacaaaagugaagcucc

SEQ ID NO: 391948 - RNA, 76 nt, Homo sapiens
uuucacuggaucaguuacccaacugucuauaucaguaugaauuuggaaugugacugauaauauuaguucagugaga

SEQ ID NO: 391949 - RNA, 83 nt, Homo sapiens
aggacuuacaaggaauaaggaggguggcagauggagaagggcauuguaccuaccuauugcccugcuuuguucuaaacaguucu

SEQ ID NO: 391950 - RNA, 60 nt, Homo sapiens
gaagagguagguugagaugggcaucauagacucugugaagaacuuaagaaccuccucuuc

SEQ ID NO: 391951 - RNA, 96 nt, Homo sapiens
cauuauuagugccugaauuucccggcuuggcugaauaaccacuguuuauguuuguguuuacagucgacuugggaauaagugucaagacggauaaug

SEQ ID NO: 391952 - RNA, 87 nt, Homo sapiens
caaugcuaguuuuuaagaaaugaguuucuagccuuccagauugaaauacuuggaaggucauuguucauuugauaaagguaggcauug

SEQ ID NO: 391953 - RNA, 58 nt, Homo sapiens
gcauauuguguauauuuugggguuacaugugauauuuugauacauauaugcaaugugu

SEQ ID NO: 391954 - RNA, 55 nt, Homo sapiens
aguaauacuuuugggauauuagauucaaauaucuaauuuucucgaagguaucacu

SEQ ID NO: 391955 - RNA, 82 nt, Homo sapiens
cucaguuccuucauugcacucccagacacccucaucaccguguagaugcccgagggucugugguggugcuugucgggcugag

SEQ ID NO: 391956 - RNA, 84 nt, Homo sapiens
ccccaguccauucccacaauugugguaggaguugccauguuucuacagaaccuggacuuccugccacauuugucuggucugggg

SEQ ID NO: 391957 - RNA, 91 nt, Homo sapiens
gggauggauguauuagaguggguaguuaggcaggcaugagcugauagucaagugauuguuaaacugccucucuaaaauaauaauuggucuc

SEQ ID NO: 391958 - RNA, 70 nt, Homo sapiens
uuguucugagacagggucucacacuguugcccaggcuggaaugcaguagugugaucuuggcucacugcaa

SEQ ID NO: 391959 - RNA, 76 nt, Homo sapiens
ggguggacaugaauuuugaggagacaccauucgaacauaucuuuguaucucuuccuucucaggguguguccuaccc

SEQ ID NO: 391960 - RNA, 59 nt, Homo sapiens
gauagcagaccaccucucccacugggagcuccaucccagggugguuugaaacuguuguc

SEQ ID NO: 391961 - RNA, 82 nt, Homo sapiens
ugcagguuuguuauguagguauacaugugccauggugguuugcugcaccuaucaaccugucaucuagguuuuaagccuugca

SEQ ID NO: 391962 - RNA, 59 nt, Homo sapiens
aggauuugacuuaaaguuauaugacuuaaaaaauguauauagcuuaaaguuuagauccu

SEQ ID NO: 391963 - RNA, 122 nt, Homo sapiens
gaugcacucacuaacuauugcagcauaaccaaucacuccacaacuuagcagcuugaaacagcaaacauuuauugucucaguuucuguggguuaggaauuugggcauggcuuuccuguguauc

SEQ ID NO: 391964 - RNA, 56 nt, Homo sapiens
augaaaauauucugugccagguagaaaaaauuauuuggcauuccagaaauuuucau

SEQ ID NO: 391965 - RNA, 90 nt, Homo sapiens
ccaaguuugcuggagccauguuuucucuaauguccccacagaacagugguugguaggauggcggagacauggacuucagagaguucuugg

SEQ ID NO: 391966 - RNA, 62 nt, Homo sapiens
uuccuuucaucaagcacagaguagauguucaaugaaggucuuuuguauuuaaugagauggaa

SEQ ID NO: 391967 - RNA, 61 nt, Homo sapiens
ucucauggcauggucaacuggaagguauuccauugguuaucauagcuaugcuacuaggaga

SEQ ID NO: 391968 - RNA, 61 nt, Homo sapiens
uuguguaguaccucucacauugaaugggacugacuugucuagccaauaggauauuacacaa

SEQ ID NO: 391969 - RNA, 67 nt, Homo sapiens
gagaaaacugggaagaaggagugguuuacucuucaggcagagugcaaguucuuccuucuucuuucuc

SEQ ID NO: 391970 - RNA, 74 nt, Homo sapiens
ucuucaagagucaauauguggauaucugagugucaaaucuggcaugcacuguauuuaaguaucacuuaggaaga

SEQ ID NO: 391971 - RNA, 79 nt, Homo sapiens
guuucagacacucuguaaggcacuaagcauaugucagugaaaagaauuacuacaucuuugcucuuauagagcuuggaau

SEQ ID NO: 391972 - RNA, 83 nt, Homo sapiens
uuaugauuuuuaugguuuauuuguaagcagagugcugucccaaaauggaugaaccuguuuaccaguaaaucaguaaacuguaa

SEQ ID NO: 391973 - RNA, 60 nt, Homo sapiens
aggaaauguuuagcauccacuuuuaaaagcaugaggagaggggagagcuaagcaauuccu

SEQ ID NO: 391974 - RNA, 83 nt, Homo sapiens
gagcauagugacagauguuagcagcucuggugacaaggugacacagugacccugucacccuuuguuaagaaucaucauagcuc

SEQ ID NO: 391975 - RNA, 120 nt, Homo sapiens
agaggggauaaaggcagggaaaagaagugauuaagaucuggacccaguucaagggaugaacuuuguuuagggcagggacaguucuuccauuucuauuccaauccuuucaucugucucucu

SEQ ID NO: 391976 - RNA, 73 nt, Homo sapiens
guucacgaugcugguauuuggaccagccugcggguuuauccugggcucuuucuguaccaaaaucuacguggau

SEQ ID NO: 391977 - RNA, 79 nt, Homo sapiens
ucuuuccuguauaaucgggccugauccucagauaccuaugguacaaagauggugauuagucccauuuuacaggugaaga

SEQ ID NO: 391978 - RNA, 69 nt, Homo sapiens
guuaagucugugggaugggcuuugagucuguguauuugggggcuaaagcuuagauccaugguggcugac

SEQ ID NO: 391979 - RNA, 88 nt, Homo sapiens
ugaaaagcuucugaauaaagguguuguucaacacaauucuagaaugcuggaccuuuuaugaacagcacguuuauucagaagccucuca

SEQ ID NO: 391980 - RNA, 129 nt, Homo sapiens
ggacauucacuaagcccaucaugcauguuauuagagaguuggcagcauuccagccaagcacauaaagugcuggcaccagaaugacugcagacucucauguccacagcagcuguuaggucugugaugucc

SEQ ID NO: 391981 - RNA, 99 nt, Homo sapiens
gaggcaggagaauggccccaaaccgggaggcggagcuugcagugagccgagaucgcgccacugcacuccagccuggcggacagggccagacuccgucuc

SEQ ID NO: 391982 - RNA, 88 nt, Homo sapiens
gugucuauacauguucaagggcauauauuaguauuuuaacuuauuauuggauacuaauauauguccuugaacauguacauauagacac

SEQ ID NO: 391983 - RNA, 58 nt, Homo sapiens
uuuggcuguaggaggggucuacgagagagacuaguggcaggacuccauuucagccaga

SEQ ID NO: 391984 - RNA, 89 nt, Homo sapiens
gguucuuggcuucuguuucuggucaggccaauaaaucuccuuccucaucccauuuuacugcuuaugacuagagacagaaacuaaaaacc

SEQ ID NO: 391985 - RNA, 59 nt, Homo sapiens
uagagacaaagauuugcagauuaggcuagcaaauagaauaaaacuguaacuuuguccug

SEQ ID NO: 391986 - RNA, 58 nt, Homo sapiens
uucucagugaaauaaauuauuuuuggccaacuugcuaaagugaaauuuuuacugggga

SEQ ID NO: 391987 - RNA, 70 nt, Homo sapiens
gguggugggcccggucaccauaagugaggagggccauaagcauguacuuauuguggcugacccaaacacc

SEQ ID NO: 391988 - RNA, 56 nt, Homo sapiens
uuugguucuguuuauaugcuggauuacauuuaucgauuugcauauguugaaccagg

SEQ ID NO: 391989 - RNA, 83 nt, Homo sapiens
ccaugcuuggaguggaagcaagggauggugugagaaauagaaaaauucuuacaucaucacauuaguuugcgucuccuguuugg

SEQ ID NO: 391990 - RNA, 61 nt, Homo sapiens
guaauagaucauugucauuuuagauguuuuaagcaaucaauguguuauaaugauuuguuac

SEQ ID NO: 391991 - RNA, 56 nt, Homo sapiens
uuaucuuaggucuggaagcugcucuugagagcaaugugcuuguccacgugagauaa

SEQ ID NO: 391992 - RNA, 69 nt, Homo sapiens
gccaauuaacaugucucggagaucucucaaagucgguucaaacaaacccacuuuagucucuuguuuggc

SEQ ID NO: 391993 - RNA, 57 nt, Homo sapiens
cagcuguuguuaugucugcaggggaaucacagucuuuggcagccccuuacacagcug

SEQ ID NO: 391994 - RNA, 130 nt, Homo sapiens
auucauugaguaugaaucuugaagaacuuaacuagugguauaagaauucuguuugucagggugcauuaauaaaagcauagugccuucuguuaaacgaggauguacuaguuuaguuauucacucaaugaau

SEQ ID NO: 391995 - RNA, 61 nt, Homo sapiens
gcugugucauccuugcucgcaccugcacccaucaccuggugagcggcacuggagacacagc

SEQ ID NO: 391996 - RNA, 81 nt, Homo sapiens
accugaggcauugucuacauuaggguuauaugaguucacucgcaagggguugcuguaugguugaagugacaagccaaaggu

SEQ ID NO: 391997 - RNA, 58 nt, Homo sapiens
aucacuggccuuuuuaaaugcuuacaacuuuaagggguccaugugaaagggucaugau

SEQ ID NO: 391998 - RNA, 77 nt, Homo sapiens
cucccauuuccuaauuugauuucaccgcucugcaaugaagucagaauuagagccacauuaaauaugggaagagggag

SEQ ID NO: 391999 - RNA, 68 nt, Homo sapiens
uggagaucaaugggauggaauugagaguccagaaauaaacccucauauuuauggccuauugauuuuua

SEQ ID NO: 392000 - RNA, 100 nt, Homo sapiens
uugagcagcaccgugccugcuagcccaagugcucuaggauccugagucaucucacgaugacacaggaagucagcacugauggcuggaggcgugcuuucga

SEQ ID NO: 392001 - RNA, 60 nt, Homo sapiens
gagaaugaugauuuccaguuucauccaugucccuacagaggacaugaacucaucauuuuu

SEQ ID NO: 392002 - RNA, 67 nt, Homo sapiens
cauagguuggggaauagaaauugggaaccgcaagaucaaauauccuauccuucuuuuucaaccugug

SEQ ID NO: 392003 - RNA, 89 nt, Homo sapiens
aaauaccuuucuagcuccauauaaagcaggaugccacagccuacauguauuaaaucaugcauuguauugaguugaauugaaugguauuu

SEQ ID NO: 392004 - RNA, 68 nt, Homo sapiens
ggacaugcucuccucacauuucccugugucuacaccuggcaacaagacagcugggaaauggagugucc

SEQ ID NO: 392005 - RNA, 69 nt, Homo sapiens
uuguauguuuaaggccaguggaaucuauagcuaauuacucauuugguucuugaaaacugaaacaugcaa

SEQ ID NO: 392006 - RNA, 92 nt, Homo sapiens
cauuuuguuuuuaguuuggcaagcuguuaauuauaaaaaaggggaaauuuuagaacuuauuugucuugauggcaauguuagagaacaaaaug

SEQ ID NO: 392007 - RNA, 59 nt, Homo sapiens
uucagaggcuuggucucagguaucuccaggagagauaccugagaaagaaagcccucgaa

SEQ ID NO: 392008 - RNA, 60 nt, Homo sapiens
ucauuuauugcucaugcauuuaauuucuuaucuaagaaaauggugccaugaccaauguga

SEQ ID NO: 392009 - RNA, 95 nt, Homo sapiens
ggagaaagcucuauacuguuuccuguagcgauuuuaguaauuuacugggaauggaaauuaguaaaaucgcuacaggaagcaguauugcuuuuuuc

SEQ ID NO: 392010 - RNA, 56 nt, Homo sapiens
agaguggauagcugugguguuggagcuugguucucucucacugagcccuucacucu

SEQ ID NO: 392011 - RNA, 71 nt, Homo sapiens
uugugucuuacugaguugauugucuuagaaacauauaaacaugacuaugagaccagcuucagaaagcacga

SEQ ID NO: 392012 - RNA, 59 nt, Homo sapiens
ucugaaacucaugauucuagccaagucugaaggcaaccaaaagagcacugaguuuuaga

SEQ ID NO: 392013 - RNA, 61 nt, Homo sapiens
cauggcacagaagaugucguuuggcuucuacaaguacagcaacauggaguuugugcgcaug

SEQ ID NO: 392014 - RNA, 70 nt, Homo sapiens
cuucaaaacuugaaaggacaggcugacucucauuuaaaaggcagaugcagcuggugauuuuaaguugaag

SEQ ID NO: 392015 - RNA, 67 nt, Homo sapiens
guaauaauuugcuaccuggugggauauugugagguugagugaaucaucagugcuugcaaauuauuau

SEQ ID NO: 392016 - RNA, 59 nt, Homo sapiens
ucuucuacagugacugcagccauagcauugaugcugguggaugcugugcugugugagga

SEQ ID NO: 392017 - RNA, 115 nt, Homo sapiens
gcugucuuuggaaaucugccauagauauucauggaauuaauuaaaauauacuggauuuaaauggagauagauagauugauugauugauguacaugauuuaagguauagagucagc

SEQ ID NO: 392018 - RNA, 58 nt, Homo sapiens
ugagacggagucuggcacugucacccagacuggagugcaauggcgcgaucuccgcuca

SEQ ID NO: 392019 - RNA, 79 nt, Homo sapiens
gagaggccuaccuaagugauggauuaaagauuuuaagaaaguaucuuuagacuguaaugcauaauuuacuuacucucuc

SEQ ID NO: 392020 - RNA, 68 nt, Homo sapiens
cacuuuagcacaucuuucuauguaaggucaauauuuagguucacuuacaaaucaagagugcuuaagug

SEQ ID NO: 392021 - RNA, 64 nt, Homo sapiens
aacagaaagaggaugcagaucucauuuuuauuuggaggaugcagaucacauuuuucugucuguu

SEQ ID NO: 392022 - RNA, 74 nt, Homo sapiens
agccagaaagugucuuggagacauugccauugaauuguucagaaacaauuuuucagacacccacagcuguagcu

SEQ ID NO: 392023 - RNA, 59 nt, Homo sapiens
gagaaugcuugucuguuauuuuaagccaccggguuugugguaaucugugacagcagcuc

SEQ ID NO: 392024 - RNA, 63 nt, Homo sapiens
aaucacaguggcucacaagagccaguuguagcaacccagcuguuguucuuggucacucugauu

SEQ ID NO: 392025 - RNA, 86 nt, Homo sapiens
gcaaugacugccagguaaaugugagacucaguuuccucaucuggcaaggggagcuggucugauacuuaccuccccaaacucaaugc

SEQ ID NO: 392026 - RNA, 60 nt, Homo sapiens
guuugccaguguuuuguugaagauuuuugcaucaauguucaucaaagauauuggccugac

SEQ ID NO: 392027 - RNA, 75 nt, Homo sapiens
uucagccauaaacagaaugaguuccagucauuugcaccaacaugaauggaacuggagaucauuauguuagcugaa

SEQ ID NO: 392028 - RNA, 62 nt, Homo sapiens
ggaggggaaaccaggguugcuaaggucacagugagcugaacauuuggcccugguucucuucu

SEQ ID NO: 392029 - RNA, 82 nt, Homo sapiens
aguucuaggguacaugugcacaacgugcagguuuguuacauauguauagauuugucauguuggugugcuguacccauuaacu

SEQ ID NO: 392030 - RNA, 69 nt, Homo sapiens
uuuuuguaaauuuaaguuccuuguagagucuggauauuagaccuuuguaagaugcauagauugcaaaaa

SEQ ID NO: 392031 - RNA, 92 nt, Homo sapiens
uuucuucuuuagcuucuaaccucuagcuuacuucaggguccaggcuggagcccuagccuucauucugacaguaggaaggaguaggggagaaa

SEQ ID NO: 392032 - RNA, 76 nt, Homo sapiens
gcacugaagcauuucgcgcuggaaaggcaugcugcguagggcuucaccugucuguuugcgaaauugcuucaaaugc

SEQ ID NO: 392033 - RNA, 91 nt, Homo sapiens
uacucuuggggaaauauccagauauggaaugguugggucauaagguaggcauauguuugcucaaaaauuccaagaugguuuuuccaaagua

SEQ ID NO: 392034 - RNA, 77 nt, Homo sapiens
ucugagaacaucauucagauauuuuauaguggacuuuucuuaauuucuucccauaauaucaaggugauguucccaga

SEQ ID NO: 392035 - RNA, 72 nt, Homo sapiens
auuccuguaaucccaacacuuuaggaggcugaggcugaggcugaggugggaggauuacuugaagucaggagu

SEQ ID NO: 392036 - RNA, 78 nt, Homo sapiens
cugcucgggcccuagcuucuagaacucuuuucagcucugcucugcugagcucagagugcaaagguuggggcuggacag

SEQ ID NO: 392037 - RNA, 113 nt, Homo sapiens
cucccccacuucuacccuuuaaauguccagggacuguuucuacauuugguucagacagacugagcaaaauuuuggacauagauggacaauugcuggauagacagcugauggag

SEQ ID NO: 392038 - RNA, 78 nt, Homo sapiens
augggaagagaccccuagagauaggaggaacguuauuugguuagguucugguucugcucucuggggaaagcuuccuau

SEQ ID NO: 392039 - RNA, 63 nt, Homo sapiens
ugacucugagagguagacagugagaaugugugugaccaggguccugaugaccucugagaguua

SEQ ID NO: 392040 - RNA, 93 nt, Homo sapiens
aagacagcuguuuuucuccuguagccccaucaucuuuuguucacuaucuggucucuaaaagaaaggugggcaacaggugaccagcaguugcuu

SEQ ID NO: 392041 - RNA, 88 nt, Homo sapiens
aaucugagauugucaugauuacauuguuuugggguuaaaguguccaaucaucucccaccauaaaaugauggugacaauaauucagguu

SEQ ID NO: 392042 - RNA, 77 nt, Homo sapiens
gcuguuuccucacugcuaacuuuuauugacuuugucaaagaucagauggcuguugguguguggguuuauuucucagc

SEQ ID NO: 392043 - RNA, 61 nt, Homo sapiens
ccaaguguuggcuuguauacaaauguucagaacagauuuauuuguaauagccaaacacugg

SEQ ID NO: 392044 - RNA, 93 nt, Homo sapiens
guuuucauguuccaguacagaaugguuuuaucagcguccaaaaaauauucuuuuaauuuguuuggaagugcuuuaaaauuauaacaugaagau

SEQ ID NO: 392045 - RNA, 59 nt, Homo sapiens
aggaagacauauagaacuaaaaagccauggggaacuugaagaguucuguauuucugccu

SEQ ID NO: 392046 - RNA, 79 nt, Homo sapiens
cagagacucaaacagguauagucacuugcccaagaucucaaaacggccaauccagggcaagacaugccugugcccuuug

SEQ ID NO: 392047 - RNA, 62 nt, Homo sapiens
auugugaauagugccgcaauaaacauacgugugcaugucuuuguagcagcaugauuuauaau

SEQ ID NO: 392048 - RNA, 84 nt, Homo sapiens
ccuggaggauccuaaccacucuaguccccaugcauccaacaaacaguaacugagcacugaauacuguggugguggcccucuagg

SEQ ID NO: 392049 - RNA, 75 nt, Homo sapiens
uuuaauucuuuccacucauuuuuccagacugccaauuaaguuuuguuuugguuaggauggguggcauguauuaaa

SEQ ID NO: 392050 - RNA, 75 nt, Homo sapiens
agaguauauauaauugggauauuuguaacacaaaguaaugauaaaugcuuuggugauagauaccccauauacucu

SEQ ID NO: 392051 - RNA, 72 nt, Homo sapiens
gugauaaguaaaugugcaauuuguaggcagguccaggcaccuuugcuuaguuguauguuccacauaugucac

SEQ ID NO: 392052 - RNA, 98 nt, Homo sapiens
ucauaccuauaauaauuggcaauguuaauugaguauuuacuaugugccaaguucuguacuaagugcuugacuuugauguuuuauuuauuuauuuauga

SEQ ID NO: 392053 - RNA, 65 nt, Homo sapiens
uuuggcuuguaaaaugaaaagcuaucaagcugaauugccuugaaaguuuuauauuauaagcuaaa

SEQ ID NO: 392054 - RNA, 70 nt, Homo sapiens
uaccugcagagaaacauuuuguauuuucaauaaauggugcuggaaaaacugaaauauuucucuguaggua

SEQ ID NO: 392055 - RNA, 68 nt, Homo sapiens
aguccaugcuuaugugcauguccacuaguccauauuaugucauugauauugugucaauaagcaggauu

SEQ ID NO: 392056 - RNA, 66 nt, Homo sapiens
caaugcuuuuuaaagguagccaguaacacacuaagcauacugaacugccuaaagaaaaagacguug

SEQ ID NO: 392057 - RNA, 99 nt, Homo sapiens
aaauagguccuaaauaaaggcugaugcaacugauaggcugaggccagaaaaaauucuuagcuaggcacugauaguuguauuuuuguuucuguucuauuu

SEQ ID NO: 392058 - RNA, 92 nt, Homo sapiens
ucauaguggguguacaccuugugauacuauuuguaauguucuagaaagauauuccuuuuaauaucacaguggguguacacccugugauauga

SEQ ID NO: 392059 - RNA, 82 nt, Homo sapiens
gucuuugcuauugugaauagugcugcaguaaacauaugugugcaugugucuuuaugauagcaugauuuauaauccuuuggau

SEQ ID NO: 392060 - RNA, 91 nt, Homo sapiens
aggauugaaggauauaaauuuugggggccaagggacagagggcuaugguccaaauguuugugucccucuaaaauuuauauguagaaauccu

SEQ ID NO: 392061 - RNA, 69 nt, Homo sapiens
ucagccugccaaaaugcugggauuacaggugugaaccaccauauuugacccucaguuuuggcucacuga

SEQ ID NO: 392062 - RNA, 55 nt, Homo sapiens
guaugguacuuuaugguuagugacaagcagagcacuaccauaugguucaccaugc

SEQ ID NO: 392063 - RNA, 77 nt, Homo sapiens
cuuuaaaacauaagcaaaauaaucacaaacaugaggccugaugguaucagugaaucuuauuuugccuggauuugaag

SEQ ID NO: 392064 - RNA, 84 nt, Homo sapiens
gagaaucauuugaaaucugaagguggagguugcagugagcuaucgcgccacugcacuccagccuugagagcaagacuguaucuc

SEQ ID NO: 392065 - RNA, 75 nt, Homo sapiens
auuuuauuagauaccuagcucgugugguuguuuugaauauugaaugaauuaauauaugcuaagugcuaauaaaau

SEQ ID NO: 392066 - RNA, 57 nt, Homo sapiens
ugacauggagagagaagccuuugaugguuucagaucaaagcgucucuccauauguca

SEQ ID NO: 392067 - RNA, 80 nt, Homo sapiens
aaaguuccauguuggacuaaagaaacauuccgugagaguuuuucguguucucagugguccauuuugcauggguuggcuuu

SEQ ID NO: 392068 - RNA, 70 nt, Homo sapiens
agugcaagcuguugguggaucuaccauucuggggucuggaggauggugggccucuucucacagcuccacu

SEQ ID NO: 392069 - RNA, 120 nt, Homo sapiens
uugaguuguuaggaaggugguuuagauuaggagcauaggauuguuugagauuugaacacugcccguguaagcuuuucuaacagucccaugcuuuugaucaauuauaagauccucccucaa

SEQ ID NO: 392070 - RNA, 93 nt, Homo sapiens
ggcauguucagaagugcuguaugggagccuaggacuaaagucaaaaaccuuagcuguucaccugguauucuauaguacuccaucugagcuguc

SEQ ID NO: 392071 - RNA, 56 nt, Homo sapiens
cugaugguuuuacacaagggcaguuccccugcacaugcucucgugccugccaccag

SEQ ID NO: 392072 - RNA, 62 nt, Homo sapiens
uauuccuauguguuuccuauaggcuaguggaagaauugcccuacuguuuauacauaggaaug

SEQ ID NO: 392073 - RNA, 75 nt, Homo sapiens
uaguugaaaagcaagcagacuuaggaacaugacuggagaaagaagucaugaagcuagcugauugcugauagauug

SEQ ID NO: 392074 - RNA, 111 nt, Homo sapiens
cacugccuggauguuugguagacuugaauagcauguuuagugcauaugaguuuaucuuucagauuuucauguauaugcaugcauucaaaggcuauaaaaauuccuccagug

SEQ ID NO: 392075 - RNA, 57 nt, Homo sapiens
uuacagucaccugggggacauauuaaauaccugggauccaccccuuggagacuguga

SEQ ID NO: 392076 - RNA, 55 nt, Homo sapiens
uugagauggagucucgcucuguggcccaggccagagugcaguggcaccaucucaa

SEQ ID NO: 392077 - RNA, 56 nt, Homo sapiens
agcacacacaguugucuucaauaaacauuccacguauauaaaggcacuguguuguu

SEQ ID NO: 392078 - RNA, 88 nt, Homo sapiens
ggagucucgcucuguugccuaggcuggagugcaguggcacgaauucggcucacugcaaccuccaccucccagguucaagcaauucucc

SEQ ID NO: 392079 - RNA, 68 nt, Homo sapiens
ccaaaagaaagcugguauagauacauuagaagcaaugauauuuuaauuaucaccgguuuauuauuugg

SEQ ID NO: 392080 - RNA, 74 nt, Homo sapiens
acagaugagauguucucauggauugugaccucaccuccuucaaaucuugguucaagggauacugucucauuugu

SEQ ID NO: 392081 - RNA, 71 nt, Homo sapiens
acaugugguaccugauacaggcgcacgguguucauggagcacgugcgguaccugauacaggcgcaccaugu

SEQ ID NO: 392082 - RNA, 58 nt, Homo sapiens
gagaauuucacugagagaauuuuauuuacauaaaagaaaugucuuagugaaauugcuu

SEQ ID NO: 392083 - RNA, 103 nt, Homo sapiens
uauuccuucaauuuuuaauucuuuucugcuugagagaauugcuguuggugucucaauuggugcucagcauuuucuuaauguaggugaguuauuuggaagaaua

SEQ ID NO: 392084 - RNA, 103 nt, Homo sapiens
aaagugguuagugcaacugagaagcugaauuuuuauuguauuuagauuuauauuuaaaugcucacauaaagguagcagcuacaguauuggacggugcagcuuu

SEQ ID NO: 392085 - RNA, 62 nt, Homo sapiens
aggauuuuguuuggguucuuuugaaguugaaaagauuuucaaaagagcucaccagaauaucu

SEQ ID NO: 392086 - RNA, 83 nt, Homo sapiens
gaugugcuagcagugucuagguaggccaucauucguuuaguaaaacucuauauggauuugcuuauacacaugugcagaauauc

SEQ ID NO: 392087 - RNA, 62 nt, Homo sapiens
uugagcucucuaaagcacagcuuucuucauggcacuccuauguccugcuuagagagccucag

SEQ ID NO: 392088 - RNA, 78 nt, Homo sapiens
acauugaugggcauuuguguugguuccaagucuuugcuaauguguauagugcuggaauaaauauacgugugcaugugu

SEQ ID NO: 392089 - RNA, 66 nt, Homo sapiens
ccucugugcacauuguuuaugucuguuggacaauuuuccagcaauaccccauguugcacaugaagg

SEQ ID NO: 392090 - RNA, 101 nt, Homo sapiens
cucagacuccagcaugcaucagaaucaccuggaggugaucacuuguuaaaaugcgcaucgcugggucccaccuccagaguuucucaugcuggaagucuggg

SEQ ID NO: 392091 - RNA, 76 nt, Homo sapiens
ccagccccggaaaucugggagucuuggcucugcugaugacugcaaggcaagcucaggccucaggugucggggcugg

SEQ ID NO: 392092 - RNA, 86 nt, Homo sapiens
uauguguguauguaaauacaugcauguuaaaauauagguguguaguagcaggcauguaaacauguauguguuuauguacauauaug

SEQ ID NO: 392093 - RNA, 62 nt, Homo sapiens
agagcuagguugcugagcacaacauuuuugucuauccagacaugauuaguccacuuggcucu

SEQ ID NO: 392094 - RNA, 67 nt, Homo sapiens
aacaucuugucuaaugucagcuaccaccaccucaauggggcacaccuuuggcauuuagacaagaguu

SEQ ID NO: 392095 - RNA, 129 nt, Homo sapiens
ugaguugaaauaaucaauaguguuaagaugucuauuuucugcaggaaggaaauagacaguauuaauaacgaagucaauuuccuguaggaaggaaauagacaucuuaacacuauugauucuuucaauuaa

SEQ ID NO: 392096 - RNA, 81 nt, Homo sapiens
uuuuucaggguuuguuuaucuauugacuugaugagggaggguuauacguacaaccaguuaaaagauggaaauuuugagaga

SEQ ID NO: 392097 - RNA, 63 nt, Homo sapiens
gagggcacugcuuuccuuucaaaauguaggguucaaauccgaugaagggguggcagugugcuu

SEQ ID NO: 392098 - RNA, 75 nt, Homo sapiens
cuccucaggugccaagaucugaauaauuaagaggagagaaaaccugugacuccucucaucugccauuugcaggag

SEQ ID NO: 392099 - RNA, 65 nt, Homo sapiens
gcuguuuggagaugcagcaagaaaggccacuaacgaggccagauuguaacaguucugcgagcagc

SEQ ID NO: 392100 - RNA, 105 nt, Homo sapiens
ugccaguaugacugcauuaucuagacaauuccauccuacgugggcacucgauacaaagauacguccacagugguggaauuguucaggcagagcagcagcacggua

SEQ ID NO: 392101 - RNA, 130 nt, Homo sapiens
ucacuccagaaauacuauaauagucaaaaguacgaauaaagcuauuccucucuuuuuauggcaguaaaauagaaagagaugaaugcuuuaaguguaauucugccugugguuucaguaguuuuggacagga

SEQ ID NO: 392102 - RNA, 78 nt, Homo sapiens
acauauuuacagucuuuauugguuuauccacaauuuuugcauauguggcaauaauucagugugggcuaaguuauaugu

SEQ ID NO: 392103 - RNA, 55 nt, Homo sapiens
uugagauggagccucacucugccacccaggcuggagugcaguggcucgaucucag

SEQ ID NO: 392104 - RNA, 68 nt, Homo sapiens
uguaaagguguuucacuguuguuuuaauuuacaauucccuaauuauauaugguaguagcaccuuuaca

SEQ ID NO: 392105 - RNA, 74 nt, Homo sapiens
ccugagggucccagcguucggcauggcugagcuuugcccucaagucucagccaucaugugggcgccuccucagg

SEQ ID NO: 392106 - RNA, 71 nt, Homo sapiens
uuugggacauagaaauacuguugcagguaaugaugccuucaauuucaaauugcaguacuuuuaguucuaag

SEQ ID NO: 392107 - RNA, 83 nt, Homo sapiens
cccaacccuagaucuggcuggccuuauuuguucaaggcacuagauacuugugaacaugacagugggcuaguuuggggccuggg

SEQ ID NO: 392108 - RNA, 89 nt, Homo sapiens
gugucugguuugugcauauaaguuguuucuaguuuuugcuggaacuaaaacugcagcagaaacauacuugcauguacauuuuggugcau

SEQ ID NO: 392109 - RNA, 74 nt, Homo sapiens
uuuuaaaaauggcaugucguuuuucauaggaucagaguggcuauguuuuaaagaggaaugacauggcacuggaa

SEQ ID NO: 392110 - RNA, 64 nt, Homo sapiens
auaaauuugggggcaggagacaugauucagcccauaacaaugucccuguuaggcacagauuuau

SEQ ID NO: 392111 - RNA, 97 nt, Homo sapiens
gcauacucagcugaauuagaaugacaaggcaauggacuaggauuauauacugagagucacccauggcuucugcauucugucauuuaaaugaguaugc

SEQ ID NO: 392112 - RNA, 74 nt, Homo sapiens
uuguuuuuugucauaguacuuuguuuugaaaaguucagaucaacugauaauacuagugcugugaugagacucag

SEQ ID NO: 392113 - RNA, 87 nt, Homo sapiens
aguuuaaggcuuuuggguccucugguccuugguuuugggcauguaucuucuaaaaaggaguaaaggggcccagauacauuuugagcu

SEQ ID NO: 392114 - RNA, 55 nt, Homo sapiens
ucacaguaacuuuguugcuuuuuauaagaaugcauaggcaaugggguuguugugg

SEQ ID NO: 392115 - RNA, 66 nt, Homo sapiens
uuucucagcagauggccuuagcuaugaagaauauguuaauccaugaaugagguauuuguugggaga

SEQ ID NO: 392116 - RNA, 59 nt, Homo sapiens
ccauggaauacucugcagccauaaaacagaaugaaaucauuuucuuugcagguccaugg

SEQ ID NO: 392117 - RNA, 56 nt, Homo sapiens
uuauugcucauuugggcauucuguugaugggccagcaauguugggaugaguaauaa

SEQ ID NO: 392118 - RNA, 93 nt, Homo sapiens
gacaccaccccauggagggauugaggguccugauaagaguggaggucuaggcuccccuucaccuggguuggccaucauuuuuucugugguguu

SEQ ID NO: 392119 - RNA, 83 nt, Homo sapiens
gaggaauuagcaucagauuccauauucuauauagcagagauuuauaggaugaugggauuugagguuuuaaaucacgaguucuc

SEQ ID NO: 392120 - RNA, 64 nt, Homo sapiens
gacuccauuuggacucugggaggauccuggccccaaaccacccucccaagaaccuccaugaguu

SEQ ID NO: 392121 - RNA, 62 nt, Homo sapiens
gggccugcuuaagugucaaggcaaucaauuucaccaaaguuuacacuggaguaucaaggccc

SEQ ID NO: 392122 - RNA, 97 nt, Homo sapiens
gaggcaggagaaucgccugaauucaggaugcagagguuguagugagccaagauuaugccacugcacuccagccuggacgacagagcgagacugucuc

SEQ ID NO: 392123 - RNA, 79 nt, Homo sapiens
cagccuguucugucugccucggucucugaaguccguguaggauucacaguaucaugggggacagaagugcuauagguug

SEQ ID NO: 392124 - RNA, 75 nt, Homo sapiens
gcagagcugggauaugaccucugucugacaccagaaccuucuguguuguacuaccucucguauuaggggcucugc

SEQ ID NO: 392125 - RNA, 107 nt, Homo sapiens
uucacucaaagguaaagacucuuagguaagaaauuuuaacacagcccaugcagaagagauggcugauguucucuuacaacuuaggcagguacuugccuuuaaaagaa

SEQ ID NO: 392126 - RNA, 69 nt, Homo sapiens
uuucauuuuuuuaucuauaaauuggguauaguguaaccuauuccaguuuuauggguauagaguuuggaa

SEQ ID NO: 392127 - RNA, 55 nt, Homo sapiens
gggacuuagugaagacuuacucccuacuucccuagugaaaucuucacuaagucuc

SEQ ID NO: 392128 - RNA, 56 nt, Homo sapiens
uguacuggaaugcauagcucacugguuucaagucagaaggcugguguuuuaguaua

SEQ ID NO: 392129 - RNA, 74 nt, Homo sapiens
gcucuucugagauaaauaggucacaguucucuauugggagaacauuugucgaucaauuuguauaacaguagggc

SEQ ID NO: 392130 - RNA, 95 nt, Homo sapiens
gacagagucucguucuguugccuaggcuggagugcaguggcgugaucucagcucacugcaaccuccgccucccggguucaggcgauucuccuguc

SEQ ID NO: 392131 - RNA, 60 nt, Homo sapiens
gggagauacaaugauugguucucacccagguggaucugaguggagacucauugauuuccu

SEQ ID NO: 392132 - RNA, 64 nt, Homo sapiens
auugugaauagugcugcaauaaacauacaugugcauguguccuuagagcagcaugauuuauaau

SEQ ID NO: 392133 - RNA, 113 nt, Homo sapiens
cuucuucugaaaagcuggaauaaauucucaaaaugacuuuuuaugcagaguaguucauugaauucuuccugcuuuccagaggcauugaaauuguucccauuuugcagaugagg

SEQ ID NO: 392134 - RNA, 81 nt, Homo sapiens
ggucacaaaucccacggaggaaggacugagaaugcacaccuguagugguguugcagaguucuuccuccugaggaccuggcc

SEQ ID NO: 392135 - RNA, 62 nt, Homo sapiens
agcacccuggaagaaaggugcuaaauacuuaguauuauggugacuuugcuuucaacuguguu

SEQ ID NO: 392136 - RNA, 56 nt, Homo sapiens
ugggaaguuuggcuuuuucacagcauguuggcuaggguguaagagcaagcuuccua

SEQ ID NO: 392137 - RNA, 116 nt, Homo sapiens
aaauugcccagucuuugguaucuuuauuagcagcacaaaagcagacuaauacaguaacuugguacugguagaguggggugcugcuguaaagauacccaaaaauguggaagcaauuu

SEQ ID NO: 392138 - RNA, 65 nt, Homo sapiens
auggucccauucauucacguauuugucuacuaauugacagcuauugaguaccuaaugggaaccgu

SEQ ID NO: 392139 - RNA, 67 nt, Homo sapiens
uccguaaguaguauaagguuuuuugacagaaauuacuaucagaaauuaugccuacuacagugaugga

SEQ ID NO: 392140 - RNA, 61 nt, Homo sapiens
auguuauugcucucgaagacucuccaaugagaaaaaacguggagaggggagacagugauau

SEQ ID NO: 392141 - RNA, 58 nt, Homo sapiens
gcuggagggcaggggugugaccauaguucacuguagccucaaauucuuggccuccagc

SEQ ID NO: 392142 - RNA, 66 nt, Homo sapiens
uugccuuuuauuauuauuuuuuauuaaguuugcaaggacuaugugaaacuggguggugagagacaa

SEQ ID NO: 392143 - RNA, 93 nt, Homo sapiens
cuuguuaaaaaugcauauuccugggccucacucuaaaucuguugaaccuagaguuccugggagauggggacuaggaaucugcaauuuaacaag

SEQ ID NO: 392144 - RNA, 100 nt, Homo sapiens
uguuugcgcugugaucuuuuuucaugugguauacgcuuauuuauuuauucaccuccuuuacugaacuagacgccauaggcaagagacacagugaugaaca

SEQ ID NO: 392145 - RNA, 91 nt, Homo sapiens
gaggcaggagaaucgccugagcugaggaagcugcacugagcuaugauuaugccacugcacuccaggcugggugacagagugagccugucuc

SEQ ID NO: 392146 - RNA, 119 nt, Homo sapiens
guuugcaguaucaauggacucuuuuuuuucacaaagguuuuucuguagcauguaaugcuguuugauagcaauuuaucacaguagaacucuuuccaaaauuggagucaguucucucaaac

SEQ ID NO: 392147 - RNA, 94 nt, Homo sapiens
ggcuauuuaaauaucacuucuuuugugauucuucaguuacuucaggccaucuggauguauacgugcaggucacaggggauaugauggcuuagcu

SEQ ID NO: 392148 - RNA, 86 nt, Homo sapiens
ggcucgggaaugcugccugugguagauggaguuuugucugcauguacuccacuuucaccacagcggagggaccccagaaaguugcc

SEQ ID NO: 392149 - RNA, 61 nt, Homo sapiens
ucauaggucugagaagaaaauaacuugaccaaauuuggcuuucuuuuuauuaggcuuguga

SEQ ID NO: 392150 - RNA, 70 nt, Homo sapiens
agggauggaaguuauuaucuuuguugaugcucagauuauucaaucaucaaccggugagagcuuccuccuu

SEQ ID NO: 392151 - RNA, 65 nt, Homo sapiens
aggaagauaauuucagaaaagugauacgaacgugauaucaaaguuucccagaaguugucuauccu

SEQ ID NO: 392152 - RNA, 66 nt, Homo sapiens
ggguggcauuugcugaagagcgguaugacaugaaaaucaaauccuugagaaaauaaaugaccacuc

SEQ ID NO: 392153 - RNA, 89 nt, Homo sapiens
guuuuaaucaagauugugccagaaaauuuacaggugcagauuaacaugguuaucugugaaugaaguuauuuugacagucauggggaaac

SEQ ID NO: 392154 - RNA, 71 nt, Homo sapiens
auaggcaguguucucacuuguaaacauucacuaaacgaugacuauuguuaccagugguacacaugaccuau

SEQ ID NO: 392155 - RNA, 93 nt, Homo sapiens
ugauucaauaaauuuaacaauuuugucauuguucaugccaaagaaucauuuuaauaggcauuuuaggugacagugguuaaaauuuguuaauua

SEQ ID NO: 392156 - RNA, 56 nt, Homo sapiens
acaaaaccuuuagguuaugggcauccaauuuacccccaucaccuggcaggauuugu

SEQ ID NO: 392157 - RNA, 85 nt, Homo sapiens
gugcuuauaaaaauuguuauuucuauaugugaaugagguuuuuuaaauaggagaucaauucauggcauaguuacauuaugugcac

SEQ ID NO: 392158 - RNA, 106 nt, Homo sapiens
uaugcguauacacacacgugcauguaugcguauacacacacgugcauguaugcguauacacacacgugcauguaugcguauacacacacgugcauguaugcguaua

SEQ ID NO: 392159 - RNA, 70 nt, Homo sapiens
aauguggguaaaucucuuuucauggcuuucagcucugaaggccgucagccccgauuugccacuccacauu

SEQ ID NO: 392160 - RNA, 66 nt, Homo sapiens
uccuccaccacugcccucaguuugaagcaaucaacacaucaaacuggcauauucugguugcgggga

SEQ ID NO: 392161 - RNA, 71 nt, Homo sapiens
ugguuagcauagaaguaaugauuucauucaaaguugaaagaugaggcuauaauuuuuauguauuagagcca

SEQ ID NO: 392162 - RNA, 89 nt, Homo sapiens
ggagaaucacuugaacccagguugcggagguugcagugugccgagaucacgccauugcacuccagccugggcgacaagagcaaaacucc

SEQ ID NO: 392163 - RNA, 87 nt, Homo sapiens
gauuaacauuuuuugucaguggacugugaaaggcaguccucaauuugggugggucugccuuucccaguucacugacucaauguaauc

SEQ ID NO: 392164 - RNA, 107 nt, Homo sapiens
gcugugugugcauaugugaacacauacaugcaugggcaugugugcaugugaaugcaugucaugugcaugcaugagccauguguggugugugcaugugugugugcagc

SEQ ID NO: 392165 - RNA, 61 nt, Homo sapiens
uggcgagcugaaauuauaaaaguuaucuaggauuccugucuuuuauuguuucagccaguca

SEQ ID NO: 392166 - RNA, 71 nt, Homo sapiens
ugucaagguacuuuuacaauuucccacugauaacuccauacaacacagggugaaauucaaggaccuucaca

SEQ ID NO: 392167 - RNA, 79 nt, Homo sapiens
gaugaaguaacaacauucuaacugacggcuuuguuucucugcuaggcuuuccugggguuugauguaugcuggcuucauc

SEQ ID NO: 392168 - RNA, 92 nt, Homo sapiens
ggcaggagaaucgcuugaacccgggaggcagagguugcagugagccaagaucacgccacugcacuccagccuucggacagagugagacuguc

SEQ ID NO: 392169 - RNA, 67 nt, Homo sapiens
ugugaguggaaaacauaugcuuguugaauuaaguaaugaucaauccuaugcucuguuuuuacucaua

SEQ ID NO: 392170 - RNA, 65 nt, Homo sapiens
ucccuagcaggcaagauaagauucaagacuauaaauucuaugaggcaucauguuccugcaaggga

SEQ ID NO: 392171 - RNA, 122 nt, Homo sapiens
ucaugcucaguaagucagcauuuuauauaagauuaacauagaguagcuaccuguagagauauuuaaguuuuuacucguagcuaucuguuuaggaacaaaaggaaaggaggcuuccugcauga

SEQ ID NO: 392172 - RNA, 61 nt, Homo sapiens
aaguucagauuugacugguuucucaugagccacaugugggaauguagcaaaucugcaauuu

SEQ ID NO: 392173 - RNA, 63 nt, Homo sapiens
gaagaaagagaugugccaaauagccuuauggugccagggcuagaauccgcgucucuugacuuc

SEQ ID NO: 392174 - RNA, 86 nt, Homo sapiens
gugccugucuuggccucugaaaguguugagauuacaggcaugagccgccaugccuggcuaaguugcuuuucgguuagauacggcau

SEQ ID NO: 392175 - RNA, 85 nt, Homo sapiens
uugcugaagauuuucuaguacucccuggagcuggacgugggauauugcacugccagcccucaugagacugguuaaguuucugcag

SEQ ID NO: 392176 - RNA, 77 nt, Homo sapiens
ggcacacuuacauagcccauuuugcacugagaugcuagauccuagccaggacgacgauuggcuuccuauuugaugcu

SEQ ID NO: 392177 - RNA, 70 nt, Homo sapiens
agaaucuauauacuguuucucaccuugguggcuccaaucuacauuuccaccaacaguguguaaggguucu

SEQ ID NO: 392178 - RNA, 82 nt, Homo sapiens
aguucuaggguacaugugcacaaugugcagguuuguuacauauguauagaugugccauguuggugugcugcacccauuaacu

SEQ ID NO: 392179 - RNA, 85 nt, Homo sapiens
aguugucugguaccuggcucugagguguuuagggcugguggaccguggccuagaaggugagagccagaagaagugcuggggaacu

SEQ ID NO: 392180 - RNA, 55 nt, Homo sapiens
cagcuggugcugcaccagugggauccugcccacuccacugcugcugcuccagcug

SEQ ID NO: 392181 - RNA, 96 nt, Homo sapiens
ugagacagagucuugcuguugccuaggcuggagugcaguggcacaaucucagcucauugcaacugccuccuggguucaagcaauucuccugucuca

SEQ ID NO: 392182 - RNA, 68 nt, Homo sapiens
aaaucauaugguucccuagguaugaaaaugcacuccaguauuaucaccuugcaggagcuaugagauuu

SEQ ID NO: 392183 - RNA, 69 nt, Homo sapiens
agauaucauguuauagaugcuucuuuaagagcuaucagcucucuaacucugccuagugacaugguaucu

SEQ ID NO: 392184 - RNA, 76 nt, Homo sapiens
ucaauugguaguagcugcuuggaauucuguguuggcuuaucuucauucaggagaaaggaagacuaugaucaauugg

SEQ ID NO: 392185 - RNA, 63 nt, Homo sapiens
ucaacucucugugugacccuuucucugagccucaguuucuucccugggaauauggggaguuga

SEQ ID NO: 392186 - RNA, 87 nt, Homo sapiens
ccucgucuaauuucauugguuaguuaacuuuaagaaaauguuuuucugcaugagucaaguucaucagccagauugcuguuggugagg

SEQ ID NO: 392187 - RNA, 68 nt, Homo sapiens
gugacaauagauauaaggaaccuuugcaaacuagaguguguuaugcaaauguuaggugucauuaucau
